United States Patent Application Publication US 2007/0054278 A1 - sequence listing, part 8

SEQ ID NO: 9015 - protein, 332 aa, Homo sapiens
MATIKSELIKNFAEEEAIHHNKISIVGTGSVGVACAISILLKGLSDELVLVDVDEGKLKGETMDLQHGSPFMKMPNIVSSKDYLVTANSNLVIITAGARQKKGETRLDLVQRNVSIFKLMIPNITQYSPHCKLLIVTNPVDILTYVAWKLSGFPKNRVIGSGCNLDSARFRYFIGQRLGIHSESCHGLILGEHGDSSVPVWSGVNIAGVPLKDLNPDIGTDKDPEQWENVHKKVISSGYEMVKMKGYTSWGISLSVADLTESILKNLRRVHPVSTLSKGLYGINEDIFLSVPCILGENGITDLIKVKLTLEEEACLQKSAETLWEIQKELKL

SEQ ID NO: 9016 - protein, 158 aa, Homo sapiens
MAEQATKSVLFVCLGNICRSPIAEAVFRKLVTDQNISENWVIDSGAVSDWNVGRSPDPRAVSCLRNHGIHTAHKARQITKEDFATFDYILCMDESNLRDLNRKSNQVKTCKAKIELLGSYDPQKQLIIEDPYYGNDSDFETVYQQCVRCCRAFLEKAH

SEQ ID NO: 9017 - protein, 158 aa, Homo sapiens
MAEQATKSVLFVCLGNICRSPIAEAVFRKLVTDQNISENWRVDSAATSGYEIGNPPDYRGQSCMKRHGIPMSHVARQITKEDFATFDYILCMDESNLRDLNRKSNQVKTCKAKIELLGSYDPQKQLIIEDPYYGNDSDFETVYQQCVRCCRAFLEKAH

SEQ ID NO: 9018 - protein, 129 aa, Homo sapiens
PHPRSSSSSGQPAAPPLQVNGGPVPAGDPRTLPARPTTVIGPPPQAHWSRLRRRGSHTRCPVGVGAGLRRRAGQEAGSAPAPRRRAERRGVSAPLRAGRWRNRLPSPCCLCVWVTFVDHPLQKQFSGNL

SEQ ID NO: 9019 - protein, 80 aa, Homo sapiens
MAEQATKSVLFVCLGNICRSPIAEAVFRKLVTDQNISENWRVDSAATSGYEIGNPPDYRGQSCMKRHGIPMSHVARQRFE

SEQ ID NO: 9020 - protein, 152 aa, Homo sapiens
HLSITHCRSSFQETCNRSKHLRELEGRQRGNFRWVIDSGAVSDWNVGRSPDPRAVSCLRNHGIHTAHKARQITKEDFATFDYILCMDESNLRDLNRKSNQVKTCKAKIELLGSYDPQKQLIIEDPYYGNDSDFETVYQQCVRCCRAFLEKAH

SEQ ID NO: 9021 - protein, 463 aa, Homo sapiens
MAALRALCGFRGVAAQVLRPGAGVRLPIQPSRGVRQWQPDVEWAQQFGGAVMYPSKETAHWKPPPWNDVDPPKDTIVKNITLNFGPQHPAAHGVLRLVMELSGEMVRKCDPHIGLLHRGTEKLIEYKTYLQALPYFDRLDYVSMMCNEQAYSLAVEKLLNIRPPPRAQWIRVLFGEITRLLNHIMAVTTHALDLGAMTPFFWLFEEREKMFEFYERVSGARMHAAYIRPGGVHQDLPLGLMDDIYQFSKNFSLRLDELEELLTNNRIWRNRTIDIGVVTAEEALNYGFSGVMLRGSGIQWDLRKTQPYDVYDQVEFDVPVGSRGDCYDRYLCRVEEMRQSLRIIAQCLNKMPPGEIKVDDAKVSPPKRAEMKTSMESLIHHFKLYTEGYQVPPGATYTAIEAPKGEFGVYLVSDGSSRPYRCKIKAPGFAHLAGLDKMSKGHMLADVVAIIGTQDIVFGEVDR

SEQ ID NO: 9022 - protein, 463 aa, Homo sapiens; identical to SEQ ID NO: 9021

SEQ ID NO: 9023 - protein, 398 aa, Homo sapiens
MSATLILEPPGRCCWNEPKGALFRAHARYCADARGELDLERAPALGGSFAGLEPMGLLWALEPEKPFWRFLKRDVQIPFVVELEVLDGHDPEPGRLLCQAQHERHFLPPGVRRQSVRAGRVRATLFLPPGPGPFPGIIDIFGIGGGLLEYRASLLAGHGFATLALAYYNFEDLPNNMDNISLEYFEEAVCYMLQHPQVKGPGIGLLGISLGADICLSMASFLKNVSATVSINGSGISGNTAINYKHSSIPPLGYDLRRIKVAFSGLVDIVDIRNALVGGYKNPSMIPIEKAQGPILLIVGQDDHNWRSELYAQTVSERLQAHGKEKPQIICYPGTGHYIEPPYFPLCPASLHRLLNKHVIWGGEPRAHSKAQEDAWKQILAFFCKHLGGTQKTAVPKL

SEQ ID NO: 9024 - protein, 212 aa, Homo sapiens
MKPPSSIQTSEFDSSDEEPIEDEQTPIHISWLSLSRVNCSQFLGLCALPGCKFKDVRRNVQKDTEELKSCGIQDIFVFCTRGELSKYRVPNLLDLYQQCGIITHHHPIADGGTPDIASCCEIMEELTTCLKNYRKTLIHCYGGLGRSCLVAACLLLYLSDTISPEQAIDSLRDLRGSGAIQTIKQYNYLHEFRDKLAAHLSSRDSQSRSVSR

SEQ ID NO: 9025 - protein, 84 aa, Homo sapiens
MGNEELCDFVRSRLEVTDDPEKVYNEIVDTCLHKGSQDNMCVIFSLVSKCTQSITRSSEEGGRVGQVPGMQSRRNHKEAGGRCP

SEQ ID NO: 9026 - protein, 646 aa, Homo sapiens
MAAESGSDFQQRRRRRRDPEEPEKTELSERELAVAVAVSQENDEENEERWVGPLPVEATLAKKRKVLEFERVYLDNLPSASMYERSYMHRDVITHVVCTKTDFIITASHDGHVKFWKKIEEGIEFVKHFRSHLGVIESIAVSSEGALFCSVGDDKAMKVFDVVNFDMINMLKLGYFPGQCEWIYCPGDAISSVAASEKSTGKIFIYDGRGDNQPLHIFDKLHTSPLTQIRLNPVYKAVVSSDKSGMIEYWTGPPHEYKFPKNVNWEYKTDTDLYEFAKCKAYPTSVCFSPDGKKIATIGSDRKVRIFRFVTGKLMRVFDESLSMFTELQQMRQQLPDMEFGRRMAVERELEKVDAVRLINIVFDETGHFVLYGTMLGIKVINVETNRCVRILGKQENIRVMQLALFQGIAKKHRAATTIEMKASENPVLQNIQADPTIVCTSFKKNRFYMFTKREPEDTKSADSDRDVFNEKPSKEEVMAATQAEGPKRVSDSAIIHTSMGDIHTKLFPVECPKTVENFCVHSRNGYYNGHTFHRIIKGFMIQTGDPTGTGMGGESIWGGEFEDEFHSTLRHDRPYTLSMANAGSNTNGSQFFITVVPTPWLDNKHTVFGRVTKGMEVVQRISNVKVNPKTDKPYEDVSIINITVK

SEQ ID NO: 9027 - protein, 305 aa, Homo sapiens
MDDKELIEYFKSQMKEDPDMASAVAAIRTLLEFLKRDKGETIQGLRANLTSAIETLCGVDSSVAVSSGGELFLRFISLASLEYSDYSKCKKIMIERGELFLRRISLSRNKIADLCHTFIKDGATILTHAYSRVVLRVLEAAVAAKKRFSVYVTESQPDLSGKKMAKALCHLNVPVTVVLDAAVGYIMEKADLVIVGAEGVVENGGIINKIGTNQMAVCAKAQNKPFYVVAESFKFVRLFPLNQQDVPDKFKYKADTLKVAQTGQDLKEEHPWVDYTAPSLITLLFTDLGVLTPSAVSDELIKLYL

SEQ ID NO: 9028 - protein, 305 aa, Homo sapiens [sequence omitted]

SEQ ID NO: 9029 - protein, 292 aa, Homo sapiens
MKEDPDMASAVAAIRTLLEFLKRDKGETIQGLRANLTSAIETLCGVDSSVAVSSGGELFLRFISLASLEYSDYSKCKKIMIERGELFLRRISLSRNKIADLCHTFIKDGATILTHAYSRVVLRVLEAAVAAKKRFSVYVTESQPDLSGKKMAKALCHLNVPVTVVLDAAVGYIMEKADLVIVGAEGVVENGGIINKIGTNQMAVCAKAQNKPFYVVAESFKFVRLFPLNQQDVPDKFKYKADTLKVAQTGQDLKEEHPWVDYTAPSLITLLFTDLGVLTPSAVSDELIKLYL

SEQ ID NO: 9030 - protein, 372 aa, Homo sapiens
MGSLFRSETMCLAQLFLQSGTAYECLSALGEKGLVQFRDLNQNVSSFQRKFVGEVKRCEELERILVYLVQEINRADIPLPEGEASPPAPPLKQVLEMQEQLQKLEVELREVTKNKEKLRKNLLELIEYTHMLRVTKTFVKRNVEFEPTYEEFPSLESDSLLDYSCMQRLGAKLGFVSGLINQGKVEAFEKMLWRVCKGYTIVSYAELDESLEDPETGEVIKWYVFLISFWGEQIGHKVKKICDCYHCHVYPYPNTAEERREIQEGLNTRIQDLYTVLHKTEDYLRQVLCKAAESVYSRVIQVKKMKAIYHMLNMCSFDVTNKCLIAEVWCPEADLQDLRRALEEGSVRLPSSPLPGTEERLMELINSEKKRK

SEQ ID NO: 9031 - protein, 856 aa, Homo sapiens
MGSLFRSETMCLAQLFLQSGTAYECLSALGEKGLVQFRDLNQNVSSFQRKFVGEVKRCEELERILVYLVQEINRADIPLPEGEASPPAPPLKQVLEMQEQLQKLEVELREVTKNKEKLRKNLLELIEYTHMLRVTKTFVKRNVEFEPTYEEFPSLESDSLLDYSCMQRLGAKLGFVSGLINQGKVEAFEKMLWRVCKGYTIVSYAELDESLEDPETGEVIKWYVFLISFWGEQIGHKVKKICDCYHCHVYPYPNTAEERREIQEGLNTRIQDLYTVLHKTEDYLRQVLCKAAESVYSRVIQVKKMKAIYHMLNMCSFDVTNKCLIAEVWCPEADLQDLRRALEEGSRESGATIPSFMNIIPTKETPPTRIRTNKFTEGFQNIVDAYGVGSYREVNPALFTIITFPFLFAVMFGDFGHGFVMFLFALLLVLNENHPRLNQSQEIMRMFFNGRYILLLMGLFSVYTGLIYNDCFSKSVNLFGSGWNVSAMYSSSHPPAEHKKMVLWNDSVVRHNSILQLDPSIPGVFRGPYPLGIDPIWNLATNRLTFLNSFKMKMSVILGIIHMTFGVILGIFNHLHFRKKFNIYLVSIPELLFMLCIFGYLIFMIFYKWLVFSAETSRVAPSILIEFINMFLFPASKTSGLYTGQEYVQRVLLVVTALSVPVLFLGKPLFLLWLHNGRSCFGVNRSGYTLIRKDSEEEVSLLGSQDIEEGNHQVEDGCREMACEEFNFGEILMTQVIHSIEYCLGCISNTASYLRLWALSLAHAQLSDVLWAMLMRVGLRVDTTYGVLLLLPVIALFAVLTIFILLIMEGLSAFLHAIRLHWVEFQNKFYVGAGTKFVPFSFSLLSSKFNNDDSVA

SEQ ID NO: 9032 - protein, 522 aa, Homo sapiens
MALLPRALSAGAGPSWRRAARAFRGFLLLLPEPAALTRALSRAMACRQEPQPQGPPPAAGAVASYDYLVIGGGSGGLASARRAAELGARAAVVESHKLGGTCVNVGCVPKKVMWNTAVHSEFMHDHADYGFPSCEGKFNWRVIKEKRDAYVSRLNAIYQNNLTKSHIEIIRGHAAFTSDPKPTIEVSGKKYTAPHILIATGGMPSTPHESQIPGASLGITSDGFFQLEELPGRSVIVGAGYIAVEMAGILSALGSKTSLMIRHDKVLRSFDSMISTNCTEELENAGVEVLKFSQVKEVKKTLSGLEVSMVTAVPGRLPVMTMIPDVDCLLWAIGRVPNTKDLSLNKLGIQTDDKGHIIVDEFQNTNVKGIYAVGDVCGKALLTPVAIAAGRKLAHRLFEYKEDSKLDYNNIPTVVFSHPPIGTVGLTEDEAIHKYGIENVKTYSTSFTPMYHAVTKRKTKCVMKMVCANKEEKVVGIHMQGLGCDEMLQGFAVAVKMGATKADFDNTVAIHPTSSEELVTLR

SEQ ID NO: 9033 - protein, 522 aa, Homo sapiens; identical to SEQ ID NO: 9032

SEQ ID NO: 9034 - protein, 561 aa, Homo sapiens [sequence omitted]

SEQ ID NO: 9035 - protein, 524 aa, Homo sapiens [sequence omitted]

SEQ ID NO: 9036 - protein, 274 aa, Homo sapiens
MIISHFPKCVAVFALLALSVGALDTFIAAVYEHAVILPNRTETPVSKEEALLLMNKNIDVLEKAVKLAAKQGAHIIVTPEDGIYGWIFTRESIYPYLEDIPDPGVNWIPCRDPWRFGNTPVQQRLSCLAKDNSIYVVANIGDKKPCNASDSQCPPDGRYQYNTDVVFDSQGKLLARYHKYNLFAPEIQFDFPKDSELVTFDTPFGKFGIFTCFDIFSHDPAVVVVDEFQLTAFSTPQHGTTRCPSSRLFPSIQHGPRPWESIYLLQIPTTPACT

SEQ ID NO: 9037 - protein, 147 aa, Homo sapiens [sequence omitted]

SEQ ID NO: 9038 - protein, 99 aa, Homo sapiens
MPALSSQTWLPNPVVYLMKAFDLLVDRPATLVRVYRVAARKEQVELGQGSGAFTQVAKAYQDRYQDLGAHHSARKCRAKHKQRMLEERKAAKEATAAAS

SEQ ID NO: 9039 - protein, 138 aa, Homo sapiens [sequence omitted]

SEQ ID NO: 9040 - protein, 518 aa, Homo sapiens
MTSSKIEMPGEVKADPAALMASLHLLPSPTPNLEIKYTKIFINNEWQNSESGRVFPVYNPATGEQVCEVQEADKADIDKAVQAARLAFSLGSVWRRMDASERGRLLDKLADLVERDRAVLATMESLNGGKPFLQAFYVDLQGVIKTFRYYAGWADKIHGMTIPVDGDYFTFTRHEPIGVCGQIIPWNFPLLMFAWKIAPALCCGNTVVIKPAEQTPLSALYMGALIKEAGFPPGVINILPGYGPTAGAAIASHIGIDKIAFTGSTEVGKLIQEAAGRSNLKRVTLELGGKSPNIIFADADLDYAVEQAHQGVFFNQGQCCTAGSRIFVEESIYEEFVRRSVERAKRRVVGSPFDPTTEQGPQIDKKQYNKILELIQSGVAEGAKLECGGKGLGRKGFFIEPTVFSNVTDDMRIAKEEIFGPVQEILRFKTMDEVIERANNSDFGLVAAVFTNDINKALTVSSAMQAGTVWINCYNALNAQSPFGGFKMSGNGREMGEFGLREYSEVKTVTVKIPQKNS

SEQ ID NO: 9041 - protein, 518 aa, Homo sapiens [sequence omitted]

SEQ ID NO: 9042 - protein, 189 aa, Homo sapiens
MKLGSTHSPFRARSEPEDPARSALEKFEQLTLDEHNLPSLVCVITGKWPLREYYSHLIHQKHFQHIQVCTPWLEAEDYPLLLGSVDLGVCLHTSSSGLDLPMKVVDMFGCCLPVCAVNFKCLHELVKHEENSLVFEDSEELAAQLQMLFSNFPDPEGKLNQFRKNLRESQQLRWDESWVQTVLPLVMDT

SEQ ID NO: 9043 - protein, 88 aa, Homo sapiens
MKVVDMFGCCLPVCAVNFKCLHELVKHEENSLVFEDSEELAAQLQMLFSNFPDPEGKLNQFRKNLRESQQLRWDESWVQTVLPLVMDT

SEQ ID NO: 9044 - protein, 393 aa, Homo sapiens
MATGGGTRSMTSMYGHLLGLQKLNLLDCASYITGLSGATWTMATLYRDPDWSSKNLEPAIFEARRHVVKDKLPSLFPDQLRKFQEELRQRSQEGYRVTFTDFWGLLILLFNHFVSPQRNECKLSDQRAALSCGQNPLPIYLTINVKDDVSNQDFREWFEFSPYEVGLQKYGAFIPSELFGSEFFMGRLVKRIPESRICYMLGLWSSIFSLNLLDAWNLSHTSEEFFHRQPCGASHRQSGDSTSHDLPFIPPSPAEDEPILPEIPKCDANILETTVVIPGSWLSNSFREILTHRSFVSEFHNFLSGLQLHTNYLQNGQFSRCVGNGKAWLSDTVLDGFPNQLTESANHLCLLDTAFFVNSSYPPLLRPERKADLIIHLNYCAGSQTKATPETNL

SEQ ID NO: 9045 - protein, 222 aa, Homo sapiens
MAIFVELNTKAKMPIVGLGTWKSPLGKVKEVVKVAIDAGYRHIDCAYVYQNEHEVGEAIQEKIQEKAVKREDLFIINKLWPTFFERPLGYKSGDDFFRKDDKGNMIGGKAMFLDAWEAMEELVDEGLVKALGVSNFNHFQIERLLNKPGLKYKPVTNQVECHPYLTQEKLIQYCHSKGITIMAYSPLGSPDRLWAKPEDPSLLEDPKIKEIAARHKKPQPRF

SEQ ID NO: 9046 - protein, 839 aa, Homo sapiens
MVQLYNLHPFGSQQVVPCKLEPDRFCGGGRDALFVAAGCKVEAFAVAGQELCQPRCAFSTLGRVLRLAYSEAGISNEISQLESDDFVICQKPLELLGEKSEQSGLSVTLESTGLADEKRKYSHFQHLLYRRFAPDISSYVLSDDIKLHSLQLLPIYQTGSLTSDGKNLSQEKELLSLFCFFSLPHVGYLYMVVKSVELMSVYQYPEKSQQAVLTPQFLHVITSNNLQCFTVRCSAAAAREEDPYMDTTLKACPPVSMDVCALRIQLFIGLKAICHFKNHIILLTKAEPEAIPERRQSPKRLLSRKDTSVKIKIPPVAEAGWNLYIVNTISPVQLYKEMVDYSNTYKTVKTQSCIHLLSEAHLLVRAALMDASQLEPGEKAELLEAFKESCGHLGDCYSRLDSQHSHLTLPYYKMSGLSMAEVLARTDWTVEDGLQKYERGLIFYINHSLYENLDEELNEELAAKVVQMFYVAEPKQVPHILCSPSMKNINPLTAMSYLRKLDTSGFSSILVTLTKAAVALKMGDLDMHRNEMKSHSEMKLVCGFILEPRLLIQQRKGQIVPTELALHLKETQPGLLVASVLGLQKNNKIGIEEADSFFKVLCAKDEDTIPQLLVDFWEAQLVACLPDVVLQELFFKLTSQYIWRLSKRQPPDTTPLRTSEDLINACSHYGLIYPWVHVVISSDSLADKNYTEDLSKLQSLICGPSFDIASIIPFLEPLSEDTIAGLSVHVLCRTRLKEYEQCIDILLERCPEAVIPYANHELKEENRTLWWKKLLPELCQRIKCGGEKYQLYLSSLKETLSIVAVELELKDFMNVLPEDGTATFFLPYLLYCSRKKPLT

SEQ ID NO: 9047 - protein, 1004 aa, Homo sapiens
MVQLYNLHPFGSQQVVPCKLEPDRFCGGGRDALFVAAGCKVEAFAVAGQELCQPRCAFSTLGRVLRLAYSEAGDYLVAIEEKNKATFLRAYVNWRNKRTENSRVCIRMIGHNVEGPFSKAFRDQMYIIEMPLSEAPLCISCCPVKGDLLVGCTNKLVLFSLKYQIINEEFSLLDFERSLIIHIDNITPVEVSFCVGYVAVMSDLEVLIVKLESGPKNGERVHHHPHKTNNRIRRTEEGISNEISQLESDDFVICQKPLELLGEKSEQSGLSVTLESTGLADEKRKYSHFQHLLYRRFAPDISSYVLSDDIKLHSLQLLPIYQTGSLTSDGKNLSQEKELLSLFCFFSLPHVGYLYMVVKSVELMSVYQYPEKSQQAVLTPQFLHVITSNNLQCFTVRCSAAAAREEDPYMDTTLKACPPVSMDVCALRIQLFIGLKAICHFKNHIILLTKAEPEAIPERRQSPKRLLSRKDTSVKIKIPPVAEAGWNLYIVNTISPVQLYKEMVDYSNTYKTVKTQSCIHLLSEAHLLVRAALMDASQLEPGEKAELLEAFKESCGHLGDCYSRLDSQHSHLTLPYYKMSGLSMAEVLARTDWTVEDGLQKYERGLIFYINHSLYENLDEELNEELAAKVVQMFYVAEPKQVPHILCSPSMKNINPLTAMSYLRKLDTSGFSSILVTLTKAAVALKMGDLDMHRNEMKSHSEMKLVCGFILEPRLLIQQRKGQIVPTELALHLKETQPGLLVASVLGLQKNNKIGIEEADSFFKVLCAKDEDTIPQLLVDFWEAQLVACLPDVVLQELFFKLTSQYIWRLSKRQPPDTTPLRTSEDLINACSHYGLIYPWVHVVISSDSLADKNYTEDLSKLQSLICGPSFDIASIIPFLEPLSEDTIAGLSVHVLCRTRLKEYEQCIDILLERCPEAVIPYANHELKEENRTLWWKKLLPELCQRIKCGGEKYQLYLSSLKETLSIVAVELELKDFMNVLPEDGTATFFLPYLLYCSRKKPLT

SEQ ID NO: 9048 - protein, 154 aa, Homo sapiens [sequence omitted]

SEQ ID NO: 9049 - protein, 189 aa, Homo sapiens
MAAMSLLRRVSVTAVAALSGRPLGTRLGFGGFLTRGFPKAAAPVRHSGDHGKRLFVIRPSRFYDRRFLKLLRFYIALTGIPVAIFITLVNVFIGQAELAEIPEGYVPEHWEYYKHPISRWIARNFYDSPEKIYERTMAVLQIEAEKAELRVKELEVRKLMHVRGDGPWYYYETIDKELIDHSPKATPDN

SEQ ID NO: 9050 - protein, 187 aa, Homo sapiens
GFRLLRWQLCLAGPLALASDLGASSLVAFRRLLGNSIFPAPVRHSGDHGKRLFVIRPSRFYDRRFLKLLRFYIALTGIPVAIFITLVNVFIGQAELAEIPEGYVPEHWEYYKHPISRWIARNFYDSPEKIYERTMAVLQIEAEKAELRVKELEVRKLMHVRGDGPWYYYETIDKELIDHSPKATPDN

SEQ ID NO: 9051 - protein, 187 aa, Homo sapiens; identical to SEQ ID NO: 9050

SEQ ID NO: 9052 - protein, 209 aa, Homo sapiens [sequence omitted]

SEQ ID NO: 9053 - protein, 155 aa, Homo sapiens
VCCGGFRLLRWQLCLAGPLALASDLGASSLVAFRRLLRFYIALTGIPVAIFITLVNVFIGQAELAEIPEGYVPEHWEYYKHPISRWIARNFYDSPEKIYERTMAVLQIEAEKAELRVKELEVRKLMHVRGDGPWYYYETIDKELIDHSPKATPDN

SEQ ID NO: 9054 - protein, 135 aa, Homo sapiens
MAAMSLLRRVSVTAVAALSGRPLGTRLGFGGFLTRGFPKAAAPVRHSGDHGKRLFVIRPSRFYDRRFLKLLRFYIALTGIPVAIFITLVNVFIGQAELAEIPEGYVPEHWEYYKGKGAGSAKIDACERRWTLVLL

SEQ ID NO: 9055 - protein, 100 aa, Homo sapiens
MAAMSLLRRVSVTAVAALSGRPLGTRLGFGGFLTRGFPKAAEILHCIDWDSSSNFHNSGECIHCIPYQDGLPVISMIVLKRYMKEQWPSFRLKLKRLNYG

SEQ ID NO: 9056 - protein, 79 aa, Homo sapiens
MYSLHPISRWIARNFYDSPEKIYERTMAVLQIEAEKAELRVKELEVRKLMHVRGDGPWYYYETIDKELIDHSPKATPDN

SEQ ID NO: 9057 - protein, 137 aa, Homo sapiens
MAAMSLLRRVSVTAVAALSGRPLGTRLGFGGFLTRGFPKAAGQAELAEIPEGYVPEHWEYYKHPISRWIARNFYDSPEKIYERTMAVLQIEAEKAELRVKELEVRKLMHVRGDGPWYYYETIDKELIDHSPKATPDN

SEQ ID NO: 9058 - protein, 313 aa, Homo sapiens
MAQRKNAKSSGNSSSSGSGSGSTSAGSSSPGARRETKHGGHKNGRKGGLSGTSFFTWFMVIALLGVWTSVAVVWFDLVDYEEVLGKLGIYDADGDGDFDVDDAKVLLGLKERSTSEPAVPPEEAEPHTEPEEQVPVEAEPQNIEDEAKEQIQSLLHEMVHAEHVEGEDLQQEDGPTGEPQQEDDEFLMATDVDDRFETLEPEVSHEETEHSYHVEETVSQDCNQDMEEMMSEQENPDSSEPVVEDERLHHDTDDVTYQVYEEQAVYEPLENEGIEITEVTAPPEDNPVEDSQVIVEEVSIFPVEEQQEVPPDT

SEQ ID NO: 9059 - protein, 210 aa, Homo sapiens
MAEDKETKHGGHKNGRKGGLSGTSFFTWFMVIALLGVWTSVAVVWFDLVDYEEVLGKLGIYDADGDGDFDVDDAKVLLEGPSGVAKRKTKAKVKELTKEELKKEKEKPESRKESKNEERKKGKKEDVRKDKKIADADLSRKESPKGKKDREKEKVDLEKSAKTKENRKKSTNMKDVSSKMASRDKDDRKESRSSTRYAHLTKGNTQKRNG

SEQ ID NO: 9060 - protein, 328 aa, Homo sapiens
MAQRKNAKSSGNSSSSGSGSGSTSAGSSSPGARRETKHGGHKNGRKGGLSGTSFFTWFMVIALLGVWTSVAVVWFDLVDYEEVLAKAKDFRYNLSEVLQGKLGIYDADGDGDFDVDDAKVLLGLKERSTSEPAVPPEEAEPHTEPEEQVPVEAEPQNIEDEAKEQIQSLLHEMVHAEHVEGEDLQQEDGPTGEPQQEDDEFLMATDVDDRFETLEPEVSHEETEHSYHVEETVSQDCNQDMEEMMSEQENPDSSEPVVEDERLHHDTDDVTYQVYEEQAVYEPLENEGIEITEVTAPPEDNPVEDSQVIVEEVSIFPVEEQQEVPPDT

SEQ ID NO: 9061 - protein, 174 aa, Homo sapiens
MAEDKETKHGGHKNGRKGGLSGTSFFTWFMVIALLGVWTSVAVVWFDLVDYEEVLAKAKDFRYNLSEVLQGKLGIYDADGDGDFDVDDAKVLLGLTKDGSNENIDSLEEVLNILAEESSDWFYGFLSFLYDIMTPFEMLEEEEEESETADGVDGTSQNEGVQGKTCVILDLHNQ

SEQ ID NO: 9062 - protein, 225 aa, Homo sapiens
MAEDKETKHGGHKNGRKGGLSGTSFFTWFMVIALLGVWTSVAVVWFDLVDYEEVLAKAKDFRYNLSEVLQGKLGIYDADGDGDFDVDDAKVLLEGPSGVAKRKTKAKVKELTKEELKKEKEKPESRKESKNEERKKGKKEDVRKDKKIADADLSRKESPKGKKDREKEKVDLEKSAKTKENRKKSTNMKDVSSKMASRDKDDRKESRSSTRYAHLTKGNTQKRNG

SEQ ID NO: 9063 - protein, 758 aa, Homo sapiens
MAQRKNAKSSGNSSSSGSGSGSTSAGSSSPGARRETKHGGHKNGRKGGLSGTSFFTWFMVIALLGVWTSVAVVWFDLVDYEEVLGKLGIYDADGDGDFDVDDAKVLLGLKERSTSEPAVPPEEAEPHTEPEEQVPVEAEPQNIEDEAKEQIQSLLHEMVHAEHVEGEDLQQEDGPTGEPQQEDDEFLMATDVDDRFETLEPEVSHEETEHSYHVEETVSQDCNQDMEEMMSEQENPDSSEPVVEDERLHHDTDDVTYQVYEEQAVYEPLENEGIEITEVTAPPEDNPVEDSQVIVEEVSIFPVEEQQEVPPETNRKTDDPEQKAKVKKKKPKLLNKFDKTIKAELDAAEKLRKRGKIEEAVNAFKELVRKYPQSPRARYGKAQCEDDLAEKRRSNEVLRGAIETYQEVASLPDVPADLLKLSLKRRSDRQQFLGHMRGSLLTLQRLVQLFPNDTSLKNDLGVGYLLIGDNDNAKKVYEEVLSVTPNDGFAKVHYGFILKAQNKIAESIPYLKEGIESGDPGTDDGRFYFHLGDAMQRVGNKEAYKWYELGHKRGHFASVWQRSLYNVNGLKAQPWWTPKETGYTELVKSLERNWKLIRDEGLAVMDKAKGLFLPEDENLREKGDWSQFTLWQQGRRNENACKGAPKTCTLLEKFPETTGCRRGQIKYSIMHPGTHVWPHTGPTNCRLRMHLGLVIPKEGCKIRCANETKTWEEGKVLIFDDSFEHEVWQDASSFRLIFIVDVWHPELTPQQRRSLPAI

SEQ ID NO: 9064 - protein, 299 aa, Homo sapiens
MAEDKETKHGGHKNGRKGGLSGTSFFTWFMVIALLGVWTSVAVVWFDLVDYEEVLAKAKDFRYNLSEVLQGKLGIYDADGDGDFDVDDAKVLLGLKERSTSEPAVPPEEAEPHTEPEEQVPVEAEPQNIEDEAKEQIQSLLHEMVHAEHVEGEDLQQEDGPTGEPQQEDDEFLMATDVDDRFETLEPEVSHEETEHSYHVEETVSQDCNQDMEEMMSEQENPDSSEPVVEDERLHHDTDDVTYQVYEEQAVYEPLENEGIEITEVTAPPEDNPVEDSQVIVEEVSIFPVEEQQEVPPDT

SEQ ID NO: 9065 - protein, 216 aa, Homo sapiens [sequence omitted]

SEQ ID NO: 9066 - protein, 102 aa, Homo sapiens [sequence omitted]

SEQ ID NO: 9067 - protein, 108 aa, Homo sapiens
MLLFCPGCGNGLIVEEGQRCHRFACNTCPYVHNITRKVTNRKYPKLKEVDDVLGGAAAWENVDSTAESCPKCEHPRAYFMQLQTRSADEPMTTFYKCCNAQCGHRWRD

SEQ ID NO: 9068 - protein, 90 aa, Homo sapiens
MDGTRTSLDIEEYSDTEVQKNQVLTLEEWQDKWVNGKTAFHQEQGHQLLKKHLDTFLKGKSGLRVFFPLCGKAVEMKWYEQININRIILP

SEQ ID NO: 9069 - protein, 124 aa, Homo sapiens [sequence omitted]

SEQ ID NO: 9070 - protein, 106 aa, Homo sapiens
MDGTRTSLDIEEYSDTEVQKNQVLTLEEWQDKWVNGKTAFHQEQGHQLLKKHLDTFLKGKSGLRVFFPLCCSELRSCHCTPAWATEQDSVSKERKRKEKKERQVDC

SEQ ID NO: 9071 - protein, 245 aa, Homo sapiens
MDGTRTSLDIEEYSDTEVQKNQVLTLEEWQDKWVNGKTAFHQEQGHQLLKKHLDTFLKGKSGLRVFFPLCGKAVEMKWFADRGHSVVGVEISELGIQEFFTEQNLSYSEEPITEIPGTKVFKSSSGNISLYCCSIFDLPRTNIGKFDMIWDRGALVAINPGDRKCYADTMFSLLGKKFQYLLCVLSYDPTKHPGPPFYVPHAEIERLFGKICNIRCLEKVDAFEERHKSWGIDCLFEKLYLLTEK

SEQ ID NO: 9072 - protein, 245 aa, Homo sapiens; identical to SEQ ID NO: 9071

SEQ ID NO: 9073 - protein, 226 aa, Homo sapiens
MDGTRTSLDIEEYSDTEVQKNQVLTLEEWQDKWVNGKTAFHQEQGHQLLKKHLDTFLKGKSGLRVFFPLCGKAVEMKWFADRGHSVVGVEISELGIQEFFTEQNLSYSEEPITEIPGTKVFKSSSGNISLYCCSIFDLPRTNIGKFDIQCFPSWERSFSISCVFFLMIQLNIQVHHFMFHMLKLKGCLVKYAIYVVLRRLMLLKNDIKVGELTVFLKSYIYLQKSK

SEQ ID NO: 9074 - protein, 173 aa, Homo sapiens
MDGTRTSLDIEEYSDTEVQKNQVLTLEEWQDKWVNGKTAFHQEQGHQLLKKHLDTFLKGKSGLRVFFPLCGKAVEMKWFADRGHSVVGVEISELGIQEFFTEQNLSYSEEPITEIPGTKVFKSSSGNISLYCCSIFDLPRTNIGKFDMIWDRGALVAINPGDRKWSTILCSTC

SEQ ID NO: 9075 - protein, 139 aa, Homo sapiens
MTGKNVYFQSQLEAFHCLQYELFPSRLTINLLVTTHIPFPQTKPHIARCVFTESSKILLGLWVQDGECSEIMTGAWSCRALRRKSRNLFSEQLKIIPKDLHFRNTMLSSCIRNQLGGPFLLEVENNERLNYRSGEGRQL

SEQ ID NO: 9076 - protein, 309 aa, Homo sapiens
MSFNLQSSKKLFIFLGKSLFSLLEAMIFALLPKPRKNVAGEIVLITGAGSGLGRLLALQFARLGSVLVLWDINKEGNEETCKMAREAGATRVHAYTCDCSQKEGVYRVADQVKKEVGDVSILINNAGIVTGKKFLDCPDELMEKSFDVNFKAHLWTYKAFLPAMIANDHGHLVCISSSAGLSGVNGLADYCASKFAAFGFAESVFVETFVQKQKGIKTTIVCPFFIKTGMFEGCTTGCPSLLPILEPKYAVEKIVEAILQEKMYLYMPKLLYFMMFLKSFLPLKTGLLIADYLGILHAMDGFVDQKKKL

SEQ ID NO: 9077 - protein, 472 aa, Homo sapiens
MSNIYIQEPPTNGKVLLKTTAGDIDIELWSKEAPKACRNFIQLCLEAYYDNTIFHRVVPGFIVQGGDPTGTGSGGESIYGAPFKDEFHSRLRFNRRGLVAMANAGSHDNGSQFFFTLGRADELNNKHTIFGKVTGDTVYNMLRLSEVDIDDDERPHNPHKIKSCEVLFNPFDDIIPREIKRLKKEKPEEEVKKLKPKGTKNFSLLSFGEEAEEEEEEVNRVSQSMKGKSKSSHDLLKDDPHLSSVPVVESEKGDAPDLVDDGEDESAEHDEYIDGDEKNLMRERIAKKLKKDTSANVKSAGEGEVEKKSVSRSEELRKEARQLKRELLAAKQKKVENAAKQAEKRSEEEEAPPDGAVAEYRREKQKYEALRKQQSKKGTSREDQTLALLNQFKSKLTQAIAETPENDIPETEVEDDEGWMSHVLQFEDKSRKVKDASMQDSDTFEIYDPRNPVNKRRREESKKLMREKKERR

SEQ ID NO: 9078 - protein, 94 aa, Homo sapiens
MALVASHHWEKFEDENFILKHTGPEILSMANAGPNTNGSQFFICTAKTEWLDGKHVVFGKVKEGMNIVEAMERFGSRNGKTSKKITIADCGQLE

SEQ ID NO: 9079 - protein, 94 aa, Homo sapiens; identical to SEQ ID NO: 9078

SEQ ID NO: 9080 - protein, 94 aa, Homo sapiens; identical to SEQ ID NO: 9078

SEQ ID NO: 9081 - protein, 108 aa, Homo sapiens [sequence omitted]

SEQ ID NO: 9082 - protein, 172 aa, Homo sapiens
MLEMGHRAGHDMSCLDIGGGFPGMEGSGPKFEELARVISAALAQDLPEERGVKVIAEPGCFYVESVCMAAVNIIAKRAVLEPGGWARMALGGDATVQVSPGPGGEEGQRVGLCPRSWGAAPLPLHPLCPMCDAFDRLFLEDVRLPELDVGDWLVFPSMGAYMSSMSSSFNGF

SEQ ID NO: 9083 - protein, 830 aa, Homo sapiens
MAGLWLGLVWQKLLLWGAASAVSLAGASLVLSLLQRVASYARKWQQMRPIPTVARAYPLVGHALLMKPDGREFFQQIIEYTEEYRHMPLLKLWVGPVPMVALYNAENVENPGSEKRARRADRISAAVGLVLIEVGVVDADGDLSRVILTSSKQIDKSSMYKFLEPWLGLGLLTRTVLSERRRKAGKEGPAGSWPLPVKRPRVQVNSYLQLWYSIATVASVQEDSGDIFFVTTYFISSTGNKWRSRRKMLTPTFHFTILEDFLDIMNEQANILVKKLEKHINQEAFNCFFYITLCALDIICGNHTPPGRQMGGRERVTGSSARFYDRTGLLRSSSHAQGCEWGRHGATAQGGEGKEEQEQGVEVDRTREEETAMGKNIGAQSNDDSEYVRAVYRMSEMIFRRIKMPWLWLDLWYLMFKEGWEHKKSLKILHTFTNSVIAERANEMNANEDCRGDGRGSAPSKNKRRAFLDLLLSVTDDEGNRLSHEDIREEVDTFMFEGHDTTAAAINWSLYLLGSNPEVQKKVDHELDDVFGHLIYLLSSGKSDRPATVEDLKKLRYLECVIKETLRLFPSVPLFARSVSEDCEVAGYRVLKGTEAVIIPYALHRDPRYFPNPEEFQPERFFPENAQGRHPYAYVPFSAGPRNCIGQKFAVMEEKTILSCILRHFWIESNQKREELGLEGQLILRPTAIEEEIQSISVVETPGCETQDQSAIEPLEQLLGDEKKQAEEMDRILEEPESHMAVCQVLLRELGKDSKQAPILPARCYRQWASEKQQRNGQGGNRMAGSEKRYAERQRMVKRQEVEEMEGAFSDEMLAGGWYPEEMMFEQWSD

SEQ ID NO: 9084 - protein, 187 aa, Homo sapiens
MVAATVAAAWLLLWAAACAQQEQDFYDFKAVNIRGKLVSLEKYRGSVSLVVNVASECGFTDQHYRALQQLQRDLGPHHFNVLAFPCNQFGQQEPDSNKEIESFARRTYSVSFPMFSKIAVTGTGAHPAFKYLAQTSGKEPTWNFWKYLVAPDGKVVGAWDPTVSVEEVRPQITALVRKLILLKREDL

SEQ ID NO: 9085 - protein, 171 aa, Homo sapiens
MAKFVIRPATAADCSDILRLIKELAKYEYMEEQVILTEKDLLEDGFGEHPFYHCLVAEVPKEHWTPEGHSIVGFAMYYFTYDPWIGKLLYLEDFFVMSDYRGFGIGSEILKNLSQVAMRCRCSSMHFLVAEWNEPSINFYKRRGASDLSSEEGWRLFKIDKEYLLKMATEE

SEQ ID NO: 9086 - protein, 96 aa, Homo sapiens
MYYFTYDPWIGKLLYLEDFFVMSDYRGFGIGSEILKNLSQVAMRCRCSSMHFLVAEWNEPSINFYKRRGASDLSSEEGWRLFKIDKEYLLKMATEE

SEQ ID NO: 9087 - protein, 524 aa, Homo sapiens
MPQLSLSWLGLGPVAASPWLLLLLVGGSWLLARVLAWTYTFYDNCRRLQCFPQPPKQNWFWGHQGLVTPTEEGMKTLTQLVTTYPQGFKLWLGPTFPLLILCHPDIIRPITSASAAVAPKDMIFYGFLKPWLGDGLLLSGGDKWSRHRRMLTPAFHFNILKPYMKIFNKSVNIMHDKWQRLASEGSARLDMFEHISLMTLDSLQKCVFSFESNCQEKPSEYIAAILELSAFVEKRNQQILLHTDFLYYLTPDGQRFRRACHLVHDFTDAVIQERRRTLPTQGIDDFLKNKAKSKTLDFIDVLLLSKDEDGKELSDEDIRAEADTFMFEGHDTTASGLSWVLYHLAKHPEYQEQCRQEVQELLKDREPIEIEWDDLAQLPFLTMCIKESLRLHPPVPVISRCCTQDFVLPDGRVIPKGIVCLINIIGIHYNPTVWPDPEVYDPFRFDQENIKERSPLAFIPFSAGPRNCIGQAFAMAEMKVVLALTLLHFRILPTHTEPRRKPELILRAEGGLWLRVEPLGANSQ

SEQ ID NO: 9088 - protein, 517 aa, Homo sapiens
MPQLSLSWLGLGPVAASPWLLLLLVGGSWLLARVLAWTYTFYDNCRRLQCFPQPPKQNWFWGHQGLVTPTEEGMKTLTQLVTTYPQGFKLWLGPTFPLLILCHPDIIRPITSASAAVAPKDMIFYGFLKPWLGDGLLLSGGDKWSRHRRMLTPAFHFNILKPYMKIFNKSVNIMHVSPLNSGSQLEPWAAGERCSWDFAYVKLLPPSCRKPSEYIAAILELSAFVEKRNQQILLHTDFLYYLTPDGQRFRRACHLVHDFTDAVIQERRRTLPTQGIDDFLKNKAKSKTLDFIDVLLLSKDEDGKELSDEDIRAEADTFMFEGHDTTASGLSWVLYHLAKHPEYQEQCRQEVQELLKDREPIEIEWDDLAQLPFLTMCIKESLRLHPPVPVISRCCTQDFVLPDGRVIPKGIVCLINIIGIHYNPTVWPDPEVYDPFRFDQENIKERSPLAFIPFSAGPRNCIGQAFAMAEMKVVLALTLLHFRILPTHTEPRRKPELILRAEGGLWLRVEPLGANSQ

SEQ ID NO: 9089 - protein, 524 aa, Homo sapiens; identical to SEQ ID NO: 9087

SEQ ID NO: 9090 - protein, 206 aa, Homo sapiens [sequence omitted]

SEQ ID NO: 9091 - protein, 520 aa, Homo sapiens
MSQLSLSWLGLWPVAASPWLLLLLVGASWLLAHVLAWTYAFYDNCRRLRCFPQPPRRNWFWGHQGMVNPTEEGMRVLTQLVATYPQGFKVWMGPISPLLSLCHPDIIRSVINASAAIAPKDKFFYSFLEPWLGDGLLLSAGDKWSRHRRMLTPAFHFNILKPYMKIFNESVNIMHAKWQLLASEGSACLDMFEHISLMTLDSLQKCVFSFDSHCQEKPSEYIAAILELSALVSKRHHEILLHIDFLYYLTPDGQRFRRACRLVHDFTDAVIQERRRTLPSQGVDDFLQAKAKSKTLDFIDVLLLSKDEDGKKLSDEDIRAEADTFMFEGHDTTASGLSWVLYHLAKHPEYQERCRQEVQELLKDREPKEIEWDDLAHLPFLTMCMKESLRLHPPVPVISRHVTQDIVLPDGRVIPKGIICLISVFGTHHNPAVWPDPEVYDPFRFDPENIKERSPLAFIPFSAGPRNCIGQTFAMAEMKVVLALTLLRFRVLPDHTEPRRKPELVLRAEGGLWLRVEPLS

SEQ ID NO: 9092 - protein, 520 aa, Homo sapiens; identical to SEQ ID NO: 9091

SEQ ID NO: 9093 - protein, 520 aa, Homo sapiens; identical to SEQ ID NO: 9091

SEQ ID NO: 9094 - protein, 1075 aa, Homo sapiens [sequence omitted]

SEQ ID NO: 9095 - protein, 1063 aa, Homo sapiens [sequence omitted]

SEQ ID NO: 9096 - protein, 66 aa, Homo sapiens
MRAKLFRFASENDLPEWKERGTGDVKLLKHKEKGAIRLLMRRDKTLKICANHYNVPLNSEQARSEA

SEQ ID NO: 9097 - protein, 277 aa, Homo sapiens
MGSALGRARRTLSGRPFQRAPCKTRRALSLSAALRNVTKAQGGCPKSLVLWGCRPKRPRKRRTSLKLAWRGTFCSSSLKISEDTHEDHDTSTENTDESNHDPQFEPIVSLPEQEIKTLEEDEEELFKMRAKLFRFASENDLPEWKERGTGDVKLLKHKEKGAIRLLMRRDKTLKICANHYITPMMELKPNAGSDRAWVWNTHADFADECPKPELLAIRFLNAENAQKFKTKFEECRKEIEEREKKGSGKNDHAEKVAEKLEALSVKEETKEDAEEKQ

SEQ ID NO: 9098 - protein, 643 aa, Homo sapiens [sequence omitted]

SEQ ID NO: 9099 - protein, 962 aa, Homo sapiens [sequence omitted]

SEQ ID NO: 9100 - protein, 962 aa, Homo sapiens [sequence omitted]

SEQ ID NO: 9101 - protein, 276 aa, Homo sapiens
MMRSIPLRGFDQQMSSMVIEHMASHGTRFLRGCAPSRVRRLPDGQLQVTWEDSTTGKEDTGTFDTVLWAIGRVPDTRSLNLEKAGVDTSPDTQKILVDSREATSVPHIYAIGDVVEGRPELTPTAIMAGRLLVQRLFGGSSDLMDYDNVPTTVFTPLEYGCVGLSEEEAVARHGQEHVEVYHAHYKPLEFTVAGRDASQCYVKMVCLREPPQLVLGLHFLGPNAGEVTQGFALGIKCGASYAQVMRTVGIHPTCSEEVVKLRISKRSGLDPTVTGC

SEQ ID NO: 9102 - protein, 503 aa, Homo sapiens [sequence omitted]

SEQ ID NO: 9103 - protein, 238 aa, Homo sapiens
MPPVIKSQPFNIFWAAPTMYCMPSFNVDINLQVFNIISNPLETQSGSKIAIFYPNELGYYPYLSQDGKSFNGGIPQNVSLSEHLRKTADDIGEGVPWWRSEELVVIDWESWKPQWDRNQGSRIIYKNHSLAFTRNHHPYWSEMKVETVAREEFENAGKNFMNITLTLALEMRPKCLWGFYLYPDCYNYDYRINPETPFYLHSTEALSQEDLVHAIGESAALGAAGVILWGGYEYSASK

SEQ ID NO: 9104 - protein, 271 aa, Homo sapiens [sequence omitted]

SEQ ID NO: 9105 - protein, 271 aa, Homo sapiens [sequence omitted]

SEQ ID NO: 9106 - protein, 309 aa, Homo sapiens [sequence omitted]

SEQ ID NO: 9107 - protein, 361 aa, Homo sapiens
MELGGAVTIFLALRLSCLLILIAWKRMDKAGKLPPGPTPILFLGHLLQVRTDATFQSFMKGEIQPCVHCVHGSRPVVVLCGHEAVKEALIDQADEFSGRGELASIKQNFQGHGVALANGERWRILRRFSLTILRDFGMGKQSIKERIQEEASYLLEEFQKTKIHEEINQVIGPHRLPRVDDRVKMPYTDVVIHEIQRLVDIVPMGVPHNIIQDTQFRGYLLPKGTDVFPLLGSVLKDPKYFRYPDAFYPQHFLDEQGRFKKNEAFVPFSSVTVMSPDVRMRQLRPSGVVSPDTPGTPMTCAGKRICLGEAMARMELFLYFTSTLQNFSLCSLVPLVDIDITPKLSGFGNITPTYELCLVAR

SEQ ID NO: 9108 - protein, 142 aa, Homo sapiens
LTAVKDAIDDLKRHQSDDRVNNQPVLLLVNGKIKEDKWMNVQVGDIIKLENNQPVMADILLLSSSEPYSLTYIETADLDGETNLKVKQAISVTSDMEDRLELLSTFNGEVRCEAPNNKLDKFSGILTYKGKNYFLDHDKLLL

SEQ ID NO: 9109 - protein, 142 aa, Homo sapiens; identical to SEQ ID NO: 9108

SEQ ID NO: 9110 - protein, 154 aa, Homo sapiens
MAASRRLMKELEEIRKCGMKNFCNIQVDEANLLTWQGLIVPDNPPYDKGAFRIEINFPAEYPFKPPKITFKTKIYHPNIDEKGQVCLPVISAENWKPATKTDQVIQSLIALVNDPQPKHPLRADLAEEYSKDRKKFCKNAEEFTKKYGEKRPVD

SEQ ID NO: 9111 - protein, 154 aa, Homo sapiens
MAASRRLMKELEEIRKCGMENFRNIQVDEANLLTWQGLIVPDNPPYNKGAFRIEINFPAEYPFKPPRITFKTKIYHPNIDEKGQVCLPVISAENWKPATKTDQVIQSLIALVNDPQPEHPLRADLAEEYSNDRKKFCKNAEEFTKKYGEKRPVD

SEQ ID NO: 9112 - protein, 176 aa, Homo sapiens [sequence omitted]

SEQ ID NO: 9113 - protein, 108 aa, Homo sapiens
MAKDIKTKIKNYRTAPFDRRFPNQNQTRNGWQKYLDLHHFKKAMTAKGGGDVSVCEWYQHVYKSLCPIPWASAWDDHGQKAHFLGRSELAPPHLCPSPRMVKKNLGIW

SEQ ID NO: 9114 - protein, 259 aa, Homo sapiens
MAACRALKAVLVDLSGTLHIEDAAVPGAQEALKRLRGASVIIRFVTNTTKESKQDLLERLRKLEFDISEDEIFTSLTAARSLLERKQVRPMLLVDDRALPDFKGIQTSDPNAVVMGLAPEHFHYQILNQAFRLLLDGAPLIAIHKARYYKRKDGLALGPGPFVTALEYATDTKATVVGKPEKTFFLEALRGTGCEPEEAVMIGDDCRDDVGGAQDVGMLGILVKTGKYRASDEEKINPPPYLTCESFPHAVDHILQHLL

SEQ ID NO: 9115 - protein, 100 aa, Homo sapiens
MATRCAFPIPFGLKSNMAILKDQLIHNLLKEEQTPQNMIIVVEVGAVHMACAISILVKDLADELALVDVMEDKLKGEMMNLQHGSLFLGMPKIVLAKTIM

SEQ ID NO: 9116 - protein, 120 aa, Homo sapiens
MFKFDQFKRLIEDFSSIADFLVIYIEEAHASDGWAFKNNMDIRNHQNLQDRLQAAHLLLARSPQCPVVVDTMQNQSSQLYAALPERLYIIQEGRILYKGKSGPWNYNPEEVRAVLEKLHS

SEQ ID NO: 9117 - protein, 125 aa, Homo sapiens
MGLPQPGLWLKRLWVLLEVAVHVVVGKVLLILFPDRVKRNILAMGEKTGMTRNPHFSHDNWIPTFFSTQYFWFVLKVRWQRLEDTTELGGLAPNCPVVRLSGQRCNIWEFMQGNRPLVLNFGSCT

SEQ ID NO: 9118 - protein, 136 aa, Homo sapiens
MFKFDQFKRLIEDFSSIADFLVIYIEEAHASDGWAFKNNMDIRNHQNLQDRLQAAHLLLARSPQCPVVVDTMQNQSSQLYAALPERLYIIQEGRILYKGKSGPWNYNPEEVRAVGRASQGLALPETQLAFTLDLCP

SEQ ID NO: 9119 - protein, 152 aa, Homo sapiens [sequence omitted]

SEQ ID NO: 9120 - protein, 105 aa, Homo sapiens
MCQGGDFTHHNGTGVKSIYGEKFDDENFILKHTGPGIFSMANAGPNTNGSQFCNCTAKTAWLDGMHVVLGKVKEGMNIAEAMERFGSRNGKTSKKITIADCGQLY

SEQ ID NO: 9121 - protein, 126 aa, Homo sapiens
METNTMKTTSNFLMKKLRPKEVSLPKRLNHVINGRTWGRHRWVVYTTEMNGKNTFWDVDGSMVPPEWHRWLHSMTDDPPTTKPLTARKFIWTNHKFNVTGTPEQYVPYSTTRKKIQEWIPPSTPYK

SEQ ID NO: 9122 - protein, 145 aa, Homo sapiens
MELVQVLKRGLQQITGHGGLRGYLRVFFRTNDAKVGTLVGEDKYGNKYYEDNKQFFGRHRWVVYTTEMNGKNTFWDVDGSMVPPEWHRWLHSMTDDPPTTKPLTARKFIWTNHKFNVTGTPEQYVPYSTTRKKIQEWIPPSTPYK

SEQ ID NO: 9123 - protein, 1166 aa, Homo sapiens
MSGRRCAGGGAACASAAAEAVEPAARELFEACRNGDVERVKRLVTPEKVNSRDTAGRKSTPLHFAAGFGRKDVVEYLLQNGANVQARDDGGLIPLHNACSFGHAEVVNLLLRHGADPNARDNWNYTPLHEAAIKGKIDVCIVLLQHGAEPTIRNTDGRTALDLADPSAKAVLTGEYKKDELLESARSGNEEKMMALLTPLNVNCHASDGRKSTPLHLAAGYNRVKIVQLLLQHGADVHAKDKGDLVPLHNACSYGHYEVTELLVKHGACVNAMDLWQFTPLHEAASKNRVEVCSLLLSYGADPTLLNCHNKSAIDLAPTPQLKERLAYEFKGHSLLQAAREADVTRIKKHLSLEMVNFKHPQTHETALHCAAASPYPKRKQICELLLRKGANINEKTKEFLTPLHVASEKAHNDVVEVVVKHEAKVNALDNLGQTSLHRAAYCGHLQTCRLLLSYGCDPNIISLQGFTALQMGNENVQQLLQEGISLGNSEADRQLLEAAKAGDVETVKKLCTVQSVNCRDIEGRQSTPLHFAAGYNRVSVVEYLLQHGADVHAKDKGGLVPLHNACSYGHYEVAELLVKHGAVVNVADLWKFTPLHEAAAKGKYEICKLLLQHGADPTKKNRDGNTPLDLVKDGDTDIQDLLRGDAALLDAAKKGCLARVKKLSSPDNVNCRDTQGRHSTPLHLAAGYNNLEVAEYLLQHGADVNAQDKGGLIPLHNAASYGHVDVAALLIKYNACVNATDKWAFTPLHEAAQKGRTQLCALLLAHGADPTLKNQEGQTPLDLVSADDVSALLTAAMPPSALPSCYKPQVLNGVRSPGATADALSSGPSSPSSLSAASSLDNLSGSFSELSSVVSSSGTEGASSLEKKEVPGVDFSITQFVRNLGLEHLMDIFEREQITLDVLVEMGHKELKEIGINAYGHRHKLIKGVERLISGQQGLNPYLTLNTSGSGTILIDLSPDDKEFQSVEEEMQSTVREHRDGGHAGGIFNRYNILKIQKVCNKKLWERYTHRRKEVSEENHNHANERMLFHGSPFVNAIIHKGFDERHAYIGGMFGAGIYFAENSSKSNQYVYGIGGGTGCPVHKDRSCYICHRQLLFCRVTLGKSFLQFSAMKMAHSPPGHHSVTGRPSVNGLALAEYVIYRGEQAYPEYLITYQIMRPEGMVDG

SEQ ID NO: 9124 - protein, 102 aa, Homo sapiens
MLRKARRVFVQKCAQCHTVEKGGKHKTGPNLHGLFGQKTGQAIVFTYTDANKNKGITWGEDTLMEYLESPKKYIPRIKMIFAGIKKKAERADLLACLKKATK

SEQ ID NO: 9125 - protein, 106 aa, Homo sapiens
MLWNLLALHQIGQRTISTASHRHFKNKVPEKQKLFQEDDGIPLYLKGGIADALLHRATMILTVGGTAYAIYQLAVASFPNKGVTSIIPAITWFTFIQLSMDQKSDK

SEQ ID NO: 9126 - protein, 122 aa, Homo sapiens [sequence omitted]

SEQ ID NO: 9127 - protein, 99 aa, Homo sapiens
MVTNLALLVELLGINHFMNTATFFVSFQEVPPTSDENVTMIETTFSNIPVRVYMPTLKSEILRTGLVYIHGGGWCMGDAGMCSILKVLVYHITYILLKC

SEQ ID NO: 9128 - protein, 79 aa, Homo sapiens
MDLLSHQKKLDSLVLSKPFMVRFCREYFTTDRSLEKVMFFNMYQWNQTICSDLLIGVPCSLRSLRKATFVIFQLVVVLS

SEQ ID NO: 9129 - protein, 109 aa, Homo sapiens
MVTNLLIEDPDVKIKLKLQSLIYPALQTLDMDLLSHQKKLDSLVLSKPFMVRFCREYFTTDRSLEKVMFFNMYQWNQTICSDLLIGVPCSLRSLRKATFVIFQLVVVLS

SEQ ID NO: 9130 - protein, 155 aa, Homo sapiens
MVKPIVFFDIAVDAKPSGRISIKLFADKIPKTAEKFHALSTGEKGFCYKGSCFHRIIPRFMCQGGDFTPLVEKFHDENLIRKHTGSGILSMANAGPNTNGSQFFICTAKTECLDGKHVAFGKVKERMNIVEAMEHFGYRNGKTSKKITIADCGQF

SEQ ID NO: 9131 - protein, 293 aa, Homo sapiens
MAAQAWKLLQALALLPRFLVARSRAVQLTSRRWLSLQECQSKKLMSDNRVTVQRFFVADTANEALEAAKRLNAKEIVLKAQILAGGRGKGVFNSGLKRGVHLTKDPNVVGQLAKQMIGYNLATKQTPKEGVKVNKVMVAEALDISRETYLAILMDQSCNGPMLVGSPQEGIDIEEVAASNPELIFKEQIDIFEGIKDSQAQRMAENLGFVGPLKSQVEAILVNIFGGIVNCAIIANGITKACQELELKVPLVVWLEGTNVQEAQEILNSRLPITSAVDLEDAAKKAVASVAKK

SEQ ID NO: 9132 - protein, 427 aa, Homo sapiens
MAAQAWKLLQALALLPRFLVARSRAVQLTSRRWLSLQECQSKKLMSDNRVTVQRFFVADTANEALEAAKRLNAKEIVLKAQILAGGRGKGVFNSGLKRGVHLTKDPNVVGQLAKQMIGYNLATKQTPKEGVKVNKVMVAEALDISRETYLAILMDQSCNGPMLVGSPQEGIDIEEVAASNPELIFKEQIDIFEGIKDSQAQRMAENLGFVGPLKSQAADQITKLYNLFLKIDATQVEVNPFGETPEGQVVCFDAKINFDDNAEFQQKDIFAMDDKSENEPIENEAAKYDLKYIGLDGNIACFVNGAGLAMATCDIIFLNGRKPASFLDLGGGVKEAQVYQAFTLPTADPKVEAILVNIFGGIVNCAIIANGITKACQELELKVPLVVWLEGTNVQEAQEILNSRLPITSAVDLEDAAKKAVASVAKK

SEQ ID NO: 9133 - protein, 178 aa, Homo sapiens [sequence omitted]

SEQ ID NO: 9134 - protein, 60 aa, Homo sapiens
  VARIANT (1)...(60): Xaa = Any Amino Acid
MVHFGSPKGSADDRFGHGRLIFMAQRGCAEMSQTQGLSNSRAESAEVDAQKRVYVCLFLX

SEQ ID NO: 9135 - protein, 190 aa, Homo sapiens
MNPQIRNPMKAMYPGTFYFQFKNLWEANDRNETWLCFTVEGIKRRSVVSWKTGVFRNQVDSETHCHAERCFLSWFCDDILSPNTKYQVTWYTSWSPCPDCAGEVAEFLARHSNVNLTIFTARLYYFQYPCYQEGLRSLSQEGVAVEIMDYEDFKYCWENFVYNDNEPFKPWKGLKTNFRLLKRRLRESLQ

SEQ ID NO: 9136 - protein, 177 aa, Homo sapiens
MNPQIRNPMKAMYPGTFYFQFKNLWEANDRNETWLCFTVEGIKRRSVVSWKTGVFRNQVDSETHCHAERCFLSWFCDDILSPNTKYQVTWYTSWSPCPDCAGEVAEFLARHSNVNLTIFTARLYYFQYPCYQEGLRSLSQEGVAVEIMDYEDFKYCWENFVYNDNELLDGYLAGCHP

SEQ ID NO: 9137 - protein, 163 aa, Homo sapiens [sequence omitted]

SEQ ID NO: 9138 - protein, 119 aa, Homo sapiens [sequence omitted]

SEQ ID NO: 9139 - protein, 112 aa, Homo sapiens
MNVGRKCLDQYSMLPATPWGVWEIIKRTDIPTLGKNVVVTGRSKIVGMPIVMSLHIRGVHERPRDDATVRISHGYTPKEQLKKQNICRYCNIRCTNSKPVHNRYNQGKNSSC

SEQ ID NO: 9140 - protein, 109 aa, Homo sapiens [sequence omitted]

SEQ ID NO: 9141 - protein, 117 aa, Homo sapiens
MVNPTVFFDISVSGKPLGHVSFRIFADKLSKTAQNFRALSTGEKGLDYKGSCFHRIIPGFMCQGGDFTYNNGTGGKSLYGEKFDDENFILKRIRPGILSMAKAGPNTNGSQFFICTA

SEQ ID NO: 9142 - protein, 110 aa, Homo sapiens
MELSGKCVGAFTVVCKDTDEAKNVESAVEDLDLSHTQLVSNLKKEGSTHIWQHITDKIGMFCFTGLKPDQVEQLTNEFSIYMVEDGHISVAGVTFSNMGYLAHAFHQVTK

SEQ ID NO: 9143 - protein, 142 aa, Homo sapiens [sequence omitted]

SEQ ID NO: 9144 - protein, 335 aa, Homo sapiens
MAYRLLLADPLGSPGASLPPCLVPLPEAFLPSLLAPSILWASPSAGASKARSPLSRSPALPLAQKREEAVVTGTESSLRVRPGIRTSGPCPPGLGKADWPGEAVDDVCGVMAGAPVQSQGSRNKLLLVSFDSFRWNYEQDVDTPNLDAMARDGVKARYMTPAFVTMTSPCHFTLVTALGEEPQHWDSEAFYSVISTEHRGLTMEFELSWVFLVAILQGDSWRTKEIECVHCEVQLVESGRGLAQPGGYLKLSGAASGFTVGSWYMSWIHQAPGKGLEWVSYISSSGCSTNYADSVKGRFTISTDNSKNTLYLQMNSLRVEDTAVYYCARDTVRGG

SEQ ID NO: 9145 - protein, 115 aa, Homo sapiens
MKYPDLCILMWDEWVPAKFKRLMMGWRGWQQHSIAEFSDSLPLLVLQRERDLKTKRLYRIIVTSTGGVSATRVRELWRLSAITGRIVESTGEKEKWSKRAQRVPGGKHTAAQTYS

SEQ ID NO: 9146 - protein, 705 aa, Homo sapiens [sequence omitted]

SEQ ID NO: 9147 - protein, 126 aa, Homo sapiens
MATLVISILPQIELDLTATQALVLAPTRELAQQIQKVVITPGDYMSTSCNACIGGTNVCTEVQKLQMEAPHVIMHTPGCMFDMVHWRYLSPKYIKMLVLDKADEMLSHGFKDQIYVIFQSLTATPR

SEQ ID NO: 9148 - protein, 126 aa, Homo sapiens; identical to SEQ ID NO: 9147

SEQ ID NO: 9149 - protein, 390 aa, Homo sapiens
MTQLSKKAASILSDTCALSHGDRLMIILPPTPEAYWICLACVRLGITFVPGSPQLTAKKIRYQLRMSKAQCIVANEAMAPVVNSAVSDCPTLKTKLLVSDKSYDGWLDFKKLIQVAPPKQTYMRTKSQDPMAIFFTKGTTGAPKMVEYSQYGLGMGFSQASRRWMDLQPTDVLWSLGDAFGGSLSLSAVLGTWFQGACVFLCHMPTFCPETVLNVLSRFPITTLSANPEMYQELLQHKCFTSYRFKSLKQCVAAGGPISPGVIEDWKRITKLDIYEGYGQTETGLLCATSKTIKLKPSSLGKPLPPYIVQIVDENSNLLPPGEEGNIAIRIKLNQPASLYCPHMVSWEEYASARGHMLYLTGDRGIMDEDGYFWWSGRVDDVANALGQRL

SEQ ID NO: 9150 - protein, 255 aa, Homo sapiens
MTAAEVRWLQESEVQSKHCLQKKLGGPKSQGDPNKLYSHSGAKERDASSDTLRQKSSFLAQDTQAPFRTGLSSLGQASPTYSSPPAHSQCLATGKGAKAKTRIPLAPDSLAWVGGILPATPPAREGIEKDNTVGEGRSPLAVTTGKARRIIQCDPCLSLLPGDLQGLSLRQAQGGDFTCHNDTGGKFIYGEKFDDENLIRKHKGPGILSMANAGPNTKGFQFFMCTTKTEWSDGKHVVFDKVKDSMDIMDAMEHS

SEQ ID NO: 9151 - protein, 87 aa, Homo sapiens [sequence omitted]

SEQ ID NO: 9152 - protein, 202 aa, Homo sapiens [sequence omitted]

SEQ ID NO: 9153 - protein, 218 aa, Homo sapiens
MPELAHGLSELLSHEGNVEEDFYSTFQVFQEEFGIIKSYNLKPGGDKISVTNQNRKEYVQLYTDFLLNKSIYKQFAAFYYGFHSVCASNALMLLRPEEVEILVCGSPDLDMHALQRSTQYDGYAKTDLTIKYFWDVVLGFPLDLQKKLLHFTTGSDRVPVGGMADLNFKISKNETSTNCLPVAHTCFNQLCLPPYKSKKDLKQKLIIGISNSEGFGLE

SEQ ID NO: 9154 - protein, 120 aa, Homo sapiens
MQQKTCYWGGGKKRVQMYPWLEKWEEDPETLLIIIKGAGGKAFCDGSDIRVISEAEKAKRKIAPVFFREEYMLNNAFGSCQKPYVALIHGITMGGRVGRQSMGSFKWLQKSVFLPCQKPQ

SEQ ID NO: 9155 - protein, 149 aa, Homo sapiens [sequence omitted]

SEQ ID NO: 9156 - protein, 134 aa, Homo sapiens [sequence omitted]

SEQ ID NO: 9157 - protein, 90 aa, Homo sapiens
MLKVLQLDCVDLYITEIPMAAKPEDKIYPIGENGKWLYHKSNLCATWETSEACKDAGLVKSLGVSSFNSRPAGAHPEQPRTQTQASQQRG

SEQ ID NO: 9158 - protein, 78 aa, Homo sapiens
MTGLTAYFGLLDICGVKGGETVMVNAAAGAVGSVLGQITKLKGCKVVGAVGSDEKTACLKKLGSDVFNYKTVESLKKL

SEQ ID NO: 9159 - protein, 99 aa, Homo sapiens [sequence omitted]

SEQ ID NO: 9160 - protein, 101 aa, Homo sapiens
MNDHQEKLEQADAQKGGEEGHVPDNSCRGLQADGVPERTVIQIIPIPKNKETRGQAISKESQTGNPSRKLGSPLTGSWDWAHEGDRYCSICNFLSIRGARC

SEQ ID NO: 9161 - protein, 135 aa, Homo sapiens
TLSITLIATSLISFYSIQIISFTLIGQLCIPTLININENNPSLINPIKCLIIGSIFTGFLIINSIIPTSSPQTTISLDLKLTALSVAILGLLLSIELSFITNTLKIKYSLQIFNFSNILGFYPITTHRTTHHKVY

SEQ ID NO: 9162 - protein, 612 aa, Homo sapiens
MAQNWKRTRIQGGILLFAFFLLEDNKPPFPSDENRPVEREKWITQKRKEVDHAEEKEDNCRGEELGKARGSRSPSLSVSGTNRREGENAEQKRLTVLVHLADSDLTWLRETLAHISSLFSPQILKGQLLLIHASSDAYPTVESIRDEAFHGEFYSKQNVDHAFLMSFATKFSDYFLLIEDNVFFAPNFVTHIHSRVTTMKSNSWVLMEFSNMGFLGKLFHSRDLPLLAHFLLLFYKEKPLDSLISHFHTLLVQESPILCRPFLFYCRVSYTAFDHKQKATALQKKNADGPNNPPGAVFTDMQVSDVHFPWEAYTLDESFFWTHNISIGNHLTVILNHPANLSRVQVMTGSIVEWEQFDFGQCEEWGSDGGVGGGNEVGAQPAPILFAASGVPLRGSRAIAHSALVFGLPPHQVWAPSLLGSFRQAQAGRTFPLLPALPQCDALEQDDHTREALPQKILHGPVHYFSDSLDAAPPRIGTHNPLRTCPDLMRDKKNQTPDQQDRIGYSADCRRGTRLKAGQNLLRVCTTEKKKQSRSPVPSMRSWGSETVGFLIGTGYFGGALSSLRPLPLSFQFCITKVTTLSSKDSMEPAEHGDLGLRAVINGSQWDLQEVI

SEQ ID NO: 9163 - protein, 366 aa, Homo sapiens
MRCSIRKCFILSVGIVFLWPFITLKIPKETEDDQNVMTVKGQAEQKRLTVLVHLADSDLTWLRETLAHISSLFSPQILKGQLLLIHASSDAYPTVESIRDEAFHGEFYSKQNVDHAFLMSFATKFSDYFLLIEDNVFFAPNFVTHIHSRVTTMKSNSWVLMEFSNMGFLGKLFHSRDLPLLAHFLLLFYKEKPLDSLISHFHTLLVQESPILCRPFLFYCRVSYTAFDHKQKATALQKKNADGPNNPPGAVFTDMQVSDVHFPWEAYTLDESFFWTHNISIGNHLTVILNHPANLSRVQVMTGSIVEWEHCTSFALLGHLSEGQMDQKILLKGMGYHVSCVRLVVKAGQAGGLMIRHIYLWEKNDK

SEQ ID NO: 9164 - protein, 369 aa, Homo sapiens
MKCKAAVAWEAGKPLSIEEIEVAPPKAHEVRIKIIATAVCHTDAYTLRGADPEGCFPVILGHEGAGIEESVGEGVTKLKAGDTVIPLYIPQCGECKFCLYPKTNLCQKIRVTQGKGLMPDGTSRFTCKGKTILRYMGTSTFSEYTVVADISVAKIDPLAPLDKLCLLGCGISAGDGAAVNTAKVEPGSVCAVFGLGGVGLAVITGCKVAGASRIIGVDINKDKFARAKEFGATECINPQGFSKPIQEGLIEMTDGGVDYSFECIGNVKVMRAALEAYHKGWGVSVVVGVAASGEEIATRPFQLVTGRTWKGTAFGGWKSVESVPKLVSEYMSKKIKVDEFVTHNLSFGEINKAFQLMHSGKSIRTVVKI

SEQ ID NO: 9165 - protein, 115 aa, Homo sapiens
MHTQDSEVVPVPAWPFSLVVFSCGGCWSVTAKMLRNLLALRQIGQRTISTASRRHFKNKVPEKQKLFQEDDEIPLYLKGGVADALLYRATMILTVGGTAYAIYELAVASFPKKQE

SEQ ID NO: 9166 - protein, 115 aa, Homo sapiens; identical to SEQ ID NO: 9165

SEQ ID NO: 9167 - protein, 104 aa, Homo sapiens
MRVGIHSGRVHCGVLGLRKWQFDVWSNDVTLANHMEAGGKAGRIHITKATLNYLNGDYEVEPGCGGERNAYLKEHSIETFLILRCTQKRKEEKAMIAKMNRQRT

SEQ ID NO: 9168 - protein, 266 aa, Homo sapiens
MPKVKSGAIGRRRGRQEQRRELKSAGGLMFNTGIGQHILKNPLIINSIIDKAALRPTDVVLEVGPGTGNMTVKLLEKAKKVVACELDPRLVAELHKRVQGTPVASKLQVLVGDVLKTDLPFFDTCVANLPYQISSPFVFKLLLHRPFFRCAILMFQREFALRLVAKPGDKLYCRLSINTQLLARVDHLMKVGKNNFRPPPKVESSVVRIEPKNPPPPINFQEWDGLVRITFVRKNKTLSAAFKSSAVQQLLEKNYRIHCSVHNIVS

SEQ ID NO: 9169 - protein, 152 aa, Homo sapiens
MPKVKSGAIGRRRGRQEQRRELKSAGGLMFNTGIGQHILKNPLIINSIIDKAALRPTDVVLEVGPGTGNMTVKLLEKAKKVVACELDPRLVAELHKRVQGTPVASKLQVLVGDVLKTDLPFFDTCVANLPYQVCYTYVSKRICPPTGCKTWR

SEQ ID NO: 9170 - protein, 266 aa, Homo sapiens; identical to SEQ ID NO: 9168

SEQ ID NO: 9171 - protein, 313 aa, Homo sapiens
MPKVKSGAIGRRRGRQEQRRELKSAGGLMFNTGIGQHILKNPLIINSIIDKAALRPTDVVLEVGPGTGNMTVKLLEKAKKVVACELDPRLVAELHKRVQGTPVASKLQVLVGDVLKTDLPFFDTCVANLPYQISSPFVFKLLLHRPFFRCAILMFQREFALRLVAKPGDKLYCRLSINTQLLARVDHLMKVGKNNFRPPPKVESSVVRIEPKNPPPPINFQEWDGLVRITFVRKNKTLSAAFKSSAVQQLLEKNYRIHCSVHNIIIPEDFSIADKIQQILTSTGFSDKRARSMDIDDFIRLLHGFNAEGIHFS

SEQ ID NO: 9172 - protein, 106 aa, Homo sapiens
MEEFAQSSDEDGVVFSLESAVQNLTEEKADLITSALAQIPQKVLWRFKGKKPTTLGANTQLYVWICQSDLHAITKYIFSHPRTSVSIATFNGHILFHPMDATEIYV

SEQ ID NO: 9173 - protein, 271 aa, Homo sapiens
MPCEPEALSAWATQAHSGSGSSFLAPDITTLSIPWLHQAPAMSNMVLLGSSSLGLAQKVVKRWGLELGKVVTKKFSNQEVSIVSGERMRDQAAYVIVKINDTLTSLAMTNVCKATWSSGMKAVLSCSPYAQQDQKDKSHPAVSAKLVANVFSVAGRSVGVDRMFLVGDIKDWVAVLVDDIPNACGTTHDSADKLLLDEVRRFSPHLVGRVGVSKLQPEAAAELRNCLYLWGWTAASSLEEPSEVGHTPVGVGCVALWWGSFRLGQATPPAP

SEQ ID NO: 9174 - protein, 146 aa, Homo sapiens
MSNMVLLGSSSLGLAQKVVKRWGLELGKVVTKKFSNQEVSIVSGERMRDQAAYVIVKINDTLTSLAMTNVCKATWSSGMKAVLSCSPYAQQDQKDKSHPAVSAKLVANVFSVAGLEHVSTMDLHTAQIQGFFSTAVNDLHVEPAVL

SEQ ID NO: 9175 - protein, 103 aa, Homo sapiens [sequence omitted]

SEQ ID NO: 9176 - protein, 123 aa, Homo sapiens
MAWTIASSSYSSGNMTLMFKPPDVLSSYITSDQLVGRYKSFIKDYSVVSTEDALDQDDRETWQKLSASAGYIHVTGNHLPVPSRKGTTKTTDKDSGNCLLLKVNQTDPMMESLQECKVAQAEG

SEQ ID NO: 9177 - protein, 183 aa, Homo sapiens
MSSPSPGKRRMDTDVVKLIESKHEVTILGGLNEFVVKFYGPQGTPYEGGVWKVRVDLPDKYPFKSPSIGFMNKIFHPNIDEASGTVCLDVINQTWTALYDLTNIFESFLPQLLAYPNPIDPLNGDAAAMYLHRPEEYKQKIKEYIQKYATEEALKEQEEGTGDSSSESSMSDFSEDEAQDMEL

SEQ ID NO: 9178 - protein, 113 aa, Homo sapiens
MNKIFHPNIDEASGTVCLDVINQTWTALYDLTNIFESFLPQLLAYPNPIDPLNGDAAAMYLHRPEEYKQKIKEYIQKYATEEALKEQEEGTGDSSSESSMSDFSEDEAQDMEL

SEQ ID NO: 9179 - protein, 183 aa, Homo sapiens; identical to SEQ ID NO: 9177

SEQ ID NO: 9180 - protein, 1716 aa, Homo sapiens
MSSRRKRAPPVRVDEEKRQQLHWNMHEDRRNEPIIISDDDEQPCPGSDTSSAHYIILSDSLKEEVAHRDKKRCSKVVSFSKPIEKEETVGIFSPLSVKLNIVISPYHFDNSWKAFLGELTLQLLPAQSLIENFSERSITLMSSESSNQFLIYVHSKGEDVEKQKKEPMSICDKGILVESSFSGEMLEDLGWLQKKRRIKLYQKPEGNHIIKVGIYLLEAGLAKLDFLSDANSRMKKFNQLMKKVMEKLHNSIIPDVLEEDEDDPESEPEGQDIDELYHFVKQTHQQETQSIQVDVQHPALIPVLRPYQREAVNWMLQQECFRSSPATESALHFLWREIVTSEGLKLYYNPYTGCIIREYPNSGPQLLGGILADEMGLGKTVEVLALILTHTRQDVKQDALTLPEGKVVNYFIPSHYFGGKLKKTEIQNIEFEPKEKVQCPPTRVMILTAVKEMNGKKGVSILSIYKYVSSIYRYDVQRNRSLLKRMLKCLIFEGLVKQIKGHGFSGTFTLGKNYKEEDICDKTKKQAVGSPRKIQKETRKSGNKDTDSEYLPSDTSDDDDDPYYYYYKSRRNRSKLRKKLVPSTKKGKSQPFINPDSQGHCPATSDSGITDVAMSKSTCISEFNQEHETEDCAESLNHADSDVPPSNTMSPFNTSDYRFECICGELDQIDRKPRVQCLKCHLWQHAKCVNYDEKNLKIKPFYCPHCLVAMEPVSTRATLIISPSSICHQWVDEINRHVRSSSLRVLVYQGVKKDGFLQPHFLAEQDIVIITYDVLRSELNYVDIPHSNSEDGRRLRNQKRYMAIPSPLVAVEWWRICLDEAQMVECPTVKAAEMAQRLSGINRWCISGTPVQRGLEDLFGLVVFLGIEPYCVKHWWVRLLYRPYCKKNPQHLYSFIAKILWRSAKKDVIDQIQIPPQTEEIHWLHFSPVERHFYHRQHEVCCQDVVVKLRKISDWALKLSSLDRRTVTSILYPLLRLRQACCHPQAVRGEFLPLQKSFEQSTFSFSTMTMEELLTSLQKKCGTECEEAHRQLVCALNGLAGIHIIKGEYALAAELYREVLRSSEEHKGKLKTDSLQRLHATHNLMELLIARHPGIPPTLRDGRLEEEAKQLREHYMSKCNTEVAEAQQALYPVQQTIHELQRKIHSNSPWWLNVIHRAIEFTIDEELVQRVRNEITSNYKQQTGKLSMSEKFRDCRGLQFLLTTQMEELNKCQKLVREAVKNLEGPPSRNVIESATVCHLRPARLPLNCCVFCKADELFTEYESKLFSNTVKGQTAIFEEMIEDEEGLVDDRAPTTTRGLWAISETERSMKAILSFAKSHRFDVEFVDEGSTSMDLFEAWKKEYKLLHEYWMALRNRVSAVDELAMATERLRVRDPREPKPNPPVLHIIEPHEVEQNRIKLLNDKAVATSQLQKKLGQLLYLTNLEKSQDKTSGGVNPEPCPICARQLGKQWAVLTCGHCFCNECISIIIEQYSVGSHRSSIKCAICRQTTSHKEISYVFTSEKANQEEDIPVKGSHSTKVEAVVRTLMKIQLRDPGAKALVFSTWQDVLDIISKALTDNNMEFAQISRVKTFQENLSAFKRDPQINILLLPLHTGSNGLTIIEATHVLLVEPILNPAHELQAIGRVHRIGQTKPTIVHRFLIKATIEERMQAMLKTAERRFFEEQALFCFHDITPFSHPWSLTTAILQLRDLVICELFFIYFKNFLICFLSSFSI

SEQ ID NO: 9181 - protein, 1507 aa, Homo sapiens
MSSRRKRAPPVRVDEEKRQQLHWNMHEDRRNEPIIISDDDEQPCPGSDTSSAHYIILSDSLKEEVAHRDKKRCSKVVSFSKPIEKEETVGIFSPLSVKLNIVISPYHFDNSWKAFLGELTLQLLPAQSLIENFSERSITLMSSESSNQFLIYVHSKGEDVEKQKKEPMSICDKGILVESSFSGEMLEDLGWLQKKRRIKLYQKPEGNHIIKVGIYLLEAGLAKLDFLSDANSRMKKFNQLMKKVMEKLHNSIIPDVLEEDEDDPESEPEGQDIDELYHFVKQTHQQETQSIQVDVQHPALIPVLRPYQREAVNWMLQQECFRSSPATESALHFLWREIVTSEGLKLYYNPYTGCIIREYPNSGPQLLGGILADEMGLGKTVEVLALILTHTRQDVKQDALTLPEGKVVNYFIPSHYFGGKLKKTEIQNIEFEPKEKVQCPPTRVMILTAVKEMNGKKGVSILSIYKYVSSIYRYDVQRNRSLLKRMLKCLIFEGLVKQIKGHGFSGTFTLGKNYKEEDICDKTKKQAVGSPRKIQKETRKSGNKDTDSEYLPSDTSDDDDDPYYYYYKSRRNRSKLRKKLVPSTKKGKSQPFINPDSQGHCPATSDSGITDVAMSKSTCISEFNQEHETEDCAESLNHADSDVPPSNTMSPFNTSDYRFECICGELDQIDRKPRVQCLKCHLWQHAKCVNYDEKNLKIKPFYCPHCLVAMEPVSTRATLIISPSSICHQWVDEINRHVRSSSLRVLVYQGVKKDGFLQPHFLAEQDIVIITYDVLRSELNYVDIPHSNSEDGRRLRNQKRYMAIPSPLVAVEWWRICLDEAQMVECPTVKAAEMAQRLSGINRWCISGTPVQRGLEDLFGLVVFLGIEPYCVKHWWVRLLYRPYCKKNPQHLYSFIAKILWRSAKKDVIDQIQIPPQTEEIHWLHFSPVERHFYHRQHEVCCQDVVVKLRKISDWALKLSSLDRRTVTSILYPLLRLRQACCHPQAVRGEFLPLQKSTMTMEELLTSLQKKCGTECEEAHRQLVCALNGLAGIHIIKGEYALAAELYREVLRSSEEHKGKLKTDSLQRLHATHNLMELLIARHPGIPPTLRDGRLEEEAKQLREHYMSKCNTEVAEAQQALYPVQQTIHELQRKIHSNSPWWLNVIHRAIEFTIDEELVQRVRNEITSNYKQQTGKLSMSEKFRDCRGLQFLLTTQMEELNKCQKLVREAVKNLEGPPSRNVIESATVCHLRPARLPLNCCVFCKADELFTEYESKLFSNTVKGQTAIFEEMIEDEEGLVDDRAPTTTRGLWAISETERSMKAILSFAKSHRFDVEFVDEGSTSMDLFEAWKKEYKLLHEYWMALRNRVSAVDELAMATERLRVRDPREPKPNPPVLHIIEPHEVEQNRIKLLNDKAVATSQLQKKLGQLLYLTNLEKSQDKTSGGVNPEPCPICARQLGKQWAVLTCGHCFCNECISIIIEQYSVGSHRSSIKCAICRQTTSHKEISYVFTSEKANQEEDIPVKVK

SEQ ID NO: 9182 - protein, 1659 aa, Homo sapiens
MSSRRKRAPPVRVDEEKRQQLHWNMHEDRRNEPIIISDDDEQPCPGSDTSSAHYIILSDSLKEEVAHRDKKRCSKVVSFSKPIEKEETVGIFSPLSVKLNIVISPYHFDNSWKAFLGELTLQLLPAQSLIENFSERSITLMSSESSNQFLIYVHSKGEDVEKQKKEPMSICDKGILVESSFSGEMLEDLGWLQKKRRIKLYQKPEGNHIIKVGIYLLEAGLAKLDFLSDANSRMKKFNQLMKKVMEKLHNSIIPDVLEEDEDDPESEPEGQDIDELYHFVKQTHQQETQSIQVDVQHPALIPVLRPYQREAVNWMLQQECFRSSPATESALHFLWREIVTSEGLKLYYNPYTGCIIREYPNSGPQLLGGILADEMGLGKTVEVLALILTHTRQDVKQDALTLPEGKVVNYFIPSHYFGGKLKKTEIQNIEFEPKEKVQCPPTRVMILTAVKEMNGKKGVSILSIYKYVSSIYRYDVQRNRSLLKRMLKCLIFEGLVKQIKGHGFSGTFTLGKNYKEEDICDKTKKQAVGSPRKIQKETRKSGNKDTDSEYLPSDTSDDDDDPYYYYYKSRRNRSKLRKKLVPSTKKGKSQPFINPDSQGHCPATSDSGITDVAMSKSTCISEFNQEHETEDCAESLNHADSDVPPSNTMSPFNTSDYRFECICGELDQIDRKPRVQCLKCHLWQHAKCVNYDEKNLKIKPFYCPHCLVAMEPVSTRATLIISPSSICHQWVDEINRHVRSSSLRVLVYQGVKKDGFLQPHFLAEQDIVIITYDVLRSELNYVDIPHSNSEDGRRLRNQKRYMAIPSPLVAVEWWRICLDEAQMVECPTVKAAEMAQRLSGINRWCISGTPVQRGLEDLFGLVVFLGIEPYCVKHWWVRLLYRPYCKKNPQHLYSFIAKILWRSAKKDVIDQIQIPPQTEEIHWLHFSPVERHFYHRQHEVCCQDVVVKLRKISDWALKLSSLDRRTVTSILYPLLRLRQACCHPQAVRGEFLPLQKSFEQSTFSFSTMTMEELLTSLQKKCGTECEEAHRQLVCALNGLAGIHIIKGEYALAAELYREVLRSSEEHKGKLKTDSLQRLHATHNLMELLIARHPGIPPTLRDGRLEEEAKQLREHYMSKCNTEVAEAQQALYPVQQTIHELQRKIHSNSPWWLNVIHRAIEFTIDEELVQRVRNEITSNYKQQTGKLSMSEKGLQFLLTTQMEELNKCQKLVREAVKNLEGPPSRNVIESATVCHLRPARLPLNCCVFCKADELFTEYESKLFSNTVKGQTAIFEEMIEDEEGLVDDRAPTTTRGLWAISETERSMKAILSFAKSHRFDVEFVDEGSTSMDLFEAWKKEYKLLHEYWMALRNRVSAVDELAMATERLRVRDPREPKPNPPVLHIIEPHEVEQNRIKLLNDKAVATSQLQKKLGQLLYLTNLEKSQDKTSGGVNPEPCPICARQLGKQWAVLTCGHCFCNECISIIIEQYSVGSHRSSIKCAICRQTTSHKEISYVFTSEKANQEEDIPVKGSHSTKVEAVVRTLMKIQLRDPGAKALVFSTWQDVLDIISKALTDNNMEFAQISRVKTFQENLSAFKRDPQINILLLPLHTGSNGLTIIEATHVLLVEPILNPAHELQAIGRVHRIGQTKPTIVHRFLIKATIEERMQAMLKTAERSIYI

SEQ ID NO: 9183 - protein, 1687 aa, Homo sapiens
MSSRRKRAPPVRVDEEKRQQLHWNMHEDRRNEPIIISDDDEQPCPGSDTSSAHYIILSDSLKEEVAHRDKKRCSKVVSFSKPIEKEETVGIFSPLSVKLNIVISPYHFDNSWKAFLGELTLQLLPAQSLIENFSERSITLMSSESSNQFLIYVHSKGEDVEKQKKEPMSICDKGILVESSFSGEMLEDLGWLQKKRRIKLYQKPEGNHIIKVGIYLLEAGLAKLDFLSDANSRMKKFNQLMKKVMEKLHNSIIPDVLEEDEDDPESEPEGQDIDELYHFVKQTHQQETQSIQVDVQHPALIPVLRPYQREAVNWMLQQECFRSSPATESALHFLWREIVTSEGLKLYYNPYTGCIIREYPNSGPQLLGGILADEMGLGKTVEVLALILTHTRQDVKQDALTLPEGKVVNYFIPSHYFGGKLKKTEIQNIEFEPKEKVQCPPTRVMILTAVKEMNGKKGVSILSIYKYVSSIYRYDVQRNRSLLKRMLKCLIFEGLVKQIKGHGFSGTFTLGKNYKEEDICDKTKKQAVGSPRKIQKETRKSGNKDTDSEYLPSDTSDDDDDPYYYYYKSRRNRSKLRKKLVPSTKKGKSQPFINPDSQGHCPATSDSGITDVAMSKSTCISEFNQEHETEDCAESLNHADSDVPPSNTMSPFNTSDYRFECICGELDQIDRKPRVQCLKCHLWQHAKCVNYDEKNLKIKPFYCPHCLVAMEPVSTRATLIISPSSICHQWVDEINRHVRSSSLRVLVYQGVKKDGFLQPHFLAEQDIVIITYDVLRSELNYVDIPHSNSEDGRRLRNQKRYMAIPSPLVAVEWWRICLDEAQMVECPTVKAAEMAQRLSGINRWCISGTPVQRGLEDLFGLVVFLGIEPYCVKHWWVRLLYRPYCKKNPQHLYSFIAKILWRSAKKDVIDQIQIPPQTEEIHWLHFSPVERHFYHRQHEVCCQDVVVKLRKISDWALKLSSLDRRTVTSILYPLLRLRQACCHPQAVRGEFLPLQKSFEQSTFSFSTMTMEELLTSLQKKCGTECEEAHRQLVCALNGLAGIHIIKGEYALAAELYREVLRSSEEHKGKLKTDSLQRLHATHNLMELLIARHPGIPPTLRDGRLEEEAKQLREHYMSKCNTEVAEAQQALYPVQQTIHELQRKIHSNSPWWLNVIHRAIEFTIDEELVQRVRNEITSNYKQQTGKLSMSEKGLQFLLTTQMEELNKCQKLVREAVKNLEGPPSRNVIESATVCHLRPARLPLNCCVFCKADELFTEYESKLFSNTVKGQTAIFEEMIEDEEGLVDDRAPTTTRGLWAISETERSMKAILSFAKSHRFDVEFVDEGSTSMDLFEAWKKEYKLLHEYWMALRNRVSAVDELAMATERLRVRDPREPKPNPPVLHIIEPHEVEQNRIKLLNDKAVATSQLQKKLGQLLYLTNLEKSQDKTSGGVNPEPCPICARQLGKQWAVLTCGHCFCNECISIIIEQYSVGSHRSSIKCAICRQTTSHKEISYVFTSEKANQEEDIPVKGSHSTKVEAVVRTLMKIQLRDPGAKALVFSTWQDVLDIISKALTDNNMEFAQISRVKTFQENLSAFKRDPQINILLLPLHTGSNGLTIIEATHVLLVEPILNPAHELQAIGRVHRIGQTKPTIVHRFLIKATIEERMQAMLKTAERSHTNSSAKHSEASVLTVADLADLFTKETEELE

SEQ ID NO: 9184 - protein, 98 aa, Homo sapiens
MAEQSDEAVKYYTLEEIQKHNHSKSTWLILHHKVYDLTKFLEEHPGGEEVLREQAGGDATENFEDVGHSTDAREMSKTFIIGELHPDDRPKLNKPPEP

SEQ ID NO: 9185 - protein, 134 aa, Homo sapiens
MAEQSDEAVKYYTLEEIQKHNHSKSTWLILHHKVYDLTKFLEEHPGGEEVLREQAGGDATENFEDVGHSTDAREMSKTFIIGELHPDDRPKLNKPPETLITTIDSSSSWWTNWVIPAISAVAVALMYRLYMAED

SEQ ID NO: 9186 - protein, 124 aa, Homo sapiens [sequence omitted]

SEQ ID NO: 9187 - protein, 298 aa, Homo sapiens
MTLAPSDQDLFVFRSGPPAAAGFSDVAATAENRQTFMQSAIQFLRKYNFDGLDIDWEYPGNRGSPADTQQLFTILLKEMYEAFEQESTRSKKPRLLMSAAVSAGKGTIETACQIPEMSSSTPSRKEPPRCGMPPGRCLMSTRGTSGSGTTTPRASPSSTPSMTPPLAAWPPPLRPRPSLLMDGASPPSGDPPPVQATTVWSGTEAGQSPPSPDERHRESLNLPTEKLFVSRSEVLLTYTVPQCLCLMAMSFTAIFLKLQKGLTKIHLAIPSTCVKGFGAIYRKDLEEKEGSYSALSQC

SEQ ID NO: 9188 - protein, 1469 aa, Homo sapiens
  VARIANT (1)...(1469): Xaa = Any Amino Acid
MSVSTMPVASSEASTLSTTPVDTSTPVTTSSEASSSSTTPEGTTITSMSVSTTLVASSEASTLSTTPVDSNTPVTTSTEATSSSTTAEGTSMPTSTYTEGSTPLTSMPVNTTLVASSEASTLSTTPVDTSTPVTTSTEASSSPTTADGASMPTSTPSEGSTPLTSMPVSKTLLTSSEASTLSTTPLDTSTHITTSTEASCSPTTTEGTSMPISTPSEGSPLLTSIPVSITPVTSPEASTLSTTPVDSNSPVTTSTEVSSSPTPAEATPVDTSTPVTTSTEATSSPTTAEGTSIPTSTPSEGTTPLTSTPVSHTLVANSEASTLSTTPVDSNTPLTTSTEASSPPPTAEGTSMPTSTPSEGSTPLTRMPVSTTMVASSETSTLSTTPADTSTPVTTYSQASSSSTTADGTSMPTSTYSEGSTPLTSVPVSTRLVVSSEASTLSTTPVDTSTPVTTSTEASSSPTTAEGTSIPTSPPSEGTTPLASMPVSTTLVVSSEANTLSTTPVDSKTQVATSTEASSPPPTAEVTSMPTSTPGERSTPLTSMPVRHTPVASSEASTLSTTPVDTSTPVTTSAETSSSPTTAEAGSSPTTADDTSMPTSTYSEGSTPLTSVPVSTMPVVSSEASTHSTTPVDTSTPVTTSTEASSSPTTAEGTSIPTSPPSEGTTPLASMPVSTTPVVSSEAGTLSTTPVDTSTPMTTSTEASSSPTTAEDIVVPISTASEGSTLLTSIPVSTTPVASPEASTLSTTPVDSNSPVVTSTEISSSATSAEVASSEASTVSTTAVDTSIPVTTSTEASSSPTTAEVTSMPTSTPSETSTPLTSMPVNHTPVASSEAGTLSTTPVDTSTPVTTSTKASSSPTTAEGVPVSTTPVTSSAISTLSTTPVDTSTPVTTSTEAHSSPTTSEGTSMPTSTPSEGSTPLTYMPVSTMLVVSSEDSTLSATPVDTSTPVTTSTEATSSTTAEGTSIPTSTPSEGMTPLTSVPVSNTPVASSEASILSTTPVDSNTPLTTSTEASSSPPTAEGTSMPTSTPSEGSTPLTSMPVSTTTVASSETSTLSTTPADTSTPVTTYSQASSSPPIADGTSMPTSTYSEGSTPLTNMSFSTTPVVSSEASTLSTTPVDTSTPVTTSTEASLSPTTAEGTSIPTSSPMRCLNGGTWKENFCDCSTGFGDGCQNTASRCKNGGTWDGLKCQCPNLYYGELCEEVVSSIDIGPPETISAQMELTVTVTSVKFTEELKNHSSQEFQEFKQTFTEQMNIVYSGIPEYVGVNITKLRLGSVVVEHDVLLRTKYTPEYKTVLDNATEVVKEKITKVTTQQIMINDICSGELXCNLGKCQMSLSGPQCLCVTTETHWYSGETCNQGTQKSLVYGLVGAGVVLMLIILVALLMLVFRSKREVKRQKYRLSQLYKWQEEDSGPAPGTFQNIGFDICQDDDSIHLESIYSNFQPSLRHIDPETKIRIQRPQVMTTSF

SEQ ID NO: 9189 - protein, 594 aa, Homo sapiens
MWCLLRGLGRPGALARGALGQQQSLGARALASAGSESRDEYSYVVVGAGSAGCVLAGRLTEDPAERVLLLEAGPKDVRAGSKRLSWKIHMPAALVANLCDDRYNWCYHTEVQRGLDGRVLYWPRGRVWGGSSSLNAMVYVRGHAEDYERWQRQGARGWDYAHCLPYFRKAQGHELGASRYRGADGPLRVSRGKTNHPLHCAFLEATQQAGYPLTEDMNGFQQEGFGWMDMTIHEGKRWSAACAYLHPALSRTNLKAEAETLVSRVLFEGTRAVGVEYVKNGQSHRAYASKEVILSGGAINSPQLLMLSGIGNADDLKKLGIPVVCHLPGVGQNLQDHLEIYIQQACTRPITLHSAQKPLRKVCIGLEWLWKFTGEGATAHLETGGFIRSQPGVPHPDIQFHFLPSQVIDHGRVPTQQEAYQVHVGPMRGTSVGWLKLRSANPQDHPVIQPNYLSTETDIEDFRLCVKLTREIFAQEALAPFRGKELQPGSHIQSDKEIDAFVRAKADSAYHPSCTCKMGQPSDPTAVVDPQTRVLGVENLRVVDASIMPSMVSGNLNAPTIMIAEKAADIIKGQPALWDKDVPVYKPRTLATQR

SEQ ID NO: 9190 - protein, 235 aa, Homo sapiens
  VARIANT (1)...(235): Xaa = Any Amino Acid
MWCLLRGLGRPGALARGALGQQQSLGARALASAGSESRDEYSYVVVGAGSAGCVLAGRLTEDPAERVLLLEAGPKDVRAGSKRLSWKIHMPAALVANLCDDRYNWCYHTEVQRGLDGRVLYWPRGRVWGGSSSLNAMVYVRGHAEDYERWQRQGARGWDYAHCLPYFRKAQGHELGASRYRGADGPLRVSRGKTNHPLHCAFLEATQQAGYPLTEDMNGFQQEGFGWMDMTIHEX

SEQ ID NO: 9191 - protein, 594 aa, Homo sapiens; identical to SEQ ID NO: 9189

SEQ ID NO: 9192 - protein, 712 aa, Homo sapiens [sequence omitted]

SEQ ID NO: 9193 - protein, 191 aa, Homo sapiens
MEAKAAPKPAASGACSVSAEETEKWMEEAMHMAKEALENTEVPVGCLMVYNNEVVGKGRNEVNQTKNATRHAEMVAIDQVLDWCRQSGKSPSEVFEHTVLYVTVEPCIMCAAALRLMKIPLVVYGCQNERFGGCGSVLNIASADLPNTGRPFQCIPGYRAEEAVEMLKTFYKQENPNAPKSKVRKKECQKS

SEQ ID NO: 9194 - protein, 144 aa, Homo sapiens
MAGQKLALKIIDWVTSWESISRNQKAIANSLTSWNEILTSRLAILPENKPSIDWTYYKASVAKAGLVDDFEKKFNALKFPVPEDKYTAQVDAEEKEDVKTCAEWMSLSKARIGQYEKQLEKMRNLIPFDQTTTEDLNEAFPETK

SEQ ID NO: 9195 - protein, 467 aa, Homo sapiens
MTDEEYIINRAIRKPDLKVRCIKVQKIRYVWNYLEGQFQKIGSLEDWLSSAKIHQKFGSGLTREEQEIRRLICGPNTIDVEVTPIWKLLIKEVLNPFYIFQLFSVCLWFSEDYKEYAFAIIIMSIISISLTVYDLRELNRCWIVFLWENNLTQLCLLPLSAGVQELESRVLVPGDLLILTGNKVLMPCDAVLIEGSCVVDEGMLTGESIPVTKTPLPKMDSSVPWKTQSEADYKRHVLFCGTEVIQAKAACSGTVRAVVLQTGFNTAKGDLVRSILYPKPVNFQLYRDAIRFLLCLVGTATIGMIYTLCVYVLSGEPPEEVVRKALDVITIAVPPALPAALTTGIIYAQRRLKKRGIFCISPQRINVCGQLNLVCFDKTGTLTRDGLDLWGVVSCDRNGFQEVHSFASGQALPWGPLCAAMASCHSLILLDGTIQGDPLDLKMFEATTWVSLCSSENLRSFFNARAT

SEQ ID NO: 9196 - protein, 1067 aa, Homo sapiens
MTDEEYIINRAIRKPDLKVRCIKVQKIRYVWNYLEGQFQKIGSLEDWLSSAKIHQKFGSGLTREEQEIRRLICGPNTIDVEVTPIWKLLIKEVLNPFYIFQLFSVCLWFSEDYKEYAFAIIIMSIISISLTVYDLRELNRCWIVFLWENNLTQLCLLPLSAGVQELESRVLVPGDLLILTGNKVLMPCDAVLIEGSCVVDEGMLTGESIPVTKTPLPKMDSSVPWKTQSEADYKRHVLFCGTEVIQAKAACSGTVRAVVLQTGFNTAKGDLVRSILYPKPVNFQLYRDAIRFLLCLVGTATIGMIYTLCVYVLSGEPPEEVVRKALDVITIAVPPALPAALTTGIIYAQRRLKKRGIFCISPQRINVCGQLNLVCFDKTGTLTRDGLDLWGVVSCDRNGFQEVHSFASGQALPWGPLCAAMASCHSLILLDGTIQGDPLDLKMFEATTWEMAFSGDDFHIKGVPAHAMVVKPCRTASQVPVEGIAILHQFPFSSALQRMTVIVQEMGGDRLAFMKGAPERVASFCQPETVPTSFVSELQIYTTQGFRVIALAYKKLENDHHATTLTRETVESDLIFLGLLILENRLKEETKPVLEELISARIRTVMITGDNLQTAITVARKSGMVSESQKVILIEANETTGSSSASISWTLVEEKKHIMYGNQDNYINIRDEVSDKGREGSYHFALTGKSFHVISQHFSSLLPKILINGTIFARMSPGQKSSLVEEFQKLDYFVGMCGDGANDCGALKMAHVGISLSEQEASVASPFTSKTPNIECVPHLIKEGRAALVTSFCMFKYMALYSMIQYVGVLLLYWETNSLSNYQFLFQDLAITTLIGVTMNLNGAYPKLVPFRPAGRLISPPLLLSVIFNILLSLAMHIAGFILVQRQPWYSVEIHSACTVQNESISELTMSPTAPEKMESNSTFTSFENTTVWFLGTINCITVALVFSKGKPFRQPTYTNYIFVLVLIIQLGVCLFILFADIPELYRRLDLLCTPVLWRASIVIMLSLNFIVSLVAESKSQYRIWQRDLANDPSWPPLNQTSHSDMPECGRGVSYSNPVFESNEEQL

SEQ ID NO: 9197 - protein, 1087 aa, Homo sapiens
MTDEEYIINRAIRKPDLKVRCIKVQKIRYVWNYLEGQFQKIGSLEDWLSSAKIHQKFGSGLTREEQEIRRLICGPNTIDVEVTPIWKLLIKEVLNPFYIFQLFSVCLWFSEDYKEYAFAIIIMSIISISLTVYDLRELNRCWIVFLWENNLTQLCLLPLSAGVQELESRVLVPGDLLILTGNKVLMPCDAVLIEGSCVVDEGMLTGESIPVTKTPLPKMDSSVPWKTQSEADYKRHVLFCGTEVIQAKAACSGTVRAVVLQTGFNTAKGDLVRSILYPKPVNFQLYRDAIRFLLCLVGTATIGMIYTLCVYVLSGEPPEEVVRKALDVITIAVPPALPAALTTGIIYAQRRLKKRGIFCISPQRINVCGQLNLVCFDKTGTLTRDGLDLWGVVSCDRNGFQEVHSFASGQALPWGPLCAAMASCHSLILLDGTIQGDPLDLKMFEATTWEMAFSGDDFHIKGVPAHAMVVKPCRTASQVPVEGIAILHQFPFSSALQRMTVIVQEMGGDRLAFMKGAPERVASFCQPETVPTSFVSELQIYTTQGFRVIALAYKKLENDHHATTLTRETVESDLIFLGLLILENRLKEETKPVLEELISARIRTVMITGDNLQTAITVARKSGMVSESQKVILIEANETTGSSSASISWTLVEEKKHIMYGNQDNYINIRDEVSDKGREGSYHFALTGKSFHVISQHFSSLLPKILINGTIFARMSPGQKSSLVEEFQKLDYFVGMCGDGANDCGALKMAHVGISLSEQEASVASPFTSKTPNIECVPHLIKEGRAALVTSFCMFKYMALYSMIQYVGVLLLYWETNSLSNYQFLFQDLAITTLIGVTMNLNGAYPKLVPFRPAGRLISPPLLLSVIFNILLSLAMHIAGFILVQRQPWYSVEIHSACTVQNESISELTMSPTAPEKMESNSTFTSFENTTVWFLGTINCITVALVFSKGKPFRQPTYTNYIFVLVLIIQLGVCLFILFADIPELYRRLDLLCTPVLWRASIVIMLSLNFIVSLVAEEAVIENRALWMMIKRCFGYQSKSQYRIWQRDLANDPSWPPLNQTSHSDMPECGRGVSYSNPVFESNEEQL

SEQ ID NO: 9198 - protein, 197 aa, Homo sapiens
MGGFMEDLRKCKIIFIIGGPGSGKGTQCEKLVEKYGFTHLSTGELLREELASESERSKLIRDIMERGDLVPSGIVLELLKEAMVASLGDTRGFLIDGYPREVKQGEEFGRRIGDPQLVICMDCSADTMTNRLLQRSRSSLPVDDTTKTIAKRLEAYYRASIPVIAYYETKTQLHKINAEGTPEDVFLQLCTAIDSIF

SEQ ID NO: 9199 - protein, 560 aa, Homo sapiens [sequence omitted]

SEQ ID NO: 9200 - protein, 468 aa, Homo sapiens
MNTNDAKEYLARREIPQLFESLLNGLMCSKPEDPVEYLESCLQKVKELGGCDKVKWDTFVSQEKKTLPPLNGGQSRRSFLRNVMPENSNFPYRRYDRLPPIHQFSIESDTDLSETAELIEEYEVFDPTRPRPKIILVIGGPGSGKGTQSLKIAERYGFQYISVGELLRKKIHSTSSNRKWSLIAKIITTGELAPQETTITEIKQKLMQIPDEEGIVIDGFPRDVAQALSFEDQICTPDLVVFLACANQRLKERLLKRAEQQGRPDDNVKATQRRLMNFKQNAAPLVKYFQEKGLIMTFDADRDEDEVFYDISMAVDNKLFPNKEAAAGSSDLDPSMILDTGEIIDTGSDYEDQQGDDQLNVFGEDTMGGFMEDLRKCKIIFIIGGPGSGKGTQCEKLVEKYGFTHLSTGELLREELASESERSKLIRDIMEHQRTFFFNSAQLLTLFSEGKNACLLEWKQKNIKKFIP

SEQ ID NO: 9201 - protein, 562 aa, Homo sapiens
MNTNDAKEYLARREIPQLFESLLNGLMCSKPEDPVEYLESCLQKVKELGGCDKVKWDTFVSQEKKTLPPLNGGQSRRSFLRNVMPENSNFPYRRYDRLPPIHQFSIESDTDLSETAELIEEYEVFDPTRPRPKIILVIGGPGSGKGTQSLKIAERYGFQYISVGELLRKKIHSTSSNRKWSLIAKIITTGELAPQETTITEIKQKLMQIPDEEGIVIDGFPRDVAQALSFEDQICTPDLVVFLACANQRLKERLLKRAEQQGRPDDNVKATQRRLMNFKQNAAPLVKYFQEKGLIMTFDADRDEDEVFYDISMAVDNKLFPNKEAAAGSSDLDPSMILDTGEIIDTGSDYEDQGDDQLNVFGEDTMGGFMEDLRKCKIIFIIGGPGSGKGTQCEKLVEKYGFTHLSTGELLREELASESERSKLIRDIMERGDLVPSGIVLELLKEAMVASLGDTRGFLIDGYPREVKQGEEFGRRIGDPQLVICMDCSADTMTNRLLQRSRSSLPVDDTTKTIAKRLEAYYRASIPVIAYYETKTQLHKINAEGTPEDVFLQLCTAIDSIF

SEQ ID NO: 9202 - protein, 330 aa, Homo sapiens
MRTGGGPGGDVRAPRAQGEATPDAALLSTAPESLTLALETRTRQPRGPGSVCPAPGDGWLWTRQDKLVRRRLAVDSAGQIEIWCPQGKGEPVPCQATSNLKPVYGWQEGLGPSELHTLVQDMGIGRSCMKRFSVSVIVETVVVPRKKFLSIKFKEDFSAGCGPRGGGCGIKLKTQNQRKKEAAVRKQDKNISEIQPGAPLVTSLPGLHCLPRRAFATLGTSSAAAAAANRKRAAYYSAAGPRPGADRHSSPPQEPGAGRVWGRYRRAPSVRWEPGVLGVLSAPQLWRPPVVRAAGSCRGERLHPRDAWAERRSQNGSREPRSSVEGWLLS

SEQ ID NO: 9203 - protein, 1108 aa, Homo sapiens
MYQLEDESAHLDEMPLMMSEEGFENEESDYHTLPRARIMQRKRGLEWFVCDGWKFLCTSCCGWLINICRRKKELKARTVWLGCPEKCEEKHPRNSIKNQKYNVFTFIPGVLYEQFKFFLNLYFLVISCSQFVPALKIGYLYTYWAPLGFVLAVTMTREAIDEFRRFQRDKEVNSQLYSKLTVRGKVQVKSSDIQVGDLIIVEKNQRIPSDMVFLRTSEKAGSCFIRTDQLDGETDWKLKVAVSCTQQLPALGDLFSISAYVYAQKPQMDIHSFEGTFTREDSDPPIHESLSIENTLWASTIVASGTVIGVVIYTGKETRSVMNTSNPKNKVGLLDLELNRLTKALFLALVALSIVMVTLQGFVGPWYRNLFRFLLLFSYIIPISLRVNLDMGKAVYGWMMMKDENIPGTVVRTSTIPEELGRLVYLLTDKTGTLTQNEMIFKRLHLGTVSYGADTMDEIQSHVRDSYSQMQSQAGGNNTGSTPLRKAQSSAPKVRKSVSSRIHEAVKAIVLCHNVTPVYESRAGVTEETEFAEADQDFSDENRTYQASSPDEVALVQWTESVGLTLVSRDLTSMQLKTPSGQVLSFCILQLFPFTSESKRMGVIVRDESTAEITFYMKGADVAMSPIVQYNDWLEEECGNMAREGLRTLVVAKKALTEEQYQDFESRYTQAKLSMHDRSLKVAAVVESLEREMELLCLTGVEDQLQADVRPTLEMLRNAGIKIWMLTGDKLETATCIAKSSHLVSRTQDIHIFRQVTSRGEAHLELNAFRRKHDCALVISGDSLEVCLKYYEHEFVELACQCPAVVCCRCSPTQKARIVTLLQQHTGRRTCAIGDGGNDVSMIQAADCGIGIEGKEGKQASLAADFSITQFRHIGRLLMVHGRNSYKRSAALGQFVMHRGLIISTMQAVFSSVFYFASVPLYQGFLMVGYATIYTMFPVFSLVLDQDVKPEMAMLYPELYKDLTKGRSLSFKTFLIWVLISIYQGGILMYGALVLFESEFVHVVAISFTALILTELLMVALTVRTWHWLMVVAEFLSLGCYVSSLAFLNEYFGIGRVSFGAFLDVAFITTVTFLWKVSAITVVSCLPLYVLKYLRRKLSPPSYCKLAS

SEQ ID NO: 9204 - protein, 240 aa, Homo sapiens
MQGDSSLDFSSDHGGSDIQGDSSLDFSGDHGGSDIQGDLSQDFRGDHGGSDIQGDSSQEFSGDHGGSDIQGDLSQDFRGDHGGSDIQGDSSQEFSGDHGGSDIQGDSSQDFSGDWERGGPRNKGLEVTNPRAARPGLAGSCFSSTSTQSLNIIEERVLKLRERRSVALLEQKHPEVAQILRKVFRENGRAQGEATPDAALLSTAPESLTLALETRTRQPRGPGSVCPAPGSLIAGAKALT

SEQ ID NO: 9205 - protein, 193 aa, Homo sapiens
MSPCHGGRRLRVEESTEQSQSAWHHSRDAGGKEACESVRDGQYKQEVSCCGWLINICRRKKELKARTVWLGCPEKCEEKHPRNSIKNQKYNVFTFIPGVLYEQFKFFLNLYFLVISCSQFVPALKIGYLYTYWAPLGFVLAVTMTREAIDEFRRFQRDKEVNSQLYSKLTITFRVRVLISSIVQAGVDVLSEF

SEQ ID NO: 9206 - protein, 677 aa, Homo sapiens
MYQLEDESAHLDEMPLMMSEEGFENEESDYHTLPRARIMQRKRGLEWFVCDGWKFLCTSCCGWLINICRRKKELKARTVWLGCPEKCEEKHPRNSIKNQKYNVFTFIPGVLYEQFKFFLNLYFLVISCSQFVPALKIGYLYTYWAPLGFVLAVTMTREAIDEFRRFQRDKEVNSQLYSKLTVRGKVQVKSSDIQVGDLIIVEKNQRIPSDMVFLRTSEKAGSCFIRTDQLDGETDWKLKVAVSCTQQLPALGDLFSISAYVYAQKPQMDIHSFEGTFTREDSDPPIHESLSIENTLWASTIVASGTVIGVVIYTGKETRSVMNTSNPKNKVGLLDLELNRLTKALFLALVALSIVMVTLQGFVGPWYRNLFRFLLLFSYIIPISLRVNLDMGKAVYGWMMMKDENIPGTVVRTSTIPEELGRLVYLLTDKTGTLTQNEMIFKRLHLGTVSYGADTMDEIQSHVRDSYSQMQSQAGGNNTGSTPLRKAQSSAPKVRKSVSSRIHEAVKAIVLCHNVTPVYESRAGVTEETEFAEADQDFSDENRTYQASSPDEVALVQWTESVGLTLVSRDLTSMQLKTPSGQVLSFCILQLFPFTSESKRMGVIVRDESTAEITFYMKGADVAMSPIVQYNDWLEEEETGRDTAVGCIKKGARPTPLLQPFLPSLQPPVQRQIQSTG

SEQ ID NO: 9207 - protein, 1095 aa, Homo sapiens
MPLMMSEEGFENEESDYHTLPRARIMQRKRGLEWFVCDGWKFLCTSCCGWLINICRRKKELKARTVWLGCPEKCEEKHPRNSIKNQKYNVFTFIPGVLYEQFKFFLNLYFLVISCSQFVPALKIGYLYTYWAPLGFVLAVTMTREAIDEFRRFQRDKEVNSQLYSKLTVRGKVQVKSSDIQVGDLIIVEKNQRIPSDMVFLRTSEKAGSCFIRTDQLDGETDWKLKVAVSCTQQLPALGDLFSISAYVYAQKPQMDIHSFEGTFTREDSDPPIHESLSIENTLWASTIVASGTVIGVVIYTGKETRSVMNTSNPKNKVGLLDLELNRLTKALFLALVALSIVMVTLQGFVGPWYRNLFRFLLLFSYIIPISLRVNLDMGKAVYGWMMMKDENIPGTVVRTSTIPEELGRLVYLLTDKTGTLTQNEMIFKRLHLGTVSYGADTMDEIQSHVRDSYSQMQSQAGGNNTGSTPLRKAQSSAPKVRKSVSSRIHEAVKAIVLCHNVTPVYESRAGVTEETEFAEADQDFSDENRTYQASSPDEVALVQWTESVGLTLVSRDLTSMQLKTPSGQVLSFCILQLFPFTSESKRMGVIVRDESTAEITFYMKGADVAMSPIVQYNDWLEEECGNMAREGLRTLVVAKKALTEEQYQDFESRYTQAKLSMHDRSLKVAAVVESLEREMELLCLTGVEDQLQADVRPTLEMLRNAGIKIWMLTGDKLETATCIAKSSHLVSRTQDIHIFRQVTSRGEAHLELNAFRRKHDCALVISGDSLEVCLKYYEHEFVELACQCPAVVCCRCSPTQKARIVTLLQQHTGRRTCAIGDGGNDVSMIQAADCGIGIEGKEGKQASLAADFSITQFRHIGRLLMVHGRNSYKRSAALGQFVMHRGLIISTMQAVFSSVFYFASVPLYQGFLMVGYATIYTMFPVFSLVLDQDVKPEMAMLYPELYKDLTKGRSLSFKTFLIWVLISIYQGGILMYGALVLFESEFVHVVAISFTALILTELLMVALTVRTWHWLMVVAEFLSLGCYVSSLAFLNEYFGIGRVSFGAFLDVAFITTVTFLWKVSAITVVSCLPLYVLKYLRRKLSPPSYCKLAS

SEQ ID NO: 9208 - protein, 1164 aa, Homo sapiens
MPTMRRTVSEIRSRAEGYEKTDDVSEKTSLADQEEVRTIFINQPQLTKFCNNHVSTAKYNIITFLPRFLYSQFRRAANSFFLFIALLQQIPDVSPTGRYTTLVPLLFILAVAAIKEIIEDIKRHKADNAVNKKQTQVLRNGAWEIVHWEKVAVGEIVKVTNGEHLPADLISLSSSEPQAMCYIETSNLDGETNLKIRQGLPATSDIKDVDSLMRISGRIECESPNRHLYDFVGNIRLDGHGTVPLGADQILLRGAQLRNTQWVHGIVVYTGHDTKLMQNSTSPPLKLSNVERITNVQILILFCILIAMSLVCSVGSAIWNRRHSGKDWYLNLNYGGASNFGLNFLTFIILFNNLIPISLLVTLEVVKFTQAYFINWDLDMHYEPTDTAAMARTSNLNEELGQVKYIFSDKTGTLTCNVMQFKKCTIAGVAYGHVPEPEDYGCSPDEWQNSQFGDEKTFSDSSLLENLQNNHPTAPIICEFLTMMAVCHTAVPEREGDKIIYQAASPDEGALVRAAKQLNFVFTGRTPDSVIIDSLGQEERYELLNVLEFTSARKRMSVIVRTPSGKLRLYCKGADTVIYDRLAETSKYKEITLKHLEQFATEGLRTLCFAVAEISESDFQEWRAVYQRASTSVQNRLLKLEESYELIEKNLQLLGATAIEDKLQDQVPETIETLMKADIKIWILTGDKQETAINIGHSCKLLKKNMGMIVINEGSLDGTRETLSRHCTTLGDALRKENDFALIIDGKTLKYALTFGVRQYFLDLALSCKAVICCRVSPLQKSEVVEMVKKQVKVVTLAIGDGANDVSMIQTAHVGVGISGNEGLQAANSSDYSIAQFKYLKNLLMIHGAWNYNRVSKCILYCFYKNIVLYIIEIWFAFVNGFSGQILFERWCIGLYNVMFTAMPPLTLGIFERSCRKENMLKYPELYKTSQNALDFNTKVFWVHCLNGLFHSVILFWFPLKALQYGTAFGNGKTSDYLLLGNFVYTFVVITVCLKAGLETSYWTWFSHIAIWGSIALWVVFFGIYSSLWPAIPMAPDMSGEAAMLFSSGVFWMGLLFIPVASLLLDVVYKVIKRTAFKTLVDEVQELEAKSQDPGAVVLGKSLTERAQLLKNVFKKNHVNLYRSESLQQNLLHGYAFSQDENGIVSQSEVIRAYDTTKQRPDEW

SEQ ID NO: 9209 - protein, 1149 aa, Homo sapiens
MPTMRRTVSEIRSRAEGYEKTDDVSEKTSLADQEEVRTIFINQPQLTKFCNNHVSTAKYNIITFLPRFLYSQFRRAANSFFLFIALLQQIPDVSPTGRYTTLVPLLFILAVAAIKEIIEDIKRHKADNAVNKKQTQVLRNGAWEIVHWEKVNVGDIVIIKGKEYIPADTVLLSSSEPQAMCYIETSNLDGETNLKIRQGLPATSDIKDVDSLMRISGRIECESPNRHLYDFVGNIRLDGHGTVPLGADQILLRGAQLRNTQWVHGIVVYTGHDTKLMQNSTSPPLKLSNVERITNVQILILFCILIAMSLVCSVGSAIWNRRHSGKDWYLNLNYGGASNFGLNFLTFIILFNNLIPISLLVTLEVVKFTQAYFINWDLDMHYEPTDTAAMARTSNLNEELGQVKYIFSDKTGTLTCNVMQFKKCTIAGVAYGQNSQFGDEKTFSDSSLLENLQNNHPTAPIICEFLTMMAVCHTAVPEREGDKIIYQAASPDEGALVRAAKQLNFVFTGRTPDSVIIDSLGQEERYELLNVLEFTSARKRMSVIVRTPSGKLRLYCKGADTVIYDRLAETSKYKEITLKHLEQFATEGLRTLCFAVAEISESDFQEWRAVYQRASTSVQNRLLKLEESYELIEKNLQLLGATAIEDKLQDQVPETIETLMKADIKIWILTGDKQETAINIGHSCKLLKKNMGMIVINEGSLDGTRETLSRHCTTLGDALRKENDFALIIDGKTLKYALTFGVRQYFLDLALSCKAVICCRVSPLQKSEVVEMVKKQVKVVTLAIGDGANDVSMIQTAHVGVGISGNEGLQAANSSDYSIAQFKYLKNLLMIHGAWNYNRVSKCILYCFYKNIVLYIIEIWFAFVNGFSGQILFERWCIGLYNVMFTAMPPLTLGIFERSCRKENMLKYPELYKTSQNALDFNTKVFWVHCLNGLFHSVILFWFPLKALQYGTAFGNGKTSDYLLLGNFVYTFVVITVCLKAGLETSYWTWFSHIAIWGSIALWVVFFGIYSSLWPAIPMAPDMSGEAAMLFSSGVFWMGLLFIPVASLLLDVVYKVIKRTAFKTLVDEVQELEAKSQDPGAVVLGKSLTERAQLLKNVFKKNHVNLYRSESLQQNLLHGYAFSQDENGIVSQSEVIRAYDTTKQRPDEW

SEQ ID NO: 9210 - protein, 1071 aa, Homo sapiens
  VARIANT (1)...(1071): Xaa = Any Amino Acid
MPTMRRTVSEIRSRAEGYEKTDDVSEKTSLADQEEVRTIFINQPQLTKFCNNHVSTAKYNIITFLPRFLYSQFRRAANSFFLFIALLQQIPDVSPTGRYTTLVPLLFILAVAAIKEIIEDIKRHKADNAVNKKQTQVLRNGAWEIVHWEKVAVGEIVKVTNGEHLPADLISLSSSEPQAMCYIETSNLDGETNLKIRQGLPATSDIKDVDSLMRISGRIECESPNRHLYDFVGNIRLDGHGTVPLGADQILLRGAQLRNTQWVHGIVVYTGHDTKLMQNSTSPPLKLSNVERITNVQILILFCILIAMSLVCSVGSAIWNRRHSGKDWYLNLNYGGASNFGLNFLTFIILFNNLIPISLLVTLEVVKFTQAYFINWDLDMHYEPTDTAAMARTSNLNEELGQVKYIFSDKTGTLTCNVMQFKKCTIAGVAYGHVPEPEDYGCSPDEWQNSQFGDEKTFSDSSLLENLQNNHPTAPIICEFLTMMAVCHTAVPEREGDKIIYQAASPDEGALVRAAKQLNFVFTGRTPDSVIIDSLGQEERYELLNVLEFTSARKRMSVIVRTPSGKLRLYCKGADTVIYDRLAETSKYKEITLKHLEQFATEGLRTLCFAVAEISESDFQEWRAVYQRASTSVQNRLLKLEESYELIEKNLQLLGATAIEDKLQDQVPETIETLMKADIKIWILTGDKQETAINIGHSCKLLKKNMGMIVINEGSLDGTRETLSRHCTTLGDALRKENDFALIIDGKTLKYALTFGVRQYFLDLALSCKAVICCRVSPLQKSEVVEMVKKQVKVVTLAIGDGANDVSMIQTAHVGVGISGNEGLQAANSSDYSIAQFKYLKNLLMIHGAWNYNRVSKCILYCFYKNIVLYIIEIWFAFVNGFSGQILFERWCIGLYNVMFTAMPPLTLGIFERSCRKENMLKYPELYKTSQNALDFNTKVFWVHCLNGLFHSVILFWFPLKALQYGTAFGNGKTSDYLLLGNFVYTFVVITVCLKAGLETSYWTWFSHIAIWGSIALWVVFFGIYSSLWPAIPMAPDMSGEAAMLFSSGVFWMGLLFIPVASLLLDVVYKX

SEQ ID NO: 9211 - protein, 2243 aa, Homo sapiens
MDLRFGFERLKEPGEKTGWLINMHPTEILDEDKRLGSAVDYYFIQDDGSRFKVALPYKPYFYIATRKGCEREVSSFLSKKFQGKIAKVETVPKEDLDLPNHLVGLKRNYIRLSFHTVEDLVKVRKEISPAVKKNREQDHASDAYTALLSSVLQRGGVITDEEETSKKIADQLDNIVDMREYDVPYHIRLSIDLKIHVAHWYNVRYRGNAFPVEITRRDDLVERPDPVVLAFDIETTKLPLKFPDAETDQIMMISYMIDGQGYLITNREIVSEDIEDFEFTPKPEYEGPFCVFNEPDEAHLIQRWFEHVQETKPTIMVTYNGDFFDWPFVEARAAVHGLSMQQEIGFQKDSQGEYKAPQCIHMDCLRWVKRDSYLPVGSHNLKAAAKAKLGYDPVELDPEDMCRMATEQPQTLATYSVSDAVATYYLYMKYVHPFIFALCTIIPMEPDEVLRKGSGTLCEALLMVQAFHANIIFPNKQEQEFNKLTDDGHVLDSETYVGGHVEALESGVFRSDIPCRFRMNPAAFDFLLQRVEKTLRHALEEEEKVPVEQVTNFEEVCDEIKSKLASLKDVPSRIECPLIYHLDVGAMYPNIILTNRLQPSAMVDEATCAACDFNKPGANCQRKMAWQWRGEFMPASRSEYHRIQHQLESEKFPPLFPEGPARAFHELSREEQAKYEKRRLADYCRKAYKKIHITKVEERLTTICQRENSFYVDTVRAFRDRRYEFKGLHKVWKKKLSAAVEVGDAAEVKRCKNMEVLYDSLQLAHKCILNSFYGYVMRKGARWYSMEMAGIVCFTGANIITQARELIEQIGRPLELDTDGIWCVLPNSFPENFVFKTTNVKKPKVTISYPGAMLNIMVKEGFTNDQYQELAEPSSLTYVTRSENSIFFEVDGPYLAMILPASKEEGKKLKKRYAVFNEDGSLAELKGFEVKRRGELQLIKIFQSSVFEAFLKGSTLEEVYGSVAKVADYWLDVLYSKAANMPDSELFELISENRSMSRKLEDYGEQKSTSISTAKRLAEFLGDQMVKDAGLSCRYIISRKPEGSPVTERAIPLAIFQAEPTVRKHFLRKWLKSSSLQDFDIRAILDWDYYIERLGSAIQKIITIPAALQQVKNPVPRVKHPDWLHKKLLEKNDVYKQKKISELFTLEGRRQVTMAEASEDSPRPSAPDMEDFGLVKLPHPAAPVTVKRKRVLWESQEESQDLTPTVPWQEILGQPPALGTSQEEWLVWLRFHKKKWQLQARQRLARRKRQRLESAEGVLRPGAIRDGPATGLGSFLRRTARSILDLPWQIVQISETSQAGLFRLWALVGSDLHCIRLSIPRVFYVNQRVAKAEEGASYRKVNRVLPRSNMVYNLYEYSVPEDMYQEHINEINAELSAPDIEGVYETQVPLLFRALVHLGCVCVVNKQLVRHLSGWEAETFALEHLEMRSLAQFSYLEPGSIRHIYLYHHAQAHKALFGIFIPSQRRASVFVLDTVRSNQMPSLGALYSAEHGLLLEKVGPELLPPPKHTFEVRAETDLKTICRAIQRFLLAYKEERRGPTLIAVQSSWELKRLASEIPVLEEFPLVPICVADKINYGVLDWQRHGARRMIRHYLNLDTCLSQAFEMSRYFHIPIGNLPEDISTFGSDLFFARHLQRHNHLLWLSPTARPDLGGKEADDNCLVMEFDDQATVEINSSGCYSTVCVELDLQNLAVNTILQSHHVNDMEGADSMGISFDVIQQASLEDMITGGQAASAPASYDETALCSNTFRILKSMVVGWVKEITQYHNIYADNQVMHFYRWLRSPSSLLHDPALHRTLHNMMKKLFLQLIAEFKRLGSSVIYANFNRIILCTKKRRVEDAIAYVEYITSSIHSKETFHSLTISFSRCWEFLLWMDPSNYGGIKGKVSSRIHCGLQDSQKAGGAEDEQENEDDEEERDGEEEEEAEESNVEDLLENNWNILQFLPQAASCQNYFLMIVSAYIVAVYHCMKDGLRRSAPGSTPVRRRGASQLSQEAEGAVGALPGMITFSQDYVANELTQSFFTITQKIQKKVTGSRNSTELSEMFPVLPGSHLLLNNPALEFIKYVCKVLSLDTNITNQVNKLNRDLLRLVDVGEFSEEAQFRDPCRSYVLPEVICRSCNFCRDLDLCKDSSFSEDGAVLPQWLCSNCQAPYDSSAIEMTLVEVLQKKLMAFTLQDLVCLKCRGVKETSMPVYCSCAGDFALTIHTQVFMEQIGIFRNIAQHYGMSYLLETLEWLLQKNPQLGH

SEQ ID NO: 9212 - protein, 1816 aa, Homo sapiens
MKYVHPFIFALCTIIPMEPDEVLRKGSGTLCEALLMVQAFHANIIFPNKQEQEFNKLTDDGHVLDSETYVGGHVEALESGVFRSDIPCRFRMNPAAFDFLLQRVEKTLRHALEEEEKVPVEQVTNFEEVCDEIKSKLASLKDVPSRIECPLIYHLDVGAMYPNIILTNRLQPSAMVDEATCAACDFNKPGANCQRKMAWQWRGEFMPASRSEYHRIQHQLESEKFPPLFPEGPARAFHELSREEQAKYEKRRLADYCRKAYKKIHITKVEERLTTICQRENSFYVDTVRAFRDRRYEFKGLHKVWKKKLSAAVEVGDAAEVKRCKNMEVLYDSLQLAHKCILNSFYGYVMRKGARWYSMEMAGIVCFTGANIITQARELIEQIGRPLELDTDGIWCVLPNSFPENFVFKTTNVKKPKVTISYPGAMLNIMVKEGFTNDQYQELAEPSSLTYVTRSENSIFFEVDGPYLAMILPASKEEGKKLKKRYAVFNEDGSLAELKGFEVKRRGELQLIKIFQSSVFEAFLKGSTLEEVYGSVAKVADYWLDVLYSKAANMPDSELFELISENRSMSRKLEDYGEQKSTSISTAKRLAEFLGDQMVKDAGLSCRYIISRKPEGSPVTERAIPLAIFQAEPTVRKHFLRKWLKSSSLQDFDIRAILDWDYYIERLGSAIQKIITIPAALQQVKNPVPRVKHPDWLHKKLLEKNDVYKQKKISELFTLEGRRQVTMAEASEDSPRPSAPDMEDFGLVKLPHPAAPVTVKRKRVLWESQEESQDLTPTVPWQEILGQPPALGTSQEEWLVWLRFHKKKWQLQARQRLARRKRQRLESAEGVLRPGAIRDGPATGLGSFLRRTARSILDLPWQIVQISETSQAGLFRLWALVGSDLHCIRLSIPRVFYVNQRVAKAEEGASYRKVNRVLPRSNMVYNLYEYSVPEDMYQEHINEINAELSAPDIEGVYETQVPLLFRALVHLGCVCVVNKQLVRHLSGWEAETFALEHLEMRSLAQFSYLEPGSIRHIYLYHHAQAHKALFGIFIPSQRRASVFVLDTVRSNQMPSLGALYSAEHGLLLEKVGPELLPPPKHTFEVRAETDLKTICRAIQRFLLAYKEERRGPTLIAVQSSWELKRLASEIPVLEEFPLVPICVADKINYGVLDWQRHGARRMIRHYLNLDTCLSQAFEMSRYFHIPIGNLPEDISTFGSDLFFARHLQRHNHLLWLSPTARPDLGGKEADDNCLVMEFDDQATVEINSSGCYSTVCVELDLQNLAVNTILQSHHVNDMEGADSMGISFDVIQQASLEDMITGGQAASAPASYDETALCSNTFRILKSMVVGWVKEITQYHNIYADNQVMHFYRWLRSPSSLLHDPALHRTLHNMMKKLFLQLIAEFKRLGSSVIYANFNRIILCTKKRRVEDAIAYVEYITSSIHSKETFHSLTISFSRCWEFLLWMDPSNYGGIKGKVSSRIHCGLQDSQKAGGAEDEQENEDDEEERDGEEEEEAEESNVEDLLENNWNILQFLPQAASCQNYFLMIVSAYIVAVYHCMKDGLRRSAPGSTPVRRRGASQLSQEAEGAVGALPGMITFSQDYVANELTQSFFTITQKIQKKVTGSRNSTELSEMFPVLPGSHLLLNNPALEFIKYVCKVLSLDTNITNQVNKLNRDLLRLVDVGEFSEEAQFRDPCRSYVLPEVICRSCNFCRDLDLCKDSSFSEDGAVLPQWLCSNCQAPYDSSAIEMTLVEVLQKKLMAFTLQDLVCLKCRGVKETSMPVYCSCAGDFALTIHTQVFMEQIGIFRNIAQHYGMSYLLETLEWLLQKNPQLGH

SEQ ID NO: 9213 - protein, 2293 aa, Homo sapiens [sequence omitted]

SEQ ID NO: 9214 - protein, 1816 aa, Homo sapiens; identical to SEQ ID NO: 9212

SEQ ID NO: 9215 - protein, 244 aa, Homo sapiens
MSQGVRRAGAGQGVAAAVQLLVTLSFLRSVVEAQVTGVLDDCLCDIDSIDNFNTYKIFPKIKKLQERDYFRYYKVNLKRPCPFWAEDGHCSIKDCHVEPCPESKIPVGIKAGHSNKYLKMANNTKELEDCEQANKLGAINSTLSNQSKEAFIDWARYDDSRDHFCELDDERSPAAQYVDLLLNPERYTGYKGTSAWRVWNSIYEENCFKPRSVYRPLNPLAPSRGRRIILHMARRFVSGEKSLL

SEQ ID NO: 9216 - protein, 170 aa, Homo sapiens [sequence omitted]

SEQ ID NO: 9217 - protein, 1265 aa, Homo sapiens
MSPALQDLSQPEGLKKTLRDEINAILQKRIMVLDGGMGTMIQREKLNEEHFRGQEFKDHARPLKGNNDILSITQPDVIYQIHKEYLLAGADIIETNTFSSTSIAQADYGLEHLAYRMNMCSAGVARKAAEEVTLQTGIKRFVAGALGPTNKTLSVSPSVERPDYRNITFDELVEAYQEQAKGLLDGGVDILLIETIFDTANAKAALFALQNLFEEKYAPRPIFISGTIVDKSGRTLSGQTGEGFVISVSHGEPLCIGLNCALGAAEMRPFIEIIGKCTTAYVLCYPNAGLPNTFGDYDETPSMMAKHLKDFAMDGLVNIVGGCCGSTPDHIREIAEAVKNCKPRVPPATAFEGHMLLSGLEPFRIGPYTNFVNIGERCNVAGSRKFAKLIMAGNYEEALCVAKVQVEMGAQVLDVNMDDGMLDGPSAMTRFCNLIASEPDIAKVPLCIDSSNFAVIEAGLKCCQGKCIVNSISLKEGEDDFLEKARKIKKYGAAMVVMAFDEEGQATETDTKIRVCTRAYHLLVKKLGFNPNDIIFDPNILTIGTGMEEHNLYAINFIHATKVIKETLPGARISGGLSNLSFSFRGMEAIREAMHGVFLYHAIKSGMDMGIVNAGNLPVYDDIHKELLQLCEDLIWNKDPEATEKLLRYAQTQGTGGKKVIQTDEWRNGPVEERLEYALVKGIEKHIIEDTEEARLNQKKYPRPLNIIEGPLMNGMKIVGDLFGAGKMFLPQVIKSARVMKKAVGHLIPFMEKEREETRVLNGTVEEEDPYQGTIVLATVKGDVHDIGKNIVGVVLGCNNFRVIDLGVMTPCDKILKAALDHKADIIGLSGLITPSLDEMIFVAKEMERLAIRIPLLIGGATTSKTHTAVKIAPRYSAPVIHVLDASKSVVVCSQLLDENLKDEYFEEIMEEYEDIRQDHYESLKERRYLPLSQARKSGFQMDWLSEPHPVKPTFIGTQVFEDYDLQKLVDYIDWKPFFDVWQLRGKYPNRGFPKIFNDKTVGGEARKVYDDAHNMLNTLISQKKLRARGVVGFWPAQSIQDDIHLYAEAAVPQAAEPIATFYGLRQQAEKDSASTEPYYCLSDFIAPLHSGIRDYLGLFAVACFGVEELSKAYEDDGDDYSSIMVKALGDRLAEAFAEELHERVRRELWAYCGSEQLDVADLRRLRYKGIRPAPGYPSQPDHTEKLTMWRLADIEQSTGIRLTESLAMAPASAVSGLYFSNLKSKYFAVGKISKDQVEDYALRKNISVAEVEKWLGPILGYDTD

SEQ ID NO: 9218 - protein, 235 aa, Homo sapiens
MLSATRRACQLLLLHSLFPVPRMGNSASNIVSPQEALPGRKEQTPVAAKHHVNGNRTVEPFPEGTQMAVFGMGCFWGAERKFWVLKGVYSTQVGFAGGYTSNPTYKEVCSEKTGHAEVVRVVYQPEHMSFEELLKVFWENHDPTQGMRQGNDHGTQYRSAIYPTSAKQMEAALSSKENYQKVLSEHGFGPITTDIREGQTFYYAEDYHQQYLSKNPNGYCGLGGTGVSCPVGIKK

SEQ ID NO: 9219 - protein, 863 aa, Homo sapiens [sequence omitted]

SEQ ID NO: 9220 - protein, 763 aa, Homo sapiens [sequence omitted]

SEQ ID NO: 9221 - protein, 450 aa, Homo sapiens
MVLAQRRRGGCEKLRAGPQAVLASGSGFCDNMLADLGLIGTIGEDDEVPVEPESDSGDEEEEGPIVLGRRQKALGKNRSADFNPDFVFTEKEGTYDGSWALADVMSQLKKKRAATTLDEKIEKVRKKRKTERMHILLGLMGLQVGELHGNLSQTQRLEALRRFKDEQIDILVATDVAARGLDIEGVKTVINFTMPNTIKHYVHRVGRTARAGRAGRSVSLVGEDERKMLKEIVKAAKAPVKARILPQDVILKFRDKIEKMEKDVYAVLQLEAEEKEMQQSEAQINTAKRLLEKGKEAVVQEPERSWFQTKEERKKEKIAKALQEFDLALRGKKKRKKFMKDAKKKGEMTAEERSQFEILKAQMFAERLAKRNRRAKRARAMPEEEPVRGPAKKQKQGKKSVFDEELTNTSKKALKQYRAGPSFEERKQLGLPHQRRGGNFKSKSRYKRRK

SEQ ID NO: 9222 - protein, 796 aa, Homo sapiens
MVLAQRRRGGCEKLRAGPQAVLASGSGFCDNMLADLGLIGTIGEDDEVPVEPESDSGDEEEEGPIVLGRRQKALGKNRSADFNPDFVFTEKEGTYDGSWALADVMSQLKKKRAATTLDEKIEKVRKKRKTEDKEAKSGKLEKEKEAKEGSEPKEQEDLQENDEEGSEDEASETDYSSADENILTKADTLKVKDRKKKKKKGQEAGGFFEDASQYDENLSFQDMNLSRPLLKAITAMGFKQPTPIQKACIPVGLLGKDICACAATGTGKTAAFALPVLERLIYKPRQAPVTRVLVLVPTRELGIQVHSVTRQLAQFCNITTCLAVGGLDVKSQEAALRAAPDILIATPGRLIDHLHNCPSFHLSSIEVLILDEADRMLDEYFEEQMKEIIRMCSHHRQTMLFSATMTDEVKDLASVSLKNPVRIFVNSNTDVAPFLRQEFIRIRPNREGDREAIVAALLTRTFTDHVMLFTQTKKQAHRMHILLGLMGLQVGELHGNLSQTQRLEALRRFKDEQIDILVATDVAARGLDIEGVKTVINFTMPNTIKHYVHRVGRTARAGRAGRSVSLVGEDERKMLKEIVKAAKAPVKARILPQDVILKFRDKIEKMEKDVYAVLQLEAEEKEMQQSEAQINTAKRLLEKGKEAVVQEPERSWFQTKEERKKEKIAKALQEFDLALRGKKKRKKFMKDAKKKGEMTAEERSQFEILKAQMFAERLAKRNRRAKRARAMPEEEPVRGPAKKQKQGKKSVFDEELTNTSKKALKQYRAGPSFEERKQLGLPHQRRGGNFKSKSRYKRRK

SEQ ID NO: 9223 - protein, 752 aa, Homo sapiens
MACREGAGSRRARSNGCRLPRRGRRRGGRRRTVGPGPIHCRGRRALGPRVFRVMEALIPVINKLQDVFNTVGADIIQLPQIVVVGTQSSGKSSVLESLVGRDLLPRGTGIVTRRPLILQLVHVSQEDKRKTTGEENGVEAEEWGKFLHTKNKLYTDFDEIRQEIENETERISGNNKGVSPEPIHLKIFSPNVVNLTLVDLPGMTKVPVGDQPKDIELQIRELILRFISNPNSIILAVTAANTDMATSEALKISREVDPDGRRTLAVITKLDLMDAGTDAMDVLMGRVIPVKLGIIGVVNRSQLDINNKKSVTDSIRDEYAFLQKKYPSLANRNGTKYLARTLNRLLMHHIRDCLPELKTRINVLAAQYQSLLNSYGEPVDDKSATLLQLITKFATEYCNTIEGTAKYIETSELCGGARICYIFHETFGRTLESVDPLGGLNTIDILTAIRNATGPRPALFVPEVSFELLVKRQIKRLEEPSLRCVELVHEEMQRIIQHCSNYSTQELLRFPKLHDAIVEVVTCLLRKRLPVTNEMVHNLVAIELAYINTKHPDFADACGLMNNNIEEQRRNRLARELPSAVSRDKVASGGGGVGDGVQEPTTGNWRGMLKTSKAEELLAEEKSKPIPIMPASPQKGHAVNLLDVPVPVARKLSAREQRDCEVIERLIKSYFLIVRKNIQDSVPKAVMHFLVNHVKDTLQSELVGQLYKSSLLDDLLTESEDMAQRRKEAADMLKALQGASQIIAEIRETHLW

SEQ ID NO: 9224 - protein, 778 aa, Homo sapiens
MACREGAGSRRARSNGCRLPRRGRRRGGRRRTVGPGPIHCRGRRALGPRVFRVMEALIPVINKLQDVFNTVGADIIQLPQIVVVGTQSSGKSSVLESLVGRDLLPRGTGIVTRRPLILQLVHVSQEDKRKTTGEENGVEAEEWGKFLHTKNKLYTDFDEIRQEIENETERISGNNKGVSPEPIHLKIFSPNVVNLTLVDLPGMTKVPVGDQPKDIELQIRELILRFISNPNSIILAVTAANTDMATSEALKISREVDPDGRRTLAVITKLDLMDAGTDAMDVLMGRVIPVKLGIIGVVNRSQLDINNKKSVTDSIRDEYAFLQKKYPSLANRNGTKYLARTLNRLLMHHIRDCLPELKTRINVLAAQYQSLLNSYGEPVDDKSATLLQLITKFATEYCNTIEGTAKYIETSELCGGARICYIFHETFGRTLESVDPLGGLNTIDILTAIRNATGPRPALFVPEVSFELLVKRQIKRLEEPSLRCVELVHEEMQRIIQHCSNYSTQELLRFPKLHDAIVEVVTCLLRKRLPVTNEMVHNLVAIELAYINTKHPDFADACGLMNNNIEEQRRNRLARELPSAVSRDKSSKVPSALAPASQEPSPAASAEADGKVASGGGGVGDGVQEPTTGNWRGMLKTSKAEELLAEEKSKPIPIMPASPQKGHAVNLLDVPVPVARKLSAREQRDCEVIERLIKSYFLIVRKNIQDSVPKAVMHFLVNHVKDTLQSELVGQLYKSSLLDDLLTESEDMAQRRKEAADMLKALQGASQIIAEIRETHLW

SEQ ID NO: 9225 - protein, 763 aa, Homo sapiens
MACREGAGSRRARSNGCRLPRRGRRRGGRRRTVGPGPIHCRGRRALGPRVFRVMEALIPVINKLQDVFNTVGADIIQLPQIVVVGTQSSGKSSVLESLVGRDLLPRGTGIVTRRPLILQLVHVSQEDKRKTTGEENGVEAEEWGKFLHTKNKLYTDFDEIRQEIENETERISGNNKGVSPEPIHLKIFSPNVVNLTLVDLPGMTKVPVGDQPKDIELQIRELILRFISNPNSIILAVTAANTDMATSEALKISREVDPDGRRTLAVITKLDLMDAGTDAMDVLMGRVIPVKLGIIGVVNRSQLDINNKKSVTDSIRDEYAFLQKKYPSLANRNGTKYLARTLNRLLMHHIRDCLPELKTRINVLAAQYQSLLNSYGEPVDDKSATLLQLITKFATEYCNTIEGTAKYIETSELCGGARICYIFHETFGRTLESVDPLGGLNTIDILTAIRNATGPRPALFVPEVSFELLVKRQIKRLEEPSLRCVELVHEEMQRIIQHCSNYSTQELLRFPKLHDAIVEVVTCLLRKRLPVTNEMVHNLVAIELAYINTKHPDFADACGLMNNNIEEQRRNRLARELPSAVSRDKLIQDSRRETKNVASGGGGVGDGVQEPTTGNWRGMLKTSKAEELLAEEKSKPIPIMPASPQKGHAVNLLDVPVPVARKLSAREQRDCEVIERLIKSYFLIVRKNIQDSVPKAVMHFLVNHVKDTLQSELVGQLYKSSLLDDLLTESEDMAQRRKEAADMLKALQGASQIIAEIRETHLW

SEQ ID NO: 9226 - protein, 752 aa, Homo sapiens; identical to SEQ ID NO: 9223

SEQ ID NO: 9227 - protein, 789 aa, Homo sapiens
MACREGAGSRRARSNGCRLPRRGRRRGGRRRTVGPGPIHCRGRRALGPRVFRVMEALIPVINKLQDVFNTVGADIIQLPQIVVVGTQSSGKSSVLESLVGRDLLPRGTGIVTRRPLILQLVHVSQEDKRKTTGEENGVEAEEWGKFLHTKNKLYTDFDEIRQEIENETERISGNNKGVSPEPIHLKIFSPNVVNLTLVDLPGMTKVPVGDQPKDIELQIRELILRFISNPNSIILAVTAANTDMATSEALKISREVDPDGRRTLAVITKLDLMDAGTDAMDVLMGRVIPVKLGIIGVVNRSQLDINNKKSVTDSIRDEYAFLQKKYPSLANRNGTKYLARTLNRLLMHHIRDCLPELKTRINVLAAQYQSLLNSYGEPVDDKSATLLQLITKFATEYCNTIEGTAKYIETSELCGGARICYIFHETFGRTLESVDPLGGLNTIDILTAIRNATGPRPALFVPEVSFELLVKRQIKRLEEPSLRCVELVHEEMQRIIQHCSNYSTQELLRFPKLHDAIVEVVTCLLRKRLPVTNEMVHNLVAIELAYINTKHPDFADACGLMNNNIEEQRRNRLARELPSAVSRDKSSKVPSALAPASQEPSPAASAEADGKLIQDSRRETKNVASGGGGVGDGVQEPTTGNWRGMLKTSKAEELLAEEKSKPIPIMPASPQKGHAVNLLDVPVPVARKLSAREQRDCEVIERLIKSYFLIVRKNIQDSVPKAVMHFLVNHVKDTLQSELVGQLYKSSLLDDLLTESEDMAQRRKEAADMLKALQGASQIIAEIRETHLW

SEQ ID NO: 9228 - protein, 789 aa, Homo sapiens; identical to SEQ ID NO: 9227

SEQ ID NO: 9229 - protein, 587 aa, Homo sapiens
MTKVPVGDQPKDIELQIRELILRFISNPNSIILAVTAANTDMATSEALKISREVDPDGRRTLAVITKLDLMDAGTDAMDVLMGRVIPVKLGIIGVVNRSQLDINNKKSVTDSIRDEYAFLQKKYPSLANRNGTKYLARTLNRLLMHHIRDCLPELKTRINVLAAQYQSLLNSYGEPVDDKSATLLQLITKFATEYCNTIEGTAKYIETSELCGGARICYIFHETFGRTLESVDPLGGLNTIDILTAIRNATGPRPALFVPEVSFELLVKRQIKRLEEPSLRCVELVHEEMQRIIQHCSNYSTQELLRFPKLHDAIVEVVTCLLRKRLPVTNEMVHNLVAIELAYINTKHPDFADACGLMNNNIEEQRRNRLARELPSAVSRDKSSKVPSALAPASQEPSPAASAEADGKLIQDSRRETKNVASGGGGVGDGVQEPTTGNWRGMLKTSKAEELLAEEKSKPIPIMPASPQKGHAVNLLDVPVPVARKLSAREQRDCEVIERLIKSYFLIVRKNIQDSVPKAVMHFLVNHVKDTLQSELVGQLYKSSLLDDLLTESEDMAQRRKEAADMLKALQGASQIIAEIRETHLW

SEQ ID NO: 9230 - protein, 550 aa, Homo sapiens
MTKVPVGDQPKDIELQIRELILRFISNPNSIILAVTAANTDMATSEALKISREVDPDGRRTLAVITKLDLMDAGTDAMDVLMGRVIPVKLGIIGVVNRSQLDINNKKSVTDSIRDEYAFLQKKYPSLANRNGTKYLARTLNRLLMHHIRDCLPELKTRINVLAAQYQSLLNSYGEPVDDKSATLLQLITKFATEYCNTIEGTAKYIETSELCGGARICYIFHETFGRTLESVDPLGGLNTIDILTAIRNATGPRPALFVPEVSFELLVKRQIKRLEEPSLRCVELVHEEMQRIIQHCSNYSTQELLRFPKLHDAIVEVVTCLLRKRLPVTNEMVHNLVAIELAYINTKHPDFADACGLMNNNIEEQRRNRLARELPSAVSRDKVASGGGGVGDGVQEPTTGNWRGMLKTSKAEELLAEEKSKPIPIMPASPQKGHAVNLLDVPVPVARKLSAREQRDCEVIERLIKSYFLIVRKNIQDSVPKAVMHFLVNHVKDTLQSELVGQLYKSSLLDDLLTESEDMAQRRKEAADMLKALQGASQIIAEIRETHLW

SEQ ID NO: 9231 - protein, 763 aa, Homo sapiens; identical to SEQ ID NO: 9225

SEQ ID NO: 9232 - protein, 587 aa, Homo sapiens; identical to SEQ ID NO: 9229

SEQ ID NO: 9233 - protein, 494 aa, Homo sapiens
MHTLWFREHNRVATELSALNPHWEGNTVYQEARKIVGAELQHITYSHWLPKVLGDPGTRMLRGYRGYNPNVNAGIINSFATAAFRFGHTLINPILYRLNATLGEISEGHLPFHKALFSPSRIIKEGGIDPVLRGLFGVAAKWRAPSYLLSPELTQRLFSAAYSAAVDSAATIIQRGRDHGIPPYVDFRVFCNLTSVKNFEDLQNEIKDSEIRQKLRKLYGSPGDIDLWPALMVEDLIPGTRVGPTLMCLFVTQFQRLRDGDRFWYENPGVFTPAQLTQLKQASLSRVLCDNGDSIQQVQADVFVKAEYPQDYLNCSEIPKVDLRVWQDCCADCRSRGQFRAVTQESQKKRSAQYSYPVDKDMELSHLRSRQQDKIYVGEDARNVTVLAKTKFSQDFSTFAAEIQETITALREQINKLEARLRQAGCTDVRGVPRKAEERWMKEDCTHCICESGQVTCVVEICPPAPCPSPELVKGTCCPVCRDRGMPSDSPEKR

SEQ ID NO: 9234 - protein, 153 aa, Homo sapiens
MADLSFIEDTVAFPEKEEDEEEEEEGVEWGYEEGVEWGLVFPDANGEYQSPINLNSREARYDPSLLDVRLSPNYVVCRDCEVTNDGHTIQVILKSKSVLSGGPLPQGHEFELYEVRFHWGRENQRGSEHTVNFKAFPMEVRITNHLVKILFSE

SEQ ID NO: 9235 - protein, 290 aa, Homo sapiens
MADLSFIEDTVAFPEKEEDEEEEEEGVEWGYEEGVEWGLVFPDANGEYQSPINLNSREARYDPSLLDVRLSPNYVVCRDCEVTNDGHTIQVILKSKSVLSGGPLPQGHEFELYEVRFHWGRENQRGSEHTVNFKAFPMELHLIHWNSTLFGSIDEAVGKPHGIAIIALFVQIGKEHVGLKAVTEILQDIQYKGKSKTIPCFNPNTLLPDPLLRDYWVYEGSLTIPPCSEGVTWILFRYPLTISQLQIEEFRRLRTHVKGAELVEGCDGILGDNFRPTQPLSDRVIRAAFQ

SEQ ID NO: 9236 - protein, 283 aa, Homo sapiens
MASGTTTTAVKIGIIGGTGLDDPEILEGRTEKYVDTPFGKPSDALILGKIKNVDCVLLARHGRQHTIMPSKVNYQANIWALKEEGCTHVIVTTACGSLREEIQPGDIVIIDQFIDRTTMRPQSFYDGSHSCARGVCHIPMAEPFCPKTREVLIETAKKLGLRCHSKGTMVTIEGPRFSSRAESFMFRTWGADVINMTTVPEVVLAKEAGICYASIAMATDYDCWKEHEEAVSVDRVLKTLKENANKAKSLLLTTIPQIGSTEWSETLHNLKNMAQFSVLLPRH

SEQ ID NO: 9237 - protein, 109 aa, Homo sapiens
MFRTWGADVINMTTVPEVVLAKEAGICYASIAMATDYDCWKEHEEAMIKFQMILSEGYHPFNIQESPFYRGLLDFPSVGHGRGEILPLSPLDLAGYCFQQPMQPPCPDS

SEQ ID NO: 9238 - protein, 317 aa, Homo sapiens [sequence omitted]

SEQ ID NO: 9239 - protein, 461 aa, Homo sapiens
MAEVGEIIEGCRLPVLRRNQDNEDEWPLAEILSVKDISGRKLFYVHYIDFNKRLDEWVTHERLDLKKIQFPKKEAKTPTKNGLPGSRPGSPEREVKRKVEVVSPATPVPSETAPASVFPQNGAARRAVAAQPGRKRKSNCLGTDEDSQDSSDGIPSAPRMTGSLVSDRSHDDIVTRMKNIECIELGRHRLKPWYFSPYPQELTTLPVLYLCEFCLKYGRSLKCLQRHLTKCDLRHPPGNEIYRKGTISFFEIDGRKNKSYSQNLCLLAKCFLDHKTLYYDTDPFLFYVMTEYDCKGFHIVGYFSKEKESTEDYNVACILTLPPYQRRGYGKLLIEFSYELSKVEGKTGTPEKPLSDLGLLSYRSYWSQTILEILMGLKSESGERPQITINEISEITSIKKEDVISTLQYLNLINYYKGQYILTLSEDIVDGHERAMLKRLLRIDSKCLHFTPKDWSKRGKW

SEQ ID NO: 9240 - protein, 513 aa, Homo sapiens
MAEVGEIIEGCRLPVLRRNQDNEDEWPLAEILSVKDISGRKLFYVHYIDFNKRLDEWVTHERLDLKKIQFPKKEAKTPTKNGLPGSRPGSPEREVPASAQASGKTLPIPVQITLRFNLPKEREAIPGGEPDQPLSSSSCLQPNHRSTKRKVEVVSPATPVPSETAPASVFPQNGAARRAVAAQPGRKRKSNCLGTDEDSQDSSDGIPSAPRMTGSLVSDRSHDDIVTRMKNIECIELGRHRLKPWYFSPYPQELTTLPVLYLCEFCLKYGRSLKCLQRHLTKCDLRHPPGNEIYRKGTISFFEIDGRKNKSYSQNLCLLAKCFLDHKTLYYDTDPFLFYVMTEYDCKGFHIVGYFSKEKESTEDYNVACILTLPPYQRRGYGKLLIEFSYELSKVEGKTGTPEKPLSDLGLLSYRSYWSQTILEILMGLKSESGERPQITINEISEITSIKKEDVISTLQYLNLINYYKGQYILTLSEDIVDGHERAMLKRLLRIDSKCLHFTPKDWSKRGKW

SEQ ID NO: 9241 - protein, 513 aa, Homo sapiens; identical to SEQ ID NO: 9240

SEQ ID NO: 9242 - protein, 403 aa, Homo sapiens [sequence omitted]

SEQ ID NO: 9243 - protein, 547 aa, Homo sapiens [sequence omitted]

SEQ ID NO: 9244 - protein, 363 aa, Homo sapiens
MAALRYAGLDDTDSEDELPPGWEERTTKDGWVYYANHTEEKTQWEHPKTGKRKRVAGDLPYGWEQETDENGQVFFVDHINKRTTYLDPRLAFTVDDNPTKPTTRQRYDGSTTAMEILQGRDFTGKVVVVTGANSGIGFETAKSFALHGAHVILACRNMARASEAVSRILEEWHKAKVETMTLDLALLRSVQHFAEAFKAKNVPLHVLVCNAATFALPWSLTKDGLETTFQVNHLGHFYLVQLLQDVLCRSAPARVIVVSSESHRFTDINDSLGKLDFSRLSPTKNDYWAMLAYNRSKLCNILFSNELHRRLSPRGVTSNAVHPGNMMYSNIHRSWWVYTLLFTLARPFTKSMVSDCLVEGGHF

SEQ ID NO: 9245 - protein, 236 aa, Homo sapiens
MRTDKCFLLRFETAKSFALHGAHVILACRNMARASEAVSRILEEWHKAKVETMTLDLALLRSVQHFAEAFKAKNVPLHVLVCNAATFALPWSLTKDGLETTFQVNHLGHFYLVQLLQDVLCRSAPARVIVVSSESHRFTDINDSLGKLDFSRLSPTKNDYWAMLAYNRSKLCNILFSNELHRRLSPRGVTSNAVHPGNMMYSNIHRSWWVYTLLFTLARPFTKSMVSDCLVEGGHF

SEQ ID NO: 9246 - protein, 1179 aa, Homo sapiens
  VARIANT (1)...(1179): Xaa = Any Amino Acid
MYSLCRSYPGLLVVPQAVQDSSLPRVARCYRHNRLPVVCWKNSRSGTLLLRSGGFHGKGVVGLFKSQNSPQAAPTSSLESSSSIEQEKYLQALLNAVSVHQKLRGNSTLTVRPAFALSPGTERRTSRMSTVLKQVVPGHLDVNPSNSFAQGGVWASLRSSTRLISSPTSFIDVGARLAGKDHSASFSNSSYLQNQLLKRQAALYIFGEKSQLRNFKVEFALNCEFVPVEFHEIRQVKASFKKLMRACIPSTIPTDSEVTFLKALGDSEWFPQLHRIMQLAVVVSEVLENGSSVLVCLEEGWDITAQVTSLVQLLSDPFYRTLEGFQMLVEKEWLSFGHKFSQRSSLTLNCQGSGFAPVFLQFLDCVHQVHNQYPTEFEFNLYYLKFLAFHYVSNRFKTFLLDSDYERLEHGTLFDDKGEKHAKKGVCIWECIDRMHKRSPIFFNYLYSPLEIEALKPNVNVSSLKKWDYYIEETLSTGPSYDWMMLTPKHFPSEDSDLAGEAGPRSQRRTVWPCYDDVSCTQPDALTSLFSEIEKLEHKLNQAPEKWQQLWERVTVDLKEEPRTDRSQRHLSRSPGIVSTNLPSYQKRSLLHLPDSSMGEEQNSSISPSNGVERRAATLYSQYTSKNDENRSFEGTLYKRGALLKGWKPRWFVLDVTKHQLRYYDSGEDTSCKGHIDLAEVEMVIPAGPSMGAPKHTSDKAFFDIFTLHQVQGEVPPHFPWASIPKGNSEESRSPWPHPSLRVEQQMPGPYGKPPTLASADPPPHSPQAIHLPISELPDGTHVQSGCNMENGLEGHKRGSGETTSEPRPAPLDGQVHVPYGSYSTLVEDGRGFSGDDDSHSGVYGICGDLCASTCRHVLSEEVAMTQWHAASVGICVDMCLSAGMSIGACSPGGAHTRPGPEVQGCGLRAASPIHFSTIPKTPSFSALMTTSSSNIPAPVVGSASPLQGPLPISAAADPLPPHRRGPIFTSELLAPLSLAVSVLICPKSIFVSSRAGLSAAEASPEWRFASYLPLQDTSEVTDLPVEMQRAPEVFPGLSSSSLEWLTNRSHLPDLLRTGQPTSDRPIKWPGPAQMENPLHLTAVRCTGPWGSGMNSSTSTPCKQGFQTHPPNGNGDTRLAELDSNAALLSAWTLRGVENMSVEVQQSWYPLKPACGGTVFPGELLRIVLVHASGRKGNX

SEQ ID NO: 9247 - protein, 701 aa, Homo sapiens
MATYKVRVATGTDLLSGTRDSISLTIVGTQGESHKQLLNHFGRDFATGAVGQYTVQCPQDLGELIIIRLHKERYAFFPKDPWYCNYVQICAPNGRIYHFPAYQWMDGYETLALREATGKTTADDSLPVLLEHRKEEIRAKQDFYHWRVFLPGLPSYVHIPSYRPPVRRHRNPNRPEWNGYIPGFPILINFKATKFLNLNLRYSFLKTASFFVRLGPMALAFKVRGLLDCKHSWKRLKDIRKIFPGKKSVVSEYVAEHWAEDTFFGYQYLNGVNPGLIRRCTRIPDKFPVTDDMVAPFLGEGTCLQAELEKGNIYLADYRIMEGIPTVELSGRKQHHCAPLCLLHFGPEGKMMPIAIQLSQTPGPDCPIFLPSDSEWDWLLAKTWVRYAEFYSHEAIAHLLETHLIAEAFCLALLRNLPMCHPLYKLLIPHTRYTVQINSIGRAVLLNEGGLSAKGMSLGVEGFAGVMVRALSELTYDSLYLPNDFVERGVQDLPGYYYRDDSLAVWNALEKYVTEIITYYYPSDAAVEGDPELQSWVQEIFKECLLGRESSGFPRCLRTVPELIRYVTIVIYTCSAKHAAVNTGQMEFTAWMPNFPASMRNPPIQTKGLTTLETFMDTLPDVKTTCITLLVLWTLSREPDDRRPLGHFPDIHFVEEAPRRSIEAFRQRLNQISHDIRQRNKCLPIPYYYLDPVLIENSISI

SEQ ID NO: 9248 - protein, 200 aa, Homo sapiens [sequence omitted]

SEQ ID NO: 9249 - protein, 406 aa, Homo sapiens
MAPPGPASALSTSAEPLSRSIFRKFLLMLCSLLTSLYVFYCLAERCQTLSGPVVGLSGGGEEAGAPGGGVLAGGPRELAVWPAAAQRKRLLQLPQWRRRRPPAPRDDGEEAAWEEESPGLSGGPGGSGAGSTVAEAPPGTLALLLDEGSKQLPQAIIIGVKKGGTRALLEFLRVHPDVRAVGAEPHFFDRSYDKGLAWYRDLMPRTLDGQITMEKTPSYFVTREAPARISAMSKDTKLIVVVRDPVTRAISDYTQTLSKRPDIPTFESLTFKNRTAGLIDTSWSAIQIGIYAKHLEHWLRHFPIRQMLFVSGERLISDPAGELGRVQDFLGLKRIITDKHFYFNKTKGFPCLKKAEGSSRPHCLGKTKGRTHPEIDREVVRRLREFYRPFNLKFYQMTGHDFGWDG

SEQ ID NO: 9250 - protein, 1173 aa, Homo sapiens
MAGAQPGVHALQLKPVCVSDSLKKGTKFVKWDDDSTIVTPIILRTDPQGFFFYWTDQNKETELLDLSLVKDARCGRHAKAPKDPKLRELLDVGNIGRLEQRMITVVYGPDLVNISHLNLVAFQEEVAKEWTNEVFSLATNLLAQNMSRDAFLEKAYTKLKLQVTPEGRIPLKNIYRLFSADRKRVETALEACSLPSSRNDSIPQEDFTPEVYRVFLNNLCPRPEIDNIFSEFGAKSKPYLTVDQMMDFINLKQRDPRLNEILYPPLKQEQVQVLIEKYEPNNSLARKGQISVDGFMRYLSGEENGVVSPEKLDLNEDMSQPLSHYFINSSHNTYLTAGQLAGNSSVEMYRQVLLSGCRCVELDCWKGRTAEEEPVITHGFTMTTEISFKEVIEAIAECAFKTSPFPILLSFENHVDSPKQQAKMAEYCRLIFGDALLMEPLEKYPLESGVPLPSPMDLMYKILVKNKKKSHKSSEGSGKKKLSEQASNTYSDSSSMFEPSSPGAGEADTESDDDDDDDDCKKSSMDEGTAGSEAMATEEMSNLVNYIQPVKFESFEISKKRNKSFEMSSFVETKGLEQLTKSPVEFVEYNKMQLSRIYPKGTRVDSSNYMPQLFWNAGCQMVALNFQTMDLAMQINMGMYEYNGKSGYRLKPEFMRRPDKHFDPFTEGIVDGIVANTLSVKIISGQFLSDKKVGTYVEVDMFGLPVDTRRKAFKTKTSQGNAVNPVWEEEPIVFKKVVLPTLACLRIAVYEEGGKFIGHRILPVQAIRPGYHYICLRNERNQPLTLPAVFVYIEVKDYVPDTYADVIEALSNPIRYVNLMEQRAKQLAALTLEDEEEVKKEADPGETPSEAPSEARTTPAENGVNHTTTLTPKPPSQALHSQPAPGSVKAPAKTEDLIQSVLTEVEAQTIEELKQQKSFVKLQKKHYKEMKDLVKRHHKKTTDLIKEHTTKYNEIQNDYLRRRAALEKSAKKDSKKKSEPSSPDHGSSTIEQDLAALDAEMTQKLIDLKDKQQQQLLNLRQEQYYSEKYQKREHIKLLIQKLTDVAEECQNNQLKKLKEICEKEKKELKKKMDKKRQEKITEAKSKDKSQMEEEKTEMIRSYIQEVVQYIKRLEEAQSKRQEKLVEKHKEIRQQILDEKPKGEGSSSFLSETCHEDPSVSPNFTPPNPQALKW

SEQ ID NO: 9251 - protein, 1115 aa, Homo sapiens
MITVVYGPDLVNISHLNLVAFQEEVAKEWTNEVFSLATNLLAQNMSRDAFLEKAYTKLKLQVTPEGRIPLKNIYRLFSADRKRVETALEACSLPSSRNDSIPQEDFTPEVYRVFLNNLCPRPEIDNIFSEFGAKSKPYLTVDQMMDFINLKQRDPRLNEILYPPLKQEQVQVLIEKYEPNNSLARKGQISVDGFMRYLSGEENGVVSPEKLDLNEDMSQPLSHYFINSSHNTYLTAGQLAGNSSVEMYRQVLLSGCRCVELDCWKGRTAEEEPVITHGFTMTTEISFKEVIEAIAECAFKTSPFPILLSFENHVDSPKQQAKMAEYCRLIFGDALLMEPLEKYPLESGVPLPSPMDLMYKILVKNKKKSHKSSEGSGKKKLSEQASNTYSDSSSMFEPSSPGAGEADTESDDDDDDDDCKKSSMDEGTAGSEAMATEEMSNLVNYIQPVKFESFEISKKRNKSFEMSSFVETKGLEQLTKSPVEFVEYNKMQLSRIYPKGTRVDSSNYMPQLFWNAGCQMVALNFQTMDLAMQINMGMYEYNGKSGYRLKPEFMRRPDKHFDPFTEGIVDGIVANTLSVKIISGQFLSDKKVGTYVEVDMFGLPVDTRRKAFKTKTSQGNAVNPVWEEEPIVFKKVVLPTLACLRIAVYEEGGKFIGHRILPVQAIRPGYHYICLRNERNQPLTLPAVFVYIEVKDYVPDTYADVIEALSNPIRYVNLMEQRAKQLAALTLEDEEEVKKEADPGETPSEAPSEARTTPAENGVNHTTTLTPKPPSQALHSQPAPGSVKAPAKTEDLIQSVLTEVEAQTIEELKQQKSFVKLQKKHYKEMKDLVKRHHKKTTDLIKEHTTKYNEIQNDYLRRRAALEKSAKKDSKKKSEPSSPDHGSSTIEQDLAALDAEMTQKLIDLKDKQQQQLLNLRQEQYYSEKYQKREHIKLLIQKLTDVAEECQNNQLKKLKEICEKEKKELKKKMDKKRQEKITEAKSKDKSQMEEEKTEMIRSYIQEVVQYIKRLEEAQSKRQEKLVEKHKEIRQQILDEKPKLQVELEQEYQDKFKRLPLEILEFVQEAMKGKISEDSNHGSAPLSLSSDPGKVNHKTPSSEELGGDIPGKEFDTPL

SEQ ID NO: 9252 - protein, 1173 aa, Homo sapiens; identical to SEQ ID NO: 9250

SEQ ID NO: 9253 - protein, 1216 aa, Homo sapiens
MAGAQPGVHALQLKPVCVSDSLKKGTKFVKWDDDSTIVTPIILRTDPQGFFFYWTDQNKETELLDLSLVKDARCGRHAKAPKDPKLRELLDVGNIGRLEQRMITVVYGPDLVNISHLNLVAFQEEVAKEWTNEVFSLATNLLAQNMSRDAFLEKAYTKLKLQVTPEGRIPLKNIYRLFSADRKRVETALEACSLPSSRNDSIPQEDFTPEVYRVFLNNLCPRPEIDNIFSEFGAKSKPYLTVDQMMDFINLKQRDPRLNEILYPPLKQEQVQVLIEKYEPNNSLARKGQISVDGFMRYLSGEENGVVSPEKLDLNEDMSQPLSHYFINSSHNTYLTAGQLAGNSSVEMYRQVLLSGCRCVELDCWKGRTAEEEPVITHGFTMTTEISFKEVIEAIAECAFKTSPFPILLSFENHVDSPKQQAKMAEYCRLIFGDALLMEPLEKYPLESGVPLPSPMDLMYKILVKNKKKSHKSSEGSGKKKLSEQASNTYSDSSSMFEPSSPGAGEADTESDDDDDDDDCKKSSMDEGTAGSEAMATEEMSNLVNYIQPVKFESFEISKKRNKSFEMSSFVETKGLEQLTKSPVEFVEYNKMQLSRIYPKGTRVDSSNYMPQLFWNAGCQMVALNFQTMDLAMQINMGMYEYNGKSGYRLKPEFMRRPDKHFDPFTEGIVDGIVANTLSVKIISGQFLSDKKVGTYVEVDMFGLPVDTRRKAFKTKTSQGNAVNPVWEEEPIVFKKVVLPTLACLRIAVYEEGGKFIGHRILPVQAIRPGYHYICLRNERNQPLTLPAVFVYIEVKDYVPDTYADVIEALSNPIRYVNLMEQRAKQLAALTLEDEEEVKKEADPGETPSEAPSEARTTPAENGVNHTTTLTPKPPSQALHSQPAPGSVKAPAKTEDLIQSVLTEVEAQTIEELKQQKSFVKLQKKHYKEMKDLVKRHHKKTTDLIKEHTTKYNEIQNDYLRRRAALEKSAKKDSKKKSEPSSPDHGSSTIEQDLAALDAEMTQKLIDLKDKQQQQLLNLRQEQYYSEKYQKREHIKLLIQKLTDVAEECQNNQLKKLKEICEKEKKELKKKMDKKRQEKITEAKSKDKSQMEEEKTEMIRSYIQEVVQYIKRLEEAQSKRQEKLVEKHKEIRQQILDEKPKLQVELEQEYQDKFKRLPLEILEFVQEAMKGKISEDSNHGSAPLSLSSDPGKVNHKTPSSEELGGDIPGKEFDTPL

SEQ ID NO: 9254 - protein, 193 aa, Homo sapiens
MAGAQPGVHALQLKPVCVSDSLKKGTKFVKWDDKSWTMEEQEYGRHEGNVEGELPALKHDAECKTVSTERPDLYYLCREDSTIVTPIILRTDPQGFFFYWTDQNKLFCQPLLETEGLPGQWALGFEKSLRHRCSWKLSVGIHENTWAPPAATTLVALISEDIGVAQMPLWELKGEASPAEDKPVKNQVLNDVI

SEQ ID NO: 9255 - protein, 1216 aa, Homo sapiens; identical to SEQ ID NO: 9253

SEQ ID NO: 9256 - protein, 1299 aa, Homo sapiens
MAYSWQTDPNPNESHEKQYEHQEFLFVNQPHSSSQVSLGFDQIVDEISGKIPHYESEIDENTFFVPTAPKWDSTGHSLNEAHQISLNEFTSKSRELSWHQVSKAPAIGFSPSVLPKPQNTNKECSWGSIGKHHGADDSRFSILALSFTSLDKINLEKELENENHNYHIGFESSIPPTNSSFSSDFMPKEENKRSGHVNIVEPSLMLLKGSLQPGMWESTWQKNIESIGCSIQLVEVPQSSNTSLASFCNKVKKIRERYHAADVNFNSGKIWSTTTAFPYQLFSKTKFNIHIFIDNSTQPLHFMPCANYLVKDLIAEILHFCTNDQLLPKDHILSVCGSEEFLQNDHCLGSHKMFQKDKSVIQLHLQKSREAPGKLSRKHEEDHSQFYLNQLLEFMHIWKVSRQCLLTLIRKYDFHLKYLLKTQENVYNIIEEVKKICSVLGCVETKQITDAVNELSLILQRKGENFYQSSETSAKGLIEKVTTELSTSIYQLINVYCNSFYADFQPVNVPRCTSYLNPGLPSHLSFTVYAAHNIPETWVHRINFPLEIKSLPRESMLTVKLFGIACATNNANLLAWTCLPLFPKEKSILGSMLFSMTLQSEPPVEMITPGVWDVSQPSPVTLQIDFPATGWEYMKPDSEENRSNLEEPLKECIKHIARLSQKQTPLLLSEEKKRYLWFYRFYCNNENCSLPLVLGSAPGWDERTVSEMHTILRRWTFSQPLEALGLLTSSFPDQEIRKVAVQQLDNLLNDELLEYLPQLVQAVKFEWNLESPLVQLLLHRSLQSIQVAHRLYWLLKNAENEAYFKSWYQKLLAALQFCAGKALNDEFSKEQKLIKILGDIGERVKSASDHQRQEVLKKEIGRLEEFFQDVNTCHLPLNPALCIKGIDHDACSYFTSNALPLKITFINANLMGKNISIIFKAGDDLRQDMLVLQLIQVMDNIWLQEGLDMQMIIYRCLSTGKDQGLVQMVPDAVTLAKIHRHSGLIGPLKENTIKKWFSQHNHLKADYEKALRNFFYSCAGWCVVTFILGVCDRHNDNIMLTKSGHMFHIDFGKFLGHAQTFGGIKRDRAPFIFTSEMEYFITEGGKNPQHFQDFVELCCRAYNIIRKHSQLLLNLLEMMLYAGLPELSGIQDLKYVYNNLRPQDTDLEATSHFTKKIKESLECFPVKLNNLIHTLAQMSAISPAKSTSQTFPQESCLLSTTRSIERATILGFSKKSSNLYLIQVTHSNNETSLTEKSFEQFSKLHSQLQKQFASLTLPEFPHWWHLPFTNSDHRRFRDLNHYMEQILNVSHEVTNVCYN

SEQ ID NO: 9257 - protein, 564 aa, Homo sapiens
MARKKLKKFTTLEIVLSVLLLVLFIISIVLIVLLAKESLKSTAPDPGTTGTPDPGTTGTPDPGTTGTTHARTTGPPDPGTTGTTPVSAECPVVNELERINCIPDQPPTKATCDQRGCCWNPQGAVSVPWCYYSKNHSYHVEGNLVNTNAGFTARLKNLPSSPVFGSNVDNVLLTAEYQTSNRFHFKLTDQTNNRFEVPHEHVQSFSGNAAASLTYQVEISRQPFSIKVTRRSNNRVLFDSSIGPLLFADQFLQLSTRLPSTNVYGLGEHVHQQYRHDMNWKTWPIFNRDTTPNGNGTNLYGAQTFFLCLEDASGLSFGVFLMNSNAMEVVLQPAPAITYRTIGGILDFYVFLGNTPEQVVQEYLELIGRPALPSYWALGFHLSRYEYGTLDNMREVVERNRAAQLPYDVQHADIDYMDERRDFTYDSVDFKGFPEFVNELHNNGQKLVIIVDPAISNNSSSSKPYGPYDRGSDMKIWVNSSDGVTPLIGEVWPGQTVFPDYTNPNCAVWWTKEFELFHNQVEFDGIWIDMNEVSNFVDGSVSGCSTNNLNNPPFTPSKSWWSAD

SEQ ID NO: 9258 - protein, 1274 aa, Homo sapiens
  VARIANT (1)...(1274): Xaa = Any Amino Acid
MARKKLKKFTTLEIVLSVLLLVLFIISIVLIVLLAKESLKSTAPDPGTTGTPDPGTTGTPDPGTTGTTHARTTGPPDPGTTGTTPVSAECPVVNELERINCIPDQPPTKATCDQRGCCWNPQGAVSVPWCYYSKNHSYHVEGNLVNTNAGFTARLKNLPSSPVFGSNVDNVLLTAEYQTSNRFHFKLTDQTNNRFEVPHEHVQSFSGNAAASLTYQVEISRQPFSIKVTRRSNNRVLFDSSIGPLLFADQFLQLSTRLPSTNVYGLGEHVHQQYRHDMNWKTWPIFNRDTTPNGNGTNLYGAQTFFLCLEDASGLSFGVFLMNSNAMEVVLQPAPAITYRTIGGILDFYVFLGNTPEQVVQEYLELIGRPALPSYWALGFHLSRYEYGTLDNMREVVERNRAAQLPYDVQHADIDYMDERRDFTYDSVDFKGFPEFVNELHNNGQKLVIIVDPAISNNSSSSKPYGPYDRGSDMKIWVNSSDGVTPLIGEVWPGQTVFPDYTNPNCAVWWTKEFELFHNQVEFDGIWIDMNEVSNFVDGSVSGCSTNNLNNPPFTPRILDGYLFCKTLCMDAVQHWGKQYDIHNLYGYSMAVATAEAAKTVFPNKRSFILTRSTFAGSGKFAAHWLGDNTATWDDLRWSIPGVLEFNLFGIPMVGPDICGFALDTPEELCRRWMQLGAFYPFSRNHNGQGYKDQDPASFGADSLLLNSSRHYLNIRYTLLPYLYTLFFRAHSRGDTVARPLLHEFYEDNSTWDVHQQFLWGPGLLITPVLDEGAEKVMAYVPDAVWYDYETGSQVRWRKQKVEMELPGDKIGLHLRGGYIFPTQQPNTTTLASRKNPLGLIIALDENKEAKGELFWDDGETKDTVANKVYLLCEFSVTQNRLEVNISQSTYKDPNNLAFNEIKILGTEEPSNVTVKHNGVPSQTSPTVTYDSNLKVAIITDIDLLLGEAYTVEWSIKIRDEEKIDCYPDENGASAENCTARGCIWEASNSSGVPFCYFVNDLYSVSDVQYNSHGATADISLKSSVYANAFPSTPVNPLRLDVTYHKNEMLQFKIYDPNKNRYEVPVPLNIPSMPSSTPEGQLYDVLIKKNPFGIEIRRKSTGTIIWDSQLLGFTFSDMFIRISTRLPSKYLYGFGETEHRSYRRDLEWHTWGMFSRDQPPGYKKNSYGVHPYYMGLEEDGSAHGVLLLNSNAMDVTFQPLPALTYRTTGGVLDFYVFLGPTPELVTQQYTELIGRPVMVPYWSLGFQLCRYGYQNDSEIASLYDEMVAAQIPYX

SEQ ID NO: 9259 - protein, 1274 aa, Homo sapiens; identical to SEQ ID NO: 9258
  VARIANT (1)...(1274): Xaa = Any Amino Acid

SEQ ID NO: 9260 - protein, 467 aa, Homo sapiens
  VARIANT (1)...(467): Xaa = Any Amino Acid
MVFAMRACPLFQSDGFQSESKEQFINRKNPLGLIIALDENKEAKGELFWDDGETKDTVANKVYLLCEFSVTQNRLEVNISQSTYKDPNNLAFNEIKILGTEEPSNVTVKHNGVPSQTSPTVTYDSNLKVAIITDIDLLLGEAYTVEWSIKIRDEEKIDCYPDENGASAENCTARGCIWEASNSSGVPFCYFVNDLYSVSDVQYNSHGATADISLKSSVYANAFPSTPVNPLRLDVTYHKNEMLQFKIYDPNKNRYEVPVPLNIPSMPSSTPEGQLYDVLIKKNPFGIEIRRKSTGTIIWDSQLLGFTFSDMFIRISTRLPSKYLYGFGETEHRSYRRDLEWHTWGMFSRDQPPGYKKNSYGVHPYYMGLEEDGSAHGVLLLNSNAMDVTFQPLPALTYRTTGGVLDFYVFLGPTPELVTQQYTELIGRPVMVPYWSLGFQLCRYGYQNDSEIASLYDEMVAAQIPYX

SEQ ID NO: 9261 - protein, 506 aa, Homo sapiens
MAGEVSAATGRFSLERLGLPGLALAAALLLLALCLLVRRTRRPGEPPLIKGWLPYLGVVLNLRKDPLRFMKTLQKQHGDTFTVLLGGKYITFILDPFQYQLVIKNHKQLSFRVFSNKLLEKAFSISQLQKNHDMNDELHLCYQFLQGKSLDILLESMMQNLKQVFEPQLLKTTSWDTAELYPFCSSIIFEITFTTIYGKVIVCDNNKFISELRDDFLKFDDKFAYLVSNIPIELLGNVKSIREKIIKCFSSEKLAKMQGWSEVFQSRQDVLEKYYVHEDLEIGAHHLGFLWASVANTIPTMFWAMYYLLRHPEAMAAVRDEIDRLLQSTGQKKGSGFPIHLTREQLDSLICLESSIFEALRLSSYSTTIRFVEEDLTLSSETGDYCVRKGDLVAIFPPVLHGDPEIFEAPEEFRYDRFIEDGKKKTTFFKRGKKLKCYLMPFGTGTSKCPGRFFALMEIKQLLVILLTYFDLEIIDDKPIGLNYSRLLFGIQYPDSDVLFRYKVKS

SEQ ID NO: 9262 - protein, 437 aa, Homo sapiens [sequence omitted]

SEQ ID NO: 9263 - protein, 610 aa, Homo sapiens
MSVQVVSAAAAAKVPEVELKDLSPSEAESQLGLSTAAVGAMAPPAGGGDPEAPAPAAERPPVPGPGSGPAAALSPAAGKVPQASAMKRSDPHHQHQRHRDGGEALVSPDGTVTEAPRTVKKIQFADQKQEFNKRPTKIGRRSLSRSISQSSTDSYSSAASYTDSSDDETSPRDKQQKNSKGSSDFCVKNIKQAEFGRREIEIAEQEMPALMALRKRAQGEKPLAGAKIVGCTHITAQTAVLMETLGALGAQCRWAACNIYSTLNEVAAALAESGFPVFAWKGESEDDFWWCIDRCVNVEGWQPNMILDDGGDLTHWIYKKYPNMFKKIKGIVEESVTGVHRLYQLSKAGKLCVPAMNVNDSVTKQKFDNLYCCRESILDGLKRTTDMMFGGKQVVVCGYGEVGKGCCAALKAMGSIVYVTEIDPICALQACMDGFRLVKLNEVIRQVDIVITCTGNKNVVTREHLDRMKNSCIVCNMGHSNTEIDVASLRTPELTWERVRSQVDHVIWPDGKRIVLLAEGRLLNLSCSTVPTFVLSITATTQALALIELYNAPEGRYKQDVYLLPKKMDEYVASLHLPTFDAHLTELTDEQAKYLGLNKNGPFKPNYYRY

SEQ ID NO: 9264 - protein, 261 aa, Homo sapiens
MLRVLCLLRPWRPLRARGCASDGAAGGSEIQVRALAGPDQGITEILMNRPSARNALGNVFVSELLETLAQLREDRQVRVLLFRSGVKGVFCAGADLKEREQMSEAEVGVFVQRLRGLMNDIASSAVMGLIETTRGLLPGAGGTQRLPRCLGVALAKELIFTGRRLSGTEAHVLGLVNHAVAQNEEGDAAYQRARALAQEILPQAPIAVRLGKVAIDRGTEVDIASGMAIEGMCYAQNIPTRDRLEGMAAFREKRTPKFVGK

SEQ ID NO: 9265 - protein, 261 aa, Homo sapiens; identical to SEQ ID NO: 9264

SEQ ID NO: 9266 - protein, 137 aa, Homo sapiens
MNRPSARNALGNVFVSELLETLAQLREDRQVRVLLFRSGVKGVFCAGADLKEREQMSEAEVGVFVQRLRGLMNDIAAFPAPTIAAMDGFALGGGLELALACDLRVAGTLLVPSVVPRVILSGSLKQTEEGQPSFFHL

SEQ ID NO: 9267 - protein, 211 aa, Homo sapiens [sequence omitted]

SEQ ID NO: 9268 - protein, 578 aa, Homo sapiens [sequence omitted]

SEQ ID NO: 9269 - protein, 242 aa, Homo sapiens [sequence omitted]

SEQ ID NO: 9270 - protein, 270 aa, Homo sapiens
MAPWGKRLAGVRGVLLDISGVLYDSGAGGGTAIAGSVEAVARLKRSRLKVRFCTNESQKSRAELVGQLQRLGFDISEQEVTAPAPAACQILKERGLRPYLLIHDGVRSEFDQIDTSNPNCVVIADAGESFSYQNMNNAFQVLMELEKPVLISLGKGRYYKETSGLMLDVGPYMKALEYACGIKAEVVGKPSPEFFKSALQAIGVEAHQAVMIGDDIVGDVGGAQRCGMRALQVRTGKFRPSDEHHPEVKADGYVDNLAEAVDLLLQHADK

SEQ ID NO: 9271 - protein, 140 aa, Homo sapiens
MGTWTTSQRQWTCCCSTPTSDGLLGEPRLLHPCLSSTPASPPPLPLLHPPRRAPPPPPLPLLHPCLPSTCPSAQTNQGPDSPAFCPLPCMGRHLFPTWVACSPAWALTSAPCSEVQEGGTGLSGLWESPKSQNSPLTMGL

SEQ ID NO: 9272 - protein, 257 aa, Homo sapiens [sequence omitted]

SEQ ID NO: 9273 - protein, 541 aa, Homo sapiens [sequence omitted]

SEQ ID NO: 9274 - protein, 384 aa, Homo sapiens
MKVTSLDGRQLRKMLRKEAAARCVVLDCRPYLAFAASNVRGSLNVNLNSVVLRRARGGAVSARYVLPDEAARARLLQEGGGGVAAVVVLDQGSRHWQKLREESAARVVLTSLLACLPAGPRVYFLKGGYETFYSEYPECCVDVKPISQEKIESERALISQCGKPVVNVSYRPAYDQGGPVEILPFLYLGSAYHASKCEFLANLHITALLNVSRRTSEACMTHLHYKWIPVEDSHTADISSHFQEAIDFIDCVREKGGKVLVHCEAGISRSPTICMAYLMKTKQFRLKEAFDYIKQRRSMVSPNFGFMGQLLQYESEILPSTPNPQPPSCQGEAAGSSLIGHLQTLSPDMQGAYCTFPASVLAPVPTHSTVSELSRSPVATATSC

SEQ ID NO: 9275 - protein, 477 aa, Homo sapiens
MGSRVTDGTHSHKTLRGRRNPRLLGRRAAGLAIERAGRERGVAPPLGRRAPSRPQPRGSPSRASPADTLAVDTLAVGTRGARGAGPLAGGGGGMKVTSLDGRQLRKMLRKEAAARCVVLDCRPYLAFAASNVRGSLNVNLNSVVLRRARGGAVSARYVLPDEAARARLLQEGGGGVAAVVVLDQGSRHWQKLREESAARVVLTSLLACLPAGPRVYFLKGGYETFYSEYPECCVDVKPISQEKIESERALISQCGKPVVNVSYRPAYDQGGPVEILPFLYLGSAYHASKCEFLANLHITALLNVSRRTSEACMTHLHYKWIPVEDSHTADISSHFQEAIDFIDCVREKGGKVLVHCEAGISRSPTICMAYLMKTKQFRLKEAFDYIKQRRSMVSPNFGFMGQLLQYESEILPSTPNPQPPSCQGEAAGSSLIGHLQTLSPDMQGAYCTFPASVLAPVPTHSTVSELSRSPVATATSC

SEQ ID NO: 9276 - protein, 39 aa, Homo sapiens
MLLFSMVCKTFETIEIFLNNNFQILLNTSIVLINVLIMR

SEQ ID NO: 9277 - protein, 1306 aa, Homo sapiens
MTMYLWLKLLAFGFAFLDTEVFVTGQSPTPSPTGLTTAKMPSVPLSSDPLPTHTTAFSPASTFERENDFSETTTSLSPDNTSTQVSPDSLDNASAFNTTGVSSVQTPHLPTHADSQTPSAGTDTQTFSGSAANAKLNPTPGSNAISDVPGERSTASTFPTDPVSPLTTTLSLAHHSSAALPARTSNTTITANTSDAYLNASETTTLSPSGSAVISTTTIATTPSKPTCDEKYANITVDYLYNKETKLFTAKLNVNENVECGNNTCTNNEVHNLTECKNASVSISHNSCTAPDKTLILDVPPGVEKFQLHDCTQVEKADTTICLKWKNIETFTCDTQNITYRFQCGNMIFDNKEIKLENLEPEHEYKCDSEILYNNHKFTNASKIIKTDFGSPGEPQIIFCRSEAAHQGVITWNPPQRSFHNFTLCYIKETEKDCLNLDKNLIKYDLQNLKPYTKYVLSLHAYIIAKVQRNGSAAMCHFTTKSAPPSQVWNMTVSMTSDNSMHVKCRPPRDRNGPHERYHLEVEAGNTLVRNESHKNCDFRVKDLQYSTDYTFKAYFHNGDYPGEPFILHHSTSYNSKALIAFLAFLIIVTSIALLVVLYKIYDLHKKRSCNLDEQQELVERDDEKQLMNVEPIHADILLETYKRKIADEGRLFLAEFQSIPRVFSKFPIKEARKPFNQNKNRYVDILPYDYNRVELSEINGDAGSNYINASYIDGFKEPRKYIAAQGPRDETVDDFWRMIWEQKATVIVMVTRCEEGNRNKCAEYWPSMEEGTRAFGDVVVKINQHKRCPDYIIQKLNIVNKKEKATGREVTHIQFTSWPDHGVPEDPHLLLKLRRRVNAFSNFFSGPIVVHCSAGVGRTGTYIGIDAMLEGLEAENKVDVYGYVVKLRRQRCLMVQVEAQYILIHQALVEYNQFGETEVNLSELHPYLHNMKKRDPPSEPSPLEAEFQRLPSYRSWRTQHIGNQEENKSKNRNSNVIPYDYNRVPLKHELEMSKESEHDSDESSDDDSDSEEPSKYINASFIMSYWKPEVMIAAQGPLKETIGDFWQMIFQRKVKVIVMLTELKHGDQEICAQYWGEGKQTYGDIEVDLKDTDKSSTYTLRVFELRHSKRKDSRTVYQYQYTNWSVEQLPAEPKELISMIQVVKQKLPQKNSSEGNKHHKSTPLLIHCRDGSQQTGIFCALLNLLESAETEEVVDIFQVVKALRKARPGMVSTFEQYQFLYDVIASTYPAQNGQVKKNNHQEDKIEFDNEVDKVKQDANCVNPLGAPEKLPEAKEQAEGSEPTSGTEGPEHSVNGPASPALNQGS

SEQ ID NO: 9278 - protein, 1258 aa, Homo sapiens
MTMYLWLKLLAFGFAFLDTEVFVTGQSPTPSPTGLTTAKMPSVPLSSDPLPTHTTAFSPASTFERENDFSETTTSLSPDNTSTQVSPDSLDNASAFNTTGVSSVQTPHLPTHADSQTPSAGTDTQTFSGSAANAKLNPTPGSNAISDAYLNASETTTLSPSGSAVISTTTIATTPSKPTCDEKYANITVDYLYNKETKLFTAKLNVNENVECGNNTCTNNEVHNLTECKNASVSISHNSCTAPDKTLILDVPPGVEKFQLHDCTQVEKADTTICLKWKNIETFTCDTQNITYRFQCGNMIFDNKEIKLENLEPEHEYKCDSEILYNNHKFTNASKIIKTDFGSPGEPQIIFCRSEAAHQGVITWNPPQRSFHNFTLCYIKETEKDCLNLDKNLIKYDLQNLKPYTKYVLSLHAYIIAKVQRNGSAAMCHFTTKSAPPSQVWNMTVSMTSDNSMHVKCRPPRDRNGPHERYHLEVEAGNTLVRNESHKNCDFRVKDLQYSTDYTFKAYFHNGDYPGEPFILHHSTSYNSKALIAFLAFLIIVTSIALLVVLYKIYDLHKKRSCNLDEQQELVERDDEKQLMNVEPIHADILLETYKRKIADEGRLFLAEFQSIPRVFSKFPIKEARKPFNQNKNRYVDILPYDYNRVELSEINGDAGSNYINASYIDGFKEPRKYIAAQGPRDETVDDFWRMIWEQKATVIVMVTRCEEGNRNKCAEYWPSMEEGTRAFGDVVVKINQHKRCPDYIIQKLNIVNKKEKATGREVTHIQFTSWPDHGVPEDPHLLLKLRRRVNAFSNFFSGPIVVHCSAGVGRTGTYIGIDAMLEGLEAENKVDVYGYVVKLRRQRCLMVQVEAQYILIHQALVEYNQFGETEVNLSELHPYLHNMKKRDPPSEPSPLEAEFQRLPSYRSWRTQHIGNQEENKSKNRNSNVIPYDYNRVPLKHELEMSKESEHDSDESSDDDSDSEEPSKYINASFIMSYWKPEVMIAAQGPLKETIGDFWQMIFQRKVKVIVMLTELKHGDQEICAQYWGEGKQTYGDIEVDLKDTDKSSTYTLRVFELRHSKRKDSRTVYQYQYTNWSVEQLPAEPKELISMIQVVKQKLPQKNSSEGNKHHKSTPLLIHCRDGSQQTGIFCALLNLLESAETEEVVDIFQVVKALRKARPGMVSTFEQYQFLYDVIASTYPAQNGQVKKNNHQEDKIEFDNEVDKVKQDANCVNPLGAPEKLPEAKEQAEGSEPTSGTEGPEHSVNGPASPALNQGS

SEQ ID NO: 9279 - protein, 1267 aa, Homo sapiens
MPSVPLSSDPLPTHTTAFSPASTFERENDFSETTTSLSPDNTSTQVSPDSLDNASAFNTTGVSSVQTPHLPTHADSQTPSAGTDTQTFSGSAANAKLNPTPGSNAISDVPGERSTASTFPTDPVSPLTTTLSLAHHSSAALPARTSNTTITANTSDAYLNASETTTLSPSGSAVISTTTIATTPSKPTCDEKYANITVDYLYNKETKLFTAKLNVNENVECGNNTCTNNEVHNLTECKNASVSISHNSCTAPDKTLILDVPPGVEKFQLHDCTQVEKADTTICLKWKNIETFTCDTQNITYRFQCGNMIFDNKEIKLENLEPEHEYKCDSEILYNNHKFTNASKIIKTDFGSPGEPQIIFCRSEAAHQGVITWNPPQRSFHNFTLCYIKETEKDCLNLDKNLIKYDLQNLKPYTKYVLSLHAYIIAKVQRNGSAAMCHFTTKSAPPSQVWNMTVSMTSDNSMHVKCRPPRDRNGPHERYHLEVEAGNTLVRNESHKNCDFRVKDLQYSTDYTFKAYFHNGDYPGEPFILHHSTSYNSKALIAFLAFLIIVTSIALLVVLYKIYDLHKKRSCNLDEQQELVERDDEKQLMNVEPIHADILLETYKRKIADEGRLFLAEFQSIPRVFSKFPIKEARKPFNQNKNRYVDILPYDYNRVELSEINGDAGSNYINASYIDGFKEPRKYIAAQGPRDETVDDFWRMIWEQKATVIVMVTRCEEGNRNKCAEYWPSMEEGTRAFGDVVVKINQHKRCPDYIIQKLNIVNKKEKATGREVTHIQFTSWPDHGVPEDPHLLLKLRRRVNAFSNFFSGPIVVHCSAGVGRTGTYIGIDAMLEGLEAENKVDVYGYVVKLRRQRCLMVQVEAQYILIHQALVEYNQFGETEVNLSELHPYLHNMKKRDPPSEPSPLEAEFQRLPSYRSWRTQHIGNQEENKSKNRNSNVIPYDYNRVPLKHELEMSKESEHDSDESSDDDSDSEEPSKYINASFIMSYWKPEVMIAAQGPLKETIGDFWQMIFQRKVKVIVMLTELKHGDQEICAQYWGEGKQTYGDIEVDLKDTDKSSTYTLRVFELRHSKRKDSRTVYQYQYTNWSVEQLPAEPKELISMIQVVKQKLPQKNSSEGNKHHKSTPLLIHCRDGSQQTGIFCALLNLLESAETEEVVDIFQVVKALRKARPGMVSTFEQYQFLYDVIASTYPAQNGQVKKNNHQEDKIEFDNEVDKVKQDANCVNPLGAPEKLPEAKEQAEGSEPTSGTEGPEHSVNGPASPALNQGS

SEQ ID NO: 9280 - protein, 1219 aa, Homo sapiens [sequence omitted]

SEQ ID NO: 9281 - protein, 960 aa, Homo sapiens
MIFDNKEIKLENLEPEHEYKCDSEILYNNHKFTNASKIIKTDFGSPGEPQIIFCRSEAAHQGVITWNPPQRSFHNFTLCYIKETEKDCLNLDKNLIKYDLQNLKPYTKYVLSLHAYIIAKVQRNGSAAMCHFTTKSAPPSQVWNMTVSMTSDNSMHVKCRPPRDRNGPHERYHLEVEAGNTLVRNESHKNCDFRVKDLQYSTDYTFKAYFHNGDYPGEPFILHHSTSYNSKALIAFLAFLIIVTSIALLVVLYKIYDLHKKRSCNLDEQQELVERDDEKQLMNVEPIHADILLETYKRKIADEGRLFLAEFQSIPRVFSKFPIKEARKPFNQNKNRYVDILPYDYNRVELSEINGDAGSNYINASYIDGFKEPRKYIAAQGPRDETVDDFWRMIWEQKATVIVMVTRCEEGNRNKCAEYWPSMEEGTRAFGDVVVKINQHKRCPDYIIQKLNIVNKKEKATGREVTHIQFTSWPDHGVPEDPHLLLKLRRRVNAFSNFFSGPIVVHCSAGVGRTGTYIGIDAMLEGLEAENKVDVYGYVVKLRRQRCLMVQVEAQYILIHQALVEYNQFGETEVNLSELHPYLHNMKKRDPPSEPSPLEAEFQRLPSYRSWRTQHIGNQEENKSKNRNSNVIPYDYNRVPLKHELEMSKESEHDSDESSDDDSDSEEPSKYINASFIMSYWKPEVMIAAQGPLKETIGDFWQMIFQRKVKVIVMLTELKHGDQEICAQYWGEGKQTYGDIEVDLKDTDKSSTYTLRVFELRHSKRKDSRTVYQYQYTNWSVEQLPAEPKELISMIQVVKQKLPQKNSSEGNKHHKSTPLLIHCRDGSQQTGIFCALLNLLESAETEEVVDIFQVVKALRKARPGMVSTFEQYQFLYDVIASTYPAQNGQVKKNNHQEDKIEFDNEVDKVKQDANCVNPLGAPEKLPEAKEQAEGSEPTSGTEGPEHSVNGPASPALNQGS

SEQ ID NO: 9282 - protein, 1492 aa, Homo sapiens
MVPYWSLGFQLCRYGYQNDSEIASLYDEMVAAQIPYDVQYSDIDYMERQLDFTLSPKFAGFPALINRMKADGMRVILILDPAISGNETQPYPAFTRGVEDDVFIKYPNDGDIVWGKLYRAYVAFPDFFRNSTAKWWKREIEELYNNPQNPERSLKFDGMWIDMNEPSSFVNGAVSPGCRDASLNHPPYMPHLESRDRGLSSKTLCMESQQILPDGSLVQHYNVHNLYGWSQTRPTYEAVQEVTGQRGVVITRSTFPSSGRWAGHWLGDNTAAWDQLKKSIIGSFYFLLFQTGADICGFFQDAEYEMCVRWMQLGAFYPFSRNHNTIGTRRQDPVSWDAAFVNISRNVLQTRYTLLPYLYTLMQKAHTEGVTVVRPLLHEFVSDQVTWDIDSQFLLGPAFLVSPVLERNARNVTAYFPRARWYDYYTGVDINARGEWKTLPAPLDHINLHVRGGYILPWQEPALNTHLSRKNPLGLIIALDENKEAKGELFWDDGQTKDTVAKKVYLLCEFSVTQNHLEVTISQSTYKDPNNLAFNEIKILGMEEPSNVTVKHNGVPSQTSPTVTYDSNLKVAIITDINLFLGEAYTVEWSIKIRDEEKIDCYPDENGDSAENCTARGCIWEASNSSGVPFCYFVNDLYSVSDVQYNSHGATADISLKSSVHANAFPSTPVNPLRLDVTYHKNEMLQFKIYDPNNNRYEVPVPLNIPSVPSSTPEGQLYDVLIKKNPFGIEIRRKSTGTIIWDSQLLGFTFNDMFIRISTRLPSKYLYGFGETEHTSYRRDLEWHTWGMFSRDQPPGYKKNSYGVHPYYMGLEEDGSAHGVLLLNSNAMDVTFQPLPALTYRTTGGVLDFYVFLGPTPELVTQQYTELIGRPVMVPYWSLGFQLCRYGYQNDSEISSLYDEMVAAQIPYDVQYSDIDYMERQLDFTLSPKFAGFPALINRMKADGMRVILILDPAISGNETQPYPAFTRGVEDDVFIKYPNDGDIVWGKVWPDFPDVVVNGSLDWDSQVELYRAYVAFPDFFRNSTAKWWKREIEELYNNPQNPERSLKFDGMWIDMNEPSSFVNGAVSPGCRDASLNHPPYMPYLESRDRGLSSKTLCMESQQILPDGSPVQHYNVHNLYGWSQTRPTYEAVQEVTGQRGVVITRSTFPSSGRWAGHWLGDNTAAWDQLKKSIIGMMEFSLFGISYTGADICGFFQDAEYEMCVRWMQLGAFYPFSRNHNTIGTRRQDPVSWDVAFVNISRTVLQTRYTLLPYLYTLMHKAHTEGVTVVRPLLHEFVSDQVTWDIDSQFLLGPAFLVSPVLERNARNVTAYFPRARWYDYYTGVDINARGEWKTLPAPLDHINLHVRGGYILPWQEPALNTHLSRQKFMGFKIALDDEGTAGGWLFWDDGQSIDTYGKGLYYLASFSASQNTMQSHIIFNNYITGTNPLKLGYIEIWGVGSVPVTSVSISVSGMVITPSFNNDPTTQVLSIDVTDRNISLHNFTSLTWISTL

SEQ ID NO: 9283 - protein, 518 aa, Homo sapiens [sequence omitted]

SEQ ID NO: 9284 - protein, 611 aa, Homo sapiens
MPEIVDTCSLASPASVCRTKHLHLRCSVDFTRRTLTGTAALTVQSQEDNLRSLVLDTKDLTIEKVVINGQEVKYALGERQSYKGSPMEISLPIALSKNQEIVIEISFETSPKSSALQWLTPEQTSGKEHPYLFSQCQAIHCRAILPCQDTPSVKLTYTAEVSVPKELVALMSAIRDGETPDPEDPSRKIYKFIQKVPIPCYLIALVVGALESRQIGPRTLVWSEKEQVEKSAYEFSETESMLKIAEDLGGPYVWGQYDLLVLPPSFPYGGMENPCLTFVTPTLLAGDKSLSNVIAHEISHSWTGNLVTNKTWDHFWLNEGHTVYLERHICGRLFGEKFRHFNALGGWGELQNSVKTFGETHPFTKLVVDLTDIDPDVAYSSVPYEKGFALLFYLEQLLGGPEIFLGFLKAYVEKFSYKSITTDDWKDFLYSYFKDKVDVLNQVDWNAWLYSPGLPPIKPNYDMTLTNACIALSQRWITAKEDDLNSFNATDLKDLSSHQLNEFLAQTLQRAPLPLGHIKRMQEVYNFNAINNSEIRFRWLRLCIQSKWEDAIPLALKMATEQGRMKFTRPLFKDLAAFDKSHDQAVRTYQEHKASMHPVTAMLVGKDLKVD

SEQ ID NO: 9285 - protein, 555 aa, Homo sapiens
MPEIVDTCSLASPASVCRTKHLHLRCSVDFTRRTLTGTAALTVQSQEDNLRSLVLDTKDLTIEKVVINGQEVKYALGERQSYKGSPMEISLPIALSKNQEIVIEISFETSPKSSALQWLTPEQTSGKEHPYLFSQCQAIHCRAILPCQDTPSVKLTYTAEVSVPKELVALMSAIRDGETPDPEDPSRKIYKFIQKVPIPCYLIALVVGALESRQIGPRTLVWSEKEQVEKSAYEFSETESMLKIAEDLGGPYVWGQYDLLVLPPSFPYGGMENPCLTFVTPTLLAGDKSLSNVIAHEISHSWTGNLVTNKTWDHFWLNEGHTVYLERHICGRLFGEKFRHFNALGGWGELQNSVKTFGETHPFTKLVVDLTDIDPDVAYSSVPYEKGFALLFYLEQLLGGPEIFLGFLKAYVEKFSYKSITTDDWKDFLYSYFKDKVDVLNQVDWNAWLYSPGLPPIKPNYDMTLTNACIALSQRWITAKEDDLNSFNATDLKDLSSHQLNEFLAQTLQRAPLPLGHIKRMQEVYNFNAINNSEIRFRYIILTCLCGRKQKTKLL

SEQ ID NO: 9286 - protein, 610 aa, Homo sapiens [sequence omitted]

SEQ ID NO: 9287 - protein, 494 aa, Homo sapiens [sequence omitted]

SEQ ID NO: 9288 - protein, 368 aa, Homo sapiens
MPYQYPALTPEQKKELSDIAHRIVAPGKGILAADESTGSIAKRLQSIGTENTEENRRFYRQLLLTADDRVNPCIGGVILFHETLYQKADDGRPFPQVIKSKGGVVGIKVDKGVVPLAGTNGETTTQGLDGLSERCAQYKKDGADFAKWRCVLKIGEHTPSALAIMENANVLARYASICQQVGLQNGIVPIVEPEILPDGDHDLKRCQYVTEKVLAAVYKALSDHHIYLEGTLLKPNMVTPGHACTQKFSHEEIAMATVTALRRTVPPAVTGITFLSGGQSEEEASINLNAINKCPLLKPWALTFSYGRALQASALKAWGGKKENLKAAQEEYVKRALANSLACQGKYTPSGQAGAAASESLFVSNHAY

SEQ ID NO: 9289 - protein, 364 aa, Homo sapiens
MPYQYPALTPEQKKELSDIAHRIVAPGKGILAADESTGSIAKRLQSIGTENTEENRRFYRQLLLTADDRVNPCIGGVILFHETLYQKADDGRPFPQVIKSKGGVVGIKVDKGVVPLAGTNGETTTQGLDGLSERCAQYKKDGADFAKWRCVLKIGEHTPSALAIMENANVLARYASICQQNGIVPIVEPEILPDGDHDLKRCQYVTEKVLAAVYKALSDHHIYLEGTLLKPNMVTPGHACTQKFSHEEIAMATVTALRRTVPPAVTGITFLSGGQSEEEASINLNAINKCPLLKPWALTFSYGRALQASALKAWGGKKENLKAAQEEYVKRALANSLACQGKYTPSGQAGAAASESLFVSNHAY

SEQ ID NO: 9290 - protein, 364 aa, Homo sapiens; identical to SEQ ID NO: 9289

SEQ ID NO: 9291 - protein, 364 aa, Homo sapiens; identical to SEQ ID NO: 9289

SEQ ID NO: 9292 - protein, 364 aa, Homo sapiens; identical to SEQ ID NO: 9289

SEQ ID NO: 9293 - protein, 384 aa, Homo sapiens
MTVTWTTWVPTRSEVQFGLQPSGPLPLRAQGTFVPFVDGGILRRKLYIHRVTLRKLLPGVQYVYRCGSAQGWSRRFRFRALKNGAHWSPRLAVFGDLGADNPKAVPRLRRDTQQGMYDAVLHVGDFAYNLDQDNARVGDRFMRLIEPVAASLPYMTCPGNHEERYNFSNYKARFSMPGDNEGLWYSWDLGPAHIISFSTEVYFFLHYGRHLVQRQFRWLESDLQKANKNRAARPWIITMGHRPMYCSNADLDDCTRHESKVRKGLQGKLYGLEDLFYKYGVDLQLWAHEHSYERLWPIYNYQVFNGSREMPYTNPRGPVHIITGSAGCEERLTPFAVFPRPWSAVRVKEYGYTRLHILNGTHIHIQQVSDDQDGKIVDDVWVVR

SEQ ID NO: 9294 - protein, 290 aa, Homo sapiens
MMLESFQFTAPSTGQLYEMFSSVMKHLPGPQQQAFKELQGLEDFIAKKVEHNQCTLDPNSPRDFIDSFLIRMQGEEKNPNTEFYLKNLVLTTLNLFVGGTETVSTTLHYGFLLLMKHPEVEAKVHEIDRVIGKNQQPKFEDRAKTLYTEAVIHEIQRFGDLLPMGVSRRVKKDTKFRDFFLSKGIEVFPMLGSVLRDLRFFSNPRDFNPQHFLGEKGQFKKRDAFVPFSIRRRNCFREGLARMELFLYLTTIMQNFRFKSRQSPKDIVVSPKHVGFVTIPRNYTKCYLPC

SEQ ID NO: 9295 - protein, 588 aa, Homo sapiens
MSRNSSLPSEQHGDDLIVTPFAQVLASLRSVRNNFTILTNLHGTSNKRSPAASQPPVSRVNPQEESYQKLAMETLEELDWCLDQLETIQTYRSVSEMASNKFKRMLNRELTHLSEMSRSGNQVSEYISNTFLDKQNDVEIPSPTQKDREKKKKQQLMTQISGVKKLMHSSSLNNTSISRFGVNTENEDHLAKELEDLNKWGLNIFNVAGYSHNRPLTCIMYAIFQERDLLKTFRISSDTFITYMMTLEDHYHSDVAYHNSLHAADVAQSTHVLLSTPALDAVFTDLEILAAIFAAAIHDVDHPGVSNQFLINTNSELALMYNDESVLENHHLAVGFKLLQEEHCDIFMNLTKKQRQTLRKMVIDMVLATDMSKHMSLLADLKTMVETKKVTSSGVLLLDNYTDRIQVLRNMVHCADLSNPTKSLELYRQWTDRIMEEFFQQGDKERERGMEISPMCDKHTASVEKSQVGFIDYIVHPLWETWADLVQPDAQDILDTLEDNRNWYQSMIPQSPSPPLDEQNRDCQGLMEKFQFELTLDEEDSEGPEKEGEGHSYFSSTKTLCVIDPENRDSLGETDIDIATEDKSPVDT

SEQ ID NO: 9296 - protein, 564 aa, Homo sapiens
MKEHGGTFSSTGISGGSGDSAMDSLQPLQPNYMPVCLFAEESYQKLAMETLEELDWCLDQLETIQTYRSVSEMASNKFKRMLNRELTHLSEMSRSGNQVSEYISNTFLDKQNDVEIPSPTQKDREKKKKQQLMTQISGVKKLMHSSSLNNTSISRFGVNTENEDHLAKELEDLNKWGLNIFNVAGYSHNRPLTCIMYAIFQERDLLKTFRISSDTFITYMMTLEDHYHSDVAYHNSLHAADVAQSTHVLLSTPALDAVFTDLEILAAIFAAAIHDVDHPGVSNQFLINTNSELALMYNDESVLENHHLAVGFKLLQEEHCDIFMNLTKKQRQTLRKMVIDMVLATDMSKHMSLLADLKTMVETKKVTSSGVLLLDNYTDRIQVLRNMVHCADLSNPTKSLELYRQWTDRIMEEFFQQGDKERERGMEISPMCDKHTASVEKSQVGFIDYIVHPLWETWADLVQPDAQDILDTLEDNRNWYQSMIPQSPSPPLDEQNRDCQGLMEKFQFELTLDEEDSEGPEKEGEGHSYFSSTKTLCVIDPENRDSLGETDIDIATEDKSPVDT

SEQ ID NO: 9297 - protein, 380 aa, Homo sapiens
MRHGFSGIPITETGTMGSKLVGIVTSRDIDFLAEKDHTTLLSEVMTPRIELVVAPAGVTLKEANEILQRSKKGKLPIVNDCDELVAIIARTDLKKNRDYPLASKDSQKQLLCGAAVGTREDDKYRLDLLTQAGVDVIVLDSSQGNSVYQIAMVHYIKQKYPHLQVIGGNVVTAAQAKNLIDAGVDGLRVGMGCGSICITQEVMACGRPQGTAVYKVAEYARRFGVPIIADGGIQTVGHVVKALALGASTVMMGSLLAATTEAPGEYFFSDGVRLKKYRGMGSLDAMEKSSSSQKRYFSEGDKVKIAQGVSGSIQDKGSIQKFVPYLIAGIQHGCQDIGARSLSVLRSMMYSGELKFEKRTMSAQIEGGVHGLHSYEKRLY

SEQ ID NO: 9298 - protein, 561 aa, Homo sapiens
MEGPLTPPPLQGGGAAAVPEPGARQHPGHETAAQRYSARLLQAGYEPESMADYLISGGTGYVPEDGLTAQQLFASADGLTYNDFLILPGFIDFIADEVDLTSALTRKITLKTPLISSPMDTVTEADMAIAMALMGGIGFIHHNCTPEFQANEVRKKFEQGFITDPVVLSPSHTVGDVLEAKMRHGFSGIPITETGTMGSKLVGIVTSRDIDFLAEKDHTTLLSEVMTPRIELVVAPAGVTLKEANEILQRSKKGKLPIVNDCDELVAIIARTDLKKNRDYPLASKDSQKQLLCGAAVGTREDDKYRLDLLTQAGVDVIVLDSSQGNSVYQIAMVHYIKQKYPHLQVIGGNVVTAAQAKNLIDAGVDGLRVGMGCGSICITQEVMACGRPQGTAVYKVAEYARRFGVPIIADGGIQTVGHVVKALALGASTVMMGSLLAATTEAPGEYFFSDGVRLKKYRGMGSLDAMEKSSSSQKRYFSEGDKVKIAQGVSGSIQDKGSIQKFVPYLIAGIQHGCQDIGARSLSVLRSMMYSGELKFEKRTMSAQIEGGVHGLHSYEKRLY

SEQ ID NO: 9299 - protein, 522 aa, Homo sapiens
MDRLRRASMADYLISGGTGYVPEDGLTAQQLFASADGLTYNDFLILPGFIDFIADEVDLTSALTRKITLKTPLISSPMDTVTEADMAIAMALMGGIGFIHHNCTPEFQANEVRKVKKFEQGFITDPVVLSPSHTVGDVLEAKMRHGFSGIPITETGTMGSKLVGIVTSRDIDFLAEKDHTTLLSEVMTPRIELVVAPAGVTLKEANEILQRSKKGKLPIVNDCDELVAIIARTDLKKNRDYPLASKDSQKQLLCGAAVGTREDDKYRLDLLTQAGVDVIVLDSSQGNSVYQIAMVHYIKQKYPHLQVIGGNVVTAAQAKNLIDAGVDGLRVGMGCGSICITQEVMACGRPQGTAVYKVAEYARRFGVPIIADGGIQTVGHVVKALALGASTVMMGSLLAATTEAPGEYFFSDGVRLKKYRGMGSLDAMEKSSSSQKRYFSEGDKVKIAQGVSGSIQDKGSIQKFVPYLIAGIQHGCQDIGARSLSVLRSMMYSGELKFEKRTMSAQIEGGVHGLHSYEKRLY

SEQ ID NO: 9300 - protein, 380 aa, Homo sapiens; identical to SEQ ID NO: 9297

SEQ ID NO: 9301 - protein, 497 aa, Homo sapiens
MDRLRRASMADYLISGGTGYVPEDGLTAQQLFASADGLTYNDFLILPGFIDFIADEVDLTSALTRKITLKTPLISSPMDTVTEADMAIAMAKFEQGFITDPVVLSPSHTVGDVLEAKMRHGFSGIPITETGTMGSKLVGIVTSRDIDFLAEKDHTTLLSEVMTPRIELVVAPAGVTLKEANEILQRSKKGKLPIVNDCDELVAIIARTDLKKNRDYPLASKDSQKQLLCGAAVGTREDDKYRLDLLTQAGVDVIVLDSSQGNSVYQIAMVHYIKQKYPHLQVIGGNVVTAAQAKNLIDAGVDGLRVGMGCGSICITQEVMACGRPQGTAVYKVAEYARRFGVPIIADGGIQTVGHVVKALALGASTVMMGSLLAATTEAPGEYFFSDGVRLKKYRGMGSLDAMEKSSSSQKRYFSEGDKVKIAQGVSGSIQDKGSIQKFVPYLIAGIQHGCQDIGARSLSVLRSMMYSGELKFEKRTMSAQIEGGVHGLHSYEKRLY

SEQ ID NO: 9302 - protein, 373 aa, Homo sapiens
MATQAHSLSYAGCNFLRQRLVLSTLSGRPVKIRKIRARDDNPGLRDFEASFIRLLDKITNGSRIEINQTGTTLYYQPGLLYGGSVEHDCSVLRGIGYYLESLLCLAPFMKHPLKIVLRGVTNDQVDPSVDVLKATALPLLKQFGIDGESFELKIVRRGMPPGGGGEVVFSCPVRKVLKPIQLTDPGKIKRIRGMAYSVRVSPQMANRIVDSARSILNKFIPDIYIYTDHMKGVNSGKSPGFGLSLVAETTSGTFLSAELASNPQGQGAAVLPEDLGRNCARLLLEEIYRGGCVDSTNQSLALLLMTLGQQDVSKVLLGPLSPYTIEFLRHLKSFFQIMFKIETKPCGEELKGGDKVLMTCVGIGFSNLSKTLK

SEQ ID NO: 9303 - protein, 373 aa, Homo sapiens; identical to SEQ ID NO: 9302

SEQ ID NO: 9304 - protein, 103 aa, Homo sapiens [sequence omitted]

SEQ ID NO: 9305 - protein, 88 aa, Homo sapiens
MRCTENCNACSWHWSTERVQFFSQPRVAKLMLQKLNEVLPHLPYLPDLSPTDHHFFKHLDSTTFCRENASTTSRMQKMLSKGSFNPEP

SEQ ID NO: 9306 - protein, 693 aa, Homo sapiens
MALCNGDSKLENAGGDLKDGHHHYEGAVVILDAGAQYGKVIDRRVRELFVQSEIFPLETPAFAIKEQGFRAIIISGGPNSVYAEDAPWFDPAIFTIGKPVLGICYGMQMMNKVFGGTVHKKSVREDGVFNISVDNTCSLFRGLQKEEVVLLTHGDSVDKVADGFKVVARSGNIVAGIANESKKLYGAQFHPEVGLTENGKVILKNFLYDIAGCSGTFTVQNRELECIREIKERVGTSKVLVLLSGGVDSTVCTALLNRALNQEQVIAVHIDNGFMRKRESQSVEEALKKLGIQVKVINAAHSFYNGTTTLPISDEDRTPRKRISKTLNMTTSPEEKRKIIGDTFVKIANEVIGEMNLKPEEVFLAQGTLRPDLIESASLVASGKAELIKTHHNDTELIRKLREEGKVIEPLKDFHKDEVRILGRELGLPEELVSRHPFPGPGLAIRVICAEEPYICKDFPETNNILKIVADFSASVKKPHTLLQRVKACTTEEDQEKLMQITSLHSLNAFLLPIKTVGVQGDCRSYSYVCGISSKDEPDWESLIFLARLIPRMCHNVNRVVYIFGPPVKEPPTDVTPTFLTTGVLSTLRQADFEAHNILRESGYAGKISQMPVILTPLHFDRDPLQKQPSCQRSVVIRTFITSDFMTGIPATPGNEIPVEVVLKMVTEIKKIPGISRIMYDLTSKPPGTTEWE

SEQ ID NO: 9307 - protein, 645 aa, Homo sapiens
MYFPSWLSQLYRGLSRPIRRTTQPIWGSLYRSLLQSSQRRIPEFSSFVVRTNTCGELRSSHLGQEVTLCGWIQYRRQNTFLVLRDFDGLVQVIIPQDESAASVKKILCEAPVESVVQVSGTVISRPAGQENPKMPTGEIEIKVKTAELLNACKKLPFEIKNFVKKTEALRLQYRYLDLRSFQMQYNLRLRSQMVMKMREYLCNLHGFVDIETPTLFKRTPGGAKEFLVPSREPGKFYSLPQSPQQFKQLLMVGGLDRYFQVARCYRDEGSRPDRQPEFTQIDIEMSFVDQTGIQSLIEGLLQYSWPNDKDPVVVPFPTMTFAEVLATYGTDKPDTRFGMKIIDISDVFRNTEIGFLQDALSKPHGTVKAICIPEGAKYLKRKDIESIRNFAADHFNQEILPVFLNANRNWNSPVANFIMESQRLELIRLMETQEEDVVLLTAGEHNKACSLLGKLRLECADLLETRGVVLRDPTLFSFLWVVDFPLFLPKEENPRELESAHHPFTAPHPSDIHLLYTEPKKARSQHYDLVLNGNEIGGGSIRIHNAELQRYILATLLKEDVKMLSHLLQALDYGAPPHGGIALGLDRLICLVTGSPSIRDVIAFPKSFRGHDLMSNTPDSVPPEELKPYHIRVSKPTDSKAERAH

SEQ ID NO: 9308 - protein, 608 aa, Homo sapiens
MYFPSWLSQLYRGLSRPIRRTTQPIWGSLYRSLLQSSQRRIPEFSSFVVRTNTCGELRSSHLGQEVTLCGWIQYRRQNTFLVLRDFDGLVQVIIPQDESAASVKKILCEAPVESVVQVSGTVISRPAGQENPKMPTGEIEIKVKTAELLNACKKLPFEIKNFVKKTEALRLQYRYLDLRSFQMQYNLRLRSQMVMKMREYLCNLHGFVDIETPTLFKRTPGGAKEFLVPSREPGKFYSLPQSPQQFKQLLMVGGLDRYFQVARCYRDEGSRPDRQPEFTQIDIEMSFVDQTGIQSLIEGLLQYSWPNDKDPVVVPFPTMTFAEVLATYGTDKPDTRFGMKIIDISDVFRNTEIGFLQDALSKPHGTVKAICIPEGAKYLKRKDIESIRNFAADHFNQEILPVFLNANRNWNSPVANFIMESQRLELIRLMETQEEDVVLLTAGEHNKACSLLGKLRLECADLLETRGVVLRDPTLFSFLWVVDFPLFLPKEENPRELESAHHPFTAPHPSDIHLLYTEPKKEDVKMLSHLLQALDYGAPPHGGIALGLDRLICLVTGSPSIRDVIAFPKSFRGHDLMSNTPDSVPPEELKPYHIRVSKPTDSKAERAH

SEQ ID NO: 9309 - protein, 645 aa, Homo sapiens; identical to SEQ ID NO: 9307

SEQ ID NO: 9310 - protein, 512 aa, Homo sapiens
MPTGEIEIKVKTAELLNACKKLPFEIKNFVKKTEALRLQYRYLDLRSFQMQYNLRLRSQMVMKMREYLCNLHGFVDIETPTLFKRTPGGAKEFLVPSREPGKFYSLPQSPQQFKQLLMVGGLDRYFQVARCYRDEGSRPDRQPEFTQIDIEMSFVDQTGIQSLIEGLLQYSWPNDKDPVVVPFPTMTFAEVLATYGTDKPDTRFGMKIIDISDVFRNTEIGFLQDALSKPHGTVKAICIPEGAKYLKRKDIESIRNFAADHFNQEILPVFLNANRNWNSPVANFIMESQRLELIRLMETQEEDVVLLTAGEHNKACSLLGKLRLECADLLETRGVVLRDPTLFSFLWVVDFPLFLPKEENPRELESAHHPFTAPHPSDIHLLYTEPKKARSQHYDLVLNGNEIGGGSIRIHNAELQRYILATLLKEDVKMLSHLLQALDYGAPPHGGIALGLDRLICLVTGSPSIRDVIAFPKSFRGHDLMSNTPDSVPPEELKPYHIRVSKPTDSKAERAH

SEQ ID NO: 9311 - protein, 501 aa, Homo sapiens
MAGFWVGTAPLVAAGRRGRWPPQQLMLSAALRTLKHVLYYSRQCLMVSRNLGSVGYDPNEKTFDKILVANRGEIACRVIRTCKKMGIKTVAIHSDVDASSVHVKMADEAVCVGPAPTSKSYLNMDAIMEAIKKTRAQAVHPGYGFLSENKEFARCLAAEDVVFIGPDTHAIQAMGDKIESKLLAKKAEVNTIPGFDGVVKDAEEAVRIAREIGYPVMIKASAGGGGKGMRIAWDDEETRDGFRLSSQEAASSFGDDRLLIEKFIDNPRHIEIQVLGDKHGNALWLNERECSIQRRNQKVVEEAPSIFLDAETRRAMGEQAVALARAVKYSSAGTVEFLVDSKKNFYFLEMNTRLQVEVDGSKLNVTSTWNLASPLLSVSVDGTQRTVQCLSREAGGNMSIQFLGTVYKVNILTRLAAELNKFMLEKVTEDTSSVLRSPMPGVVVAVSVKPGDAVAEGQEICVIEAMKMQNSMTAGKTGTVKSVHCQAGDTVGEGDLLVELE

SEQ ID NO: 9312 - protein, 728 aa, Homo sapiens
MAGFWVGTAPLVAAGRRGRWPPQQLMLSAALRTLKHVLYYSRQCLMVSRNLGSVGYDPNEKTFDKILVANRGEIACRVIRTCKKMGIKTVAIHSDVDASSVHVKMADEAVCVGPAPTSKSYLNMDAIMEAIKKTRAQAVHPGYGFLSENKEFARCLAAEDVVFIGPDTHAIQAMGDKIESKLLAKKAEVNTIPGFDGVVKDAEEAVRIAREIGYPVMIKASAGGGGKGMRIAWDDEETRDGFRLSSQEAASSFGDDRLLIEKFIDNPRHIEIQVLGDKHGNALWLNERECSIQRRNQKVVEEAPSIFLDAETRRAMGEQAVALARAVKYSSAGTVEFLVDSKKNFYFLEMNTRLQVEHPVTECITGLDLVQEMIRVAKGYPLRHKQADIRINGWAVECRVYAEDPYKSFGLPSIGRLSQYQEPLHLPGVRVDSGIQPGSDISIYYDPMISKLITYGSDRTEALKRMADALDNYVIRGVTHNIALLREVIINSRFVKGDISTKFLSDVYPDGFKGHMLTKSEKNQLLAIASSLFVAFQLRAQHFQENSRMPVIKPDIANWELSVKLHDKVHTVVASNNGSVFSVEVDGSKLNVTSTWNLASPLLSVSVDGTQRTVQCLSREAGGNMSIQFLGTVYKVNILTRLAAELNKFMLEKVTEDTSSVLRSPMPGVVVAVSVKPGDAVAEGQEICVIEAMKMQNSMTAGKTGTVKSVHCQAGDTVGEGDLLVELE

SEQ ID NO: 9313 - protein, 695 aa, Homo sapiens
MEHVLYYSRQCLMVSRNLGSVGYDPNEKTFDKILVANRGEIACRVIRTCKKMGIKTVAIHSDVDASSVHVKMADEAVCVGPAPTSKSYLNMDAIMEAIKKTRAQAVHPGYGFLSENKEFARCLAAEDVVFIGPDTHAIQAMGDKIESKLLAKKAEVNTIPGFDGVVKDAEEAVRIAREIGYPVMIKASAGGGGKGMRIAWDDEETRDGFRLSSQEAASSFGDDRLLIEKFIDNPRHIEIQVLGDKHGNALWLNERECSIQRRNQKVVEEAPSIFLDAETRRAMGEQAVALARAVKYSSAGTVEFLVDSKKNFYFLEMNTRLQVEHPVTECITGLDLVQEMIRVAKGYPLRHKQADIRINGWAVECRVYAEDPYKSFGLPSIGRLSQYQEPLHLPGVRVDSGIQPGSDISIYYDPMISKLITYGSDRTEALKRMADALDNYVIRGVTHNIALLREVIINSRFVKGDISTKFLSDVYPDGFKGHMLTKSEKNQLLAIASSLFVAFQLRAQHFQENSRMPVIKPDIANWELSVKLHDKVHTVVASNNGSVFSVEVDGSKLNVTSTWNLASPLLSVSVDGTQRTVQCLSREAGGNMSIQFLGTVYKVNILTRLAAELNKFMLEKVTEDTSSVLRSPMPGVVVAVSVKPGDAVAEGQEICVIEAMKMQNSMTAGKTGTVKSVHCQAGDTVGEGDLLVELE

SEQ ID NO: 9314 - protein, 173 aa, Homo sapiens
MAPVLSKDSADIESILALNPRTQTHATLCSTSAKKLDKKHWKRNPDKNCFNCEKLENNFDDIKHTTLGERGALREAMRCLKCADAPCQKSCPTNLDIKSFITSIANKNYYGAAKMIFSDNPLGLTCGMVCPTSDLCVGGCNLYATEEGPINIGGLQQFATETLILAFSLMNHL

SEQ ID NO: 9315 - protein, 1025 aa, Homo sapiens
MAPVLSKDSADIESILALNPRTQTHATLCSTSAKKLDKKHWKRNPDKNCFNCEKLENNFDDIKHTTLGERGALREAMRCLKCADAPCQKSCPTNLDIKSFITSIANKNYYGAAKMIFSDNPLGLTCGMVCPTSDLCVGGCNLYATEEGPINIGGLQQFATEVFKAMSIPQIRNPSLPPPEKMSEAYSAKIALFGAGPASISCASFLARLGYSDITIFEKQEYVGGLSTSEIPQFRLPYDVVNFEIELMKDLGVKIICGKSLSVNEMTLSTLKEKGYKAAFIGIGLPEPNKDAIFQGLTQDQGFYTSKDFLPLVAKGSKAGMCACHSPLPSIRGVVIVLGAGDTAFDCATSALRCGARRVFIVFRKGFVNIRAVPEEMELAKEEKCEFLPFLSPRKVIVKGGRIVAMQFVRTEQDETGKWNEDEDQMVHLKADVVISAFGSVLSDPKVKEALSPIKFNRWGLPEVDPETMQTSEAWVFAGGDVVGLANTTVESVNDGKQASWYIHKYVQSQYGASVSAKPELPLFYTPIDLVDISVEMAGLKFINPFGLASATPATSTSMIRRAFEAGWGFALTKTFSLDKDIVTNVSPRIIRGTTSGPMYGPGQSSFLNIELISEKTAAYWCQSVTELKADFPDNIVIASIMCSYNKNDWTELAKKSEDSGADALELNLSCPHGMGERGMGLACGQDPELVRNICRWVRQAVQIPFFAKLTPNVTDIVSIARAAKEGGANGVTATNTVSGLMGLKSDGTPWPAVGIAKRTTYGGVSGTAIRPIALRAVTSIARALPGFPILATGGIDSAESGLQFLHSGASVLQVCSAIQNQDFTVIEDYCTGLKALLYLKSIEELQDWDGQSPATVSHQKGKPVPRIAELMDKKLPSFGPYLEQRKKIIAENKIRLKEQNVAFSPLKRNCFIPKRPIPTIKDVIGKALQYLGTFGELSNVEQVVAMIDEEMCINCGKCYMTCNDSGYQAIQFDPETHLPTITDTCTGCTLCLSVCPIVDCIKMVSRTTPYEPKRGVPLSVNPVC

SEQ ID NO: 9316 - protein, 480 aa, Homo sapiens
MNASEFRRRGKEMVDYVANYMEGIEGRQVYPDVEPGYLRPLIPAAAPQEPDTFEDIINDVEKIIMPGVTHWHSPYFFAYFPTASSYPAMLADMLCGAIGCIGFSWAASPACTELETVMMDWLGKMLELPKAFLNEKAGEGGGVIQGSASEATLVALLAARTKVIHRLQAASPELTQAAIMEKLVAYSSDQAHSSVERAGLIGGVKLKAIPSDGNFAMRASALQEALERDKAAGLIPFFMVATLGTTTCCSFDNLLEVGPICNKEDIWLHVDAAYAGSAFICPEFRHLLNGVEFADSFNFNPHKWLLVNFDCSAMWVKKRTDLTGAFRLDPTYLKHSHQDSGLITDYRHWQIPLGRRFRSLKMWFVFRMYGVKGLQAYIRKHVQLSHEFESLVRQDPRFEICVEVILGLVCFRLKGSNKVNEALLQRINSAKKIHLVPCHLRDKFVLRFAICSRTVESAHVQRAWEHIKELAADVLRAERE

SEQ ID NO: 9317 - protein, 480 aa, Homo sapiens; identical to SEQ ID NO: 9316

SEQ ID NO: 9318 - protein, 480 aa, Homo sapiens; identical to SEQ ID NO: 9316

SEQ ID NO: 9319 - protein, 637 aa, Homo sapiens
MLGKGVVGGGGGTKAPKPSFVSYVRPEEIHTNEKEVTEKEVTLHLLPGEQLLCEASTVLKYVQEDSCQHGVYGRLVCTDFKIAFLGDDESALDNDETQFKNKVIGENDITLHCVDQIYGVFDEKKKTLFGQLKKYPEKLIIHCKDLRVFQFCLRYTKEEEVKRIVSGIIHHTQAPKLLKRLFLFSYATAAQNNTVTDPKNHTVMFDTLKDWCWELERTKGNMKYKAVSVNEGYKVCERLPAYFVVPTPLPEENVQRFQGHGIPIWCWSCHNGSALLKMSALPKEQDDGILQIQKSFLDGIYKTIHRPPYEIVKTEDLSSNFLSLQEIQTAYSKFKQLFLIDNSTEFWDTDIKWFSLLESSSWLDIIRRCLKKAIEITECMEAQNMNVLLLEENASDLCCLISSLVQLMMDPHCRTRIGFQSLIQKEWVMGGHCFLDRCNHLRQNDKEEHQRQLSLPLTQSKSSPKRGFFREETDHLIKNLLGKRISKLINSSDELQDNFREFYDSWHSKSTDYHGLLLPHIEGPEIKVWAQRYLRWIPEAQILGGGQVATLSKLLEMMEEVQSLQEKIDERHHSQQAPQAEAPCLLRNSARLSSLFPFALLQRHSSKPVLPTSGWKALGDEDDLAKREDEFVDLGDV

SEQ ID NO: 9320 - protein, 747 aa, Homo sapiens
MLGKGVVGGGGGTKAPKPSFVSYVRPEEIHTNEKEVTEKEVTLHLLPGEQLLCEASTVLKYVQEDSCQHGVYGRLVCTDFKIAFLGDDESALDNDETQFKNKVIGENDITLHCVDQIYGVFDEKKKTLFGQLKKYPEKLIIHCKDLRVFQFCLRYTKEEEVKRIVSGIIHHTQAPKLLKRLFLFSYATAAQNNTVTDPKNHTVMFDTLKDWCWELERTKGNMKYKAVSVNEGYKVCERLPAYFVVPTPLPEENVQRFQGHGIPIWCWSCHNGSALLKMSALPKEQDDGILQIQKSFLDGIYKTIHRPPYEIVKTEDLSSNFLSLQEIQTAYSKFKQLFLIDNSTEFWDTDIKWFSLLESSSWLDIIRRCLKKAIEITECMEAQNMNVLLLEENASDLCCLISSLVQLMMDPHCRTRIGFQSLIQKEWVMGGHCFLDRCNHLRQNDKEEVPVFLLFLDCVWQLVHQHPPAFEFTETYLTVLSDSLYIPIFSTFFFNSPHQKDTNMGREGQDTQSKPLNLLTVWDWSVQFEPKAQTLLKNPLYVEKPKLDKGQRKGMRFKHQRQLSLPLTQSKSSPKRGFFREETDHLIKNLLGKRISKLINSSDELQDNFREFYDSWHSKSTDYHGLLLPHIEGPEIKVWAQRYLRWIPEAQILGGGQVATLSKLLEMMEEVQSLQEKIDERHHSQQAPQAEAPCLLRNSARLSSLFPFALLQRHSSKPVLPTSGWKALGDEDDLAKREDEFVDLGDV

SEQ ID NO: 9321 - protein, 503 aa, Homo sapiens
MALRAKAEVCVAAPWLSLQRARALGTRAARAPRTVLPFEAMPQHPGNRWLRLLQIWREQGYEHLHLEMHQTFQELGPIFRYNLGGPRMVCVMLPEDVEKLQQVDSLHPCRMILEPWVAYRQHRGHKCGVFLLNGPEWRFNRLRLNPDVLSPKAVQRFLPMVDAVARDFSQALKKKVLQNARGSLTLDVQPSIFHYTIEASNLALFGERLGLVGHSPSSASLNFLHALEVMFKSTVQLMFMPRSLSRWISPKVWKEHFEAWDCIFQYGDNCIQKIYQELAFNRPQHYTGIVAELLLKAELSLEAIKANSMELTAGSVDTTAFPLLMTLFELARNPDVQQILRQESLAAAASISEHPQKATTELPLLRAALKETLRLYPVGLFLERVVSSDLVLQNYHIPAGTLVQVFLYSLGRNAALFPRPERYNPQRWLDIRGSGRNFHHVPFGFGMRQCLGRRLAEAEMLLLLHHVLKHFLVETLTQEDIKMVYSFILRPGTSPLLTFRAIN

SEQ ID NO: 9322 - protein, 1131 aa, Homo sapiens
MVPCWNHGNITRSKAEELLSRTGKDGSFLVRASESISRAYALCVLYRNCVYTYRILPNEDDKFTVQASEGVSMRFFTKLDQLIEFYKKENMGLVTHLQYPVPLEEEDTGDDPEEDTGLPEEHLKAIQDYLSTQLAQDSEFVKTGSSSLPHLKKLTTLLCKELYGEVIRTLPSLESLQRLFDQQLSPGLRPRPQVPGEANPINMVSKLSQLTSLLSSIEDKVKALLHEGPESPHRPSLIPPVTFEVKAESLGIPQKMQLKVDVESGKLIIKKSKDGSEDKFYSHKKILQLIKSQKFLNKLVILVETEKEKILRKEYVFADSKKREGFCQLLQQMKNKHSEQPEPDMITIFIGTWNMGNAPPPKKITSWFLSKGQGKTRDDSADYIPHDIYVIGTQEDPLSEKEWLEILKHSLQEITSVTFKTVAIHTLWNIRIVVLAKPEHENRISHICTDNVKTGIANTLGNKGAVGVSFMFNGTSLGFVNSHLTSGSEKKLRRNQNYMNILRFLALGDKKLSPFNITHRFTHLFWFGDLNYRVDLPTWEAETIIQKIKQQQYADLLSHDQLLTERREQKVFLHFEEEEITFAPTYRFERLTRDKYAYTKQKATGMKYNLPSWCDRVLWKSYPLVHVVCQSYGSTSDIMTSDHSPVFATFEAGVTSQFVSKNGPGTVDSQGQIEFLRCYATLKTKSQTKFYLEFHSSCLESFVKSQEGENEEGSEGELVVKFGETLPKLKPIISDPEYLLDQHILISIKSSDSDESYGEGCIALRLEATETQLPIYTPLTHHGELTGHFQGEIKLQTSQGKTREKLYDFVKTERDESSGPKTLKSLTSHDPMKQWEVTSRAPPCSGSSITEIINPNYMGVGPFGPPMPLHVKQTLSPDQQPTAWSYDQPPKDSPLGPCRGESPPTPPGQPPISPKKFLPSTANRGLPPRTQESRPSDLGKNAGDTLPQEDLPLTKPEMFENPLYGSLSSFPKPAPRKDQESPKMPRKEPPPCPEPGILSPSIVLTKAQEADRGEGPGKQVPAPRLRSFTCSSSAEGRAAGGDKSQGKPKTPVSSQAPVPAKRPIKPSRSEINQQTPPTPTPRPPLPVKSPAVLHLQHSKGRDYRDNTELPHHGKHRPEEGPPGPLGRTAMQ

SEQ ID NO: 9323 - protein, 70 aa, Homo sapiens [sequence omitted]

SEQ ID NO: 9324 - protein, 976 aa, Homo sapiens
MFTLSPAPREVIRTLPSLESLQRLFDQQLSPGLRPRPQVPGEANPINMVSKLSQLTSLLSSIEDKVKALLHEGPESPHRPSLIPPVTFEVKAESLGIPQKMQLKVDVESGKLIIKKSKDGSEDKFYSHKKILQLIKSQKFLNKLVILVETEKEKILRKEYVFADSKKREGFCQLLQQMKNKHSEQPEPDMITIFIGTWNMGNAPPPKKITSWFLSKGQGKTRDDSADYIPHDIYVIGTQEDPLSEKEWLEILKHSLQEITSVTFKTVAIHTLWNIRIVVLAKPEHENRISHICTDNVKTGIANTLGNKGAVGVSFMFNGTSLGFVNSHLTSGSEKKLRRNQNYMNILRFLALGDKKLSPFNITHRFTHLFWFGDLNYRVDLPTWEAETIIQKIKQQQYADLLSHDQLLTERREQKVFLHFEEEEITFAPTYRFERLTRDKYAYTKQKATGMKYNLPSWCDRVLWKSYPLVHVVCQSYGSTSDIMTSDHSPVFATFEAGVTSQFVSKNGPGTVDSQGQIEFLRCYATLKTKSQTKFYLEFHSSCLESFVKSQEGENEEGSEGELVVKFGETLPKLKPIISDPEYLLDQHILISIKSSDSDESYGEGCIALRLEATETQLPIYTPLTHHGELTGHFQGEIKLQTSQGKTREKLYDFVKTERDESSGPKTLKSLTSHDPMKQWEVTSRAPPCSGSSITEIINPNYMGVGPFGPPMPLHVKQTLSPDQQPTAWSYDQPPKDSPLGPCRGESPPTPPGQPPISPKKFLPSTANRGLPPRTQESRPSDLGKNAGDTLPQEDLPLTKPEMFENPLYGSLSSFPKPAPRKDQESPKMPRKEPPPCPEPGILSPSIVLTKAQEADRGEGPGKQVPAPRLRSFTCSSSAEGRAAGGDKSQGKPKTPVSSQAPVPAKRPIKPSRSEINQQTPPTPTPRPPLPVKSPAVLHLQHSKGRDYRDNTELPHHGKHRPEEGPPGPLGRTAMQ

SEQ ID NO: 9325 - protein, 1131 aa, Homo sapiens; identical to SEQ ID NO: 9322

SEQ ID NO: 9326 - protein, 1993 aa, Homo sapiens [sequence omitted]

SEQ ID NO: 9327 - protein, 1019 aa, Homo sapiens
MSNRPNNNPGGSLRRSQRNTAGAQPQDDSIGGRSCSSSSAVIVPQPEDPDRANTSERQKTGQVPKKDNSRGVKRSASPDYNRTNSPSSAKKPKALQHTESPSETNKPHSKSKKRHLDQEQQLKSAQSPSTSKAHTRKSGATGGSRSQKRKRTESSCVKSGSGSESTGAEERSAKPTKLASKSATSAKAGCSTITDSSSAASTSSSSSAVASASSTVPPGARVKQGKDQNKARRSRSASSPSPRRSSREKEQRSSKSETSKPGPSGLQAKLASLRKSTKKRSESPPAELPSLRRSTRQKTTGSCASTSRRGSGLGKRGAAEARRQEKMADPESNQEAVNSSAARTDEAPQGAAGAVGMTTSGESESDDSEMGRLQALLEARGLPPHLFGPLGPRMSQLFHRTIGSGASSKAQQLLQGLQASDESQQLQAVIEMCQLLVMGNEETLGGFPVKSVVPALITLLQMEHNFDIMNHACRALTYMMEALPRSSAVVVDAIPVFLEKLQVIQCIDVAEQALTALEMLSRRHSKAILQAGGLADCLLYLEFFSINAQRNALAIAANCCQSITPDEFHFVADSLPLLTQRLTHQDKKSVESTCLCFARLVDNFQHEENLLQQVASKDLLTNVQQLLVVTPPILSSGMFIMVVRMFSLMCSNCPTLAVQLMKQNIAETLHFLLCGASNGSCQEQIDLVPRSPQELYELTSLICELMPCLPKEGIFAVDTMLKKGNAQNTDGAIWQWRDDRGLWHPYNRIDSRIIEAAHQVGEDEISLSTLGRVYTIDFNSMQQINEDTGTARAIQRKPNPLANSNTSGYSESKKDDARAQLMKEDPELAKSFIKTLFGVLYEVYSSSAGPAVRHKCLRAILRIIYFADAELLKDVLKNHAVSSHIASMLSSQDLKIVVGALQMAEILMQKLPDIFSVYFRREGVMHQVKHLAESESLLTSPPKACTNGSGSMGSTTSVSSGTATAATHAAADLGSPSLQHSRDDSLDLSPQGRLSDVLKRKRLPKRGPRRAHWKSGTSG

SEQ ID NO: 9328 - protein, 1992 aa, Homo sapiens
MSNRPNNNPGGSLRRSQRNTAGAQPQDDSIGGRSCSSSSAVIVPQPEDPDRANTSERQKTGQVPKKDNSRGVKRSASPDYNRTNSPSSAKKPKALQHTESPSETNKPHSKSKKRHLDQEQQLKSAQSPSTSKAHTRKSGATGGSRSQKRKRTESSCVKSGSGSESTGAEERSAKPTKLASKSATSAKAGCSTITDSSSAASTSSSSSAVASASSTVPPGARVKQGKDQNKARRSRSASSPSPRRSSREKEQSKTGGSSKFDWAARFSPKVSLPKTKLSLPGSSKSETSKPGPSGLQAKLASLRKSTKKRSESPPAELPSLRRSTRQKTTGSCASTSRRGSGLGKRGAAEARRQEKMADPESNQEAVNSSAARTDEAPQGAAGAVGMTTSGESESDDSEMGRLQALLEARGLPPHLFGPLGPRMSQLFHRTIGSGASSKAQQLLQGLQASDESQQLQAVIEMCQLLVMGNEETLGGFPVKSVVPALITLLQMEHNFDIMNHACRALTYMMEALPRSSAVVVDAIPVFLEKLQVIQCIDVAEQALTALEMLSRRHSKAILQAGGLADCLLYLEFFSINAQRNALAIAANCCQSITPDEFHFVADSLPLLTQRLTHQDKKSVESTCLCFARLVDNFQHEENLLQQVASKDLLTNVQQLLVVTPPILSSGMFIMVVRMFSLMCSNCPTLAVQLMKQNIAETLHFLLCGASNGSCQEQIDLVPRSPQELYELTSLICELMPCLPKEGIFAVDTMLKKGNAQNTDGAIWQWRDDRGLWHPYNRIDSRIIEQINEDTGTARAIQRKPNPLANSNTSGYSESKKDDARAQLMKEDPELAKSFIKTLFGVLYEVYSSSAGPAVRHKCLRAILRIIYFADAELLKDVLKNHAVSSHIASMLSSQDLKIVVGALQMAEILMQKLPDIFSVYFRREGVMHQVKHLAESESLLTSPPKACTNGSGSMGSTTSVSSGTATAATHAAADLGSPSLQHSRDDSLDLSPQGRLSDVLKRKRLPKRGPRRPKYSPPRDDDKVDNQAKSPTTTQSPKSSFLASLNPKTWGRLSTQSNSNNIEPARTAGGSGLARAASKDTISNNREKIKGWIKEQAHKFVERYFSSENMDGSNPALNVLQRLCAATEQLNLQVDGGAECLVEIRSIVSESDVSSFEIQHSGFVKQLLLYLTSKSEKDAVSREIRLKRFLHVFFSSPLPGEEPIGRVEPVGNAPLLALVHKMNNCLSQMEQFPVKVHDFPSGNGTGGSFSLNRGSQALKFFNTHQLKCQLQRHPDCANVKQWKGGPVKIDPLALVQAIERYLVVRGYGRVREDDEDSDDDGSDEEIDESLAAQFLNSGNVRHRLQFYIGEHLLPYNMTVYQAVRQFSIQAEDERESTDDESNPLGRAGIWTKTHTIWYKPVREDEESNKDCVGGKRGRAQTAPTKTSPRNAKKHDELWHDGVCPSVSNPLEVYLIPTPPENITFEDPSLDVILLLRVLHAISRYWYYLYDNAMCKEIIPTSEFINSKLTAKANRQLQDPLVIMTGNIPTWLTELGKTCPFFFPFDTRQMLFYVTAFDRDRAMQRLLDTNPEINQSDSQDSRVAPRLDRKKRTVNREELLKQAESVMQDLGSSRAMLEIQYENEVGTGLGPTLEFYALVSQELQRADLGLWRGEEVTLSNPKGSQEGTKYIQNLQGLFALPFGRTAKPAHIAKVKMKFRFLGKLMAKAIMDFRLVDLPLGLPFYKWMLRQETSLTSHDLFDIDPVVARSVYHLEDIVRQKKRLEQDKSQTKESLQYALETLTMNGCSVEDLGLDFTLPGFPNIELKKGGKDIPVTIHNLEEYLRLVIFWALNEGVSRQFDSFRDGFESVFPLSHLQYFYPEELDQLLCGSKADTWDAKTLMECCRPDHGYTHDSRAVKFLFEILSSFDNEQQRLFLQFVTGSPRLPVGGFRSLNPPLTIVRKTFESTENPDDFLPSVMTCVNYLKLPDYSSIEIMREKLLIAAREGQQSFHLS

SEQ ID NO: 9329 - protein, 1958 aa, Homo sapiens
MSNRPNNNPGGSLRRSQRNTAGAQPQDDSIGGRSCSSSSAVIVPQPEDPDRANTSERQKTGQVPKKDNSRGVKRSASPDYNRTNSPSSAKKPKALQHTESPSETNKPHSKSKKRHLDQEQQLKSAQSPSTSKAHTRKSGATGGSRSQKRKRTESSCVKSGSGSESTGAEERSAKPTKLASKSATSAKAGCSTITDSSSAASTSSSSSAVASASSTVPPGARVKQGKDQNKARRSRSASSPSPRRSSREKEQRSSKSETSKPGPSGLQAKLASLRKSTKKRSESPPAELPSLRRSTRQKTTGSCASTSRRGSGLGKRGAAEARRQEKMADPESNQEAVNSSAARTDEAPQGAAGAVGMTTSGESESDDSEMGRLQALLEARGLPPHLFGPLGPRMSQLFHRTIGSGASSKAQQLLQGLQASDESQQLQAVIEMCQLLVMGNEETLGGFPVKSVVPALITLLQMEHNFDIMNHACRALTYMMEALPRSSAVVVDAIPVFLEKLQVIQCIDVAEQALTALEMLSRRHSKAILQAGGLADCLLYLEFFSINAQRNALAIAANCCQSITPDEFHFVADSLPLLTQRLTHQDKKSVESTCLCFARLVDNFQHEENLLQQVASKDLLTNVQQLLVVTPPILSSGMFIMVVRMFSLMCSNCPTLAVQLMKQNIAETLHFLLCGASNGSCQEQIDLVPRSPQELYELTSLICELMPCLPKEGIFAVDTMLKKGNAQNTDGAIWQWRDDRGLWHPYNRIDSRIIEQINEDTGTARAIQRKPNPLANSNTSGYSESKKDDARAQLMKEDPELAKSFIKTLFGVLYEVYSSSAGPAVRHKCLRAILRIIYFADAELLKDVLKNHAVSSHIASMLSSQDLKIVVGALQMAEILMQKLPDIFSVYFRREGVMHQVKHLAESESLLTSPPKACTNGSGSMGSTTSVSSGTATAATHAAADLGSPSLQHSRDDSLDLSPQGRLSDVLKRKRLPKRGPRRPKYSPPRDDDKVDNQAKSPTTTQSPKSSFLASLNPKTWGRLSTQSNSNNIEPARTAGGSGLARAASKDTISNNREKIKGWIKEQAHKFVERYFSSENMDGSNPALNVLQRLCAATEQLNLQVDGGAECLVEIRSIVSESDVSSFEIQHSGFVKQLLLYLTSKSEKDAVSREIRLKRFLHVFFSSPLPGEEPIGRVEPVGNAPLLALVHKMNNCLSQMEQFPVKVHDFPSGNGTGGRGSQALKFFNTHQLKCQLQRHPDCANVKQWKGGPVKIDPLALVQAIERYLVVRGYGRVREDDEDSDDDGSDEEIDESLAAQFLNSGNVRHRLQFYIGEHLLPYNMTVYQAVRQFSIQAEDERESTDDESNPLGRAGIWTKTHTIWYKPVREDEESNKDCVGGKRGRAQTAPTKTSPRNAKKHDELWHDGVCPSVSNPLEVYLIPTPPENITFEDPSLDVILLLRVLHAISRYWYYLYDNAMCKEIIPTSEFINSKLTAKANRQLQDPLVIMTGNIPTWLTELGKTCPFFFPFDTRQMLFYVTAFDRDRAMQRLLDTNPEINQSDSQDSRVAPRLDRKKRTVNREELLKQAESVMQDLGSSRAMLEIQYENEVGTGLGPTLEFYALVSQELQRADLGLWRGEEVTLSNPKGSQEGTKYIQNLQGLFALPFGRTAKPAHIAKVKMKFRFLGKLMAKAIMDFRLVDLPLGLPFYKWMLRQETSLTSHDLFDIDPVVARSVYHLEDIVRQKKRLEQDKSQTKESLQYALETLTMNGCSVEDLGLDFTLPGFPNIELKKGGKDIPVTIHNLEEYLRLVIFWALNEGVSRQFDSFRDGFESVFPLSHLQYFYPEELDQLLCGSKADTWDAKTLMECCRPDHGYTHDSRAVKFLFEILSSFDNEQQRLFLQFVTGSPRLPVGGFRSLNPPLTIVRKTFESTENPDDFLPSVMTCVNYLKLPDYSSIEIMREKLLIAAREGQQSFHLS

SEQ ID NO: 9330 - protein, 1243 aa, Homo sapiens [sequence omitted]

SEQ ID NO: 9331 - protein, 1243 aa, Homo sapiens [sequence omitted]

SEQ ID NO: 9332 - protein, 1198 aa, Homo sapiens
MGDMTNSDFYSKNQRNESSHGGEFGCTMEELRSLMELRGTEAVVKIKETYGDTEAICRRLKTSPVEGLPGTAPDLEKRKQIFGQNFIPPKKPKTFLQLVWEALQDVTLIILEIAAIISLGLSFYHPPGEGNEGCATAQGGAEDEGEAEAGWIEGAAILLSVICVVLVTAFNDWSKEKQFRGLQSRIEQEQKFTVVRAGQVVQIPVAEIVVGDIAQVKYGDLLPADGLFIQGNDLKIDESSLTGESDQVRKSVDKDPMLLSGTHVMEGSGRMLVTAVGVNSQTGIIFTLLGAGGEEEEKKDKKAKQQDGAAAMEMQPLKSAEGGDADDRKKASMHKKEKSVLQGKLTKLAVQIGKAGLVMSAITVIILVLYFTVDTFVVNKKPWLPECTPVYVQYFVKFFIIGVTVLVVAVPEGLPLAVTISLAYSVKKMMKDNNLVRHLDACETMGNATAICSDKTGTLTTNRMTVVQAYVGDVHYKEIPDPSSINTKTMELLINAIAINSAYTTKILPPEKEGALPRQVGNKTECGLLGFVLDLKQDYEPVRSQMPEEKLYKVYTFNSVRKSMSTVIKLPDESFRMYSKGASEIVLKKCCKILNGAGEPRVFRPRDRDEMVKKVIEPMACDGLRTICVAYRDFPSSPEPDWDNENDILNELTCICVVGIEDPVRPEVPEAIRKCQRAGITVRMVTGDNINTARAIAIKCGIIHPGEDFLCLEGKEFNRRIRNEKGEIEQERIDKIWPKLRVLARSSPTDKHTLVKGIIDSTHTEQRQVVAVTGDGTNDGPALKKADVGFAMGIAGTDVAKEASDIILTDDNFSSIVKAVMWGRNVYDSISKFLQFQLTVNVVAVIVAFTGACITQDSPLKAVQMLWVNLIMDTFASLALATEPPTETLLLRKPYGRNKPLISRTMMKNILGHAVYQLALIFTLLFVGEKMFQIDSGRNAPLHSPPSEHYTIIFNTFVMMQLFNEINARKIHGERNVFDGIFRNPIFCTIVLGTFAIQIVIVQFGGKPFSCSPLQLDQWMWCIFIGLGELVWGQVIATIPTSRLKFLKEAGRLTQKEEIPEEELNEDVEEIDHAERELRRGQILWFRGLNRIQTQIRVVKAFRSSLYEGLEKPESRTSIHNFMAHPEFRIEDSQPHIPLIDDTDLEEDAALKQNSSPPSSLNKNNSAIDSGINLTTDTSKSATSSSPGSPIHSLETSL

SEQ ID NO: 9333 - protein, 1321 aa, Homo sapiens [sequence omitted]

SEQ ID NO: 9334 - protein, 1198 aa, Homo sapiens; identical to SEQ ID NO: 9332

SEQ ID NO: 9335 - protein, 1044 aa, Homo sapiens [sequence omitted]

SEQ ID NO: 9336 - protein, 240 aa, Homo sapiens
MFDGEVPHWYHFSCLQKVGHSMRHPDVEVDGFSELWWDDQQKVKKTADAGGVTGKGQNGIGSKAEKTLGCFVKNREELGFQPEYSASQLKGFSLLAAEDKETLKKQLPGVKSEGKREGDEVDGVDEVAKKKSKKEKDEDGKLEKALKAQNDLIWNIKDELMKVCSINDLKEMLIFNRQQVPSGESAILDRVADSMTFGALLPCEECSGQLVFKSDTYYCTGDVTAWTKCMVKTWTPNQKE

SEQ ID NO: 9337 - protein, 233 aa, Homo sapiens
MELVARQRRRWVTLQQSRPSPAEASARGVMEKIEKGQMRLSKKMLDPEKPQLGMIDPWYHPGCFVKNREELGFQPEYSASQLKGFSLLAAEDKETLKKQLPGVKSEGKREGDEVDGVDEVAKKKSKKEKDEDGKLEKALKAQNDLIWNIKDELMKVCSINDLKEMLIFNRQQVPSGESAILDRVADSMTFGALLPCEECSGQLVFKSDTYYCTGDVTAWTKCMVKTWTPNQKE

SEQ ID NO: 9338 - protein, 253 aa, Homo sapiens
MPPPSTASEPAAMNASAPADKPLSNMKILTLGKLSRNKDEVKATIEKLGGKLMGTANKASPCISTKEEVEKKKKKMEEGLQELFSAHILSPWGAEVKAEPVEVVAPRGKSGAVLSKKSKGQVKEEGINKSEKRMKLTLKGGAAVDPDSGLEHSAHVLEKGGKVFSATLSLVDVVKGTNSYYKLKLLKDDKESRHWIFKSWDRVGTVIGSNKLEQMLSKEDTIEHFMKLYEEKLGMLGTPKIHKVSQKVLPPGD

SEQ ID NO: 9339 - protein, 828 aa, Homo sapiens [sequence omitted]

SEQ ID NO: 9340 - protein, 564 aa, Homo sapiens
MLRTTRGPGLGPPLLQAALGLGRAGWHWPAGRAASGGRGRAWLQPTGRETGVQVYNSLTGRKEPLIVAHAEAASWYSCGPTVYDHAHLGHACSYVRFDIIRRILTKVFGCSIVMVMGITDVDDKIIKRANEMNISPASLASLYEEDFKQDMAALKVLPPTVYLRVTENIPQIISFIEGIIARGNAYSTAKGNVYFDLKSRGDKYGKLVGVVPGPVGEPADSDKRHASDFALWKAAKPQEVFWASPWGPGRPGWHIECSAIASMVFGSQLDIHSGGIDLAFPHHENEIAQCEVFHQCEQWGNYFLHSGHLHAKGKEEKMSKSLKNYITIKDFLKTFSPDVFRFFCLRSSYRSAIDYSDSAMLQAQQLLLGLGSFLEDARAYMKGQLACGSVREAMLWERLSSTKRAVKAALADDFDTPRVVDAILGLAHHGNGQLRASLKEPEGPRSPAVFGAIISYFEQFFETVGISLANQQYVSGDGSEATLHGVVDELVRFRQKVRQFALAMPEATGDARRQQLLERQPLLEACDTLRRGLTAHGINIKDRSSTTSTWELLDQRTKDQKSAG

SEQ ID NO: 9341 - protein, 236 aa, Homo sapiens
MPLIMQGFKDAAEEAGMSVTCGQTVLTSWIVLGGVTTTTGQSVYHARQYSARGCAGVHKTPGGTSGVAVHDCHFGHPRRCRVDIPRSNNEHGEVQQESFIMYTFSAHAATDIVGIRIWGHTQNLTKQLRNGFLQFTTVPVLAKMTVMSKACGNMFSLMQGTCPETAGGILICLPHEQAAWFCAEINSPKCGGGHQAWIIGIAEKGSHAAGIIDQPWIIEVARVATQNVNPTPGATS

SEQ ID NO: 9342 - protein, 115 aa, Homo sapiens
MTSPGSGLILQANFVHSQRRESFLYRSDSDYDLSPKSMSRNSSIASDIHGDDLIVTPFAQVLASLRTVRNNFAALTNLQDRAPSKRSPMCNQPSINKATITGSWMELNPYTLLDM

SEQ ID NO: 9343 - protein, 585 aa, Homo sapiens
MKEQPSCAGTGHPSMAGYGRMAPFELASGPVKRLRTESPFPCLFAEEAYQKLASETLEELDWCLDQLETLQTRHSVSEMASNKFKRMLNRELTHLSEMSRSGNQVSEFISNTFLDKQHEVEIPSPTQKEKEKKKRPMSQISGVKKLMHSSSLTNSSIPRFGVKTEQEDVLAKELEDVNKWGLHVFRIAELSGNRPLTVIMHTIFQERDLLKTFKIPVDTLITYLMTLEDHYHADVAYHNNIHAADVVQSTHVLLSTPALEAVFTDLEILAAIFASAIHDVDHPGVSNQFLINTNSELALMYNDSSVLENHHLAVGFKLLQEENCDIFQNLTKKQRQSLRKMVIDIVLATDMSKHMNLLADLKTMVETKKVTSSGVLLLDNYSDRIQVLQNMVHCADLSNPTKPLQLYRQWTDRIMEEFFRQGDRERERGMEISPMCDKHNASVEKSQVGFIDYIVHPLWETWADLVHPDAQDILDTLEDNREWYQSTIPQSPSPAPDDPEEGRQGQTEKFQFELTLEEDGESDTEKDSGSQVEEDTSCSDSKTLCTQDSESTEIPLDEQVEEEAVGEEEESQPEACVIDDRSPDT

SEQ ID NO: 9344 - protein, 687 aa, Homo sapiens
MAFVWDPLGATVPGPSTRAKSRLRFSKSYSFDVDNGTSAGRSPLDPMTSPGSGLILQANFVHSQRRESFLYRSDSDYDLSPKSMSRNSSIASDIHGDDLIVTPFAQVLASLRTVRNNFAALTNLQDRAPSKRSPMCNQPSINKATITEEAYQKLASETLEELDWCLDQLETLQTRHSVSEMASNKFKRMLNRELTHLSEMSRSGNQVSEFISNTFLDKQHEVEIPSPTQKEKEKKKRPMSQISGVKKLMHSSSLTNSSIPRFGVKTEQEDVLAKELEDVNKWGLHVFRIAELSGNRPLTVIMHTIFQERDLLKTFKIPVDTLITYLMTLEDHYHADVAYHNNIHAADVVQSTHVLLSTPALEAVFTDLEILAAIFASAIHDVDHPGVSNQFLINTNSELALMYNDSSVLENHHLAVGFKLLQEENCDIFQNLTKKQRQSLRKMVIDIVLATDMSKHMNLLADLKTMVETKKVTSSGVLLLDNYSDRIQVLQNMVHCADLSNPTKPLQLYRQWTDRIMEEFFRQGDRERERGMEISPMCDKHNASVEKSQVGFIDYIVHPLWETWADLVHPDAQDILDTLEDNREWYQSTIPQSPSPAPDDPEEGRQGQTEKFQFELTLEEDGESDTEKDSGSQVEEDTSCSDSKTLCTQDSESTEIPLDEQVEEEAVGEEEESQPEACVIDDRSPDT

SEQ ID NO: 9345 - protein, 252 aa, Homo sapiens
MACTWRARAQGRAEAPQWPARRKILPAMVSHSELRKLFYSADAVCFDVDSTVIREEGIDELAKICGVEDAVSEMTRRAMGGAVPFKAALTERLALIQPSREQVQRLIAEQPPHLTPGIRELVSRLQERNVQVFLISGGFRSIVEHVASKLNIPATNVFANRLKFYFNGEYAGFDETQPTAESGGKGKVIKLLKEKFHFKKIIMIGDGATDMEACPPADAFIGFGGNVIRQQVKDNAKWYITDFVELLGELEE

SEQ ID NO: 9346 - protein, 225 aa, Homo sapiens
MVSHSELRKLFYSADAVCFDVDSTVIREEGIDELAKICGVEDAVSEMTRRAMGGAVPFKAALTERLALIQPSREQVQRLIAEQPPHLTPGIRELVSRLQERNVQVFLISGGFRSIVEHVASKLNIPATNVFANRLKFYFNGEYAGFDETQPTAESGGKGKVIKLLKEKFHFKKIIMIGDGATDMEACPPADAFIGFGGNVIRQQVKDNAKWYITDFVELLGELEE

SEQ ID NO: 9347 - protein, 225 aa, Homo sapiens; identical to SEQ ID NO: 9346

SEQ ID NO: 9348 - protein, 252 aa, Homo sapiens; identical to SEQ ID NO: 9345

SEQ ID NO: 9349 - protein, 570 aa, Homo sapiens
MGNWAVNEGLSIFVILVWLGLNVFLFVWYYRVYDIPPKFFYTRKLLGSALALARAPAACLNFNCMLILLPVCRNLLSFLRGSSACCSTRVRRQLDRNLTFHKMVAWMIALHSAIHTIAHLFNVEWCVNARVNNSDPYSVALSELGDRQNESYLNFARKRIKNPEGGLYLAVTLLAGITGVVITLCLILIITSSTKTIRRSYFEVFWYTHHLFVIFFIGLAIHGAERIVRGQTAESLAVHNITVCEQKISEWGKIKECPIPQFAGNPPMTWKWIVGPMFLYLCERLVRFWRSQQKVVITKVVTHPFKTIELQMKKKGFKMEVGQYIFVKCPKVSKLEWHPFTLTSAPEEDFFSIHIRIVGDWTEGLFNACGCDKQEFQDAWKLPKIAVDGPFGTASEDVFSYEVVMLVGAGIGVTPFASILKSVWYKYCNNATNLKLKKIYFYWLCRDTHAFEWFADLLQLLESQMQERNNAGFLSYNIYLTGWDESQANHFAVHHDEEKDVITGLKQKTLYGRPNWDNEFKTIASQHPNTRIGVFLCGPEALAETLSKQSISNSESGPRGVHFIFNKENF

SEQ ID NO: 9350 - protein, 385 aa, Homo sapiens
MAAAGDGEDGQDPHSKHLYTADMFTHGIQSAAHFVMFFAPWCGHCQRLQPTWNDLGDKYNSMEDAKVYVAKVDCTAHSDVCSAQGVRGYPTLKLFKPGQEAVKYQGPRDFQTLENWMLQTLNEEPVTPEPEVEPPSAPELKQGLYELSASNFELHVAQGDHFIKFFAPWCGHCKALAPTWEQLALGLEHSETVKIGKVDCTQHYELCSGNQVRGYPTLLWFRDGKKVDQYKGKRDLESLREYVESQLQRTETGATETVTPSEAPVLAAEPEADKGTVLALTENNFDDTIAEGITFIKFYAPWCGHCKTLAPTWEELSKKEFPGLAGVKIAEVDCTAERNICSKYSVRGYPTLLLFRGGKKVSEHSGGRDLDSLHRFVLSQAKDEL

SEQ ID NO: 9351 - protein, 324 aa, Homo sapiens
MEDAKVYVAKVDCTAHSDVCSAQGVRGYPTLKLFKPGQEAVKYQGPRDFQTLENWMLQTLNEEPVTPEPEVEPPSAPELKQGLYELSASNFELHVAQGDHFIKFFAPWCGHCKALAPTWEQLALGLEHSETVKIGKVDCTQHYELCSGNQVRGYPTLLWFRDGKKVDQYKGKRDLESLREYVESQLQRTETGATETVTPSEAPVLAAEPEADKGTVLALTENNFDDTIAEGITFIKFYAPWCGHCKTLAPTWEELSKKEFPGLAGVKIAEVDCTAERNICSKYSVRGYPTLLLFRGGKKVSEHSGGRDLDSLHRFVLSQAKDEL

SEQ ID NO: 9352 - protein, 404 aa, Homo sapiens
MPARPGRLLPLLARPAAADGPPAADGEDGQDPHSKHLYTADMFTHGIQSAAHFVMFFAPWCGHCQRLQPTWNDLGDKYNSMEDAKVYVAKVDCTAHSDVCSAQGVRGYPTLKLFKPGQEAVKYQGPRDFQTLENWMLQTLNEEPVTPEPEVEPPSAPELKQGLYELSASNFELHVAQGDHFIKFFAPWCGHCKALAPTWEQLALGLEHSETVKIGKVDCTQHYELCSGNQVRGYPTLLWFRDGKKVDQYKGKRDLESLREYVESQLQRTETGATETVTPSEAPVLAAEPEADKGTVLALTENNFDDTIAEGITFIKFYAPWCGHCKTLAPTWEELSKKEFPGLAGVKIAEVDCTAERNICSKYSVRGYPTLLLFRGGKKVSEHSGGRDLDSLHRFVLSQAKDEL

SEQ ID NO: 9353 - protein, 404 aa, Homo sapiens; identical to SEQ ID NO: 9352

SEQ ID NO: 9354 - protein, 341 aa, Homo sapiens
MWCSLCLECLVWWLMPVISESDVALTPALVEKGDVKPLAEQIANTVGCETTNSAVMAHCLRQKMEEELLETTLKMVGWESQALCCSLPQSYPHTPTVIDGVVLPKTPEELQAERKFHTVPYIVGFNRKEFGWFLPTLMSYLLSEGKLDQKTAMSLFWKSYPFVRIPKELIPEAIEKYLGGTDDPVKKKDLFLDLMGDVLFGVPSVTVARNHRDAGAPTYMYEFQYRPSFSSDMKPKTVIGDHGDELFSVLGAPSLKEGASEEEIRLSKMVMKFWANFARNGNPNGEGLPHWPEYNQEEGYLQIGANTQAAQKLKDKEVAFWTKLFAKKAVEKPPQIEHIAL

SEQ ID NO: 9355 - protein, 438 aa, Homo sapiens
MWLPALVLATLAASAAWGHPSSPPVVDTVHGKVLGKFVSLEGFAQPVAIFLGIPFAKPPLGPLRFTPPQPAEPWSFVKNATSYPPMCTQDPKAGQLLSELFTNRKENIPLKLSEDCLYLNIYTPADLTKKNRLPVMVWIHGGGLMVGAASTYDGLALAAHENVVVVTIQYRLGIWGFFSTGDEHSRGNWGHLDQVAALRWVQDNIASFGGNPGSVTIFGESAGGESVSVLVLSPLAKNLFHRAISESGVALTSVLVKKGDVKPLAEQIAITAGCKTTTSAVMVHCLRQKTEEELLETTLKMKFLSLDLQGDPRESQPLLGTVIDGMLLLKTPEELQAERNFHTVPYMVGINKQEFGWLIPMQLMSYPLSEGQLDQKTAMSLLWKSYPLVCIAKELIPEATEKYLGGTDDTVKKKDLFLDLIADVMFGVPSVIVARNHR

SEQ ID NO: 9356 - protein, 131 aa, Homo sapiens
MWLPALVLATLAASAAWVLPCRKSQLLHDARNQKALPPLLIPRLPYGYLSQDMATSFPAVAPGHPSSPPVVDTVHGKVLGKFVSLEGFAQPVAIFLGIPFAKPPLGPLRFTPPQPAEPWSFVKNATSYPPM

SEQ ID NO: 9357 - protein, 439 aa, Homo sapiens
MWLPALVLATLAASAAWGHPSSPPVVDTVHGKVLGKFVSLEGFAQPVAIFLGIPFAKPPLGPLRFTPPQPAEPWSFVKNATSYPPMCTQDPKAGQLLSELFTNRKENIPLKLSEDCLYLNIYTPADLTKKNRLPVMVWIHGGGLMVGAASTYDGLALAAHENVVVVTIQYRLGIWGFFSTGDEHSRGNWGHLDQVAALRWVQDNIASFGGNPGSVTIFGESAGGESVSVLVLSPLAKNLFHRAISESGVALTSVLVKKGDVKPLAEQIAITAGCKTTTSAVMVHCLRQKTEEELLETTLKMKFLSLDLQGDPRESQPLLGTVIDGMLLLKTPEELQAERNFHTVPYMVGINKQEFGWLIPMLMSYPLSEGQLDQKTAMSLLWKSYPLVCIAKELIPEATEKYLGGTDDTVKKKDLFLDLIADVMFGVPSVIVARNHRGE

SEQ ID NO: 9358 - protein, 1723 aa, Homo sapiens [sequence omitted]

SEQ ID NO: 9359 - protein, 466 aa, Homo sapiens
MTLKASEGESGGSMHTALSDLYLEHLLQKRSRPEAVSHPLNTVTEDMYTNGSPAPGSPAQVKGQEVRKVRLIQFEKVTEEPMGITLKLNEKQSCTVARILHGGMIHRQGSLHVGDEILEINGTNVTNHSVDQLQKAMKETKGMISLKVIPNQQSRLPALQMFMRAQFDYDPKKDNLIPCKEAGLKFATGDIIQIINKDDSNWWQGRVEGSSKESAGLIPSPELQEWRVASMAQSAPSEAPSCSPFGKKKKYKDKYLAKHSSIFDQLDVVSYEEVVRLPAFKRKTLVLIGASGVGRSHIKNALLSQNPEKFVYPVPYTTRPPRKSEEDGKEYHFISTEEMTRNISANEFLEFGSYQGNMFGTKFETVHQIHKQNKIAILDIEPQTLKIVRTAELSPFIVFIAPTDQGTQTEALQQLQKDSEAIRSQYAHYFDLSLVNNGVDETLKKLQEAFDQACSSPQWVPVSWVY

SEQ ID NO: 9360 - protein, 340 aa, Homo sapiens
MTLKASEGESGGSMHTALSDLYLEHLLQKRSRPEMFMRAQFDYDPKKDNLIPCKEAGLKFATGDIIQIINKDDSNWWQGRVEGSSKESAGLIPSPELQEWRVASMAQSAPSEAPSCSPFGKKKKYKDKYLAKHSSIFDQLDVVSYEEVVRLPAFKRKTLVLIGASGVGRSHIKNALLSQNPEKFVYPVPYTTRPPRKSEEDGKEYHFISTEEMTRNISANEFLEFGSYQGNMFGTKFETVHQIHKQNKIAILDIEPQTLKIVRTAELSPFIVFIAPTDQGTQTEALQQLQKDSEAIRSQYAHYFDLSLVNNGVDETLKKLQEAFDQACSSPQWVPVSWVY

SEQ ID NO: 9361 - protein, 466 aa, Homo sapiens; identical to SEQ ID NO: 9359

SEQ ID NO: 9362 - protein, 446 aa, Homo sapiens
MTLKASEGESGGSMHTALSDLYLEHLLQKRSRPEAVSHPLNTVTEDMYTNGSPAPGSPAQVKGQEVRKVRLIQFEKVTEEPMGITLKLNEKQSCTVARILHGGMIHRQGSLHVGDEILEINGTNVTNHSVDQLQKAMKETKGMISLKVIPNQQSRLPALQEAGLKFATGDIIQIINKDDSNWWQGRVEGSSKESAGLIPSPELQEWRVASMAQSAPSEAPSCSPFGKKKKYKDKYLAKHSSIFDQLDVVSYEEVVRLPAFKRKTLVLIGASGVGRSHIKNALLSQNPEKFVYPVPYTTRPPRKSEEDGKEYHFISTEEMTRNISANEFLEFGSYQGNMFGTKFETVHQIHKQNKIAILDIEPQTLKIVRTAELSPFIVFIAPTDQGTQTEALQQLQKDSEAIRSQYAHYFDLSLVNNGVDETLKKLQEAFDQACSSPQWVPVSWVY

SEQ ID NO: 9363 - protein, 449 aa, Homo sapiens
MTLKASEGESGGSMHTALSDLYLEHLLQKRSRPEAVSHPLNTVTEDMYTNGSPAPGSPAQVKGQEGITLKLNEKQSCTVARILHGGMIHRQGSLHVGDEILEINGTNVTNHSVDQLQKAMKETKGMISLKVIPNQQSRLPALQMFMRAQFDYDPKKDNLIPCKEAGLKFATGDIIQIINKDDSNWWQGRVEGSSKESAGLIPSPELQEWRVASMAQSAPSEAPSCSPFGKKKKYKDKYLAKHSSIFDQLDVVSYEEVVRLPAFKRKTLVLIGASGVGRSHIKNALLSQNPEKFVYPVPYTTRPPRKSEEDGKEYHFISTEEMTRNISANEFLEFGSYQGNMFGTKFETVHQIHKQNKIAILDIEPQTLKIVRTAELSPFIVFIAPTDQGTQTEALQQLQKDSEAIRSQYAHYFDLSLVNNGVDETLKKLQEAFDQACSSPQWVPVSWVY

SEQ ID NO: 9364 - protein, 363 aa, Homo sapiens
MTLKASEGESGGSMHTALSDLYLEHLLQKRSRPEKETKGMISLKVIPNQQSRLPALQMFMRAQFDYDPKKDNLIPCKEAGLKFATGDIIQIINKDDSNWWQGRVEGSSKESAGLIPSPELQEWRVASMAQSAPSEAPSCSPFGKKKKYKDKYLAKHSSIFDQLDVVSYEEVVRLPAFKRKTLVLIGASGVGRSHIKNALLSQNPEKFVYPVPYTTRPPRKSEEDGKEYHFISTEEMTRNISANEFLEFGSYQGNMFGTKFETVHQIHKQNKIAILDIEPQTLKIVRTAELSPFIVFIAPTDQGTQTEALQQLQKDSEAIRSQYAHYFDLSLVNNGVDETLKKLQEAFDQACSSPQWVPVSWVY

SEQ ID NO: 9365 - protein, 633 aa, Homo sapiens
MAHLKRLVKLHIKRHYHKKFWKLGAVIFFFIIVLVLMQREVSVQYSKEESRMERNMKNKNKMLDLMLEAVNNIKDAMPKMQIGAPVRQNIDAGERPCLQGYYTAAELKPVLDRPPQDSNAPGASGKAFKTTNLSVEEQKEKERGEAKHCFNAFASDRISLHRDLGPDTRPPECIEQKFKRCPPLPTTSVIIVFHNEAWSTLLRTVHSVLYSSPAILLKEIILVDDASVDEYLHDKLDEYVKQFSIVKIVRQRERKGLITARLLGATVATAETLTFLDAHCECFYGWLEPLLARIAENYTAVVSPDIASIDLNTFEFNKPSPYGSNHNRGNFDWSLSFGWESLPDHEKQRRKDETYPIKTPTFAGGLFSISKEYFEYIGSYDEEMEIWGGENIEMSFRVWQCGGQLEIMPCSVVGHVFRSKSPHSFPKGTQVIARNQVRLAEVWMDEYKEIFYRRNTDAAKIVKQKAFGDLSKRFEIKHRLQCKNFTWYLNNIYPEVYVPDLNPVISGYIKSVGQPLCLDVGENNQGGKPLIMYTCHGLGGNQYFEYSAQHEIRHNIQKELCLHAAQGLVQLKACTYKGHKTVVTGEQIWEIQKDQLLYNPFLKMCLSANGEHPSLVSCNPSDPLQKWILSQND

SEQ ID NO: 9366 - protein, 633 aa, Homo sapiens; identical to SEQ ID NO: 9365

SEQ ID NO: 9367 - protein, 231 aa, Homo sapiens
LVTEAAEPCPKKPHEPAVAALPKWSSEAAHPFILANRGGREEPCGGNLELLVPQGPSRLCSGYKVITATRSVQDSSNVDGPGATTCAEQQPRRPLREKPRDSQAWPGRRPHPARAIQGSHLERSGRAGAGREAGAQARKWGLAPADVAGWSSPGRLQVEAEPRFCLSRQRGRPSGKAGGGGGGGALLSRNCGDSNRSRSRRHLHLAPSPRPAPARPPLPATLPCPPARYYH

SEQ ID NO: 9368 - protein, 633 aa, Homo sapiens; identical to SEQ ID NO: 9365

SEQ ID NO: 9369 - protein, 1077 aa, Homo sapiens
MDSKMKKMAELQLSVVSDPKNRKAIENQIQQWEQNLEKFHMDLFRMRCYLASLQGGELPNPKSLLAAASRPSKLALGRLGILSVSSFHALVCSRDDSALRKRTLSLTQRGRNKKGIFSSLKGLDTLARKGKEKRPSITQIFDSSGSHGFSGTQLPQNSSNSSEVDELLHIYGSTVDGVPRDNAWEIQTYVHFQDNHGVTVGIKPEHRVEDILTLACKMRQLEPSHYGLQLRKLVDDNVEYCIPAPYEYMQQQVYDEIEVFPLNVYDVQLTKTGSVCDFGFAVTAQVDERQHLSRIFISDVLPDGLAYGEGLRKGNEIMTLNGEAVSDLDLKQMEALFSEKSVGLTLIARPPDTKATLCTSWSDSDLFSRDQKSLLPPPNQSQLLEEFLDNFKKNTANDFSNVPDITTGLKRSQTDGTLDQVSHREKMEQTFRSAEQITALCRSFNDSQANGMEGPRENQDPPPRPLARHLSDADRLRKVIQELVDTEKSYVKDLSCLFELYLEPLQNETFLTQDEMESLFGSLPEMLEFQKVFLETLEDGISASSDFNTLETPSQFRKLLFSLGGSFLYYADHFKLYSGFCANHIKVQKVLERAKTDKAFKAFLDARNPTKQHSSTLESYLIKPVQRVLKYPLLLKELVSLTDQESEEHYHLTEALKAMEKVASHINEMQKIYEDYGTVFDQLVAEQSGTEKEVTELSMGELLMHSTVSWLNPFLSLGKARKDLELTVFVFKRAVILVYKENCKLKKKLPSNSRPAHNSTDLDPFKFRWLIPISALQVRLGNPAGTENNSIWELIHTKSEIEGRPETIFQLCCSDSESKTNIVKVIRSILRENFRRHIKCELPLEKTCKDRLVPLKNRVPVSAKLASSRSLKVLKNSSSNEWTGETGKGTLLDSDEGSLSSGTQSSGCPTAEGRQDSKSTSPGKYPHPGLADFADNLIKESDILSDEDDDHRQTVKQGSPTKDIEIQFQRLRISEDPDVHPEAEQQPGPESGEGQKGGEQPKLVRGHFCPIKRKANSTKRDRGTLLKAQIRHQSLDSQSENATIDLNSVLEREFSVQSLTSVVSEECFYETESHGKS

SEQ ID NO: 9370 - protein, 1725 aa, Homo sapiens [sequence omitted]

SEQ ID NO: 9371 - protein, 1013 aa, Homo sapiens
MDLFRMRCYLASLQGGELPNPKSLLAAASRPSKLALGRLGILSVSSFHALVCSRDDSALRKRTLSLTQRGRNKKGIFSSLKGLDTLARKGKEKRPSITQVDELLHIYGSTVDGVPRDNAWEIQTYVHFQDNHGVTVGIKPEHRVEDILTLACKMRQLEPSHYGLQLRKLVDDNVEYCIPAPYEYMQQQVYDEIEVFPLNVYDVQLTKTGSVCDFGFAVTAQVDERQHLSRIFISDVLPDGLAYGEGLRKGNEIMTLNGEAVSDLDLKQMEALFSEKSVGLTLIARPPDTKATLCTSWSDSDLFSRDQKSLLPPPNQSQLLEEFLDNFKKNTANDFSNVPDITTGLKRSQTDGTLDQVSHREKMEQTFRSAEQITALCRSFNDSQANGMEGPRENQDPPPRPLARHLSDADRLRKVIQELVDTEKSYVKDLSCLFELYLEPLQNETFLTQDEMESLFGSLPEMLEFQKVFLETLEDGISASSDFNTLETPSQFRKLLFSLGGSFLYYADHFKLYSGFCANHIKVQKVLERAKTDKAFKAFLDARNPTKQHSSTLESYLIKPVQRVLKYPLLLKELVSLTDQESEEHYHLTEALKAMEKVASHINEMQKIYEDYGTVFDQLVAEQSGTEKEVTELSMGELLMHSTVSWLNPFLSLGKARKDLELTVFVFKRAVILVYKENCKLKKKLPSNSRPAHNSTDLDPFKFRWLIPISALQVRLGNPAGTENNSIWELIHTKSEIEGRPETIFQLCCSDSESKTNIVKVIRSILRENFRRHIKCELPLEKTCKDRLVPLKNRVPVSAKLASSRSLKVLKNSSSNEWTGETGKGTLLDSDEGSLSSGTQSSGCPTAEGRQDSKSTSPGKYPHPGLADFADNLIKESDILSDEDDDHRQTVKQGSPTKDIEIQFQRLRISEDPDVHPEAEQQPGPESGEGQKGGEQPKLVRGHFCPIKRKANSTKRDRGTLLKAQIRHQSLDSQSENATIDLNSVLEREFSVQSLTSVVSEECFYETESHGKS

SEQ ID NO: 9372 - protein, 1077 aa, Homo sapiens; identical to SEQ ID NO: 9369

SEQ ID NO: 9373 - protein, 245 aa, Homo sapiens
MNFASNLSDYFLLLEDHIHCTPKFAAAISSALSAWKELPWVILEFSHLSISGKVFCTSDFSRLNTFFLLFHKDTPTHLLLSEFRLLLAQNIPIHFSPSVFHHTGNYSVFDDMCFSVEKDRVFGEPDNPVATVLTDMVSMLAVILQYTYTLNKEGYSTLNPLKGNYLTVILDRPQKNTQIAVGRYRLQQGQVEPGYDPQEDPKSCARYALLGPLVGGNLDQVVFSEEESVEQLNCIRLLVLASQES

SEQ ID NO: 9374 - protein, 982 aa, Homo sapiens [sequence omitted]

SEQ ID NO: 9375 - protein, 982 aa, Homo sapiens [sequence omitted]

SEQ ID NO: 9376 - protein, 770 aa, Homo sapiens
MANSMNGRNPGGRGGNPRKGRILGIIDAIQDAVGPPKQAAADRRTVEKTWKLMDKVVRLCQNPKLQLKNSPPYILDILPDTYQHLRLILSKYDDNQKLAQLSENEYFKIYIDSLMKKSKRAIRLFKEGKERMYEEQSQDRRNLTKLSLIFSHMLAEIKAIFPNGQFQGDNFRITKADAAEFWRKFFGDKTIVPWKVFRQCLHEVHQISSGLEAMALKSTIDLTCNDYISVFEFDIFTRLFQPWGSILRNWNFLAVTHPGYMAFLTYDEVKARLQKYSTKPGSYIFRLSCTRLGQWAIGYVTGDGNILQTIPHNKPLFQALIDGSREGFYLYPDGRSYNPDLTGLCEPTPHDHIKVTQEQYELYCEMGSTFQLCKICAENDKDVKIEPCGHLMCTSCLTAWQESDGQGCPFCRCEIKGTEPIIVDPFDPRDEGSRCCSIIDPFGMPMLDLDDDDDREESLMMNRLANVRKCTDRQNSPVTSPGSSPLAQRRKPQPDPLQIPHLSLPPVPPRLDLIQKGIVRSPCGSPTGSPKSSPCMVRKQDKPLPAPPPPLRDPPPPPPERPPPIPPDNRLSRHIHHVESVPSRDPPMPLEAWCPRDVFGTNQLVGCRLLGEGSPKPGITASSNVNGRHSRVGSDPVLMRKHRRHDLPLEGAKVFSNGHLGSEEYDVPPRLSPPPPVTTLLPSIKCTGPLANSLSEKTRDPVEEDDDEYKIPSSHPVSLNSQPSHCHNVKPPVRSCDNGHCMLNGTHGPSSEKKSNIPDLSIYLKGTYRI

SEQ ID NO: 9377 - protein, 586 aa, Homo sapiens
MGVNAVHWFRKGLRLHDNPALKECIQGADTIRCVYILDPWFAGSSNVGINRWRFLLQCLEDLDANLRKLNSRLFVIRGQPADVFPRLFKEWNITKLSIEYDSEPFGKERDAAIKKLATEAGVEVIVRISHTLYDLDKIIELNGGQPPLTYKRFQTLISKMEPLEIPVETITSEVIEKCTTPLSDDHDEKYGVPSLEELGFDTDGLSSAVWPGGETEALTRLERHLERKAWVANFERPRMNANSLLASPTGLSPYLRFGCLSCRLFYFKLTDLYKKVKKNSSPPLSLYGQLLWREFFYTAATNNPRFDKMEGNPICVQIPWDKNPEALAKWAEGRTGFPWIDAIMTQLRQEGWIHHLARHAVACFLTRGDLWISWEEGMKVFEELLLDADWSINAGSWMWLSCSSFFQQFFHCYCPVGFGRRTDPNGDYIRRYLPVLRGFPAKYIYDPWNAPEGIQKVAKCLIGVNYPKPMVNHAEASRLNIERMKQIYQQLSRYRGLGLLASVPSNPNGNGGFMGYSAENIPGCSSSGSCSQGSGILHYAHGDSQQTHLLKQGRSSMGTGLSGGKRPSQEEDTQSIGPKVQRQSTN

SEQ ID NO: 9378 - protein, 586 aa, Homo sapiens; identical to SEQ ID NO: 9377

SEQ ID NO: 9379 - protein, 427 aa, Homo sapiens
MEPLEIPVETITSEVIEKCTTPLSDDHDEKYGVPSLEELGFDTDGLSSAVWPGGETEALTRLERHLERKAWVANFERPRMNANSLLASPTGLSPYLRFGCLSCRLFYFKLTDLYKKVKKNSSPPLSLYGQLLWREFFYTAATNNPRFDKMEGNPICVQIPWDKNPEALAKWAEGRTGFPWIDAIMTQLRQEGWIHHLARHAVACFLTRGDLWISWEEGMKVFEELLLDADWSINAGSWMWLSCSSFFQQFFHCYCPVGFGRRTDPNGDYIRRYLPVLRGFPAKYIYDPWNAPEGIQKVAKCLIGVNYPKPMVNHAEASRLNIERMKQIYQQLSRYRGLGLLASVPSNPNGNGGFMGYSAENIPGCSSSGSCSQGSGILHYAHGDSQQTHLLKQGRSSMGTGLSGGKRPSQEEDTQSIGPKVQRQSTN

SEQ ID NO: 9380 - protein, 839 aa, Homo sapiens
MLRRGSQALRRFSTGRVYFKNKLKLALIGQSLFGQEVYSHLRKEGHRVVGVFTVPDKDGKADPLALAAEKDGTPVFKLPKWRVKGKTIKEVAEAYRSVGAELNVLPFCTQFIPMDIIDSPKHGSIIYHPSILPRHRGASAINWTLIMGDKKAGFSVFWADDGLDTGPILLQRSCDVEPNDTVDALYNRFLFPEGIKAMVEAVQLIADGKAPRIPQPEEGATYEGIQKKENAEISWDQSAEVLHNWIRGHDKVPGAWTEINGQMVTFYGSTLLNSSVPPGEPLEIKGAKKPGLVTKNGLVLFGNDGKALTVRNLQFEDGKMIPASQYFSTGETSVVELTAEEVKVAETIKVIWAGILSNVPIIEDSTDFFKSGASSMDVARLVEEIRQKCGGLQLQNEDVYMATKFEGFIQKVVRKLRGEDQEVELVVDYISKEVNEIMVKMPYQCFINGQFTDADDGKTYDTINPTDGSTICKVSYASLADVDKAVAAAKDAFENGEWGRMNARERGRLMYRLADLLEENQEELATIEALDSGAVYTLALKTHIGMSVQTFRYFAGWCDKIQGSTIPINQARPNRNLTFTKKEPLGVCAIIIPWNYPLMMLAWKSAACLAAGNTLVLKPAQVTPLTALKFAELSVKAGFPKGVINIIPGSGGIAGQRLSEHPDIRKLGFTGSTPIGKQIMKSCAVSNLKKVSLELGGKSPLIIFNDCELDKAVRMGMGAVFFNKGENCIAAGRLFVEESIHDEFVTRVVEEIKKMKIGDPLDRSTDHGPQNHKAHLEKLLQYCETGVKEGATLVYGGRQVQRPGFFMEPTVFTDVEDYMYLAKEESFGPIMVISKFQNG

SEQ ID NO: 9381 - protein, 372 aa, Homo sapiens
MAHAPARCPSARGSGDGEMGKPRNVALITGITGQDGSYLAEFLLEKGYEVHGIVRRSSSFNTGRIEHLYKNPQAHIEGNMKLHYGDLTDSTCLVKIINEVKPTEIYNLGAQSHVKISFDLAEYTADVDGVGTLRLLDAVKTCGLINSVKFYQASTSELYGKVQEIPQKETTPFYPRSPYGAAKLYAYWIVVNFREAYNLFAVNGILFNHESPRRGANFVTRKISRSVAKIYLGQLECFSLGNLDAKRDWGHAKDYVEAMWLMLQNDEPEDFVIATGEVHSVREFVEKSFLHIGKTIVWEGKNENEVGRCKETGKVHVTVDLKYYRPTEVDFLQGDCTKAKQKLNWKPRVAFDELVREMVHADVELMRTNPNA

SEQ ID NO: 9382 - protein, 766 aa, Homo sapiens
MNVNQVAENLALSHQEELVDLPKNYPLSENEDEGDSDGERKHQKLLEAIISLDGKNRRKLAERSEASLKVSEFSVSSEGSGEKLGLADLLEPVKTSSSLATVKKQLNRVKSKKVVELPLNKEKIEQIHREVAFSKTSQVLSKWDPIILKNQQAEQLVFPLGKEQPAIAPIEHALSGWKARTPLEQEIFNLLHKNKQPVTDPLLTPMEKASLQAMSLEEAKMHRAELQRARALQSYYEAKARKEKKIKSKKYHKVVKKGKAKKALKEFEQLQKVNPTVALEEMEKIENARMMERMSLKHQNSGKWAKSKAIMAKYDLEARQAMQEQLAKNKELTQKLQVASESEEEEGGTEVEELLVPHVANEVQMNVDGPNPWMFRSCTSDTKEAATQEDPEQVPELAAHEVSASEAEERPVAEEEILLREFEERQSLRKRSELNQDAEPASSQETKDSSSQEVLSELRALSQKLKEKHQSRKQKASSEGTVPQVQREEPAPEEAEPLLLQRSERVQTLEELEELGKEDCFQNKELPRPVLEGQQSERTPNNRPDAPKEKKEKEQLINLQNFLTTQSPSVRSLAVPTIIEELEDEEERDQRQMIKEAFAGDDVIRDFLKEKREAVEASKPKDVDLTLPGWGEWGGVGLKPSAKKRRQFLIKAPEGPPRKDKNLPNVIISEKRNIHAAAHQVQVLPYPFTHHRQFERTIQTPIGSTWNTQRAFQKLTTPKVVTKPGHIIKPIKAEDVGYQSSSRSDLPVIQRNPKRITTRHNKEEKL

SEQ ID NO: 9383 - protein, 766 aa, Homo sapiens; identical to SEQ ID NO: 9382

SEQ ID NO: 9384 - protein, 766 aa, Homo sapiens; identical to SEQ ID NO: 9382

SEQ ID NO: 9385 - protein, 766 aa, Homo sapiens; identical to SEQ ID NO: 9382

SEQ ID NO: 9386 - protein, 766 aa, Homo sapiens; identical to SEQ ID NO: 9382

SEQ ID NO: 9387 - protein, 1446 aa, Homo sapiens
MARAQALVLALTFQLCAPETETPAAGCTFEEASDPAVPCEYSQAQYDDFQWEQVRIHPGTRAPADLPHGSYLMVNTSQHAPGQRAHVIFQSLSENDTHCVQFSYFLYSRDGHSPGTLGVYVRVNGGPLGSAVWNMTGSHGRQWHQAELAVSTFWPNEYQVLFEALISPDRRGYMGLDDILLLSYPCAKAPHFSRLGDVEVNAGQNASFQCMAAGRAAEAERFLLQRQSGALVPAAGVRHISHRRFLATFPLAAVSRAEQDLYRCVSQAPRGAGVSNFAELIVKEPPTPIAPPQLLRAGPTYLIIQLNTNSIIGDGPIVRKEIEYRMARGPWAEVHAVSLQTYKLWHLDPDTEYEISVLLTRPGDGGTGRPGPPLISRTKCAEPMRAPKGLAFAEIQARQLTLQWEPLGYNVTRCHTYTVSLCYHYTLGSSHNQTIRECVKTEQGVSRYTIKNLLPYRNVHVRLVLTNPEGRKEGKEVTFQTDEDVPSGIAAESLTFTPLEDMIFLKWEEPQEPNGLITQYEISYQSIESSDPAVNVPGPRRTISKLRNETYHVFSNLHPGTTYLFSVRARTGKGFGQAALTEITTNISAPSFDYADMPSPLGESENTITVLLRPAQGRGAPISVYQVIVEEERARRLRREPGGQDCFPVPLTFEAALARGLVHYFGAELAASSLPEAMPFTVGDNQTYRGFWNPPLEPRKAYLIYFQAASHLKGETRLNCIRIARKAACKESKRPLEVSQRSEEMGLILGICAGGLAVLILLLGAIIVIIRKGRDHYAYSYYPKPVNMTKATVNYRQEKTHMMSAVDRSFTDQSTLQEDERLGLSFMDTHGYSTRGDQRSGGVTEASSLLGGSPRRPCGRKGSPYHTGQLHPAVRVADLLQHINQMKTAEGYGFKQEYESFFEGWDATKKKDKVKGSRQEPMPAYDRHRVKLHPMLGDPNADYINANYIDGYHRSNHFIATQGPKPEMVYDFWRMVWQEHCSSIVMITKLVEVGRVKCSRYWPEDSDTYGDIKIMLVKTETLAEYVVRTFALERRGYSARHEVRQFHFTAWPEHGVPYHATGLLAFIRRVKASTPPDAGPIVIHCSAGTGRTGCYIVLDVMLDMAECEGVVDIYNCVKTLCSRRVNMIQTEEQYIFIHDAILEACLCGETTIPVSEFKATYKEMIRIDPQSNSSQLREEFQTLNSVTPPLDVEECSIALLPRNRDKNRSMDVLPPDRCLPFLISTDGDSNNYINAALTDSYTRSAAFIVTLHPLQSTTPDFWRLVYDYGCTSIVMLNQLNQSNSAWPCLQYWPEPGRQQYGLMEVEFMSGTADEDLVARVFRVQNISRLQEGHLLVRHFQFLRWSAYRDTPDSKKAFLHLLAEVDKWQAESGDGRTIVHCLNGGGRSGTFCACATVLEMIRCHNLVDVFFAAKTLRNYKPNMVETMDQYHFCYDVALEYLEGLESR

SEQ ID NO: 9388 - protein, 1436 aa, Homo sapiens
MARAQALVLALTFQLCAPETETPAAGCTFEEASDPAVPCEYSQAQYDDFQWEQVRIHPGTRAPADLPHGSYLMVNTSQHAPGQRAHVIFQSLSENDTHCVQFSYFLYSRDGHSPGTLGVYVRVNGGPLGSAVWNMTGSHGRQWHQAELAVSTFWPNEYQVLFEALISPDRRGYMGLDDILLLSYPCAKAPHFSRLGDVEVNAGQNASFQCMAAGRAAEAERFLLQRQSGALVPAAGVRHISHRRFLATFPLAAVSRAEQDLYRCVSQAPRGAGVSNFAELIVKEPPTPIAPPQLLRAGPTYLIIQLNTNSIIGDGPIVRKEIEYRMARGPWAEVHAVSLQTYKLWHLDPDTEYEISVLLTRPGDGGTGRPGPPLISRTKCAEPMRAPKGLAFAEIQARQLTLQWEPLGYNVTRCHTYTVSLCYHYTLGSSHNQTIRECVKTEQGVSRYTIKNLLPYRNVHVRLVLTNPEGRKEGKEVTFQTDEDVPSGIAAESLTFTPLEDMIFLKWEEPQEPNGLITQYEISYQSIESSDPAVNVPGPRRTISKLRNETYHVFSNLHPGTTYLFSVRARTGKGFGQAALTEITTNISAPSFDYADMPSPLGESENTITVLLRPAQGRGAPISVYQVIVEEERARRLRREPGGQDCFPVPLTFEAALARGLVHYFGAELAASSLPEAMPFTVGDNQTYRGFWNPPLEPRKAYLIYFQAASHLKGETRLNCIRIARKAACKESKRPLEVSQRSEEMGLILGICAGGLAVLILLLGAIIVIIRKGKPVNMTKATVNYRQEKTHMMSAVDRSFTDQSTLQEDERLGLSFMDTHGYSTRGDQRSGGVTEASSLLGGSPRRPCGRKGSPYHTGQLHPAVRVADLLQHINQMKTAEGYGFKQEYESFFEGWDATKKKDKVKGSRQEPMPAYDRHRVKLHPMLGDPNADYINANYIDGYHRSNHFIATQGPKPEMVYDFWRMVWQEHCSSIVMITKLVEVGRVKCSRYWPEDSDTYGDIKIMLVKTETLAEYVVRTFALERRGYSARHEVRQFHFTAWPEHGVPYHATGLLAFIRRVKASTPPDAGPIVIHCSAGTGRTGCYIVLDVMLDMAECEGVVDIYNCVKTLCSRRVNMIQTEEQYIFIHDAILEACLCGETTIPVSEFKATYKEMIRIDPQSNSSQLREEFQTLNSVTPPLDVEECSIALLPRNRDKNRSMDVLPPDRCLPFLISTDGDSNNYINAALTDSYTRSAAFIVTLHPLQSTTPDFWRLVYDYGCTSIVMLNQLNQSNSAWPCLQYWPEPGRQQYGLMEVEFMSGTADEDLVARVFRVQNISRLQEGHLLVRHFQFLRWSAYRDTPDSKKAFLHLLAEVDKWQAESGDGRTIVHCLNGGGRSGTFCACATVLEMIRCHNLVDVFFAAKTLRNYKPNMVETMDQYHFCYDVALEYLEGLESR

SEQ ID NO: 9389 - protein, 959 aa, Homo sapiens [sequence omitted]

SEQ ID NO: 9390 - protein, 725 aa, Homo sapiens
MAAASAVSVLLVAAERNRWHRLPSLLLPPRTWVWRQRTMKYTTATGRNITKVLIANRGEIACRVMRTAKKLGVQTVAVYSEADRNSMHVDMADEAYSIGPAPSQQSYLSMEKIIQVAKTSAAQAIHPGCGFLSENMEFAELCKQEGIIFIGPPPSAIRDMGIKSTSKSIMAAAGVPVVEGYHGEDQSDQCLKEHARRIGYPVMIKAVRGGGGKGMRIVRSEQEFQEQLESARREAKKSFNDDAMLIEKFVDTPRHVEVQVFGDHHGNAVYLFERDCSVQRRHQKIIEEAPAPGIKSEVRKKLGEAAVRAAKAVNYVGAGTVEFIMDSKHNFCFMEMNTRLQVEHPVTEMITGTDLVEWQLRIAAGEKIPLSQEEITLQGHAFEARIYAEDPSNNFMPVAGPLVHLSTPRADPSTRIETGVRQGDEVSVHYDPMIAKLVVWAADRQAALTKLRYSLRQYNIVGLPTNIDFLLNLSGHPEFEAGNVHTDFIPQHHKQLLLSRKAAAKESLCQAALGLILKEKAMTDTFTLQAHDQFSPFSSSSGRRLNISYTRNMTLKDGKNNVAIAVTYNHDGSYSMQIEDKTFQVLGNLYSEGDCTYLKCSVNGVASKAKLIILENTIYLFSKEGSIEIDIPVPKYLSSVSSQETQGGPLAPMTGTIEKVFVKAGDKVKAGDSLMVMIAMKMEHTIKSPKDGTVKKVFYREGAQANRHTPLVEFEEEESDKRESE

SEQ ID NO: 9391 - protein, 556 aa, Homo sapiens
MRRFVYCKVVLATSLMWVLVDVFLLLYFSECNKCDDKKERSLLPALRAVISRNQEGPGEMGKAVLIPKDDQEKMKELFKINQFNLMASDLIALNRSLPDVRLEGCKTKVYPDELPNTSVVIVFHNEAWSTLLRTVYSVINRSPHYLLSEVILVDDASERDFLKLTLENYVKNLEVPVKIIRMEERSGLIRARLRGAAASKGQVITFLDAHCECTLGWLEPLLARIKEDRKTVVCPIIDVISDDTFEYMAGSDMTYGGFNWKLNFRWYPVPQREMDRRKGDRTLPVRTPTMAGGLFSIDRNYFEEIGTYDAGMDIWGGENLEMSFRIWQCGGSLEIVTCSHVGHVFRKATPYTFPGGTGHVINKNNRRLAEVWMDEFKDFFYIISPGVVKVDYGDVSVRKTLRENLKCKPFSWYLENIYPDSQIPRRYYSLGEIRNVETNQCLDNMGRKENEKVGIFNCHGMGGNQVFSYTADKEIRTDDLCLDVSRLNGPVIMLKCHHMRGNQLWEYDAERLTLRHVNSNQCLDEPSEEDKMVPTMQDCSGSRSQQWLLRNMTLGT

SEQ ID NO: 9392 - protein, 158 aa, Homo sapiens
NSFKITARYKERLEPKRPVARFYSSGLKCERPKHSRAEPGGQGPRSRDTAPQLRAEEASDSAARSEWAGARARLKDGCWRLAATAWEVTVRPAAPASSRGLLPPPYHEASKSSHAGLDLFSVAACHRFNLLGLHHLCFDGVCKTTAKEEIPRQNLWDE

SEQ ID NO: 9393 - protein, 91 aa, Homo sapiens
MKPVSRRTLDWIYSVVSPGDRGPPPCRLTGPAGGKALFLQHPETPKSIPELSISLPHLDSASSWRIRSSASYVRAAGCTRHWNPIYSTLLL

SEQ ID NO: 9394 - protein, 925 aa, Homo sapiens
MTTEQRRSLQAFQDYIRKTLDPTYILSYMAPWFREEEVQYIQAEKNNKGPMEAATLFLKFLLELQEEGWFRGFLDALDHAGYSGLYEAIESWDFKKIEKLEEYRLLLKRLQPEFKTRIIPTDIISDLSECLINQECEEILQICSTKGMMAGAEKLVECLLRSDKENWPKTLKLALEKERNKFSELWIVEKGIKDVETEDLEDKMETSDIQIFYQEDPECQNLSENSCPPSEVSDTNLYSPFKPRNYQLELALPAMKGKNTIICAPTGCGKTFVSLLICEHHLKKFPQGQKGKVVFFANQIPVYEQQKSVFSKYFERHGYRVTGISGATAENVPVEQIVENNDIIILTPQILVNNLKKGTIPSLSIFTLMIFDECHNTSKQHPYNMIMFNYLDQKLGGSSGPLPQVIGLTASVGVGDAKNTDEALDYICKLCASLDASVIATVKHNLEELEQVVYKPQKFFRKVESRISDKFKYIIAQLMRDTESLAKRICKDLENLSQIQNREFGTQKYEQWIVTVQKACMVFQMPDKDEESRICKALFLYTSHLRKYNDALIISEHARMKDALDYLKDFFSNVRAAGFDEIEQDLTQRFEEKLQELESVSRDPSNENPKLEDLCFILQEEYHLNPETITILFVKTRALVDALKNWIEGNPKLSFLKPGILTGRGKTNQNTGMTLPAQKCILDAFKASGDHNILIATSVADEGIDIAQCNLVILYEYVGNVIKMIQTRGRGRARGSKCFLLTSNAGVIEKEQINMYKEKMMNDSILRLQTWDEAVFREKILHIQTHEKFIRDSQEKPKPVPDKENKKLLCRKCKALACYTADVRVIEECHYTVLGDAFKECFVSRPHPKPKQFSSFEKRAKIFCARQNCSHDWGIHVKYKTFEIPVIKIESFVVEDIATGVQTLYSKWKDFHFEKIPFDPAEMSK

SEQ ID NO: 9395 - protein, 643 aa, Homo sapiens [sequence omitted]

SEQ ID NO: 9396 - protein, 325 aa, Homo sapiens
MSTTRTENAVIMGLSSQNGQLRGPLKPSGGPRGEATQTQQQTNQLKNTNTIIALNHKRRLLMRIFEMGWKKPSPFQEESIPIALSGRDILARAKNGTGKSSAHDIPLLKRLDLKKDTIQTIVIVPTGGPALQVSQICIQVSKHMGGVKVVMTTGGTNSGDDVLRLDDTVHMVIAAPGRILNLIKKGVAKDITQYYAYVTEHQKVHGLTTLFSRLQLNQMIIFFNCSQRVEWPAKISQLGIDIQAVNVVINFDFSKLEETYLRHIGRPGHFGHFGLAINLITYGDHFNLKGIEEQLGKEIKPIPSNIDKSLHVAEFHSKAVENEKP

SEQ ID NO: 9397 - protein, 187 aa, Homo sapiens
MRIFEMGWKKPSPFQEESIPIALSGRDILARAKNGTGKSSAHDIPLLKRLDLKKDTIQTIVIVPTGGPALQVSQICIQVSKHMGGVKVVMTTGGTNSGDDVLRLDDTVHMVIAAPGRILNLIKKGVAKVSHVQVIVLDEADKFLSQDFGQLMEDIILMLPEDRQILLHSATFPLSIQKFMNSHLQKP

SEQ ID NO: 9398 - protein, 336 aa, Homo sapiens [sequence omitted]

SEQ ID NO: 9399 - protein, 985 aa, Homo sapiens [sequence omitted]

SEQ ID NO: 9400 - protein, 1066 aa, Homo sapiens [sequence omitted]

SEQ ID NO: 9401 - protein, 37 aa, Homo sapiens
MGFVACSQEVGQALGTLIHESSIPYEGCCRPCHLARG

SEQ ID NO: 9402 - protein, 1048 aa, Homo sapiens [sequence omitted]

SEQ ID NO: 9403 - protein, 56 aa, Homo sapiens
MGEYFRDNGKCTFAIYDDLSKQAGDCYQMSLLLCRLPVVRPILVICFIYNPGCWRG

SEQ ID NO: 9404 - protein, 617 aa, Homo sapiens
MLVPLAKLSCLAYQCFHALKIKKNYLPLCAIRWSSTSTVPRITTHYTIYPRDKDKRWEGVNMERFAEEADVVIVGAGPAGLSAAVRLKQLAVAHEKDIRVCLVEKAAQIGAHTLSGACLDPGAFKELFPDWKEKGAPLNTPVTEDRFGILTEKYRIPVPILPGLPMNNHGNYIVRLGHLVSWMGEQAEALGVEVYPGYAAAEVLFHDDGSVKGIATNDVGIQKDGAPKATFERGLELHAKVTIFAEGCHGHLAKQLYKKFDLRANCEPQTYGIGLKELWVIDEKNWKPGRVDHTVGWPLDRHTYGGSFLYHLNEGEPLVALGLVVGLDYQNPYLSPFREFQRWKHHPSIRPTLEGGKRIAYGARALNEGGFQSIPKLTFPGGLLIGCSPGFMNVPKIKGTHTAMKSGILAAESIFNQLTSENLQSKTIGLHVTEYEDNLKNSWVWKELYSVRNIRPSCHGVLGVYGGMIYTGIFYWILRGMEPWTLKHKGSDFERLKPAKDCTPIEYPKPDGQISFDLLSSVALSGTNHEHDQPAHLTLRDDSIPVNRNLSIYDGPEQRFCPAGVYEFVPVEQGDGFRLQINAQNCVHCKTCDIKDPSQNINWVVPEGGGGPAYNGM

SEQ ID NO: 9405 - protein, 252 aa, Homo sapiens
MGISKDPIFVPGVWGPYFSAMVPGFWLNEGGQSVTGKLIDHMVQGHAAFPELQVKATARCQSIYAYLNSHLDLIKKAQPVGFLTVDLHVWPDFHGNRSPLADLTLKGMVTGLKLSQDLDDLAILYLATVQAIALGTRFIIEAMEAAGHSISTLFLCGGLSKNPLFVQMHADITGMPVVLSQEVESVLVGAAVLGACASGDFASVQEAMAKMSKVGKVVFPRLQDKKYYDKKYQVFLKLVEHQKEYLAIMNDD

SEQ ID NO: 9406 - protein, 252 aa, Homo sapiens; identical to SEQ ID NO: 9405

SEQ ID NO: 9407 - protein, 575 aa, Homo sapiens
MSGGEQKPERYYVGVDVGTGSVRAALVDQSGVLLAFADQPIKNWEPQFNHHEQSSEDIWAACCVVTKKVVQGIDLNQIRGLGFDATCSLVVLDKQFHPLPVNQEGDSHRNVIMWLDHRAVSQVNRINETKHSVLQYVGGVMSVEMQAPKLLWLKENLREICWDKAGHFFDLPDFLSWKATGVTARSLCSLVCKWTYSAEKGWDDSFWKMIGLEDFVADNYSKIGNQVLPPGASLGNGLTPEAARDLGLLPGIAVAASLIDAHAGGLGVIGADVRGHGLICEGQPVTSRLAVICGTSSCHMGISKDPIFVPGVWGPYFSAMVPGFWLNEGGQSVTGKLIDHMVQGHAAFPELQVKATARCQSIYAYLNSHLDLIKKAQPVGFLTVDLHVWPDFHGNRSPLADLTLKGMRTTGYLYIPALAALHSPSSLLSPQVTGLKLSQDLDDLAILYLATVQAIALGTRFIIEAMEAAGHSISTLFLCGGLSKNPLFVQMHADITGMPVVLSQEVESVLVGAAVLGACASGDFASVQEAMAKMSKVGKVVFPRLQDKKYYDKKYQVFLKLVEHQKEYLAIMNDD

SEQ ID NO: 9408 - protein, 439 aa, Homo sapiens
MWLDHRAVSQVNRINETKHSVLQYVGGVMSVEMQAPKLLWLKENLREICWDKAGHFFDLPDFLSWKATGVTARSLCSLVCKWTYSAEKGWDDSFWKMIGLEDFVADNYSKIGNQVLPPGASLGNGLTPEAARDLGLLPGIAVAASLIDAHAGGLGVIGADVRGHGLICEGQPVTSRLAVICGTSSCHMGISKDPIFVPGVWGPYFSAMVPGFWLNEGGQSVTGKLIDHMVQGHAAFPELQVKATARCQSIYAYLNSHLDLIKKAQPVGFLTVDLHVWPDFHGNRSPLADLTLKGMVTGLKLSQDLDDLAILYLATVQAIALGTRFIIEAMEAAGHSISTLFLCGGLSKNPLFVQMHADITGMPVVLSQEVESVLVGAAVLGACASGDFASVQEAMAKMSKVGKVVFPRLQDKKYYDKKYQVFLKLVEHQKEYLAIMNDD

SEQ ID NO: 9409 - protein, 551 aa, Homo sapiens
MSGGEQKPERYYVGVDVGTGSVRAALVDQSGVLLAFADQPIKNWEPQFNHHEQSSEDIWAACCVVTKKVVQGIDLNQIRGLGFDATCSLVVLDKQFHPLPVNQEGDSHRNVIMWLDHRAVSQVNRINETKHSVLQYVGGVMSVEMQAPKLLWLKENLREICWDKAGHFFDLPDFLSWKATGVTARSLCSLVCKWTYSAEKGWDDSFWKMIGLEDFVADNYSKIGNQVLPPGASLGNGLTPEAARDLGLLPGIAVAASLIDAHAGGLGVIGADVRGHGLICEGQPVTSRLAVICGTSSCHMGISKDPIFVPGVWGPYFSAMVPGFWLNEGGQSVTGKLIDHMVQGHAAFPELQVKATARCQSIYAYLNSHLDLIKKAQPVGFLTVDLHVWPDFHGNRSPLADLTLKGMVTGLKLSQDLDDLAILYLATVQAIALGTRFIIEAMEAAGHSISTLFLCGGLSKNPLFVQMHADITGMPVVLSQEVESVLVGAAVLGACASGDFASVQEAMAKMSKVGKVVFPRLQDKKYYDKKYQVFLKLVEHQKEYLAIMNDD

SEQ ID NO: 9410 - protein, 487 aa, Homo sapiens
MSGGEQKPERYYVGVDVGTGSVRAALVDQSGVLLAFADQPIKNWEPQFNHHEQSSEDIWAACCVVTKNLREICWDKAGHFFDLPDFLSWKATGVTARSLCSLVCKWTYSAEKGWDDSFWKMIGLEDFVADNYSKIGNQVLPPGASLGNGLTPEAARDLGLLPGIAVAASLIDAHAGGLGVIGADVRGHGLICEGQPVTSRLAVICGTSSCHMGISKDPIFVPGVWGPYFSAMVPGFWLNEGGQSVTGKLIDHMVQGHAAFPELQVKATARCQSIYAYLNSHLDLIKKAQPVGFLTVDLHVWPDFHGNRSPLADLTLKGMRTTGYLYIPALAALHSPSSLLSPQVTGLKLSQDLDDLAILYLATVQAIALGTRFIIEAMEAAGHSISTLFLCGGLSKNPLFVQMHADITGMPVVLSQEVESVLVGAAVLGACASGDFASVQEAMAKMSKVGKVVFPRLQDKKYYDKKYQVFLKLVEHQKEYLAIMNDD

SEQ ID NO: 9411 - protein, 439 aa, Homo sapiens; identical to SEQ ID NO: 9408

SEQ ID NO: 9412 - protein, 458 aa, Homo sapiens
MATESPATRRVQVAEHPRLLKLKEMFNSKFGSIPKFYVRAPGRVNIIGEHIDYCGYSVLPMAVEQDVLIAVEPVKTYALQLANTNPLYPDFSTSANNIQIDKTKPLWHNYFLCGLKGIQEHFGLSNLTGMNCLVDGNIPPSSGLSSSSALVCCAGLVTLTVLGRNLSKVELAEICAKSERYIGTEGGGMDQSISFLAEEGTAKLIEFSPLRATDVKLPSGAVFVIANSCVEMNKAATSHFNIRVMECRLAAKLLAKYKSLQWDKVLRLEEVQAKLGISLEEMLLVTEDALHPEPYNPEEICRCLGISLEELRTQILSPNTQDVLIFKLYQRAKHVYSEAARVLQFKKICEEAPENMVQLLGELMNQSHMSCRDMYECSCPELDQLVDICRKFGAQGSRLTGAGWGGCTVSMVPADKLPSFLANVHKAYYQRSDGSLAPEKQSLFATKPGGGALVLLEA

SEQ ID NO: 9413 - protein, 458 aa, Homo sapiens; identical to SEQ ID NO: 9412

SEQ ID NO: 9414 - protein, 549 aa, Homo sapiens
MASASSGPSSSVGFSSFDPAVPSCTLSSASGIKRPMASEVPYASGMPIKKIGHRSVDSSGETTYKKTTSSALKGAIQLGITHTVGSLSTKPERDVLMQDFYVVESIFFPSEGSNLTPAHHYNDFRFKTYAPVAFRYFRELFGIRPDDYLYSLCSEPLIELCSSGASGSLFYVSSDDEFIIKTVQHKEAEFLQKLLPGYYMNLNQNPRTLLPKFYGLYCVQAGGKNIRIVVMNNLLPRSVKMHIKYDLKGSTYKRRASQKEREKPLPTFKDLDFLQDIPDGLFLDADMYNALCKTLQRDCLVLQSFKIMDYSLLMSIHNIDHAQREPLSSETQYSVDTRRPAPQKALYSTAMESIQGEARRGGTMETDDHMGGIPARNSKGERLLLYIGIIDILQSYRFVKKLEHSWKALVHDGDTVSVHRPGFYAERFQRFMCNTVFKKIPLKPSPSKKFRSGSSFSRRAGSSGNSCITYQPSVSGEHKAQVTTKAEVEPGVHLGRPDVLPQTPPLEEISEGSPIPDPSFSPLVGETLQMLTTSTTLEKLEVAESEFTH

SEQ ID NO: 9415 - protein, 500 aa, Homo sapiens
MASASSGPSSSVGFSSFDPAVPSCTLSSASGIKRPMASEVPYASGMPIKKIGHRSVDSSGETTYKKTTSSALKGAIQLGITHTVGSLSTKPERDVLMQDFYVVESIFFPSEGSNLTPAHHYNDFRFKTYAPVAFRYFRELFGIRPDDYLYSLCSEPLIELCSSGASGSLFYVSSDDEFIIKTVQHKEAEFLQKLLPGYYMNLNQNPRTLLPKFYGLYCVQAGGKNIRIVVMNNLLPRSVKMHIKYDLKGSTYKRRASQKEREKPLPTFKDLDFLQDIPDGLFLDADMYNALCKTLQRDCLVLQSFKIMDYSLLMSIHNIDHAQREPLSSETQYSVDTRRPAPQKALYSTAMESIQGEARRGGTMETDDHMGGIPARNSKGERLLLYIGIIDILQSYRFVKKLEHSWKALVHDGDTVSVHRPGFYAERFQRFMCNTVFKKIPCVHLGRPDVLPQTPPLEEISEGSPIPDPSFSPLVGETLQMLTTSTTLEKLEVAESEFTH

SEQ ID NO: 9416 - protein, 562 aa, Homo sapiens
MASASSGPSSSVGFSSFDPAVPSCTLSSAASGIKRPMASEVLEARQDSYISLVPYASGMPIKKIGHRSVDSSGETTYKKTTSSALKGAIQLGITHTVGSLSTKPERDVLMQDFYVVESIFFPSEGSNLTPAHHYNDFRFKTYAPVAFRYFRELFGIRPDDYLYSLCSEPLIELCSSGASGSLFYVSSDDEFIIKTVQHKEAEFLQKLLPGYYMNLNQNPRTLLPKFYGLYCVQAGGKNIRIVVMNNLLPRSVKMHIKYDLKGSTYKRRASQKEREKPLPTFKDLDFLQDIPDGLFLDADMYNALCKTLQRDCLVLQSFKIMDYSLLMSIHNIDHAQREPLSSETQYSVDTRRPAPQKALYSTAMESIQGEARRGGTMETDDHMGGIPARNSKGERLLLYIGIIDILQSYRFVKKLEHSWKALVHDGDTVSVHRPGFYAERFQRFMCNTVFKKIPLKPSPSKKFRSGSSFSRRAGSSGNSCITYQPSVSGEHKAQVTTKAEVEPGVHLGRPDVLPQTPPLEEISEGSPIPDPSFSPLVGETLQMLTTSTTLEKLEVAESEFTH

SEQ ID NO: 9417 - protein, 261 aa, Homo sapiens
MVVLSVPAEVTVILLDIEGTTTPIAFVKDILFPYIEENVKEYLQTHWEEEECQQDVSLLRKQAEEDAHLDGAVPIPAASGNGVDDLQQMIQAVVDNVCWQMSLDRKTTALKQLQGHMWRAAFTAGRMKAEFFADVVPAVRKWREAGMKVYIYSSGSVEAQKLLFGHSTEGDILELVDGHFDTKIGHKVESESYRKIADSIGCSTNNILFLTDVTREASAAEEADVHVAVVVRPGNAGLTDDEKTYYSLITSFSELYLPSST

SEQ ID NO: 9418 - protein, 48 aa, Homo sapiens [sequence omitted]

SEQ ID NO: 9419 - protein, 316 aa, Homo sapiens
MLVTLGLLTSFFSFLYMVAPSIRKFFAGGVCRTNVQLPGKVVVITGANTGIGKETARELASRGARVYIACRDVLKGESAASEIRVDTKNSQVLVRKLDLSDTKSIRAFAEGFLAEEKQLHILINNAGVMMCPYSKTADGFETHLGVNHLGHFLLTYLLLERLKVSAPARVVNVSSVAHHIGKIPFHDLQSEKRYSRGFAYCHSKLANVLFTRELAKRLQGTGVTTYAVHPGVVRSELVRHSSLLCLLWRLFSPFVKTAREGAQTSLHCALAEGLEPLSGKYFSDCKRTWVSPRARNNKTAERLWNVSCELLGIRWE

SEQ ID NO: 9420 - protein, 252 aa, Homo sapiens
MYNPIKTLKTNTIGTLNMLGLAKRVGARLLLASTSEVYGDPEVHPQSEDYWGHVNPIGPRACYDEGKRVAETMCYAYMKQEGVEVRVARIFNTFGPRMHMNDGRVVSNFILQALQGEPLTVYGSGSQTRAFQYVSDLVNGLVALMNSNVSSPVNLGNPEEHTILEFAQLIKNLVGSGSEIQFLSEAQDDPQKRKPDIKKAKLMLGWEPVVPLEEGLNKAIHYFRKELEYQANNQYIPKPKPARIKKGRTRHS

SEQ ID NO: 9421 - protein, 420 aa, Homo sapiens
MVSKALLRLVSAVNRRRMKLLLGIALLAYVASVWGNFVNMRSIQENGELKIESKIEEMVEPLREKIRDLEKSFTQKYPPVKFLSEKDRKRILITGGAGFVGSHLTDKLMMDGHEVTVVDNFFTGRKRNVEHWIGHENFELINHDVVEPLYIEVDQIYHLASPASPPNYMYNPIKTLKTNTIGTLNMLGLAKRVGARLLLASTSEVYGDPEVHPQSEDYWGHVNPIGPRACYDEGKRVAETMCYAYMKQEGVEVRVARIFNTFGPRMHMNDGRVVSNFILQALQGEPLTVYGSGSQTRAFQYVSDLVNGLVALMNSNVSSPVNLGNPEEHTILEFAQLIKNLVGSGSEIQFLSEAQDDPQKRKPDIKKAKLMLGWEPVVPLEEGLNKAIHYFRKELEYQANNQYIPKPKPARIKKGRTRHS

SEQ ID NO: 9422 - protein, 228 aa, Homo sapiens [sequence omitted]

SEQ ID NO: 9423 - protein, 1444 aa, Homo sapiens
MYLPISLLSTGGCSFDEHYSNCGYSVALGTNGFTWEQINTWEKPMLDQAVPTGSFMMVNSSGRASGQKAHLLLPTLKENDTHCIDFHYYFSSRDRSSPGALNVYVKVNGGPQGNPVWNVSGVVTEGWVKAELAISTFWPHFYQVIFESVSLKGHPGYIAVDEVRVLAHPCRKAPHFLRLQNVEVNVGQNATFQCIAGGKWSQHDKLWLQQWNGRDTALMVTRVVNHRRFSATVSVADTAQRSVSKYRCVIRSDGGSGVSNYAELIVKEPPTPIAPPELLAVGATYLWIKPNANSIIGDGPIILKEVEYRTTTGTWAETHIVDSPNYKLWHLDPDVEYEIRVLLTRPGEGGTGPPGPPLTTRTKCADPVHGPQNVEIVDIRARQLTLQWEPFGYAVTRCHSYNLTVQYQYVFNQQQYEAEEVIQTSSHYTLRGLRPFMTIRLRLLLSNPEGRMESEELVVQTEEDVPGAVPLESIQGGPFEEKIYIQWKPPNETNGVITLYEINYKAVGSLDPSADLSSQRGKVFKLRNETHHLFVGLYPGTTYSFTIKASTAKGFGPPVTTRIATKISAPSMPEYDTDTPLNETDTTITVMLKPAQSRGAPVSVYQLVVKEERLQKSRRAADIIECFSVPVSYRNASSLDSLHYFAAELKPANLPVTQPFTVGDNKTYNGYWNPPLSPLKSYSIYFQALSKANGETKINCVRLATKAPMGSAQVTPGTPLCLLTTGASTQNSNTVEPEKQVDNTVKMAGVIAGLLMFIIILLGVMLTIKRRRNAYSYSYYLSQRKLAKKQKETQSGAQREMGPVASADKPTTKLSASRNDEGFSSSSQDVNGFTDGSRGELSQPTLTIQTHPYRTCDPVEMSYPRDQFQPAIRVADLLQHITQMKRGQGYGFKEEYEALPEGQTASWDTAKEDENRNKNRYGNIISYDHSRVRLLVLDGDPHSDYINANYIDGYHRPRHYIATQGPMQETVKDFWRMIWQENSASIVMVTNLVEVGRVKCVRYWPDDTEVYGDIKVTLIETEPLAEYVIRTFTVQKKGYHEIRELRLFHFTSWPDHGVPCYATGLLGFVRQVKFLNPPEAGPIVVHCSAGAGRTGCFIAIDTMLDMAENEGVVDIFNCVRELRAQRVNLVQTEEQYVFVHDAILEACLCGNTAIPVCEFRSLYYNISRLDPQTNSSQIKDEFQTLNIVTPRVRPEDCSIGLLPRNHDKNRSMDVLPLDRCLPFLISVDGESSNYINAALMDSHKQPAAFVVTQHPLPNTVADFWRLVFDYNCSSVVMLNEMDTAQFCMQYWPEKTSGCYGPIQVEFVSADIDEDIIHRIFRICNMARPQDGYRIVQHLQYIGWPAYRDTPPSKRSLLKVVRRLEKWQEQYDGREGRTVVHCLNGGGRSGTFCAICSVCEMIQQQNIIDVFHIVKTLRNNKSNMVETLEQYKFVYEVALEYLSSF

SEQ ID NO: 9424 - protein, 574 aa, Homo sapiens
MAHNKIPPRWLNCPRRGQPVAGRFLPLKTMLGPRYDSQVAEENRFHPSMLSNYLKSLKVKMGLLVDLTNTSRFYDRNDIEKEGIKYIKLQCKGHGECPTTENTETFIRLCERFNERNPPELIGVHCTHGFNRTGFLICAFLVEKMDWSIEAAVATFAQARPPGIYKGDYLKELFRRYGDIEEAPPPPLLPDWCFEDDEDEDEDEDGKKESEPGSSASFGKRRKERLKLGAIFLEGVTVKGVTQVTTQPKLGEVQQKCHQFCGWEGSGFPGAQPVSMDKQNIKLLDLKPYKVSWKADGTRYMMLIDGTNEVFMIDRDNSVFHVSNLEFPFRKDLRMHLSNTLLDGEMIIDRVNGQAVPRYLIYDIIKFNSQPVGDCDFNVRLQCIEREIISPRHEKMKTGLIDKTQEPFSVRNKPFFDICTSRKKYKPGRCDDILKWKPPSLNSVDFRLKITRMGGEGLLPQNVGLLYVGGYERPFAQIKVTKELKQYDNKIIECKFENNSWVFMRQRTDKSFPNAYNTAMAVCNSISNPVTKEMLFEFIDRCTAASQGQKRKHHLDPDTELMPPPPPKRPRPLT

SEQ ID NO: 9425 - protein, 541 aa, Homo sapiens
MAHNKIPPRWLNCPRRGQPVAGRFLPLKTMLGPRYDSQVAEENRFHPSMLSNYLKSLKVKMGLLVDLTNTSRFYDRNDIEKEGIKYIKLQCKGHGECPTTENTETFIRLCERFNERNPPELIGVHCTHGFNRTGFLICAFLVEKMDWSIEAAVATFAQARPPGIYKGDYLKELFRRYGDIEEAPPPPLLPDWCFEDDEDEDEDEDGKKESEPGSSASFGKRRKERLKLGAIFLEGVTVKGVTQVTTQPKLGEVQQKCHQFCGWEGSGFPGAQPVSMDKQNIKLLDLKPYKVSWKADGTRYMMLIDGTNEVFMIDRDNSVFHVSNLEFPFRKDLRMHLSNTLLDGEMIIDRVNGQAVPRYLIYDIIKFNSQPVGDCDFNVRLQCIEREIISPRHEKMKTGLIDKTQEPFSVRNKPFFDICTSRKLLEGNFAKEVSHEMDGLIFQPTGKYKPGRCDDILKWKPPSLNSVDFRLKITRMGGEGLLPQNVGLLYVGGYERPFAQIKVCLFIFSVLFLDVLLSGIHQNLANNNQHIKISCSSTLGG

SEQ ID NO: 9426 - protein, 574 aa, Homo sapiens; identical to SEQ ID NO: 9424

SEQ ID NO: 9427 - protein, 597 aa, Homo sapiens
MAHNKIPPRWLNCPRRGQPVAGRFLPLKTMLGPRYDSQVAEENRFHPSMLSNYLKSLKVKMGLLVDLTNTSRFYDRNDIEKEGIKYIKLQCKGHGECPTTENTETFIRLCERFNERNPPELIGVHCTHGFNRTGFLICAFLVEKMDWSIEAAVATFAQARPPGIYKGDYLKELFRRYGDIEEAPPPPLLPDWCFEDDEDEDEDEDGKKESEPGSSASFGKRRKERLKLGAIFLEGVTVKGVTQVTTQPKLGEVQQKCHQFCGWEGSGFPGAQPVSMDKQNIKLLDLKPYKVSWKADGTRYMMLIDGTNEVFMIDRDNSVFHVSNLEFPFRKDLRMHLSNTLLDGEMIIDRVNGQAVPRYLIYDIIKFNSQPVGDCDFNVRLQCIEREIISPRHEKMKTGLIDKTQEPFSVRNKPFFDICTSRKLLEGNFAKEVSHEMDGLIFQPTGKYKPGRCDDILKWKPPSLNSVDFRLKITRMGGEGLLPQNVGLLYVGGYERPFAQIKVTKELKQYDNKIIECKFENNSWVFMRQRTDKSFPNAYNTAMAVCNSISNPVTKEMLFEFIDRCTAASQGQKRKHHLDPDTELMPPPPPKRPRPLT

SEQ ID NO: 9428 - protein, 597 aa, Homo sapiens; identical to SEQ ID NO: 9427

SEQ ID NO: 9429 - protein, 147 aa, Homo sapiens
MDFCPIPYIKINFRCIRNQNRENKTLKHLEKFLKDLELEIPFDPAIPLLGIYPKDYKSCCYKDTCTRMFIVALLTIAKTWNQPKCPTMIDWIKTMWHIYTMEYYAAIKNDEFMSFVGTWMKLETIILSKLSQGQKTKHHMFSLTGGN

SEQ ID NO: 9430 - protein, 2610 aa, Homo sapiens
MADVDPDTLLEWLQMGQGDERDMQLIALEQLCMLLLMSDNVDRCFETCPPRTFLPALCKIFLDESAPDNVLEVTARAITYYLDVSAECTRRIVGVDGAIKALCNRLVVVELNNRTSRDLAEQCVKVLELICTRESGAVFEAGGLNCVLTFIRDSGHLVHKDTLHSAMAVVSRLCGKMEPQDSSLEICVESLSSLLKHEDHQVSDGALRCFASLADRFTRRGVDPAPLAKHGLTEELLSRMAAAGGTVSGPSSACKPGRSTTGAPSTTADSKLSNQVSTIVSLLSTLCRGSPVVTHDLLRSELPDSIESALQGDERCVLDTMRLVDLLLVLLFEGRKALPKSSAGSTGRIPGLRRLDSSGERSHRQLIDCIRSKDTDALIDAIDTGAFEVNFMDDVGQTLLNWASAFGTQEMVEFLCERGADVNRGQRSSSLHYAACFGRPQVAKTLLRHGANPDLRDEDGKTPLDKARERGHSEVVAILQSPGDWMCPVNKGDDKKKKDTNKDEEECNEPKGDPEMAPIYLKRLLPVFAQTFQQTMLPSIRKASLALIRKMIHFCSEALLKEVCDSDVGHNLPTILVEITATVLDQEDDDDGHLLALQIIRDLVDKGGDIFLDQLARLGVISKVSTLAGPSSDDENEEESKPEKEDEPQEDAKELQQGKPYHWRDWSIIRGRDCLYIWSDAAALELSNGSNGWFRFILDGKLATMYSSGSPEGGSDSSESRSEFLEKLQRARGQVKPSTSSQPILSAPGPTKLTVGNWSLTCLKEGEIAIHNSDGQQATILKEDLPGFVFESNRGTKHSFTAETSLGSEFVTGWTGKRGRKLKSKLEKTKQKVRTMARDLYDDHFKAVESMPRGVVVTLRNIATQLESSWELHTNRQCIESENTWRDLMKTALENLIVLLKDENTISPYEMCSSGLVQALLTVLNNSMDLDMKQDCSQLVERINVFKTAFSENEDDESRPAVALIRKLIAVLESIERLPLHLYDTPGSTYNLQILTRRLRFRLERAPGETALIDRTGRMLKMEPLATVESLEQYLLKMVAKQWYDFDRSSFVFVRKLREGQNFIFRHQHDFDENGIIYWIGTNAKTAYEWVNPAAYGLVVVTSSEGRNLPYGRLEDILSRDNSALNCHSNDDKNAWFAIDLGLWVIPSAYTLRHARGYGRSALRNWVFQVSKDGQNWTSLYTHVDDCSLNEPGSTATWPLDPPKDEKQGWRHVRIKQMGKNASGQTHYLSLSGFELYGTVNGVCEDQLGKAAKEAEANLRRQRRLVRSQVLKYMVPGARVIRGLDWKWRDQDGSPQGEGTVTGELHNGWIDVTWDAGGSNSYRMGAEGKFDLKLAPGYDPDTVASPKPVSSTVSGTTQSWSSLVKNNCPDKTSAAAGSSSRKGSSSSVCSVASSSDISLGSTKTERRSEIVMEHSIVSGADVHEPIVVLSSAENVPQTEVGSSSSASTSTLTAETGSENAERKLGPDSSVRTPGESSAISMGIVSVSSPDVSSVSELTNKEAASQRPLSSSASNRLSVSSLLAAGAPMSSSASVPNLSSRETSSLESFVRRVANIARTNATNNMNLSRSSSDNNTNTLGRNVMSTATSPLMGAQSFPNLTTPGTTSTVTMSTSSVTSSSNVATATTVLSVGQSLSNTLTTSLTSTSSESDTGQEAEYSLYDFLDSCRASTLLAELDDDEDLPEPDEEDDENEDDNQEDQEYEEVMILRRPSLQRRAGSRSDVTHHAVTSQLPQVPAGAGSRPIGEQEEEEYETKGGRRRTWDDDYVLKRQFSALVPAFDPRPGRTNVQQTTDLEIPPPGTPHSELLEEVECTPSPRLALTLKVTGLGTTREVELPLTNFRSTIFYYVQKLLQLSCNGNVKSDKLRRIWEPTYTIMYREMKDSDKEKENGKMGCWSIEHVEQYLGTDELPKNDLITYLQKNADAAFLRHWKLTGTNKSIRKNRNCSQLIAAYKDFCEHGTKSGLNQGAISTLQSSDILNLTKEQPQAKAGNGQNSCGVEDVLQLLRILYIVASDPYSRISQEDGDEQPQFTFPPDEFTSKKITTKILQQIEEPLALASGALPDWCEQLTSKCPFLIPFETRQLYFTCTAFGASRAIVWLQNRREATVERTRTTSSVRRDDPGEFRVGRLKHERVKVPRGESLMEWAENVMQIHADRKSVLEVEFLGEEGTGLGPTLEFYALVAAEFQRTDLGAWLCDDNFPDDESRHVDLGGGLKPPGYYVQRSCGLFTAPFPQDSDELERITKLFHFLGIFLAKCIQDNRLVDLPISKPFFKLMCMGDIKSNMSKLIYESRGDRDLHCTESQSEASTEEGHDSLSVGSFEEDSKSEFILDPPKPKPPAWFNGILTWEDFELVNPHRARFLKEIKDLAIKRRQILSNKGLSEDEKNTKLQELVLKNPSGSGPPLSIEDLGLNFQFCPSSRIYGFTAVDLKPSGEDEMITMDNAEEYVDLMFDFCMHTGIQKQMEAFRDGFNKVFPMEKLSSFSHEEVQMILCGNQSPSWAAEDIINYTEPKLGYTRDSPGFLRFVRVLCGMSSDERKAFLQFTTGCSTLPPGGLANLHPRLTVVRKVDATDASYPSVNTCVHYLKLPEYSSEEIMRERLLAATMEKGFHLN

SEQ ID NO: 9431 - protein, 391 aa, Homo sapiens
MADVDPDTLLEWLQMGQGDERDMQLIALEQLCMLLLMSDNVDRCFETCPPRTFLPALCKIFLDESAPDNVLEVTARAITYYLDVSAECTRRIVGVDGAIKALCNRLVVVELNNRTSRDLAEQCVKVLELICTRESGAVFEAGGLNCVLTFIRDSGHLVHKDTLHSAMAVVSRLCGKMEPQDSSLEICVESLSSLLKHEDHQVSDGALRCFASLADRFTRRGVDPAPLAKHGLTEELLSRMAAAGGTVSGPSSACKPGRSTTGAPSTTADSKLSNQVSTIVSLLSTLCRGSPVVTHDLLRSELPDSIESALQGDERCVLDTMRLVDLLLVLLFEGRKALPKSSAGSTGRIPGLRRLDSSGERSHRQLIDCIRSKDTDALIDAIDTGGQKIFF

SEQ ID NO: 9432 - protein, 2610 aa, Homo sapiens; identical to SEQ ID NO: 9430

SEQ ID NO: 9433 - protein, 143 aa, Homo sapiens
MKLEKSKTLFNPFYKESTTLITKPDKVIPIKGNYRPIFHMIVDSKLCHRMWKSVWRFLRDLELEIPFDPAITLLGIYPKDCKSCCYKDTCTHMFIAALFTIAKTWNQPKCPTMIDWIKKMWHIYTMEYYAAIKNDEFMSFVGT

SEQ ID NO: 9434 - protein, 451 aa, Homo sapiens
MVGSALRRGAHAYVYLVSKASHISRGHQHQAWGSRPPAAECATQRAPGSVVELLGKSYPQDDHSNLTRKVLTRVGRNLHNQQHHPLWLIKERVKEHFYKQYVGRFGTPLFSVYDNLSPVVTTWQNFDSLLIPADHPSRKKGDNYYLNRTHMLRAHTSAHQWDLLHAGLDAFLVVGDVYRRDQIDSQHYPIFHQLEAVRLFSKHELFAGIKDGESLQLFEQSSRSAHKQETHTMEAVKLVEFDLKQTLTRLMAHLFGDELEIRWVDCYFPFTHPSFEMEINFHGEWLEVLGCGVMEQQLVNSAGAQDRIGWAFGLGLERLAMILYDIPDIRLFWCEDERFLKQFCVSNINQKVKFQPLSKYPAVINDISFWLPSENYAENDFYDLVRTIGGDLVEKVDLIDKFVHPKTHKTSHCYRITYRHMERTLSQREVRHIHQALQEAAVQLLGVEGRF

SEQ ID NO: 9435 - protein, 451 aa, Homo sapiens; identical to SEQ ID NO: 9434

SEQ ID NO: 9436 - protein, 720 aa, Homo sapiens [sequence omitted]

SEQ ID NO: 9437 - protein, 913 aa, Homo sapiens [sequence omitted]

SEQ ID NO: 9438 - protein, 453 aa, Homo sapiens [sequence omitted]

SEQ ID NO: 9439 - protein, 453 aa, Homo sapiens [sequence omitted]

SEQ ID NO: 9440 - protein, 1724 aa, Homo sapiens [sequence omitted]

SEQ ID NO: 9441 - protein, 623 aa, Homo sapiens [sequence omitted]

SEQ ID NO: 9442 - protein, 623 aa, Homo sapiens [sequence omitted]

SEQ ID NO: 9443 - protein, 726 aa, Homo sapiens
MEDRLHMDNGLVPQKIVSVHLQDSTLKEVKDQVSNKQAQILEPKPEPSLEIKPEQDGMEHVGRDDPKALGEEPKQRRGSASGSEPAGDSDRGGGPVEHYHLHLSSCHECLELENSTIESVKFASAENIPDLPYDYSSSLESVADETSPEREGRRVNLTGKAPNILLYVGSDSQEALGRFHEVRSVLADCVDIDSYILYHLLEDSALRDPWTDNCLLLVIATRESIPEDLYQKFMAYLSQGGKVLGLSSSFTFGGFQVTSKGALHKTVQNLVFSKADQSEVKLSVLSSGCRYQEGPVRLSPGRLQGHLENEDKDRMIVHVPFGTRGGEAVLCQVHLELPPSSNIVQTPEDFNLLKSSNFRRYEVLREILTTLGLSCDMKQVPALTPLYLLSAAEEIRDPLMQWLGKHVDSEGEIKSGQLSLRFVSSYVSEVEITPSCIPVVTNMEAFSSEHFNLEIYRQNLQTKQLGKVILFAEVTPTTMRLLDGLMFQTPQEMGLIVIAARQTEGKGRGGNVWLSPVGCALSTLLISIPLRSQLGQRIPFVQHLMSVAVVEAVRSIPEYQDINLRVKWPNDIYYSDLMKIGGVLVNSTLMGETFYILIGCGFNVTNSNPTICINDLITEYNKQHKAELKPLRADYLIARVVTVLEKLIKEFQDKGPNSVLPLYYRYWVHSGQQVHLGSAEGPKVSIVGLDDSGFLQVHQEGGEVVTVHPDGNSFDMLRNLILPKRR

SEQ ID NO: 9444 - protein, 726 aa, Homo sapiens; identical to SEQ ID NO: 9443

SEQ ID NO: 9445 - protein, 81 aa, Homo sapiens
MMFPLARNALSSLKIQSILQSMARHSHVKHSPDFHDKYGNAVLASGTAFCVATWVFTATQIGIEWNLSPVGRVTPKEWKHQ

SEQ ID NO: 9446 - protein, 477 aa, Homo sapiens
MTSKFLLVSFILAALSLSTTFSLQPDQQKVLLVSFDGFRWDYLYKVPTPHFHYIMKYGVHVKQVTNVFITKTYPNHYTLVTGLFAENHGIVANDMFDPIRNKSFSLDHMNIYDSKFWEEATPIWITNQRAGHTSGAAMWPGTDVKIHKRFPTHYMPYNESVSFEDRVAKIIEWFTSKEPINLGLLYWEDPDDMGHHLGPDSPLMGPVISDIDKKLGYLIQMLKKAKLWNTLNLIITSDHGMTQCSEERLIELDQYLDKDHYTLIDQSPVAAILPKEGKFDEVYEALTHAHPNLTVYKKEDVPERWHYKYNSRIQPIIAVADEGWHILQNKSDDFLLGNHGYDNALADMHPIFLAHGPAFRKNFSKEAMNSTDLYPLLCHLLNITAMPHNGSFWNVQDLLNSAMPRVVPYTQSTILLPGSVKPAEYDQEGSYPYFIGVSLGSIIVIVFFVIFIKHLIHSQIPALQDMHAEIAQPLLQA

SEQ ID NO: 9447 - protein, 477 aa, Homo sapiens; identical to SEQ ID NO: 9446

SEQ ID NO: 9448 - protein, 336 aa, Homo sapiens
MKTLMRHGLAVCLALTTMCTSLLLVYSSLGGQKERPPQQQQQQQQQQQQASATGSSQPAAESSTQQRPGVPAGPRPLDGYLGVADHKPLKMHCRDCALVTSSGHLLHSRQGSQIDQTECVIRMNDAPTRGYGRDVGNRTSLRVIAHSSIQRILRNRHDLLNVSQGTVFIFWGPSSYMRRDGKGQVYNNLHLLSQVLPRLKAFMITRHKMLQFDELFKQETGKDRKISNTWLSTGWFTMTIALELCDRINVYGMVPPDFCRDPNHPSVPYHYYEPFGPDECTMYLSHERGRKGSHHRFITEKRVFKNWARTFNIHFFQPDWKPESLAINHPENKPVF

SEQ ID NO: 9449 - protein, 99 aa, Homo sapiens
MIISKVKINSEKPLALMRPGRIDRIIYVPLPDAATRREIFKLQFHSMPVSNEVDLDELILQTDAYSGAENSVFDLRRGLASCMMIWQFAGNSKRKTKKP

SEQ ID NO: 9450 - protein, 856 aa, Homo sapiens
MSSKKNRKRLNQSAENGSSLPSAASSCAEARAPSAGSDFAATSGTLTVTNLLEKGKEFRVYTAWPMAGFPGGKVGLSEMAQKNVGVRPGDAIQVQPLVGAVLQAEEMDVALSDKDMEINEEELTGCILRKLDGKIVLPGNFLYCTFYGRPYKLQVLRVKGADGMILGGPQSDSDTDAQRMAFEQSSMETSSLELSLQLSQLDLEDTQIPTSRSTPYKPIDDRITNKASDVLLDVTQSPGDGSGLMLEEVTGLKCNFESAREGNEQLTEEERLLKFSIGAKCNTDTFYFISSTTRVNFTEIDKNSKEQDNQFKVTYDMIGGLSSQLKAIREIIELPLKQPELFKSYGIPAPRGVLLYGPPGTGKTMIARAVANEVGAYVSVINGPEIISKFYGETEAKLRQIFAEATLRHPSIIFIDELDALCPKREGAQNEVEKRVVASLLTLMDGIGSEVSEGQVLVLGATNRPHALDAALRRPGRFDKEIEIGVPNAQDRLDILQKLLRRVPHLLTEAELLQLANSAHGYVGADLKVLCNEAGLCALRRILKKQPNLPDVKVAGLVKITLKDFLQAMNDIRPSAMREIAIDVPNVSWSDIGGLESIKLKLEQAVEWPLKHPESFIRMGIQPPKGVLLYGPPGCSKTMIAKALANESGLNFLAIKGPELMNKYVGESERAVRETFRKARAVAPSIIFFDELDALAVERGSSLGAGNVADRVLAQLLTEMDGIEQLKDVTILAATNRPDRIDKALMRPGRIDRIIYVPLPDAATRREIFKLQFHSMPVSNEVDLDELILQTDAYSGAEIVAVCREAALLALEEDIQANLIMKRHFTQALSTVTPRIPESLRRFYEDYQEKSGLHTL

SEQ ID NO: 9451 - protein, 890 aa, Homo sapiens [sequence omitted]

SEQ ID NO: 9452 - protein, 969 aa, Homo sapiens
MGQICQRESATAAEKPKLHLLAESEPPEDHGSPGLRRTDRPHACRPATPTASMIAAQLLAYYFTELKDDQVKKIDKYLYAMRLSDETLIDIMTRFRKEMKNGLSRDFNPTATVKMLPTFVRSIPDGSEKGDFIALDLGGSSFRILRVQVNHEKNQNVHMESEVYDTPENIVHGSGSQLFDHVAECLGDFMEKRKIKDKKLPVGFTFSFPCQQSKIDEAILITWTKRFKASGVEGADVVKLLNKAIKKRGDYDANIVAVVNDTVGTMMTCGYDDQHCEVGLIIGTGTNACYMEELRHIDLVEGDEGRMCINTEWGAFGDDGSLEDIRTEFDREIDRGSLNPGKQLFEKMVSGMYLGELVRLILVKMAKEGLLFEGRITPELLTRGKFNTSDVSAIEKNKEGLHNAKEILTRLGVEPSDDDCVSVQHVCTIVSFRSANLVAATLGAILNRLRDNKGTPRLRTTVGVDGSLYKTHPQYSRRFHKTLRRLVPDSDVRFLLSESGSGKGAAMVTAVAYRLAEQHRQIEETLAHFHLTKDMLLEVKKRMRAEMELGLRKQTHNNAVVKMLPSFVRRTPDGTENGDFLALDLGGTNFRVLLVKIRSGKKRTVEMHNKIYAIPIEIMQGTGEELFDHIVSCISDFLDYMGIKGPRMPLGFTFSFPCQQTSLDAGILITWTKGFKATDCVGHDVVTLLRDAIKRREEFDLDVVAVVNDTVGTMMTCAYEEPTCEVGLIVGTGSNACYMEEMKNVEMVEGDQGQMCINMEWGAFGDNGCLDDIRTHYDRLVDEYSLNAGKQRYEKMISGMYLGEIVRNILIDFTKKGFLFRGQISETLKTRGIFETKFLSQIESDRLALLQVRAILQQLGLNSTCDDSILVKTVCGVVSRRAAQLCGAGMAAVVDKIRENRGLDRLNVTVGVDGTLYKLHPHFSRIMHQTVKELSPKCNVSFLLSEDGSGKGAALITAVGVRLRTEASS

SEQ ID NO: 9453 - protein, 921 aa, Homo sapiens
MGQICQRESATAAEKPKLHLLAESEIDKYLYAMRLSDETLIDIMTRFRKEMKNGLSRDFNPTATVKMLPTFVRSIPDGSEKGDFIALDLGGSSFRILRVQVNHEKNQNVHMESEVYDTPENIVHGSGSQLFDHVAECLGDFMEKRKIKDKKLPVGFTFSFPCQQSKIDEAILITWTKRFKASGVEGADVVKLLNKAIKKRGDYDANIVAVVNDTVGTMMTCGYDDQHCEVGLIIGTGTNACYMEELRHIDLVEGDEGRMCINTEWGAFGDDGSLEDIRTEFDREIDRGSLNPGKQLFEKMVSGMYLGELVRLILVKMAKEGLLFEGRITPELLTRGKFNTSDVSAIEKNKEGLHNAKEILTRLGVEPSDDDCVSVQHVCTIVSFRSANLVAATLGAILNRLRDNKGTPRLRTTVGVDGSLYKTHPQYSRRFHKTLRRLVPDSDVRFLLSESGSGKGAAMVTAVAYRLAEQHRQIEETLAHFHLTKDMLLEVKKRMRAEMELGLRKQTHNNAVVKMLPSFVRRTPDGTENGDFLALDLGGTNFRVLLVKIRSGKKRTVEMHNKIYAIPIEIMQGTGEELFDHIVSCISDFLDYMGIKGPRMPLGFTFSFPCQQTSLDAGILITWTKGFKATDCVGHDVVTLLRDAIKRREEFDLDVVAVVNDTVGTMMTCAYEEPTCEVGLIVGTGSNACYMEEMKNVEMVEGDQGQMCINMEWGAFGDNGCLDDIRTHYDRLVDEYSLNAGKQRYEKMISGMYLGEIVRNILIDFTKKGFLFRGQISETLKTRGIFETKFLSQIESDRLALLQVRAILQQLGLNSTCDDSILVKTVCGVVSRRAAQLCGAGMAAVVDKIRENRGLDRLNVTVGVDGTLYKLHPHFSRIMHQTVKELSPKCNVSFLLSEDGSGKGAALITAVGVRLRTEASS

SEQ ID NO: 9454 - protein, 905 aa, Homo sapiens
MAKRALRDFIDKYLYAMRLSDETLIDIMTRFRKEMKNGLSRDFNPTATVKMLPTFVRSIPDGSEKGDFIALDLGGSSFRILRVQVNHEKNQNVHMESEVYDTPENIVHGSGSQLFDHVAECLGDFMEKRKIKDKKLPVGFTFSFPCQQSKIDEAILITWTKRFKASGVEGADVVKLLNKAIKKRGDYDANIVAVVNDTVGTMMTCGYDDQHCEVGLIIGTGTNACYMEELRHIDLVEGDEGRMCINTEWGAFGDDGSLEDIRTEFDREIDRGSLNPGKQLFEKMVSGMYLGELVRLILVKMAKEGLLFEGRITPELLTRGKFNTSDVSAIEKNKEGLHNAKEILTRLGVEPSDDDCVSVQHVCTIVSFRSANLVAATLGAILNRLRDNKGTPRLRTTVGVDGSLYKTHPQYSRRFHKTLRRLVPDSDVRFLLSESGSGKGAAMVTAVAYRLAEQHRQIEETLAHFHLTKDMLLEVKKRMRAEMELGLRKQTHNNAVVKMLPSFVRRTPDGTENGDFLALDLGGTNFRVLLVKIRSGKKRTVEMHNKIYAIPIEIMQGTGEELFDHIVSCISDFLDYMGIKGPRMPLGFTFSFPCQQTSLDAGILITWTKGFKATDCVGHDVVTLLRDAIKRREEFDLDVVAVVNDTVGTMMTCAYEEPTCEVGLIVGTGSNACYMEEMKNVEMVEGDQGQMCINMEWGAFGDNGCLDDIRTHYDRLVDEYSLNAGKQRYEKMISGMYLGEIVRNILIDFTKKGFLFRGQISETLKTRGIFETKFLSQIESDRLALLQVRAILQQLGLNSTCDDSILVKTVCGVVSRRAAQLCGAGMAAVVDKIRENRGLDRLNVTVGVDGTLYKLHPHFSRIMHQTVKELSPKCNVSFLLSEDGSGKGAALITAVGVRLRTEASS

SEQ ID NO: 9455 - protein, 917 aa, Homo sapiens
MIAAQLLAYYFTELKDDQVKKIDKYLYAMRLSDETLIDIMTRFRKEMKNGLSRDFNPTATVKMLPTFVRSIPDGSEKGDFIALDLGGSSFRILRVQVNHEKNQNVHMESEVYDTPENIVHGSGSQLFDHVAECLGDFMEKRKIKDKKLPVGFTFSFPCQQSKIDEAILITWTKRFKASGVEGADVVKLLNKAIKKRGDYDANIVAVVNDTVGTMMTCGYDDQHCEVGLIIGTGTNACYMEELRHIDLVEGDEGRMCINTEWGAFGDDGSLEDIRTEFDREIDRGSLNPGKQLFEKMVSGMYLGELVRLILVKMAKEGLLFEGRITPELLTRGKFNTSDVSAIEKNKEGLHNAKEILTRLGVEPSDDDCVSVQHVCTIVSFRSANLVAATLGAILNRLRDNKGTPRLRTTVGVDGSLYKTHPQYSRRFHKTLRRLVPDSDVRFLLSESGSGKGAAMVTAVAYRLAEQHRQIEETLAHFHLTKDMLLEVKKRMRAEMELGLRKQTHNNAVVKMLPSFVRRTPDGTENGDFLALDLGGTNFRVLLVKIRSGKKRTVEMHNKIYAIPIEIMQGTGEELFDHIVSCISDFLDYMGIKGPRMPLGFTFSFPCQQTSLDAGILITWTKGFKATDCVGHDVVTLLRDAIKRREEFDLDVVAVVNDTVGTMMTCAYEEPTCEVGLIVGTGSNACYMEEMKNVEMVEGDQGQMCINMEWGAFGDNGCLDDIRTHYDRLVDEYSLNAGKQRYEKMISGMYLGEIVRNILIDFTKKGFLFRGQISETLKTRGIFETKFLSQIESDRLALLQVRAILQQLGLNSTCDDSILVKTVCGVVSRRAAQLCGAGMAAVVDKIRENRGLDRLNVTVGVDGTLYKLHPHFSRIMHQTVKELSPKCNVSFLLSEDGSGKGAALITAVGVRLRTEASS

SEQ ID NO: 9456 - protein, 969 aa, Homo sapiens; identical to SEQ ID NO: 9452

SEQ ID NO: 9457 - protein, 135 aa, Homo sapiens
MESTMDQIGNPSLLSKAAKAMWSGSGPQIPVLISESAFQAFKTQLLRVEKQKKGPEVSKCPPHNGADLPARIEGCVGVHLRGGKTLTKSTAGKRHEARQEPPQTQPLSLGAAGATCVLTKGSPEDRSVSPWLIAF

SEQ ID NO: 9458 - protein, 921 aa, Homo sapiens; identical to SEQ ID NO: 9453

SEQ ID NO: 9459 - protein, 254 aa, Homo sapiens
MGTGHDLWPKSRPEGVRPEGEPPELVTRGRVLWGVALGSAIQICQLEIRRGTPGRGDALPLKTQPPEDHGSPGLRRTDRPHACRPATPTASMIAAQLLAYYFTELKDDQVKKYSYEPKPTFIVVFIAMYCAKGIVSLCLVHPHNALVRDRLPRAGQKLGSRLPPTLLRWGWAAAEAMCSQEEESGAAGRAQTTIDKYLYAMRLSDETLIDIMTRFRKEMKNGLSRDFNPTATVKMLPTFVRSIPDGSGKSVTQR

SEQ ID NO: 9460 - protein, 916 aa, Homo sapiens
MDCEHSLSLPCRGAEAWEIGIDKYLYAMRLSDETLIDIMTRFRKEMKNGLSRDFNPTATVKMLPTFVRSIPDGSEKGDFIALDLGGSSFRILRVQVNHEKNQNVHMESEVYDTPENIVHGSGSQLFDHVAECLGDFMEKRKIKDKKLPVGFTFSFPCQQSKIDEAILITWTKRFKASGVEGADVVKLLNKAIKKRGDYDANIVAVVNDTVGTMMTCGYDDQHCEVGLIIGTGTNACYMEELRHIDLVEGDEGRMCINTEWGAFGDDGSLEDIRTEFDREIDRGSLNPGKQLFEKMVSGMYLGELVRLILVKMAKEGLLFEGRITPELLTRGKFNTSDVSAIEKNKEGLHNAKEILTRLGVEPSDDDCVSVQHVCTIVSFRSANLVAATLGAILNRLRDNKGTPRLRTTVGVDGSLYKTHPQYSRRFHKTLRRLVPDSDVRFLLSESGSGKGAAMVTAVAYRLAEQHRQIEETLAHFHLTKDMLLEVKKRMRAEMELGLRKQTHNNAVVKMLPSFVRRTPDGTENGDFLALDLGGTNFRVLLVKIRSGKKRTVEMHNKIYAIPIEIMQGTGEELFDHIVSCISDFLDYMGIKGPRMPLGFTFSFPCQQTSLDAGILITWTKGFKATDCVGHDVVTLLRDAIKRREEFDLDVVAVVNDTVGTMMTCAYEEPTCEVGLIVGTGSNACYMEEMKNVEMVEGDQGQMCINMEWGAFGDNGCLDDIRTHYDRLVDEYSLNAGKQRYEKMISGMYLGEIVRNILIDFTKKGFLFRGQISETLKTRGIFETKFLSQIESDRLALLQVRAILQQLGLNSTCDDSILVKTVCGVVSRRAAQLCGAGMAAVVDKIRENRGLDRLNVTVGVDGTLYKLHPHFSRIMHQTVKELSPKCNVSFLLSEDGSGKGAALITAVGVRLRTEASS

SEQ ID NO: 9461 - protein, 916 aa, Homo sapiens; identical to SEQ ID NO: 9460

SEQ ID NO: 9462 - protein, 921 aa, Homo sapiens; identical to SEQ ID NO: 9453

SEQ ID NO: 9463 - protein, 425 aa, Homo sapiens
MYLLAYPQKPMVKTKTIELIEFEKLPAGQNATVAVMSYSGYDIEDALVLNKASLDRGFGRCLVYKNAKCTLKRYTNQTFDKVMGPMLDAATRKPIWRHEILDADGICSPGEKVENKQVLVNKSMPTVTQIPLEGSNVPQQPQYKDVPITYKGATDSYIEKVMISSNAEDAFLIKMLLRQTRRPEIGDKFSSRHGQKGVCGLIVPQEDMPFCDSGICPDIIMNPHGFPSRMTVGKLIELLAGKAGVLDGRFHYGTAFGGSKVKDVCEDLVRHGYNYLGKDYVTSGITGEPLEAYIYFGPVYYQKLKHMVLDKMHARARGPRAVLTRQPTEGRSRDGGLRLGEMERDCLIGYGASMLLLERLMISSDAFEVDVCGQCGLLGYSGWCHYCKSSCHVSSLRIPYACKLLFQELQSMNIIPRLKLSKYNE

SEQ ID NO: 9464 - protein, 1177 aa, Homo sapiens [sequence omitted]

SEQ ID NO: 9465 - protein, 1133 aa, Homo sapiens
MDVLAEEFGNLTPEQLAAPIPTVEEKWRLLPAFLKVKGLVKQHIDSFNYFINVEIKKIMKANEKVTSDADPMWYLKYLNIYVGLPDVEESFNVTRPVSPHECRLRDMTYSAPITVDIEYTRGSQRIIRNALPIGRMPIMLRSSNCVLTGKTPAEFAKLNECPLDPGGYFIVKGVEKVILIQEQLSKNRIIVEADRKGAVGASVTSSTHEKKSRTNMAVKQGRFYLRHNTLSEDIPIVIIFKAMGVESDQEIVQMIGTEEHVMAAFGPSLEECQKAQIFTQMQALKYIGNKVRRQRMWGGGPKKTKIEEARELLASTILTHVPVKEFNFRAKCIYTAVMVRRVILAQGDNKVDDRDYYGNKRLELAGQLLSLLFEDLFKKFNSEMKKIADQVIPKQRAAQFDVVKHMRQDQITNGMVNAISTGNWSLKRFKMDRQGVTQVLSRLSYISALGMMTRISSQFEKTRKVSGPRSLQPSQWGMLCPSDTPEGEACGLVKNLALMTHITTDMEDGPIVKLASNLGVEDVNLLCGEELSYPNVFLVFLNGNILGVIRDHKKLVNTFRLMRRAGYINEFVSISTNLTDRCVYISSDGGRLCRPYIIVKKQKPAVTNKHMEELAQGYRNFEDFLHESLVEYLDVNEENDCNIALYEHTINKDTTHLEIEPFTLLGVCAGLIPYPHHNQSPRNTYQCAMGKQAMGTIGYNQRNRIDTLMYLLAYPQKPMVKTKTIELIEFEKLPAGQNATVAVMSYSGYDIEDALVLNKASLDRGFGRCLVYKNAKCTLKRYTNQTFDKVMGPMLDAATRKPIWRHEILDADGICSPGEKVENKQVLVNKSMPTVTQIPLEGSNVPQQPQYKDVPITYKGATDSYIEKVMISSNAEDAFLIKMLLRQTRRPEIGDKFSSRHGQKGVCGLIVPQEDMPFCDSGICPDIIMNPHGFPSRMTVGKLIELLAGKAGVLDGRFHYGTAFGGSKVKDVCEDLVRHGYNYLGKDYVTSGITGEPLEAYIYFGPVYYQKLKHMVLDKMHARARGPRAVLTRQPTEGRSRDGGLRLGEMERDCLIGYGASMLLLERLMISSDAFEVDVCGQCGLLGYSGWCHYCKSSCHVSSLRIPYACKLLFQELQSMNIIPRLKLSKYNE

SEQ ID NO: 9466 - protein, 838 aa, Homo sapiens
  VARIANT (1)...(838): Xaa = Any Amino Acid
MENAEINNIIKIVGLQYKKNYEDEDSLKTLRYGKIMIMTDQDQDGSHIKGLLINFIHHNWPSLLRHRFLEEFITPIVKVSKNKQEMAFYSLPEFEEWKSSTPNHKKWKVKYYKGLGTSTSKEAKEYFADMKRHRIQFKYSGPEDDAAISLAFSKKQIDDRKEWLTNFMEDRRQRKLLGLPEDYLYGQTTTYLTYNDFINKELILFSNSDNERSIPSMVDGLKPGQRKVLFTCFKRNDKREVKVAQLAGSVAEMSSYHHGEMSLMMTIINLAQNFVGSNNLNLLQPIGQFGTRLHGGKDSASPRYIFTMLSSLARLLFPPKDDHTLKFLYDDNQRVEPEWYIPIIPMVLINGAEGIGTGWSCKIPNFDVREIVNNIRRLMDGEEPLPMLPSYKNFKGTIEELAPNQYVISGEVAILNSTTIEISELPVRTWTQTYKEQVLEPMLNGTEKTPPLITDYREYHTDTTVKFVVKMTEEKLAEAERVGLHKVFKLQTSLTCNSMVLFDHVGCLKKYDTVLDILRDFFELRLKYYGLRKEWLLGMLGAESAKLNNQARFILEKIDGKIIIENKPKKELIKVLIQRGYDSDPVKAWKEAQQKVPDEEENEESDNEKETEKSDSVTDSGPTFNYLLDMPLWYLTKEKKDELCRLRNEKEQELDTLKRKSPSDLWKEDLATFIEELEAVEAKEKQDEQVGLPGKGGKAKGKKTQMAEVLPSPRGQRVIPRITIEMKAEAEKKNKKKIKNENTEGSPQEDGVELEGLKQRLEKKQKREPGTKTKKQTTLAFKPIKKGKKRNPWSDSESDRSSDESNFDVPPRETEPRRAATKFTMDLDSDEDFSDFDX

SEQ ID NO: 9467 - protein, 1531 aa, Homo sapiens
MEVSPLQPVNENMQVNKIKKNEDAKKRLSVERIYQKKTQLEHILLRPDTYIGSVELVTQQMWVYDEDVGINYREVTFVPGLYKIFDEILVNAADNKQRDPKMSCIRVTIDPENNLISIWNNGKGIPVVEHKVEKMYVPALIFGQLLTSSNYDDDEKKVTGGRNGYGAKLCNIFSTKFTVETASREYKKMFKQTWMDNMGRAGEMELKPFNGEDYTCITFQPDLSKFKMQSLDKDIVALMVRRAYDIAGSTKDVKVFLNGNKLPVKGFRSYVDMYLKDKLDETGNSLKVIHEQVNHRWEVCLTMSEKGFQQISFVNSIATSKGGRHVDYVADQIVTKLVDVVKKKNKGGVAVKAHQVKNHMWIFVNALIENPTFDSQTKENMTLQPKSFGSTCQLSEKFIKAAIGCGIVESILNWVKFKAQVQLNKKCSAVKHNRIKGIPKLDDANDAGGRNSTECTLILTEGDSAKTLAVSGLGVVGRDKYGVFPLRGKILNVREASHKQIMENAEINNIIKIVGLQYKKNYEDEDSLKTLRYGKIMIMTDQDQDGSHIKGLLINFIHHNWPSLLRHRFLEEFITPIVKVSKNKQEMAFYSLPEFEEWKSSTPNHKKWKVKYYKGLGTSTSKEAKEYFADMKRHRIQFKYSGPEDDAAISLAFSKKQIDDRKEWLTNFMEDRRQRKLLGLPEDYLYGQTTTYLTYNDFINKELILFSNSDNERSIPSMVDGLKPGQRKVLFTCFKRNDKREVKVAQLAGSVAEMSSYHHGEMSLMMTIINLAQNFVGSNNLNLLQPIGQFGTRLHGGKDSASPRYIFTMLSSLARLLFPPKDDHTLKFLYDDNQRVEPEWYIPIIPMVLINGAEGIGTGWSCKIPNFDVREIVNNIRRLMDGEEPLPMLPSYKNFKGTIEELAPNQYVISGEVAILNSTTIEISELPVRTWTQTYKEQVLEPMLNGTEKTPPLITDYREYHTDTTVKFVVKMTEEKLAEAERVGLHKVFKLQTSLTCNSMVLFDHVGCLKKYDTVLDILRDFFELRLKYYGLRKEWLLGMLGAESAKLNNQARFILEKIDGKIIIENKPKKELIKVLIQRGYDSDPVKAWKEAQQKVPDEEENEESDNEKETEKSDSVTDSGPTFNYLLDMPLWYLTKEKKDELCRLRNEKEQELDTLKRKSPSDLWKEDLATFIEELEAVEAKEKQDEQVGLPGKGGKAKGKKTQMAEVLPSPRGQRVIPRITIEMKAEAEKKNKKKIKNENTEGSPQEDGVELEGLKQRLEKKQKREPGTKTKKQTTLAFKPIKKGKKRNPWSDSESDRSSDESNFDVPPRETEPRRAATKTKFTMDLDSDEDFSDFDEKTDDEDFVPSDASPPKTKTSPKLSNKELKPQKSVVSDLEADDVKGSVPLSSSPPATHFPDETEITNPVPKKNVTVKKTAAKSQSSTSTTGAKKRAAPKGTKRDPALNSGVSQKPDPAKTKNRRKRKPSTSDDSDSNFEKIVSKAVTSKKSKGESDDFHMDFDSAVAPRAKSVRAKKPIKYLEESDEDDLF

SEQ ID NO: 9468 - protein, 2302 aa, Homo sapiens
MTSEEMTASVLIPVTQRKVVSAQSAADESSEKVSDINISKAHTVRRSGETSHTISQLNKLKEEPSGSNLPKILSIAREKIVSDENSNEKCWEKIMPDSAKNLNINCNNILRNHQHGLPQRQFYEMYNSVAEEDLCLETGIPSPLERKVFPGIQLELDRPSMGISPLGNQSVIIETGRAHPDSRRAVFHFHYEVDRRMSDTFCTLSENLILDDCGNCVPLPGGEEKQKKNYVAYTCKLMELAKNCDNKNEQLQCDHCDTLNDKYFCFEGSCEKVDMVYSGDSFCRKDFTDSQAAKTFLSHFEDFPDNCDDVEEDAFKSKKERSTLLVRRFCKNDREVKKSVYTGTRAIVRTLPSGHIGLTAWSYIDQKRNGPLLPCGRVMEPPSTVEIRQDGSQRLSEAQWYPIYNAVRREETENTVGSLLHFLTKLPASETAHGRISVGPCLKQCVRDTVCEYRATLQRTSISQYITGSLLEATTSLGARSGLLSTFGGSTGRMMLKERQPGPSVANSNALPSSSAGISKELIDLQPLIQFPEEVASILMEQEQTIYRRVLPVDYLCFLTRDLGTPECQSSLPCLKASISASILTTQNGEHNALEDLVMRFNEVSSWVTWLILTAGSMEEKREVFSYLVHVAKCCWNMGNYNAVMEFLAGLRSRKVLKMWQFMDQSDIETMRSLKDAMAQHESSCEYRKVVTRALHIPGCKVVPFCGVFLKELCEVLDGASGLMKLCPRYNSQEETLEFVADYSGQDNFLQRVGQNGLKNSEKESTVNSIFQVIRSCNRSLETDEEDSPSEGNSSRKSSLKDKSRWQFIIGDLLDSDNDIFEQSKEYDSHGSEDSQKAFDHGTELIPWYVLSIQADVHQFLLQGATVIHYDQDTHLSARCFLQLQPDNSTLTWVKPTTASPASSKAKLGVLNNTAEPGKFPLLGNAGLSSLTEGVLDLFAVKAVYMGHPGIDIHTVCVQNKLGSMFLSETGVTLLYGLQTTDNRLLHFVAPKHTAKMLFSGLLELTRAVRKMRKFPDQRQQWLRKQYVSLYQEDGRYEGPTLAHAVELFGGRRWSARNPSPGTSAKNAEKPNMQRNNTLGISTTKKKKKILMRGESGEVTDDEMATRKAKMHKECRSRSGSDPQDINEQEESEVNAIANPPNPLPSRRAHSLTTAGSPNLAAGTSSPIRPVSSPVLSSSNKSPSSAWSSSSWHGRIKGGMKGFQSFMVSDSNMSFVEFVELFKSFSVRSRKDLKDLFDVYAVPCNRSGSESAPLYTNLTIDENTSDLQPDLDLLTRNVSDLGLFIKSKQQLSDNQRQISDAIAAASIVTNGTGIESTSLGIFGVGILQLNDFLVNCQGEHCTYDEILSIIQKFEPSISMCHQGLMSFEGFARFLMDKENFASKNDESQENIKELQLPLSYYYIESSHNTYLTGHQLKGESSVELYSQVLLQGCRSVELDCWDGDDGMPIIYHGHTLTTKIPFKEVVEAIDRSAFINSDLPIIISIENHCSLPQQRKMAEIFKTVFGEKLVTKFLFETDFSDDPMLPSPDQLRKKVLLKNKKLKAHQTPVDILKQKAHQLASMQVQAYNGGNANPRPANNEEEEDEEDEYDYDYESLSDDNILEDRPENKSCNDKLQFEYNEEIPKRIKKADNSACNKGKVYDMELGEEFYLDQNKKESRQIAPELSDLVIYCQAVKFPGLSTLNASGSSRGKERKSRKSIFGNNPGRMSPGETASFNKTSGKSSCEGIRQTWEESSSPLNPTTSLSAIIRTPKCYHISSLNENAAKRLCRRYSQKLTQHTACQLLRTYPAATRIDSSNPNPLMFWLHGIQLVALNYQTDDLPLHLNAAMFEANGGCGYVLKPPVLWDKNCPMYQKFSPLERDLDSMDPAVYSLTIVSGQNVCPSNSMGSPCIEVDVLGMPLDSCHFRTKPIHRNTLNPMWNEQFLFHVHFEDLVFLRFAVVENNSSAVTAQRIIPLKALKRGYRHLQLRNLHNEVLEISSLFINSRRMEENSSGNTMSASSMFNTEERKCLQTHRVTVHGVPGPEPFTVFTINGGTKAKQLLQQILTNEQDIKPVTTDYFLMEEKYFISKEKNECRKQPFQRAIGPEEEIMQILSSWFPEEGYMGRIVLKTQQENLEEKNIVQDDKEVILSSEEESFFVQVHDVSPEQPRTVIKAPRVSTAQDVIQQTLCKAKYSYSILSNPNPSDYVLLEEVVKDTTNKKTTTPKSSQRVLLDQECVFQAQSKWKGAGKFILKLKEQVQASREDKKKGISFASELKKLTKSTKQPRGLTSPSQLLTSESIQTKEEKPVGGLSSSDTMDYRQ

SEQ ID NO: 9469 - protein, 1994 aa, Homo sapiens
MVSEGSAAGRDFAGMEEVRQLHVRFCKGIKIWHQAWFLCSLLGREPQEREAGCQLWLCTLSAVLKVGWLFPLSEVPNFTLLKDGCGCWRLKEDQIYNAVRREETENTVGSLLHFLTKLPASETAHGRISVGPCLKQCVRDTVCEYRATLQRTSISQYITGSLLEATTSLGARSGLLSTFGGSTGRMMLKERQPGPSVANSNALPSSSAGISKELIDLQPLIQFPEEVASILMEQEQTIYRRVLPVDYLCFLTRDLGTPECQSSLPCLKASISASILTTQNGEHNALEDLVMRFNEVSSWVTWLILTAGSMEEKREVFSYLVHVAKCCWNMGNYNAVMEFLAGLRSRKVLKMWQFMDQSDIETMRSLKDAMAQHESSCEYRKVVTRALHIPGCKVVPFCGVFLKELCEVLDGASGLMKLCPRYNSQEETLEFVADYSGQDNFLQRVGQNGLKNSEKESTVNSIFQVIRSCNRSLETDEEDSPSEGNSSRKSSLKDKSRWQFIIGDLLDSDNDIFEQSKEYDSHGSEDSQKAFDHGTELIPWYVLSIQADVHQFLLQGATVIHYDQDTHLSARCFLQLQPDNSTLTWVKPTTASPASSKAKLGVLNNTAEPGKFPLLGNAGLSSLTEGVLDLFAVKAVYMGHPGIDIHTVCVQNKLGSMFLSETGVTLLYGLQTTDNRLLHFVAPKHTAKMLFSGLLELTRAVRKMRKFPDQRQQWLRKQYVSLYQEDGRYEGPTLAHAVELFGGRRWSARNPSPGTSAKNAEKPNMQRNNTLGISTTKKKKKILMRGESGEVTDDEMATRKAKMHKECRSRSGSDPQDINEQEESEVNAIANPPNPLPSRRAHSLTTAGSPNLAAGTSSPIRPVSSPVLSSSNKSPSSAWSSSSWHGRIKGGMKGFQSFMVSDSNMSFVEFVELFKSFSVRSRKDLKDLFDVYAVPCNRSGSESAPLYTNLTIDENTSDLQPDLDLLTRNVSDLGLFIKSKQQLSDNQRQISDAIAAASIVTNGTGIESTSLGIFGVGILQLNDFLVNCQGEHCTYDEILSIIQKFEPSISMCHQGLMSFEGFARFLMDKENFASKNDESQENIKELQLPLSYYYIESSHNTYLTGHQLKGESSVELYSQVLLQGCRSVELDCWDGDDGMPIIYHGHTLTTKIPFKEVVEAIDRSAFINSDLPIIISIENHCSLPQQRKMAEIFKTVFGEKLVTKFLFETDFSDDPMLPSPDQLRKKVLLKNKKLKAHQTPVDILKQKAHQLASMQVQAYNGGNANPRPANNEEEEDEEDEYDYDYESLSDDNILEDRPENKSCNDKLQFEYNEEIPKRIKKADNSACNKGKVYDMELGEEFYLDQNKKESRQIAPELSDLVIYCQAVKFPGLSTLNASGSSRGKERKSRKSIFGNNPGRMSPGETASFNKTSGKSSCEGIRQTWEESSSPLNPTTSLSAIIRTPKCYHISSLNENAAKRLCRRYSQKLTQHTACQLLRTYPAATRIDSSNPNPLMFWLHGIQLVALNYQTDDLPLHLNAAMFEANGGCGYVLKPPVLWDKNCPMYQKFSPLERDLDSMDPAVYSLTIVSGQNVCPSNSMGSPCIEVDVLGMPLDSCHFRTKPIHRNTLNPMWNEQFLFHVHFEDLVFLRFAVVENNSSAVTAQRIIPLKALKRGYRHLQLRNLHNEVLEISSLFINSRRMEENSSGNTMSASSMFNTEERKCLQTHRVTVHGVPGPEPFTVFTINGGTKAKQLLQQILTNEQDIKPVTTDYFLMEEKYFISKEKNECRKQPFQRAIGPEEEIMQILSSWFPEEGYMGRIVLKTQQENLEEKNIVQDDKEVILSSEEESFFVQVHDVSPEQPRTVIKAPRVSTAQDVIQQTLCKAKYSYSILSNPNPSDYVLLEEVVKDTTNKKTTTPKSSQRVLLDQECVFQAQSKWKGAGKFILKLKEQVQASREDKKKGISFASELKKLTKSTKQPRGLTSPSQLLTSESIQTKEEKPVGGLSSSDTMDYRQ

SEQ ID NO: 9470 - protein, 247 aa, Homo sapiens
MLVLRSGLTKALASRTLAPQVCSSFATGPRQYDGTFYEFRTYYLKPSNMNAFMENLKKNIHLRTSYSELVGFWSVEFGGRTNKVFHIWKYDNFAHRAEVRKALANCKEWQEQSIIPNLARIDKQETEITYLIPWSKLEKPPKEGVYELAVFQMKPGGPALWGDAFERAINAHVNLGYTKVVGVFHTEYGELNRVHVLWWNESADSRAAGRHKSHEDPRVVAAVRESVNYLVSQQNMLLIPASFSPLK

SEQ ID NO: 9471 - protein, 551 aa, Homo sapiens
MRLRNGTVATALAFITSFLTLSWYTTWQNGKEKLIAYQREFLALKERLRIAEHRISQRSSELNTIVQQFKRVGAETNGSKDALNKFSDNTLKLLKELTSKKSLQVPSIYYHLPHLLKNEGSLQPAVQIGNGRTGVSIVMGIPTVKREVKSYLIETLHSLIDNLYPEEKLDCVIVVFIGETDIDYVHGVVANLEKEFSKEISSGLVEVISPPESYYPDLTNLKETFGDSKERVRWRTKQNLDYCFLMMYAQEKGIYYIQLEDDIIVKQNYFNTIKNFALQLSSEEWMILEFSQLGFIGKMFQAPDLTLIVEFIFMFYKEKPIDWLLDHILWVKVCNPEKDAKHCDRQKANLRIRFRPSLFQHVGLHSSLSGKIQKLTDKDYMKPLLLKIHVNPPAEVSTSLKVYQGHTLEKTYMGEDFFWAITPIAGDYILFKFDKPVNVESYLFHSGNQEHPGDILLNTTVEVLPFKSEGLEISKETKDKRLEDGYFRIGKFENGVAEGMVDPSLNPISAFRLSVIQNSAVWAILNEQRVFSGWWQKSRDKAEGPQAPLLF

SEQ ID NO: 9472 - protein, 535 aa, Homo sapiens
MRLRNGTVATALAFITSFLTLSWYTTWQNGKEKLIAYQREFLALKERLRIAEHRISQRSSELNTIVQQFKRVGAETNGSKDALNKFSDNTLKLLKELTSKKSLQVPSIYYHLPHLLKNEGSLQPAVQIGNGRTGVSIVMGIPTVKREVKSYLIETLHSLIDNLYPEEKLDCVIVVFIGETDIDYVHGVVANLEKEFSKEISSGLVEVISPPESYYPDLTNLKETFGDSKERVRWRTKQNLDYCFLMMYAQEKGIYYIQLEDDIIVKQNYFNTIKNFALQLSSEEWMILEFSQLGFIGKMFQAPDLTLIVEFIFMFYKEKPIDWLLDHILWVKVCNPEKDAKHCDRQKANLRIRFRPSLFQHVGLHSSLSGKIQKLTDKDYMKPLLLKIHVNPPAEVSTSLKVYQGHTLEKTYMGEDFFWAITPIAGDYILFKFDKPVNVESYLFHSGNQEHPGDILLNTTVEVLPFKSEGLEISKETKDKRLEDGYFRIGKFENGVAEGMVDPSLNPISAFRLSVIQNSAVWAILNEIHIKKATN

SEQ ID NO: 9473 - protein, 535 aa, Homo sapiens; identical to SEQ ID NO: 9472

SEQ ID NO: 9474 - protein, 258 aa, Homo sapiens
MKFLLDILLLLPLLIVCSLESFVKLFIPKRRKSVTGEIVLITGAGHGIGRLTAYEFAKLKSKLVLWDINKHGLEETAAKCKGLGAKVHTFVVDCSNREDIYSSAKKVKTTKAFLPAMTKNNHGHIVTVASAAGHVSVPFLLAYCSSKFAAVGFHKTLTDELAALQITGVKTTCLCPNFVNTGFIKNPSTSLGPTLEPEEVVNRLMHGILTEQKMIFIPSSIAFLTTLERILPERFLAVLKRKISVKFDAVIGYKMKAQ

SEQ ID NO: 9475 - protein, 467 aa, Homo sapiens
MSSAPTTPPSVDKVDGFSRKSVRKARQKRSQSSSQFRSQGKPIELTPLPLLKDVPSSEQPELFLKKLQQCCVIFDFMDTLSDLKMKEYKRSTLNELVDYITISRGCLTEQTYPEVVRMVSCNIFRTLPPSDSNEFDPEEDEPTLEASWPHLQLVYEFFIRFLESQEFQPSIAKKYIDQKFVLQLLELFDSEDPRERDYLKTVLHRIYGKFLGLRAFIRKQINNIFLRFVYETEHFNGVAELLEILGSIINGFALPLKAEHKQFLVKVLIPLHTVRSLSLFHAQLAYCIVQFLEKDPSLTEPVIRGLMKFWPKTCSQKEVMFLGELEEILDVIEPSQFVKIQEPLFKQIAKCVSSPHFQVAERALYYWNNEYIMSLIEENSNVILPIMFSSLYRISKEHWNPAIVALVYNVLKAFMEMNSTMFDELTATYKSDRQREKKKEKEREELWKKLEDLELKRGLRRDGIIPT

SEQ ID NO: 9476 - protein, 467 aa, Homo sapiens [sequence omitted]

SEQ ID NO: 9477 - protein, 657 aa, Homo sapiens
MRLKIGFILRSLLVVGSFLGLVVLWSSLTPRPDDPSPLSRMREDRDVNDPMPNRGGNGLAPGEDRFKPVVPWPHVEGVEVDLESIRRINKAKNEQEHHAGGDSQKDIMQRQYLTFKPQTFTYHDPVLRPGILGNFEPKEPEPPGVVGGPGEKAKPLVLGPEFKQAIQASIKEFGFNMVASDMISLDRSVNDLRQEECKYWHYDENLLTSSVVIVFHNEGWSTLMRTVHSVIKRTPRKYLAEIVLIDDFSNKEHLKEKLDEYIKLWNGLVKVFRNERREGLIQARSIGAQKAKLGQVLIYLDAHCEVAVNWYAPLVAPISKDRTICTVPLIDVINGNTYEIIPQGGGDEDGYARGAWDWSMLWKRVPLTPQEKRLRKTKTEPYRSPAMAGGLFAIEREFFFELGLYDPGLQIWGGENFEISYKIWQCGGKLLFVPCSRVGHIYRLEGWQGNPPPIYVGSSPTLKNYVRVVEVWWDEYKDYFYASRPESQALPYGDISELKKFREDHNCKSFKWFMEEIAYDITSHYPLPPKNVDWGEIRGFETAYCIDSMGKTNGGFVELGPCHRMGGNQLFRINEANQLMQYDQCLTKGADGSKVMITHCNLNEFKEWQYFKNLHRFTHIPSGKCLDRSEVLHQVFISNCDSSKTTQKWEMNNIHSV

SEQ ID NO: 9478 - protein, 136 aa, Homo sapiens
MPWEVAGAQTLPSWLRLNLGSICPLGAPGGRADFDPELSCLISFPGGTSLSFLVLVTGCTSVGRIPDAEIYKITATDFYPLQEEAKEEERLIALKKILSSGVFYFSWPNDGSRFDLTVRTQKQGDDSSEWGNSFFW

SEQ ID NO: 9479 - protein, 1496 aa, Homo sapiens
MALSKGLRLLGRLGAEGDCSVLLEARGRDDCLLFEAGTVATLAPEEKEVIKGQYGKLTDAYGCLGELRLKSGGTSLSFLVLVTGCTSVGRIPDAEIYKITATDFYPLQEEAKEEERLIALKKILSSGVFYFSWPNDGSRFDLTVRTQKQGDDSSEWGNSFFWNQLLHVPLRQHQVSCCDWLLKIICGVVTIRTVYASHKQAKACLVSRVSCERTGTRFHTRGVNDDGHVSNFVETEQMIYMDDGVSSFVQIRGSVPLFWEQPGLQVGSHHLRLHRGLEANAPAFDRHMVLLKEQYGQQVVVNLLGSRGGEEVLNRAFKKLLWASCHAGDTPMINFDFHQFAKGGKLEKLETLLRPQLKLHWEDFDVFTKGENVSPRFQKGTLRMNCLDCLDRTNTVQSFIALEVLHLQLKTLGLSSKPIVDRFVESFKAMWSLNGHSLSKVFTGSRALEGKAKVGKLKDGARSMSRTIQSNFFDGVKQEAIKLLLVGDVYGEEVADKGGMLLDSTALLVTPRILKAMTERQSEFTNFKRIRIAMGTWNVNGGKQFRSNVLRTAELTDWLLDSPQLSGATDSQDDSSPADIFAVGFEEMVELSAGNIVNASTTNKKMWGEQLQKAISRSHRYILLTSAQLVGVCLYIFVRPYHVPFIRDVAIDTVKTGMGGKAGNKGAVGIRFQFHSTSFCFICSHLTAGQSQVKERNEDYKEITQKLCFPMGRNVFSHDYVFWCGDFNYRIDLTYEEVFYFVKRQDWKKLLEFDQLQLQKSSGKIFKDFHEGAINFGPTYKYDVGSAAYDTSDKCRTPAWTDRVLWWRKKHPFDKTAGELNLLDSDLDVDTKVRHTWSPGALQYYGRAELQASDHRPVLAIVEVEVQEVDVGARERVFQEVSSFQGPLDATVVVNLQSPTLEEKNEFPEDLRTELMQTLGSYGTIVLVRINQGQMLVTFADSHSALSVLDVDGMKVKGRAVKIRPKTKDWLKGLREEIIRKRDSMAPVSPTANSCLLEENFDFTSLDYESEGDILEDDEDYLVDEFNQPGVSDSELGGDDLSDVPGPTALAPPSKSPALTKKKQHPTYKDDADLVELKRELEAVGEFRHRSPSRSLSVPNRPRPPQPPQRPPPPTGLMVKKSASDASISSGTHGQYSILQTARLLPGAPQQPPKARTGISKPYNVKQIKTTNAQEAEAAIRCLLEARGGASEEALSAVAPRDLEASSEPEPTPGAAKPETPQAPPLLPRRPPPRVPAIKKPTLRRTGKPLSPEEQFEQQTVHFTIGPPETSVEAPPVVTAPRVPPVPKPRTFQPGKAAERPSHRKPASDEAPPGAGASVPPPLEAPPLVPKVPPRRKKSAPAAFHLQVLQSNSQLLQGLTYNSSDSPSGHPPAAGTVFPQGDFLSTSSATSPDSDGTKAMKPEAAPLLGDYQDPFWNLLHHPKLLNNTWLSKSSDPLDSGTRSPKRDPIDPVSAGASAAKAELPPDHEHKTLGHWVTISDQEKRTALQVFDPLAKT

SEQ ID NO: 9480 - protein, 572 aa, Homo sapiens
MEPEAPRRRHTHQRGYLLTRNPHLNKDLAFTLEERQQLNIHGLLPPSFNSQEIQVLRVVKNFEHLNSDFDRYLLLMDLQDRNEKLFYRVLTSDIEKFMPIVYTPTVGLACQQYSLVFRKPRGLFITIHDRGHIASVLNAWPEDVIKAIVVTDGERILGLGDLGCNGMGIPVGKLALYTACGGMNPQECLPVILDVGTENEELLKDPLYIGLRQRRVRGSEYDDFLDEFMEAVSSKYGMNCLIQFEDFANVNAFRLLNKYRNQYCTFNDDIQGTASVAVAGLLAALRITKNKLSDQTILFQGAGEAALGIAHLIVMALEKEGLPKEKAIKKIWLVDSKGLIVKGRASLTQEKEKFAHEHEEMKNLEAIVQEIKPTALIGVAAIGGAFSEQILKDMAAFNERPIIFALSNPTSKAECSAEQCYKITKGRAIFASGSPFDPVTLPNGQTLYPGQGNNSYVFPGVALGVVACGLRQITDNIFLTTAEVIAQQVSDKHLEEGRLYPPLNTIRDVSLKIAEKIVKDAYQEKTATVYPEPQNKEAFVRSQMYSTDYDQILPDCYSWPEEVQKIQTKVDQ

SEQ ID NO: 9481 - protein, 392 aa, Homo sapiens
MAVVAAAAGWLLRLRAAGAEGHWRRLPGAGLARGFLHPAATVEDAAQRRQVAHFTFQPDPEPREYGQTQKMNLFQSVTSALDNSLAKDPTAVIFGEDVAFGGVFRCTVGLRDKYGKDRVFNTPLCEQGIVGFGIGIAVTGATAIAEIQFADYIFPAFDQIVNEAAKYRYRSGDLFNCGSLTIRSPWGCVGHGALYHSQSPEAFFAHCPGIKVVIPRSPFQAKGLLLSCIEDKNPCIFFEPKILYRAAAEEVPIEPYNIPLSQAEVIQEGSDVTLVAWGTQVHVIREVASMAKEKLGVSCEVIDLRTIIPWDVDTICKSVIKTGRLLISHEAPLTGGFASEISSTVQEECFLNLEAPISRVCGYDTPFPHIFEPFYIPDKWKCYDALRKMINY

SEQ ID NO: 9482 - protein, 346 aa, Homo sapiens
MQREEIRTVKRGGGASGRVPGLRSGDGRPRRVSRTGIAEDVDPLPGLPRRARPSVSGYAARPGALAVSGPAGQPPGQGPQRPRRPAKDAQPAPPPRPAGATRTGAPPAEGRRHKAAPHNGPARRSPPCNPAPRSCTHIWATRACGPRAPRSSALGSASVPTASSRLRPTARLPGPRSRRWQESGRRPPEQRRRGGRAPARGRAFPALPGETCFGLSSGPSPVRGSTCAARVARLGMPGTAGSSARKALGCSGAVTAALSPPGPAARLLSGLAGMPRAPPAFKESGLAADAYVSLGAGRIPWVPAPFHVGRRVGEPGSSLRAPPAGRRRRCTSSRRPAPGLERAQPC

SEQ ID NO: 9483 - protein, 1241 aa, Homo sapiens
MAPLKVWQLQDLSFQTAARILASPVELALVVMKDLSQNFPTKARAITKTAVSSELRTEVEENQKYFKGTLGLQPGDSALFINGLHMDLDTQDIFSLFDVLRNEARVMEGLHRLGIEGLSLHNVLKLNIQPSEADYAVDIRSPAISWVNNLEVDSRYNSWPSSLQELLRPTFPGVIRQIRKNLHNMVFIVDPAHETTAELMNTAEMFLSNHIPLRIGFIFVVNDSEDVDGMQDAGVAVLRAYNYVAQEVDDYHAFQTLTHIYNKVRTGEKVKVEHVVSVLEKKYPYVEVNSILGIDSAYDRNRKEARGYYEQTGVGPLPVVLFNGMPFEREQLDPDELETITMHKILETTTFFQRAVYLGELPHDQDVVEYIMNQPNVVPRINSRILTAERDYLDLTASNNFFVDDYARFTILDSQGKTAAVANSMNYLTKKGMSSKEIYDDSFIRPVTFWIVGDFDSPSGRQLLYDAIKHQKSSNNVRISMINNPAKEISYENTQISRAIWAALQTQTSNAAKNFITKMAKEGAAEALAAGADIAEFSVGGMDFSLFKEVFESSKMDFILSHAVYCRDVLKLKKGQRAVISNGRIIGPLEDSELFNQDDFHLLENIILKTSGQKIKSHIQQLRVEEDVASDLVMKVDALLSAQPKGDPRIEYQFFEDRHSAIKLRPKEGETYFDVVAVVDPVTREAQRLAPLLLVLAQLINMNLRVFMNCQSKLSDMPLKSFYRYVLEPEISFTSDNSFAKGPIAKFLDMPQSPLFTLNLNTPESWMVESVRTPYDLDNIYLEEVDSVVAAEYELEYLLLEGHCYDITTGQPPRGLQFTLGTSANPVIVDTIVMANLGYFQLKANPGAWILRLRKGRSEDIYRIYSHDGTDSPPDADEVVIVLNNFKSKIIKVKVQKKADMVNEDLLSDGTSENESGFWDSFKWGFTGQKTEEVKQDKDDIINIFSVASGHLYERFLRIMMLSVLKNTKTPVKFWFLKNYLSPTFKEFIPYMANEYNFQYELVQYKWPRWLHQQTEKQRIIWGYKILFLDVLFPLVVDKFLFVDADQIVRTDLKELRDFNLDGAPYGYTPFCDSRREMDGYRFWKSGYWASHLAGRKYHISALYVVDLKKFRKIAAGDRLRGQYQGLSQDPNSLSNLDQDLPNNMIHQVPIKSLPQEWLWCETWCDDASKKRAKTIDLCNNPMTKEPKLEAAVRIVPEWQDYDQEIKQLQIRFQKEKETGALYKEKTKEPSREGPQKREEL

SEQ ID NO: 9484 - protein, 3130 aa, Homo sapiens
MFSVRIVTADYYMASPLQGLDTCQSPLTQAPVKKVPVVRVFGATPAGQKTCLHLHGIFPYLYVPYDGYGQQPESYLSQMAFSIDRALNVALGNPSSTAQHVFKVSLVSGMPFYGYHEKERHFMKIYLYNPTMVKRICELLQSGAIMNKFYQPHEAHIPYLLQLFIDYNLYGMNLINLAAVKFRKARRKSNTLHATGSCKNHLSGNSLADTLFRWEQDEIPSSLILEGVEPQSTCELEVDAVAADILNRLDIEAQIGGNPGLQAIWEDEKQRRRNRNETSQMSQPESQDHRFVPATESEKKFQKRLQEILKQNDFSVTLSGSVDYSDGSQEFSAELTLHSEVLSPEMLQCTPANMVEVHKDKESSKGHTRHKVEEALINEEAILNLMENSQTFQPLTQRLSESPVFMDSSPDEALVHLLAGLESDGYRGERNRMPSPCRSFGNNKYPQNSDDEENEPQIEKEEMELSLVMSQRWDSNIEEHCAKKRSLCRNTHRSSTEDDDSSSGEEMEWSDNSLLLASLSIPQLDGTADENSDNPLNNENSRTHSSVIATSKLSVKPSIFHKDAATLEPSSSAKITFQCKHTSALSSHVLNKEDLIEDLSQTNKNTEKGLDNSVTSFTNESTYSMKYPGSLSSTVHSENSHKENSKKEILPVSSCESSIFDYEEDIPSVTRQVPSRKYTNIRKIEKDSPFIHMHRHPNENTLGKNSFNFSDLNHSKNKVSSEGNEKGNSTALSSLFPSSFTENCELLSCSGENRTMVHSLNSTADESGLNKLKIRYEEFQEHKTEKPSLSQQAAHYMFFPSVVLSNCLTRPQKLSPVTYKLQPGNKPSRLKLNKRKLAGHQETSTKSSETGSTKDNFIQNNPCNSNPEKDNALASDLTKTTRGAFENKTPTDGFIDCHFGDGTLETEQSFGLYGNKYTLRAKRKVNYETEDSESSFVTHNSKISLPHPMEIGESLDGTLKSRKRRKMSKKLPPVIIKYIIINRFRGRKNMLVKLGKIDSKEKQVILTEEKMELYKKLAPLKDFWPKVPDSPATKYPIYPLTPKKSHRRKSKHKSAKKKTGKQQRTNNENIKRTLSFRKKRSHAILSPPSPSYNAETEDCDLNYSDVMSKLGFLSERSTSPINSSPPRCWSPTDPRAEEIMAAAEKEAMLFKGPNVYKKTVNSRIGKTSRARAQIKKSKAKLANPSIVTKKRNKRNQTNKLVDDGKKKPRAKQKTNEKGTSRKHITLKDEKIKSQSGAEVKFVLKHQNVSEFASSSGGSQLLFKQKDMPLMGSAVDHPLSASLPTGINAQQKLSGCFSSFLESKKSVDLQTFPSSRDDLHPSVVCNSIGPGVSKINVQRPHNQSAMFTLKESTLIQKNIFDLSNHLSQVAQNTQISSGMSSKIEDNANNIQRNYLSSIGKLSEYRNSLESKLDQAYTPNFLHCKDSQQQIVCIAEQSKHSETCSPGNTASEESQMPNNCFVTSLRSPIKQIAWEQKQRGFILDMSNFKPERVKPRSLSEAISQTKALSQCKNRNVSTPSAFGEGQSGLAVLKELLQKRQQKAQNANTTQDPLSNKHQPNKNISGSLEHNKANKRTRSVTSPRKPRTPRSTKQKEKIPKLLKVDSLNLQNSSQLDNSVSDDSPIFFSDPGFESCYSLEDSLSPEHNYNFDINTIGQTGFCSFYSGSQFVPADQNLPQKFLSDAVQDLFPGQAIEKNEFLSHDNQKCDEDKHHTTDSASWIRSGTLSPEIFEKSTIDSNENRRHNQWKNSFHPLTTRSNSIMDSFCVQQAEDCLSEKSRLNRSSVSKEVFLSLPQPNNSDWIQGHTRKEMGQSLDSANTSFTAILSSPDGELVDVACEDLELYVSRNNDMLTPTPDSSPRSTSSPSQSKNGSFTPRTANILKPLMSPPSREEIMATLLDHDLSETIYQEPFCSNPSDVPEKPREIGGRLLMVETRLANDLAEFEGDFSLEGLRLWKTAFSAMTQNPRPGSPLRSGQGVVNKGSSNSPKMVEDKKIVIMPCKCAPSRQLVQVWLQAKEEYERSKKLPKTKPTGVVKSAENFSSSVNPDDKPVVPPKMDVSPCILPTTAHTKEDVDNSQIALQAPTTGCSQTASESQMLPPVASASDPEKDEDDDDNYYISYSSPDSPVIPPWQQPISPDSKALNGDDRPSSPVEELPSLAFENFLKPIKDGIQKSPCSEPQEPLVISPINTRARTGKCESLCFHSTPIIQRKLLERLPEAPGLSPLSTEPKTQKLSNKKGSNTDTLRRVLLTQAKNQFAAVNTPQKETSQIDGPSLNNTYGFKVSIQNLQEAKALHEIQNLTLISVELHARTRRDLEPDPEFDPICALFYCISSDTPLPDTEKTELTGVIVIDKDKTVFSQDIRYQTPLLIRSGITGLEVTYAADEKALFHEIANIIKRYDPDILLGYEIQMHSWGYLLQRAAALSIDLCRMISRVPDDKIENRFAAERDEYGSYTMSEINIVGRITLNLWRIMRNEVALTNYTFENVSFHVLHQRFPLFTFRVLSDWFDNKTDLYRWKMVDHYVSRVRGNLQMLEQLDLIGKTSEMARLFGIQFLHVLTRGSQYRVESMMLRIAKPMNYIPVTPSVQQRSQMRAPQCVPLIMEPESRFYSNSVLVLDFQSLYPSIVIAYNYCFSTCLGHVENLGKYDEFKFGCTSLRVPPDLLYQVRHDITVSPNGVAFVKPSVRKGVLPRMLEEILKTRFMVKQSMKAYKQDRALSRMLDARQLGLKLIANVTFGYTSANFSGRMPCIEVGDSIVHKARETLERAIKLVNDTKKWGARVVYGDTDSMFVLLKGATKEQSFKIGQEIAEAVTATNPKPVKLKFEKVYLPCVLQTKKRYVGYMYETLDQKDPVFDAKGIETVRRDSCPAVSKILERSLKLLFETRDISLIKQYVQRQCMKLLEGKASIQDFIFAKEYRGSFSYKPGACVPALELTRKMLTYDRRSEPQVGERVPYVIIYGTPGVPLIQLVRRPVEVLQDPTLRLNATYYITKQILPPLARIFSLIGIDVFSWYHELPRIHKATSSSRSEPEGRKGTISQYFTTLHCPVCDDLTQHGICSKCRSQPQHVAVILNQEIRELERQQEQLVKICKNCTGCFDRHIPCVSLNCPVLFKLSRVNRELSKAPYLRQLLDQF

SEQ ID NO: 9485 - protein, 3130 aa, Homo sapiens; identical to SEQ ID NO: 9484

SEQ ID NO: 9486 - protein, 3052 aa, Homo sapiens
MAFSIDRALNVALGNPSSTAQHVFKVSLVSGMPFYGYHEKERHFMKIYLYNPTMVKRICELLQSGAIMNKFYQPHEAHIPYLLQLFIDYNLYGMNLINLAAVKFRKARRKSNTLHATGSCKNHLSGNSLADTLFRWEQDEIPSSLILEGVEPQSTCELEVDAVAADILNRLDIEAQIGGNPGLQAIWEDEKQRRRNRNETSQMSQPESQDHRFVPATESEKKFQKRLQEILKQNDFSVTLSGSVDYSDGSQEFSAELTLHSEVLSPEMLQCTPANMVEVHKDKESSKGHTRHKVEEALINEEAILNLMENSQTFQPLTQRLSESPVFMDSSPDEALVHLLAGLESDGYRGERNRMPSPCRSFGNNKYPQNSDDEENEPQIEKEEMELSLVMSQRWDSNIEEHCAKKRSLCRNTHRSSTEDDDSSSGEEMEWSDNSLLLASLSIPQLDGTADENSDNPLNNENSRTHSSVIATSKLSVKPSIFHKDAATLEPSSSAKITFQCKHTSALSSHVLNKEDLIEDLSQTNKNTEKGLDNSVTSFTNESTYSMKYPGSLSSTVHSENSHKENSKKEILPVSSCESSIFDYEEDIPSVTRQVPSRKYTNIRKIEKDSPFIHMHRHPNENTLGKNSFNFSDLNHSKNKVSSEGNEKGNSTALSSLFPSSFTENCELLSCSGENRTMVHSLNSTADESGLNKLKIRYEEFQEHKTEKPSLSQQAAHYMFFPSVVLSNCLTRPQKLSPVTYKLQPGNKPSRLKLNKRKLAGHQETSTKSSETGSTKDNFIQNNPCNSNPEKDNALASDLTKTTRGAFENKTPTDGFIDCHFGDGTLETEQSFGLYGNKYTLRAKRKVNYETEDSESSFVTHNSKISLPHPMEIGESLDGTLKSRKRRKMSKKLPPVIIKYIIINRFRGRKNMLVKLGKIDSKEKQVILTEEKMELYKKLAPLKDFWPKVPDSPATKYPIYPLTPKKSHRRKSKHKSAKKKTGKQQRTNNENIKRTLSFRKKRSHAILSPPSPSYNAETEDCDLNYSDVMSKLGFLSERSTSPINSSPPRCWSPTDPRAEEIMAAAEKEAMLFKGPNVYKKTVNSRIGKTSRARAQIKKSKAKLANPSIVTKKRNKRNQTNKLVDDGKKKPRAKQKTNEKGTSRKHITLKDEKIKSQSGAEVKFVLKHQNVSEFASSSGGSQLLFKQKDMPLMGSAVDHPLSASLPTGINAQQKLSGCFSSFLESKKSVDLQTFPSSRDDLHPSVVCNSIGPGVSKINVQRPHNQSAMFTLKESTLIQKNIFDLSNHLSQVAQNTQISSGMSSKIEDNANNIQRNYLSSIGKLSEYRNSLESKLDQAYTPNFLHCKDSQQQIVCIAEQSKHSETCSPGNTASEESQMPNNCFVTSLRSPIKQIAWEQKQRGFILDMSNFKPERVKPRSLSEAISQTKALSQCKNRNVSTPSAFGEGQSGLAVLKELLQKRQQKAQNANTTQDPLSNKHQPNKNISGSLEHNKANKRTRSVTSPRKPRTPRSTKQKEKIPKLLKVDSLNLQNSSQLDNSVSDDSPIFFSDPGFESCYSLEDSLSPEHNYNFDINTIGQTGFCSFYSGSQFVPADQNLPQKFLSDAVQDLFPGQAIEKNEFLSHDNQKCDEDKHHTTDSASWIRSGTLSPEIFEKSTIDSNENRRHNQWKNSFHPLTTRSNSIMDSFCVQQAEDCLSEKSRLNRSSVSKEVFLSLPQPNNSDWIQGHTRKEMGQSLDSANTSFTAILSSPDGELVDVACEDLELYVSRNNDMLTPTPDSSPRSTSSPSQSKNGSFTPRTANILKPLMSPPSREEIMATLLDHDLSETIYQEPFCSNPSDVPEKPREIGGRLLMVETRLANDLAEFEGDFSLEGLRLWKTAFSAMTQNPRPGSPLRSGQGVVNKGSSNSPKMVEDKKIVIMPCKCAPSRQLVQVWLQAKEEYERSKKLPKTKPTGVVKSAENFSSSVNPDDKPVVPPKMDVSPCILPTTAHTKEDVDNSQIALQAPTTGCSQTASESQMLPPVASASDPEKDEDDDDNYYISYSSPDSPVIPPWQQPISPDSKALNGDDRPSSPVEELPSLAFENFLKPIKDGIQKSPCSEPQEPLVISPINTRARTGKCESLCFHSTPIIQRKLLERLPEAPGLSPLSTEPKTQKLSNKKGSNTDTLRRVLLTQAKNQFAAVNTPQKETSQIDGPSLNNTYGFKVSIQNLQEAKALHEIQNLTLISVELHARTRRDLEPDPEFDPICALFYCISSDTPLPDTEKTELTGVIVIDKDKTVFSQDIRYQTPLLIRSGITGLEVTYAADEKALFHEIANIIKRYDPDILLGYEIQMHSWGYLLQRAAALSIDLCRMISRVPDDKIENRFAAERDEYGSYTMSEINIVGRITLNLWRIMRNEVALTNYTFENVSFHVLHQRFPLFTFRVLSDWFDNKTDLYRWKMVDHYVSRVRGNLQMLEQLDLIGKTSEMARLFGIQFLHVLTRGSQYRVESMMLRIAKPMNYIPVTPSVQQRSQMRAPQCVPLIMEPESRFYSNSVLVLDFQSLYPSIVIAYNYCFSTCLGHVENLGKYDEFKFGCTSLRVPPDLLYQVRHDITVSPNGVAFVKPSVRKGVLPRMLEEILKTRFMVKQSMKAYKQDRALSRMLDARQLGLKLIANVTFGYTSANFSGRMPCIEVGDSIVHKARETLERAIKLVNDTKKWGARVVYGDTDSMFVLLKGATKEQSFKIGQEIAEAVTATNPKPVKLKFEKVYLPCVLQTKKRYVGYMYETLDQKDPVFDAKGIETVRRDSCPAVSKILERSLKLLFETRDISLIKQYVQRQCMKLLEGKASIQDFIFAKEYRGSFSYKPGACVPALELTRKMLTYDRRSEPQVGERVPYVIIYGTPGVPLIQLVRRPVEVLQDPTLRLNATYYITKQILPPLARIFSLIGIDVFSWYHELPRIHKATSSSRSEPEGRKGTISQYFTTLHCPVCDDLTQHGICSKCRSQPQHVAVILNQEIRELERQQEQLVKICKNCTGCFDRHIPCVSLNCPVLFKLSRVNRELSKAPYLRQLLDQF

SEQ ID NO: 9487 - protein, 263 aa, Homo sapiens
MVSGIYSCQRSLAEITELIHIALLVHRGIVNLNELQSSDGPLKDMQFGNKIAILSGDFLLANACNGLALLQNTKVVELLASALMDLVQGVYHENSTSKESYITDDIGISTWKEQTFLSHGALLAKSCQAAMELAKHDAEVQNMAFQYGKHMAMSHKINSDVQPFIKEKTSDSMTFNLNSAPVVLHQEFLGRDLWIKQIGEAQEKGRLDYAKLRERIKAGKGVTSAIDLCRYHGNKALEALESFPPSEARSALENIVFAVTRFS

SEQ ID NO: 9488 - protein, 399 aa, Homo sapiens
MNFRQLLLHLPRYLGASGSPRRLWWSPSLDTISSVGSWRGRSSKSPAHWNQVVSEAEKIVGYPTSFMSLRCLLSDELSNIAMQVRKLVGTQHPLLTTARGLVHDSWNSLQLRGLVVLLISKAAGPSSVNTSCQNYDMVSGIYSCQRSLAEITELIHIALLVHRGIVNLNELQSSDGPLKDMQFGNKIAILSGDFLLANACNGLALLQNTKVVELLASALMDLVQGVYHENSTSKESYITDDIGISTWKEQTFLSHGALLAKSCQAAMELAKHDAEVQNMAFQYGKHMAMSHKINSDVQPFIKEKTSDSMTFNLNSAPVVLHQEFLGRDLWIKQIGEAQEKGRLDYAKLRERIKAGKGVTSAIDLCRYHGNKALEALESFPPSEARSALENIVFAVTRFS

SEQ ID NO: 9489 - protein, 162 aa, Homo sapiens
MAQWQQLLRRPKGGSPAPGWGWLSEHLAAASMLKWEQGGWAADLSQSQVGLPVTNLLKLYMPENISTVAFHFSWEKRMDSTDRVYFVNHKTKTTQWEDPGTQGFQNAEPLPEGWEFCILMRVLDYDIKTQGLWQLYIIFREEEELHYRGLAKEWFPCFHMKF

SEQ ID NO: 9490 - protein, 120 aa, Homo sapiens [sequence omitted]

SEQ ID NO: 9491 - protein, 209 aa, Homo sapiens
MSGDATRTLGKGSQPPGPVPEGLIRIYSMRFCPYSHRTRLVLKAKDIRHEVVNINLRNKPEWYYTKHPFGHIPVLETSQCQLIYESVIACEYLDDAYPGRKLFPYDPYERARQKMLLELFCKILEYQNTTFFGGTCISMIDYLLWPWFERLDVYGILDCVSHTPALRLWISAMKWDPTVCALLMDKSIFQGFLNLYFQNNPNAFDFGLC

SEQ ID NO: 9492 - protein, 243 aa, Homo sapiens [sequence omitted]

SEQ ID NO: 9493 - protein, 181 aa, Homo sapiens
MRFCPYSHRTRLVLKAKDIRHEVVNINLRNKPEWYYTKHPFGHIPVLETSQCQLIYESVIACEYLDDAYPGRKLFPYDPYERARQKMLLELFCKILEYQNTTFFGGTCISMIDYLLWPWFERLDVYGILDCVSHTPALRLWISAMKWDPTVCALLMDKSIFQGFLNLYFQNNPNAFDFGLC

SEQ ID NO: 9494 - protein, 79 aa, Homo sapiens
QLLKDPQVLFAGYKVPHPLEHKIIIRVQTTPDYSPQEAFTNAITDLISELSLLEERFRVRAGPGGADGVAIKDKQEGIE

SEQ ID NO: 9495 - protein, 69 aa, Homo sapiens
QLLKDPQVLFAGYKVPHPLEHKIIIRVQTTPDYSPQEAFTNAITDLISELSLLEERFRVAIKDKQEGIE

SEQ ID NO: 9496 - protein, 111 aa, Homo sapiens
QLLKDPQVLFAGYKVPHPLEHKIIIRVQTTPDYSPQEAFTNAITDLISELSLLEERFRVRAGPGGADGVGWTLARVPRPGTALACFFGGPGGEAAVMEEQGLPPQAPGHVD

SEQ ID NO: 9497 - protein, 222 aa, Homo sapiens
MNSNVENLPPHIIRLVYKEVTTLTADPPDGIKVFPNEEDLTDLQVTIEGPEGTPYAGGLFRMKLLLGKDFPASPPKGYFLTKIFHPNVGANGEICVNVLKRDWTAELGIRHVLLTIKCLLIHPNPESALNEEAGRLLLENYEEYAARARLLTEIHGGAGGPSGRAEAGRALASGTEASSTDPGAPGGPGGAEGPMAKKHAGERDKKLAAKKKTDKKRALRRL

SEQ ID NO: 9498 - protein, 244 aa, Homo sapiens
MGATAGWAVTVYDKPASFFKEAPLDLQHRLFMKLGSTHSPFRARSEPEDPDTERSAFTERDSGSGLVTRLHERPALLVSSTSWTEDEDFSILLAALEKFEQLTLDGQNLPSLVCVITGKGPLREYYSRLIHQKHFQHIQVCIPWLEGRGLPPLLGSVDLDVCLDTSSSGLDLPMKVVDMFRCCLPACAVNFKCLHELVKHEENRLVFEDSEELAAQLQMLFSNFPDPEGKLNQFRKNLRESQQL

SEQ ID NO: 9499 - protein, 53 aa, Homo sapiens
MVIFLRTRTAGRKGAPTCLDSRCLIRGQIVVPDLEFNILQTFQSNESFIRFPI

SEQ ID NO: 9500 - protein, 338 aa, Homo sapiens
MLSALARPASAALRRSFSTSAQNNAKVAVLGASGGIGQPLSLLLKNSPLVSRLTLYDIAHTPGVAADLSHIETKAAVKGYLGPEQLPDCLKGCDVVVIPAGVPRKPGMTRDDLFNTNATIVATLTAACAQHCPEAMICVIANPVNSTIPITAEVFKKHGVYNPNKIFGVTTLDIVRANTFVAELKGLDPARVNVPVIGGHAGKTIIPLISQCTPKVDFPQDQLTALTGRIQEAGTEVVKAKAGAGSATLSMAYAGARFVFSLVDAMNGKEGVVECSFVKSQETECTYFSTPLLLGKKGIEKNLGIGKVSSFEEKMISDAIPELKASIKKGEDFVKTLK

SEQ ID NO: 9501 - protein, 338 aa, Homo sapiens; identical to SEQ ID NO: 9500

SEQ ID NO: 9502 - protein, 82 aa, Homo sapiens [sequence omitted]

SEQ ID NO: 9503 - protein, 400 aa, Homo sapiens
MPLSMRYLFIISVSSVIIFIVFSVFNFGGDPSFQRLNISDPLRLTQVCTSFINGKTRFLWKNKLMIHEKSSCKEYLTQSHYITAPLSKEEADFPLAYIMVIHHHFDTFARLFRAIYMPQNIYCVHVDEKATTEFKDAVEQLLSCFPNAFLASKMEPVVYGGISRLQADLNCIRDLSAFEVSWKYVINTCGQDFPLKTNKEIVQYLKGFKGKNITPGVLPPAHAIGRTKYVHQEHLGKELSYVIRTTALKPPPPHNLTIYFGSAYVALSREFANFVLHDPRAVDLLQWSKDTFSPDEHFWVTLNRIPGVPGSMPNASWTGNLRAIKWSDMEDRHGGCHGHYVHGICIYGNGDLKWLVNSPSLFANKFELNTYPLTVECLELRHRERTLNQSETAIQPSWYF

SEQ ID NO: 9504 - protein, 402 aa, Homo sapiens
MNFWRYCFFAFTLLSVVIFVRFYSSQLSPPKSYEKLNSSSERYFRKTACNHALEKMPVFLWENILPSPLRSVPCKDYLTQNHYITSPLSEEEAAFPLAYVMVIHKDFDTFERLFRAIYMPQNVYCVHVDEKAPAEYKESVRQLLSCFQNAFIASKTESVVYAGISRLQADLNCLKDLVASEVPWKYVINTCGQDFPLKTNREIVQHLKGFKGKNITPGVLPPDHAIKRTKYVHQEHTDKGGFFVKNTNILKTSPPHQLTIYFGTAYVALTREFVDFVLRDQRAIDLLQWSKDTYSPDEHFWVTLNRVSGVPGSMPNASWTGNLRAIKWSDMEDRHGGCHGHYVHGICIYGNGDLKWLVNSPSLFANKFELNTYPLTVECLELRHRERTLNQSETAIQPSWYF

SEQ ID NO: 9505 - protein, 402 aa, Homo sapiens
MMGSWKHCLFSASLISALIFVFVYNTELWENKRFLRAALSNASLLAEACHQIFEGKVFYPTENALKTTLDEATCYEYMVRSHYVTETLSEEEAGFPLAYTVTIHKDFGTFERLFRAIYMPQNVYCVHLDQKATDAFKGAVKQLLSCFPNAFLASKKESVVYGGISRLQADLNCLEDLVASEVPWKYVINTCGQDFPLKTNREIVQYLKGFKGKNITPGVLPPDHAVGRTKYVHQELLNHKNSYVIKTTKLKTPPPHDMVIYFGTAYVALTRDFANFVLQDQLALDLLSWSKDTYSPDEHFWVTLNRIPGVPGSMPNASWTGNLRAIKWSDMEDRHGGCHGHYVHGICIYGNGDLKWLVNSPSLFANKFELNTYPLTVECLELRHRERTLNQSETAIQPSWYF

SEQ ID NO: 9506 - protein, 89 aa, Homo sapiens
MPNASWTGNLRAIKWSDMEDRHGGCHGHYVHGICIYGNGDLKWLVNSPSLFANKFELNTYPLTVECLELRHRERTLNQSETAIQPSWYF

SEQ ID NO: 9507 - protein, 57 aa, Homo sapiens
MTNQEKWAHLSPSEFSQLQKYAEYSTKKLKDVLEEFHGNGVLAKYNPEGKQDILNQV

SEQ ID NO: 9508 - protein, 804 aa, Homo sapiens [sequence omitted]

SEQ ID NO: 9509 - protein, 815 aa, Homo sapiens
MTNQEKWAHLSPSEFSQLQKYAEYSTKKLKDVLEEFHGNGVLAKYNPEGKQDILNQTIDFEGFKLFMKTFLEAELPDDFTAHLFMSFSNKFPHSSPMVKSKPALLSGGLRMNKGAITPPRTTSPANTCSPEVIHLKDIVCYLSLLERGRPEDKLEFMFRLYDTDGNGFLDSSELENIISQMMHVAEYLEWDVTELNPILHEMMEEIDYDHDGTVSLEEWIQGGMTTIPLLVLLGLENVSISTEEGGLVNVKDDGQHVWRLKHFNKPAYCNLCLNMLIGVGKQGLCCSFCKYTVHERCVARAPPSCIKTYVKSKRNTDVMHHYWVEGNCPTKCDKCHKTVKCYQGLTGLHCVWCQITLHNKCASHLKPECDCGPLKDHILPPTTICPVVLQTLPTSGVSVPEERQSTVKKEKSGSQQPNKVIDKNKMQRANSVTVDGQGLQVTPVPGTHPLLVFVNPKSGGKQGERIYRKFQYLLNPRQVYSLSGNGPMPGLNFFRDVPDFRVLACGGDGTVGWVLDCIEKANVGKHPPVAILPLGTGNDLARCLRWGGGYEGENLMKILKDIENSTEIMLDRWKFEVIPNDKDEKGDPVPYSIINNYFSIGVDASIAHRFHIMREKHPEKFNSRMKNKFWYFEFGTSETFSATCKKLHESVEIECDGVQIDLINISLEGIAILNIPSMHGGSNLWGESKKRRSHRRIEKKGSDKRTTVTDAKELKFASQDLSDQLLEVVGLEGAMEMGQIYTGLKSAGRRLAQCSCVVIRTSKSLPMQIDGEPWMQTPCTIKITHKNQAPMLMGPPPKTGLFCSLVKRTRNRSKE

SEQ ID NO: 9510 - protein, 734 aa, Homo sapiens [sequence omitted]

SEQ ID NO: 9511 - protein, 702 aa, Homo sapiens [sequence omitted]

SEQ ID NO: 9512 - protein, 1318 aa, Homo sapiens
MVPRIPGATRCGASPGDSWRRGPTPLFPETRRTPCSCGRRPTPPPGRTGPGGCTQNIAVYEWLPSFLQKTLPEYTGYRPFLDPSISSEFVAASEQFLSTMVPPGVYMRNASCHFQGVINRNSSVSRALRVCNSYWSREHPSLQSAEDVDALLLGMASQIAEREDHVLVEDVRDFWPGPLKFSRTDHLASCLQRGRDLGLPSYTKARAALGLSPITRWQDINPALSRSNDTVLEATAALYNQDLSWLELLPGGLLESHRDPGPLFSTIVLEQFVRLRDGDRYWFENTRNGLFSKKEIEEIRNTTLQDVLVAVINIDPSALQPNVFVWHKGDPCPQPRQLSTEGLPACAPSVVRDYFEGSGFGFGVTIGTLCCFPLVSLLSAWIVARLRMRNFKRLQGQDRQSIVSEKLVGGMEALEWQGHKEPCRPVLVYLQPGQIRVVDGRLTVLRTIQLQPPQKVNFVLSSNRGRRTLLLKIPKEYDLVLLFNLEEERQALVENLRGALKESGLSIQEWELREQELMRAAVTREQRRHLLETFFRHLFSQVLDINQADAGTLPLDSSQKVREALTCELSRAEFAESLGLKPQDMFVESMFSLADKDGNGYLSFREFLDILVVFMKGSPEEKSRLMFRMYDFDGNGLISKDEFIRMLRSFIEISNNCLSKAQLAEVVESMFRESGFQDKEELTWEDFHFMLRDHNSELRFTQLCVKGVEVPEVIKDLCRRASYISQDMICPSPRVSARCSRSDIETELTPQRLQCPMDTDPPQEIRRRFGKKVTSFQPLLFTEAHREKFQRSCLHQTVQQFKRFIENYRRHIGCVAVFYAIAGGLFLERAYYYAFAAHHTGITDTTRVGIILSRGTAASISFMFSYILLTMCRNLITFLRETFLNRYVPFDAAVDFHRLIASTAIVLTVLHSVGHVVNVYLFSISPLSVLSCLFPGLFHDDGSEFPQKYYWWFFQTVPGLTGVVLLLILAIMYVFASHHFRRRSFRGFWLTHHLYILLYVLLIIHGSFALIQLPRFHIFFLVPAIIYGGDKLVSLSRKKVEISVVKAELLPSGVTHLRFQRPQGFEYKSGQWVRIACLALGTTEYHPFTLTSAPHEDTLSLHIRAAGPWTTRLREIYSAPTGDRCARYPKLYLDGPFGEGHQEWHKFEVSVLVGGGIGVTPFASILKDLVFKSSVSCQVFCKKIYFIWVTRTQRQFEWLADIIREVEENDHQDLVSVHIYITQLAEKFDLRTTMLYICERHFQKVLNRSLFTGLRSITHFGRPPFEPFFNSLQEVHPQVRKIGVFSCGPPGMTKNVEKACQLINRQDRTHFSHHYENF

SEQ ID NO: 9513 - protein, 1318 aa, Homo sapiens; identical to SEQ ID NO: 9512

SEQ ID NO: 9514 - protein, 955 aa, Homo sapiens
MVPRIPGATRCGASPGDSWRRGPTPLFPETRRTPCSCGRRPTPPPGRTGPGGCTQNIAVYEWLPSFLQKTLPEYTGYRPFLDPSISSEFVAASEQFLSTMVPPGVYMRNASCHFQGVINRNSSVSRALRVCNSYWSREHPSLQSAEDVDALLLGMASQIAEREDHVLVEDVRDFWPGPLKFSRTDHLASCLQRGRDLGLPSYTKARAALGLSPITRWQDINPALSRSNDTVLEATAALYNQDLSWLELLPGGLLESHRDPGPLFSTIVLEQFVRLRDGDRYWFENTRNGLFSKKEIEEIRNTTLQDVLVAVINIDPSALQPNVFVWHKGDPCPQPRQLSTEGLPACAPSVVRDYFEGSGFGFGVTIGTLCCFPLVSLLSAWIVARLRMRNFKRLQGQDRQSIVSEKLVGGMEALEWQGHKEPCRPVLVYLQPGQIRVVDGRLTVLRTIQLQPPQKVNFVLSSNRGRRTLLLKIPKEYDLVLLFNLEEERQALVENLRGALKESGLSIQEWELREQELMRAAVTREQRRHLLETFFRHLFSQVLDINQADAGTLPLDSSQKVREALTCELSRAEFAESLGLKPQDMFVESMFSLADKDGNGYLSFREFLDILVVFMKGSPEEKSRLMFRMYDFDGNGLISKDEFIRMLRSFIEISNNCLSKAQLAEVVESMFRESGFQDKEELTWEDFHFMLRDHNSELRFTQLCVKGVEVPEVIKDLCRRASYISQDMICPSPRVSARCSRSDIETELTPQRLQCPMDTDPPQEIRRRFGKKVTSFQPLLFTEAHREKFQRSCLHQTVQQFKRFIENYRRHIGCVAVFYAIAGGLFLERAYYYAFAAHHTGITDTTRVGIILSRGTAASISFMFSYILLTMCRNLITFLRETFLNRYVPFDAAVDFHRLIASTAIVLTGRAWVSLGGSPGPPAPADFPSYESPPLCWHLPLMSFSIRMELAWARV

SEQ ID NO: 9515 - protein, 74 aa, Homo sapiens
MSHFPTLGALEHLPASTCCPFPCEHPPLGLWPTQSHPSVGNKGVSVFFAALLNCLNQGSQTTACRPNPAHSLCL

SEQ ID NO: 9516 - protein, 330 aa, Homo sapiens [sequence omitted]

SEQ ID NO: 9517 - protein, 269 aa, Homo sapiens [sequence omitted]

SEQ ID NO: 9518 - protein, 153 aa, Homo sapiens [sequence omitted]

SEQ ID NO: 9519 - protein, 103 aa, Homo sapiens [sequence omitted]

SEQ ID NO: 9520 - protein, 136 aa, Homo sapiens [sequence omitted]

SEQ ID NO: 9521 - protein, 296 aa, Homo sapiens [sequence omitted]

SEQ ID NO: 9522 - protein, 153 aa, Homo sapiens [sequence omitted]

SEQ ID NO: 9523 - protein, 529 aa, Homo sapiens
MTLKWTSVLLLIHLSCYFSSGSCGKVLVWAAEYSHWMNMKTILKELVQRGHEVTVLASSASILFDPNDASTLKFEVYPTSLTKTEFENIIMQQVKRWSDIRKDSFWLYFSQEQEILWELYDIFRNFCKDVVSNKKVMKKLQESRFDIVFADAVFPCGELLAALLNIRFVYSLRFTPGYTIERHSGGLIFPPSYIPIVMSKLSDQMTFMERVKNMIYVLYFDFWFQMSDMKKWDQFYSEVLGRPTTLFETMGKADIWLMRNSWSFQFPHPFLPNVDFVGGFHCKPAKPLPKEMEEFVQSSGENGVVVFSLGSVISNMTAERANVIATALAKIPQKVLWRFDGNKPDALGLNTRLYKWIPQNDLLGHPKTRAFITHGGANGIYEAIYHGIPMVGIPLFFDQPDNIAHMKAKGAAVRLDFNTMSSTDLLNALKTVINDPLYKENIMKLSRIQHDQPVKPLDRAVFWIEFVMPHKGAKHLRVAAHDLTWFQYHSLDVIGFLLACVATVIFIITKFCLFCFWKFARKGKKGKRD

SEQ ID NO: 9524 - protein, 437 aa, Homo sapiens
MTLKWTSVLLLIHLSCYFSSGSCGKVLVWAAEYSHWMNMKTILKELVQRGHEVTVLASSASILFDPNDASTLKFEVYPTSLTKTEFENIIMQQVKRWSDIRKDSFWLYFSQEQEILWELYDIFRNFCKDVVSNKKVMKKLQESRFDIVFADAVFPCGELLAALLNIRFVYSLRFTPGYTIERHSGGLIFPPSYIPIVMSKLSDQMTFMERVKNMIYVLYFDFWFQMSDMKKWDQFYSEVLGRPTTLFETMGKADIWLMRNSWSFQFPHPFLPNVDFVGGFHCKPAKPLPKEMEEFVQSSGENGVVVFSLGSVISNMTAERANVIATALAKIPQKVLWRFDGNKPDALGLNTRLYKWIPQNDLLGHPKTRAFITHGGANGIYEAIYHGIPMVGIPLFFDQPDNIAHMKAKGAAVRLDFNTMSSTDLLNALKTVINDPL

SEQ ID NO: 9525 - protein, 335 aa, Homo sapiens
MTLKWTSVLLLIHLSCYFSSGSCGKVLVWAAEYSHWMNMKTILKELVQRGHEVTVLASSASILFDPNDASTLKFEVYPTSLTKTEFENIIMQQVKRWSDIRKDSFWLYFSQEQEILWELYDIFRNFCKDVVSNKKVMKKLQESRFDIVFADAVFPCGELLAALLNIRFVYSLRFTPGYTIERHSGGLIFPPSYIPIVMSKLSDQMTFMERVKNMIYVLYFDFWFQMSDMKKWDQFYSEVLGRPTTLFETMGKADIWLMRNSWSFQFPHPFLPNVDFVGGFHCKPAKPLPKEMEEFVQSSGENGVVVFSLGSVISNMTAERANVIATALAKIPQKI

SEQ ID NO: 9526 - protein, 214 aa, Homo sapiens [sequence omitted]

SEQ ID NO: 9527 - protein, 319 aa, Homo sapiens
MGKYTVRVATGDLLLAGSPNLVQLWLVGEHGEADLGKQLPPVWGKEAEFEIDVPLHLGRLLMVKLRKHNVLLSLDWFCKWISVQGPGTQGEAFFPCYRWVQGHGIICLPEGTARTVSDDPQNLFKKYREQELEERRKVWGSWKDGLILPIAGNRQPDLPRDERFLEDKDLDFNVSLAKGLKDLAIKGTLDFINCVKRLEDFKKIFPHGKTVLAERVYDSWKNDAFFGYQFLNGANPMLLRCSSRLPACLVLPPGMEDLKTQLEKELQAGSLFEVDFSLLDGVKPNVIIFKQQCVAAPLVMLKLQPDGGLLPMVIQLQPP

SEQ ID NO: 9528 - protein, 87 aa, Homo sapiens
MAPGRRMRTTLTRPGGAAAPVGAPIRPSHELASRLGLRPRGSALPASGAARVRLPSWPALAGPPGPSRRLRSCLNPGAVVWASSAGL

SEQ ID NO: 9529 - protein, 186 aa, Homo sapiens
MEQDIFFTPTGSVDGKRPNTLASNTQLYKWISQNDLLGHPKTKSFMTHGETSGIYEAIYHGIPMVGIPLFADQPDNIAHMKALNVDIRTMSSTDLLNALKTVINDPVYKENAMKLSIIRHDLPIKPLDQAAFWIEFVMQHKGAKHLRVAAHDLTWFQYHNLHVIRFLLAYVSTVIFIITRCCLFSF

SEQ ID NO: 9530 - protein, 167 aa, Homo sapiens
MVYMFEYDSTHGKFHGTVKAEKGKLVINGNPITIFQEQDPSKIKWGDAGAEYVVKSTSGGATRVIISAPSADAPMFVMGMNHKKYDNRLNIVSYASCTTNCLVPLGEVIHDNFGIVERFQNTVHAITATQKIVDGLSGKLWCDGCGALQNITPASTGTAKAVGRGHL

SEQ ID NO: 9531 - protein, 118 aa, Homo sapiens [sequence omitted]

SEQ ID NO: 9532 - protein, 150 aa, Homo sapiens
MAGILFEDIFDVKDIDPEGKKFDRVSRLHCESESFKMDLILDVNIQIYPVDLGDKFRLVIASTLYEDGTLDDGEYNPTDDRPSRADQFEYVMYGKVYRIEGDETSTEAATRLSAYVSYGGLLMRLQGDANNLHGFEVDSRVYLLMKKLAF

SEQ ID NO: 9533 - protein, 150 aa, Homo sapiens; identical to SEQ ID NO: 9532

SEQ ID NO: 9534 - protein, 150 aa, Homo sapiens; identical to SEQ ID NO: 9532

SEQ ID NO: 9535 - protein, 530 aa, Homo sapiens
MRRLWGAARKPSGAGWEKEWAEAPQEAPGAWSGRLGPGRSGRKGRAVPGWASWPAHLALAARPARHLGGAGQGPRPLHSGTAPFHSRASGERQRRLEPQLQHESRCRSSTPADAWRAEAALPVRAMGAPWGSPTAAAGGRRGWRRGRGLPWTVCVLAAAGLTCTALITYACWGQLPPLPWASPTPSRPVGVLLWWEPFGGRDSAPRPPPDCRLRFNISGCRLLTDRASYGEAQAVLFHHRDLVKGPPDWPPPWGIQAHTAEEVDLRVLDYEEAAAAAEALATSSPRPPGQRWVWMNFESPSHSPGLRSLASNLFNWTLSYRADSDVFVPYGYLYPRSHPGDPPSGLAPPLSRKQGLVAWVVSHWDERQARVRYYHQLSQHVTVDVFGRGGPGQPVPEIGLLHTVARYKFYLAFENSQHLDYITEKLWRNALLAGAVPVVLGPDRANYERFVPRGAFIHVDDFPSASSLASYLLFLDRNPAVYRRYFHWRRSYAVHITSFWDEPWCRVCQAVQRAGDRPKSIRNLASWFER

SEQ ID NO: 9536 - protein, 577 aa, Homo sapiens
MQWLMRFRTLWGIHKSFHNIHPAPSQLRCRSLSEFGAPRWNDYEVPEEFNFASYVLDYWAQKEKEGKRGPNPAFWWVNGQGDEVKWSFREMGDLTRRVANVFTQTCGLQQGDHLALMLPRVPEWWLVAVGCMRTGIIFIPATILLKAKDILYRLQLSKAKGIVTIDALASEVDSIASQCPSLKTKLLVSDHSREGWLDFRSLVKSASPEHTCVKSKTLDPMVIFFTSGTTGFPKMAKHSHGLALQPSFPGSRKLRSLKTSDVSWCLSDSGWIVATIWTLVEPWTAGCTVFIHHLPQFDTKVIIQTLLKYPINHFWGVSSIYRMILQQDFTSIRFPALEHCYTGGEVVLPKDQEEWKRRTGLLLYENYGQSETGLICATYWGMKIKPGFMGKATPPYDVQVIDDKGSILPPNTEGNIGIRIKPVRPVSLFMCYEGDPEKTAKVECGDFYNTGDRGKMDEEGYICFLGRSDDIINASGYRIGPAEVESALVEHPAVAESAVVGSPDPIRGEVVKAFIVLTPQFLSHDKDQLTKELQQHVKSVTAPYKYPRKVEFVSELPKTITGKIERKELRKKETGQM

SEQ ID NO: 9537 - protein, 379 aa, Homo sapiens
MQWLMRFRTLWGIHKSFHNIHPAPSQLRCRSLSEFGAPRWNDYEVPEEFNFASYVLDYWAQKEKVCQEKPSPVSSRGYVFLQKTPSAWFVFSQDTDQERSSSDIRSQEGKRGPNPAFWWVNGQGDEVKWSFREMGDLTRRVANVFTQTCGLQQGDHLALMLPRVPEWWLVAVGCMRTGIIFIPATILLKAKDILYRLQLSKAKGIVTIDALASEVDSIASQCPSLKTKLLVSDHSREGWLDFRSLVKSASPEHTCVKSKTLDPMVIFFTSGTTGFPKMAKHSHGLALQPSFPGRKLRSLKTSDVSWCLSDSGWIVATIWTLVEPWTAGCTVFIHHLPQFDTKVIIQTLLKYPINHFWGVSSIYRMILQQDFTRYGRSGL

SEQ ID NO: 9538 - protein, 228 aa, Homo sapiens [sequence omitted]

SEQ ID NO: 9539 - protein, 151 aa, Homo sapiens
MVWIHGGGLMVGAASTYDGLALAAHENVVVVTIQYRLGIWGFFSTGDEHSPGNCGHLDQLAALHWVQDNIASFGGNPGSVTIFGGSVGGESVSVLVLSPLAKNLFHRAISESGVALTSVLVKKGDVKPLAEVGLRLVRLWLDTHTSLALCS

SEQ ID NO: 9540 - protein, 478 aa, Homo sapiens
MFKFHQMKHIFEILDKMRCLRKRSTVSFLGVLVIFLLFMNLYIEDSYVLEGDKQLIRETSTHQLNSERYVHTFKDLSNFSGAINVTYRYLAATPLQRKRYLTIGLSSVKRKKGNYLLETIKSIFEQSSYEELKEISVVVHLADFNSSWRDAMVQDITQKFAHHIIAGRLMVIHAPEEYYPILDGLKRNYNDPEDRVKFRSKQNVDYAFLLNFCANTSDYYVMLEDDVRCSKNFLTAIKKVIASLEGTYWVTLEFSKLGYIGKLYHSHDLPRLAHFLLMFYQEMPCDWLLTHFRGLLAQKNVIRFKPSLFQHMGYYSSYKGTENKLKDDDFEEESFDIPDNPPASLYTNMNVFENYEASKAYSSVDEYFWGKPPSTGDVFVIVFENPIIIKKIKVNTGTEDRQNDILHHGALDVGENVMPSKQRRQCSTYLRLGEFKNGNFEMSGVNQKIPFDIHCMRIYVTKTQKEWLIIRSISIWTS

SEQ ID NO: 9541 - protein, 181 aa, Homo sapiens [sequence omitted]

SEQ ID NO: 9542 - protein, 116 aa, Homo sapiens [sequence omitted]

SEQ ID NO: 9543 - protein, 116 aa, Homo sapiens [sequence omitted]

SEQ ID NO: 9544 - protein, 593 aa, Homo sapiens
MLRTSVLRLLGRTGASRLSLLEDFGPRYYSSGSLSAGDDACDVRAYFTTPIFYVNAAPHIGHLYSALLADALCRHRRLRGPSTAATRFSTGTDEHGLKIQQAAATAGLAPTELCDRVSEQFQQLFQEAGISCTDFIRTTEARHRVAVQHFWGVLKSRGLLYKGVYEGWYCASDECFLPEAKVTQQPGPSGDSFPVSLESGHPVSWTKEENYIFRLSQFRKPLQRWLRGNPQAITPEPFHHVVLQWLDEELPDLSVSRRSSHLHWGIPVPGDDSQTIYVWLDALVNYLTVIGYPNAEFKSWWPATSHIIGKDILKFHAIYWPAFLLGAGMSPPQRICVHSHWTVCGQKMSKSLGNVVDPRTCLNRYTVDGFRYFLLRQGVPNWDCDYYDEKVVKLLNSELADALGGLLNRCTAKRINPSETYPAFCTTCFPSEPGLVGPSVRAQAEDYALVSAVATLPKQVADHYDNFRIYKALEAVSSCVRQTNGFVQRHAPWKLNWESPVDAPWLGTVLHVALECLRVFGTLLQPVTPSLADKLLSRLGVSASERSLGELYFLPRFYGHPCPFEGRRLGPETGLLFPRLDQSRTWLVKAHRT

SEQ ID NO: 9545 - protein, 370 aa, Homo sapiens
MKIKDAKKPSFPWFGMDIGGTLVKLSYFEPIDITAEEEQEEVESLKSIRKYLTSNVAYGSTGIRDVHLELKDLTLFGRRGNLHFIRFPTQDLPTFIQMGRDKNFSTLQTVLCATGGGAYKFEKDFRTIGNLHLHKLDELDCLVKGLLYIDSVSFNGQAECYYFANASEPERCQKMPFNLDDPYPLLVVNIGSGVSILAVHSKDNYKRVTGTSLGGGTFLGLCSLLTGCESFEEALEMASKGDSTQADKLVRDIYGGDYERFGLPGWAVASSFGNMIYKEKRESVSKEDLARATLVTITNNIGSVARMCAVNEKINRVVFVGNFLRVNTLSMKLLAYALDYWSKGQLKALFLEHEGYFGAVGALLGLPNFS

SEQ ID NO: 9546 - protein, 212 aa, Homo sapiens
  VARIANT (1)...(212): Xaa = Any Amino Acid
MKIKDAKKPSFPWFGMDIGGTLVKLSYFEPIDITAEEEQEEVESLKSIRKYLTSNVAYGSTGIRDVHLELKDLTLFGRRGNLHFIRFPTQDLPTFIQMGRDKNFSTLQTVLCATGGGAYKFEKDFRTIGNLHLHKLDELDCLVKGLLYIDSVSFNGQAECYYFANASEPERCQKMPFNLDDPYPLLVVNIGSGVSILAVHSKDNYKRVTGTX

SEQ ID NO: 9547 - protein, 370 aa, Homo sapiens; identical to SEQ ID NO: 9545

SEQ ID NO: 9548 - protein, 311 aa, Homo sapiens
MKIKDAKKPSFPWFGMDIGGTLVKLSYFEPIDITAEEEQEEVESLKSIRKYLTSNVAYGSTGIRDVHLELKDLTLFGRRGNLHFIRFPTQDLPTFIQMGRDKNFSTLQTVLCATGGGAYKFEKDFRTIGNLHLHKLDELDCLVKGLLYIDSVSFNGQAECYYFANASEPERCQKMPFNLDDPYPLLVVNIGSGVSILAVHSKDNYKRVTGTSFGNMIYKEKRESVSKEDLARATLVTITNNIGSVARMCAVNEKINRVVFVGNFLRVNTLSMKLLAYALDYWSKGQLKALFLEHEGYFGAVGALLGLPNFS

SEQ ID NO: 9549 - protein, 79 aa, Homo sapiens
MKHSFTSMILKTNTIKAMATKRWKWEPVKAKADWSRAKTIATVSWDAQGISLVGFLDGQRMIIFVYYESVLKKLPKALA

SEQ ID NO: 9550 - protein, 132 aa, Homo sapiens
MAIIKKSGNNRCWRGCGEIGTLLHCWWDRKLVQPLWKSVWRFLRDLELEIPFDPAIPLLGIYPKDYKSCCYKDTCTRMFIAALFTIAKTWNQPKCPTMIDWIKKMWHIYTMEYYAAIKNDEFMSFVGTWMKL

SEQ ID NO: 9551 - protein, 123 aa, Homo sapiens
MTHKNWSHSVFSVLDQALGTWDMAVSETQKDPSPTDYSLLISLEAASECISTPTWGSPYQWIRVGLAGSRNLFAVSLSLSLSLPFPLPLSLPTPSLSLFLSFFFFFFLMRWGRVVLSRLVSNS

SEQ ID NO: 9552 - protein, 76 aa, Homo sapiens
VKKYPYTWLCYNGEIYNHKKVQHYFEFEYQTKVDGEIILRLYDKGGIEQTICVLDGVFAFVLLDSANKKVFLGRDT

SEQ ID NO: 9553 - protein, 100 aa, Homo sapiens
MVESVRIGEYPNQTFLLCMQWQTVPLLFLWDMQTNKAPPSFYLSVQHYFEFEYQTKVDGEIILRLYDKGGIEQTICVLDGVFAFVLLDSANKKVFLGRDT

SEQ ID NO: 9554 - protein, 73 aa, Homo sapiens
VNAQGVYNVLVLLLLPKVQHYFEFEYQTKVDGEIILRLYDKGGIEQTICVLDGVFAFVLLDSANKKVFLGRDT

SEQ ID NO: 9555 - protein, 164 aa, Homo sapiens
MHKAGTNLRDRHQTAEAGLAPCLLPIGSLLVLSPLQQEPSNPAFVTLPHPTEVTTPSPQIPPEAHAADSQALALLLGVVPMQRNGHKQARTICQKPASPQACDGVRLSLHRAQPHYLLQSWSVSEPRTKPHPTVHKQHPLTGKLAGCGGSCLEQSFGGCSGRTA

SEQ ID NO: 9556 - protein, 69 aa, Homo sapiens
EAPAYHLILEGILLLWIIRLLFSKTYKLQERSDLTVKEKEELIEEWQPQPLVPPVPKDHPAVNYNIVSG

SEQ ID NO: 9557 - protein, 87 aa, Homo sapiens
MATAMEQWVLVEMVQLLYEAPAYHLILEGILILWIIRLLFSKTHKLQERSDLTVKEKEELIEEWQPEPLVPPVPKDHPALNHNIVSG

SEQ ID NO: 9558 - protein, 71 aa, Homo sapiens
  VARIANT (1)...(71): Xaa = Any Amino Acid
MRPWLRHLVLQALRNSRAFCGSCGQPAPLPVPQKIVATWEAISLGRQPVPEYFNFAHDVLDVWSRLEEMKX

SEQ ID NO: 9559 - protein, 97 aa, Homo sapiens
GQCPASWRRGECCRRIRTTRPFCFFNCYLEVVKAFIVLTPAYSSHDPEALTRELQEHVKRVTAPYKYPRKVAFVSELPKTVSGKIQRSKLRSQEWGK

SEQ ID NO: 9560 - protein, 165 aa, Homo sapiens
QTYCGLVPVKQNSGTSSSYHAPDVTQHAPYFKGTAVVNGEFKDLSLDDFEGKYLVLFFCVSHRAQPYPLDFTFVCPTEIVASSDKAKEFHDVNFEVVAVSVDSHFSRLAWINTPRKNGALGHINIAPLSDLTKRISRDFGVLLEGPGLALRGLFIIDPNGVIKYL

SEQ ID NO: 9561 - protein, 279 aa, Homo sapiens
MENSEKTEVVLLACGSFNPITNMHLRLFELAKDYMNGTGRYTVVKGIISPVGDAYKKKGLIPAYHRVIMAELATKNSKWVEVDTWESLQKEWKETLKVLRHHQEKLEASDCDHQQNSPTLERPGRKRKWTETQDSSQKKSLEPKTKAVPKVKLLCGADLLESFAVPNLWKSEDITQIVANYGLICVTRAGNDAQKFIYESDVLWKHRSNIHVVNEWIANDISSTKIRRALRRGQSIRYLVPDLVQEYIEKHNLYSSESEDRNAGVILAPLQRNTAEAKT

SEQ ID NO: 9562 - protein, 104 aa, Homo sapiens
MEMMLDKKQIQVIFLFKFKMGHKAAETTRSINNAFGPEIANKGTVQWWFKNFCKGDESREDEECCARPSKVGNDQLRAIIEADPLTTLEVAENSTSTILRSFSI

SEQ ID NO: 9563 - protein, 286 aa, Homo sapiens
MAARVLRARGAAWAGGLLQRAAPCSLLPRLRTWTSSSNRSREDSWLKSLFVRKVDPRKDAHSNLLAKKETSNLYKLQFHNVKPECLEAYNKICQEVLPKIHEDKHYPCTLVGTWNTWYGEQDQAVHLWRYEGGYPALTEVMNKLRENKEFLEFRKARSDMLLSRKNQLLLEFSFWNEPVPRSGPNIYELRSYQLRPGTMIEWGNYWARAIRFRQDGNEAVGGFFSQIGQLYMVHHLWAYRDLQTREDIRNAAWHKHGWEELVYYTVPLIQEMESRIMIPLKTSPLQ

SEQ ID NO: 9564 - protein, 561 aa, Homo sapiens
MCGIWALFGSDDCLSVQCLSAMKIAHRGPDAFRFENVNGYTNCCFGFHRLAVVDPLFGMQPIRVKKYPYLWLCYNGEIYNHKKMQQHFEFEYQTKVDGEIILHLYDKGGIEQTICMLDGVFAFVLLDTANKKVFLGRDTYGVRPLFKAMTEDGFLAVCSEAKGLVTLKHSATPFLKVEPFLPGHYEVLDLKPNGKVASVEMVKYHHCRDEPLHALYDNVEKLFPGFEIETVKNNLRILFNNAVKKRLMTDRRIGCLLSGGLDSSLVAATLLKQLKEAQVQYPLQTFAIGMEDSPDLLAARKVADHIGSEHYEVLFNSEEGIQALDEVIFSLETYDITTVRASVGMYLISKYIRKNTDSVVIFSGEGSDELTQGYIYFHKAPSPEKAEEESERLLRELYLFDVLRADRTTAAHGLELRVPFLDHRFSSYYLSLPPEMRIPKNGIEKHLLRETFEDSNLIPKEILWRPKEAFSDGITSVKNSWFKILQEYVEHQVDDAMMANAAQKFPFNTPKTKEGYYYRQVFERHYPGRADWLSHYWMPKWINATDPSARTLTHYKSAVKA

SEQ ID NO: 9565 - protein, 561 aa, Homo sapiens; identical to SEQ ID NO: 9564

SEQ ID NO: 9566 - protein, 561 aa, Homo sapiens; identical to SEQ ID NO: 9564

SEQ ID NO: 9567 - protein, 561 aa, Homo sapiens; identical to SEQ ID NO: 9564

SEQ ID NO: 9568 - protein, 1023 aa, Homo sapiens
MFHLRTCAAKLRPLTASQTVKTFSQNRPAAARTFQQIRCYSAPVAAEPFLSGTSSNYVEEMYCAWLENPKSVHKSWDIFFRNTNAGAPPGTAYQSPLPLSRGSLAAVAHAQSLVEAQPNVDKLVEDHLAVQSLIRAYQIRGHHVAQLDPLGILDADLDSSVPADIISSTDKLGFYGLDESDLDKVFHLPTTTFIGGQESALPLREIIRRLEMAYCQHIGVEFMFINDLEQCQWIRQKFETPGIMQFTNEEKRTLLARLVRSTRFEEFLQRKWSSEKRFGLEGCEVLIPALKTIIDKSSENGVDYVIMGMPHRGRLNVLANVIRKELEQIFCQFDSKLEAADEGSGDVKYHLGMYHRRINRVTDRNITLSLVANPSHLEAADPVVMGKTKAEQFYCGDTEGKKVMSILLHGDAAFAGQGIVYETFHLSDLPSYTTHGTVHVVVNNQIGFTTDPRMARSSPYPTDVARVVNAPIFHVNSDDPEAVMYVCKVAAEWRSTFHKDVVVDLVCYRRNGHNEMDEPMFTQPLMYKQIRKQKPVLQKYAELLVSQGVVNQPEYEEEISKYDKICEEAFARSKDEKILHIKHWLDSPWPGFFTLDGQPRSMSCPSTGLTEDILTHIGNVASSVPVENFTIHGGLSRILKTRGEMVKNRTVDWALAEYMAFGSLLKEGIHIRLSGQDVERGTFSHRHHVLHDQNVDKRTCIPMNHLWPNQAPYTVCNSSLSEYGVLGFELGFAMASPNALVLWEAQFGDFHNTAQCIIDQFICPGQAKWVRQNGIVLLLPHGMEGMGPEHSSARPERFLQMCNDDPDVLPDLKEANFDINQLYDCNWVVVNCSTPGNFFHVLRRQILLPFRKPLIIFTPKSLLRHPEARSSFDEMLPGTHFQRVIPEDGPAAQNPENVKRLLFCTGKVYYDLTRERKARDMVGQVAITRIEQLSPFPFDLLLKEVQKYPNAELAWCQEEHKNQGYYDYVKPRLRTTISRAKPVWYAGRDPAAAPATGNKKTHLTELQRLLDTAFDLDVFKNFS

SEQ ID NO: 9569 - protein, 427 aa, Homo sapiens
MFHLRTCAAKLRPLTASQTVKTFSQNRPAAARTFQQIRCYSAPVAAEPFLSGTSSNYVEEMYCAWLENPKSVHKSWDIFFRNTNAGAPPGTAYQSPLPLSRGSLAAVAHAQSLVEAQPNVDKLVEDHLAVQSLIRAYQIRGHHVAQLDPLGILDADLDSSVPADIISSTDKLGFYGLDESDLDKVFHLPTTTFIGGQESALPLREIIRRLEMAYCQHIGVEFMFINDLEQCQWIRQKFETPGIMQFTNEEKRTLLARLVRSTRFEEFLQRKWSSEKRFGLEGCEVLIPALKTIIDKSSENGVDYVIMGMPHRGRLNVLANVIRKELEQIFCQFDSKLEAADEGSGDVKYHLGMYHRRINRVTDRNITLSLVANPSHLEAADPVVMGKTKAEQFYCGDTEGKKVRPRERRARQIVKAPCSSMEFRSPT

SEQ ID NO: 9570 - protein, 162 aa, Homo sapiens
MSQMRRVAHHGGPRAVVKNFRTKMFHLRTCAAKLRPLTASQTVKTFSQNRPAAARTFQQIRCYSAPVAAEPFLSGTSSNYVEEMYCAWLENPKSVHKVRLAGLWVCLMLVCWPVPDWSPGKCVRPEESAGRQAAGAPYQPPYLYRTQHSPSRSHGPWIGVQQ

SEQ ID NO: 9571 - protein, 1023 aa, Homo sapiens; identical to SEQ ID NO: 9568

SEQ ID NO: 9572 - protein, 1023 aa, Homo sapiens; identical to SEQ ID NO: 9568

SEQ ID NO: 9573 - protein, 1023 aa, Homo sapiens; identical to SEQ ID NO: 9568

SEQ ID NO: 9574 - protein, 547 aa, Homo sapiens [sequence omitted]

SEQ ID NO: 9575 - protein, 547 aa, Homo sapiens
MEDSEALGFEHMGLDPRLLQAVTDLGWSRPTLIQEKAIPLALEGKDLLARARTGSGKTAAYAIPMLQLLLHRKATGPVVEQAVRGLVLVPTKELARQAQSMIQQLATYCARDVRVANVSAAEDSVSQRAVLMEKPDVVVGTPSRILSHLQQDSLKLRDSLELLVVDEADLLFSFGFEEELKSLLCHLPRIYQAFLMSATFNEDVQALKELILHNPVTLKLQESQLPGPDQLQQFQVVCETEEDKFLLLYALLKLSLIRGKSLLFVNTLERSYRLRLFLEQFSIPTCVLNGELPLRSRCHIISQFNQGFYDCVIATDAEVLGAPVKGKRRGRGPKGDKASDPEAGVARGIDFHHVSAVLNFDLPPTPEAYIHRAGRTARANNPGIVLTFVLPTEQFHLGKIEELLSGENRGPILLPYQFRMEEIEGFRYRCRDAMRSVTKQAIREARLKEIKEELLHSEKLKTYFEDNPRDLQLLRHDLPLHPAVVKPHLGHVPDYLVPPALRGLVRPHKKRKKLSSSCRKAKRAKSQNPLRSFKHKGKKFRPTAKPS

SEQ ID NO: 9576 - protein, 644 aa, Homo sapiens
MPSKAENLRPSEPAPQPPEGRTLQGQLPGAPPAQRAGSPPDAPGSESPALACSTPATPSGEDPPARAAPIAPRPPARPRLERALSLDDKGWRRRRFRGSQEDLEARNGTSPSRGSVQSEGPGAPAHSCSPPCLSTSLQEIPKSRGVLSSERGSPSSGGNPLSGVASSSPNLPHRDAAVAGSSPRLPSLLPPRPPPALSLDIASDSLRTANKVDSDLADYKLRAQPLLVRAHSSLGPGRPRSPLACDDCSLRSAKSSFSLLAPIRSKDVRSRSYLEGSLLASGALLGADELARYFPDRNVALFVATWNMQGQKELPPSLDEFLLPAEADYAQDLYVIGVQEGCSDRREWETRLQETLGPHYVLLSSAAHGVLYMSLFIRRDLIWFCSEVECSTVTTRIVSQIKTKGALGISFTFFGTSFLFITSHFTSGDGKVAERLLDYTRTVQALVLPRNVPDTNPYRSSAADVTTRFDEVFWFGDFNFRLSGGRTVVDALLCQGLVVDVPALLQHDQLIREMRKGSIFKGFQEPDIHFLPSYKFDIGKDTYDSTSKQRTPSYTDRVLYRSRHKGDICPVSYSSCPGIKTSDHRPVYGLFRVKVRPGRDNIPLAAGKFDRELYLLGIKRRISKEIQRQQALQSQNSSTICSVS

SEQ ID NO: 9577 - protein, 370 aa, Homo sapiens
MPSKAENLRPSEPAPQPPEGRTLQGQLPGAPPAQRAGSPPDAPGSESPALACSTPATPSGEDPPARAAPIAPRPPARPRLERALSLDDKGWRRRRFRGSQEDLEARNGTSPSRGSVQSEGPGAPAHSCSPPCLSTSLQEIPKSRGVLSSERGSPSSGGNPLSGVASSSPNLPHRDAAVAGSSPRLPSLLPPRPPPALSLDIASDSLRTANKVDSDLADYKLRAQPLLVRAHSSLGPGRPRSPLACDDCSLRSAKSSFSLLAPIRSKDVRSRSYLEGSLLASGALLGADELARYFPDRNVALFVATWNMQGQKELPPSLDEFLLPAEADYAQDLYVIGVQEGCSDRDLIWFCSGGRGWRGGRGWKVAASHR

SEQ ID NO: 9578 - protein, 354 aa, Homo sapiens
MLFNLRILLNNAAFRNGHNFMVRNFRCGQPLQNKVQLKGRDLLTLKNFTGEEIKYMLWLSADLKFRIKQKGEYLPLLQGKSLGMIFEKRSTRTRLSTETGFALLGGHPCFLTTQDIHLGVNESLTDTARVLSSMADAVLARVYKQSDLDTLAKEASIPIINGLSDLYHPIQILADYLTLQEHYSSLKGLTLSWIGDGNNILHSIMMSAAKFGMHLQAATPKGYEPDASVTKLAEQYAKENGTKLLLTNDPLEAAHGGNVLITDTWISMGQEEEKKKRLQAFQGYQVTMKTAKVAASDWTFLHCLPRKPEEVDDEVFYSPRSLVFPEAENRKWTIMAVMVSLLTDYSPQLQKPKF

SEQ ID NO: 9579 - protein, 354 aa, Homo sapiens; identical to SEQ ID NO: 9578

SEQ ID NO: 9580 - protein, 1161 aa, Homo sapiens
MWAMESGHLLWALLFMQSLWPQLTDGATRVYYLGIRDVQWNYAPKGRNVITNQPLDSDIVASSFLKSDKNRIGGTYKKTIYKEYKDDSYTDEVAQPAWLGFLGPVLQAEVGDVILIHLKNFATRPYTIHPHGVFYEKDSEGSLYPDGSSGPLKADDSVPPGGSHIYNWTIPEGHAPTDADPACLTWIYHSHVDAPRDIATGLIGPLITCKRGALDGNSPPQRQDVDHDFFLLFSVVDENLSWHLNENIATYCSDPASVDKEDETFQESNRMHAINGFVFGNLPELNMCAQKRVAWHLFGMGNEIDVHTAFFHGQMLTTRGHHTDVANIFPATFVTAEMVPWEPGTWLISCQVNSHFRDGMQALYKVKSCSMAPPVDLLTGKVRQYFIEAHEIQWDYGPMGHDGSTGKNLREPGSISDKFFQKSSSRIGGTYWKVRYEAFQDETFQEKMHLEEDRHLGILGPVIRAEVGDTIQVVFYNRASQPFSMQPHGVFYEKDYEGTVYNDGSSYPGLVAKPFEKVTYRWTVPPHAGPTAQDPACLTWMYFSAADPIRDTNSGLVGPLLVCRAGALGADGKQKGVDKEFFLLFTVLDENKSWYSNANQAAAMLDFRLLSEDIEGFQDSNRMHAINGFLFSNLPRLDMCKGDTVAWHLLGLGTETDVHGVMFQGNTVQLQGMRKGAAMLFPHTFVMAIMQPDNLGTFEIYCQAGSHREAGMRAIYNVSQCPGHQATPRQRYQAARIYYIMAEEVEWDYCPDRSWEREWHNQSEKDSYGYIFLSNKDGLLGSRYKKAVFREYTDGTFRIPRPRTGPEEHLGILGPLIKGEVGDILTVVFKNNASRPYSVHAHGVLESTTVWPLAAEPGEVVTYQWNIPERSGPGPNDSACVSWIYYSAVDPIKDMYSGLVGPLAICQKGILEPHGGRSDMDREFALLFLIFDENKSWYLEENVATHGSQDPGSINLQDETFLESNKMHAINGKLYANLRGLTMYQGERVAWYMLAMGQDVDLHTIHFHAESFLYRNGENYRADVVDLFPGTFEVVEMVASNPGTWLMHCHVTDHVHAGMETLFTVFSRTEHLSPLTVITKETEKAVPPRDIEEGNVKMLGMQIPIKNVEMLASVLVAISVTLLLVVLALGGVVWYQHRQRKLRRNRRSILDDSFKLLSFKQ

SEQ ID NO: 9581 - protein, 891 aa, Homo sapiens
MHAINGFVFGNLPELNMCAQKRVAWHLFGMGNEIDVHTAFFHGQMLTTRGHHTDVANIFPATFVTAEMVPWEPGTWLISCQVNSHFRDGMQALYKVKSCSMAPPVDLLTGKVRQYFIEAHEIQWDYGPMGHDGSTGKNLREPGSISDKFFQKSSSRIGGTYWKVRYEAFQDETFQEKMHLEEDRHLGILGPVIRAEVGDTIQVVFYNRASQPFSMQPHGVFYEKDYEGTVYNDGSSYPGLVAKPFEKVTYRWTVPPHAGPTAQDPACLTWMYFSAADPIRDTNSGLVGPLLVCRAGALGADGKQKGVDKEFFLLFTVLDENKSWYSNANQAAAMLDFRLLSEDIEGFQDSNRMHAINGFLFSNLPRLDMCKGDTVAWHLLGLGTETDVHGVMFQGNTVQLQGMRKGAAMLFPHTFVMAIMQPDNLGTFEIYCQAGSHREAGMRAIYNVSQCPGHQATPRQRYQAARIYYIMAEEVEWDYCPDRSWEREWHNQSEKDSYGYIFLSNKDGLLGSRYKKAVFREYTDGTFRIPRPRTGPEEHLGILGPLIKGEVGDILTVVFKNNASRPYSVHAHGVLESTTVWPLAAEPGEVVTYQWNIPERSGPGPNDSACVSWIYYSAVDPIKDMYSGLVGPLAICQKGILEPHGGRSDMDREFALLFLIFDENKSWYLEENVATHGSQDPGSINLQDETFLESNKMHAINGKLYANLRGLTMYQGERVAWYMLAMGQDVDLHTIHFHAESFLYRNGENYRADVVDLFPGTFEVVEMVASNPGTWLMHCHVTDHVHAGMETLFTVFSRTEHLSPLTVITKETEKAVPPRDIEEGNVKMLGMQIPIKNVEMLASVLVAISVTLLLVVLALGGVVWYQHRQRKLRRNRRSILDDSFKLLSFKQ

SEQ ID NO: 9582 - protein, 891 aa, Homo sapiens; identical to SEQ ID NO: 9581

SEQ ID NO: 9583 - protein, 154 aa, Homo sapiens
MSSSPVKRQRMESALDQLKQFTTVVADTGDFHAIDEYKPQDATTNPSLILAAAQMPAYQELVEEAIAYGRKLGGSQEDQIKNAIDKLFVLFGAEILKKIPGRVSTEVDARLSFDKDAMVARARRLIELYKEAGISKDRILIKLSSTWEGIQAGK

SEQ ID NO: 9584 - protein, 525 aa, Homo sapiens
MAAPEPARAAPPPPPPPPPPPGADRVVKAVPFPPTHRLTSEEVFDLDGIPRVDVLKNHLVKEGRVDEEIALRIINEGAAILRREKTMIEVEAPITVCGDIHGQFFDLMKLFEVGGSPANTRYLFLGDYVDRGYFSIECVLYLWVLKILYPSTLFLLRGNHECRHLTEYFTFKQECKIKYSERVYEACMEAFDSLPLAALLNQQFLCVHGGLSPEIHTLDDIRRLDRFKEPPAFGPMCDLLWSDPSEDFGNEKSQEHFSHNTVRGCSYFYNYPAVCEFLQNNNLLSIIRAHEAQDAGYRMYRKSQTTGFPSLITIFSAPNYLDVYNNKAAVLKYENNVMNIRQFNCSPHPYWLPNFMDVFTWSLPFVGEKVTEMLVNVLSICSDDELMTEGEDQFDVGSAAARKEIIRNKIRAIGKMARVFSVLREESESVLTLKGLTPTGMLPSGVLAGGRQTLQSATVEAIEAEKAIRGFSPPHRICSFEEAKGLDRINERMPPRKDAVQQDGFNSLNTAHATENHGTGNHTAQ

SEQ ID NO: 9585 - protein, 524 aa, Homo sapiens
MAAPEPARAAPPPPPPPPPPPGADRVVKAVPFPPTHRLTSEEVFDLDGIPRVDVLKNHLVKEGRVDEEIALRIINEGAAILRREKTMIEVEAPITVCGDIHGQFFDLMKLFEVGGSPANTRYLFLGDYVDRGYFSIECVLYLWVLKILYPSTLFLLRGNHECRHLTEYFTFKQECKIKYSERVYEACMEAFDSLPLAALLNQQFLCVHGGLSPEIHTLDDIRRLDRFKEPPAFGPMCDLLWSDPSEDFGNEKSQEHFSHNTVRGCSYFYNYPAVCEFLQNNNLLSIIRAHEAQDAGYRMYRKSQTTGFPSLITIFSAPNYLDVYNNKAAVLKYENNVMNIRQFNCSPHPYWLPNFMDVFTWSLPFVGEKVTEMLVNVLSICSDDELMTEGEDQFDGSAAARKEIIRNKIRAIGKMARVFSVLREESESVLTLKGLTPTGMLPSGVLAGGRQTLQSATVEAIEAEKAIRGFSPPHRICSFEEAKGLDRINERMPPRKDAVQQDGFNSLNTAHATENHGTGNHTAQ

SEQ ID NO: 9586 - protein, 484 aa, Homo sapiens
MELGPEPPHRRRLLFACSPPPASQPVVKALFGASAAGGLSPVTNLTVTMDQLQGLGSDYEQPLEVKNNSNLQRMGSSESTDSGFCLDSPGPLDSKENLENPMRRIHSLPQKLLGCSPALKRSHSDSLDHDIFQLIDPDENKENLSSNERDSSEPGNFIPLFTPQSPVTATLSDEDDGFVDLLDGENLKNEEETPSCMASLWTAPLVMRTTNLDNRCKLFDSPSLCSSSTRSVLKRPERSQEESPPGSTKRRKSMSGASPKESTNPEKAHETLHQSLSLASSPKGTIENILDNDPRDLIGDFSKGYLFHTVAGKHQDLKYISPEIMASVLNGKFANLIKEFVIIDCRYPYEYEGGHIKGAVNLHMEEEVEDFLLKKPIVPTDGKRVIVVFHCEFSSERGPRMCRYVRERDRLGNEYPKLHYPELYVLKGGYKEFFMKCQSYCEPPSYRPMHHEDFKEDLKKFRTKSRTWAGEKSKREMYSRLKKL

SEQ ID NO: 9587 - protein, 524 aa, Homo sapiens
MELGPEPPHRRRLLFACSPPPASQPVVKALFGASAAGGLSPVTNLTVTMDQLQGLGSDYEQPLEVKNNSNLQRMGSSESTDSGFCLDSPGPLDSKENLENPMRRIHSLPQKLLGCSPALKRSHSDSLDHDIFQLIDPDENKENEAFEFKKPVRPVSRGCLHSHGLQEGKDLFTQRQNSAPARMLSSNERDSSEPGNFIPLFTPQSPVTATLSDEDDGFVDLLDGENLKNEEETPSCMASLWTAPLVMRTTNLDNRCKLFDSPSLCSSSTRSVLKRPERSQEESPPGSTKRRKSMSGASPKESTNPEKAHETLHQSLSLASSPKGTIENILDNDPRDLIGDFSKGYLFHTVAGKHQDLKYISPEIMASVLNGKFANLIKEFVIIDCRYPYEYEGGHIKGAVNLHMEEEVEDFLLKKPIVPTDGKRVIVVFHCEFSSERGPRMCRYVRERDRLGNEYPKLHYPELYVLKGGYKEFFMKCQSYCEPPSYRPMHHEDFKEDLKKFRTKSRTWAGEKSKREMYSRLKKL

SEQ ID NO: 9588 - protein, 524 aa, Homo sapiens; identical to SEQ ID NO: 9587

SEQ ID NO: 9589 - protein, 870 aa, Homo sapiens
MDSTKEKCDSYKDDLLLRMGLNDNKAGMEGLDKEKINKIIMEATKGSRFYGNELKKEKQVNQRIENMMQQKAQITSQQLRKAQLQVDRFAMELEQSRNLSNTIVHIDMDAFYAAVEMRDNPELKDKPIAVGSMSMLSTSNYHARRFGVRAAMPGFIAKRLCPQLIIVPPNFDKYRAVSKEVKEILADYDPNFMAMSLDEAYLNITKHLEERQNWPEDKRRYFIKMGSSVENDNPGKEVNKLSEHERSISPLLFEESPSDVQPPGDPFQVNFEEQNNPQILQNSVVFGTSAQEVVKEIRFRIEQKTTLTASAGIAPNTMLAKVCSDKNKPNGQYQILPNRQAVMDFIKDLPIRKVSGIGKVTEKMLKALGIITCTELYQQRALLSLLFSETSWHYFLHISLGLGSTHLTRDGERKSMSVERTFSEINKAEEQYSLCQELCSELAQDLQKERLKGRTVTIKLKNVNFEVKTRASTVSSVVSTAEEIFAIAKELLKTEIDADFPHPLRLRLMGVRISSFPNEEDRKHQQRSIIGFLQAGNQALSATECTLEKTDKDKFVKPLEMSHKKSFFDKKRSERKWSHQDTFKCEAVNKQSFQTSQPFQVLKKKMNENLEISENSDDCQILTCPVCFRAQGCISLEALNKHVDECLDGPSISENFKMFSCSHVSATKVNKKENVPASSLCEKQDYEAHPKIKEISSVDCIALVDTIDNSSKAESIDALSNKHSKEECSSLPSKSFNIEHCHQNSSSTVSLENEDVGSFRQEYRQPYLCEVKTGQALVCPVCNVEQKTSDLTLFNVHVDVCLNKSFIQELRKDKFNPVNQPKESSRSTGSSSGVQKAVTRTKRPGLMTKYSTSKKIKPNNPKHTLDIFFK

SEQ ID NO: 9590 - protein, 870 aa, Homo sapiens; identical to SEQ ID NO: 9589

SEQ ID NO: 9591 - protein, 870 aa, Homo sapiens; identical to SEQ ID NO: 9589

SEQ ID NO: 9592 - protein, 542 aa, Homo sapiens
MSPCPEEAAMRREVVKRIETVVKDLWPTADVQIFGSFSTGLYLPTSDIDLVVFGKWERPPLQLLEQALRKHNVAEPCSIKVLDKATVPIIKLTDQETEVKVDISFNMETGVRAAEFIKNYMKKYSLLPYLILVLKQFLLQRDLNEVFTGGISSYSLILMAISFLQLHPRIDARRADENLGMLLVEFFELYGRNFNYLKTGIRIKEGGAYIAKEEIMKAMTSGYRPSMLCIEDPLLPGNDVGRSSYGAMQVKQVFDYAYIVLSHAVSPLARSYPNRDAESTLGRIIKVTQEVIDYRRWIKEKWGSKAHPSPGMDSRIKIKERIATCNGEQTQNREPESPYGQRLTLSLSSPQLLSSGSSASSVSSLSGSDVDSDTPPCTTPSVYQFSLQAPAPLMAGLPTALPMPSGKPQPTTSRTLIMTTNNQTRFTIPPPTLGVAPVPCRQAGVEGTASLKAVHHMSSPAIPSASPNPLSSPHLYHKQHNGMKLSMKGSHGHTQGGGYSSVGSGGVRPPVGNRGHHQYNRTGWRRKKHTHTRDSLPVSLSR

SEQ ID NO: 9593 - protein, 542 aa, Homo sapiens; identical to SEQ ID NO: 9592

SEQ ID NO: 9594 - protein, 161 aa, Homo sapiens
MKELQDIARLSDRFISVELVDESLFDWNVKLHQVDKDSVLWQDMKETNTEFILLNLTFPDNFPFSPPFMRVLSPRLENGYVLDGGAICMELLTPRGWSSAYTVEAVMRQFAASLVKGQGRICRKAGKSKKSFSRKEAEATFKSLVKTHEKYGWVTPPVSDG

SEQ ID NO: 9595 - protein, 161 aa, Homo sapiens; identical to SEQ ID NO: 9594

SEQ ID NO: 9596 - protein, 338 aa, Homo sapiens
MTTVLTYTFKKCTSDALLTASEWSLRFSIRPLSYSSQATLTGLLHQPSVPKEVVDYIIFGTVIQEVKTSHVAGEAALGTAFSDKTPAHTVTMACISANQAMTTGVGLIASGQCDVIMAGGVELMFHVPIRQSRKMRKLMLDLTPELPEVSEFSTSETTGHSADQLAVSRLEQDEYALRCPSLAKKAQDEGLLSDVVPFKVPGKDTVTKHNGIRPSSLEQMAKLKPAFIKPYGTATAANSSFLTDGASEAEEKALAMGYKPKECLRDFMYFAQNYMGRKSKVTLLPSEKFNNWGGSLSLEHPFGATGCRLVVAAANRLRKEGGQYALAAACAAGGQGHG

SEQ ID NO: 9597 - protein, 2490 aa, Homo sapiens
MINRPRWVVPVLPKGELEVLLEAAIDLSKKGLDVKSEACQRFFRDGLTISFTKILTDEAVSGWKFEIHRCIINNTHRLVELCVAKLSQDWFPLLELLAMALNPHCKFHIYNGTRPCESVSSSVQLPEDELFARSPDPRSPKGWLVDLLNKFGTLNGFQILHDRFINGSALNVQIIAALIKPFGQCYEFLTLHTVKKYFLPIIEMVPQFLENLTDEELKKEAKNEAKNDALSMIIKSLKNLASRVPGQEETVKNLEIFRLKMILRLLQISSFNGKMNALNEVNKVISSVSYYTHRHGNPEEEEWLTAERMAEWIQQNNILSIVLRDSLHQPQYVEKLEKILRFVIKEKALTLQDLDNIWAAQAGKHEAIVKNVHDLLAKLAWDFSPEQLDHLFDCFKASWTNASKKQREKLLELIRRLAEDDKDGVMAHKVLNLLWNLAHSDDVPVDIMDLALSAHIKILDYSCSQDRDTQKIQWIDRFIEELRTNDKWVIPALKQIREICSLFGEAPQNLSQTQRSPHVFYRHDLINQLQHNHALVTLVAENLATYMESMRLYARDHEDYDPQTVRLGSRYSHVQEVQERLNFLRFLLKDGQLWLCAPQAKQIWKCLAENAVYLCDREACFKWYSKLMGDEPDLDPDINKDFFESNVLQLDPSLLTENGMKCFERFFKAVNCREGKLVAKRRAYMMDDLELIGLDYLWRVVIQSNDDIASRAIDLLKEIYTNLGPRLQVNQVVIHEDFIQSCFDRLKASYDTLCVLDGDKDSVNCARQEAVRMVRVLTVLREYINECDSDYHEERTILPMSRAFRGKHLSFVVRFPNQGRQVDDLEVWSHTNDTIGSVRRCILNRIKANVAHTKIELFVGGELIDPADDRKLIGQLNLKDKSLITAKLTQISSNMPSSPDSSSDSSTGSPGNHGNHYSDGPNPEVESCLPGVIMSLHPRYISFLWQVADLGSSLNMPPLRDGARVLMKLMPPDSTTIEKLRAICLDHAKLGESSLSPSLDSLFFGPSASQVLYLTEVVYALLMPAGAPLADDSSDFQFHFLKSGGLPLVLSMLTRNNFLPNADMETRRGAYLNALKIAKLLLTAIGYGHVRAVAEACQPGVEGVNPMTQINQVTHDQAVVLQSALQSIPNPSSECMLRNVSVRLAQQISDEASRYMPDICVIRAIQKIIWASGCGSLQLVFSPNEEITKIYEKTNAGNEPDLEDEQVCCEALEVMTLCFALIPTALDALSKEKAWQTFIIDLLLHCHSKTVRQVAQEQFFLMCTRCCMGHRPLLFFITLLFTVLGSTARERAKHSGDYFTLLRHLLNYAYNSNINVPNAEVLLNNEIDWLKRIRDDVKRTGETGIEETILEGHLGVTKELLAFQTSEKKFHIGCEKGGANLIKELIDDFIFPASNVYLQYMRNGELPAEQAIPVCGSPPTINAGFELLVALAVGCVRNLKQIVDSLTEMYYIGTAITTCEALTEWEYLPPVGPRPPKGFVGLKNAGATCYMNSVIQQLYMIPSIRNGILAIEGTGSDVDDDMSGDEKQDNESNVDPRDDVFGYPQQFEDKPALSKTEDRKEYNIGVLRHLQVIFGHLAASRLQYYVPRGFWKQFRLWGEPVNLREQHDALEFFNSLVDSLDEALKALGHPAMLSKVLGGSFADQKICQGCPHRYECEESFTTLNVDIRNHQNLLDSLEQYVKGDLLEGANAYHCEKCNKKETTFVGTTVNIKQVDTVKRLLIKKLPPVLAIQLKRFDYDWERECAIKFNDYFEFPRELDMEPYTVAGVAKLEGDNVNPESQLIQQSEQSESETAGSTKYRLVGVLVHSGQASGGHYYSYIIQRNGGDGERNRWYKFDDGDVTECKMDDDEEMKNQCFGGEYMGEVFDHMMKRMSYRRQKRWWNAYILFYERMDTIDQDDELIRYISELAITTRPHQIIMPSAIERSVRKQNVQFMHNRMQYSMEYFQFMKKLLTCNGVYLNPPPGQDHLLPEAEEITMISIQLAARFLFTTGFHTKKVVRGSASDWYDALCILLRHSKNVRFWFAHNVLFNVSNRFSEYLLECPSAEVRGAFAKLIVFIAHFSLQDGPCPSPFASPGPSSQAYDNLSLSDHLLRAVLNLLRREVSEHGRHLQQYFNLFVMYANLGVAEKTQLLKLSVPATFMLVSLDEGPGPPIKYQYAELGKLYSVVSQLIRCCNVSSRMQSSINGNPPLPNPFGDPNLSQPIMPIQQNVADILFVRTSYVKKIIEDCSNSEETVKLLRFCCWENPQFSSTVLSELLWQVAYSYTYELRPYLDLLLQILLIEDSWQTHRIHNALKGIPDDRDGLFDTIQRSKNHYQKRAYQCIKCMVALFSNCPVAYQILQGNGDLKRKWTWAVEWLGDELERRPYTGNPQYTYNNWSPPVQSNETSNGYFLERSHSARMTLAKACELCPEEEPDDQDAPDEHESPPPEDAPLYPHSPGSQYQQNNHVHGQPYTGPAAHHMNNPQRTGQRAQENYEGSEEVSPPQTKDQ

SEQ ID NO: 9598 - protein, 2379 aa, Homo sapiens
MALNPHCKFHIYNGTRPCESVSSSVQLPEDELFARSPDPRSPKGWLVDLLNKFGTLNGFQILHDRFINGSALNVQIIAALIKPFGQCYEFLTLHTVKKYFLPIIEMVPQFLENLTDEELKKEAKNEAKNDALSMIIKSLKNLASRVPGQEETVKNLEIFRLKMILRLLQISSFNGKMNALNEVNKVISSVSYYTHRHGNPEEEEWLTAERMAEWIQQNNILSIVLRDSLHQPQYVEKLEKILRFVIKEKALTLQDLDNIWAAQAGKHEAIVKNVHDLLAKLAWDFSPEQLDHLFDCFKASWTNASKKQREKLLELIRRLAEDDKDGVMAHKVLNLLWNLAHSDDVPVDIMDLALSAHIKILDYSCSQDRDTQKIQWIDRFIEELRTNDKWVIPALKQIREICSLFGEAPQNLSQTQRSPHVFYRHDLINQLQHNHALVTLVAENLATYMESMRLYARDHEDYDPQTVRLGSRYSHVQEVQERLNFLRFLLKDGQLWLCAPQAKQIWKCLAENAVYLCDREACFKWYSKLMGDEPDLDPDINKDFFESNVLQLDPSLLTENGMKCFERFFKAVNCREGKLVAKRRAYMMDDLELIGLDYLWRVVIQSNDDIASRAIDLLKEIYTNLGPRLQVNQVVIHEDFIQSCFDRLKASYDTLCVLDGDKDSVNCARQEAVRMVRVLTVLREYINECDSDYHEERTILPMSRAFRGKHLSFVVRFPNQGRQVDDLEVWSHTNDTIGSVRRCILNRIKANVAHTKIELFVGGELIDPADDRKLIGQLNLKDKSLITAKLTQISSNMPSSPDSSSDSSTGSPGNHGNHYSDGPNPEVESCLPGVIMSLHPRYISFLWQVADLGSSLNMPPLRDGARVLMKLMPPDSTTIEKLRAICLDHAKLGESSLSPSLDSLFFGPSASQVLYLTEVVYALLMPAGAPLADDSSDFQFHFLKSGGLPLVLSMLTRNNFLPNADMETRRGAYLNALKIAKLLLTAIGYGHVRAVAEACQPGVEGVNPMTQINQVTHDQAVVLQSALQSIPNPSSECMLRNVSVRLAQQISDEASRYMPDICVIRAIQKIIWASGCGSLQLVFSPNEEITKIYEKTNAGNEPDLEDEQVCCEALEVMTLCFALIPTALDALSKEKAWQTFIIDLLLHCHSKTVRQVAQEQFFLMCTRCCMGHRPLLFFITLLFTVLGSTARERAKHSGDYFTLLRHLLNYAYNSNINVPNAEVLLNNEIDWLKRIRDDVKRTGETGIEETILEGHLGVTKELLAFQTSEKKFHIGCEKGGANLIKELIDDFIFPASNVYLQYMRNGELPAEQAIPVCGSPPTINAGFELLVALAVGCVRNLKQIVDSLTEMYYIGTAITTCEALTEWEYLPPVGPRPPKGFVGLKNAGATCYMNSVIQQLYMIPSIRNGILAIEGTGSDVDDDMSGDEKQDNESNVDPRDDVFGYPQQFEDKPALSKTEDRKEYNIGVLRHLQVIFGHLAASRLQYYVPRGFWKQFRLWGEPVNLREQHDALEFFNSLVDSLDEALKALGHPAMLSKVLGGSFADQKICQGCPHRYECEESFTTLNVDIRNHQNLLDSLEQYVKGDLLEGANAYHCEKCNKKVDTVKRLLIKKLPPVLAIQLKRFDYDWERECAIKFNDYFEFPRELDMEPYTVAGVAKLEGDNVNPESQLIQQSEQSESETAGSTKYRLVGVLVHSGQASGGHYYSYIIQRNGGDGERNRWYKFDDGDVTECKMDDDEEMKNQCFGGEYMGEVFDHMMKRMSYRRQKRWWNAYILFYERMDTIDQDDELIRYISELAITTRPHQIIMPSAIERSVRKQNVQFMHNRMQYSMEYFQFMKKLLTCNGVYLNPPPGQDHLLPEAEEITMISIQLAARFLFTTGFHTKKVVRGSASDWYDALCILLRHSKNVRFWFAHNVLFNVSNRFSEYLLECPSAEVRGAFAKLIVFIAHFSLQDGPCPSPFASPGPSSQAYDNLSLSDHLLRAVLNLLRREVSEHGRHLQQYFNLFVMYANLGVAEKTQLLKLSVPATFMLVSLDEGPGPPIKYQYAELGKLYSVVSQLIRCCNVSSRMQSSINGNPPLPNPFGDPNLSQPIMPIQQNVADILFVRTSYVKKIIEDCSNSEETVKLLRFCCWENPQFSSTVLSELLWQVAYSYTYELRPYLDLLLQILLIEDSWQTHRIHNALKGIPDDRDGLFDTIQRSKNHYQKRAYQCIKCMVALFSNCPVAYQILQGNGDLKRKWTWAVEWLGDELERRPYTGNPQYTYNNWSPPVQSNETSNGYFLERSHSARMTLAKACELCPEEEPDDQDAPDEHESPPPEDAPLYPHSPGSQYQQNNHVHGQPYTGPAAHHMNNPQRTGQRAQENYEGSEEVSPPQTKDQ

SEQ ID NO: 9599 - protein, 2477 aa, Homo sapiens
MINRPRWVVPVLPKGELEVLLEAAIDLSKKGLDVKSEACQRFFRDGLTISFTKILTDEAVSGWKFEIHRCIINNTHRLVELCVAKLSQDWFPLLELLAMALNPHCKFHIYNGTRPCESVSSSVQLPEDELFARSPDPRSPKGWLVDLLNKFGTLNGFQILHDRFINGSALNVQIIAALIKPFGQCYEFLTLHTVKKYFLPIIEMVPQFLENLTDEELKKEAKNEAKNDALSMIIKSLKNLASRVPGQEETVKNLEIFRLKMILRLLQISSFNGKMNALNEVNKVISSVSYYTHRHGNPEEEEWLTAERMAEWIQQNNILSIVLRDSLHQPQYVEKLEKILRFVIKEKALTLQDLDNIWAAQAGKHEAIVKNVHDLLAKLAWDFSPEQLDHLFDCFKASWTNASKKQREKLLELIRRLAEDDKDGVMAHKVLNLLWNLAHSDDVPVDIMDLALSAHIKILDYSCSQDRDTQKIQWIDRFIEELRTNDKWVIPALKQIREICSLFGEAPQNLSQTQRSPHVFYRHDLINQLQHNHALVTLVAENLATYMESMRLYARDHEDYDPQTVRLGSRYSHVQEVQERLNFLRFLLKDGQLWLCAPQAKQIWKCLAENAVYLCDREACFKWYSKLMGDEPDLDPDINKDFFESNVLQLDPSLLTENGMKCFERFFKAVNCREGKLVAKRRAYMMDDLELIGLDYLWRVVIQSNDDIASRAIDLLKEIYTNLGPRLQVNQVVIHEDFIQSCFDRLKASYDTLCVLDGDKDSVNCARQEAVRMVRVLTVLREYINECDSDYHEERTILPMSRAFRGKHLSFVVRFPNQGRQVDDLEVWSHTNDTIGSVRRCILNRIKANVAHTKIELFVGGELIDPADDRKLIGQLNLKDKSLITAKLTQISSNMPSSPDSSSDSSTGSPGNHGNHYSDGPNPEVESCLPGVIMSLHPRYISFLWQVADLGSSLNMPPLRDGARVLMKLMPPDSTTIEKLRAICLDHAKLGESSLSPSLDSLFFGPSASQVLYLTEVVYALLMPAGAPLADDSSDFQFHFLKSGGLPLVLSMLTRNNFLPNADMETRRGAYLNALKIAKLLLTAIGYGHVRAVAEACQPGVEGVNPMTQINQVTHDQAVVLQSALQSIPNPSSECMLRNVSVRLAQQISDEASRYMPDICVIRAIQKIIWASGCGSLQLVFSPNEEITKIYEKTNAGNEPDLEDEQVCCEALEVMTLCFALIPTALDALSKEKAWQTFIIDLLLHCHSKTVRQVAQEQFFLMCTRCCMGHRPLLFFITLLFTVLGSTARERAKHSGDYFTLLRHLLNYAYNSNINVPNAEVLLNNEIDWLKRIRDDVKRTGETGIEETILEGHLGVTKELLAFQTSEKKFHIGCEKGGANLIKELIDDFIFPASNVYLQYMRNGELPAEQAIPVCGSPPTINAGFELLVALAVGCVRNLKQIVDSLTEMYYIGTAITTCEALTEWEYLPPVGPRPPKGFVGLKNAGATCYMNSVIQQLYMIPSIRNGILAIEGTGSDVDDDMSGDEKQDNESNVDPRDDVFGYPQQFEDKPALSKTEDRKEYNIGVLRHLQVIFGHLAASRLQYYVPRGFWKQFRLWGEPVNLREQHDALEFFNSLVDSLDEALKALGHPAMLSKVLGGSFADQKICQGCPHRYECEESFTTLNVDIRNHQNLLDSLEQYVKGDLLEGANAYHCEKCNKKVDTVKRLLIKKLPPVLAIQLKRFDYDWERECAIKFNDYFEFPRELDMEPYTVAGVAKLEGDNVNPESQLIQQSEQSESETAGSTKYRLVGVLVHSGQASGGHYYSYIIQRNGGDGERNRWYKFDDGDVTECKMDDDEEMKNQCFGGEYMGEVFDHMMKRMSYRRQKRWWNAYILFYERMDTIDQDDELIRYISELAITTRPHQIIMPSAIERSVRKQNVQFMHNRMQYSMEYFQFMKKLLTCNGVYLNPPPGQDHLLPEAEEITMISIQLAARFLFTTGFHTKKVVRGSASDWYDALCILLRHSKNVRFWFAHNVLFNVSNRFSEYLLECPSAEVRGAFAKLIVFIAHFSLQDGPCPSPFASPGPSSQAYDNLSLSDHLLRAVLNLLRREVSEHGRHLQQYFNLFVMYANLGVAEKTQLLKLSVPATFMLVSLDEGPGPPIKYQYAELGKLYSVVSQLIRCCNVSSRMQSSINGNPPLPNPFGDPNLSQPIMPIQQNVADILFVRTSYVKKIIEDCSNSEETVKLLRFCCWENPQFSSTVLSELLWQVAYSYTYELRPYLDLLLQILLIEDSWQTHRIHNALKGIPDDRDGLFDTIQRSKNHYQKRAYQCIKCMVALFSNCPVAYQILQGNGDLKRKWTWAVEWLGDELERRPYTGNPQYTYNNWSPPVQSNETSNGYFLERSHSARMTLAKACELCPEEEPDDQDAPDEHESPPPEDAPLYPHSPGSQYQQNNHVHGQPYTGPAAHHMNNPQRTGQRAQENYEGSEEVSPPQTKDQ

SEQ ID NO: 9600 - protein, 2493 aa, Homo sapiens
MINRPRWVVPVLPKGELEVLLEAAIDLSKKGLDVKSEACQRFFRDGLTISFTKILTDEAVSGWKFEIHRCIINNTHRLVELCVAKLSQDWFPLLELLAMALNPHCKFHIYNGTRPCESVSSSVQLPEDELFARSPDPRSPKGWLVDLLNKFGTLNGFQILHDRFINGSALNVQIIAALIKPFGQCYEFLTLHTVKKYFLPIIEMVPQFLENLTDEELKKEAKNEAKNDALSMIIKSLKNLASRVPGQEETVKNLEIFRLKMILRLLQISSFNGKMNALNEVNKVISSVSYYTHRHGNPEEEEWLTAERMAEWIQQNNILSIVLRDSLHQPQYVEKLEKILRFVIKEKALTLQDLDNIWAAQAGKHEAIVKNVHDLLAKLAWDFSPEQLDHLFDCFKASWTNASKKQREKLLELIRRLAEDDKDGVMAHKVLNLLWNLAHSDDVPVDIMDLALSAHIKILDYSCSQDRDTQKIQWIDRFIEELRTNDKWVIPALKQIREICSLFGEAPQNLSQTQRSPHVFYRHDLINQLQHNHALVTLVAENLATYMESMRLYARDHEDYDPQTVRLGSRYSHVQEVQERLNFLRFLLKDGQLWLCAPQAKQIWKCLAENAVYLCDREACFKWYSKLMGDEPDLDPDINKDFFESNVLQLDPSLLTENGMKCFERFFKAVNCREGKLVAKRRAYMMDDLELIGLDYLWRVVIQSNDDIASRAIDLLKEIYTNLGPRLQVNQVVIHEDFIQSCFDRLKASYDTLCVLDGDKDSVNCARQEAVRMVRVLTVLREYINECDSDYHEERTILPMSRAFRGKHLSFVVRFPNQGRQVDDLEVWSHTNDTIGSVRRCILNRIKANVAHTKIELFVGGELIDPADDRKLIGQLNLKDKSLITAKLTQISSNMPSSPDSSSDSSTGSPGNHGNHYSDGPNPEVESCLPGVIMSLHPRYISFLWQVADLGSSLNMPPLRDGARVLMKLMPPDSTTIEKLRAICLDHAKLGESSLSPSLDSLFFGPSASQVLYLTEVVYALLMPAGAPLADDSSDFQFHFLKSGGLPLVLSMLTRNNFLPNADMETRRGAYLNALKIAKLLLTAIGYGHVRAVAEACQPGVEGVNPMTQINQVTHDQAVVLQSALQSIPNPSSECMLRNVSVRLAQQISDEASRYMPDICVIRAIQKIIWASGCGSLQLVFSPNEEITKIYEKTNAGNEPDLEDEQVCCEALEVMTLCFALIPTALDALSKEKAWQTFIIDLLLHCHSKTVRQVAQEQFFLMCTRCCMGHRPLLFFITLLFTVLGSTARERAKHSGDYFTLLRHLLNYAYNSNINVPNAEVLLNNEIDWLKRIRDDVKRTGETGIEETILEGHLGVTKELLAFQTSEKKFHIGCEKGGANLIKELIDDFIFPASNVYLQYMRNGELPAEQAIPVCGSPPTINAGFELLVALAVGCVRNLKQIVDSLTEMYYIGTAITTCEALTEWEYLPPVGPRPPKGFVGLKNAGATCYMNSVIQQLYMIPSIRNGILAIEGTGSDVDDDMSGDEKQDNESNVDPRDDVFGYPQQFEDKPALSKTEDRKEYNIGVLRHLQVIFGHLAASRLQYYVPRGFWKQFRLWGEPVNLREQHDALEFFNSLVDSLDEALKALGHPAMLSKVLGGSFADQKICQGCPHRYECEESFTTLNVDIRNHQNLLDSLEQYVKGDLLEGANAYHCEKCNKKVDTVKRLLIKKLPPVLAIQLKRFDYDWERECAIKFNDYFEFPRELDMEPYTVAGVAKLEGDNVNPESQLIQQSEQSESETAGSTKYRLVGVLVHSGQASGGHYYSYIIQRNGGDGERNRWYKFDDGDVTECKMDDDEEMKNQCFGGEYMGEVFDHMMKRMSYRRQKRWWNAYILFYERMDTIDQDDELIRYISELAITTRPHQIIMPSAIERSVRKQNVQFMHNRMQYSMEYFQFMKKLLTCNGVYLNPPPGQDHLLPEAEEITMISIQLAARFLFTTGFHTKKVVRGSASDWYDALCILLRHSKNVRFWFAHNVLFNVSNRFSEYLLECPSAEVRGAFAKLIVFIAHFSLQDGPCPSPFASPGPSSQAYDNLSLSDHLLRAVLNLLRREVSEHGRHLQQYFNLFVMYANLGVAEKTQLLKLSVPATFMLVSLDEGPGPPIKYQYAELGKLYSVVSQLIRCCNVSSRMQSSINGNPPLPNPFGDPNLSQPIMPIQQNVADILFVRTSYVKKIIEDCSNSEETVKLLRFCCWENPQFSSTVLSELLWQVAYSYTYELRPYLDLLLQILLIEDSWQTHRIHNALKGIPDDRDGLFDTIQRSKNHYQKRAYQCIKCMVALFSNCPVAYQILQGNGDLKRKWTWAVEWLGDELERRPYTGNPQYTYNNWSPPVQSNETSNGYFLERSHSARMTLAKACELCPEEVKKATSVQQIEMEESKEPDDQDAPDEHESPPPEDAPLYPHSPGSQYQQNNHVHGQPYTGPAAHHMNNPQRTGQRAQENYEGSEEVSPPQTKDQ

SEQ ID NO: 9601 - protein, 2379 aa, Homo sapiens; identical to SEQ ID NO: 9598

SEQ ID NO: 9602 - protein, 2554 aa, Homo sapiens
MTATTRGSPVGGNDNQGQAPDGQSQPPLQQNQTSSPDSSNENSPATPPDEQGQGDAPPQLEDEEPAFPHTDLAKLDDMINRPRWVVPVLPKGELEVLLEAAIDLSKKGLDVKSEACQRFFRDGLTISFTKILTDEAVSGWKFEIHRCIINNTHRLVELCVAKLSQDWFPLLELLAMALNPHCKFHIYNGTRPCESVSSSVQLPEDELFARSPDPRSPKGWLVDLLNKFGTLNGFQILHDRFINGSALNVQIIAALIKPFGQCYEFLTLHTVKKYFLPIIEMVPQFLENLTDEELKKEAKNEAKNDALSMIIKSLKNLASRVPGQEETVKNLEIFRLKMILRLLQISSFNGKMNALNEVNKVISSVSYYTHRHGNPEEEEWLTAERMAEWIQQNNILSIVLRDSLHQPQYVEKLEKILRFVIKEKALTLQDLDNIWAAQAGKHEAIVKNVHDLLAKLAWDFSPEQLDHLFDCFKASWTNASKKQREKLLELIRRLAEDDKDGVMAHKVLNLLWNLAHSDDVPVDIMDLALSAHIKILDYSCSQDRDTQKIQWIDRFIEELRTNDKWVIPALKQIREICSLFGEAPQNLSQTQRSPHVFYRHDLINQLQHNHALVTLVAENLATYMESMRLYARDHEDYDPQTVRLGSRYSHVQEVQERLNFLRFLLKDGQLWLCAPQAKQIWKCLAENAVYLCDREACFKWYSKLMGDEPDLDPDINKDFFESNVLQLDPSLLTENGMKCFERFFKAVNCREGKLVAKRRAYMMDDLELIGLDYLWRVVIQSNDDIASRAIDLLKEIYTNLGPRLQVNQVVIHEDFIQSCFDRLKASYDTLCVLDGDKDSVNCARQEAVRMVRVLTVLREYINECDSDYHEERTILPMSRAFRGKHLSFVVRFPNQGRQVDDLEVWSHTNDTIGSVRRCILNRIKANVAHTKIELFVGGELIDPADDRKLIGQLNLKDKSLITAKLTQISSNMPSSPDSSSDSSTGSPGNHGNHYSDGPNPEVESCLPGVIMSLHPRYISFLWQVADLGSSLNMPPLRDGARVLMKLMPPDSTTIEKLRAICLDHAKLGESSLSPSLDSLFFGPSASQVLYLTEVVYALLMPAGAPLADDSSDFQFHFLKSGGLPLVLSMLTRNNFLPNADMETRRGAYLNALKIAKLLLTAIGYGHVRAVAEACQPGVEGVNPMTQINQVTHDQAVVLQSALQSIPNPSSECMLRNVSVRLAQQISDEASRYMPDICVIRAIQKIIWASGCGSLQLVFSPNEEITKIYEKTNAGNEPDLEDEQVCCEALEVMTLCFALIPTALDALSKEKAWQTFIIDLLLHCHSKTVRQVAQEQFFLMCTRCCMGHRPLLFFITLLFTVLGSTARERAKHSGDYFTLLRHLLNYAYNSNINVPNAEVLLNNEIDWLKRIRDDVKRTGETGIEETILEGHLGVTKELLAFQTSEKKFHIGCEKGGANLIKELIDDFIFPASNVYLQYMRNGELPAEQAIPVCGSPPTINAGFELLVALAVGCVRNLKQIVDSLTEMYYIGTAITTCEALTEWEYLPPVGPRPPKGFVGLKNAGATCYMNSVIQQLYMIPSIRNGILAIEGTGSDVDDDMSGDEKQDNESNVDPRDDVFGYPQQFEDKPALSKTEDRKEYNIGVLRHLQVIFGHLAASRLQYYVPRGFWKQFRLWGEPVNLREQHDALEFFNSLVDSLDEALKALGHPAMLSKVLGGSFADQKICQGCPHRYECEESFTTLNVDIRNHQNLLDSLEQYVKGDLLEGANAYHCEKCNKKVDTVKRLLIKKLPPVLAIQLKRFDYDWERECAIKFNDYFEFPRELDMEPYTVAGVAKLEGDNVNPESQLIQQSEQSESETAGSTKYRLVGVLVHSGQASGGHYYSYIIQRNGGDGERNRWYKFDDGDVTECKMDDDEEMKNQCFGGEYMGEVFDHMMKRMSYRRQKRWWNAYILFYERMDTIDQDDELIRYISELAITTRPHQIIMPSAIERSVRKQNVQFMHNRMQYSMEYFQFMKKLLTCNGVYLNPPPGQDHLLPEAEEITMISIQLAARFLFTTGFHTKKVVRGSASDWYDALCILLRHSKNVRFWFAHNVLFNVSNRFSEYLLECPSAEVRGAFAKLIVFIAHFSLQDGPCPSPFASPGPSSQAYDNLSLSDHLLRAVLNLLRREVSEHGRHLQQYFNLFVMYANLGVAEKTQLLKLSVPATFMLVSLDEGPGPPIKYQYAELGKLYSVVSQLIRCCNVSSRMQSSINGNPPLPNPFGDPNLSQPIMPIQQNVADILFVRTSYVKKIIEDCSNSEETVKLLRFCCWENPQFSSTVLSELLWQVAYSYTYELRPYLDLLLQILLIEDSWQTHRIHNALKGIPDDRDGLFDTIQRSKNHYQKRAYQCIKCMVALFSNCPVAYQILQGNGDLKRKWTWAVEWLGDELERRPYTGNPQYTYNNWSPPVQSNETSNGYFLERSHSARMTLAKACELCPEEEPDDQDAPDEHESPPPEDAPLYPHSPGSQYQQNNHVHGQPYTGPAAHHMNNPQRTGQRAQENYEGSEEVSPPQTKDQ

SEQ ID NO: 9603 - protein, 2395 aa, Homo sapiens
MALNPHCKFHIYNGTRPCESVSSSVQLPEDELFARSPDPRSPKGWLVDLLNKFGTLNGFQILHDRFINGSALNVQIIAALIKPFGQCYEFLTLHTVKKYFLPIIEMVPQFLENLTDEELKKEAKNEAKNDALSMIIKSLKNLASRVPGQEETVKNLEIFRLKMILRLLQISSFNGKMNALNEVNKVISSVSYYTHRHGNPEEEEWLTAERMAEWIQQNNILSIVLRDSLHQPQYVEKLEKILRFVIKEKALTLQDLDNIWAAQAGKHEAIVKNVHDLLAKLAWDFSPEQLDHLFDCFKASWTNASKKQREKLLELIRRLAEDDKDGVMAHKVLNLLWNLAHSDDVPVDIMDLALSAHIKILDYSCSQDRDTQKIQWIDRFIEELRTNDKWVIPALKQIREICSLFGEAPQNLSQTQRSPHVFYRHDLINQLQHNHALVTLVAENLATYMESMRLYARDHEDYDPQTVRLGSRYSHVQEVQERLNFLRFLLKDGQLWLCAPQAKQIWKCLAENAVYLCDREACFKWYSKLMGDEPDLDPDINKDFFESNVLQLDPSLLTENGMKCFERFFKAVNCREGKLVAKRRAYMMDDLELIGLDYLWRVVIQSNDDIASRAIDLLKEIYTNLGPRLQVNQVVIHEDFIQSCFDRLKASYDTLCVLDGDKDSVNCARQEAVRMVRVLTVLREYINECDSDYHEERTILPMSRAFRGKHLSFVVRFPNQGRQVDDLEVWSHTNDTIGSVRRCILNRIKANVAHTKIELFVGGELIDPADDRKLIGQLNLKDKSLITAKLTQISSNMPSSPDSSSDSSTGSPGNHGNHYSDGPNPEVESCLPGVIMSLHPRYISFLWQVADLGSSLNMPPLRDGARVLMKLMPPDSTTIEKLRAICLDHAKLGESSLSPSLDSLFFGPSASQVLYLTEVVYALLMPAGAPLADDSSDFQFHFLKSGGLPLVLSMLTRNNFLPNADMETRRGAYLNALKIAKLLLTAIGYGHVRAVAEACQPGVEGVNPMTQINQVTHDQAVVLQSALQSIPNPSSECMLRNVSVRLAQQISDEASRYMPDICVIRAIQKIIWASGCGSLQLVFSPNEEITKIYEKTNAGNEPDLEDEQVCCEALEVMTLCFALIPTALDALSKEKAWQTFIIDLLLHCHSKTVRQVAQEQFFLMCTRCCMGHRPLLFFITLLFTVLGSTARERAKHSGDYFTLLRHLLNYAYNSNINVPNAEVLLNNEIDWLKRIRDDVKRTGETGIEETILEGHLGVTKELLAFQTSEKKFHIGCEKGGANLIKELIDDFIFPASNVYLQYMRNGELPAEQAIPVCGSPPTINAGFELLVALAVGCVRNLKQIVDSLTEMYYIGTAITTCEALTEWEYLPPVGPRPPKGFVGLKNAGATCYMNSVIQQLYMIPSIRNGILAIEGTGSDVDDDMSGDEKQDNESNVDPRDDVFGYPQQFEDKPALSKTEDRKEYNIGVLRHLQVIFGHLAASRLQYYVPRGFWKQFRLWGEPVNLREQHDALEFFNSLVDSLDEALKALGHPAMLSKVLGGSFADQKICQGCPHRYECEESFTTLNVDIRNHQNLLDSLEQYVKGDLLEGANAYHCEKCNKKVDTVKRLLIKKLPPVLAIQLKRFDYDWERECAIKFNDYFEFPRELDMEPYTVAGVAKLEGDNVNPESQLIQQSEQSESETAGSTKYRLVGVLVHSGQASGGHYYSYIIQRNGGDGERNRWYKFDDGDVTECKMDDDEEMKNQCFGGEYMGEVFDHMMKRMSYRRQKRWWNAYILFYERMDTIDQDDELIRYISELAITTRPHQIIMPSAIERSVRKQNVQFMHNRMQYSMEYFQFMKKLLTCNGVYLNPPPGQDHLLPEAEEITMISIQLAARFLFTTGFHTKKVVRGSASDWYDALCILLRHSKNVRFWFAHNVLFNVSNRFSEYLLECPSAEVRGAFAKLIVFIAHFSLQDGPCPSPFASPGPSSQAYDNLSLSDHLLRAVLNLLRREVSEHGRHLQQYFNLFVMYANLGVAEKTQLLKLSVPATFMLVSLDEGPGPPIKYQYAELGKLYSVVSQLIRCCNVSSRMQSSINGNPPLPNPFGDPNLSQPIMPIQQNVADILFVRTSYVKKIIEDCSNSEETVKLLRFCCWENPQFSSTVLSELLWQVAYSYTYELRPYLDLLLQILLIEDSWQTHRIHNALKGIPDDRDGLFDTIQRSKNHYQKRAYQCIKCMVALFSNCPVAYQILQGNGDLKRKWTWAVEWLGDELERRPYTGNPQYTYNNWSPPVQSNETSNGYFLERSHSARMTLAKACELCPEEVKKATSVQQIEMEESKEPDDQDAPDEHESPPPEDAPLYPHSPGSQYQQNNHVHGQPYTGPAAHHMNNPQRTGQRAQENYEGSEEVSPPQTKDQ

SEQ ID NO: 9604 - protein, 604 aa, Homo sapiens
MARISFSYLCPASWYFTVPTVSPFLRQRVAFLGLFFISCLLLLMLIIDFRHWSASLPRDRQYERYLARVGELEATDTEDPNLNYGLVVDCGSSGSRIFVYFWPRHNGNPHDLLDIKQMRDRNSQPVVKKIKPGISAMADTPEHASDYLRPLLSFAAAHVPVKKHKETPLYILCTAGMRLLPERKQLAILADLVKDLPLEFDFLFSQSQAEVISGKQEGVYAWIGINFVLGRFDHEDESDAEATQELAAGRRRTVGILDMGGASLQIAYEVPTSTSVLPAKQEEAAKILLAEFNLGCDVQHTEHVYRVYVTTFLGFGGNFARQRYEDLVLNETLNKNRLLGQKTGLSPDNPFLDPCLPVGLTDVVERNSQVLHVRGRGDWVSCGAMLSPLLARSNTSQASLNGIYQSPIDFNNSEFYGFSEFFYCTEDVLRIGGRYHGPTFAKAAQDYCGMAWSVLTQRFKNGLFSSHADEHRLKYQCFKSAWMYQVLHEGFHFPYDYPNLRTAQLVYDREVQWTLGAILYKTRFLPLRDLRQEGVRQAHGSWFRLSFVYNHYLFFACILVVLLAIFLYLLRLRRIHHRQTRASAPLDLLWLEEVVPMMGVQVGP

SEQ ID NO: 9605 - protein, 592 aa, Homo sapiens
MARISFSYLCPASWYFTVPTVSPFLRQRVAFLGLFFISCLLLLMLIIDFRHWSASLPRDRQYERYLARVGELEATDTEDPNLNYGLVVDCGSSGSRIFVYFWPRHNGNPHDLLDIKQMRDRNSQPVVKKIKPGISAMADTPEHASDYLRPLLSFAAAHVPVKKHKETPLYILCTAGMRLLPERKQLAILADLVKDLPLEFDFLFSQSQAEVISGKQEGVYAWIGINFVLGRFDHEDGRRRTVGILDMGGASLQIAYEVPTSTSVLPAKQEEAAKILLAEFNLGCDVQHTEHVYRVYVTTFLGFGGNFARQRYEDLVLNETLNKNRLLGQKTGLSPDNPFLDPCLPVGLTDVVERNSQVLHVRGRGDWVSCGAMLSPLLARSNTSQASLNGIYQSPIDFNNSEFYGFSEFFYCTEDVLRIGGRYHGPTFAKAAQDYCGMAWSVLTQRFKNGLFSSHADEHRLKYQCFKSAWMYQVLHEGFHFPYDYPNLRTAQLVYDREVQWTLGAILYKTRFLPLRDLRQEGVRQAHGSWFRLSFVYNHYLFFACILVVLLAIFLYLLRLRRIHHRQTRASAPLDLLWLEEVVPMMGVQVGP

SEQ ID NO: 9606 - protein, 515 aa, Homo sapiens
MATSTGRWLLLRLALFGFLWEASGGLDSGASRDDDLLLPYPRARARLPRDCTRVRAGNREHESWPPPPATPGAGGLAVRTFVSHFRDRAVAGHLTRAVEPLRTFSVLEPGGPGGCAARRRATVEETARAADCRVAQNGGFFRMNSGECLGNVVSDERRVSSSGGLQNAQFGIRRDGTLVTGYLSEEEVLDTENPFVQLLSGVVWLIRNGSIYINESQATECDETQETGSFSKFVNVISARTAIGHDRKGQLVLFHADGQTEQRGINLWEMAEFLLKQDVVNAINLDGGGSATFVLNGTLASYPSDHCQDNMWRCPRQVSTVVCVHEPRCQPPDCHGHGTCVDGHCQCTGHFWRGPGCDELDCGPSNCSQHGLCTETGCRCDAGWTGSNCSEECPLGWHGPGCQRPCKCEHHCPCDPKTGNCSVSRVKQCLQPPEATLRAGELSFFTRTAWLALTLALAFLLLISTAANLSLLLSRAERNRRLHGDYAYHPLQEMNGEPLAAEKEQPGGAHNPFKD

SEQ ID NO: 9607 - protein, 494 aa, Homo sapiens
MEWNPGFPLSIDAKCHKDLPRDIQFDSEKGVDFVLNYSKAMENLFINRFMHMFQSSWNDFADFEKIFVKISNTISERVMNHWQEDLMFGYQFLNGCNPVLIRRCTELPEKLPVTTEMVECSLERQLSLEQEVQQGNIFIVDFELLDGIDANKTDPCTLQFLAAPICLLYKNLANKIVPIAIQLNQIPGDENPIFLPSDAKYDWLLAKIWVRSSDFHVHQTITHLLRTHLVSEVFGIAMYRQLPAVHPIFKLLVAHVRFTIAINTKAREQLICECGLFDKANATGGGGHVQMVQRAMKDLTYASLCFPEAIKARGMESKEDIPYYFYRDDGLLVWEAIRTFTAEVVDIYYEGDQVVEEDPELQDFVNDVYVYGMRGRKSSGFPKSVKSREQLSEYLTVVIFTASAQHAAVNFGQYDWCSWIPNAPPTMRAPPPTAKGVVTIEQIVDTLPDRGRSCWHLGAVWALSQFQENEVKLGRAGHSPRSPQVKRFLSLRAL

SEQ ID NO: 9608 - protein, 529 aa, Homo sapiens
MEWNPGFPLSIDAKCHKDLPRDIQFDSEKGVDFVLNYSKAMENLFINRFMHMFQSSWNDFADFEKIFVKISNTISERVMNHWQEDLMFGYQFLNGCNPVLIRRCTELPEKLPVTTEMVECSLERQLSLEQEVQQGNIFIVDFELLDGIDANKTDPCTLQFLAAPICLLYKNLANKIVPIAIQLNQIPGDENPIFLPSDAKYDWLLAKIWVRSSDFHVHQTITHLLRTHLVSEVFGIAMYRQLPAVHPIFKLLVAHVRFTIAINTKAREQLICECGLFDKANATGGGGHVQMVQRAMKDLTYASLCFPEAIKARGMESKEDIPYYFYRDDGLLVWEAIRTFTAEVVDIYYEGDQVVEEDPELQDFVNDVYVYGMRGRKSSGFPKSVKSREQLSEYLTVVIFTASAQHAAVNFGQYDWCSWIPNAPPTMRAPPPTAKGVVTIEQIVDTLPDRGRSCWHLGAVWALSQFQENELFLGMYPEEHFIEKPVKEAMARFRKNLEAIVSVIAERNKKKQLPYYYLSPDRIPNSVAI

SEQ ID NO: 9609 - protein, 81 aa, Homo sapiens
MLRQIIGQAKKHPSLIPLFVFIGTGATGATLYLLRLALFNPDVCWDRNNPEPWNKLGPNDQYKFYSVNVDYSKLKKERPDF

SEQ ID NO: 9610 - protein, 65 aa, Homo sapiens
VGSLLSSRRPLPQTCSARSSVRPRSIRAWDRNNPEPWNKLGPNDQYKFYSVNVDYSKLKKERPDF

SEQ ID NO: 9611 - protein, 81 aa, Homo sapiens; identical to SEQ ID NO: 9609

SEQ ID NO: 9612 - protein, 179 aa, Homo sapiens
MSGISPQQMGEPEGSWSGKNPGTMGASRLYTLVLVLQPQRVLLGMKKRGFGAGRWNGFGGKVQEGETIEDGARRELQEESGLTVDALHKVGQIVFEFVGEPELMDVHVFCTDSIQGTPVESDEMRPCWFQLDQIPFKDMWPDDSYWFPLLLQKKKFHGYFKFQGQDTILDYTLREVDTV

SEQ ID NO: 9613 - protein, 179 aa, Homo sapiens; identical to SEQ ID NO: 9612

SEQ ID NO: 9614 - protein, 1205 aa, Homo sapiens
MTNPSDRVLPANSMAESREGDFGCTVMELRKLMELRSRDALTQINVHYGGVQNLCSRLKTSPVEGLSGNPADLEKRRQVFGHNVIPPKKPKTFLELVWEALQDVTLIILEIAAIISLVLSFYRPAGEENELCGQVATTPEDENEAQAGWIEGAAILFSVIIVVLVTAFNDWSKEKQFRGLQCRIEQEQKFSIIRNGQLIQLPVAEIVVGDIAQVKYGDLLPADGILIQGNDLKIDESSLTGESDHVKKSLDKDPMLLSGTHVMEGSGRMVVTAVGVNSQTGIILTLLGVNEDDEGEKKKKGKKQGVPENRNKAKTQDGVALEIQPLNSQEGIDNEEKDKKAVKVPKKEKSVLQGKLTRLAVQIGKAGLLMSALTVFILILYFVIDNFVINRRPWLPECTPIYIQYFVKFFIIGITVLVVAVPEGLPLAVTISLAYSVKKMMKDNNLVRHLDACETMGNATAICSDKTGTLTMNRMTVVQAYIGGIHYRQIPSPDVFLPKVLDLIVNGISINSAYTSKILPPEKEGGLPRQVGNKTECALLGFVTDLKQDYQAVRNEVPEEKLYKVYTFNSVRKSMSTVIRNPNGGFRMYSKGASEIILRKCNRILDRKGEAVPFKNKDRDDMVRTVIEPMACDGLRTICIAYRDFDDTEPSWDNENEILTELTCIAVVGIEDPVRPEVPDAIAKCKQAGITVRMVTGDNINTARAIATKCGILTPGDDFLCLEGKEFNRLIRNEKGEVEQEKLDKIWPKLRVLARSSPTDKHTLVKGIIDSTVGEHRQVVAVTGDGTNDGPALKKADVGFAMGIAGTDVAKEASDIILTDDNFTSIVKAVMWGRNVYDSISKFLQFQLTVNVVAVIVAFTGACITQDSPLKAVQMLWVNLIMDTFASLALATEPPTESLLKRRPYGRNKPLISRTMMKNILGHAFYQLIVIFILVFAGEKFFDIDSGRKAPLHSPPSQHYTIVFNTFVLMQLFNEINSRKIHGEKNVFSGIYRNIIFCSVVLGTFICQIFIVEFGGKPFSCTSLSLSQWLWCLFIGIGELLWGQFISAIPTRSLKFLKEAGHGTTKEEITKDAEGLDEIDHAEMELRRGQILWFRGLNRIQTQIKVVKAFHSSLHESIQKPYNQKSIHSFMTHPEFAIEEELPRTPLLDEEEEENPDKASKFGTRVLLLDGEVTPYANTNNNAVDCNQVQLPQSDSSLQSLETSV

SEQ ID NO: 9615 - protein, 87 aa, Homo sapiens
MELRRGQILWFRGLNRIQTQIDVINTFQTGASFKGVLRRQNMGQHLDVKLVPSSSYVAVAPVKSSPTTSVPAVSSPPMGNQSGQSVP

SEQ ID NO: 9616 - protein, 1241 aa, Homo sapiens
MTNPSDRVLPANSMAESREGDFGCTVMELRKLMELRSRDALTQINVHYGGVQNLCSRLKTSPVEGLSGNPADLEKRRQVFGHNVIPPKKPKTFLELVWEALQDVTLIILEIAAIISLVLSFYRPAGEENELCGQVATTPEDENEAQAGWIEGAAILFSVIIVVLVTAFNDWSKEKQFRGLQCRIEQEQKFSIIRNGQLIQLPVAEIVVGDIAQVKYGDLLPADGILIQGNDLKIDESSLTGESDHVKKSLDKDPMLLSGTHVMEGSGRMVVTAVGVNSQTGIILTLLGVNEDDEGEKKKKGKKQGVPENRNKAKTQDGVALEIQPLNSQEGIDNEEKDKKAVKVPKKEKSVLQGKLTRLAVQIGKAGLLMSALTVFILILYFVIDNFVINRRPWLPECTPIYIQYFVKFFIIGITVLVVAVPEGLPLAVTISLAYSVKKMMKDNNLVRHLDACETMGNATAICSDKTGTLTMNRMTVVQAYIGGIHYRQIPSPDVFLPKVLDLIVNGISINSAYTSKILPPEKEGGLPRQVGNKTECALLGFVTDLKQDYQAVRNEVPEEKLYKVYTFNSVRKSMSTVIRNPNGGFRMYSKGASEIILRKCNRILDRKGEAVPFKNKDRDDMVRTVIEPMACDGLRTICIAYRDFDDTEPSWDNENEILTELTCIAVVGIEDPVRPEVPDAIAKCKQAGITVRMVTGDNINTARAIATKCGILTPGDDFLCLEGKEFNRLIRNEKGEVEQEKLDKIWPKLRVLARSSPTDKHTLVKGIIDSTVGEHRQVVAVTGDGTNDGPALKKADVGFAMGIAGTDVAKEASDIILTDDNFTSIVKAVMWGRNVYDSISKFLQFQLTVNVVAVIVAFTGACITQDSPLKAVQMLWVNLIMDTFASLALATEPPTESLLKRRPYGRNKPLISRTMMKNILGHAFYQLIVIFILVFAGEKFFDIDSGRKAPLHSPPSQHYTIVFNTFVLMQLFNEINSRKIHGEKNVFSGIYRNIIFCSVVLGTFICQIFIVEFGGKPFSCTSLSLSQWLWCLFIGIGELLWGQFISAIPTRSLKFLKEAGHGTTKEEITKDAEGLDEIDHAEMELRRGQILWFRGLNRIQTQIDVINTFQTGASFKGVLRRQNMGQHLDVKLVPSSSYIKVVKAFHSSLHESIQKPYNQKSIHSFMTHPEFAIEEELPRTPLLDEEEEENPDKASKFGTRVLLLDGEVTPYANTNNNAVDCNQVQLPQSDSSLQSLETSV

SEQ ID NO: 9617 - protein, 1205 aa, Homo sapiens; identical to SEQ ID NO: 9614

SEQ ID NO: 9618 - protein, 1170 aa, Homo sapiens
MTNPSDRVLPANSMAESREGDFGCTVMELRKLMELRSRDALTQINVHYGGVQNLCSRLKTSPVEGLSGNPADLEKRRQVFGHNVIPPKKPKTFLELVWEALQDVTLIILEIAAIISLVLSFYRPAGEENELCGQVATTPEDENEAQAGWIEGAAILFSVIIVVLVTAFNDWSKEKQFRGLQCRIEQEQKFSIIRNGQLIQLPVAEIVVGDIAQVKYGDLLPADGILIQGNDLKIDESSLTGESDHVKKSLDKDPMLLSGTHVMEGSGRMVVTAVGVNSQTGIILTLLGVNEDDEGEKKKKGKKQGVPENRNKAKTQDGVALEIQPLNSQEGIDNEEKDKKAVKVPKKEKSVLQGKLTRLAVQIGKAGLLMSALTVFILILYFVIDNFVINRRPWLPECTPIYIQYFVKFFIIGITVLVVAVPEGLPLAVTISLAYSVKKMMKDNNLVRHLDACETMGNATAICSDKTGTLTMNRMTVVQAYIGGIHYRQIPSPDVFLPKVLDLIVNGISINSAYTSKILPPEKEGGLPRQVGNKTECALLGFVTDLKQDYQAVRNEVPEEKLYKVYTFNSVRKSMSTVIRNPNGGFRMYSKGASEIILRKCNRILDRKGEAVPFKNKDRDDMVRTVIEPMACDGLRTICIAYRDFDDTEPSWDNENEILTELTCIAVVGIEDPVRPEVPDAIAKCKQAGITVRMVTGDNINTARAIATKCGILTPGDDFLCLEGKEFNRLIRNEKGEVEQEKLDKIWPKLRVLARSSPTDKHTLVKGIIDSTVGEHRQVVAVTGDGTNDGPALKKADVGFAMGIAGTDVAKEASDIILTDDNFTSIVKAVMWGRNVYDSISKFLQFQLTVNVVAVIVAFTGACITQDSPLKAVQMLWVNLIMDTFASLALATEPPTESLLKRRPYGRNKPLISRTMMKNILGHAFYQLIVIFILVFAGEKFFDIDSGRKAPLHSPPSQHYTIVFNTFVLMQLFNEINSRKIHGEKNVFSGIYRNIIFCSVVLGTFICQIFIVEFGGKPFSCTSLSLSQWLWCLFIGIGELLWGQFISAIPTRSLKFLKEAGHGTTKEEITKDAEGLDEIDHAEMELRRGQILWFRGLNRIQTQIDVINTFQTGASFKGVLRRQNMGQHLDVKLVPSSSYVAVAPVKSSPTTSVPAVSSPPMGNQSGQSVP

SEQ ID NO: 9619 - protein, 651 aa, Homo sapiens
MARGSAVAWAALGPLLWGCALGLQGGMLYPQESPSRECKELDGLWSFRADFSDNRRRGFEEQWYRRPLWESGPTVDMPVPSSFNDISQDWRLRHFVGWVWYEREVILPERWTQDLRTRVVLRIGSAHSYAIVWVNGVDTLEHEGGYLPFEADISNLVQVGPLPSRLRITIAINNTLTPTTLPPGTIQYLTDTSKYPKGYFVQNTYFDFFNYAGLQRSVLLYTTPTTYIDDITVTTSVEQDSGLVNYQISVKGSNLFKLEVRLLDAENKVVANGTGTQGQLKVPGVSLWWPYLMHERPAYLYSLEVQLTAQTSLGPVSDFYTLPVGIRTVAVTKSQFLINGKPFYFHGVNKHEDADIRGKGFDWPLLVKDFNLLRWLGANAFRTSHYPYAEEVMQMCDRYGIVVIDECPGVGLALPQFFNNVSLHHHMQVMEEVVRRDKNHPAVVMWSVANEPASHLESAGYYLKMVIAHTKSLDPSRPVTFVSNSNYAADKGAPYVDVICLNSYYSWYHDYGHLELIQLQLATQFENWYKKYQKPIIQSEYGAETIAGFHQDPPLMFTEEYQKSLLEQYHLGLDQKRRKYVVGELIWNFADFMTEQSPTRVLGNKKGIFTRQRQPKSAAFLLRERYWKIANETRYPHSVAKSQCLENSLFT

SEQ ID NO: 9620 - protein, 651 aa, Homo sapiens; identical to SEQ ID NO: 9619

SEQ ID NO: 9621 - protein, 560 aa, Homo sapiens
MARGSAVAWAALGPLLWGCALGLQGGMLYPQESPSRECKELDGLWSFRADFSDNRRRGFEEQWYRRPLWESGPTVDMPVPSSFNDISQDWRLRHFVGWVWYEREVILPERWTQDLRTRVVLRIGSAHSYAIVWVNGVDTLEHEGGYLPFEADISNLVQVGPLPSRLRITIAINNTLTPTTLPPGTIQYLTDTSKYPKGYFVQNTYFDFFNYAGLQRSVLLYTTPTTYIDDITVTTSVEQDSGLVNYQISVKGSNLFKLEVRLLDAENKVVANGTGTQGQLKVPGVSLWWPYLMHERPAYLYSLEVQLTAQTSLGPVSDFYTLPVGIRTVAVTKSQFLINGKPFYFHGVNKHEDADIRGKGFDWPLLVKDFNLLRWLGANAFRTSHYPYAEEVMQMCDRYGIVVIDECPGVGLALPQFFNNVSLHHHMQVMEEVVRRDKNHPAVVMWSVANEPASHLESAGYYLKMVIAHTKSLDPSRPVTFVSNSNYAADKGAPYVDVICLNSYYSWYHDYGHLELIQLQLATQFENWYKKYQKPIIQSEYGAETIAGFHQVSRSTSDVH

SEQ ID NO: 9622 - protein, 985 aa, Homo sapiens
MAASVAAAARRLRRAIRRSPAWRGLSHRPLSSEPPAAKASAVRAAFLNFFRDRHGHRLVPSASVRPRGDPSLLFVNAGMNQFKPIFLGTVDPRSEMAGFRRVANSQKCVRAGGHHNDLEDVGRDLSHHTFFEMLGNWAFGGEYFKEEACNMAWELLTQVYGIPEERLWISYFDGDPKAGLDPDLETRDIWLSLGVPASRVLSFGPQENFWEMGDTGPCGPCTEIHYDLAGGVGAPQLVELWNLVFMQHNREADGSLQPLPQRHVDTGMGLERLVAVLQGKHSTYDTDLFSPLLNAIQQGCRAPPYLGRVGVADEGRTDTAYRVVADHIRTLSVCISDGIFPGMSGPPLVLRRILRRAVRFSMEILKAPPGFLGSLVPVVVETLGDAYPELQRNSAQIANLVSEDEAAFLASLERGRRIIDRTLRTLGPSDMFPAEVAWSLSLCGDLGLPLDMVELMLEEKGVQLDSAGLERLAQEEAQHRARQAEPVQKQGLWLDVHALGELQRQGVPPTDDSPKYNYSLRPSGSYEFGTCEAQVLQLYTEDGTAVASVGKGQRCGLLLDRTNFYAEQGGQASDRGYLVRAGQEDVLFPVARAQVCGGFILHEAVAPECLRLGDQVQLHVDEAWRLGCMAKHTATHLLNWALRQTLGPGTEQQGSHLNPEQLRLDVTTQTPLTPEQLRAVENTVQEAVGQDEAVYMEEVPLALTAQVPGLRSLDEVYPDPVRVVSVGVPVAHALDPASQAALQTSVELCCGTHLLRTGAVGDLVIIGDRQLSKGTTRLLAVTGEQAQQARELGQSLAQEVKAATERLSLGSRDVAEALRLSKDIGRLIEAVETAVMPQWQRRELLATVKMLQRRANTAIRKLQMGQAAKKTQELLERHSKGPLIVDTVSAESLSVLVKVVRQLCEQAPSTSVLLLSPQPMGKVLCACQVAQGAMPTFTAEAWALAVCSHMGGKAWGSRVVAQGTGSTTDLEAALSIAQTYALSQL

SEQ ID NO: 9623 - protein, 288 aa, Homo sapiens [sequence omitted]

SEQ ID NO: 9624 - protein, 493 aa, Homo sapiens
MKGAGSLAASLPMAEKFWWEGTMEGPSGYPSSAKTASFQDAVRMLNTLQTNAGYLEQVKRQRGDPQTQLEAMELYLARSGLQVEDLDRLNIIHVTGTKGKGSTCAFTECILRSYGLKTGFFSSPHLVQVRERIRINGQPISPELFTKYFWRLYHRLEETKDGSCVSMPPYFRFLTLMAFHVFLQEKVDLAVVEVGIGGAYDCTNIIRKPVVCGVSSLGIDHTSLLGDTVEKIAWQKGGIFKQGVPAFTVLQPEGPLAVLRDRAQQISCPLYLCPMLEALEEGGPPLTLGLEGEHQRSNAALALQLAHCWLQRQDRHGAGEPKASRPGLLWQLPLAPVFQPTSHMRLGLRNTEWPGRTQVLRRGPLTWYLDGAHTASSAQACVRWFRQALQGRERPSGGPEVRVLLFNATGDRDPAALLKLLQPCQFDYAVFCPNLTEVSSTGNADQQNFTVTLDQVLLRCLEHQQHWNHLDEEQASPDLWSAPSPEPGGLSVR

SEQ ID NO: 9625 - protein, 587 aa, Homo sapiens [sequence omitted]

SEQ ID NO: 9626 - protein, 327 aa, Homo sapiens
MPPYFRFLTLMAFHVFLQEKVDLAVVEVGIGGAYDCTNIIRKPVVCGVSSLGIDHTSLLGDTVEKIAWQKGGIFKQGVPAFTVLQPEGPLAVLRDRAQQISCPLYLCPMLEALEEGGPPLTLGLEGEHQRSNAALALQLAHCWLQRQDRHGAGEPKASRPGLLWQLPLAPVFQPTSHMRLGLRNTEWPGRTQVLRRGPLTWYLDGAHTASSAQACVRWFRQALQGRERPSGGPEVRVLLFNATGDRDPAALLKLLQPCQFDYAVFCPNLTEVSSTGNADQQNFTVTLDQVLLRCLEHQQHWNHLDEEQASPDLWSAPSPEPGGLSVR

SEQ ID NO: 9627 - protein, 192 aa, Homo sapiens
  VARIANT (1)...(192): Xaa = Any Amino Acid
MSRARSHLRAALFLAAASARGVTTQVAARRGLSAWPVPQEPSMEYQDAVRMLNTLQTNAGYLEQVKRQRGDPQTQLEAMELYLARSGLQVEDLDRLNIIHVTGTKGKGSTCAFTECILRSYGLKTGFFRYWLVGGCGVCVPMDPGGLWNQPVLQDQGHPQEVSCMSLCPVFIHSINIQLALTPGRQSKLLSX

SEQ ID NO: 9628 - protein, 84 aa, Homo sapiens [sequence omitted]

SEQ ID NO: 9629 - protein, 89 aa, Homo sapiens [sequence omitted]

SEQ ID NO: 9630 - protein, 130 aa, Homo sapiens [sequence omitted]

SEQ ID NO: 9631 - protein, 393 aa, Homo sapiens
MTTYSDKGAKPERGRFLHFHSVTFWVGNAKQAASFYCSKMGFEPLAYRGLETGSREVVSHVIKQGKIVFVLSSALNPWNKEMGDHLVKHGDGVKDIAFEVEDCDYIVQKARERGAKIMREPWVEQDKFGKVKFAVLQTYGDTTHTLVEKMNYIGQFLPGYEAPAFMDPLLPKLPKCSLEMIDHIVGNQPDQEMVSASEWYLKNLQFHRFWSVDDTQVHTEYSSLRSIVVANYEESIKMPINEPAPGKKKSQIQEYVDYNGGAGVQHIALKTEDIITAIRHLRERGLEFLSVPSTYYKQLREKLKTAKIKVKENIDALEELKILVDYDEKGYLLQIFTKPVQDRPTLFLEVIQRHNHQGFGAGNFNSLFKAFEEEQNLRGNLTNMETNGVVPGM

SEQ ID NO: 9632 - protein, 375 aa, Homo sapiens [sequence omitted]

SEQ ID NO: 9633 - protein, 487 aa, Homo sapiens
MRRGERRDAGGPRPESPVPAGRASLEEPPDGPSAGQATGPGEGRRSTESEVYDDGTNTFFWRAHTLTVLFILTCTLGYVTLLEETPQDTAYNTKRGIVASILVFLCFGVTQAKDGPFSRPHPAYWRFWLCVSVVYELFLIFILFQTVQDGRQFLKYVDPKLGVPLPERDYGGNCLIYDPDNETDPFHNIWDKLDGFVPAHFLGWYLKTLMIRDWWMCMIISVMFEFLEYSLEHQLPNFSECWWDHWIMDVLVCNGLGIYCGMKTLEWLSLKTYKWQGLWNIPTYKGKMKRIAFQFTPYSWVRFEWKPASSLRRWLAVCGIILVFLLAELNTFYLKFVLWMPPEHYLVLLRLVFFVNVGGVAMREIYDFMDDPKPHKKLGPQAWLVAAITATELLIVVKYDPHTLTLSLPFYISQCWTLGSVLALTWTVWRFFLRDITLRYKETRWQKWQNKDDQGSTVGNGDQHPLGLDEDLLGPGVAEGEGAPTPN

SEQ ID NO: 9634 - protein, 487 aa, Homo sapiens; identical to SEQ ID NO: 9633

SEQ ID NO: 9635 - protein, 487 aa, Homo sapiens; identical to SEQ ID NO: 9633

SEQ ID NO: 9636 - protein, 132 aa, Homo sapiens
MKLLTRAGSFSRFYSLKVAPKVKATAAPAGAPPQPQDLEFTKLPNGLVIASLENYSPVSRIGLFIKAGSRYEDFSNLGTTHLLRLTSSLTTKGASSFKITRGIEAVGGKLSVHSIFNQEQILSQETTLFAHP

SEQ ID NO: 9637 - protein, 453 aa, Homo sapiens
MKLLTRAGSFSRFYSLKVAPKVKATAAPAGAPPQPQDLEFTKLPNGLVIASLENYSPVSRIGLFIKAGSRYEDFSNLGTTHLLRLTSSLTTKGASSFKITRGIEAVGGKLSVTATRENMAYTVECLRGDVDILMEFLLNVTTAPEFRRWEVADLQPQLKIDKAVAFQNPQTHVIENLHAAAYRNALANPLYCPDYRIGKVTSEELHYFVQNHFTSARMALIGLGVSHPVLKQVAEQFLNMRGGLGLSGAKANYRGGEIREQNGDSLVHAAFVAESAVAGSAEANAFSVLQHVLGAGPHVKRGSNTTSHLHQAVAKATQQPFDVSAFNASYSDSGLFGIYTISQATAAGDVIKAAYNQVKTIAQGNLSNTDVQAAKNKLKAGYLMSVESSECFLEEVGSQALVAGSYMPPSTVLQQIDSVANADIINAAKKFVSGQKSMAASGNLGHTPFVDEL

SEQ ID NO: 9638 - protein, 257 aa, Homo sapiens
MAYTVECLRGDVDILMEFLLNVTTAPEFRRWEVADLQPQLKIDKAVAFQNPQTHVIENLHAAAYRNALANPLYCPDYRIGKVTSEELHYFVQNHFTSARMALIGLGVSHPVLKQVAEQFLNMRGGLGLSGAKANYRGGEIREQNGDSLVHAAFVAESAVAGSAEANAFSVLQHVLGAGPHVKRGSNTTSHLHQAVAKATQQPFDVSAFNASYSDSGLFGIYTISQATAAGDVIKAAYNQVKTIAQGNLSNTDVQAAK

SEQ ID NO: 9639 - protein, 251 aa, Homo sapiens [sequence omitted]

SEQ ID NO: 9640 - protein, 200 aa, Homo sapiens
MLTREHRCGRSEEQELEPWPSPKKARSGRWLRNGFKRKMEEPEEPADSGQSLVPVYIYSPEYVSMCDSLAKIPKRASMVHSLIEAYALHKQMRIVKPKVASMEEMATFHTDAYLQHLQKVSQEGDDDHPDSIEYGLGYDCPATEGIFDYAAAIGGATITAAQCLIDGMCKVAINWSGGWHHAKKDVCVCGTLQGILKKSK

SEQ ID NO: 9641 - protein, 249 aa, Homo sapiens
MLTREHRCGRSEEQELEPWPSPKKARSGRWLRNGFKRKMEEPEEPADSGQSLVPVYIYSPEYVSMCDSLAKIPKRASMVHSLIEAYALHKQMRIVKPKVASMEEMATFHTDAYLQHLQKVSQEGDDDHPDSIEYGLGYDCPATEGIFDYAAAIGGATITAAQCLIDGMCKVAINWSGGWHHAKKDEASGFCYLNDAVLGILRLRRKFERILYVDLDLHHGDGVEDAFSFTSKVMTVSLHKFSPGFFPGK

SEQ ID NO: 9642 - protein, 415 aa, Homo sapiens
MLTREHRCGRSEEQELEPWPSPKKARSGRWLRNGFKRKMEEPEEPADSGQSLVPVYIYSPEYVSMCDSLAKIPKRASMVHSLIEAYALHKQMRIVKPKVASMEEMATFHTDAYLQHLQKVSQEGDDDHPDSIEYGLGYDCPATEGIFDYAAAIGGATITAAQCLIDGMCKVAINWSGGWHHAKKDEASGFCYLNDAVLGILRLRRKFERILYVDLDLHHGDGVEDAFSFTSKVMTVSLHKFSPGFFPGTGDVSDVGLGKGRYYSVNVPIQDGIQDEKYYQICESVLKEVYQAFNPKAVVLQLGADTIAGDPMCSFNMTPVGIGKCLKYILQWQLATLILGGGGYNLANTARCWTYLTGVILGKTLSSEIPDHEFFTAYGPDYVLEITPSCRPDRNEPHRIQQILNYIKGNLKHVV

SEQ ID NO: 9643 - protein, 590 aa, Homo sapiens [sequence omitted]

SEQ ID NO: 9644 - protein, 588 aa, Homo sapiens
MEAAHAKTTEECLAYFGVSETTGLTPDQVKRNLEKYGLNELPAEEGKTLWELVIEQFEDLLVRILLLAACISFVLAWFEEGEETITAFVEPFVILLILIANAIVGVWQERNAENAIEALKEYEPEMGKVYRADRKSVQRIKARDIVPGDIVEVAVGDKVPADIRILAIKSTTLRVDQSILTGESVSVIKHTEPVPDPRAVNQDKKNMLFSGTNIAAGKALGIVATTGVGTEIGKIRDQMAATEQDKTPLQQKLDEFGEQLSKVISLICVAVWLINIGHFNDPVHGGSWFRGAIYYFKIAVALAVAAIPEGLPAVITTCLALGTRRMAKKNAIVRSLPSVETLGCTSVICSDKTGTLTTNQMSVCKMFIIDKVDGDICLLNEFSITGSTYAPEGEVLKNDKPVRPGQYDGLVELATICALCNDSSLDFNEAKGVYEKVGEATETALTTLVEKMNVFNTDVRSLSKVERANACNSVIRQLMKKEFTLEFSRDRKSMSVYCSPAKSSRAAVGNKMFVKGAPEGVIDRCNYVRVGTTRVPLTGPVKEKIMAVIKEWGTGRDTLRCLALATRDTPPKREEMVLDDSARFLEYE

SEQ ID NO: 9645 - protein, 852 aa, Homo sapiens
MKRAAAKHLIERYYHQLTEGCGNEACTNEFCASCPTFLRMDNNAAAIKALELYKINAKLCDPHPSKKGASSAYLENSKGAPNNSCSEIKMNKKGARIDFKDVTYLTEEKVYEILELCREREDYSPLIRVIGRVFSSAEALVQSFRKVKQHTKEELKSLQAKDEDKDEDEKEKAACSAAAMEEDSEASSSRIGDSSQGDNNLQKLGPDDVSVDIDAIRRVYTRLLSNEKIETAFLNALVYLSPNVECDLTYHNVYSRDPNYLNLFIIVMENRNLHSPEYLEMALPLFCKAMSKLPLAAQGKLIRLWSKYNADQIRRMMETFQQLITYKVISNEFNSRNLVNDDDAIVAASKCLKMVYYANVVGGEVDTNHNEEDDEEPIPESSELTLQELLGEERRNKKGPRVDPLETELGVKTLDCRKPLIPFEEFINEPLNEVLEMDKDYTFFKVETENKFSFMTCPFILNAVTKNLGLYYDNRIRMYSERRITVLYSLVQGQQLNPYLRLKVRRDHIIDDALVRLEMIAMENPADLKKQLYVEFEGEQGVDEGGVSKEFFQLVVEEIFNPDIGMFTYDESTKLFWFNPSSFETEGQFTLIGIVLGLAIYNNCILDVHFPMVVYRKLMGKKGTFRDLGDSHPVLYQSLKDLLEYEGNVEDDMMITFQISQTDLFGNPMMYDLKENGDKIPITNENRKEFVNLYSDYILNKSVEKQFKAFRRGFHMVTNESPLKYLFRPEEIELLICGSRNLDFQALEETTEYDGGYTRDSVLIREFWEIVHSFTDEQKRLFLQFTTGTDRAPVGGLGKLKMIIAKNGPDTERLPTSHTCFNVLLLPEYSSKEKLKERLLKAITYAKGFGML

SEQ ID NO: 9646 - protein, 673 aa, Homo sapiens
MEEDSEASSSRIGDSSQGDNNLQKLGPDDVSVDIDAIRRVYTRLLSNEKIETAFLNALVYLSPNVECDLTYHNVYSRDPNYLNLFIIVMENRNLHSPEYLEMALPLFCKAMSKLPLAAQGKLIRLWSKYNADQIRRMMETFQQLITYKVISNEFNSRNLVNDDDAIVAASKCLKMVYYANVVGGEVDTNHNEEDDEEPIPESSELTLQELLGEERRNKKGPRVDPLETELGVKTLDCRKPLIPFEEFINEPLNEVLEMDKDYTFFKVETENKFSFMTCPFILNAVTKNLGLYYDNRIRMYSERRITVLYSLVQGQQLNPYLRLKVRRDHIIDDALVRLEMIAMENPADLKKQLYVEFEGEQGVDEGGVSKEFFQLVVEEIFNPDIGMFTYDESTKLFWFNPSSFETEGQFTLIGIVLGLAIYNNCILDVHFPMVVYRKLMGKKGTFRDLGDSHPVLYQSLKDLLEYEGNVEDDMMITFQISQTDLFGNPMMYDLKENGDKIPITNENRKEFVNLYSDYILNKSVEKQFKAFRRGFHMVTNESPLKYLFRPEEIELLICGSRNLDFQALEETTEYDGGYTRDSVLIREFWEIVHSFTDEQKRLFLQFTTGTDRAPVGGLGKLKMIIAKNGPDTERLPTSHTCFNVLLLPEYSSKEKLKERLLKAITYAKGFGML

SEQ ID NO: 9647 - protein, 872 aa, Homo sapiens
MATACKRSGEPQSDDIEASRMKRAAAKHLIERYYHQLTEGCGNEACTNEFCASCPTFLRMDNNAAAIKALELYKINAKLCDPHPSKKGASSAYLENSKGAPNNSCSEIKMNKKGARIDFKDVTYLTEEKVYEILELCREREDYSPLIRVIGRVFSSAEALVQSFRKVKQHTKEELKSLQAKDEDKDEDEKEKAACSAAAMEEDSEASSSRIGDSSQGDNNLQKLGPDDVSVDIDAIRRVYTRLLSNEKIETAFLNALVYLSPNVECDLTYHNVYSRDPNYLNLFIIVMENRNLHSPEYLEMALPLFCKAMSKLPLAAQGKLIRLWSKYNADQIRRMMETFQQLITYKVISNEFNSRNLVNDDDAIVAASKCLKMVYYANVVGGEVDTNHNEEDDEEPIPESSELTLQELLGEERRNKKGPRVDPLETELGVKTLDCRKPLIPFEEFINEPLNEVLEMDKDYTFFKVETENKFSFMTCPFILNAVTKNLGLYYDNRIRMYSERRITVLYSLVQGQQLNPYLRLKVRRDHIIDDALVRLEMIAMENPADLKKQLYVEFEGEQGVDEGGVSKEFFQLVVEEIFNPDIGMFTYDESTKLFWFNPSSFETEGQFTLIGIVLGLAIYNNCILDVHFPMVVYRKLMGKKGTFRDLGDSHPVLYQSLKDLLEYEGNVEDDMMITFQISQTDLFGNPMMYDLKENGDKIPITNENRKEFVNLYSDYILNKSVEKQFKAFRRGFHMVTNESPLKYLFRPEEIELLICGSRNLDFQALEETTEYDGGYTRDSVLIREFWEIVHSFTDEQKRLFLQFTTGTDRAPVGGLGKLKMIIAKNGPDTERLPTSHTCFNVLLLPEYSSKEKLKERLLKAITYAKGFGML

SEQ ID NO: 9648 - protein, 852 aa, Homo sapiens; identical to SEQ ID NO: 9645

SEQ ID NO: 9649 - protein, 727 aa, Homo sapiens [sequence omitted]

SEQ ID NO: 9650 - protein, 751 aa, Homo sapiens
MPALGWAVAAILMLQTAMAEPSPGTLPRKAGVFSDLSNQELKAVHSFLWSKKELRLQPSSTTTMAKNTVFLIEMLLPKKYHVLRFLDKGERHPVREARAVIFFGDQEHPNVTEFAVGPLPGPCYMRALSPRPGYQSSWASRPISTAEYALLYHTLQEATKPLHQFFLNTTGFSFQDCHDRCLAFTDVAPRGVASGQRRSWLIIQRYVEGYFLHPTGLELLVDHGSTDAGHWAVEQVWYNGKFYGSPEELARKYADGEVDVVVLEDPLPGGKGHDSTEEPPLFSSHKPRGDFPSPIHVSGPRLVQPHGPRFRLEGNAVLYGGWSFAFRLRSSSGLQVLNVHFGGERIAYEVSVQEAVALYGGHTPAGMQTKYLDVGWGLGSVTHELAPGIDCPETATFLDTFHYYDADDPVHYPRALCLFEMPTGVPLRRHFNSNFKGGFNFYAGLKGQVLVLRTTSTVYNYDYIWDFIFYPNGVMEAKMHATGYVHATFYTPEGLRHGTRLHTHLIGNIHTHLVHYRVDLDVAGTKNSFQTLQMKLENITNPWSPRHRVVQPTLEQTQYSWERQAAFRFKRKLPKYLLFTSPQENPWGHKRSYRLQIHSMADQVLPPGWQEEQAITWARYPLAVTKYRESELCSSSIYHQNDPWHPPVVFEQFLHNNENIENEDLVAWVTVGFLHIPHSEDIPNTATPGNSVGFLLRPFNFFPEDPSLASRDTVIVWPRDNGPNYVQRWIPEDRDCSMPPPFSYNGTYRPV

SEQ ID NO: 9651 - protein, 727 aa, Homo sapiens [sequence omitted]

SEQ ID NO: 9652 - protein, 770 aa, Homo sapiens [sequence omitted]

SEQ ID NO: 9653 - protein, 79 aa, Homo sapiens
MPALGWAVAAILMLQTAMAEPSPGTLPRKAGVFSDLASRDTVIVWPRDNGPNYVQRWIPEDRDCSMPPPFSYNGTYRPV

SEQ ID NO: 9654 - protein, 751 aa, Homo sapiens; identical to SEQ ID NO: 9650

SEQ ID NO: 9655 - protein, 1203 aa, Homo sapiens
MGNLKSVAQEPGPPCGLGLGLGLGLCGKQGPATPAPEPSRAPASLLPPAPEHSPPSSPLTQPPEGPKFPRVKNWEVGSITYDTLSAQAQQDGPCTPRRCLGSLVFPRKLQGRPSPGPPAPEQLLSQARDFINQYYSSIKRSGSQAHEQRLQEVEAEVAATGTYQLRESELVFGAKQAWRNAPRCVGRIQWGKLQVFDARDCRSAQEMFTYICNHIKYATNRGNLRSAITVFPQRCPGRGDFRIWNSQLVRYAGYRQQDGSVRGDPANVEITELCIQHGWTPGNGRFDVLPLLLQAPDEPPELFLLPPELVLEVPLEHPTLEWFAALGLRWYALPAVSNMLLEIGGLEFPAAPFSGWYMSTEIGTRNLCDPHRYNILEDVAVCMDLDTRTTSSLWKDKAAVEINVAVLHSYQLAKVTIVDHHAATASFMKHLENEQKARGGCPADWAWIVPPISGSLTPVFHQEMVNYFLSPAFRYQPDPWKGSAAKGTGITRKKTFKEVANAVKISASLMGTVMAKRVKATILYGSETGRAQSYAQQLGRLFRKAFDPRVLCMDEYDVVSLEHETLVLVVTSTFGNGDPPENGESFAAALMEMSGPYNSSPRPEQHKSYKIRFNSISCSDPLVSSWRRKRKESSNTDSAGALGTLRFCVFGLGSRAYPHFCAFARAVDTRLEELGGERLLQLGQGDELCGQEEAFRGWAQAAFQAACETFCVGEDAKAAARDIFSPKRSWKRQRYRLSAQAEGLQLLPGLIHVHRRKMFQATIRSVENLQSSKSTRATILVRLDTGGQEGLQYQPGDHIGVCPPNRPGLVEALLSRVEDPPAPTEPVAVEQLEKGSPGGPPPGWVRDPRLPPCTLRQALTFFLDITSPPSPQLLRLLSTLAEEPREQQELEALSQDPRRYEEWKWFRCPTLLEVLEQFPSVALPAPLLLTQLPLLQPRYYSVSSAPSTHPGEIHLTVAVLAYRTQDGLGPLHYGVCSTWLSQLKPGDPVPCFIRGAPSFRLPPDPSLPCILVGPGTGIAPFRGFWQERLHDIESKGLQPTPMTLVFGCRCSQLDHLYRDEVQNAQQRGVFGRVLTAFSREPDNPKTYVQDILRTELAAEVHRVLCLERGHMFVCGDVTMATNVLQTVQRILATEGDMELDEAGDVIGVLRDQQRYHEDIFGLTLRTQEVTSRIRTQSFSLQERQLRGAVPWAFDPPGSDTNSP

SEQ ID NO: 9656 - protein, 464 aa, Homo sapiens
MASESGKLWGGRFVGAVDPIMEKFNASIAYDRHLWEVDVQGSKAYSRGLEKAGLLTKAEMDQILHGLDKVAEEWAQGTFKLNSNDEDIHTANERRLKELIGATAGKLHTGRSRNDQVVTDLRLWMRQTCSTLSGLLWELIRTMVDRAEAERDVLFPGYTHLQRAQPIRWSHWILSHAVALTRDSERLLEVRKRINVLPLGSGAIAGNPLGVDRELLRAELNFGAITLNSMDATSERDFVAEFLFWASLCMTHLSRMAEDLILYCTKEFSFVQLSDAYSTGSSLMPQKKNPDSLELIRSKAGRVFGRCAGLLMTLKGLPSTYNKDLQEDKEAVFEVSDTMSAVLQVATGVISTLQIHQENMGQALSPDMLATDLAYYLVRKGMPFRQAHEASGKAVFMAETKGVALNQLSLQELQTISPLFSGDVICVWDYGHSVEQYGALGGTARSSVDWQIRQVRALLQAQQA

SEQ ID NO: 9657 - protein, 372 aa, Homo sapiens
MEKFNASIAYDRHLWEVDVQGSKAYSRGLEKAGLLTKAEMDQILHGLDKVAEEWAQGTFKLNSNDEDIHTANERRLKELIGATAGKLHTGRSRNDQVVTDLRLWMRQTCSTLSGLLWELIRTMVDRAEAERDVLFPGYTHLQRAQPIRWSHWILSHAVALTRDSERLLEVRKRINVLPLGSGAIAGNPLGVDRELLRAELNFGAITLNSMDATSERDFVAEFLFWASLCMTHLSRMAEDLILYCTKEFSFVQLSDAYSTGSSLMPQKKNPDSLELIRSKAGRVFGRCAGLLMTLKGLPSTYNKDLQRTWDRLSAPTCWPLTLPITWSAKGCHSARPTRPPGKLCSWPRPRGSPSTSCHCRSCRPSAPCSRAT

SEQ ID NO: 9658 - protein, 464 aa, Homo sapiens; identical to SEQ ID NO: 9656

SEQ ID NO: 9659 - protein, 111 aa, Homo sapiens
MAGKQAISASGKWLDGIRKWYYNTAGFNKLGLMRDDTIYEDEDIKEAIRRLPENLYNDRMCHIKSALDLTMKHQILPKEQWTKYEEENFYLELYVQEVIRERKEREEWAKK

SEQ ID NO: 9660 - protein, 469 aa, Homo sapiens [sequence omitted]

SEQ ID NO: 9661 - protein, 509 aa, Homo sapiens
MAAAAGMLLLGLLQAGGSVLGQAMEKVTGGNLLSMLLIACAFTLSLVYLIRLAAGHLVQLPAGVKSPPYIFSPIPFLGHAIAFGKSPIEFLENAYEKYGPVFSFTMVGKTFTYLLGSDAAALLFNSKNEDLNAEDVYSRLTTPVFGKGVAYDVPNPVFLEQKKMLKSGLNIAHFKQHVSIIEKETKEYFESWGESGEKNVFEALSELIILTASHCLHGKEIRSQLNEKVAQLYADLDGGFSHAAWLLPGWLPLPSFRRRDRAHREIKDIFYKAIQKRRQSQEKIDDILQTLLDATYKDGRPLTDDEVAGMLIGLLLAGQHTSSTTSAWMGFFLARDKTLQKKCYLEQKTVCGENLPPLTYDQLKDLNLLDRCIKETLRLRPPIMIMMRMARTPQTVAGYTIPPGHQVCVSPTVNQRLKDSWVERLDFNPDRYLQDNPASGEKFAYVPFGAGRHRCIGENFAYVQIKTIWSTMLRLYEFDLIDGYFPTVNYTTMIHTPENPVIRYKRRSK

SEQ ID NO: 9662 - protein, 509 aa, Homo sapiens; identical to SEQ ID NO: 9661

SEQ ID NO: 9663 - protein, 392 aa, Homo sapiens
MITLITEQLQKQTLDELKCTRFSISLPLPDHADISNCGNSFQLVSEGASWRGLPHCSCAEFQDSLNFSYHPSGLSLHLRPPSRGNSPKEQPFSQVLRPEPPDPEKLPVPPAPPSKRHCRSLSVPVDLSRWQPVWRPAPSKLWTPIKHRGSGGGGGPQVPHQSPPKRVSSLRFLQAPSASSQCAPAHRPYSPPFFSLALAQDSSRPCAASPQSGSWESDAESLSPCPPQRRFSLSPSLGPQASRFLPSARSSPASSPELPWRPRGLRNLPRSRSQPCDLDARKTGVKRRHEEDPRRLRPSLDFDKMNQKPYSGGLCLQETAREGSSISPPWFMACSPPPLSASCSPTGGSSQVLSESEEEEEGAVRWGRQALSKRTLCQRDFGDLDLNLIEEN

SEQ ID NO: 9664 - protein, 1181 aa, Homo sapiens
MNPRQGYSLSGYYTHPFQGYEHRQLRYQQPGPGSSPSSFLLKQIEFLKGQLPEAPVIGKQTPSLPPSLPGLRPRFPVLLASSTRGRQVDIRGVPRGVHLGSQGLQRGFQHPSPRGRSLPQRGVDCLSSHFQELSIYQDQEQRILKFLEELGEGKATTAHDLSGKLGTPKKEINRVLYSLAKKGKLQKEAGTPPLWKIAVSTQAWNQHSGVVRPDGHSQGAPNSDPSLEPEDRNSTSVSEDLLEPFIAVSAQAWNQHSGVVRPDSHSQGSPNSDPGLEPEDSNSTSALEDPLEFLDMAEIKEKICDYLFNVSDSSALNLAKNIGLTKARDINAVLIDMERQGDVYRQGTTPPIWHLTDKKRERMQIKRNTNSVPETAPAAIPETKRNAEFLTCNIPTSNASNNMVTTEKVENGQEPVIKLENRQEARPEPARLKPPVHYNGPSKAGYVDFENGQWATDDIPDDLNSIRAAPGEFRAIMEMPSFYSHGLPRCSPYKKLTECQLKNPISGLLEYAQFASQTCEFNMIEQSGPPHEPRFKFQVVINGREFPPAEAGSKKVAKQDAAMKAMTILLEEAKAKDSGKSEESSHYSTEKESEKTAESQTPTPSATSFFSGKSPVTTLLECMHKLGNSCEFRLLSKEGPAHEPKFQYCVAVGAQTFPSVSAPSKKVAKQMAAEEAMKALHGEATNSMASDNQVRKIGELVRYLNTNPVGGLLEYARSHGFAAEFKLVDQSGPPHEPKFVYQAKVGGRWFPAVCAHSKKQGKQEAADAALRVLIGENEKAERMGFTELPLTGSTFHDQIAMLSHRCFNTLTNSFQPSLLGRKILAAIIMKKDSEDMGVVVSLGTGNRCVKGDSLSLKGETVNDCHAEIISRRGFIRFLYSELMKYNSQTAKDSIFEPAKGGEKLQIKKTVSFHLYISTAPCGDGALFDKSCSDRAMESTESRHYPVFENPKQGKLRTKVENGEGTIPVESSDIVPTWDGIRLGERLRTMSCSDKILRWNVLGLQGALLTHFLQPIYLKSVTLGYLFSQGHLTRAICCRVTRDGSAFEDGLRHPFIVNHPKVGRVSIYDSKRQSGKTKETSVNWCLADGYDLEILDGTRGTVDGPRNELSRVSKKNIFLLFKKLCSFRYRRDLLRLSYGEAKKAARDYETAKNYFKKGLKDMGYGNWISKPQEEKNFYLCPV

SEQ ID NO: 9665 - protein, 886 aa, Homo sapiens
MAEIKEKICDYLFNVSDSSALNLAKNIGLTKARDINAVLIDMERQGDVYRQGTTPPIWHLTDKKRERMQIKRNTNSVPETAPAAIPETKRNAEFLTCNIPTSNASNNMVTTEKVENGQEPVIKLENRQEARPEPARLKPPVHYNGPSKAGYVDFENGQWATDDIPDDLNSIRAAPGEFRAIMEMPSFYSHGLPRCSPYKKLTECQLKNPISGLLEYAQFASQTCEFNMIEQSGPPHEPRFKFQVVINGREFPPAEAGSKKVAKQDAAMKAMTILLEEAKAKDSGKSEESSHYSTEKESEKTAESQTPTPSATSFFSGKSPVTTLLECMHKLGNSCEFRLLSKEGPAHEPKFQYCVAVGAQTFPSVSAPSKKVAKQMAAEEAMKALHGEATNSMASDNQVRKIGELVRYLNTNPVGGLLEYARSHGFAAEFKLVDQSGPPHEPKFVYQAKVGGRWFPAVCAHSKKQGKQEAADAALRVLIGENEKAERMGFTELPLTGSTFHDQIAMLSHRCFNTLTNSFQPSLLGRKILAAIIMKKDSEDMGVVVSLGTGNRCVKGDSLSLKGETVNDCHAEIISRRGFIRFLYSELMKYNSQTAKDSIFEPAKGGEKLQIKKTVSFHLYISTAPCGDGALFDKSCSDRAMESTESRHYPVFENPKQGKLRTKVENGEGTIPVESSDIVPTWDGIRLGERLRTMSCSDKILRWNVLGLQGALLTHFLQPIYLKSVTLGYLFSQGHLTRAICCRVTRDGSAFEDGLRHPFIVNHPKVGRVSIYDSKRQSGKTKETSVNWCLADGYDLEILDGTRGTVDGPRNELSRVSKKNIFLLFKKLCSFRYRRDLLRLSYGEAKKAARDYETAKNYFKKGLKDMGYGNWISKPQEEKNFYLCPV

SEQ ID NO: 9666 - protein, 886 aa, Homo sapiens; identical to SEQ ID NO: 9665

SEQ ID NO: 9667 - protein, 1226 aa, Homo sapiens
MNPRQGYSLSGYYTHPFQGYEHRQLRYQQPGPGSSPSSFLLKQIEFLKGQLPEAPVIGKQTPSLPPSLPGLRPRFPVLLASSTRGRQVDIRGVPRGVHLGSQGLQRGFQHPSPRGRSLPQRGVDCLSSHFQELSIYQDQEQRILKFLEELGEGKATTAHDLSGKLGTPKKEINRVLYSLAKKGKLQKEAGTPPLWKIAVSTQAWNQHSGVVRPDGHSQGAPNSDPSLEPEDRNSTSVSEDLLEPFIAVSAQAWNQHSGVVRPDSHSQGSPNSDPGLEPEDSNSTSALEDPLEFLDMAEIKEKICDYLFNVSDSSALNLAKNIGLTKARDINAVLIDMERQGDVYRQGTTPPIWHLTDKKRERMQIKRNTNSVPETAPAAIPETKRNAEFLTCNIPTSNASNNMVTTEKVENGQEPVIKLENRQEARPEPARLKPPVHYNGPSKAGYVDFENGQWATDDIPDDLNSIRAAPGEFRAIMEMPSFYSHGLPRCSPYKKLTECQLKNPISGLLEYAQFASQTCEFNMIEQSGPPHEPRFKFQVVINGREFPPAEAGSKKVAKQDAAMKAMTILLEEAKAKDSGKSEESSHYSTEKESEKTAESQTPTPSATSFFSGKSPVTTLLECMHKLGNSCEFRLLSKEGPAHEPKFQYCVAVGAQTFPSVSAPSKKVAKQMAAEEAMKALHGEATNSMASDNQPEGMISESLDNLESMMPNKVRKIGELVRYLNTNPVGGLLEYARSHGFAAEFKLVDQSGPPHEPKFVYQAKVGGRWFPAVCAHSKKQGKQEAADAALRVLIGENEKAERMGFTEVTPVTGASLRRTMLLLSRSPEAQPKTLPLTGSTFHDQIAMLSHRCFNTLTNSFQPSLLGRKILAAIIMKKDSEDMGVVVSLGTGNRCVKGDSLSLKGETVNDCHAEIISRRGFIRFLYSELMKYNSQTAKDSIFEPAKGGEKLQIKKTVSFHLYISTAPCGDGALFDKSCSDRAMESTESRHYPVFENPKQGKLRTKVENGEGTIPVESSDIVPTWDGIRLGERLRTMSCSDKILRWNVLGLQGALLTHFLQPIYLKSVTLGYLFSQGHLTRAICCRVTRDGSAFEDGLRHPFIVNHPKVGRVSIYDSKRQSGKTKETSVNWCLADGYDLEILDGTRGTVDGPRNELSRVSKKNIFLLFKKLCSFRYRRDLLRLSYGEAKKAARDYETAKNYFKKGLKDMGYGNWISKPQEEKNFYLCPV

SEQ ID NO: 9668 - protein, 905 aa, Homo sapiens
MAEIKEKICDYLFNVSDSSALNLAKNIGLTKARDINAVLIDMERQGDVYRQGTTPPIWHLTDKKRERMQIKRNTNSVPETAPAAIPETKRNAEFLTCNIPTSNASNNMVTTEKVENGQEPVIKLENRQEARPEPARLKPPVHYNGPSKAGYVDFENGQWATDDIPDDLNSIRAAPGEFRAIMEMPSFYSHGLPRCSPYKKLTECQLKNPISGLLEYAQFASQTCEFNMIEQSGPPHEPRFKFQVVINGREFPPAEAGSKKVAKQDAAMKAMTILLEEAKAKDSGKSEESSHYSTEKESEKTAESQTPTPSATSFFSGKSPVTTLLECMHKLGNSCEFRLLSKEGPAHEPKFQYCVAVGAQTFPSVSAPSKKVAKQMAAEEAMKALHGEATNSMASDNQPEGMISESLDNLESMMPNKVRKIGELVRYLNTNPVGGLLEYARSHGFAAEFKLVDQSGPPHEPKFVYQAKVGGRWFPAVCAHSKKQGKQEAADAALRVLIGENEKAERMGFTELPLTGSTFHDQIAMLSHRCFNTLTNSFQPSLLGRKILAAIIMKKDSEDMGVVVSLGTGNRCVKGDSLSLKGETVNDCHAEIISRRGFIRFLYSELMKYNSQTAKDSIFEPAKGGEKLQIKKTVSFHLYISTAPCGDGALFDKSCSDRAMESTESRHYPVFENPKQGKLRTKVENGEGTIPVESSDIVPTWDGIRLGERLRTMSCSDKILRWNVLGLQGALLTHFLQPIYLKSVTLGYLFSQGHLTRAICCRVTRDGSAFEDGLRHPFIVNHPKVGRVSIYDSKRQSGKTKETSVNWCLADGYDLEILDGTRGTVDGPRNELSRVSKKNIFLLFKKLCSFRYRRDLLRLSYGEAKKAARDYETAKNYFKKGLKDMGYGNWISKPQEEKNFYLCPV

SEQ ID NO: 9669 - protein, 931 aa, Homo sapiens
MAEIKEKICDYLFNVSDSSALNLAKNIGLTKARDINAVLIDMERQGDVYRQGTTPPIWHLTDKKRERMQIKRNTNSVPETAPAAIPETKRNAEFLTCNIPTSNASNNMVTTEKVENGQEPVIKLENRQEARPEPARLKPPVHYNGPSKAGYVDFENGQWATDDIPDDLNSIRAAPGEFRAIMEMPSFYSHGLPRCSPYKKLTECQLKNPISGLLEYAQFASQTCEFNMIEQSGPPHEPRFKFQVVINGREFPPAEAGSKKVAKQDAAMKAMTILLEEAKAKDSGKSEESSHYSTEKESEKTAESQTPTPSATSFFSGKSPVTTLLECMHKLGNSCEFRLLSKEGPAHEPKFQYCVAVGAQTFPSVSAPSKKVAKQMAAEEAMKALHGEATNSMASDNQPEGMISESLDNLESMMPNKVRKIGELVRYLNTNPVGGLLEYARSHGFAAEFKLVDQSGPPHEPKFVYQAKVGGRWFPAVCAHSKKQGKQEAADAALRVLIGENEKAERMGFTEVTPVTGASLRRTMLLLSRSPEAQPKTLPLTGSTFHDQIAMLSHRCFNTLTNSFQPSLLGRKILAAIIMKKDSEDMGVVVSLGTGNRCVKGDSLSLKGETVNDCHAEIISRRGFIRFLYSELMKYNSQTAKDSIFEPAKGGEKLQIKKTVSFHLYISTAPCGDGALFDKSCSDRAMESTESRHYPVFENPKQGKLRTKVENGEGTIPVESSDIVPTWDGIRLGERLRTMSCSDKILRWNVLGLQGALLTHFLQPIYLKSVTLGYLFSQGHLTRAICCRVTRDGSAFEDGLRHPFIVNHPKVGRVSIYDSKRQSGKTKETSVNWCLADGYDLEILDGTRGTVDGPRNELSRVSKKNIFLLFKKLCSFRYRRDLLRLSYGEAKKAARDYETAKNYFKKGLKDMGYGNWISKPQEEKNFYLCPV

SEQ ID NO: 9670 - protein, 1200 aa, Homo sapiens
MNPRQGYSLSGYYTHPFQGYEHRQLRYQQPGPGSSPSSFLLKQIEFLKGQLPEAPVIGKQTPSLPPSLPGLRPRFPVLLASSTRGRQVDIRGVPRGVHLGSQGLQRGFQHPSPRGRSLPQRGVDCLSSHFQELSIYQDQEQRILKFLEELGEGKATTAHDLSGKLGTPKKEINRVLYSLAKKGKLQKEAGTPPLWKIAVSTQAWNQHSGVVRPDGHSQGAPNSDPSLEPEDRNSTSVSEDLLEPFIAVSAQAWNQHSGVVRPDSHSQGSPNSDPGLEPEDSNSTSALEDPLEFLDMAEIKEKICDYLFNVSDSSALNLAKNIGLTKARDINAVLIDMERQGDVYRQGTTPPIWHLTDKKRERMQIKRNTNSVPETAPAAIPETKRNAEFLTCNIPTSNASNNMVTTEKVENGQEPVIKLENRQEARPEPARLKPPVHYNGPSKAGYVDFENGQWATDDIPDDLNSIRAAPGEFRAIMEMPSFYSHGLPRCSPYKKLTECQLKNPISGLLEYAQFASQTCEFNMIEQSGPPHEPRFKFQVVINGREFPPAEAGSKKVAKQDAAMKAMTILLEEAKAKDSGKSEESSHYSTEKESEKTAESQTPTPSATSFFSGKSPVTTLLECMHKLGNSCEFRLLSKEGPAHEPKFQYCVAVGAQTFPSVSAPSKKVAKQMAAEEAMKALHGEATNSMASDNQPEGMISESLDNLESMMPNKVRKIGELVRYLNTNPVGGLLEYARSHGFAAEFKLVDQSGPPHEPKFVYQAKVGGRWFPAVCAHSKKQGKQEAADAALRVLIGENEKAERMGFTELPLTGSTFHDQIAMLSHRCFNTLTNSFQPSLLGRKILAAIIMKKDSEDMGVVVSLGTGNRCVKGDSLSLKGETVNDCHAEIISRRGFIRFLYSELMKYNSQTAKDSIFEPAKGGEKLQIKKTVSFHLYISTAPCGDGALFDKSCSDRAMESTESRHYPVFENPKQGKLRTKVENGEGTIPVESSDIVPTWDGIRLGERLRTMSCSDKILRWNVLGLQGALLTHFLQPIYLKSVTLGYLFSQGHLTRAICCRVTRDGSAFEDGLRHPFIVNHPKVGRVSIYDSKRQSGKTKETSVNWCLADGYDLEILDGTRGTVDGPRNELSRVSKKNIFLLFKKLCSFRYRRDLLRLSYGEAKKAARDYETAKNYFKKGLKDMGYGNWISKPQEEKNFYLCPV

SEQ ID NO: 9671 - protein, 783 aa, Homo sapiens
MPGKLRSDAGLESDTAMKKGETLRKQTEEKEKKEKPKSDKTEEIAEEEETVFPKAKQVKKKAEPSEVDMNSPKSKKAKKKEEPSQNDISPKTKSLRKKKEPIEKKVVSSKTKKVTKNEEPSEEEIDAPKPKKMKKEKEMNGETREKSPKLKNGFPHPEPDCNPSEAASEESNSEIEQEIPVEQKEGAFSNFPISEETIKLLKGRGVTFLFPIQAKTFHHVYSGKDLIAQARTGTGKTFSFAIPLIEKLHGELQDRKRGRAPQVLVLAPTRELANQVSKDFSDITKKLSVACFYGGTPYGGQFERMRNGIDILVGTPGRIKDHIQNGKLDLTKLKHVVLDEVDQMLDMGFADQVEEILSVAYKKDSEDNPQTLLFSATCPHWVFNVAKKYMKSTYEQVDLIGKKTQKTAITVEHLAIKCHWTQRAAVIGDVIRVYSGHQGRTIIFCETKKEAQELSQNSAIKQDAQSLHGDIPQKQREITLKGFRNGSFGVLVATNVAARGLDIPEVDLVIQSSPPKDVESYIHRSGRTGRAGRTGVCICFYQHKEEYQLVQVEQKAGIKFKRIGVPSATEIIKASSKDAIRLLDSVPPTAISHFKQSAEKLIEEKGAVEALAAALAHISGATSVDQRSLINSNVGFVTMILQCSIEMPNISYAWKELKEQLGEEIDSKVKGMVFLKGKLGVCFDVPTASVTEIQEKWHDSRRWQLSVATEQPELEGPREGYGGFRGQREGSRGFRGQRDGNRRFRGQREGSRGPRGQRSGGGNKSNRSQNKGQKRSFSKAFGQ

SEQ ID NO: 9672 - protein, 173 aa, Homo sapiens [sequence omitted]

SEQ ID NO: 9673 - protein, 415 aa, Homo sapiens
MKLSLTKVVNGCRLGKIKNLGKTGDHTMDIPGCLLYTKTGSAPHLTHHTLHNIHGVPAMAQLTLSSLAEHHEVLTEYKEGVGKFIGMPESLLYCSLHDPVSPCPAGYVTNKSVSVWSVAGRVEMTVSKFMAIQKALQPDWFQCLSDGEVSCKEATSIKRVRKSVDRSLLFLDNCLRLQEESEVLQKSVIIGVIEGGDVMEERLRSARETAKRPVGGFLLDGFQGNPTTLEARLRLLSSVTAELPEDKPRLISGVSRPDEVLECIERGVDLFESFFPYQVTERGCALTFSFDYQPNPEETLLQQNGTQEEIKCMDQIKKIETTGCNQEITSFEINLKEKKYQEDFNPLVRGCSCYCCKNHTRAYIHHLLVTNELLAGVLLMMHNFEHYFGFFHYIREALKSDKLAQLKELIHRQAS

SEQ ID NO: 9674 - protein, 415 aa, Homo sapiens; identical to SEQ ID NO: 9673

SEQ ID NO: 9675 - protein, 417 aa, Homo sapiens
MKLSLTKVVNGCRLGKIKNLGKTGDHTMDIPGCLLYTKTGSAPHLTHHTLHNIHGVPAMAQLTLSSLAEHHEVLTEYKEGVGKFIGMPESLLYCSLHDPVSPCPAGYVTNKSVSVWSVAGRVEMTVSKFMAIQKALQPDWFQCLSDGEVSCKEATSIKRVRKSVDRSLLFLDNCLRLQEESEVLQKSVIIGVIEGGDVMEERLRSARETAKRPVGGFLLDGFQGNPTTLEARLRLLSSVTAELPEDKPRPVLISGVSRPDEVLECIERGVDLFESFFPYQVTERGCALTFSFDYQPNPEETLLQQNGTQEEIKCMDQIKKIETTGCNQEITSFEINLKEKKYQEDFNPLVRGCSCYCCKNHTRAYIHHLLVTNELLAGVLLMMHNFEHYFGFFHYIREALKSDKLAQLKELIHRQAS

SEQ ID NO: 9676 - protein, 331 aa, Homo sapiens
MRGYLVAIFLSAVFLYYVLHCILWGTNVYWVAPVEMKRRNKIQPCLSKPAFASLLRFHQFHPFLCAADFRKIASLYGSDKFDLPYGMRTSAEYFRLALSKLQSCDLFDEFDNIPCKKCVVVGNGGVLKNKTLGEKIDSYDVIIRMNNGPVLGHEEEVGRRTTFRLFYPESVFSDPIHNDPNTTVILTAFKPHDLRWLLELLMGDKINTNGFWKKPALNLIYKPYQIRILDPFIIRTAAYELLHFPKVFPKNQKPKHPTTGIIAITLAFYICHEVHLAGFKYNFSDLKSPLHYYGNATMSLMNKNAYHNVTAEQLFLKDIIEKNLVINLTQD

SEQ ID NO: 9677 - protein, 187 aa, Homo sapiens
MNNGPVLGHEEEVGRRTTFRLFYPESVFSDPIHNDPNTTVILTAFKPHDLRWLLELLMGDKINTNGFWKKPALNLIYKPYQIRILDPFIIRTAAYELLHFPKVFPKNQKPKHPTTGIIAITLAFYICHEVHLAGFKYNFSDLKSPLHYYGNATMSLMNKNAYHNVTAEQLFLKDIIEKNLVINLTQD

SEQ ID NO: 9678 - protein, 384 aa, Homo sapiens
MWQAPRERQQPAGAAAPQVSEPGAPLRSSLLGLGGSLLPAGFAAGLHCPGEPAMRGYLVAIFLSAVFLYYVLHCILWGTNVYWVAPVEMKRRNKIQPCLSKPAFASLLRFHQFHPFLCAADFRKIASLYGSDKFDLPYGMRTSAEYFRLALSKLQSCDLFDEFDNIPCKKCVVVGNGGVLKNKTLGEKIDSYDVIIRMNNGPVLGHEEEVGRRTTFRLFYPESVFSDPIHNDPNTTVILTAFKPHDLRWLLELLMGDKINTNGFWKKPALNLIYKPYQIRILDPFIIRTAAYELLHFPKVFPKNQKPKHPTTGIIAITLAFYICHEVHLAGFKYNFSDLKSPLHYYGNATMSLMNKNAYHNVTAEQLFLKDIIEKNLVINLTQD

SEQ ID NO: 9679 - protein, 331 aa, Homo sapiens; identical to SEQ ID NO: 9676

SEQ ID NO: 9680 - protein, 331 aa, Homo sapiens; identical to SEQ ID NO: 9676

SEQ ID NO: 9681 - protein, 331 aa, Homo sapiens; identical to SEQ ID NO: 9676

SEQ ID NO: 9682 - protein, 417 aa, Homo sapiens
MVVMHGYKAVKEALLDYKDEFSGRGDLPAFHAHRDRGIIFNNGPTWKDIRRFSLTTLRNYGMGKQGNESRIQREAHFLLEALRKTQGQPFDPTFLIGCAPCNVIADILFRKHFDYNDEKFLRLMYLFNENFHLLSTPWLQLYNNFPSFLHYLPGSHRKVIKNVAEVKEYVSERVKEHHQSLDPNCPRDLTDCLLVEMEKEKHSAERLYTMDGITVTVADLFFAGTETTSTTLRYGLLILMKYPEIEEKLHEEIDRVIGPSRIPAIKDRQEMPYMDAVVHEIQRFITLVPSNLPHEATRDTIFRGYLIPKGTVVVPTLDSVLYDNQEFPDPEKFKPEHFLNENGKFKYSDYFKPFSTGKRVCAGEGLARMELFLLLCAILQHFNLKPLVDPKDIDLSPIHIGFGCIPPRYKLCVIPRS

SEQ ID NO: 9683 - protein, 493 aa, Homo sapiens
MSALGVTVALLVWAAFLLLVSMWRQVHSSWNLPPGPFPLPIIGNLFQLELKNIPKSFTRLAQRFGPVFTLYVGSQRMVVMHGYKAVKEALLDYKDEFSGRGDLPAFHAHRDRGIIFNNGPTWKDIRRFSLTTLRNYGMGKQGNESRIQREAHFLLEALRKTQGQPFDPTFLIGCAPCNVIADILFRKHFDYNDEKFLRLMYLFNENFHLLSTPWLQLYNNFPSFLHYLPGSHRKVIKNVAEVKEYVSERVKEHHQSLDPNCPRDLTDCLLVEMEKEKHSAERLYTMDGITVTVADLFFAGTETTSTTLRYGLLILMKYPEIEEKLHEEIDRVIGPSRIPAIKDRQEMPYMDAVVHEIQRFITLVPSNLPHEATRDTIFRGYLIPKGTVVVPTLDSVLYDNQEFPDPEKFKPEHFLNENGKFKYSDYFKPFSTGKRVCAGEGLARMELFLLLCAILQHFNLKPLVDPKDIDLSPIHIGFGCIPPRYKLCVIPRS

SEQ ID NO: 9684 - protein, 376 aa, Homo sapiens
MLSLLSGLALLAISFLLLKLGTFCWDRSCLPPGPLPFPILGNLWQLCFQLHPETLLQLAQSVFTVWVGPIPVAVLSGFQVVKEALVSNSEQFSGRSLTPLFQDLFGERGRAAPPAGEGEAARWSLHSGRLGLGKLALEVQLQKEAAELAEAFRQEQGRPFDPQVSIVRSTVRVIGALVFGHHFLLEDPIFQELTQAIDFGLAFVSTVWRRLYDVFPWALCHLPGPHQEIFRYQEVVLSLIHQEITRHKLRAPEAPRDFISCYLAQISKVSLEQLLRKGGAIFLGCTSFLSTSFLSHGLSFSSLTLSTSFQSTLKMNPPQTHTKPPAETVQLELDEVLGAAPVVCYEDRKRLPYTMLSSMTCSASAASWPWVPCASV

SEQ ID NO: 9685 - protein, 290 aa, Homo sapiens [sequence omitted]

SEQ ID NO: 9686 - protein, 844 aa, Homo sapiens [sequence omitted]

SEQ ID NO: 9687 - protein, 835 aa, Homo sapiens [sequence omitted]

SEQ ID NO: 9688 - protein, 709 aa, Homo sapiens
MDAAGRGCHLLPLPAARGPARAPAAAAAAAASPPGPCSGAACAPSAAAGAGAMNPSSSAGEEKGATGGSSSSGSGAGSCCLGAEGGADPRGAGSAAAAGAAALDEPAAAGQKEKDEALEEKLRNLTFRKQVSYRKAISRAGLQHLAPAHPLSLPVANGPAKEPRATLDWSENAVNGEHLWLETNVSGDLCYLGEENCQVRFAKSALRRKCAVCKIVVHTACIEQLEKINFRCKPTFREGGSRSPRENFVRHHWVHRRRQEGKCKQCGKGFQQKFSFHSKEIVAISCSWCKQAFHNKVTCFMLHHIEEPCSLGAHAAVIVPPTWIIKVKKPQNSLKASNRKKKRTSFKRKASKRGMEQENKGRPFVIKPISSPLMKPLLVFVNPKSGGNQGTKVLQMFMWYLNPRQVFDLSQEGPKDALELYRKVPNLRILACGGDGTNENIAQNALGKHSVTTNAKNGQMVAALTSCCCAWLLRDKAEDLVGWILSILDELQLSPQPPVGVLPLGTGNDLARTLNWGGQWICSLIPQGYTDEPVSKILCQVEDGTVVQLDRWNLHVERNPDLPPEELEDGVCKLPLNVFNNYFSLGFDAHVTLEFHESREANPEKFNSRFRNKMFYAGCDGTDLTPKIQELKFQCIVFLNIPRYCAGTMPWGNPGDHHDFEPQRHDDGYIEVIGFTMASLLKQLTSEAQHRLSLASFVPPSHCTCALSL

SEQ ID NO: 9689 - protein, 764 aa, Homo sapiens [sequence omitted]

SEQ ID NO: 9690 - protein, 347 aa, Homo sapiens
MRFYRLLQIRAEALLAAGSHVIILGDLNTAHRPIDHWDAVNLECFEEDPGRKWMDSLLSNLGCQSASHVGPFIDSYRCFQPKQEGAFTCWSAVTGARHLNYGSRLDYVLGDRTLVIDTFQASFLLPEVMGSDHCPVGAVLSVSSVPAKQCPPLCTRFLPEFAGTQLKILRFLVPLEQSPVLEQSTLQHNNQTRVQTCQNKAQVRSTRPQPSQVGSSRGQKNLKSYFQPSPSCPQASPDIELPSLPLMSALMTPKTPEEKAVAKVVKGQAKTSEAKDEKELRTSFWKSVLAGPLRTPLCGGHREPCVMRTVKKPGPNLGRRFYMCARPRGPPTDPSSRCNFFLWSRPS

SEQ ID NO: 9691 - protein, 294 aa, Homo sapiens
MDSLLSNLGCQSASHVGPFIDSYRCFQPKQEGAFTCWSAVTGARHLNYGSRLDYVLGDRTLVIDTFQASFLLPEVMGSDHCPVGAVLSVSSVPAKQCPPLCTRFLPEFAGTQLKILRFLVPLEQSPVLEQSTLQHNNQTRVQTCQNKAQVRSTRPQPSQVGSSRGQKNLKSYFQPSPSCPQASPDIELPSLPLMSALMTPKTPEEKAVAKVVKGQAKTSEAKDEKELRTSFWKSVLAGPLRTPLCGGHREPCVMRTVKKPGPNLGRRFYMCARPRGPPTDPSSRCNFFLWSRPS

SEQ ID NO: 9692 - protein, 518 aa, Homo sapiens
MLRVVSWNINGIRRPLQGVANQEPSNCAAVAVGRILDELDADIVCLQETKVTRDALTEPLAIVEGYNSYFSFSRNRSGYSGVATFCKDNATPVAAEEGLSGLFATQNGDVGCYGNMDEFTQEELRALDSEGRALLTQHKIRTWEGKEKTLTLINVYCPHADPGRPERLVFKMRFYRLLQIRAEALLAAGSHVIILGDLNTAHRPIDHWDAVNLECFEEDPGRKWMDSLLSNLGCQSASHVGPFIDSYRCFQPKQEGAFTCWSAVTGARHLNYGSRLDYVLGDRTLVIDTFQASFLLPEVMGSDHCPVGAVLSVSSVPAKQCPPLCTRFLPEFAGTQLKILRFLVPLEQSPVLEQSTLQHNNQTRVQTCQNKAQVRSTRPQPSQVGSSRGQKNLKSYFQPSPSCPQASPDIELPSLPLMSALMTPKTPEEKAVAKVVKGQAKTSEAKDEKELRTSFWKSVLAGPLRTPLCGGHREPCVMRTVKKPGPNLGRRFYMCARPRGPPTDPSSRCNFFLWSRPS

SEQ ID NO: 9693 - protein, 479 aa, Homo sapiens
MSFGATPKMSPEMGELTQTRLQKIWIPHSSGSSRLQRRRGSSIPQFTNSPTMVIMVGLPARGKTYISTKLTRYLNWIGTPTKVFNLGQYRREAVSYKNYEFFLPDNMEALQIRKQCALAALKDVHNYLSHEEGHVAVFDATNTTRERRSLILQFAKEHGYKVFFIESICNDPGIIAENIRQVKLGSPDYIDCDREKVLEDFLKRIECYEVNYQPLDEELDSHLSYIKIFDVGTRYMVNRVQDHIQSRTVYYLMNIHVTPRSIYLCRHGESELNIRGRIGGDSGLSVRGKQYAYALANFIQSQGISSLKVWTSHMKRTIQTAEALGVPYEQWKALNEIDAGVCEEMTYEEIQEHYPEEFALRDQDKYRYRYPKGESYEDLVQRLEPVIMELERQENVLVICHQAVMRCLLAYFLDKSSDELPYLKCPLHTVLKLTPVAYGCKVESIYLNVEAVNTHREKPENVDITREPEEALDTVPAHY

SEQ ID NO: 9694 - protein, 587 aa, Homo sapiens
MVTAAMLLQCCPVLARGPTSLLGKVVKTHQFLFGIGRCPILATQGPNCSQIHLKATKAGGDSPSWAKGHCPFMLSELQDGKSKIVQKAAPEVQEDVKAFKTDLPSSLVSVSLRKPFSGPQEQEQISGKVTHLIQNNMPGNYVFSYDQFFRDKIMEKKQDHTYRVFKTVNRWADAYPFAQHFSEASVASKDVSVWCSNDYLGMSRHPQVLQATQETLQRHGAGAGGTRNISGTSKFHVELEQELAELHQKDSALLFSSCFVANDSTLFTLAKILPGCEIYSDAGNHASMIQGIRNSGAAKFVFRHNDPDHLKKLLEKSNPKIPKIVAFETVHSMDGAICPLEELCDVSHQYGALTFVDEVHAVGLYGSRGAGIGERDGIMHKIDIISGTLGKAFGCVGGYIASTRDLVDMVRSYAAGFIFTTSLPPMVLSGALESVRLLKGEEGQALRRAHQRNVKHMRQLLMDRGLPVIPCPSHIIPIRVGNAALNSKLCDLLLSKHGIYVQAINYPTVPRGEELLRLAPSPHHSPQMMEDFVEKLLLAWTAVGLPLQDVSVAACNFCRRPVHFELMSEWERSYFGNMGPQYVTTYA

SEQ ID NO: 9695 - protein, 611 aa, Homo sapiens
MRGGEVALGWNKKKRLFCEDFRFKMVTAAMLLQCCPVLARGPTSLLGKVVKTHQFLFGIGRCPILATQGPNCSQIHLKATKAGGDSPSWAKGHCPFMLSELQDGKSKIVQKAAPEVQEDVKAFKTDLPSSLVSVSLRKPFSGPQEQEQISGKVTHLIQNNMPGNYVFSYDQFFRDKIMEKKQDHTYRVFKTVNRWADAYPFAQHFSEASVASKDVSVWCSNDYLGMSRHPQVLQATQETLQRHGAGAGGTRNISGTSKFHVELEQELAELHQKDSALLFSSCFVANDSTLFTLAKILPGCEIYSDAGNHASMIQGIRNSGAAKFVFRHNDPDHLKKLLEKSNPKIPKIVAFETVHSMDGAICPLEELCDVSHQYGALTFVDEVHAVGLYGSRGAGIGERDGIMHKIDIISGTLGKAFGCVGGYIASTRDLVDMVRSYAAGFIFTTSLPPMVLSGALESVRLLKGEEGQALRRAHQRNVKHMRQLLMDRGLPVIPCPSHIIPIRVGNAALNSKLCDLLLSKHGIYVQAINYPTVPRGEELLRLAPSPHHSPQMMEDFVEKLLLAWTAVGLPLQDVSVAACNFCRRPVHFELMSEWERSYFGNMGPQYVTTYA

SEQ ID NO: 9696 - protein, 335 aa, Homo sapiens
MVRRDRLRRMREWWVQVGLLAVPLLAAYLHIPPPQLSPALHSWKSSGKFFTYKGLRIFYQDSVGVVGSPEIVVLLHGFPTSSYDWYKIWEGLTLRFHRVIALDFLGFGFSDKPRPHHYSIFEQASIVEALLRHLGLQNRRINLLSHDYGDIVAQELLYRYKQNRSGRLTIKSLCLSNGGIFPETHRPLLLQKLLKDGGVLSPILTRLMNFFVFSRGLTPVFGPYTRPSESELWDMWAGIRNNDGNLVIDSLLQYINQRKKFRRRWVGALASVTIPIHFIYGPLDPVNPYPEFLELYRKTLPRSTVSILDDHISHYPQLEDPMGFLNAYMGFINSF

SEQ ID NO: 9697 - protein, 326 aa, Homo sapiens
MREWWVQVGLLAVPLLAAYLHIPPPQLSPALHSWKSSGKFFTYKGLRIFYQDSVGVVGSPEIVVLLHGFPTSSYDWYKIWEGLTLRFHRVIALDFLGFGFSDKPRPHHYSIFEQASIVEALLRHLGLQNRRINLLSHDYGDIVAQELLYRYKQNRSGRLTIKSLCLSNGGIFPETHRPLLLQKLLKDGGVLSPILTRLMNFFVFSRGLTPVFGPYTRPSESELWDMWAGIRNNDGNLVIDSLLQYINQRKKFRRRWVGALASVTIPIHFIYGPLDPVNPYPEFLELYRKTLPRSTVSILDDHISHYPQLEDPMGFLNAYMGFINSF

SEQ ID NO: 9698 - protein, 335 aa, Homo sapiens; identical to SEQ ID NO: 9696

SEQ ID NO: 9699 - protein, 327 aa, Homo sapiens
MGGSALNQGVLEGDDAPGQSLYERLSQRMLDISGDRGVLKDVIREGAGDLVAPDASVLVKYSGYLEHMDRPFDSNYFRKTPRLMKLGEDITLWGMELGLLSMRRGELARFLFKPNYAYGTLGCPPLIPPNTTVLFEIELLDFLDCAESDKFCALSAEQQDQFPLQKVLKVAATEREFGNYLFRQNRFYDAKVRYKRALLLLRRRSAPPEEQHLVEAAKLPVLLNLSFTYLKLDRPTIALCYGEQALIIDQKNAKALFRCGQACLLLTEYQKARDFLVRAQKEQPFNHDINNELKKLASCYRDYVDKEKEMWHRMFAPCGDGSTAGES

SEQ ID NO: 9700 - protein, 101 aa, Homo sapiens
MGGSALNQGVLEGDDAPGQSLYERLSQRMLDISGDRGVLKDVIREGAGDLVAPDASVLDITLWGMELGLLSMRRGELARCFVLGKLLDSQGPSLHLYLRAS

SEQ ID NO: 9701 - protein, 281 aa, Homo sapiens
MASRGRRPEHGGPPELFYDETEARKYVRNSRMIDIQTRMAGRALELLYLPENKPCYLLDIGCGTGLSGSYLSDEGHYWVGLDISPAMLDEAVDREIEGDLLLGDMGQGIPFKPGTFDGCISISAVQWLCNANKKSENPAKRLYCFFASLFSVLVRGSRAVLQLYPENSEQLELITTQATKAGFSGGMVVDYPNSAKAKKFYLCLFSGPSTFIPEGLSENQDEVEPRESVFTNERFPLRMSRRGMVRKSRAWVLEKKERHRRQGREVRPDTQYTGRKRKPRF

SEQ ID NO: 9702 - protein, 220 aa, Homo sapiens
MASRGRRPEHGGPPELFYDETEARKYVRNSRMIDIQTRMAGRALELLYLPENKPCYLLDIGCGTGLSGSYLSDEGHYWVGLDISPAMLDEAVDREIEGDLLLGDMGQGIPFKPGTFDGCISISAVQWLCNANKKSENPAKRLYCFFASLFSVLVRGSRAVLQLYPENSEQVSPSATGCAGELGDSTGKLSWGSDKESYADWREKEETCTLVWPLMAHLMT

SEQ ID NO: 9703 - protein, 346 aa, Homo sapiens
MAASQAVEEMRSRVVLGEFGVRNVHTTDFPGNYSGYDDAWDQDRFEKNFRVDVVHMDENSLEFDMVGIDAAIANAFRRILLAEVPTMAVEKVLVYNNTSIVQDEILAHRLGLIPIHADPRLFEYRNQGDEEGTEIDTLQFRLQVRCTRNPHAAKDSSDPNELYVNHKVYTRHMTWIPLGNQADLFPEGTIRPVHDDILIAQLRPGQEIDLLMHCVKGIGKDHAKFSPVATASYRLLPDITLLEPVEGEAAEELSRCFSPGVIEVQEVQGKKVARVANPRLDTFSREIFRNEKLKKVVRLARVRDHYIFSVESTGVLPPDVLVSEAIKVLMGKCRRFLDELDAVQMD

SEQ ID NO: 9704 - protein, 342 aa, Homo sapiens
MAASQAVEEMRSRVVLGEFGVRNVHTTDFPGNYSGYDDAWDQDRFEKNFRVDVVHMDENSLEFDMVGIDAAIANAFRRILLAEVPTMAVEKVLVYNNTSIVQDEILAHRLGLIPIHADPRLFEYRNQGDEEGTEIDTLQFRLQVRCTRNPHAAKDSSDPNELYVNHKVYTRHMTWIPLGNQADLFPEGTIRPVHDDILIAQLRPGQEIDLLMHCVKGIGKDHAKFSPVATASYRLLPDITLLEPVEGEAAEELSRCFSPGVIEVQEVQGKKVARVANPRLDTFSREIFRNEKLKKVVRLARVRDHYICKKDLLAAVAHTCNPSTLGGQGEWITGSRERDHPG

SEQ ID NO: 9705 - protein, 346 aa, Homo sapiens; identical to SEQ ID NO: 9703

SEQ ID NO: 9706 - protein, 60 aa, Homo sapiens
MHHHAWLIFVFLVEMGFRHVGQAGLELLISSDPPALASQSAGITGLSHQASPNFYFLFYL

SEQ ID NO: 9707 - protein, 713 aa, Homo sapiens
MATGQDRVVALVDMDCFFVQVEQRQNPHLRNKPCAVVQYKSWKGGGIIAVSYEARAFGVTRSMWADDAKKLCPDLLLAQVRESRGKANLTKYREASVEVMEIMSRFAVIERASIDEAYVDLTSAVQERLQKLQGQPISADLLPSTYIEGLPQGPTTAEETVQKEGMRKQGLFQWLDSLQIDNLTSPDLQLTVGAVIVEEMRAAIERETGFQCSAGISHNKVLAKLACGLNKPNRQTLVSHGSVPQLFSQMPIRKIRSLGGKLGASVIEILGIEYMGELTQFTESQLQSHFGEKNGSWLYAMCRGIEHDPVKPRQLPKTIGCSKNFPGKTALATREQVQWWLLQLAQELEERLTKDRNDNDRVATQLVVSIRVQGDKRLSSLRRCCALTRYDAHKMSHDAFTVIKNCNTSGIQTEWSPPLTMLFLCATKFSASAPSSSTDITSFLSSDPSSLPKVPVTSSEAKTQGSGPAVTATKKATTSLESFFQKAAERQKVKEASLSSLTAPTQAPMSNSPSKPSLPFQTSQSTGTEPFFKQKSLLLKQKQLNNSSVSSPQQNPWSNCKALPNSLPTEYPGCVPVCEGVSKLEESSKATPAEMDLAHNSQSMHASSASKSVLEVTQKATPNPSLLAAEDQVPCEKCGSLVPVWDMPEHMDYHFALELQKSFLQPHSSNPQVVSAVSHQGKRNPKSPLACTNKRPRPEGMQTLESFFKPLTH

SEQ ID NO: 9708 - protein, 713 aa, Homo sapiens; identical to SEQ ID NO: 9707

SEQ ID NO: 9709 - protein, 414 aa, Homo sapiens
MATGQDRVVALVDMDCFFVQVEQRQNPHLRNKPCAVVQYKSWKGGGIIAVSYEARAFGVTRSMWADDAKKLCPDLLLAQVRESRGKANLTKYREASVEVMEIMSRFAVIERASIDEAYVDLTSAVQERLQKLQGQPISADLLPSTYIEGLPQGPTTAEETVQKEGMRKQGLFQWLDSLQIDNLTSPDLQLTVGAVIVEEMRAAIERETGFQCSAGISHNKVLAKLACGLNKPNRQTLVSHGSVPQLFSQMPIRKIRSLGGKLGASVIEILGIEYMGELTQFTESQLQSHFGEKNGSWLYAMCRGIEHDPVKPRQLPKTIGCSKNFPGKTALATREQVQWWLLQLAQELEERLTKDRNDNDRVATQLVVSIRVQGDKRLSSLRRCCALTRYDAHKMSHDAFTVIKNCNTSGIQTE

SEQ ID NO: 9710 - protein, 1693 aa, Homo sapiens
MGVPKFYRWISERYPCLSEVVKEHQIPEFDNLYLDMNGIIHQCSHPNDDDVHFRISDDKIFTDIFHYLEVLFRIIKPRKVFFMAVDGVAPRAKMNQQRGRRFRSAKEAEDKIKKAIEKGETLPTEARFDSNCITPGTEFMARLHEHLKYFVNMKISTDKSWQGVTIYFSGHETPGEGEHKIMEFIRSEKAKPDHDPNTRHCLYGLDADLIMLGLTSHEAHFSLLREEVRFGGKKTQRVCAPEETTFHLLHLSLMREYIDYEFSVLKEKITFKYDIERIIDDWILMGFLVGNDFIPHLPHLHINHDALPLLYGTYVTILPELGGYINESGHLNLPRFEKYLVKLSDFDREHFSEVFVDLKWFESKVGNKYLNEAAGVAAEEARNYKEKKKLKGQENSLCWTALDKNEGEMITSKDNLEDETEDDDLFETEFRQYKRTYYMTKMGVDVVSDDFLADQAACYVQAIQWILHYYYHGVQSWSWYYPYHYAPFLSDIHNISTLKIHFELGKPFKPFEQLLAVLPAASKNLLPACYQHLMTNEDSPIIEYYPPDFKTDLNGKQQEWEAVVLIPFIDERLLEAMETCNHSLKKEERKRNQHSECLMCWYDRDTEFIYPSPWPEKFPAIERCCTRYKIISLDAWRVDINKNKITRIDQKALYFCGFPTLKHIRHKFFLKKSGVQVFQQSSRGENMMLEILVDAESDELTVENVASSVLGKSVFVNWPHLEEARVVAVSDGETKFYLEEPPGTQKLYSGRTAPPSKVVHLGDKEQSNWAKEVQGISEHYLRRKGIIINETSAVVYAQLLTGRKYQINQNGEVRLEKQWSKQVVPFVYQTIVKDIRAFDSRFSNIKTLDDLFPLRSMVFMLGTPYYGCTGEVQDSGDVITEGRIRVIFSIPCEPNLDALIQNQHKYSIKYNPGYVLASRLGVSGYLVSRFTGSIFIGRGSRRNPHGDHKANVGLNLKFNKKNEEVPGYTKKVGSEWMYSSAAEQLLAEYLERAPELFSYIAKNSQEDVFYEDDIWPGENENGAEKVQEIITWLKGHPVSTLSRSSCDLQILDAAIVEKIEEEVEKCKQRKNNKKVRVTVKPHLLYRPLEQQHGVIPDRDAEFCLFDRVVNVRENFSVPVGLRGTIIGIKGANREADVLFEVLFDEEFPGGLTIRCSPGRGYRLPTSALVNLSHGSRSETGNQKLTAIVKPQPAVHQHSSSSSVSSGHLGALNHSPQSLFVPTQVPTKDDDEFCNIWQSLQGSGKMQYFQPTIQEKGAVLPQEISQVNQHHKSGFNDNSVKYQQRKHDPHRKFKEECKSPKAECWSQKMSNKQPNSGIENFLASLNISKENEVQSSHHGEPPSEEHLSPQSFAMKGTRMLKEILKIDGSNTVDHKNEIKQIANEIPVSSNRRDEYGLPSQPKQNKKLASYMNKPHSANEYHNVQSMDNMCWPAPSQIPPVSTPVTELSRICSLVGMPQPDFSFLRMPQTMTVCQVKLSNGLLVHGPQCHSENEAKEKAALFALQQLGSLGMNFPLPSQVFANYPSAVPPGTIPPAFPPPTANIMPSSSHLFGSMPWGPSVPVPGKPFHHTLYSGTMPMAGGIPGGVHNQFIPLQVTKKRVANKKNFENKEAQSSQATPVQTSQPDSSNIVKVSPRESSSASLKSSPIAQPASSFQVETASQGHSISHHKSTPISSSRRKSRKLAVNFGVSKPSE

SEQ ID NO: 9711 - protein, 1694 aa, Homo sapiens
MGVPKFYRWISERYPCLSEVVKEHQIPEFDNLYLDMNGIIHQCSHPNDDDVHFRISDDKIFTDIFHYLEVLFRIIKPRKVFFMAVDGVAPRAKMNQQRGRRFRSAKEAEDKIKKAIEKGETLPTEARFDSNCITPGTEFMARLHEHLKYFVNMKISTDKSWQGVTIYFSGHETPGEGEHKIMEFIRSEKAKPDHDPNTRHCLYGLDADLIMLGLTSHEAHFSLLREEVRFGGKKTQRVCAPEETTFHLLHLSLMREYIDYEFSVLKEKITFKYDIERIIDDWILMGFLVGNDFIPHLPHLHINHDALPLLYGTYVTILPELGGYINESGHLNLPRFEKYLVKLSDFDREHFSEVFVDLKWFESKVGNKYLNEAAGVAAEEARNYKEKKKLKGQENSLCWTALDKNEGEMITSKDNLEDETEDDDLFETEFRQYKRTYYMTKMGVDVVSDDFLADQAACYVQAIQWILHYYYHGVQSWSWYYPYHYAPFLSDIHNISTLKIHFELGKPFKPFEQLLAVLPAASKNLLPACYQHLMTNEDSPIIEYYPPDFKTDLNGKQQEWEAVVLIPFIDEKRLLEAMETCNHSLKKEERKRNQHSECLMCWYDRDTEFIYPSPWPEKFPAIERCCTRYKIISLDAWRVDINKNKITRIDQKALYFCGFPTLKHIRHKFFLKKSGVQVFQQSSRGENMMLEILVDAESDELTVENVASSVLGKSVFVNWPHLEEARVVAVSDGETKFYLEEPPGTQKLYSGRTAPPSKVVHLGDKEQSNWAKEVQGISEHYLRRKGIIINETSAVVYAQLLTGRKYQINQNGEVRLEKQWSKQVVPFVYQTIVKDIRAFDSRFSNIKTLDDLFPLRSMVFMLGTPYYGCTGEVQDSGDVITEGRIRVIFSIPCEPNLDALIQNQHKYSIKYNPGYVLASRLGVSGYLVSRFTGSIFIGRGSRRNPHGDHKANVGLNLKFNKKNEEVPGYTKKVGSEWMYSSAAEQLLAEYLERAPELFSYIAKNSQEDVFYEDDIWPGENENGAEKVQEIITWLKGHPVSTLSRSSCDLQILDAAIVEKIEEEVEKCKQRKNNKKVRVTVKPHLLYRPLEQQHGVIPDRDAEFCLFDRVVNVRENFSVPVGLRGTIIGIKGANREADVLFEVLFDEEFPGGLTIRCSPGRGYRLPTSALVNLSHGSRSETGNQKLTAIVKPQPAVHQHSSSSSVSSGHLGALNHSPQSLFVPTQVPTKDDDEFCNIWQSLQGSGKMQYFQPTIQEKGAVLPQEISQVNQHHKSGFNDNSVKYQQRKHDPHRKFKEECKSPKAECWSQKMSNKQPNSGIENFLASLNISKENEVQSSHHGEPPSEEHLSPQSFAMKGTRMLKEILKIDGSNTVDHKNEIKQIANEIPVSSNRRDEYGLPSQPKQNKKLASYMNKPHSANEYHNVQSMDNMCWPAPSQIPPVSTPVTELSRICSLVGMPQPDFSFLRMPQTMTVCQVKLSNGLLVHGPQCHSENEAKEKAALFALQQLGSLGMNFPLPSQVFANYPSAVPPGTIPPAFPPPTANIMPSSSHLFGSMPWGPSVPVPGKPFHHTLYSGTMPMAGGIPGGVHNQFIPLQVTKKRVANKKNFENKEAQSSQATPVQTSQPDSSNIVKVSPRESSSASLKSSPIAQPASSFQVETASQGHSISHHKSTPISSSRRKSRKLAVNFGVSKPSE

SEQ ID NO: 9712 - protein, 246 aa, Homo sapiens
MLHNASLLIDDIEDNSKLRRGFPVAHSIYGIPSVINSANYVYFLGLEKVLTLDHPDAVKLFTRQLLELHQGQGLDIYWRDNYTCPTEEEYKAMVLQKTGGLFGLAVGLMQLFSDYKEDLKPLLNTLGLFFQIRDDYANLHSKEYSENKSFCEDLTEGKFSFPTIHAIWSRPESTQVQNILRQRTENIDIKKYCVHYLEDVGSFEYTRNTLKELEAKAYKQIDARGGNPELVALVKHLSKMFKEENE

SEQ ID NO: 9713 - protein, 300 aa, Homo sapiens [sequence omitted]

SEQ ID NO: 9714 - protein, 246 aa, Homo sapiens; identical to SEQ ID NO: 9712

SEQ ID NO: 9715 - protein, 300 aa, Homo sapiens [sequence omitted]

SEQ ID NO: 9716 - protein, 180 aa, Homo sapiens
MADSELQLVEQRIRSFPDFPTPGVVFRDISPVLKDPASFRAAIGLLARHLKATHGGRIDYIAGLDSRGFLFGPSLAQELGLGCVLIRKRGKLPGPTLWASYSLEYGKAELEIQKDALEPGQRVVVVDDLLATGGTMNAACELLGRLQAEVLECVSLVELTSLKGREKLAPVPFFSLLQYE

SEQ ID NO: 9717 - protein, 522 aa, Homo sapiens
MAAVVAATRWWQLLLVLSAAGMGASGAPQPPNILLLLMDDMGWGDLGVYGEPSRETPNLDRMAAEGLLFPNFYSANPLCSPSRAALLTGRLPIRNGFYTTNAHARNAYTPQEIVGGIPDSEQLLPELLKKAGYVSKIVGKWHLGHRPQFHPLKHGFDEWFGSPNCHFGPYDNKARPNIPVYRDWEMVGRYYEEFPINLKTGEANLTQIYLQEALDFIKRQARHHPFFLYWAVDATHAPVYASKPFLGTSQRGRYGDAVREIDDSIGKILELLQDLHVADNTFVFFTSDNGAALISAPEQGGSNGPFLCGKQTTFEGGMREPALAWWPGHVTAGQVSHQLGSIMDLFTTSLALAGLTPPSDRAIDGLNLLPTLLQGRLMDRPIFYYRGDTLMAATLGQHKAHFWTWTNSWENFRQGIDFCPGQNVSGVTTHNLEDHTKLPLIFHLGRDPGERFPLSFASAEYQEALSRITSVVQQHQEALVPAQPQLNVCNWAVMNWAPPGCEKLGKCLTPPESIPKKCLWSH

SEQ ID NO: 9718 - protein, 341 aa, Homo sapiens
MNIVVEFFVVTFKVLWAFVLAAARWLVRPKEKSVAGQVCLITGAGSGLGRLFALEFARRRALLVLWDINTQSNEETAGMVRHIYRDLEAADAAALQAGNGEEEILPHCNLQVFTYTCDVGKRENVYLTAERVRKEVGEVSVLVNNAGVVSGHHLLECPDELIERTMMVNCHAHFWTTKAFLPTMLEINHGHIVTVASSLGLFSTAGVEDYCASKFGVVGFHESLSHELKAAEKDGIKTTLVCPYLVDTGMFRGCRIRKEIEPFLPPLKPDYCVKQAMKAILTDQPMICTPRLMYIVTFMKSILPFEAVVCMYRFLGADKCMYPFIAQRKQATNNNEAKNGI

SEQ ID NO: 9719 - protein, 341 aa, Homo sapiens; identical to SEQ ID NO: 9718

SEQ ID NO: 9720 - protein, 617 aa, Homo sapiens [sequence omitted]

SEQ ID NO: 9721 - protein, 614 aa, Homo sapiens
MRPPQCLLHTPSLASPLLLLLLWLLGGGVGAEGREDAELLVTVRGGRLRGIRLKTPGGPVSAFLGIPFAEPPMGPRRFLPPEPKQPWSGVVDATTFQSVCYQYVDTLYPGFEGTEMWNPNRELSEDCLYLNVWTPYPRPTSPTPVLVWIYGGGFYSGASSLDVYDGRFLVQAERTVLVSMNYRVGAFGFLALPGSREAPGNVGLLDQRLALQWVQENVAAFGGDPTSVTLFGESAGAASVGMHLLSPPSRGLFHRAVLQSGAPNGPWATVGMGEARRRATQLAHLVGCPPGGTGGNDTELVACLRTRPAQVLVNHEWHVLPQESVFRFSFVPVVDGDFLSDTPEALINAGDFHGLQVLVGVVKDEGSYFLVYGAPGFSKDNESLISRAEFLAGVRVGVPQVSDLAAEAVVLHYTDWLHPEDPARLREALSDVVGDHNVVCPVAQLAGRLAAQGARVYAYVFEHRASTLSWPLWMGVPHGYEIEFIFGIPLDPSRNYTAEEKIFAQRLMRYWANFARTGDPNEPRDPKAPQWPPYTAGAQQYVSLDLRPLEVRRGLRAQACAFWNRFLPKLLSATDTLDEAERQWKAEFHRWSSYMVHWKNQFDHYSKQDRCSDL

SEQ ID NO: 9722 - protein, 614 aa, Homo sapiens; identical to SEQ ID NO: 9721

SEQ ID NO: 9723 - protein, 617 aa, Homo sapiens [sequence omitted]

SEQ ID NO: 9724 - protein, 87 aa, Homo sapiens [sequence omitted]

SEQ ID NO: 9725 - protein, 894 aa, Homo sapiens
MYGVFVRILTERSQRKAFLQARSCIEDRLRLEDENEKQERLLMSLLPRNVAMEMKEDFLKPPERIFHKIYIQRHDNVSILFADIVGFTGLASQCTAQELVKLLNELFGKFDELATENHCRRIKILGDCYYCVSGLTQPKTDHAHCCVEMGLDMIDTITSVAEATEVDLNMRVGLHTGRVLCGVLGLRKWQYDVWSNDVTLANVMEAAGLPGKVHITKTTLACLNGDYEVEPGYGHERNSFLKTHNIETFFIVPSHRRKIFPGLILSDIKPAKRMKFKTVCYLLVQLMHCRKMFKAEIPFSNVMTCEDDDKRRALRTASEKLRNRSSFSTNVVYTTPGTRVNRYISRLLEARQTELEMADLNFFTLKYKHVEREQKYHQLQDEYFTSAVVLTLILAALFGLVYLLIFPQSVVVLLLLVFCICFLVACVLYLHITRVQCFPGCLTIQIRTVLCIFIVVLIYSVAQGCVVGCLPWAWSSKPNSSLVVLSSGGQRTALPTLPCESTHHALLCCLVGTLPLAIFFRVSSLPKMILLSGLTTSYILVLELSGYTRTGGGAVSGRSYEPIVAILLFSCALALHARQVDIRLRLDYLWAAQAKEEREDMEKVKLDNRRILFNLLPAHVAQHFLMSNPRNMDLYYQSYSQVGVMFASIPNFNDFYIELDGNNMGVECLRLLNEIIADFDELMEKDFYKDIEKIKTIGSTYMAAVGLAPTSGTKAKKSISSHLSTLADFAIEMFDVLDEINYQSYNDFVLRVGINVGPVVAGVIGARRPQYDIWGNTVNVASRMDSTGVQGRIQVTEEVHRLLRRCPYHFVCRGKVSVKGKGEMLTYFLEGRTDGNGSQIRSLGLDRKMCPFGRAGLQGRRPPVCPMPGVSVRAGLPPHSPGQYLPSAAAGKEA

SEQ ID NO: 9726 - protein, 270 aa, Homo sapiens [sequence omitted]

SEQ ID NO: 9727 - protein, 392 aa, Homo sapiens
MASHKLLVTPPKALLKPLSIPNQLLLGPGPSNLPPRIMAAGGLQMIGSMSKDMYQIMDEIKEGIQYVFQTRNPLTLVISGSGHCALEAALVNVLEPGDSFLVGANGIWGQRAVDIGERIGARVHPMTKDPGGHYTLQEVEEGLAQHKPVLLFLTHGESSTGVLQPLDGFGELCHRYKCLLLVDSVASLGGTPLYMDRQGIDILYSGSQKALNAPPGTSLISFSDKAKKKMYSRKTKPFSFYLDIKWLANFWGCDDQPRMYHHTIPVISLYSLRESLALIAEQGLENSWRQHREAAAYLHGRLQALGLQLFVKDPALRLPTVTTVAVPAGYDWRDIVSYVIDHFDIEIMGGLGPSTGKVLRIGLLGCNATRENVDRVTEALRAALQHCPKKKL

SEQ ID NO: 9728 - protein, 306 aa, Homo sapiens
MMTSVQRLGGDGEDLEGERRPEGSEGAAEEHGHRHGDRRSRPGGPFQLRTGAPDKVRETQSAMGVTAYNLCPKSLNRPQRVHAAETLEEFKVYADPTNLNTRNRADSPPGEVNAQAMAAASSCQRCSLHPHPFHLGAVRNEAVVISGRKLAQQIKQEVRQEVEEWVASDKDVDDFYVINVGQMCLDQYSTLPAAPWGVWEIIKQTGIPTLGKSVVVAGRSKNVEMPVAMLLHTDGAHEGPRGDATVTISHGYTPKEQLKKHTILADIVISAADIPNLITAHMIKEGAAIINVGINRVQDPVTANPS

SEQ ID NO: 9729 - protein, 352 aa, Homo sapiens
MSLYCGIACRRKFFWCYRLLSTYVTKTRYLFELKEDDDACKKAQQTGAFYLFHSLAPLLQTSAHQYLAPRHSLLELERLLGKFGQDAQRIEDSVLIGCSEQQEAWFALDLGLDSSFSISASLHKPEMETELKGSFIELRKALFQLNARDASLLSTAQALLRWHDAHQFCSRSGQPTKKNVAGSKRVCPSNNIIYYPQMAPVAITLVSDGTRCLLARQSSFPKGMYSALAGFCDIGESVEETIRREVAEEVGLEVESLQYYASQHWPFPSGSLMIACHATVKPGQTEIQVNLRELETAAWFSHDEVATALKRKGPYTQQQNGTFPFWLPPKLAISHQLIKEWVEKQTCSSLPA

SEQ ID NO: 9730 - protein, 241 aa, Homo sapiens
MSLYCGIACRRKFFWCYRLLSTYVTKTRYLFELKEDDDACKKAQQTGAFYLFHSLAPLLQTSAHQYLAPRHSLLELERLLGKFGQDAQRIEDSVLIGCSEQQEAWFALDLGLDSSFSISASLHKPEMETELKGSFIELRKALFQLNARDASLLSTAQALLRWHDAHQFCSRSGQPTKKNVAGSKRVCPSNNIIYYPQMAPVAITLVSDGTRCLLARQSSFPKGMYSALAGFCDIAYRAVLN

SEQ ID NO: 9731 - protein, 191 aa, Homo sapiens
MKLASGFLVLWLSLGGGLAQSDTSPDTEESYSDWGLRHLRGSFESVNSYFDSFLELLGGKNGVCQYRCRYGKAPMPRPGYKPQEPNGCGSYFLGLKMDLGIPAMTKCCNQLDVCYDTCGANKYRCDAKFRWCLHSICSDLKRSLGFVSKVEAACDSLVDTVFNTVWTLGCRPFMNSQRAACICAEEEKEEL

SEQ ID NO: 9732 - protein, 534 aa, Homo sapiens
MIWYILIIGILLPQSLAHPGFFTSIGQMTDLIHTEKDLVTSLKDYIKAEEDKLEQIKKWAEKLDRLTSTATKDPEGFVGHPVNAFKLMKRLNTEWSELENLVLKDMSDGFISNLTIQRQYFPNDEDQVGAAKALLRLQDTYNLDTDTISKGNLPGVKHKSFLTAEDCFELGKVAYTEADYYHTELWMEQALRQLDEGEISTIDKVSVLDYLSYAVYQQGDLDKALLLTKKLLELDPEHQRANGNLKYFEYIMAKEKDVNKSASDDQSDQKTTPKKKGVAVDYLPERQKYEMLCRGEGIKMTPRRQKKLFCRYHDGNRNPKFILAPAKQEDEWDKPRIIRFHDIISDAEIEIVKDLAKPRLSRATVHDPETGKLTTAQYRVSKSAWLSGYENPVVSRINMRIQDLTGLDVSTAEELQVANYGVGGQYEPHFDFARKDEPDAFKELGTGNRIATWLFYMSDVSAGGATVFPEVGASVWPKKGTAVFWYNLFASGEGDYSTRHAACPVLVGNKWVSNKWLHERGQEFRRPCTLSELE

SEQ ID NO: 9733 - protein, 534 aa, Homo sapiens; identical to SEQ ID NO: 9732

SEQ ID NO: 9734 - protein, 534 aa, Homo sapiens
MIWYILIIGILLPQSLAHPGFFTSIGQMTDLIHTEKDLVTSLKDYIKAEEDKLEQIKKWAEKLDRLTSTATKDPEGFVGHPVNAFKLMKRLNTEWSELENLVLKDMSDGFISNLTIQRQYFPNDEDQVGAAKALLRLQDTYNLDTDTISKGNLPGVKHKSFLTAEDCFELGKVAYTEADYYHTELWMEQALRQLDEGEISTIDKVSVLDYLSYAVYQQGDLDKALLLTKKLLELDPEHQRANGNLKYFEYIMAKEKDVNKSASDDQSDQKTTPKKKGVAVDYLPERQKYEMLCRGEGIKMTPRRQKKLFCRYHDGNRNPKFILAPAKQEDEWDKPRIIRFHDIISDAEIEIVKDLAKPRLRRATISNPITGDLETVHYRISKSAWLSGYENPVVSRINMRIQDLTGLDVSTAEELQVANYGVGGQYEPHFDFARKDEPDAFKELGTGNRIATWLFYMSDVSAGGATVFPEVGASVWPKKGTAVFWYNLFASGEGDYSTRHAACPVLVGNKWVSNKWLHERGQEFRRPCTLSELE

SEQ ID NO: 9735 - protein, 115 aa, Homo sapiens
MLTASEGGHSRRGFWGMGNRNSLPGAGILMLKLRPLSHSSQSKAERGHKVRLAVGSGLRPDTWERFVRRFGPLQVLETYGLTEGNVATINYTGQRGAVGRASWLYKVSQGCWWPR

SEQ ID NO: 9736 - protein, 776 aa, Homo sapiens
MPKPPKPRNNLEDRHNPGIQGRREHRPGPGRVRAASSPGGSAPRAERRLWGEGWESGAAPHPHSSRVSALRPCGVVGAWVGMGVCQRTRAPWKEKSQLERAALGFRKGGSGMFASGWNQTVPIEEAGSMAALLLLPLLLLLPLLLLKLHLWPQLRWLPADLAFAVRALCCKRALRARALAAAAADPEGPEGGCSLAWRLAELAQQRAAHTFLIHGSRRFSYSEAERESNRAARAFLRALGWDWGPDGGDSGEGSAGEGERAAPGAGDAAAGSGAEFAGGDGAARGGGAAAPLSPGATVALLLPAGPEFLWLWFGLAKAGLRTAFVPTALRRGPLLHCLRSCGARALVLAPEFLESLEPDLPALRAMGLHLWAAGPGTHPAGISDLLAEVSAEVDGPVPGYLSSPQSITDTCLYIFTSGTTGLPKAARISHLKILQCQGFYQLCGVHQEDVIYLALPLYHMSGSLLGIVGCMGIGATVVLKSKFSAGQFWEDCQQHRVTVFQYIGELCRYLVNQPPSKAERGHKVRLAVGSGLRPDTWERFVRRFGPLQVLETYGLTEGNVATINYTGQRGAVGRASWLYKHIFPFSLIRYDVTTGEPIRDPQGHCMATSPGEPGLLVAPVSQQSPFLGYAGGPELAQGKLLKDVFRPGDVFFNTGDLLVCDDQGFLRFHDRTGDTFRWKGENVATTEVAEVFEALDFLQEVNVYGVTVPGHEGRAGMAALVLRPPHALDLMQLYTHVSENLPPYARPRFLRLQAVGAYLPLTTARYSALLAGNLRI

SEQ ID NO: 9737 - protein, 175 aa, Homo sapiens
MEGGGGTQPPPRIGSTWAQGARGLRGGQPWRGLLCLPHPPGHEGRAGMAALVLRPPHALDLMQLYTHVSENLPPYARPRFLRLQVTGHFPRRPLTPYILTPHIHPVYQLRSLMAPKLHKGTPNVIHSVKRKNTETQALHPTSFLIPAFFWPGSFSSLSPPPLNLDLTLPFPRLAP

SEQ ID NO: 9738 - protein, 811 aa, Homo sapiens
MPKPPKPRNNLEDRHNPGIQGRREHRPGPGRVRAASSPGGSAPRAERRLWGEGWESGAAPHPHSSRVSALRPCGVVGAWVGMGVCQRTRAPWKEKSQLERAALGFRKGGSGMFASGWNQTVPIEEAGSMAALLLLPLLLLLPLLLLKLHLWPQLRWLPADLAFAVRALCCKRALRARALAAAAADPEGPEGGCSLAWRLAELAQQRAAHTFLIHGSRRFSYSEAERESNRAARAFLRALGWDWGPDGGDSGEGSAGEGERAAPGAGDAAAGSGAEFAGGDGAARGGGAAAPLSPGATVALLLPAGPEFLWLWFGLAKAGLRTAFVPTALRRGPLLHCLRSCGARALVLAPEFLESLEPDLPALRAMGLHLWAAGPGTHPAGISDLLAEVSAEVDGPVPGYLSSPQSITDTCLYIFTSGTTGLPKAARISHLKILQCQGFYQLCGVHQEDVIYLALPLYHMSGSLLGIVGCMGIGATVVLKSKFSAGQFWEDCQQHRVTVFQYIGELCRYLVNQPPSKAERGHKVRLAVGSGLRPDTWERFVRRFGPLQVLETYGLTEGNVATINYTGQRGAVGRASWLYKHIFPFSLIRYDVTTGEPIRDPQGHCMATSPGEPGLLVAPVSQQSPFLGYAGGPELAQGKLLKDVFRPGDVFFNTGDLLVCDDQGFLRFHDRTGDTFRWKGENVATTEVAEVFEALDFLQEVNVYGVTVPGHEGRAGMAALVLRPPHALDLMQLYTHVSENLPPYARPRFLRLQESLATTETFKQQKVRMANEGFDPSTLSDPLYVLDQAVGAYLPLTTARYSALLAGNLRI

SEQ ID NO: 9739 - protein, 482 aa, Homo sapiens [sequence omitted]

SEQ ID NO: 9740 - protein, 757 aa, Homo sapiens
MAGCIPEEKTYRRFLELFLGEFRGPCGGGEPEPEPEPEPEPEPEPESEPEPEPELVEAEAAEASVEEPGEEAATVAATEEGDQEQDPEPEEEAAVEGEEEEEGAATAAAAPGHSAVPPPPPQLPPLPPLPRPLSERITREEVEGESLDLCLQQLYKYNCPSFLAAALARATSDEVLQSDLSAHYIPKETDGTEGTVEIETVKLARSVFSKLHEICCSWVKDFPLRRRPQLYYETSIHAIKNMRRKMEDKHVCIPDFNMLFNLEDQEEQAYFAVFDGHGGVDAAIYASIHLHVNLVRQEMFPHDPAEALCRAFRVTDERFVQKAARESLRCGTTGVVTFIRGNMLHVAWVGDSQVMLVRKGQAVELMKPHKPDREDEKQRIEALGGCVVWFGAWRVNGSLSVSRAIGDAEHKPYICGDADSASTVLDGTEDYLILACDGFYDTVNPDEAVKVVSDHLKENNGDSSMVAHKLVASARDAGSSDNITVIVVFLRDMNKAVNVSEESDWTENSFQGGQEDGGDDKENHGECKRPWPQHQCSAPADLGYDGRVDSFTDRTSLSPGSQINVLEDPGYLDLTQIEASKPHSAQFLLPVEMFGPGAPKKANLINELMMEKKSVQSSLPEWSGAGEFPTAFNLGSTGEQIYRMQSLSPVCSGLENEQFKSPGNRVSRLSHLRHHYSKKWHRFRFNPKFYSFLSAQEPSHKIGTSLSSLTGSGKRNRIRSSLPWRQNSWKGYSENMRKLRKTHDIPCPDLPWSYKIE

SEQ ID NO: 9741 - protein, 1849 aa, Homo sapiens
MAVSRLDRLFILLDTGTTPVTRKAAAQQLGEVVKLHPHELNNLLSKVLIYLRSANWDTRIAAGQAVEAIVKNVPEWNPVPRTRQEPTSESSMEDSPTTERLNFDRFDICRLLQHGASLLGSAGAEFEVQDEKSGEVDPKERIARQRKLLQKKLGLNMGEAIGMSTEELFNDEDLDYTPTSASFVNKQPTLQAAELIDSEFRAGMSNRQKNKAKRMAKLFAKQRSRDAVETNEKSNDSTDGEPEEKRRKIANVVINQSANDSKVLIDNIPDSSSLIEETNEWPLESFCEELCNDLFNPSWEVRHGAGTGLREILKAHGKSGGKMGDSTLEEMIQQHQEWLEDLVIRLLCVFALDRFGDFVSDEVVAPVRETCAQTLGVVLKHMNETGVHKTVDVLLKLLTQEQWEVRHGGLLGIKYALAVRQDVINTLLPKVLTRIIEGLQDLDDDVRAVAAASLVPVVESLVYLQTQKVPFIINTLWDALLELDDLTASTNSIMTLLSSLLTYPQVQQCSIQQSLTVLVPRVWPFLHHTISSVRRAALETLFTLLSTQDQNSSSWLIPILPDMLRHIFQFCVLESSQEILDLIHKVWMELLSKASVQYVVAAACPWMGAWLCLMMQPSHLPIDLNMLLEVKARAKEKTGGKVRQGQSQNKEVLQEYIAGADTIMEDPATRDFVVMRARMMAAKLLGALCCCICDPGVNVVTQEIKPAESLGQLLLFHLNSKSALQRISVALVICEWAALQKECKAVTLAVQPRLLDILSEHLYYDEIAVPFTRMQNECKQLISSLADVHIEVGNRVNNNVLTIDQASDLVTTVFNEATSSFDLNPQVLQQLDSKRQQVQMTVTETNQEWQVLQLRVHTFAACAVVSLQQLPEKLNPIIKPLMETIKKEENTLVQNYAAQCIAKLLQQCTTRTPCPNSKIIKNLCSSLCVDPYLTPCVTCPVPTQSGQENSKGSTSEKDGMHHTVTKHRGIITLYRHQKAAFAITSRRGPTPKAVKAQIADLPAGSSGNILVELDEAQKPYLVQRRGAEFALTTIVKHFGGEMAVKLPHLWDAMVGPLRNTIDINNFDGKSLLDKGDSPAQELVNSLQVFETAAASMDSELHPLLVQHLPHLYMCLQYPSTAVRHMAARCVGVMSKIATMETMNIFLEKVLPWLGAIDDSVKQEGAIEALACVMEQLDVGIVPYIVLLVVPVLGRMSDQTDSVRFMATQCFATLIRLMPLEAGIPDPPNMSAELIQLKAKERHFLEQLLDGKKLENYKIPVPINAELRKYQQDGVNWLAFLNKYKLHGILCDDMGLGKTLQSICILAGDHCHRAQEYARSKLAECMPLPSLVVCPPTLTGHWVDEVGKFCSREYLNPLHYTGPPTERIRLQHQVKRHNLIVASYDVVRNDIDFFRNIKFNYCILDEGHVIKNGKTKLSKAVKQLTANYRIILSGTPIQNNVLELWSLFDFLMPGFLGTERQFAARYGKPILASRDARSSSREQEAGVLAMDALHRQVLPFLLRRMKEDVLQDLPPKIIQDYYCTLSPLQVQLYEDFAKSRAKCDVDETVSSATLSEETEKPKLKATGHVFQALQYLRKLCNHPALVLTPQHPEFKTTAEKLAVQNSSLHDIQHAPKLSALKQLLLDCGLGNGSTSESGTESVVAQHRILIFCQLKSMLDIVEHDLLKPHLPSVTYLRLDGSIPPGQRHSIVSRFNNDPSIDVLLLTTHVGGLGLNLTGADTVVFVEHDWNPMRDLQAMDRAHRIGQKRVVNVYRLITRGTLEEKIMGLQKFKMNIANTVISQENSSLQSMGTDQLLDLFTLDKDGKAEKADTSTSGKASMKSILENLSDLWDQEQYDSEYSLENFMHSLK

SEQ ID NO: 9742 - protein, 662 aa, Homo sapiens
MSHVAVENALGLDQQFAGLDLNSSDNQSGGSTASKGRYIPPHLRNREATKGFYDKDSSGWSSSKDKDAYSSFGSRSDSRGKSSFFSDRGSGSRGRFDDRGRSDYDGIGSRGDRSGFGKFERGGNSRWCDKSDEDDWSKPLPPSERLEQELFSGGNTGINFEKYDDIPVEATGNNCPPHIESFSDVEMGEIIMGNIELTRYTRPTPVQKHAIPIIKEKRDLMACAQTGSGKTAAFLLPILSQIYSDGPGEALRAMKENGRYGRRKQYPISLVLAPTRELAVQIYEEARKFSYRSRVRPCVVYGGADIGQQIRDLERGCHLLVATPGRLVDMMERGKIGLDFCKYLVLDEADRMLDMGFEPQIRRIVEQDTMPPKGVRHTMMFSATFPKEIQMLARDFLDEYIFLAVGRVGSTSENITQKVVWVEESDKRSFLLDLLNATGKDSLTLVFVETKKGADSLEDFLYHEGYACTSIHGDRSQRDREEALHQFRSGKSPILVATAVAARGLDISNVKHVINFDLPSDIEEYVHRIGRTGRVGNLGLATSFFNERNINITKDLLDLLVEAKQEVPSWLENMAYEHHYKGSSRGRSKSSRFSGGFGARDYRQSSGASSSSFSSSRASSSRSGGGGHGSSRGFGGGGYGGFYNSDGYGGNYNSQGVDWWGN

SEQ ID NO: 9743 - protein, 662 aa, Homo sapiens; identical to SEQ ID NO: 9742

SEQ ID NO: 9744 - protein, 662 aa, Homo sapiens; identical to SEQ ID NO: 9742

SEQ ID NO: 9745 - protein, 662 aa, Homo sapiens; identical to SEQ ID NO: 9742

SEQ ID NO: 9746 - protein, 323 aa, Homo sapiens
MDSKQQCVKLNDGHFMPVLGFGTYAPPEVPRSKALEVTKLAIEAGFRHIDSAHLYNNEEQVGLAIRSKIADGSVKREDIFYTSKLWSTFHRPELVRPALENSLKKAQLDYVDLYLIHSPMSLKPGEELSPTDENGKVIFDIVDLCTTWEAMEKCKDAGLAKSIGVSNFNRRQLEMILNKPGLKYKPVCNQVECHPYFNRSKLLDFCKSKDIVLVAYSALGSQRDKRWVDPNSPVLLEDPVLCALAKKHKRTPALIALRYQLQRGVVVLAKSYNEQRIRQNVQVFEFQLTAEDMKAIDGLDRNLHYFNSDSFASHPNYPYSDEY

SEQ ID NO: 9747 - protein, 118 aa, Homo sapiens
MVPILLLGTPLHLLHRHRRRLRRRPADRQEENKAGLLDLPDASVNGWSSDEEKAGGLDDEEEAELVPSEVLMHQAIHTIEFCLGCVSNTASYLRLWALSLAHARWNSRTSSTQARATS

SEQ ID NO: 9748 - protein, 830 aa, Homo sapiens
MGSMFRSEEVALVQLFLPTAAAYTCVSRLGELGLVEFRDLNASVSAFQRRFVVDVRRCEELEKTFTFLQEEVRRAGLVLPPPKGRLPAPPPRDLLRIQEETERLAQELRDVRGNQQALRAQLHQLQLHAAVLRQGHEPQLAAAHTDGASERTPLLQAPGGPHQDLRVNFVAGAVEPHKAPALERLLWRACRGFLIASFRELEQPLEHPVTGEPATWMTFLISYWGEQIGQKIRKITDCFHCHVFPFLQQEEARLGALQQLQQQSQELQEVLGETERFLSQVLGRVLQLLPPGQVQVHKMKAVYLALNQCSVSTTHKCLIAEAWCSVRDLPALQEALRDSSMEEGVSAVAHRIPCRDMPPTLIRTNRFTASFQGIVDAYGVGRYQEVNPAPYTIITFPFLFAVMFGDVGHGLLMFLFALAMVLAENRPAVKAAQNEIWQTFFRGRYLLLLMGLFSIYTGFIYNECFSRATSIFPSGWSVAAMANQSGWSDAFLAQHTMLTLDPNVTGVFLGPYPFGIDPIWSLAANHLSFLNSFKMKMSVILGVVHMAFGVVLGVFNHVHFGQRHRLLLETLPELTFLLGLFGYLVFLVIYKWLCVWAARAASAPSILIHFINMFLFSHSPSNRLLYPRQEVVQATLVVLALAMVPILLLGTPLHLLHRHRRRLRRRPADRQEENKAGLLDLPDASVNGWSSDEEKAGGLDDEEEAELVPSEVLMHQAIHTIEFCLGCVSNTASYLRLWALSLAHAQLSEVLWAMVMRIGLGLGREVGVAAVVLVPIFAAFAVMTVAILLVMEGLSAFLHALRLHWVEFQNKFYSGTGYKLSPFTFAATDD

SEQ ID NO: 9749 - protein, 614 aa, Homo sapiens
MTFLISYWGEQIGQKIRKITDCFHCHVFPFLQQEEARLGALQQLQQQSQELQEVLGETERFLSQVLGRVLQLLPPGQVQVHKMKAVYLALNQCSVSTTHKCLIAEAWCSVRDLPALQEALRDSSMEEGVSAVAHRIPCRDMPPTLIRTNRFTASFQGIVDAYGVGRYQEVNPAPYTIITFPFLFAVMFGDVGHGLLMFLFALAMVLAENRPAVKAAQNEIWQTFFRGRYLLLLMGLFSIYTGFIYNECFSRATSIFPSGWSVAAMANQSGWSDAFLAQHTMLTLDPNVTGVFLGPYPFGIDPIWSLAANHLSFLNSFKMKMSVILGVVHMAFGVVLGVFNHVHFGQRHRLLLETLPELTFLLGLFGYLVFLVIYKWLCVWAARAASAPSILIHFINMFLFSHSPSNRLLYPRQEVVQATLVVLALAMVPILLLGTPLHLLHRHRRRLRRRPADRQEENKAGLLDLPDASVNGWSSDEEKAGGLDDEEEAELVPSEVLMHQAIHTIEFCLGCVSNTASYLRLWALSLAHAQLSEVLWAMVMRIGLGLGREVGVAAVVLVPIFAAFAVMTVAILLVMEGLSAFLHALRLHWVEFQNKFYSGTGYKLSPFTFAATDD

SEQ ID NO: 9750 - protein, 614 aa, Homo sapiens; identical to SEQ ID NO: 9749

SEQ ID NO: 9751 - protein, 830 aa, Homo sapiens; identical to SEQ ID NO: 9748

SEQ ID NO: 9752 - protein, 140 aa, Homo sapiens
MVARTAVLTNSRSKAERPEPCFLPCLTPASHFHSPAALVSRQLARYTKEGFLHLGALGTTTLLPDTRCLVDNSKSRLPQLLDCDKVKSSLYKRWNFIQNGAIMNKGTGRCLEVENRGLAGIDLILRSCTGQRWTIKNSIK

SEQ ID NO: 9753 - protein, 598 aa, Homo sapiens
MASLRRVKVLLVLNLIAVAGFVLFLAKCRPIAVRSGDAFHEIRPRAEVANLSAHSASPIQDAVLKRLSLLEDIVYRQLNGLSKSLGLIEGYGGRGKGGLPATLSPAEEEKAKGPHEKYGYNSYLSEKISLDRSIPDYRPTKCKELKYSKDLPQISIIFIFVNEALSVILRSVHSAVNHTPTHLLKEIILVDDNSDEEELKVPLEEYVHKRYPGLVKVVRNQKREGLIRARIEGWKVATGQVTGFFDAHVEFTAGWAEPVLSRIQENRKRVILPSIDNIKQDNFEVQRYENSAHGYSWELWCMYISPPKDWWDAGDPSLPIRTPAMIGCSFVVNRKFFGEIGLLDPGMDVYGGENIELGIKVWLCGGSMEVLPCSRVAHIERKKKPYNSNIGFYTKRNALRVAEVWMDDYKSHVYIAWNLPLENPGIDIGDVSERRALRKSLKCKNFQWYLDHVYPEMRRYNNTVAYGELRNNKAKDVCLDQGPLENHTAILYPCHGWGPQLARYTKEGFLHLGALGTTTLLPDTRCLVDNSKSRLPQLLDCDKVKSSLYKRWNFIQNGAIMNKGTGRCLEVENRGLAGIDLILRSCTGQRWTIKNSIK

SEQ ID NO: 9754 - protein, 268 aa, Homo sapiens
MLTQNLLLGKSQVSESEPPGQIFPLAIPGHAARSREHTEKDVFIANRDGTNPPAQGVLRTKGGGVTASANWETRRFGSRGRGTSRAAGSGERRVIRHAYLPAALPATFWEGPEGAQVRGEGRPGCLMASLRRVKVLLVLNLIAVAGFVLFLAKCRPIAVRSGDAFHEIRPRAEVANLSAHSASPIQDAVLKRLSLLEDIVYRQLNAPCAPVLPYLAWGVRQKSPCQLLEYPYLLVICGIHQQPPRVDELIPGERPTLAGVGAIGCKLR

SEQ ID NO: 9755 - protein, 737 aa, Homo sapiens
MPGKLLWGDIMELEAPLEESESQKKERQKSDRRKSRHHYDSDEKSETRENGVTDDLDAPKAKKSKMKEKLNGDTEEGFNRLSDEFSKSHKSRRKDLPNGDIDEYEKKSKRVSSLDTSTHKSSDNKLEETLTREQKEGAFSNFPISEETIKLLKGRGVTYLFPIQVKTFGPVYEGKDLIAQARTGTGKTFSFAIPLIERLQRNQETIKKSRSPKVLVLAPTRELANQVAKDFKDITRKLSVACFYGGTSYQSQINHIRNGIDILVGTPGRIKDHLQSGRLDLSKLRHVVLDEVDQMLDLGFAEQVEDIIHESYKTDSEDNPQTLLFSATCPQWVYKVAKKYMKSRYEQVDLVGKMTQKAATTVEHLAIQCHWSQRPAVIGDVLQVYSGSEGRAIIFCETKKNVTEMAMNPHIKQNAQCLHGDIAQSQREITLKGFREGSFKVLVATNVAARGLDIPEVDLVIQSSPPQDVESYIHRSGRTGRAGRTGICICFYQPRERGQLRYVEQKAGITFKRVGVPSTMDLVKSKSMDAIRSLASVSYAAVDFFRPSAQRLIEEKGAVDALAAALAHISGASSFEPRSLITSDKGFVTMTLESLEEIQDVSCAWKELNRKLSSNAVSQITRMCLLKGNMGVCFDVPTTESERLQAEWHDSDWILSVPAKLPEIEEYYDGNTSSNSRQRSGWSSGRSGRSGRSGGRSGGRSGRQSRQGSRSGSRQDGRRRSGNRNRSRSGGHKRSFD

SEQ ID NO: 9756 - protein, 549 aa, Homo sapiens
MEFAELIKTPRVDNVVLHRPFYPAVEGTLCLTGHHLILSSRQDNTEELWLLHSNIDAIDKRFVGSLGTIIIKCKDFRIIQLDIPGMEECLNIASSIEALSTLDSITLMYPFFYRPMFEVIEDGWHSFLPEQEFELYSSATSEWRLSYVNKEFAVCPSYPPIVTVPKSIDDEALRKVATFRHGGRFPVLSYYHKKNGMVIMRSGQPLTGTNGRRCKEDEKLINATLRAGKRGYIIDTRSLNVAQQTRAKGGGFEQEAHYPQWRRIHKSIERYHILQESLIKLVEACNDQTHNMDRWLSKLEASNWLTHIKEILTTACLAAQCIDREGASILIHGTEGTDSTLQVTSLAQIILEPRSRTIRGFEALIEREWLQAGHPFQQRCAQSAYCNTKQKWEAPVFLLFLDCVWQILRQFPCSFEFNENFLIMLFEHAYASQFGTFLGNNESERCKLKLQQKTMSLWSWVNQPSELSKFTNPLFEANNLVIWPSVAPQSLPLWEGIFLRWNRSSKYLDEAYEEMVNIIEYNKELQAKVNILRRQLAELETEDGMQESP

SEQ ID NO: 9757 - protein, 61 aa, Homo sapiens
MEFAELIKTPRVDNVVLHRPFYPAVEGTLCLTGHHLILSSRQDNTEELWLLHSNIDAIDKR

SEQ ID NO: 9758 - protein, 307 aa, Homo sapiens [sequence omitted]

SEQ ID NO: 9759 - protein, 359 aa, Homo sapiens
MPAHLLQDDISSSYTTTTTITAPPSRVLQNGGDKLETMPLYLEDDIRPDIKDDIYDPTYKDKEGPSPKVEYVWRNIILMSLLHLGALYGITLIPTCKFYTWLWGVFYYFVSALGITAGAHRLWSHRSYKARLPLRLFLIIANTMAFQNDVYEWARDHRAHHKFSETHADPHNSRRGFFFSHVGWLLVRKHPAVKEKGSTLDLSDLEAEKLVMFQRRYYKPGLLLMCFILPTLVPWYFWGETFQNSVFVATFLRYAVVLNATWLVNSAAHLFGYRPYDKNISPRENILVSLGAVGEGFHNYHHSFPYDYSASEYRWHINFTTFFIDCMAALGLAYDRKKVSKAAILARIKRTGDGNYKSG

SEQ ID NO: 9760 - protein, 359 aa, Homo sapiens; identical to SEQ ID NO: 9759

SEQ ID NO: 9761 - protein, 72 aa, Homo sapiens
LLAFVSGEGFHNYHHSFPYDYSASEYRWHINFTTFFIDCMAALGLAYDRKKVSKAAILARIKRTGDGNYKSG

SEQ ID NO: 9762 - protein, 273 aa, Homo sapiens
MRDLRNPHPSSAFLNLIGFVSRRELGSIDGVQQISLEDALSSQEVEVAYICSESSSHEDYIRQFLNAGKHVLVEYPMTLSLAAAQELWELAEQKGKVLHEEHVELLMEEFAFLKKEVVGKDLLKGSLLFTAGPLEEERFGFPAFSGISRLTWLVSLFGELSLVSATLEERKEDQYMKMTVCLETEKKSPLSWIEEKGPGLKRNRYLSFHFKSGSLENVPNVGVNKNIFLKDQNIFVQKLLGQFSEKELAAEKKRILHCLGLAEEIQKYCCSRK

SEQ ID NO: 9763 - protein, 273 aa, Homo sapiens; identical to SEQ ID NO: 9762

SEQ ID NO: 9764 - protein, 273 aa, Homo sapiens; identical to SEQ ID NO: 9762

SEQ ID NO: 9765 - protein, 1585 aa, Homo sapiens
MASPSRNSQSRRRCKEPLRYSYNPDQFHNMDLRGGPHDGVTIPRSTSDTDLVTSDSRSTLMVSSSYYSIGHSQDLVIHWDIKEEVDAGDWIGMYLIDEVLSENFLDYKNRGVNGSHRGQIIWKIDASSYFVEPETKICFKYYHGVSGALRATTPSVTVKNSAAPIFKSIGADETVQGQGSRRLISFSLSDFQAMGLKKGMFFNPDPYLKISIQPGKHSIFPALPHHGQERRSKIIGNTVNPIWQAEQFSFVSLPTDVLEIEVKDKFAKSRPIIKRFLGKLSMPVQRLLERHAIGDRVVSYTLGRRLPTDHVSGQLQFRFEITSSIHPDDEEISLSTEPESAQIQDSPMNNLMESGSGEPRSEAPESSESWKPEQLGEGSVPDGPGNQSIELSRPAEEAAVITEAGDQGMVSVGPEGAGELLAQVQKDIQPAPSAEELAEQLDLGEEASALLLEDGEAPASTKEEPLEEEATTQSRAGREEEEKEQEEEGDVSTLEQGEGRLQLRASVKRKSRPCSLPVSELETVIASACGDPETPRTHYIRIHTLLHSMPSAQGGSAAEEEDGAEEESTLKDSSEKDGLSEVDTVAADPSALEEDREEPEGATPGTAHPGHSGGHFPSLANGAAQDGDTHPSTGSESDSSPRQGGDHSCEGCDASCCSPSCYSSSCYSTSCYSSSCYSASCYSPSCYNGNRFASHTRFSSVDSAKISESTVFSSQDDEEEENSAFESVPDSMQSPELDPESTNGAGPWQDELAAPSGHVERSPEGLESPVAGPSNRREGECPILHNSQPVSQLPSLRPEHHHYPTIDEPLPPNWEARIDSHGRVFYVDHVNRTTTWQRPTAAATPDGMRRSGSIQQMEQLNRRYQNIQRTIATERSEEDSGSQSCEQAPAGGGGGGGSDSEAESSQSSLDLRREGSLSPVNSQKITLLLQSPAVKFITNPEFFTVLHANYSAYRVFTSSTCLKHMILKVRRDARNFERYQHNRDLVNFINMFADTRLELPRGWEIKTDQQGKSFFVDHNSRATTFIDPRIPLQNGRLPNHLTHRQHLQRLRSYSAGEASEVSRNRGASLLARPGHSLVAAIRSQHQHESLPLAYNDKIVAFLRQPNIFEMLQERQPSLARNHTLREKIHYIRTEGNHGLEKLSCDADLVILLSLFEEEIMSYVPLQAAFHPGYSFSPRCSPCSSPQNSPGLQRASARAPSPYRRDFEAKLRNFYRKLEAKGFGQGPGKIKLIIRRDHLLEGTFNQVMAYSRKELQRNKLYVTFVGEEGLDYSGPSREFFFLLSQELFNPYYGLFEYSANDTYTVQISPMSAFVENHLEWFRFSGRILGLALIHQYLLDAFFTRPFYKALLRLPCDLSDLEYLDEEFHQSLQWMKDNNITDILDLTFTVNEEVFGQVTERELKSGGANTQVTEKNKKEYIERMVKWRVERGVVQQTEALVRGFYEVVDSRLVSVFDARELELVIAGTAEIDLNDWRNNTEYRGGYHDGHLVIRWFWAAVERFNNEQRLRLLQFVTGTSSVPYEGFAALRGSNGLRRFCIEKWGKITSLPRAHTCFNRLDLPPYPSYSMLYEKLLTAVEETSTFGLE

SEQ ID NO: 9766 - protein, 461 aa, Homo sapiens
MCLRRPALFPGVALLLAAARLAAASDVLGLRDDNLESRISDTGSAGLMLVEFFAPWCGHCKRLAPEYEAAATRLKGIVPLAKADCTANTNTCNKYGVSGYPTLNMFRDGEEAGAYDGPRTADGIVSHLKKQAGPASVPLRTEEEFKKFISDKDASIVGFFDDSFSEAHSEFLKAASNLRDNYRFAHTNVESLVNEYDDNGDGIILFRPSHLTNKLEDKTVAYTVQKMTSGKIKKFIQENIFGICPHMTEDNKDLIQGKDLLIAYYDVDYEKNAKGSNYWRNRVMMVAKKFLDAGHKLNFAVASRKTFSHELSDFGLESTAGEIPVVAIRTAKGEKFVMQEDFSRDGNALERFLQDYFDGNLKRYLKSEPIPESNDGPVKVVVAENFDEIVNNENKDVLIEFYAPWCGHCKNLEPKYKELGEKLSKDLNIVIAKMDATANDVPSPYEVRVFLPYTSLQPTRS

SEQ ID NO: 9767 - protein, 147 aa, Homo sapiens
MALRACGLIIFRRCLIPKVDNNAIEFLLLQASDGIHHWTPPKGHVEPGEDDLETALRETQEEAGIEAGQLTIIEGFKRELNYVARNKPKTVIYWLAEVKDYDVEIRLSHEHQAYRWLGLEEACQLAQFKEMKAALQEGHQFLCSIEA

SEQ ID NO: 9768 - protein, 147 aa, Homo sapiens; identical to SEQ ID NO: 9767

SEQ ID NO: 9769 - protein, 147 aa, Homo sapiens; identical to SEQ ID NO: 9767

SEQ ID NO: 9770 - protein, 147 aa, Homo sapiens; identical to SEQ ID NO: 9767

SEQ ID NO: 9771 - protein, 293 aa, Homo sapiens
MAPPSVFAEVPQAQPVLVFKLTADFREDPDPRKVNLGVGAYRTDDCHPWVLPVVKKVEQKIANDNSLNHEYLPILGLAEFRSCASRLALGDDSPALKEKRVGGVQSLGGTGALRIGADFLARWYNGTNNKNTPVYVSSPTWENHNAVFSAAGFKDIRSYRYWDAEKRGLDLQGFLNDLENAPEFSIVVLHACAHNPTGIDPTPEQWKQIASVMKHRFLFPFFDSAYQGFASGNLERDAWAIRYFVSEGFEFFCAQSFSKNFGLYSECSPEELQPHLLASLPASAATADSGPSL

SEQ ID NO: 9772 - protein, 413 aa, Homo sapiens
MAPPSVFAEVPQAQPVLVFKLTADFREDPDPRKVNLGVGAYRTDDCHPWVLPVVKKVEQKIANDNSLNHEYLPILGLAEFRSCASRLALGDDSPALKEKRVGGVQSLGGTGALRIGADFLARWYNGTNNKNTPVYVSSPTWENHNAVFSAAGFKDIRSYRYWDAEKRGLDLQGFLNDLENAPEFSIVVLHACAHNPTGIDPTPEQWKQIASVMKHRFLFPFFDSAYQGFASGNLERDAWAIRYFVSEGFEFFCAQSFSKNFGLYNERVGNLTVVGKEPESILQVLSQMEKIVRITWSNPPAQGARIVASTLSNPELFEEWTGNVKTMADRILTMRSELRARLEALKTPGTWNHITDQIGMFSFTGLNPKQVEYLVNEKHIYLLPSGRINVSGLTTKNLDYVATSIHEAVTKIQ

SEQ ID NO: 9773 - protein, 413 aa, Homo sapiens; identical to SEQ ID NO: 9772

SEQ ID NO: 9774 - protein, 502 aa, Homo sapiens
MDLIPNLAVETWLLLAVSLVLLYLYGTRTHGLFKRLGIPGPTPLPLLGNVLSYRQGLWKFDTECYKKYGKMWGTYEGQLPVLAITDPDVIRTVLVKECYSVFTNRRSLGPVGFMKSAISLAEDEEWKRIRSLLSPTFTSGKLKEMFPIIAQYGDVLVRNLRREAEKGKPVTLKDIFGAYSMDVITGTSFGVNIDSLNNPQDPFVESTKKFLKFGFLDPLFLSIILFPFLTPVFEALNVSLFPKDTINFLSKSVNRMKKSRLNDKQKHRLDFLQLMIDSQNSKETESHKALSDLELAAQSIIFIFAGYETTSSVLSFTLYELATHPDVQQKLQKEIDAVLPNKAPPTYDAVVQMEYLDMVVNETLRLFPVAIRLERTCKKDVEINGVFIPKGSMVVIPTYALHHDPKYWTEPEEFRPERFSKKKDSIDPYIYTPFGTGPRNCIGMRFALMNMKLALIRVLQNFSFKPCKETQIPLKLDTQGLLQPEKPIVLKVDSRDGTLSGE

SEQ ID NO: 9775 - protein, 503 aa, Homo sapiens
MDLIPNFAMETWVLVATSLVLLYIYGTHSHKLFKKLGIPGPTPLPFLGTILFYLRGLWNFDRECNEKYGEMWGLYEGQQPMLVIMDPDMIKTVLVKECYSVFTNQMPLGPMGFLKSALSFAEDEEWKRIRTLLSPAFTSVKFKEMVPIISQCGDMLVRSLRQEAENSKSINLKDFFGAYTMDVITGTLFGVNLDSLNNPQDPFLKNMKKLLKLDFLDPFLLLISLFPFLTPVFEALNIGLFPKDVTHFLKNSIERMKESRLKDKQKHRVDFFQQMIDSQNSKETKSHKALSDLELVAQSIIIIFAAYDTTSTTLPFIMYELATHPDVQQKLQEEIDAVLPNKAPVTYDALVQMEYLDMVVNETLRLFPVVSRVTRVCKKDIEINGVFIPKGLAVMVPIYALHHDPKYWTEPEKFCPERFSKKNKDSIDLYRYIPFGAGPRNCIGMRFALTNIKLAVIRALQNFSFKPCKETQIPLKLDNLPILQPEKPIVLKVHLRDGITSGP

SEQ ID NO: 9776 - protein, 250 aa, Homo sapiens
MDLIPNFAMETWVLVATSLVLLYIYGTHSHKLFKKLGIPGPTPLPFLGTILFYLRGLWNFDRECNEKYGEMWGLYEGQQPMLVIMDPDMIKTVLVKECYSVFTNQMPLGPMGFLKSALSFAEDEEWKRIRTLLSPAFTSVKFKEMVPIISQCGDMLVRSLRQEAENSKSINLKDFFGAYTMDVITGTLFGVNLDSLNNPQDPFLKNMKKLLKLDFLDPFLLLIYRVSLCCLGRSAWCDLGSLKPPPPGFE

SEQ ID NO: 9777 - protein, 504 aa, Homo sapiens
MDLIPNFAMETWVLVATSLVLLYIYGTHSHKLFKKLGIPGPTPLPFLGTILFYLRGLWNFDRECNEKYGEMWGLYEGQQPMLVIMDPDMIKTVLVKECYSVFTNQMPLGPMGFLKSALSFAEDEEWKRIRTLLSPAFTSVKFKEMVPIISQCGDMLVRSLRQEAENSKSINLKDFFGAYTMDVITGTLFGVNLDSLNNPQDPFLKNMKKLLKLDFLDPFLLLISLFPFLTPVFEALNIGLFPKDVTHFLKNSIERMKESRLKDKQKHRVDFFQQMIDSQNSKETKSHKALSDLELVAQSIIIIFAAYDTTSTTLPFIMYELATHPDVQQKLQEEIDAVLPNKAPVTYDALVQMEYLDMVVNETLRLFPVVSRVTRVCKKDIEINGVFIPKGLAVMVPIYALHHDPKYWTEPEKFCPESRFSKKNKDSIDLYRYIPFGAGPRNCIGMRFALTNIKLAVIRALQNFSFKPCKETQIPLKLDNLPILQPEKPIVLKVHLRDGITSGP

SEQ ID NO: 9778 - protein, 420 aa, Homo sapiens
MDLIPNFAMETWVLVATSLVLLYIYGTHSHKLFKKLGIPGPTPLPFLGTILFYLRGLWNFDRECNEKYGEMWGLYEGQQPMLVIMDPDMIKTVLVKECYSVFTNQMPLGPMGFLKSALSFAEDEEWKRIRTLLSPAFTSVKFKEMVPIISQCGDMLVRSLRQEAENSKSINLKDFFGAYTMDVITGTLFGVNLDSLNNPQDPFLKNMKKLLKLDFLDPFLLLISLFPFLTPVFEALNIGLFPKDVTHFLKNSIERMKESRLKDKQKHRVDFFQQMIDSQNSKETKSHKALSDLELVAQSIIIIFAAYDTTSTTLPFIMYELATHPDVQQKLQEEIDAVLPNKAPVTYDALVQMEYLDMVVNETLRLFPVVSRVTRVCKKDIEINGVFIPKGLAVMVPIYALHHDPKYWTEPEKFCPERSH

SEQ ID NO: 9779 - protein, 238 aa, Homo sapiens
MPVSKCPKKSESLWKGWDRKAQRNGLRSQVYAVNGDYYVGEWKDNVKHGKGTQVWKKKGAIYEGDWKFGKRDGYGTLSLPDQQTGKCRRVYSGWWKGDKKSGYGIQFFGPKEYYEGDWCGSQRSGWGRMYYSNGDIYEGQWENDKPNGEGMLRLKNGNRYEGCWERGMKNGAGRFFHLDHGQLFEGFWVDNMAKCGTMIDFGRDEAPEPTQFPIPEVKILDPDGVLAEALAMFRKTEE

SEQ ID NO: 9780 - protein, 315 aa, Homo sapiens
MGNPGTFKRGLLLSALSYLGFETYQVISQAAVVHATAKVEEILEQADYLYESGETEKLYQLLTQYKESEDAELLWRLARASRDVAQLSRTSEEEKKLLVYEALEYAKRALEKNESSFASHKWYAICLSDVGDYEGIKAKIANAYIIKEHFEKAIELNPKDATSIHLMGIWCYTFAEMPWYQRRIAKMLFATPPSSTYEKALGYFHRAEQGKTYLKLHNKKLAAFWLMKAKDYPAHTEEDKQEPDSPRVTLVRDVSPLRVRPITENKPQESLTFSFPCSPHLIVLVWIPELTAGLRCLFPHVHVYQRFCVASPSAS

SEQ ID NO: 9781 - protein, 309 aa, Homo sapiens
MASKSWLNFLTFLCGSAIGFLLCSQLFSILLGEKVDTQPNVLHNDPHARHSDDNGQNHLEGQMNFNADSSQHKDENTDIAENLYQKVRILCWVMTGPQNLEKKAKHVKATWAQRCNKVLFMSSEENKDFPAVGLKTKEGRDQLYWKTIKAFQYVHEHYLEDADWFLKADDDTYVILDNLRWLLSKYDPEEPIYFGRRFKPYVKQGYMSGGAGYVLSKEALKRFVDAFKTDKCTHSSSIEDLALGRCMEIMNVEAGDSRDTIGKETFHPFVPEHHLIKGYLPRTFWYWNYNYYPPVEVSLEILLLCQYLD

SEQ ID NO: 9782 - protein, 363 aa, Homo sapiens
MASKSWLNFLTFLCGSAIGFLLCSQLFSILLGEKVDTQPNVLHNDPHARHSDDNGQNHLEGQMNFNADSSQHKDENTDIAENLYQKVRILCWVMTGPQNLEKKAKHVKATWAQRCNKVLFMSSEENKDFPAVGLKTKEGRDQLYWKTIKAFQYVHEHYLEDADWFLKADDDTYVILDNLRWLLSKYDPEEPIYFGRRFKPYVKQGYMSGGAGYVLSKEALKRFVDAFKTDKCTHSSSIEDLALGRCMEIMNVEAGDSRDTIGKETFHPFVPEHHLIKGYLPRTFWYWNYNYYPPVEGPGCCSDLAVSFHYVDSTTMYELEYLVYHLRPYGYLYRYQPTLPERILKEISQANKNEDTKVKLGNP

SEQ ID NO: 9783 - protein, 363 aa, Homo sapiens; identical to SEQ ID NO: 9782

SEQ ID NO: 9784 - protein, 667 aa, Homo sapiens
MPEKVTRFCPLEGKANKNVQWDEDSVEYMPANPVRIAFVLVVHGRASRQLQRMFKAIYHKDHFYYIHVDKRSNYLHRQVLQVSRQYSNVRVTPWRMATIWGGASLLSTYLQSMRDLLEMTDWPWDFFINLSAADYPIRTNDQLVAFLSRYRDMNFLKSHGRDNARFIRKQGLDRLFLECDAHMWRLGDRRIPEGIAVDGGSDWFLLNRRFVEYVTFSTDDLVTKMKQFYSYTLLPAESFFHTVLENSPHCDTMVDNNLRITNWNRKLGCKCQYKHIVDWCGCSPNDFKPQDFHRFQQTARPTFFARKFEAVVNQEIIGQLDYYLYGNYPAGTPGLRSYWENVYDEPDGIHSLSDVTLTLYHSFARLGLRRAETSLHTDGENSCRYYPMGHPASVHLYFLADRFQGFLIKHHATNLAVSKLETLETWVMPKKVFKIASPPSDFGRLQFSEVGTDWDAKERLFRNFGGLLGPMDEPVGMQKWGKGPNVTVTVIWVDPVNVIAATYDILIESTAEFTHYKPPLNLPLRPGVWTVKILHHWVPVAETKFLVAPLTFSNRQPIKPEEALKLHNGPLRNAYMEQSFQSLNPVLSLPINPAQVEQARRNAASTGTALEGWLDSLVGGMWTAMDICATGPTACPVMQTCSQTAWSSFSPDPKSELGAVKPDGRLR

SEQ ID NO: 9785 - protein, 266 aa, Homo sapiens
MLSALGMLAAGGAGLAVALHSAVSASDLELHPPSYPWSHRGLLSSLDHTSIRRGFQVYKQVCASCHSMDFVAYRHLVGVCYTEDEAKELAAEVEVQDGPNEDGEMFMRPGKLFDYFPKPYPNSEAARAANNGALPPDLSYIVRARHGGEDYVFSLLTGYCEPPTGVSLREGLYFNPYFPGQAIAMAPPIYTDVLEFDDGTPATMSQIAKDVCTFLRWASEPEHDHRKRMGLKMLMMMALLVPLVYTIKRHKWSVLKSRKLAYRPPK

SEQ ID NO: 9786 - protein, 562 aa, Homo sapiens [sequence omitted]

SEQ ID NO: 9787 - protein, 653 aa, Homo sapiens
MGCSSSSTKTRRSDTSLRAALIIQNWYRGYKARLKARQHYALTIFQSIEYADEQGQMQLSTFFSFMLENYTHIHKEELELRNQSLESEQDMRDRWDYVDSIDVPDSYNGPRLQFPLTCTDIDLLLEAFKEQQILHAHYVLEVLFETKKVLKQMPNFTHIQTSPSKEVTICGDLHGKLDDLFLIFYKNGLPSERNPYVFNGDFVDRGKNSIEILMILCVSFLVYPNDLHLNRGNHEDFMMNLRYGFTKEILHKYKLHGKRILQILEEFYAWLPIGTIVDNEILVIHGGISETTDLNLLHRVERNKMKSVLIPPTETNRDHDTDSKHNKVGVTFNAHGRIKTNGSPTEHLTEHEWEQIIDILWSDPRGKNGCFPNTCRGGGCYFGPDVTSKILNKYQLKMLIRSHECKPEGYEICHDGKVVTIFSASNYYEEGSNRGAYIKLCSGTTPRFFQYQVTKATCFQPLRQRVDTMENSAIKILRERVISRKSDLTRAFQLQDHRKSGKLSVSQWAFCMENILGLNLPWRSLSSNLVNIDQNGNVEYMSSFQNIRIEKPVQEAHSTLVETLYRYRSDLEIIFNAIDTDHSGLISVEEFRAMWKLFSSHYNVHIDDSQVNKLANIMDLNKDGSIDFNEFLKAFYVVHRYEDLMKPDVTNLG

SEQ ID NO: 9788 - protein, 322 aa, Homo sapiens
MTTTIQSLFPNLQVFPALGNHDYWPQDQLPVVTSKVYNAVANLWKPWLDEEAISTLRKGGFYSQKVTTNPNLRIISLNTNLYYGPNIMTLNKTDPANQFEWLESTLNNSQQNKEKVYIIAHVPVGYLPSSQNITAMREYYNEKLIDIFQKYSDVIAGQFYGHTHRDSIMVLSDKKGSPVNSLFVAPAVTPVKSVLEKQTNNPGIRLFQYDPRDYKLLDMLQYYLNLTEANLKGESIWKLEYILTQTYDIEDLQPESLYGLAKQFTILDSKQFIKYYNYFFVSYDSSVTCDKTCKAFQICAIMNLDNISYADCLKQLYIKHNY

SEQ ID NO: 9789 - protein, 453 aa, Homo sapiens
MALVRALVCCLLTAWHCRSGLGLPVAPAGGRNPPPAIGQFWHVTDLHLDPTYHITDDHTKVCASSKGANASNPGPFGDVLCDSPYQLILSAFDFIKNSGQEASFMIWTGDSPPHVPVPELSTDTVINVITNMTTTIQSLFPNLQVFPALGNHDYWPQDQLPVVTSKVYNAVANLWKPWLDEEAISTLRKGGFYSQKVTTNPNLRIISLNTNLYYGPNIMTLNKTDPANQFEWLESTLNNSQQNKEKVYIIAHVPVGYLPSSQNITAMREYYNEKLIDIFQKYSDVIAGQFYGHTHRDSIMVLSDKKGSPVNSLFVAPAVTPVKSVLEKQTNNPGIRLFQYDPRDYKLLDMLQYYLNLTEANLKGESIWKLEYILTQTYDIEDLQPESLYGLAKQFTILDSKQFIKYYNYFFVSYDSSVTCDKTCKAFQICAIMNLDNISYADCLKQLYIKHNY

SEQ ID NO: 9790 - protein, 453 aa, Homo sapiens; identical to SEQ ID NO: 9789

SEQ ID NO: 9791 - protein, 808 aa, Homo sapiens
MLRFPTCFPSFRVVGEKQLPQEIIFLVWSPKRDLIALANTAGEVLLHRLASFHRVWSFPPNENTGKEVTCLAWRPDGKLLAFALADTKKIVLCDVEKPESLHSFSVEAPVSCMHWMEVTVESSVLTSFYNAEDESNLLLPKLPTLPKNYSNTSKIFSEENSDEIIKLLGDVRLNILVLGGSSGFIELYAYGMFKIARVTGIAGTCLALCLSSDLKSLSVVTEVSTNGASEVSYFQLETNLLYSFLPEVTRMARKFTHISALLQYINLSLTCMCEAWEEILMQMDSRLTKFVQEKNTTTSVQDEFMHLLLWGKASAELQTLLMNQLTVKGLKKLGQSIESSYSSIQKLVISHLQSGSESLLYHLSELKGMASWKQKYEPLGLDAAGIEEAITAVGSFILKANELLQVIDSSMKNFKAFFRWLYVAMLRMTEDHVLPELNKMTQKDITFVAEFLTEHFNEAPDLYNRKGKYFNVERVGQYLKDEDDDLVSPPNTEGNQWYDFLQNSSHLKESPLLFPYYPRKSLHFVKRRMENIIDQCLQKPADVIGKSMNQAICIPLYRDTRSEDSTRRLFKFPFLWNNKTSNLHYLLFTILEDSLYKMCILRRHTDISQSVSNGLIAIKFGSFTYATTEKVRRSIYSCLDAQFYDDETVTVVLKDTVGREGRDRLLVQLPLSLVYNSEDSAEYQFTGTYSTRLDEQCSAIPTRTMHFEKHWRLLESMKAQYVAGNGFRKVSCVLSSNLRHVRVFEMDIDDEWELDESSDEEEEASNKPVKIKEEVLSESEAENQQAGAAALAPEIVIKVEKLDPELDS

SEQ ID NO: 9792 - protein, 552 aa, Homo sapiens
MLRFPTCFPSFRVVGEKQLPQEIIFLVWSPKRDLIALANTAGEVLLHRLASFHRVWSFPPNENTGKEVTCLAWRPDGKLLAFALADTKKIVLCDVEKPESLHSFSVEAPVSCMHWMEVTVESSVLTSFYNAEDESNLLLPKLPTLPKNYSNTSKIFSEENSDEIIKLLGDVRLNILVLGGSSGFIELYAYGMFKIARVTGIAGTCLALCLSSDLKSLSVVTEVSTNGASEVSYFQLETNLLYSFLPEVTRMARKFTHISALLQYINLSLTCMCEAWEEILMQMDSRLTKFVQEKNTTTSVQDEFMHLLLWGKASAELQTLLMNQLTVKGLKKLGQSIESSYSSIQKLVISHLQSGSESLLYHLSELKGMASWKQKYEPLGLDAAGIEEAITAVGSFILKANELLQVIDSSMKNFKAFFRWLYVAMLRMTEDHVLPELNKVMTQKDITFVAEFLTEHFNEAPDLYNRKGKYFNVERVGQYLKDEDDDLVSPPNTEGNQWYDFLQNSSHLKESPLLFPYYPRKSLHFVKRRMENIIDQCLQKPAVSLKEMHVFV

SEQ ID NO: 9793 - protein, 808 aa, Homo sapiens; identical to SEQ ID NO: 9791

SEQ ID NO: 9794 - protein, 808 aa, Homo sapiens; identical to SEQ ID NO: 9791

SEQ ID NO: 9795 - protein, 554 aa, Homo sapiens [sequence omitted]

SEQ ID NO: 9796 - protein, 540 aa, Homo sapiens [sequence omitted]

SEQ ID NO: 9797 - protein, 509 aa, Homo sapiens
MNNEEDLLQEDSTRDEGNETEANSMNTLRRTRKKVTKPYVCSTEVGETDMSNSNDCMRDSSQILTPPQLSSRMKHIRQAMAKNRLQFVRFEATDLHGVSRSKTIPAHFFQEKVSHGVCMPRGYLEVIPNPKDNEMNNIRATCFNSDIVLMPELSTFRVLPWADRTARVICDTFTVTGEPLLTSPRYIAKRQLSHLQASGFSLLSAFIYDFCIFGVPEILNSKIISFPALTFLNNHDQPFMQELVDGLYHTGANVESFSSSTRPGQMEISFLPEFGISSADNAFTLRTGVKEVARKYNYIASFFIETGFCDSGILSHSLWDVDRKKNMFCSTSGTEQLTITGKKWLAGLLKHSAALSCLMAPSVSCRKRYSKDRKDLKKSVPTTWGYNDNSCIFNIKCHGEKGTRIENKLGSATANPYLVLAATVAAGLDGLHSSNEVLAGPDESTDFYQVEPSEIPLKLEDALVALEEDQCLRQALGETFIRYFVAMKKYELENEEIAAERNKFLEYFI

SEQ ID NO: 9798 - protein, 1499 aa, Homo sapiens [sequence omitted]

SEQ ID NO: 9799 - protein, 441 aa, Homo sapiens
MRKRTVCLHGCATGSYCLQKWSKTAVVTGTHSRCPSSRVHSAVGGEGRGVEADLWLLAGLAGTQEPCVLRALCGQPWPTLMPCAGVAPLCPQPQRQLPRLGTTLPAWPVLSPQLSFSPHFSLVLSVMTSTVGAAVTSVLKTPKYFCLHLPVFKAGDTSGERTPHSPTSFLNSKLVTVGLCPFSKQTLPLGEVGGAPIPATRARELDAHSTTSSSAAQPDFPSQPFFLSLEVRADKSLKKGVVEWLVLRVLCQWARFLSWGYVEPVHGDKLQGAQQTLMRRKKDKKACNDMKSRLDLWKRKEEKKYVNRFWKEIHVGDFVRLRCNEIFPADILLLSSSDPDGLCHIETANLDGETNLKRRQVVRGFSELGVWVQREVFVAESCLWCALATVQQGEGQCPPPSASAPAHRASLGQWALLSVDLSEGTVGSGAMPPVTVTGGDA

SEQ ID NO: 9800 - protein, 530 aa, Homo sapiens [sequence omitted]

SEQ ID NO: 9801 - protein, 148 aa, Homo sapiens
MAVGDLIPIPGDTAVNLPLAVGWCVCCSSQVPKSVLVYHCTSGNLNPCNRGKMGFQVLATFEIPIPFERALTRPYADFTTSNFRTQYWNAISQQAPAIIYDFYLWLTGRKPRQGQDGSKSNQPPLQPATSCWQDLFLHPVKSQGGTRA

SEQ ID NO: 9802 - protein, 1115 aa, Homo sapiens
MAGAGGGLGVWGNLVLLGLCSWTGARAPAPNPGRNLTVETQTTSSISLSWEVPDGLDSQNSNYWVQCTGDGGTTETRNTTATNVTVDGLGPGSLYTCSVWVEKDGVNSSVGTVTTATAPNPVRNLRVEAQTNSSIALTWEVPDGPDPQNSTYGVEYTGDGGRAGTRSTAHTNITVDGLEPGCLYAFSMWVGKNGINSSRETRNATTAHNPVRNLRVEAQTTSSISLSWEVPDGTDPQNSTYCVQCTGDGGRTETRNTTDTRVTVDGLGPGSLYTCSVWVEKDGVNSSVEIVTSATAPNPVRNLTVEAQTNSSIALTWEVPDGPDPQNSTYGVEYTGDGGRAGTRSTAHTNITVDRLEPGCLYVFSVWVGKNGINSSRETRNATTAPNPVRNLHMETQTNSSIALCWEVPDGPYPQDYTYWVEYTGDGGGTETRNTTNTSVTAERLEPGTLYTFSVWAEKNGARGSRQNVSISTVPNAVTSLSKQDWTNSTIALRWTAPQGPGQSSYSYWVSWVREGMTDPRTQSTSGTDITLKELEAGSLYHLTVWAERNEVRGYNSTLTAATAPNEVTDLQNETQTKNSVMLWWKAPGDPHSQLYVYWVQWASKGHPRRGQDPQANWVNQTSRTNETWYKVEALEPGTLYNFTVWAERNDVASSTQSLCASTYPDTVTITSCVSTSAGYGVNLIWSCPQGGYEAFELEVGGQRGSQDRSSCGEAVSVLGLGPARSYPATITTIWDGMKVVSHSVVCHTESAGVIAGAFVGILLFLILVGLLIFFLKRRNKKKQQKPELRDLVFSSPGDIPAEDFADHVRKNERDSNCGFADEYQQLSLVGHSQSQMVASASENNAKNRYRNVLPYDWSRVPLKPIHEEPGSDYINASFMPGLWSPQEFIATQGPLPQTVGDFWRLVWEQQSHTLVMLTNCMEAGRVKCEHYWPLDSQPCTHGHLRVTLVGEEVMENWTVRELLLLQVEEQKTLSVRQFHYQAWPDHGVPSSPDTLLAFWRMLRQWLDQTMEGGPPIVHCSAGVGRTGTLIALDVLLRQLQSEGLLGPFSFVRKMRESRPLMVQTEAQYVFLHQCILRFLQQSAQAPAEKEVPYEDVENLIYENVAAIQAHKLEV

SEQ ID NO: 9803 - protein, 97 aa, Homo sapiens [sequence omitted]

SEQ ID NO: 9804 - protein, 589 aa, Homo sapiens
MAAADGDDSLYPIAVLIDELRNEDVQLRLNSIKKLSTIALALGVERTRSELLPFLTDTIYDEDEVLLALAEQLGTFTTLVGGPEYVHCLLPPLESLATVEETVVRDKAVESLRAISHEHSPSDLEAHFVPLVKRLAGGDWFTSRTSACGLFSVCYPRVSSAVKAELRQYFRNLCSDDTPMVRRAAASKLGEFAKVLELDNVKSEIIPMFSNLASDEQDSVRLLAVEACVNIAQLLPQEDLEALVMPTLRQAAEDKSWRVRYMVADKFTELQKAVGPEITKTDLVPAFQNLMKDCEAEVRAAASHKVKEFCENLSADCRENVIMSQILPCIKELVSDANQHVKSALASVIMGLSPILGKDNTIEHLLPLFLAQLKDECPEVRLNIISNLDCVNEVIGIRQLSQSLLPAIVELAEDAKWRVRLAIIEYMPLLAGQLGVEFFDEKLNSLCMAWLVDHVYAIREAATSNLKKLVEKFGKEWAHATIIPKVLAMSGDPNYLHRMTTLFCINVLSEVCGQDITTKHMLPTVLRMAGDPVANVRFNVAKSLQKIGPILDNSTLQSEVKPILEKLTQDQDVDVKYFAQEALTVLSLA

SEQ ID NO: 9805 - protein, 367 aa, Homo sapiens
MLLAVLYCLLWSFQTSAGHFPRACVSSKNLMEKECCPPWSGDRSPCGQLSGRGSCQNILLSNAPLGPQFPFTGVDDRESWPSVFYNRTCQCSGNFMGFNCGNCKFGFWGPNCTERRLLVRRNIFDLSAPEKDKFFAYLTLAKHTISSDYVIPIGTYGQMKNGSTPMFNDINIYDLFVWMHYYVSMDALLGGSEIWRDIDFAHEAPAFLPWHRLFLLRWEQEIQKLTGDENFTIPYWDWRDAEKCDICTDEYMGGQHPTNPNLLSPASFFSSWQIVCSRLEEYNSHQSLCNGTPEGPLRRNPGNHDKSRTPRLPSSADVEFCLSLTQYESGSMDKAANFSFRNTLEEMGFLHIGWAGLKLLTSRDPPP

SEQ ID NO: 9806 - protein, 529 aa, Homo sapiens [sequence omitted]

SEQ ID NO: 9807 - protein, 465 aa, Homo sapiens
MEPSSLELPADTVQRIAAELKCHPTDERVALHLDEEDKLRHFRECFYIPKIQDLPPVDLSLVNKDENAIYFLGNSLGLQPKMVKTYLEEELDKWAKIAAYGHEVGKRPWITGDESIVGLMKDIVGANEKEIALMNALTVNLHLLMLSFFKPTPKRYKILLEAKAFPSDHYAIESQLQLHGLNIEESMRMIKPREGEETLRIEDILEVIEKEGDSIAVILFSGVHFYTGQHFNIPAITKAGQAKGCYVGFDLAHAVGNVELYLHDWGVDFACWCSYKYLNAGAGGIAGAFIHEKHAHTIKPALVGWFGHELSTRFKMDNKLQLIPGVCGFRISNPPILLVCSLHASLEIFKQATMKALRKKSVLLTGYLEYLIKHNYGKDKAATKKPVVNIITPSHVEERGCQLTITFSVPNKDVFQELEKRGVVCDKRNPNGIRVAPVPLYNSFHDVYKFTNLLTSILDSAETKN

SEQ ID NO: 9808 - protein, 307 aa, Homo sapiens
MEPSSLELPADTVQRIAAELKCHPTDERVALHLDEEDKLRHFRECFYIPKIQDLPPVDLSLVNKDENAIYFLGNSLGLQPKMVKTYLEEELDKWAKIAAYGHEVGKRPWITGDESIVGLMKDIVGANEKEIALMNALTVNLHLLMLSFFKPTPKRYKILLEAKAFPSDHYAIESQLQLHGLNIEESMRMIKPREGEETLRIEDILEVIEKEGDSIAVILFSGVHFYTGQHFNIPAITKAGQAKGCYVGFDLAHAVGNVELYLHDWGVDFACWCSYKYLNAGAGGIAGAFIHEKHAHTIKPARSEFFN

SEQ ID NO: 9809 - protein, 465 aa, Homo sapiens; identical to SEQ ID NO: 9807

SEQ ID NO: 9810 - protein, 413 aa, Homo sapiens
MSDKLPYKVAAWGRKALDIAENKMPGLMRIWERYSASKPLNGARIPGCLHRTVETAVLMSLITLGTEVQWSSCNIFSTQDHAAAAIAKAGISASTGIPVLPLPRLACLEGRNRRGVPVTGDLTNLIHSEYSQLLLSFRGISKETTIGVHNLYKMMVNGILKVPAIDVNDSATKSKFDNLYGCGIKQATDVMIAGKVAVVAGYGDKGKSCAQALRGFRASVIITKTDPIKALQAAMEGYEVTTMDEACQEGDVFVTTTGCVDIILGQHFEQTKDDTIVCNTGYFDVEMDVKWLNKNTVEKVNVKLQVDPYRLKNGRGIILLAEGRLVNLACAMGHPSFVRSNSFTSQVMAQIKLWTHPDKYPVGVHFLPKKLDESVAEAHLGKLNMKLTKLTEKQAQYLGMSCYCPFKPDHYRY

SEQ ID NO: 9811 - protein, 223 aa, Homo sapiens [sequence omitted]

SEQ ID NO: 9812 - protein, 292 aa, Homo sapiens
MASSMRSLFSDHGKYVESFRRFLNHSTEHQCMQEFMDKKLPGIIGRIGDTKSEIKILSIGGGAGEIDLQILSKVQAQYPGVCINNEVVEPSAEQIAKYKELVAKTSNLENVKFAWHKETSSEYQSRMLEKKELQKWDFIHMIQMLYYVKDIPATLKFFHSLLGTNAKMLIIVVSGSSGWDKLWKKYGSRFPQDDLCQYITSDDLTQMLDNLGLKYECYDLLSTMDISDCFIDGNENGDLLWDFLTETCNFNATAPPDLRAELGKDLQEPEFSAKKEGKVLFNNTLSFIVIEA

SEQ ID NO: 9813 - protein, 51 aa, Homo sapiens
MASSMRSLFSDHGKYVESFRRFLNHSTEHQCMQEFMDKKLPGIIGRYQNCC

SEQ ID NO: 9814 - protein, 126 aa, Homo sapiens
MASSMRSLFSDHGKYVESFRRFLNHSTEHQCMQEFMDKKLPGIIGRIGDTKSEIKILSIGGGADCLIRGSSRVLKRNSCFILCSTRQKDKPGMRIHDERSSELPFGAARLESKSAFPSFLVSFILF

SEQ ID NO: 9815 - protein, 628 aa, Homo sapiens
MPQDSVPSPRSLQGKSTTLFSRHTKAIVWGMQTRAVQGMLDFDYVCSRDEPSVAAMVYPFTGDHKQKFYWGHKEILIPVFKNMADAMRKHPEVDVLINFASLRSAYDSTMETMNYAQIRTIAIIAEGIPEALTRKLIKKADQKGVTIIGPATVGGIKPGCFKIGNTGGMLDNILASKLYRPGSVAYVSRSGGMSNELNNIISRTTDGVYEGVAIGGDRYPGSTFMDHVLRYQDTPGVKMIVVLGEIGGTEEYKICRGIKEGRLTKPIVCWCIGTCATMFSSEVQFGHAGACANQASETAVAKNQALKEAGVFVPRSFDELGEIIQSVYEDLVANGVIVPAQEVPPPTVPMDYSWARELGLIRKPASFMTSICDERGQELIYAGMPITEVFKEEMGIGGVLGLLWFQKRLPKYSCQFIEMCLMVTADHGPAVSGAHNTIICARAGKDLVSSLTSGLLTIGDRFGGALDAAAKMFSKAFDSGIIPMEFVNKMKKEGKLIMGIGHRVKSINNPDMRVQILKDYVRQHFPATPLLDYALEVEKITTSKKPNLILNVDGLIGVAFVDMLRNCGSFTREEADEYIDIGALNGIFVLGRSMGFIGHYLDQKRLKQGLYRHPWDDISYVLPEHMSM

SEQ ID NO: 9816 - protein, 1091 aa, Homo sapiens
MSAKAISEQTGKELLYKFICTTSAIQNRFKYARVTPDTDWARLLQDHPWLLSQNLVVKPDQLIKRRGKLGLVGVNLTLDGVKSWLKPRLGQEATVGKATGFLKNFLIEPFVPHSQAEEFYVCIYATREGDYVLFHHEGGVDVGDVDAKAQKLLVGVDEKLNPEDIKKHLLVHAPEDKKEILASFISGLFNFYEDLYFTYLEINPLVVTKDGVYVLDLAAKVDATADYICKVKWGDIEFPPPFGREAYPEEAYIADLDAKSGASLKLTLLNPKGRIWTMVAGGGASVVYSDTICDLGGVNELANYGEYSGAPSEQQTYDYAKTILSLMTREKHPDGKILIIGGSIANFTNVAATFKGIVRAIRDYQGPLKEHEVTIFVRRGGPNYQEGLRVMGEVGKTTGIPIHVFGTETHMTAIVGMALGHRPIPNQPPTAAHTANFLLNASGSTSTPAPSRTASFSESRADEVAPAKKAKPAMPQGKSTTLFSRHTKAIVWGMQTRAVQGMLDFDYVCSRDEPSVAAMVYPFTGDHKQKFYWGHKEILIPVFKNMADAMRKHPEVDVLINFASLRSAYDSTMETMNYAQIRTIAIIAEGIPEALTRKLIKKADQKGVTIIGPATVGGIKPGCFKIGNTGGMLDNILASKLYRPGSVAYVSRSGGMSNELNNIISRTTDGVYEGVAIGGDRYPGSTFMDHVLRYQDTPGVKMIVVLGEIGGTEEYKICRGIKEGRLTKPIVCWCIGTCATMFSSEVQFGHAGACANQASETAVAKNQALKEAGVFVPRSFDELGEIIQSVYEDLVANGVIVPAQEVPPPTVPMDYSWARELGLIRKPASFMTSICDERGQELIYAGMPITEVFKEEMGIGGVLGLLWFQKRLPKYSCQFIEMCLMVTADHGPAVSGAHNTIICARAGKDLVSSLTSGLLTIGDRFGGALDAAAKMFSKAFDSGIIPMEFVNKMKKEGKLIMGIGHRVKSINNPDMRVQILKDYVRQHFPATPLLDYALEVEKITTSKKPNLILNVDGLIGVAFVDMLRNCGSFTREEADEYIDIGALNGIFVLGRSMGFIGHYLDQKRLKQGLYRHPWDDISYVLPEHMSM

SEQ ID NO: 9817 - protein, 1101 aa, Homo sapiens
MSAKAISEQTGKELLYKFICTTSAIQNRFKYARVTPDTDWARLLQDHPWLLSQNLVVKPDQLIKRRGKLGLVGVNLTLDGVKSWLKPRLGQEATVGKATGFLKNFLIEPFVPHSQAEEFYVCIYATREGDYVLFHHEGGVDVGDVDAKAQKLLVGVDEKLNPEDIKKHLLVHAPEDKKEILASFISGLFNFYEDLYFTYLEINPLVVTKDGVYVLDLAAKVDATADYICKVKWGDIEFPPPFGREAYPEEAYIADLDAKSGASLKLTLLNPKGRIWTMVAGGGASVVYSDTICDLGGVNELANYGEYSGAPSEQQTYDYAKTILSLMTREKHPDGKILIIGGSIANFTNVAATFKGIVRAIRDYQGPLKEHEVTIFVRRGGPNYQEGLRVMGEVGKTTGIPIHVFGTETHMTAIVGMALGHRPIPNQPPTAAHTANFLLNASGSTSTPAPSRTASFSESRADEVAPAKKAKPAMPQDSVPSPRSLQGKSTTLFSRHTKAIVWGMQTRAVQGMLDFDYVCSRDEPSVAAMVYPFTGDHKQKFYWGHKEILIPVFKNMADAMRKHPEVDVLINFASLRSAYDSTMETMNYAQIRTIAIIAEGIPEALTRKLIKKADQKGVTIIGPATVGGIKPGCFKIGNTGGMLDNILASKLYRPGSVAYVSRSGGMSNELNNIISRTTDGVYEGVAIGGDRYPGSTFMDHVLRYQDTPGVKMIVVLGEIGGTEEYKICRGIKEGRLTKPIVCWCIGTCATMFSSEVQFGHAGACANQASETAVAKNQALKEAGVFVPRSFDELGEIIQSVYEDLVANGVIVPAQEVPPPTVPMDYSWARELGLIRKPASFMTSICDERGQELIYAGMPITEVFKEEMGIGGVLGLLWFQKRLPKYSCQFIEMCLMVTADHGPAVSGAHNTIICARAGKDLVSSLTSGLLTIGDRFGGALDAAAKMFSKAFDSGIIPMEFVNKMKKEGKLIMGIGHRVKSINNPDMRVQILKDYVRQHFPATPLLDYALEVEKITTSKKPNLILNVDGLIGVAFVDMLRNCGSFTREEADEYIDIGALNGIFVLGRSMGFIGHYLDQKRLKQGLYRHPWDDISYVLPEHMSM

SEQ ID NO: 9818 - protein, 179 aa, Homo sapiens
MAFLASGPYLTHQQKVLRLYKRALRHLESWCVQRDKYRYFACLMRARFEEHKNEKDMAKATQLLKEAEEEFWYRQHPQPYIFPDSPGGTSYERYDCYKVPEWCLDDWHPSEKAMYPDYFAKREQWKKLRRESWEREVKQLQEETPPGGPLTEALPPARKEGDLPPLWWYIVTRPRERPM

SEQ ID NO: 9819 - protein, 246 aa, Homo sapiens
MDGTRTSLDIEEYSNTEVQKNQVLTLEEWQDKWVNGNTAFHQEQGPQLLKKHLDTFLKGESGLRVFFPLCRKEVEMKWFADRGHSVVGVEISELGIREFFTEQNLSYSEEPITEIPGTKAFKSSSGNISSYCCSIFDLPRTNIGTFDMIWDRGALVAINPGDRKCYADIMLSLLGKKFQYLLCVFLTIQLNIQVHHFMFHMLKLKGCLVKYAIYIVLRRLMLLKNDIKIGGLTIFLKSYIYLQKSK

SEQ ID NO: 9820 - protein, 155 aa, Homo sapiens
MSLDQEVRQGLKAYSNWPTYPQLYVSGELIGGLDIIKEIHASEELDIICPKAPKLEERLKVLTNEASMMLFMKGNKQEAKCGFSKQILEILNSTGGEYETFDILEDEGDRQGLKAYSNWPTYPQLYVKGELVGGLDIVKELKENGELLPILRGEN

SEQ ID NO: 9821 - protein, 598 aa, Homo sapiens
MTFQASHRSAWGKSRKKNWQYEGPTQKLFLKRNNVSAPDGPSDPSISVSSEQSGAQQPPALQVERIVDKRKNKKGKTEYLVRWKGYDSEDDTWEPEQHLVNCEEYIHDFNRRHTEKQKESTLTRTNRTSPNNARKQISRSTNSNFSKTSPKALVIGKDHESKNSQLFAASQKFRKNTAPSLSSRKNMDLAKSGIKILVPKSPVKSRTAVDGFQSESPEKLDPVEQGQEDTVAPEVAAEKPVGALLGPGAERARMGSRPRIHPLVPQVPGPVTAAMATGLAVNGKGTSPFMDALTANGTTNIQTSVTGVTASKRKFIDDRRDQPFDKRLRFSVRQTESAYRYRDIVVRKQDGFTHILLSTKSSENNSLNPEVMREVQSALSTAAADDSKLVLLSAVGSVFCCGLDFIYFIRRLTDDRKRESTKMAEAIRNFVNTFIQFKKPIIVAVNGPAIGLGASILPLCDVVWANEKAWFQTPYTTFGQSPDGCSTVMFPKIMGGASANEMLLSGRKLTAQEACGKGLVSQVFWPGTFTQEVMVRIKELASCNPVVLEESKALVRCNMKMELEQANERECEVLKKIWGSAQGMDSMLKYLQRKIDEF

SEQ ID NO: 9822 - protein, 433 aa, Homo sapiens [sequence omitted]

SEQ ID NO: 9823 - protein, 1228 aa, Homo sapiens
MKVSNKEHKKTVGHQFRTSLHLLMETLNATTPHYVRCIKPNDEKLPFHFDPKRAVQQLRACGVLETIRISAAGYPSRWAYHDFFNRYRVLVKKRELANTDKKAICRSVLENLIKDPDKFQFGRTKIFFRAGQVAYLEKLRADKFRTATIMIQKTVRGWLQKVKYHRLKGATLTLQRYCRGHLARRLAEHLRRIRAAVVLQKHYRMQRARQAYQRVRRAAVVIQAFTRAMFVRRTYRQVLMEHKATTIQKHVRGWMARRHFQRLRDAAIVIQCAFRMLKARRELKALRIEARSAEHLKRLNVGMENKVVQLQRKIDEQNKEFKTLSEQLSVTTSTYTMEVERLKKELVHYQQSPGEDTSLRLQEEVESLRTELQRAHSERKILEDAHSREKDELRKRVADLEQENALLKDEKEQLNNQILCQSKDEFAQNSVKENLMKKELEEERSRYQNLVKEYSQLEQRYDNLRDEMTIIKQTPGHRRNPSNQSSLESDSNYPSISTSEIGDTEDALQQVEEIGLEKAAMDMTVFLKLQKRVRELEQERKKLQVQLEKREQQDSKKVQAEPPQTDIDLDPNADLAYNSLKRQELESENKKLKNDLNELRKAVADQATQNNSSHGSPDSYSLLLNQLKLAHEELEVRKEEVLILRTQIVSADQRRLAGRNAEPNINARSSWPNSEKHVDQEDAIEAYHGVCQTNSKTEDWGYLNEDGELGLAYQGLKQVARLLEAQLQAQSLEHEEEVEHLKAQLEALKEEMDKQQQTFCQTLLLSPEAQVEFGVQQEISRLTNENLDLKELVEKLEKNERKLKKQLKIYMKKAQDLEAAQALAQSERKRHELNRQVTVQRKEKDFQGMLEYHKEDEALLIRNLVTDLKPQMLSGTVPCLPAYILYMCIRHADYTNDDLKVHSLLTSTINGIKKVLKKHNDDFEMTSFWLSNTCRLLHCLKQYSGDEGFMTQNTAKQNEHCLKNFDLTEYRQVLSDLSIQIYQQLIKIAEGVLQPMIVSAMLENESIQGLSGVKPTGYRKRSSSMADGDNSYCLEAIIRQMNAFHTVMCDQGLDPEIILQVFKQLFYMINAVTLNNLLLRKDVCSWSTGMQLRYNISQLEEWLRGRNLHQSGAVQTMEPLIQAAQLLQLKKKTQEDAEAICSLCTSLSTQQIVKILNLYTPLNEFEERVTVAFIRTIQAQLQERNDPQQLLLDAKHMFPVLFPFNPSSLTMDSIHIPACLNLEFLNEV

SEQ ID NO: 9824 - protein, 1296 aa, Homo sapiens [sequence omitted]

SEQ ID NO: 9825 - protein, 1725 aa, Homo sapiens [sequence omitted]

SEQ ID NO: 9826 - protein, 1228 aa, Homo sapiens; identical to SEQ ID NO: 9823

SEQ ID NO: 9827 - protein, 397 aa, Homo sapiens
MALLRGVFVVAAKRTPFGAYGGLLKDFTATDLSEFAAKAALSAGKVSPETVDSVIMGNVLQSSSDAIYLARHVGLRVGIPKETPALTINRLCGSGFQSIVNGCQEICVKEAEVVLCGGTESMSQAPYCVRNVRFGTKLGSDIKLEDSLWVSLTDQHVQLPMAMTAENLAVKHKISREECDKYALQSQQRWKAANDAGYFNDEMAPIEVKTKKGKQTMQVDEHARPQTTLEQLQKLPPVFKKDGTVTAGNASGVADGAGAVIIASEDAVKKHNFTPLARIVGYFVSGCDPSIMGIGPVPAISGALKKAGLSLKDMDLVEVNEAFAPQYLAVERSLDLDISKTNVNGGAIALGHPLGGSGSRITAHLVHELRRRGGKYAVGSACIGGGQGIAVIIQSTA

SEQ ID NO: 9828 - protein, 402 aa, Homo sapiens
MQCSSWYLHVGVFVVAAKRTPFGAYGGLLKDFTATDLSEFAAKAALSAGKVSPETVDSVIMGNVLQSSSDAIYLARHVGLRVGIPKETPALTINRLCGSGFQSIVNGCQEICVKEAEVVLCGGTESMSQAPYCVRNVRFGTKLGSDIKLEDSLWVSLTDQHVQLPMAMTAENLAVKHKISREECDKYALQSQQRWKAANDAGYFNDEMAPIEVKTKKGKQTMQVDEHARPQTTLEQLQKLPPVFKKDGTVTAGNASGVADGAGAVIIASEDAVKKHNFTPLARIVGYFVSGCDPSIMGIGPVPAISGALKKAGLSLKDMDLVEVNEAFAPQYLAVERSLDLDISKTNVNGGAIALGHPLGGSGSRITAHLVHELRRRGGKYAVGSACIGGGQGIAVIIQSTA

SEQ ID NO: 9829 - protein, 397 aa, Homo sapiens; identical to SEQ ID NO: 9827

SEQ ID NO: 9830 - protein, 321 aa, Homo sapiens
MPTYFLKWERLSVGATCGLVALWQWWRLDSGTMSGFSTEERATPFSLKYRVFLKNEKGQYMSPFQDIPIYADKDVFHVVVEVPLWSNAKMEVATKDPLNPIKQDVKKRKLRYVANLFPYKGYVWNYGAIPQTWEDPGHNDKHTGCCGDNDPIDVCEIGSKVCARDEIIGVKVLGILAMIDEGETDWKVIAINMDDPDAGNYTDISDVKRLKPGYLEATVDWFRRYKVPDGKPENEFAFNAEFEDKDFAIDIIKSTHDHWKALVTKKMNGKGISCMNKTVSESLFKCDPDAARAIVDALPPPCESACTVPTDVDTWFHHQKN

SEQ ID NO: 9831 - protein, 106 aa, Homo sapiens
MAQEFVNCKIQPGKLVVFIKPTCPYCRRAQEILSQLSTKQRLLEFVDITASNHTNKIQDYLQQLTGARMVPRVFIGKDCIGGCSDLVSMQQIGELLTRLKQIGALQ

SEQ ID NO: 9832 - protein, 106 aa, Homo sapiens; identical to SEQ ID NO: 9831

SEQ ID NO: 9833 - protein, 501 aa, Homo sapiens
MKKEGRKRWKRKEDKKRVVVSNLLFEGWSHKENPNRHHRGNQIKTSKYTVLSFVPKNIFEQLHRFANLYFVGIAVLNFIPVVNAFQPEVSMIPICVILAVTAIKDAWEDLRRYKSDKVINNRECLIYSRKEQTYVQKCWKDVRVGDFIQMKCNEIVPADILLLFSSDPNGICHLETASLDGETNLKQRCVVKGFSQQEVQFEPELFHNTIVCEKPNNHLNKFKGYMEHPDQTRTGFGCESLLLRGCTIRNTEMAVGIVIYAGHETKAMLNNSGPRYKRSKIERRMNIDIFFCIGILILMCLIGAVGHSIWNGTFEEHPPFDVPDANGSFLPSALGGFYMFLTMIILLQVLIPISLYVSIELVKLGQVFFLSNDLDLYDEETDLSIQCRALNIAEDLGQIQYIFSDKTGTLTENKMVFRRCTIMGSEYSHQENGIEAPKGSIPLSKRKYPALLRNEEIKDILLALLEAVWHFHKLLPVSLWSSLSQIRAVPITCKLSFVYKG

SEQ ID NO: 9834 - protein, 1433 aa, Homo sapiens
MKKEGRKRWKRKEDKKRVVVSNLLFEGWSHKENPNRHHRGNQIKTSKYTVLSFVPKNIFEQLHRFANLYFVGIAVLNFIPVVNAFQPEVSMIPICVILAVTAIKDAWEDLRRYKSDKVINNRECLIYSRKEQTYVQKCWKDVRVGDFIQMKCNEIVPADILLLFSSDPNGICHLETASLDGETNLKQRCVVKGFSQQEVQFEPELFHNTIVCEKPNNHLNKFKGYMEHPDQTRTGFGCESLLLRGCTIRNTEMAVGIVIYAGHETKAMLNNSGPRYKRSKIERRMNIDIFFCIGILILMCLIGAVGHSIWNGTFEEHPPFDVPDANGSFLPSALGGFYMFLTMIILLQVLIPISLYVSIELVKLGQVFFLSNDLDLYDEETDLSIQCRALNIAEDLGQIQYIFSDKTGTLTENKMVFRRCTIMGSEYSHQENAKRLETPKELDSDGEEWTQYQCLSFSARWAQDPATMRSQKGAQPLRRSQSARVPIQGHYRQRSMGHRESSQPPVAFSSSIEKDVTPDKNLLTKVRDAALWLETLSDSRPAKASLSTTSSIADFFLALTICNSVMVSTTTEPRQRVTIKPSSKALGTSLEKIQQLFQKLKLLSLSQSFSSTAPSDTDLGESLGANVATTDSDERDDASVCSGGDSTDDGGYRSSMWDQGDILESGSGTSLEEALEAPATDLARPEFCYEAESPDEAALVHAAHAYSFTLVSRTPEQVTVRLPQGTCLTFSLLCTLGFDSVRKRMSVVVRHPLTGEIVVYTKGADSVIMDLLEDPACVPDINMEKKLRKIRARTQKHLDLYARDGLRTLCIAKKVVSEEDFRRWASFRREAEASLDNRDELLMETAQHLENQLTLLGATGIEDRLQEGVPDTIATLREAGIQLWVLTGDKQETAVNIAHSCRLLNQTDTVYTINTENQETCESILNCALEELKQFRELQKPDRKLFGFRLPSKTPSITSEAVVPEAGLVIDGKTLNAIFQGKLEKKFLELTQYCRSVLCCRSTPLQKSMIVKLVRDKLRVMTLSIGDGANDVSMIQAADIGIGISGQEGMQAVMSSDFAITRFKHLKKLLLVHGHWCYSRLARMVVYYLYKNVCYVNLLFWYQFFCGFSSSTMIDYWQMIFFNLFFTSLPPLVFGVLDKDISAETLLALPELYKSGQNSECYNLSTFWISMVDAFYQSLICFFIPYLAYKGSDIDVFTFGTPINTISLTTILLHQAMEMKTWTIFHGVVLLGSFLMYFLVSLLYNATCVICNSPTNPYWVMEGQLSNPTFYLVCFLTPVVALLPRYFFLSLQGTCGKSLISKAQKIDKLPPDKRNLEIQSWRSRQRPAPVPEVARPTHHPVSSITGQDFSASTPKSSNPPKRKHVEESVLHEQRCGTECMRDDSCSGDSSAQLSSGEHLLGPNRIMAYSRGQTDMCRCSKRSSHRRSQSSLTI

SEQ ID NO: 9835 - protein, 854 aa, Homo sapiens [sequence omitted]

SEQ ID NO: 9836 - protein, 501 aa, Homo sapiens
MVLQPSERHYRDWNHRRLGPWCSPTGSPAPLSCETGCGEGSWILVCRLLVPTQVSLLSMEEDIDTRKINNSFLRDHSYATEADIISTVEFNHTGELLATGDKGGRVVIFQREQESKNQVHRRGEYNVYSTFQSHEPEFDYLKSLEIEEKINKIRWLPQQNAAYFLLSTNDKTVKLWKVSERDKRPEGYNLKDEEGRLRDPATITTLRVPVLRPMDLMVEATPRRVFANAHTYHINSISVNSDYETYMSADDLRINLWNFEITNQSFNIVDIKPANMEELTEVITAAEFHPHHCNTFVYSSSKGTIRLCDMRASALCDRHTKFFEEPEDPSNRSFFSEIISSISDVKFSHSGRYIMTRDYLTVKVWDLNMENRPIETYQVHDYLRSKLCSLYENDCIFDKFECVWNGSDSVIMTGSYNNFFRMFDRNTKRDVTLEASRENSKPRAILKPRKVCVGGKRRKDEISVDSLDFSKKILHTAWHPSENIIAVAATNNLYIFQDKVN

SEQ ID NO: 9837 - protein, 443 aa, Homo sapiens
MEEDIDTRKINNSFLRDHSYATEADIISTVEFNHTGELLATGDKGGRVVIFQREQESKNQVHRRGEYNVYSTFQSHEPEFDYLKSLEIEEKINKIRWLPQQNAAYFLLSTNDKTVKLWKVSERDKRPEGYNLKDEEGRLRDPATITTLRVPVLRPMDLMVEATPRRVFANAHTYHINSISVNSDYETYMSADDLRINLWNFEITNQSFNIVDIKPANMEELTEVITAAEFHPHHCNTFVYSSSKGTIRLCDMRASALCDRHTKFFEEPEDPSNRSFFSEIISSISDVKFSHSGRYIMTRDYLTVKVWDLNMENRPIETYQVHDYLRSKLCSLYENDCIFDKFECVWNGSDSVIMTGSYNNFFRMFDRNTKRDVTLEASRENSKPRAILKPRKVCVGGKRRKDEISVDSLDFSKKILHTAWHPSENIIAVAATNNLYIFQDKVN

SEQ ID NO: 9838 - protein, 443 aa, Homo sapiens; identical to SEQ ID NO: 9837

SEQ ID NO: 9839 - protein, 509 aa, Homo sapiens
MLLSLPALHLQTSEHHPFFQLPHRRLGPWCSPTGSPAPLSCETGCGEGSWILVCRLLVPTQVSLLSMEEDIDTRKINNSFLRDHSYATEADIISTVEFNHTGELLATGDKGGRVVIFQREQESKNQVHRRGEYNVYSTFQSHEPEFDYLKSLEIEEKINKIRWLPQQNAAYFLLSTNDKTVKLWKVSERDKRPEGYNLKDEEGRLRDPATITTLRVPVLRPMDLMVEATPRRVFANAHTYHINSISVNSDYETYMSADDLRINLWNFEITNQSFNIVDIKPANMEELTEVITAAEFHPHHCNTFVYSSSKGTIRLCDMRASALCDRHTKFFEEPEDPSNRSFFSEIISSISDVKFSHSGRYIMTRDYLTVKVWDLNMENRPIETYQVHDYLRSKLCSLYENDCIFDKFECVWNGSDSVIMTGSYNNFFRMFDRNTKRDVTLEASRENSKPRAILKPRKVCVGGKRRKDEISVDSLDFSKKILHTAWHPSENIIAVAATNNLYIFQDKVN

SEQ ID NO: 9840 - protein, 501 aa, Homo sapiens; identical to SEQ ID NO: 9836

SEQ ID NO: 9841 - protein, 443 aa, Homo sapiens; identical to SEQ ID NO: 9837

SEQ ID NO: 9842 - protein, 112 aa, Homo sapiens
APSPGSLRPPRSAQSGSVPPPRHRLRASIQPAPSGRELPLPAPPPGAGGRGVALRPPHPCEHGAASGAERAGPALHPARGPVTRRALPAEALAAGGGRRPYAAHWTRSALGA

SEQ ID NO: 9843 - protein, 177 aa, Homo sapiens
MALRVVRSVRALLCTLRAVPLPAAPCPPRPWQLGVGAVRTLRTGPALLSVRKFTEKHEWVTTENGIGTVGISNFAQEALGDVVYCSLPEVGTKLNKQDEFGALESVKAASELYSPLSGEVTEINEALAENPGLVNKSCYEDGWLIKMTLSNPSELDELMSEEAYEKYIKSIEEVVLN

SEQ ID NO: 9844 - protein, 162 aa, Homo sapiens [sequence omitted]

SEQ ID NO: 9845 - protein, 173 aa, Homo sapiens
MALRVVRSVRALLCTLRAVPLPAAPCPPRPWQLGVGAVRTLRTGPALLSVRKFTEKHEWVTTENGIGTVGISNFAQEALGDVVYCSLPEVGTKLNKQDEFGALESVKAASELYSPLSGEVTEINEALAENPGLVNKSCYEDGWLIKMTLSNPSELDELMSEEAYEKYIKSIEE

SEQ ID NO: 9846 - protein, 434 aa, Homo sapiens [sequence omitted]

SEQ ID NO: 9847 - protein, 1070 aa, Homo sapiens
MEQDTAAVAATVAAADATATIVVIEDEQPGPSTSQEEGAAAAATEATAATEKGEKKKEKNVSSFQLKLAAKAPKSEKEMDPEYEEKMKADRAKRFEFLLKQTELFAHFIQPSAQKSPTSPLNMKLGRPRIKKDEKQSLISAGDYRHRRTEQEEDEELLSESRKTSNVCIRFEVSPSYVKGGPLRDYQIRGLNWLISLYENGVNGILADEMGLGKTLQTIALLGYLKHYRNIPGPHMVLVPKSTLHNWMNEFKRWVPSLRVICFVGDKDARAAFIRDEMMPGEWDVCVTSYEMVIKEKSVFKKFHWRYLVIDEAHRIKNEKSKLSEIVREFKSTNRLLLTGTPLQNNLHELWALLNFLLPDVFNSADDFDSWFDTKNCLGDQKLVERLHAVLKPFLLRRIKTDVEKSLPPKKEIKIYLGLSKMQREWYTKILMKDIDVLNSSGKMDKMRLLNILMQLRKCCNHPYLFDGAEPGPPYTTDEHIVSNSGKMVVLDKLLAKLKEQGSRVLIFSQMTRLLDILEDYCMWRGYEYCRLDGQTPHEEREDKFLEVEFLGQREAIEAFNAPNSSKFIFMLSTRAGGLGINLASADVVILYDSDWNPQVDLQAMDRAHRIGQKKPVRVFRLITDNTVEERIVERAEIKLRLDSIVIQQGRLIDQQSNKLAKEEMLQMIRHGATHVFASKESELTDEDITTILERGEKKTAEMNERLQKMGESSLRNFRMDIEQSLYKFEGEDYREKQKLGMVEWIEPPKRERKANYAVDAYFREALRVSEPKIPKAPRPPKQPNVQDFQFFPPRLFELLEKEILYYRKTIGYKVPRNPDIPNPALAQREEQKKIDGAEPLTPEETEEKEKLLTQGFTNWTKRDFNQFIKANEKYGRDDIDNIAREVEGKSPEEVMEYSAVFWERCNELQDIEKIMAQIERGEARIQRRISIKKALDAKIARYKAPFHQLRIQYGTSKGKNYTEEEDRFLICMLHKMGFDRENVYEELRQCVRNAPQFRFDWFIKSRTAMEFQRRCNTLISLIEKENMEIEERERAEKKKRATKTPMSQKRKAESATESSGKKDVKKVKS

SEQ ID NO: 9848 - protein, 1054 aa, Homo sapiens
MEQDTAAVAATVAAADATATIVVIEDEQPGPSTSQEEGAAAAATEATAATEKGEKKKEKNVSSFQLKLAAKAPKSEKEMDPEYEEKMKADRAKRFEFLLKQTELFAHFIQPSAQKSPTSPLNMKLGRPRIKKDEKQSLISAGDYRHRRTEQEEDEELLSESRKTSNVCIRFEVSPSYVKGGPLRDYQIRGLNWLISLYENGVNGILADEMGLGKTLQTIALLGYLKHYRNIPGPHMVLVPKSTLHNWMNEFKRWVPSLRVICFVGDKDARAAFIRDEMMPGEWDVCVTSYEMVIKEKSVFKKFHWRYLVIDEAHRIKNEKSKLSEIVREFKSTNRLLLTGTPLQNNLHELWALLNFLLPDVFNSADDFDSWFDTKNCLGDQKLVERLHAVLKPFLLRRIKTDVEKSLPPKKEIKIYLGLSKMQREWYTKILMKDIDVLNSSGKMDKMRLLNILMQLRKCCNHPYLFDGAEPGPPYTTDEHIVSNSGKMVVLDKLLAKLKEQGSRVLIFSQMTRLLDILEDYCMWRGYEYCRLDGQTPHEEREDKFLEVEFLGQREAIEAFNAPNSSKFIFMLSTRAGGLGINLASADVVILYDSDWNPQVDLQAMDRAHRIGQKKPVRVFRLITDNTVEERIVERAEIKLRLDSIVIQQGRLIDQQSNKLAKEEMLQMIRHGATHVFASKESELTDEDITTILERGEKKTAEMNERLQKMGESSLRNFRMDIEQSLYKFEGEDYREKQKLGMVEWIEPPKRERKANYAVDAYFREALRVSEPKIPKAPRPPKQPNVQDFQFFPPRLFELLEKEILYYRKTIGYKVPRNPDIPNPALAQREEQKKIDGAEPLTPEETEEKEKLLTQGFTNWTKRDFNQFIKANEKYGRDDIDNIAREVEGKSPEEVMEYSAVFWERCNELQDIEKIMAQIERGEARIQRRISIKKALDAKIARYKAPFHQLRIQYGTSKGKNYTEEEDRFLICMLHKMGFDRENVYEELRQCVRNAPQFRFDWFIKSRTAMEFQRRCNTLISLIEKENMEIEERERAEKKKRATKTPMVKFSAFS

SEQ ID NO: 9849 - protein, 1029 aa, Homo sapiens
MEQDTAAVAATVAAADATATIVVIEDEQPGPSTSQEEGAAAAATEATAATEKGEKKKEKADRAKRFEFLLKQTELFAHFIQPSAQKSPTSPLNMKLGRPRIKKDEKQSLISAGDYRHRRTEQEEDEELLSESRKTSNVCIRFEVSPSYVKGGPLRDYQIRGLNWLISLYENGVNGILADEMGLGKTLQTIALLGYLKHYRNIPGPHMVLVPKSTLHNWMNEFKRWVPSLRVICFVGDKDARAAFIRDEMMPGEWDVCVTSYEMVIKEKSVFKKFHWRYLVIDEAHRIKNEKSKLSEIVREFKSTNRLLLTGTPLQNNLHELWALLNFLLPDVFNSADDFDSWFDTKNCLGDQKLVERLHAVLKPFLLRRIKTDVEKSLPPKKEIKIYLGLSKMQREWYTKILMKDIDVLNSSGKMDKMRLLNILMQLRKCCNHPYLFDGAEPGPPYTTDEHIVSNSGKMVVLDKLLAKLKEQGSRVLIFSQMTRLLDILEDYCMWRGYEYCRLDGQTPHEEREEAIEAFNAPNSSKFIFMLSTRAGGLGINLASADVVILYDSDWNPQVDLQAMDRAHRIGQKKPVRVFRLITDNTVEERIVERAEIKLRLDSIVIQQGRLIDQQSNKLAKEEMLQMIRHGATHVFASKESELTDEDITTILERGEKKTAEMNERLQKMGESSLRNFRMDIEQSLYKFEGEDYREKQKLGMVEWIEPPKRERKANYAVDAYFREALRVSEPKIPKAPRPPKQPNVQDFQFFPPRLFELLEKEILYYRKTIGYKVPRNPDIPNPALAQREEQKKIDGAEPLTPEETEEKEKLLTQGFTNWTKRDFNQFIKANEKYGRDDIDNIAREVEGKSPEEVMEYSAVFWERCNELQDIEKIMAQIERGEARIQRRISIKKALDAKIARYKAPFHQLRIQYGTSKGKNYTEEEDRFLICMLHKMGFDRENVYEELRQCVRNAPQFRFDWFIKSRTAMEFQRRCNTLISLIEKENMEIEERERAEKKKRATKTPMSQKRKAESATESSGKKDVKKVKS

SEQ ID NO: 9850 - protein, 391 aa, Homo sapiens
MTYKCAVVDVPFGGAKAGVKINPKNYTENELEKITRRFTMELAKKGFIGPGVDVPAPDMNTGEREMSWIADTYASTIGHYDINAHACVTGKPISQGGIHGRISATGRGVFHGIENFINEASYMSILGMTPGFRDKTFVVQGFGNVGLHSMRYLHRFGAKCIAVGESDGSIWNPDGIDPKELEDFKLQHGSILGFPKAKPYEGSILEVDCDILIPAATEKQLTKSNAPRVKAKIIAEGANGPTTPEADKIFLERNILVIPDLYLNAGGVTVSYFEWLKNLNHVSYGRLTFKYERDSNYHLLLSVQESLERKFGKHGGTIPIVPTAEFQDSISGASEKDIVHSALAYTMERSARQIMHTAMKYNLGLDLRTAAYVNAIEKVFKVYSEAGVTFT

SEQ ID NO: 9851 - protein, 558 aa, Homo sapiens
MYRYLAKALLPSRAGPAALGSAANHSAALLGRGRGQPAAASQPGLALAARRHYSELVADREDDPNFFKMVEGFFDRGASIVEDKLVKDLRTQESEEQKRNRVRGILRIIKPCNHVLSLSFPIRRDDGSWEVIEGYRAQHSQHRTPCKGGIRYSTDVSVDEVKALASLMTYKCAVVDVPFGGAKAGVKINPKNYTENELEKITRRFTMELAKKGFIGPGVDVPAPDMNTGEREMSWIADTYASTIGHYDINAHACVTGKPISQGGIHGRISATGRGVFHGIENFINEASYMSILGMTPGFRDKTFVVQGFGNVGLHSMRYLHRFGAKCIAVGESDGSIWNPDGIDPKELEDFKLQHGSILGFPKAKPYEGSILEVDCDILIPAATEKQLTKSNAPRVKAKIIAEGANGPTTPEADKIFLERNILVIPDLYLNAGGVTVSYFEWLKNLNHVSYGRLTFKYERDSNYHLLLSVQESLERKFGKHGGTIPIVPTAEFQDSISGASEKDIVHSALAYTMERSARQIMHTAMKYNLGLDLRTAAYVNAIEKVFKVYSEAGVTFT

SEQ ID NO: 9852 - protein, 230 aa, Homo sapiens [sequence omitted]

SEQ ID NO: 9853 - protein, 93 aa, Homo sapiens
MRSTAEVTGKSQNSSTLAGAWGVKNRRREEVFPSLQKRNQSQPQLPGSQKQFTHQAAPLPSFQLLATGRRCLKGFALRLQEEAAGRTAGALGF

SEQ ID NO: 9854 - protein, 151 aa, Homo sapiens
MCRPRAYIFSDCHSRVLEQLRGNVLLNGLSLEADITANLDGPRVTVAQLDWDVATVCQLSAVQPDVVIAADVLYCPEAIVSLVGVLRRLAACREHQRAPEVYVAFTVHNPQTCQLFTTELVEIRWEVEACHDQKLFPYKEHLEMAMLNLIL

SEQ ID NO: 9855 - protein, 93 aa, Homo sapiens; identical to SEQ ID NO: 9853

SEQ ID NO: 9856 - protein, 103 aa, Homo sapiens
DSKKKLREGQQGPWGFSLWPGSYVSITKGSTVCTQLSSHRSCCNSRRFFRNRFSLPAGSGKFEKSICIILKSRAYLIACPHRIPGHHLADPRCPTHQQPLPSS

SEQ ID NO: 9857 - protein, 213 aa, Homo sapiens [sequence omitted]

SEQ ID NO: 9858 - protein, 385 aa, Homo sapiens
MAAATIVHDTSEAVELCPAYGLYLKPITKMTISVALPQLKQPGKSISNWEVMERLKGMVQNHQFSTLRISKSTMDFIRFEGEVENKSLVKSFLACLDGKTIKLSGFSDILKVRAAEFKIDFPTRHDWDSFFRDAKDMNETLPGERPDTIHLEGLPCKWFALKESGSEKPSEDVLVKVFEKFGEIRNVDIPMLDPYREEMTGRNFHTFSFGGHLNFEAYVQYREYMGFIQAMSALRGMKLMYKGEDGKAVACNIKVSFDSTKHLSDASIKKRQLERQKLQELEQQREEQKRREKEAEERQRAEERKQKELEELERERKREEKLRKREQKQRDRELRRNQKKLEKLQAEEQKQLQEKIKLEERKLLLAQRNLQSIRLIAELLSRAKL

SEQ ID NO: 9859 - protein, 373 aa, Homo sapiens
MGSSEDQAYRLLNDYANGFMVSQVLFAACELGVFDLLAEAPGPLDVAAVAAGVRASAHGTELLLDICVSLKLLKVETRGGKAFYRNTELSSDYLTTVSPTSQCSMLKYMGRTSYRCWGHLADAVREGRNQYLETFGVPAEELFTAIYRSEGERLQFMQALQEVWSVNGRSVLTAFDLSVFPLMCDLGGTWIKLETIILSKLSQGQKTKHRVFSLIGGAGALAKECMSLYPGCKITVFDIPEVVWTAKQHFSFQEEEQIDFQEGDFFKDPLPEADLYILARVLHDWADGKCSHLLERIYHTCKPGGGILVIESLLDEDRRGPLLTQLYSLNMLVQTEGQERTPTHYHMLLSSAGFRDFQFKKTGAIYDAILARK

SEQ ID NO: 9860 - protein, 695 aa, Homo sapiens [sequence omitted]

SEQ ID NO: 9861 - protein, 446 aa, Homo sapiens
MAAATIVHDTSEAVELCPAYGLYLKPITKMTISVALPQLKQPGKSISNWEVMERLKGMVQNHQFSTLRISKSTMDFIRFEGEVENKSLVKSFLACLDGKTIKLSGFSDILKVRAAEFKIDFPTRHDWDSFFRDAKDMNETLPGERPDTIHLEGLPCKWFALKESGSEKPSEDVLVKVFEKFGEIRNVDIPMLDPYREEMTGRNFHTFSFGGHLNFEAYVQYREYMGFIQAMSALRGMKLMYKGEDGKAVACNIKVSFDSTKHLSDASIKKRQLERQKLQELEQQREEQKRREKEAEERQRAEERKQKELEELERERKREEKLRKREQKQRDRELRRNQKKLEKLQAEEQKQLQEKIKLEERKLLLAQRNLQSIRLIAELLSRAKVPGGSLCSRQPRPGCPQCPPLKCGRRHGAVSPPAAAVATKPALMPRMTAPSREGVALVCRSR

SEQ ID NO: 9862 - protein, 101 aa, Homo sapiens
MKLSGTHSPFRARSEPEDPATERSAFMKRDAGSGLVMRLHERPALLVSSTGWTEDEDFSILLAALEKFEQLTLDGHNLPSLVCVITGKGPLREYYSRLIHQ

SEQ ID NO: 9863 - protein, 110 aa, Homo sapiens
MKLSGTHSPFRARSEPEDPATERSAFMKRDAGSGLVMRLHERPALLVSSTGWTGLHDPCNTWEDEDFSILLAALEKFEQLTLDGHNLPSLVCVITGKGPLREYYSRLIHQ

SEQ ID NO: 9864 - protein, 1261 aa, Homo sapiens
MEKKSLSARVPTGRQKLGGASQGRSLRKGLRPMSGANRGRGQASSTMTSTGQDSTTTRQRRSRQNPQSPPQDSSVTSKRNIKKGAVPRSIPNLAEVKKKGKMKKLGQAMEEDLIVGLQGMDLNLEAEALAGTGLVLDEQLNEFHCLWDDSFPEGPERLHAIKEQLIQEGLLDRCVSFQARFAEKEELMLVHSLEYIDLMETTQYMNEGELRVLADTYDSVYLHPNSYSCACLASGSVLRLVDAVLGAEIRNGMAIIRPPGHHAQHSLMDGYCMFNHVAVAARYAQQKHRIRRVLIVDWDVHHGQGTQFTFDQDPSVLYFSIHRYEQGRFWPHLKASNWSTTGFGQGQGYTINVPWNQVGMRDADYIAAFLHVLLPVALEFQPQLVLVAAGFDALQGDPKGEMAATPAGFAQLTHLLMGLAGGKLILSLEGGYNLRALAEGVSASLHTLLGDPCPMLESPGAPCRSAQASVSCALEALEPFWEVLVRSTETVERDNMEEDNVEESEEEGPWEPPVLPILTWPVLQSRTGLVYDQNMMNHCNLWDSHHPEVPQRILRIMCRLEELGLAGRCLTLTPRPATEAELLTCHSAEYVGHLRATEKMKTRELHRESSNFDSIYICPSTFACAQLATGAACRLVEAVLSGEVLNGAAVVRPPGHHAEQDAACGFCFFNSVAVAARHAQTISGHALRILIVDWDVHHGNGTQHMFEDDPSVLYVSLHRYDHGTFFPMGDEGASSQIGRAAGTGFTVNVAWNGPRMGDADYLAAWHRLVLPIAYEFNPELVLVSAGFDAARGDPLGGCQVSPEGYAHLTHLLMGLASGRIILILEGGYNLTSISESMAACTRSLLGDPPPLLTLPRPPLSGALASITETIQVHRRYWRSLRVMKVEDREGPSSSKLVTKKAPQPAKPRLAERMTTREKKVLEAGMGKVTSASFGEESTPGQTNSETAVVALTQDQPSEAATGGATLAQTISEAAIGGAMLGQTTSEEAVGGATPDQTTSEETVGGAILDQTTSEDAVGGATLGQTTSEEAVGGATLAQTTSEAAMEGATLDQTTSEEAPGGTELIQTPLASSTDHQTPPTSPVQGTTPQISPSTLIGSLRTLELGSESQGASESQAPGEENLLGEAAGGQDMADSMLMQGSRGLTDQAIFYAVTPLPWCPHLVAVCPIPAAGLDVTQPCGDCGTIQENWVCLSCYQVYCGRYINGHMLQHHGNSGHPLVLSYIDLSAWCYYCQAYVHHQALLDVKNIAHQNKFGEDMPHPH

SEQ ID NO: 9865 - protein, 1215 aa, Homo sapiens
MTSTGQDSTTTRQRRSRQNPQSPPQDSSVTSKRNIKKGAVPRSIPNLAEVKKKGKMKKLGQAMEEDLIVGLQGMDLNLEAEALAGTGLVLDEQLNEFHCLWDDSFPEGPERLHAIKEQLIQEGLLDRCVSFQARFAEKEELMLVHSLEYIDLMETTQYMNEGELRVLADTYDSVYLHPNSYSCACLASGSVLRLVDAVLGAEIRNGMAIIRPPGHHAQHSLMDGYCMFNHVAVAARYAQQKHRIRRVLIVDWDVHHGQGTQFTFDQDPSVLYFSIHRYEQGRFWPHLKASNWSTTGFGQGQGYTINVPWNQVGMRDADYIAAFLHVLLPVALEFQPQLVLVAAGFDALQGDPKGEMAATPAGFAQLTHLLMGLAGGKLILSLEGGYNLRALAEGVSASLHTLLGDPCPMLESPGAPCRSAQASVSCALEALEPFWEVLVRSTETVERDNMEEDNVEESEEEGPWEPPVLPILTWPVLQSRTGLVYDQNMMNHCNLWDSHHPEVPQRILRIMCRLEELGLAGRCLTLTPRPATEAELLTCHSAEYVGHLRATEKMKTRELHRESSNFDSIYICPSTFACAQLATGAACRLVEAVLSGEVLNGAAVVRPPGHHAEQDAACGFCFFNSVAVAARHAQTISGHALRILIVDWDVHHGNGTQHMFEDDPSVLYVSLHRYDHGTFFPMGDEGASSQIGRAAGTGFTVNVAWNGPRMGDADYLAAWHRLVLPIAYEFNPELVLVSAGFDAARGDPLGGCQVSPEGYAHLTHLLMGLASGRIILILEGGYNLTSISESMAACTRSLLGDPPPLLTLPRPPLSGALASITETIQVHRRYWRSLRVMKVEDREGPSSSKLVTKKAPQPAKPRLAERMTTREKKVLEAGMGKVTSASFGEESTPGQTNSETAVVALTQDQPSEAATGGATLAQTISEAAIGGAMLGQTTSEEAVGGATPDQTTSEETVGGAILDQTTSEDAVGGATLGQTTSEEAVGGATLAQTTSEAAMEGATLDQTTSEEAPGGTELIQTPLASSTDHQTPPTSPVQGTTPQISPSTLIGSLRTLELGSESQGASESQAPGEENLLGEAAGGQDMADSMLMQGSRGLTDQAIFYAVTPLPWCPHLVAVCPIPAAGLDVTQPCGDCGTIQENWVCLSCYQVYCGRYINGHMLQHHGNSGHPLVLSYIDLSAWCYYCQAYVHHQALLDVKNIAHQNKFGEDMPHPH

SEQ ID NO: 9866 - protein, 289 aa, Homo sapiens
MTGSSPAASNMAASIQRSRVPASGFRTVGQATSGSAMAGFPGLERKFRRGRPRGKSVSAGERGESPKRPRKSQGVEAPAVEPCGVCVVTPCLCPCSPMLPPCLELSGKRPRHSWADALSTIRLPHVKYICPHAPRIPVTLNMKMVMPSWFDLMGLSPDAPEDEAGIKKAAENIKALIEHEMKNGIPANRIVLGGFSQGGALSLYTALTCPHPLAGIVALSCWLPLHRAFPQAANGSAKDLAILQCHGELDPMVPVRFGALTAEKLRSVVTPARVQFKTYPGVMHSSCPQ

SEQ ID NO: 9867 - protein, 134 aa, Homo sapiens
MCGNTMSVPLLTDAATVSGAERETAAVIFLHGLGDTGHSWADALSTIRLPHVKYICPHAPRIPVTLNMKMVMPSWFDLMGLSPDAPEDEAGIKKAAENRRGPVPLHGPHLPPPSGWHRGVELLAASAPGLPPGS

SEQ ID NO: 9868 - protein, 219 aa, Homo sapiens
MCGNTMSVPLLTDAATVSGAERETAAVIFLHGLGDTGHSWADALSTIRLPHVKYICPHAPRIPVTLNMKMVMPSWFDLMGLSPDAPEDEAGIKKAAENIKALIEHEMKNGIPANRIVLGGFSQGGALSLYTALTCPHPLAGIVALSCWLPLHRAFPQAANGSAKDLAILQCHGELDPMVPVRFGALTVCCHTCQGPVQDIPGCHAQLLSSGDGSCEGIS

SEQ ID NO: 9869 - protein, 79 aa, Homo sapiens
MCGNTMSVPLLTDAATVSGAERETAAVIFLHGLGDTGHSWADALSTIRLPHVKYICPHAPRIPVTLNMKMVMPSCQGLD

SEQ ID NO: 9870 - protein, 113 aa, Homo sapiens
MKMVMPSWFDLMGLSPDAPEDEAGIKKAAENIKALIEHEMKNGIPANRIVLGGFSQGGALSLYTALTCPHPLAGIVALSCWLPLHRAFPQVNVPTDPPALCVCILVAWGLLQH

SEQ ID NO: 9871 - protein, 148 aa, Homo sapiens
MTGSSPAASNMAASIQRSRVPASGFRTVGQATSGSAMAGFPGLERKFRRGRPRGKSVSAGERGESPKRPRKSQGVEAPAVEPCGVCVVTPCLCPCSPMLPPCLELSGKRPRLFFYMDLETQGTAGLTPSPPSGSLTSSTSVPMRLGSL

SEQ ID NO: 9872 - protein, 231 aa, Homo sapiens
MCGNTMSVPLLTDAATVSGAERETAAVIFLHGLGDTGHSWADALSTIRLPHVKYICPHAPRIPVTLNMKMVMPSWFDLMGLSPDAPEDEAGIKKAAENIKALIEHEMKNGIPANRIVLGGFSQGGALSLYTALTCPHPLAGIVALSCWLPLHRAFPQAANGSAKDLAILQCHGELDPMVPVRFGALTAEKLRSVVTPARVQFKTYPGVMHSSCPQEMAAVKEFLEKLLPPV

SEQ ID NO: 9873 - protein, 125 aa, Homo sapiens
MKNGIPANRIVLGGFSQGGALSLYTALTCPHPLAGIVALSCWLPLHRAFPQAANGSAKDLAILQCHGELDPMVPVRFGALTAEKLRSVVTPARVQFKTYPGVMHSSCPQEMAAVKEFLEKLLPPV

SEQ ID NO: 9874 - protein, 833 aa, Homo sapiens [sequence omitted]

SEQ ID NO: 9875 - protein, 546 aa, Homo sapiens
MAASSDAGPAGHFASVYNPLAWTVTTIVTLTVGFPGVRVTDEAGHPVPSQIQNSTETPSAYDLLILTTIPGLSYRHYNIRPTAGAQEGTQEPAATVASTLQFGRRLRRRTSHAGRYLVPVANDCYIVLLDQDTNLMHSIWERQSNRTVRVTQEFLEYHVNGDVKQGPISDNYLFTPGKAAVPAWEAVEMEIVAGQLVTEIRQYFYRNMTAQNYTYAIRSRLTHVPQGHDGELLCHRIEQEYQAGPLELNREAVLRTSTNLNSQQVIYSDNNGYQMQRRPYVSYVNNSIARNYYPMVQSAFMEDGKSRLVLLSERAHGISSQGNGQVEVMLHRRLWNNFDWDLGYNLTLNDTSVVHPVLWLLLGSWSLTTALRQRSALALQHRPVVLFGDLAGTAPKLPGPQQQEAVTLPPNLHLQILSIPGWRYSSNHTEHSQNLRKGHRGEAQADLRRVLLRLYHLYEVGEDPVLSQPVTVNLEAVLQALGSVVAVEERSLTGTWDLSMLHRWSWRTGPGRHRGDTTSPSRPPGGPIITVHPKEIRTFFIHFQQQ

SEQ ID NO: 9876 - protein, 1009 aa, Homo sapiens
MGQLCWLPLLAPLLLLRPPGVQSAGPIRAFVVPHSHMDVGWVYTVQESMRAYAANVYTSVVEELARGQQRRFIAVEQEFFRLWWDGVASDQQKYQVRQLLEEGRLEFVIGGQVMHDEAVTHLDDQILQLTEGHGFLYETFGIRPQFSWHVDPFGASATTPTLFALAGFNAHLGSRIDYDLKAAMQEARGLQFVWRGSPSLSERQEIFTHIMDQYSYCTPSHIPFSNRSGFYWNGVAVFPKPPQDGVYPNMSEPVTPANINLYAEALVANVKQRAAWFRTPHVLWPWGCDKQFFNASVQFANMDPLLDHINSHAAELGVSVQYATLGDYFRALHALNVTWRVRDHHDFLPYSTEPFQAWTGFYTSRSSLKGLARRASALLYAGESMFTRYLWPAPRGHLDPTWALQQLQQLRWAVSEVQHHDAITGTESPKVRDMYATHLASGMLGMRKLMASIVLDELQPQAPMAASSDAGPAGHFASVYNPLAWTVTTIVTLTVGFPGVRVTDEAGHPVPSQIQNSTETPSAYDLLILTTIPGLSYRHYNIRPTAGAQEGTQEPAATVASTLQFGRRLRRRTSHAGRYLVPVANDCYIVLLDQDTNLMHSIWERQSNRTVRVTQEFLEYHVNGDVKQGPISDNYLFTPGKAAVPAWEAVEMEIVAGQLVTEIRQYFYRNMTAQNYTYAIRSRLTHVPQGHDGELLCHRIEQEYQAGPLELNREAVLRTSTNLNSQQVIYSDNNGYQMQRRPYVSYVNNSIARNYYPMVQSAFMEDGKSRLVLLSERAHGISSQGNGQVEVMLHRRLWNNFDWDLGYNLTLNDTSVVHPVLWLLLGSWSLTTALRQRSALALQHRPVVLFGDLAGTAPKLPGPQQQEAVTLPPNLHLQILSIPGWRYSSNHTEHSQNLRKGHRGEAQADLRRVLLRLYHLYEVGEDPVLSQPVTVNLEAVLQALGSVVAVEERSLTGTWDLSMLHRWSWRTGPGRHRGDTTSPSRPPGGPIITVHPKEIRTFFIHFQQQ

SEQ ID NO: 9877 - protein, 954 aa, Homo sapiens
MGQLCWLPLLAPLLLLRPPGVQSAGPIRAFVVPHSHMDVGWVYTVQESMRAYAANVYTSVVEELARGQQRRFIAVEQEFFRLWWDGVASDQQKYQVRQLLEEGRLEFVIGGQVMHDEAVTHLDDQILQLTEGHGFLYETFGIRPQFSWHVDPFGASATTPTLFALAGFNAHLGSRIDYDLKAAMQEARGLQFVWRGSPSLSERQEIFTHIMDQYSYCTPSHIPFSNRSGFYWNGVAVFPKPPQDGVYPNMSEPVTPANINLYAEALVANVKQRAAWFRTPHVLWPWGCDKQFFNASVQFANMDPLLDHINSHAAELGVSVQYATLGDYFRALHALNVTWRVRDHHDFLPYSTEPFQAWTGFYTSRSSLKGLARRASALLYAGESMFTRYLWPAPRGHLDPTWALQQLQQLRWAVSEVQHHDAITGTESPKVRDMYATHLASGMLGMRKLMASIVLDELQPQAPMAASSDAGPAGHFASVYNPLAWTVTTIVTLTVGFPGVRVTDEAGHPVPSQIQNSTETPSAYDLLILTTIPGLSYRHYNIRPTAGAQEGTQEPAATVASTLQFGRRLRRRTSHAGRYLVPVANDCYIVLLDQDTNLMHSIWERQSNRTVRVTQEFLEYHVNGDVKQGPISDNYLFTPGKAAVPAWEAVEMEIVAGQLVTEIRQYFYRNMTAQNYTYAIRSRLTHVPQGHDGELLCHRIEQEYQAGPLELNREAVLRTSTNLNSQQVIYSDNNGYQMQRRPYVSYVNNSIARNYYPMVQSAFMEDGKSRLVLLSERAHGISSQGNGQVEVMLHRRLWNNFDWDLGYNLTLNDTSVVHPVLWLLLGSWSLTTALRQRSALALQHRPVVLFGDLAGTAPKLPGPQQQEAVTLPPNLHLQILSIPGWRYSSNHTEHSQNLRKGHRGEAQADLRRVLLRLYHLYEVGEDPVLSQPVTVNLEVNFPTPIQTISQGSKP

SEQ ID NO: 9878 - protein, 694 aa, Homo sapiens
MENKSLESSQTDLKLVAHPRAKSKVWKYFGFDTNAEGCILQWKKIYCRICMAQIAYSGNTSNLSYHLEKNHPEEFCEFVKSNTEQMREAFATAFSKLKPESSQQPGQDALAVKAGHGYDSKKQQELTAAVLGLICEGLYPASIVDEPTFKVLLKTADPRYELPSRKYISTKAIPEKYGAVREVILKELAEATWCGISTDMWRSENQNRAYVTLAAHFLGLGAPNCLSMGSRCLKTFEVPEENTAETITRVLYEVFIEWGISAKVFGATTNYGKDIVKACSLLDVAVHMPCLGHTFNAGIQQAFQLPKLGALLSRCRKLVEYFQQSAVAMYMLYEKQKQQNVAHCMLVSNRVSWWGSTLAMLQRLKEQQFVIAGVLVEDSNNHHLMLEASEWATIEGLVELLQPFKQVAEMLSASRYPTISMVKPLLHMLLNTTLNIKETDSKELSMAKEVIAKELSKTYQETPEIDMFLNVATFLDPRYKRLPFLSAFERQQVENRVVEEAKGLLDKVKDGGYRPAEDKIFPVPEEPPVKKLMRTSTPPPASVINNMLAEIFCQTGGVEDQEEWHAQVVEELSNFKSQKVLGLNEDPLKWWSDRLALFPLLPKVLQKYWCVTATRVAPERLFGSAANVVSAKRNRLAPAHVDEQVFLYENARSGAEAEPEDQDEGEWGLDQEQVFSLGDGVSGGFFGIRDSSFL

SEQ ID NO: 9879 - protein, 330 aa, Homo sapiens
MSPLSAARAALRVYAVGAAVILAQLLRRCRGGFLEPVFPPRPDRVAIVTGGTDGIGYSTAKHLARLGMHVIIAGNNDSKAKQVVSKIKEETLNDKVEFLYCDLASMTSIRQFVQKFKMKKIPLHVLINNAGVMMVPQRKTRDGFEEHFGLNYLGHFLLTNLLLDTLKESGSPGHSARVVTVSSATHYVAELNMDDLQSSACYSPHAAYAQSKLALVLFTYHLQRLLAAEGSHVTANVVDPGVVNTDLYKHVFWATRLAKKLLGWLLFKTPDEGAWTSIYAAVTPELEGVGGRYLYNEKETKSLHVTYNQKLQQQLWSKSCEMTGVLDVTL

SEQ ID NO: 9880 - protein, 694 aa, Homo sapiens; identical to SEQ ID NO: 9878

SEQ ID NO: 9881 - protein, 263 aa, Homo sapiens
MHVIIAGNNDSKAKQVVSKIKEETLNDKVEFLYCDLASMTSIRQFVQKFKMKKIPLHVLINNAGVMMVPQRKTRDGFEEHFGLNYLGHFLLTNLLLDTLKESGSPGHSARVVTVSSATHYVAELNMDDLQSSACYSPHAAYAQSKLALVLFTYHLQRLLAAEGSHVTANVVDPGVVNTDLYKHVFWATRLAKKLLGWLLFKTPDEGAWTSIYAAVTPELEGVGGRYLYNEKETKSLHVTYNQKLQQQLWSKSCEMTGVLDVTL

SEQ ID NO: 9882 - protein, 136 aa, Homo sapiens
MHYCERFLHAARWHQRDRGTMWKVHFVTPVFQPEGAGACYGRKVCPCFGEKVVHHDPPLLFDLSRDPSETHILTPASEPVFYQVMERVQQAVWEHQRTLSPVPLQLDRLGNIWRPWLQPCCGPFPLCWCLREDDPQ

SEQ ID NO: 9883 - protein, 589 aa, Homo sapiens
MLHLHHSCLCFRSWLPAMLAVLLSLAPSASSDISASRPNILLLMADDLGIGDIGCYGNNTMRTPNIDRLAEDGVKLTQHISAASLCTPSRAAFLTGRYPVRSGMVSSIGYRVLQWTGASGGLPTNETTFAKILKEKGYATGLIGKWHLGLNCESASDHCHHPLHHGFDHFYGMPFSLMGDCARWELSEKRVNLEQKLNFLFQVLALVALTLVAGKLTHLIPVSWMPVIWSALSAVLLLASSYFVGALIVHADCFLMRNHTITEQPMCFQRTTPLILQEVASFLKRNKHGPFLLFVSFLHVHIPLITMENFLGKSLHGLYGDNVEEMDWMVGRILDTLDVEGLSNSTLIYFTSDHGGSLENQLGNTQYGGWNGIYKGGKGMGGWEGGIRVPGIFRWPGVLPAGRVIGEPTSLMDVFPTVVRLAGGEVPQDRVIDGQDLLPLLLGTAQHSDHEFLMHYCERFLHAARWHQRDRGTMWKVHFVTPVFQPEGAGACYGRKVCPCFGEKVVHHDPPLLFDLSRDPSETHILTPASEPVFYQVMERVQQAVWEHQRTLSPVPLQLDRLGNIWRPWLQPCCGPFPLCWCLREDDPQ

SEQ ID NO: 9884 - protein, 599 aa, Homo sapiens [sequence omitted]

SEQ ID NO: 9885 - protein, 593 aa, Homo sapiens [sequence omitted]

SEQ ID NO: 9886 - protein, 181 aa, Homo sapiens
MRSAARRGRAAPAARDSLPVLLFLCLLLKTCEPKTANAFKPNILLIMADDLGTGDLGCYGNNTLRTPNIDQLAEEGVRLTQHLAAAPLCTPSRAAFLTGRHSFRSGMDASNGYRALQWNAGSGGLPENETTFARILQQHGYATGLIGVDMWEPHIIRWLGIFVIKKIPGQAWWRTPVVPAT

SEQ ID NO: 9887 - protein, 382 aa, Homo sapiens
MRSAARRGRAAPAARDSLPVLLFLCLLLKTCEPKTANAFKPNILLIMADDLGTGDLGCYGNNTLRTPNIDQLAEEGVRLTQHLAAAPLCTPSRAAFLTGRHSFRSGMDASNGYRALQWNAGSGGLPENETTFARILQQHGYATGLIGKWHQGVNCASRGDHCHHPLNHGFDYFYGMPFTLTNDCDPGRPPEVDAALRAQLWGYTQFLALGILTLAAGQTCGFFCVSARAVTGMAGVGCLFFISWYSSFGFVRRWNCILMRNHDVTEQPMVLEKTASLMLKEAVSYIERHKHGPFLLFLSLLHVHIPLVTTSAFLGKSQHGLYGDNVEEMDWLIASDFMSSSEVTESEAIKLMFRTMQRRCLPSMAFKKPWRGPVRLQILKRA

SEQ ID NO: 9888 - protein, 557 aa, Homo sapiens [sequence omitted]

SEQ ID NO: 9889 - protein, 593 aa, Homo sapiens [sequence omitted]

SEQ ID NO: 9890 - protein, 286 aa, Homo sapiens
MTKKRIAVIGGGVSGLSSIKCCVEEGLEPVCFERTDDIGGLWRFQENPEEGRASIYKSVIINTSKEMMCFSDYPIPDHYPNFMHNAQVLEYFRMYAKEFDLLKYIRFKTTVCSVKKQPDFATSGQWEVVTESEGKKEMNVFDGVMVCTGHHTNAHLPLESFPGIEKFKGQYFHSRDYKNPEGFTGKRVIIIGIGNSGGDLAVEISQTAKQVFLSTRRGAWILNRVGDYGYPADVLFSSRLTHFIWKICGQSLANKYLEKKINQRFDHEMFGLKPKHRYVPRMGVQG

SEQ ID NO: 9891 - protein, 533 aa, Homo sapiens
MTKKRIAVIGGGVSGLSSIKCCVEEGLEPVCFERTDDIGGLWRFQENPEEGRASIYKSVIINTSKEMMCFSDYPIPDHYPNFMHNAQVLEYFRMYAKEFDLLKYIRFKTTVCSVKKQPDFATSGQWEVVTESEGKKEMNVFDGVMVCTGHHTNAHLPLESFPGIEKFKGQYFHSRDYKNPEGFTGKRVIIIGIGNSGGDLAVEISQTAKQVFLSTRRGAWILNRVGDYGYPADVLFSSRLTHFIWKICGQSLANKYLEKKINQRFDHEMFGLKPKHRALSQHPTLNDDLPNRIISGLVKVKGNVKEFTETAAIFEDGSREDDIDAVIFATGYSFDFPFLEDSVKVVKNKISLYKKVFPPNLERPTLAIIGLIQPLGAIMPISELQGRWATQVFKGLKTLPSQSEMMAEISKAQEEIDKRYVESQRHTIQGDYIDTMEELADLVGVRPNLLSLAFTDPKLALHLLLGPCTPIHYRVQGPGKWDGARKAILTTDDRIRKPLMTRVVERSSSMTSTMTIGKFMLALAFFAIIIAYF

SEQ ID NO: 9892 - protein, 285 aa, Homo sapiens
MTKKRIAVIGGGVSGLSSIKCCVEEGLEPVCFERTDDIGGLWRFQENPEEGRASIYKSVIINTSKEMMCFSDYPIPDHYPNFMHNAQVLEYFRMYAKEFDLLKYIRFKTTVCSVKKQPDFATSGQWEVVTESEGKKEMNVFDGVMVCTGHHTNAHLPLESFPGIEKFKGQYFHSRDYKNPEGFTGKRVIIIGIGNSGGDLAVEISQTAKQVFLSTRRGAWILNRVGDYGYPADVLFSSRLTHFIWKICGQSLANKYLEKKINQRFDHEMFGLKPKHRSKDIALTE

SEQ ID NO: 9893 - protein, 533 aa, Homo sapiens; identical to SEQ ID NO: 9891

SEQ ID NO: 9894 - protein, 533 aa, Homo sapiens; identical to SEQ ID NO: 9891

SEQ ID NO: 9895 - protein, 317 aa, Homo sapiens
MVVMNSLRVILQASPGKLLWRKFQIPRFMPARPCSLYTCTYKTRNRALHPLWESVDLVPGGDRQSPINIRWRDSVYDPGLKPLTISYDPATCLHVWNNGYSFLVEFEDSTDKSVIKGGPLEHNYRLKQFHFHWGAIDAWGSEHTVDSKCFPAELHLVHWNAVRFENFEDAALEENGLAVIGVFLKLGKHHKELQKLVDTLPSIKHKDALVEFGSFDPSCLMPTCPDYWTYSGSLTTPPLSESVTWIIKKQPVEVDHDQLEQFRTLLFTSEGEKEKRMVDNFRPLQPLMNRTVRSSFRHDYVLNVQAKPKPATSQATP

SEQ ID NO: 9896 - protein, 59 aa, Homo sapiens [sequence omitted]

SEQ ID NO: 9897 - protein, 317 aa, Homo sapiens; identical to SEQ ID NO: 9895

SEQ ID NO: 9898 - protein, 317 aa, Homo sapiens; identical to SEQ ID NO: 9895

SEQ ID NO: 9899 - protein, 198 aa, Homo sapiens
LSDPVSWPGRCYGIWVVWHFLPGAHLSRLLDPSRSSISLVQPCLESITFIIKKQPVEVDDDQISETSGSPVSTGRPKPLARKLRPAQKHWVLQSRPFLSSQVQENCKVTYFHRKHWVRIRPLRTTPPSWDYTRICIQREMVPARIRVLREMVPEAWRCFPNRLPLLSNIRPDFSKAPLAYVKRWLWTARHPHSLSAAW

SEQ ID NO: 9900 - protein, 195 aa, Homo sapiens
MTQPPASTSGIMGTLSSWNLKILQINQLHLVHWNAVKFENFEDAALEENGLAVIGVFLKISETSGSPVSTGRPKPLARKLRPAQKHWVLQSRPFLSSQVQENCKVTYFHRKHWVRIRPLRTTPPSWDYTRICIQREMVPARIRVLREMVPEAWRCFPNRLPLLSNIRPDFSKAPLAYVKRWLWTARHPHSLSAAW

SEQ ID NO: 9901 - protein, 897 aa, Homo sapiens [sequence omitted]

SEQ ID NO: 9902 - protein, 365 aa, Homo sapiens [sequence omitted]

SEQ ID NO: 9903 - protein, 445 aa, Homo sapiens [sequence omitted]

SEQ ID NO: 9904 - protein, 387 aa, Homo sapiens
  VARIANT (1)...(387): Xaa = Any Amino Acid
MERAGATSRGGQAPGFLLRLHTEGRAEAARVQEQDLRQWGLTGIHLRSYQLEGVNWLAQRFHCQNGCILGDEMGLGKTCQTIALFIYLAGRLNDEGPFLILCPLSVLSNWKEEMQRFAPGLSCVTYAGDKEERACLQQDLKQESRFHVLLTTYEICLKDASFLKSFPWSVLVVDEAHRLKNQSSLLHKTLSEFSVVFSLLLTGTPIQNSLQELYSLLSFVEPDLFSKEEVGDFIQRYQDIEKESESGNELHKLLQPFLLRRVKAEVATELPKKTEVVIYHGMSALQKKYYKAILMKDLDAFENETAKKVKLQNILSQLRKCVDHPYLFDGVEPEPFEVGDHLTEASGKLHLLDKLLAFLYSGGHRVLLFSQMTQMLDILQDYMDYRX

SEQ ID NO: 9905 - protein, 366 aa, Homo sapiens [sequence omitted]

SEQ ID NO: 9906 - protein, 224 aa, Homo sapiens [sequence omitted]

SEQ ID NO: 9907 - protein, 366 aa, Homo sapiens
MAAARHSTLDFMLGAKADGETILKGLQSIFQEQGMAESVHTWQDHGYLATYTNKNGSFANLRIYPHGLVLLDLQSYDGDAQGKEEIDSILNKVEERMKELSQDSTGRVKRLPPIVRGGAIDRYWPTADGRLVEYDIDEVVYDEDSPYQNIKILHSKQFGNILILSGDVNLAESDLAYTRAIMGSGKEDYTGKDVLILGGGDGGILCEIVKLKPKMVTMVEIDQMVIDGCKKYMRKTCGDVLDNLKGDCYQVLIEDCIPVLKRYAKEGREFDYVINDLTAVPISTSPEEDSTWEFLRLILDLSMKVLKQDGKYFTQGNCVNLTEALSLYEEQLGRLYCPVEFSKEIVCVPSYLELWVFYTVWKKAKP

SEQ ID NO: 9908 - protein, 451 aa, Homo sapiens
MPLQKFHYRNLLLGEHDVPLTCIEQIVTVNDHKRKQKVLGPNQKLKFNPTELIIYCKDFRIVRFRFDESGPESAKKVCLAIAHYSQPTDLQLLFAFEYVGKKYHNSANKINGIPSGDGGGGGGGGNGAGGGSSQKTPLFETYSDWDREIKRTGASGWRVCSINEGYMISTCLPEYIVVPSSLADQDLKIFSHSFVGRRMPLWCWSHSNGSALVRMALIKDVLQQRKIDQRICNAITKSHPQRSDVYKSDLDKTLPNIQEVQAAFVKLKQLCVNEPFEETEEKWLSSLENTRWLEYVRAFLKHSAELVYMLESKHLSVVLQEEEGRDLSCCVASLVQVMLDPYFRTITGFQSLIQKEWVMAGYQFLDRCNHLKRSEKESPLFLLFLDATWQLLEQYPAAFEFSETYLAVLYDSTRISLFGTFLFNSPHQRVKQSTVSRIKSCTKQDYFPSRV

SEQ ID NO: 9909 - protein, 451 aa, Homo sapiens; identical to SEQ ID NO: 9908

SEQ ID NO: 9910 - protein, 506 aa, Homo sapiens
MPLLGLLPRRAWASLLSQLLRPPCASCTGAVRCQSQVAEAVLTSQLKAHQEKPNFIIKTPKGTRDLSPQHMVVREKILDLVISCFKRHGAKGMDTPAFELKETLTEKYGEDSGLMYDLKDQGGELLSLRYDLTVPFARYLAMNKVKKMKRYHVGKVWRRESPTIVQGRYREFCQCDFDIAGQFDPMIPDAECLKIMCEILSGLQLGDFLIKVNDRRIVDGMFAVCGVPESKFRAICSSIDKLDKMAWKDVRHEMVVKKGLAPEVADRIGDYVQCHGGVSLVEQMFQDPRLSQNKQALEGLGDLKLLFEYLTLFGIADKISFDLSLARGLDYYTGVIYEAVLLQTPTQAGEEPLNVGSVAAGGRYDGLVGMFDPKGHKVPCVGLSIGVERIFYIVEQRMKTKGEKVRTTETQVFVATPQKNFLQERLKLIAELWDSGIKAEMLYKNNPKLLTQLHYCESTGIPLVVIIGEQELKEGVIKIRSVASREEVAIKRENFVAEIQKRLSES

SEQ ID NO: 9911 - protein, 526 aa, Homo sapiens
MAASKKAVLGPLVGAVDQGTSSTRFLVFNSKTAELLSHHQVEIKQEFPREGWVEQDPKEILHSVYECIEKTCEKLGQLNIDISNIKAIGVSNQRETTVVWDKITGEPLYNAVAAPVSPGPSVPVAVVPSGSSVPAPGTSSSKTGLPLSTYFSAVKLRWLLDNVRKVQKAVEEKRALFGTIDSWLIWSLTGGVNGGVHCTDVTNASRTMLFNIHSLEWDKQLCEFFGIPMEILPNVRSSSEIYGLMKAGALEGVPISGCLGDQSAALVGQMCFQIGQAKNTYGTGCFLLCNTGHKCVFSDHGLLTTVAYKLGRDKPVYYALEGSVAIAGAVIRWLRDNLGIIKTSEEIEKLAKEVGTSYGCYFVPAFSGLYAPYWEPSARGIICGLTQFTNKCHIAFAALEAVCFQTREILDAMNRDCGIPLSHLQVDGGMTSNKILMQLQADILYIPVVKPSMPETTALGAAMAAGAAEGVGVWSLEPEDLSAVTMERFEPQINAEESEIRYSTWKKAVMKSMGWVTTQSPESGIP

SEQ ID NO: 9912 - protein, 389 aa, Homo sapiens [sequence omitted]

SEQ ID NO: 9913 - protein, 274 aa, Homo sapiens
MAYANEVKRVVSSAQEKGRKIAAFFAESLPSVGGQIIPPAGYFSQVADPRVSHLLCHRHIRKAGGVFVADEIQVGFGRVGKHFWAFQLQGKDFVPDIVTMGKSIGNGHPVACVAATQPVARAFEATGVEYFNTFGGSPVSCAVGLAVLNVLEKEQLQDHATSVGSFLMQLLGQQKIKHPIVGDVRGVGLFIGVDLIKDEATRTPATEEAAYLVSRLKENYVLLSTDGPGRNILKFKPPMCFSLDNARQVVAKLDAILTDMEEKVRSCETLRLQP

SEQ ID NO: 9914 - protein, 175 aa, Homo sapiens
MGKSIGNGHPVACVAATQPVARAFEATGVEYFNTFGGSPVSCAVGLAVLNVLEKEQLQDHATSVGSFLMQLLGQQKIKHPIVGDVRGVGLFIGVDLIKDEATRTPATEEAAYLVSRLKENYVLLSTDGPGRNILKFKPPMCFSLDNARQVVAKLDAILTDMEEKVRSCETLRLQP

SEQ ID NO: 9915 - protein, 175 aa, Homo sapiens; identical to SEQ ID NO: 9914

SEQ ID NO: 9916 - protein, 174 aa, Homo sapiens [sequence omitted]

SEQ ID NO: 9917 - protein, 174 aa, Homo sapiens [sequence omitted]

SEQ ID NO: 9918 - protein, 154 aa, Homo sapiens
MPGVGPEPLGFWKIPWWTLPDANSSTQILLSRCQGQGRQGGRPEVQQEGWPRRVAGPAPSGGRHSPTLAGSPPRVPRHFCTWGWWGESLKTTGFHWLLLKIQTPGPMPGGSTATGQVDLGVCAFHLLSHNIWWKNMSHHIRHEQKEKLDMCDPT

SEQ ID NO: 9919 - protein, 395 aa, Homo sapiens
MASQEFEVEAIVDKRQDKNGNTQYLVRWKGYDKQDDTWEPEQHLMNCEKCVHDFNRRQTEKQKKLTWTTTSRIFSNNARRRTSRSTKANYSKNSPKTPVTDKHHRSKNRKLFAASKNVRRKAASILSDTKNMEIINSTIETLAPDSPFDHKTVSGFQKLEKLDPIAADQQDTVVFKVTEGKLLRDPLSRPGAEQTGIQNKTQIHPLMSQMSGSVTASMATGSATRKGIVVLIDPLAANGTTDMHTSVPRVKGGQRNITDDSLVSQVFLTGTFTQEVMIQIKELASYNAIVLEECKALVRCNIKLELEQANERECEVLRKIWSSAQGIESMLKIPLLGYKAALASLPERHRTIRDGALDFIVAQTLQRHTIIRDLSFSINTYGTKSTDDHSPKLNT

SEQ ID NO: 9920 - protein, 283 aa, Homo sapiens [sequence omitted]

SEQ ID NO: 9921 - protein, 283 aa, Homo sapiens [sequence omitted]

SEQ ID NO: 9922 - protein, 1095 aa, Homo sapiens
MALGTTLRASLLLLGLLTEGLAQLAIPASVPRGFWALPENLTVVEGASVELRCGVSTPGSAVQWAKDGLLLGPDPRIPGFPRYRLEGDPARGEFHLHIEACDLSDDAEYECQVGRSEMGPELVSPRVILSILVPPKLLLLTPEAGTMVTWVAGQEYVVNCVSGDAKPAPDITILLSGQTISDISANVNEGSQQKLFTVEATARVTPRSSDNRQLLVCEASSPALEAPIKASFTVNVLFPPGPPVIEWPGLDEGHVRAGQSLELPCVARGGNPLATLQWLKNGQPVSTAWGTEHTQAVARSVLVMTVRPEDHGAQLSCEAHNSVSAGTQEHGITLQVTFPPSAIIILGSASQTENKNVTLSCVSKSSRPRVLLRWWLGWRQLLPMEETVMDGLHGGHISMSNLTFLARREDNGLTLTCEAFSEAFTKETFKKSLILNVKYPAQKLWIEGPPEGQKLRAGTRVRLVCLAIGGNPEPSLMWYKDSRTVTESRLPQESRRVHLGSVEKSGSTFSRELVLVTGPSDNQAKFTCKAGQLSASTQLAVQFPPTNVTILANASALRPGDALNLTCVSVSSNPPVNLSWDKEGERLEGVAAPPRRAPFKGSAAARSVLLQVSSRDHGQRVTCRAHSAELRETVSSFYRLNVLYRPEFLGEQVLVVTAVEQGEALLPVSVSANPAPEAFNWTFRGYRLSPAGGPRHRILSSGALHLWNVTRADDGLYQLHCQNSEGTAEARLRLDVHYAPTIRALQDPTEVNVGGSVDIVCTVDANPILPGMFNWERLGEDEEDQSLDDMEKISRGPTGRLRIHHAKLAQAGAYQCIVDNGVAPPARRLLRLVVRFAPQVEHPTPLTKVAAAGDSTSSATLHCRARGVPNIVFTWTKNGVPLDLQDPRYTEHTYHQGGVHSSLLTIANVSAAQDYALFTCTATNALGSDQTNIQLVSISRPDPPSGLKVVSLTPHSVGLEWKPGFDGGLPQRFCIRYEALGTPGFHYVDVVPPQATTFTLTGLQPSTRYRVWLLASNALGDSGLADKGTQLPITTPGLHQPSGEPEDQLPTEPPSGKTLGAAPAACAVRSWGASAPLQCLLCRGGPLAAETQASC

SEQ ID NO: 9923 - protein, 1241 aa, Homo sapiens
MALGTTLRASLLLLGLLTEGLAQLAIPASVPRGFWALPENLTVVEGASVELRCGVSTPGSAVQWAKDGLLLGPDPRIPGFPRYRLEGDPARGEFHLHIEACDLSDDAEYECQVGRSEMGPELVSPRVILSILVPPKLLLLTPEAGTMVTWVAGQEYVVNCVSGDAKPAPDITILLSGQTISDISANVNEGSQQKLFTVEATARVTPRSSDNRQLLVCEASSPALEAPIKASFTVNVLFPPGPPVIEWPGLDEGHVRAGQSLELPCVARGGNPLATLQWLKNGQPVSTAWGTEHTQAVARSVLVMTVRPEDHGAQLSCEAHNSVSAGTQEHGITLQVTFPPSAIIILGSASQTENKNVTLSCVSKSSRPRVLLRWWLGWRQLLPMEETVMDGLHGGHISMSNLTFLARREDNGLTLTCEAFSEAFTKETFKKSLILNVKYPAQKLWIEGPPEGQKLRAGTRVRLVCLAIGGNPEPSLMWYKDSRTVTESRLPQESRRVHLGSVEKSGSTFSRELVLVTGPSDNQAKFTCKAGQLSASTQLAVQFPPTNVTILANASALRPGDALNLTCVSVSSNPPVNLSWDKEGERLEGVAAPPRRAPFKGSAAARSVLLQVSSRDHGQRVTCRAHSAELRETVSSFYRLNVLYRPEFLGEQVLVVTAVEQGEALLPVSVSANPAPEAFNWTFRGYRLSPAGGPRHRILSSGALHLWNVTRADDGLYQLHCQNSEGTAEARLRLDVHYAPTIRALQDPTEVNVGGSVDIVCTVDANPILPGMFNWERLGEDEEDQSLDDMEKISRGPTGRLRIHHAKLAQAGAYQCIVDNGVAPPARRLLRLVVRFAPQVEHPTPLTKVAAAGDSTSSATLHCRARGVPNIVFTWTKNGVPLDLQDPRYTEHTYHQGGVHSSLLTIANVSAAQDYALFTCTATNALGSDQTNIQLVSISRPDPPSGLKVVSLTPHSVGLEWKPGFDGGLPQRFCIRYEALGTPGFHYVDVVPPQATTFTLTGLQPSTRYRVWLLASNALGDSGLADKGTQLPITTPGLHQPSGEPEDQLPTEPPSGPSGLPLLPVLFALGGLLLLSNASCVGGVLWQRRLRRLAEGISEKTEAGSEEDRVRNEYEESQWTGERDTQSSTVSTTEAEPYYRSLRDFSPQLPPTQEEVSYSRGFTGEDEDMAFPGHLYDEVERTYPPSGAWGPLYDEVQMGPWDLHWPEDTYQDPRGIYDQVAGDLDTLEPDSLPFELRGHLV

SEQ ID NO: 9924 - protein, 725 aa, Homo sapiens
MAFPGHLYDEVERTYPPSGAWGPLYDEVQMGPWDLHWPEDTYQDPRGIYDQVAGDLDTLEPDSLPFELRGHLVWGFNHVSQAGLKLLASSDPPASASQSAEITESHSVVQVGVQWRYFGSLHPLPPGSRDSLASASRIAGITAPWEAEVSRSPQGTQDSPVTRMLRTCYVLCSQAGPPSRGWQSLSFDGGAFHLKGTGELTRALLVLRLCAWPPLVTHGLLLQAWSRRLLGSRLSGAFLRASVYGQFVAGETAEEVKGCVQQLRTLSLRPLLAVPTEEEPDSAAKRMRLHHVGQAGLELLTPAASGSVAQAGVQWRQSSDRGGGNQAAASRSSLLQEAAFSPPCGRLQLPAQPASRHGARGRGSMKAKSLTSRHLLASQGQETIIKTKVRIPALWKAEPGQHSKTPSQQNKSQYVTTLWEADVGRSLENLQVSCLNAEQNQHLRASLSRLHRVAQVTPPAGTSTSGPPSAACIGWHSRLHRVAQYARAQHVRLLVDAEYTSLNPALSLLVAALAVRWNSPGEGGPWVWNTYQACLKDTFERLGRDAEAAHRAGLAFGVKLVRGAYLDKERAVAQLHGMEDPTQPDYEATSELNRASPFSYSRCLELMLTHVARHGPMCHLMVASHNEESVRQATKRMWELGIPLDGTVCFGQLLGMCDHVSLALGQAGYVVYKSIPYGSLEEVIPYLIRRAQENRSVLQGARREQELLSQELWRRLLPGCRRIPH

SEQ ID NO: 9925 - protein, 536 aa, Homo sapiens
MSPRVVSNSSVLASQSVGITNVRTVFSNVFNNTTAFPILRGSNCHKITAPGLGKGQLVNLLPPENLPWCGGSQGPRMLRTCYVLCSQAGPPSRGWQSLSFDGGAFHLKGTGELTRALLVLRLCAWPPLVTHGLLLQAWSRRLLGSRLSGAFLRASVYGQFVAGETAEEVKGCVQQLRTLSLRPLLAVPTEEEPDSAAKSGEAWYEGNLGAMLRCVDLSRGLLEPPSLAEASLMQLKVTALTSTRLCKELASWVRRPGASLELSPERLAEAMDSGQNLQVSCLNAEQNQHLRASLSRLHRVAQYARAQHVRLLVDAEYTSLNPALSLLVAALAVRWNSPGEGGPWVWNTYQACLKDTFERLGRDAEAAHRAGLAFGVKLVRGAYLDKERAVAQLHGMEDPTQPDYEATSQSYSRCLELMLTHVARHGPMCHLMVASHNEESVRQATKRMWELGIPLDGTVCFGQLLGMCDHVSLALGQAGYVVYKSIPYGSLEEVIPYLIRRAQENRSVLQGARREQELLSQELWRRLLPGCRRIPH

SEQ ID NO: 9926 - protein, 130 aa, Homo sapiens [sequence omitted]

SEQ ID NO: 9927 - protein, 569 aa, Homo sapiens
MRDNTSPISVILVSSGSRGNKLLFRYPFQRSQEHPASQTSKPRSRYAASNTGDHADEQDGDSRFSDVILATILATKSEMCGQKFELKIDNVRFVGHPTLLQHALGQISKTDPSPKREAPTMILFNVVFALRANADPSVINCLHNLSRRIATVLQHEERRCQYLTREAKLILALQDEVSAMADGNEGPQSPFHHILPKCKLARDLKEAYDSLCTSGVVRLHINSWLEVSFCLPHKIHYAASSLIPPEAIERSLKAIRPYHALLLLSDEKSLLGELPIDCSPALVRVIKTTSAVKNLQQLAQDADLALLQVFQLAAHLVYWGKAIIIYPLCENNVYMLSPNASVCLYSPLAEQFSHQFPSHDLPSVLAKFSLPVSLSEFRNPLAPAVQETQLIQMVVWMLQRRLLIQLHTYVCLMASPSEEEPRPREDDVPFTARVGGRSLSTPNALSFGSPTSSDDMTLTSPSMDNSSAELLPSGDSPLNQRMTENLLASLSEHERAAILSVPAAQNPEDLRMFARLLHYFRGRHHLEEIMYNENTRRSQLLMLFDKFRSVLVVTTHEDPVIAVFQALLP

SEQ ID NO: 9928 - protein, 569 aa, Homo sapiens; identical to SEQ ID NO: 9927

SEQ ID NO: 9929 - protein, 235 aa, Homo sapiens
MLSPNASVCLYSPLAEQFSHQFPSHDLPSVLAKFSLPVSLSEFRNPLAPAVQETQLIQMVVWMLQRRLLIQLHTYVCLMASPSEEEPRPREDDVPFTARVGGRSLSTPNALSFGSPTSSDDMTLTSPSMDNSSAELLPSGDSPLNQRMTENLLASLSEHERAAILSVPAAQNPEDLRMFARLLHYFRGRHHLEEIMYNENTRRSQLLMLFDKFRSVLVVTTHEDPVIAVFQALLP

SEQ ID NO: 9930 - protein, 158 aa, Homo sapiens
MHLASAFAGIGFGNAGVHLCHGMSYPISGLVKMYKAKDYNVDHPLVPHGLSVVLTSPAVFTFTAQMFPERHLEMAEILGADTRTARIQDAGLVLADTLRKFLFDLDVDDGLAAVGYSKADIPALVKGTLPQERVTKLAPCPQSEEDLAALFEASMKLY

SEQ ID NO: 9931 - protein, 424 aa, Homo sapiens
MAVSNIRYGAAVTKEVGMASIRDDLKNMGAKNVCLMTDKNLSKLPPVQVAMDSLVKNGIPFTVYDNVRVEPTDSSFMEAIEFAQKGAFDAYVAVGGGSTMDTCKAANLYASSPHSDFLDYVSAPIGKGKPVSVPLKPLIAVPTTSGTGSETTGVAIFDYEHLKVKIGITSRAIKPTLGLIDPLHTLHMPARVVANSGFDVLCHALESYTTLPYHLRSPCPSNPITRPAYQGSNPISDIWAIHALRIVAKYLKRAVRNPDDLEARSHMHLASAFAGIGFGNAGVHLCHGMSYPISGLVKMYKAKDYNVDHPLVPHGLSVVLTSPAVFTFTAQMFPERHLEMAEILGADTRTARIQDAGLVLADTLRKFLFDLDVDDGLAAVGYSKADIPALVKGTLPQERVTKLAPCPQSEEDLAALFEASMKLY

SEQ ID NO: 9932 - protein, 255 aa, Homo sapiens
MAVSNIRYGAAVTKEVGMDLKNMGAKNVCLMTDKNLSKLPPVQVAMDSLVKNGIPFTVYDNVRVEPTDSSFMEAIEFAQKGAFDAYVAVGGGSTMDTCKAANLYASSPHSDFLDYVSAPIGKGKPVSVPLKPLIAVPTTSGTGSETTGVAIFDYEHLKVKIGITSRAIKPTLGLIDPLHTLHMPARVVANSGFDVLCHALESYTTLPYHLRSPCPSNPITRPAYQGSNPISDIWAIHALRIVAKYLKRAVNSTDK

SEQ ID NO: 9933 - protein, 184 aa, Homo sapiens
MPPTCIIAQMRRCMVWSLTLYPMSREQYWFVTCPQTSCPSQWMFPRVPLGPGIQGAGWKQLLVQHASMFQWIKNNGGAAAMEKLSSIKSQTIYEIIDNSQGFYVCPVEPQNRSKMNIPFRIGNAKGDDALEKRFLDKALELNMLSLKGHRSVGGIRASLYNAVTIEDVQKLAAFMKKFLEMHQL

SEQ ID NO: 9934 - protein, 324 aa, Homo sapiens
MDAPRQVVNFGPGPAKLPHSVLLEIQKELLDYKGVGISVLEMSHRSSDFAKIINNTENLVRELLAVPDNYKVIFLQGGGCGQFSAVPLNLIGLKAGRCADYVVTGAWSAKAAEEAKKFGTINIVHPKLGSYTKIPDPSTWNLNPDASYVYYCANETVHGVEFDFIPDVKGAVLVCDMSSNFLSKPVDVSKFGVIFAGAQKNVGSAGVTVVIVRDDLLGFALRECPSVLEYKVQAGNSSLYNTPPCFSIYVMGLVLEWIKNNGGAAAMEKLSSIKSQTIYEIIDNSQGFYVSVGGIRASLYNAVTIEDVQKLAAFMKKFLEMHQL

SEQ ID NO: 9935 - protein, 370 aa, Homo sapiens
MDAPRQVVNFGPGPAKLPHSVLLEIQKELLDYKGVGISVLEMSHRSSDFAKIINNTENLVRELLAVPDNYKVIFLQGGGCGQFSAVPLNLIGLKAGRCADYVVTGAWSAKAAEEAKKFGTINIVHPKLGSYTKIPDPSTWNLNPDASYVYYCANETVHGVEFDFIPDVKGAVLVCDMSSNFLSKPVDVSKFGVIFAGAQKNVGSAGVTVVIVRDDLLGFALRECPSVLEYKVQAGNSSLYNTPPCFSIYVMGLVLEWIKNNGGAAAMEKLSSIKSQTIYEIIDNSQGFYVCPVEPQNRSKMNIPFRIGNAKGDDALEKRFLDKALELNMLSLKGHRSVGGIRASLYNAVTIEDVQKLAAFMKKFLEMHQL

SEQ ID NO: 9936 - protein, 370 aa, Homo sapiens; identical to SEQ ID NO: 9935

SEQ ID NO: 9937 - protein, 194 aa, Homo sapiens [sequence omitted]

SEQ ID NO: 9938 - protein, 324 aa, Homo sapiens; identical to SEQ ID NO: 9934

SEQ ID NO: 9939 - protein, 54 aa, Homo sapiens
MAVSWRSWLANEGVKHLCLFIWLSMNVLLFWKTFLLYNQGPEYHYLHQMLGELS

SEQ ID NO: 9940 - protein, 554 aa, Homo sapiens
MNVLLFWKTFLLYNQGPEYHYLHQMLGLGLCLSRASASVLNLNCSLILLPMCRTLLAYLRGSQKVPSRRTRRLLDKSRTFHITCGVTICIFSGVHVAAHLVNALNFSVNYSEDFVELNAARYRDEDPRKLLFTTVPGLTGVCMVVVLFLMITASTYAIRVSNYDIFWYTHNLFFVFYMLLTLHVSGGLLKYQTNLDTHPPGCISLNRTSSQNISLPEYFSEHFHEPFPEGFSKPAEFTQHKFVKICMEEPRFQANFPQTWLWISGPLCLYCAERLYRYIRSNKPVTIISVISHPSDVMEIRMVKENFKARPGQYITLHCPSVSALENHPFTLTMCPTETKATFGVHLKIVGDWTERFRDLLLPPSSQDSEILPFIQSRNYPKLYIDGPFGSPFEESLNYEVSLCVAGGIGVTPFASILNTLLDDWKPYKLRRLYFIWVCRDIQSFRWFADLLCMLHNKFWQENRPDYVNIQLYLSQTDGIQKIIGEKYHALNSRLFIGRPRWKLLFDEIAKYNRGKTVGVFCCGPNSLSKTLHKLSNQNNSYGTRFEYNKESFS

SEQ ID NO: 9941 - protein, 578 aa, Homo sapiens
MAVSWRSWLANEGVKHLCLFIWLSMNVLLFWKTFLLYNQGPEYHYLHQMLGLGLCLSRASASVLNLNCSLILLPMCRTLLAYLRGSQKVPSRRTRRLLDKSRTFHITCGVTICIFSGVHVAAHLVNALNFSVNYSEDFVELNAARYRDEDPRKLLFTTVPGLTGVCMVVVLFLMITASTYAIRVSNYDIFWYTHNLFFVFYMLLTLHVSGGLLKYQTNLDTHPPGCISLNRTSSQNISLPEYFSEHFHEPFPEGFSKPAEFTQHKFVKICMEEPRFQANFPQTWLWISGPLCLYCAERLYRYIRSNKPVTIISVISHPSDVMEIRMVKENFKARPGQYITLHCPSVSALENHPFTLTMCPTETKATFGVHLKIVGDWTERFRDLLLPPSSQDSEILPFIQSRNYPKLYIDGPFGSPFEESLNYEVSLCVAGGIGVTPFASILNTLLDDWKPYKLRRLYFIWVCRDIQSFRWFADLLCMLHNKFWQENRPDYVNIQLYLSQTDGIQKIIGEKYHALNSRLFIGRPRWKLLFDEIAKYNRGKTVGVFCCGPNSLSKTLHKLSNQNNSYGTRFEYNKESFS

SEQ ID NO: 9942 - protein, 263 aa, Homo sapiens
MAGSQKEEIMPPQQGVPFQESGCWGSMGAQSRERSGRDHSGTWICAGGSQETFHLGAPVETTCLAGMSGPRPVVLSGPSGAGKSTLLKRLLQEHSGIFGFSVSHTTRNPRPGEENGKDYYFVTREVMQRDIAAGDFIEHAEFSGNLYGTSKVAVQAVQAMNRICVLDVDLQGVRNIKATDLRPIYISVQPPSLHVLEQRLRQRNTETEESLVKRLAAAQADMESSKEPGLFDVVIINDSLDQAYAELKEALSEEIKKAQRTGA

SEQ ID NO: 9943 - protein, 197 aa, Homo sapiens
MSGPRPVVLSGPSGAGKSTLLKRLLQEHSGIFGFSVSHTTRNPRPGEENGKDYYFVTREVMQRDIAAGDFIEHAEFSGNLYGTSKVAVQAVQAMNRICVLDVDLQGVRNIKATDLRPIYISVQPPSLHVLEQRLRQRNTETEESLVKRLAAAQADMESSKEPGLFDVVIINDSLDQAYAELKEALSEEIKKAQRTGA

SEQ ID NO: 9944 - protein, 115 aa, Homo sapiens
MNRICVLDVDLQGVRNIKATDLRPIYISVQPPSLHVLEQRLRQRNTETEESLVKRLAAAQADMESSECAVGSPGNARRGVRVLRSVAPGTLWVPRPPDTWSPCEGPQTSQLPPNT

SEQ ID NO: 9945 - protein, 197 aa, Homo sapiens; identical to SEQ ID NO: 9943

SEQ ID NO: 9946 - protein, 263 aa, Homo sapiens; identical to SEQ ID NO: 9942

SEQ ID NO: 9947 - protein, 218 aa, Homo sapiens
MLRRPLAGLAAAALGRAPPDGMSGPRPVVLSGPSGAGKSTLLKRLLQEHSGIFGFSVSHTTRNPRPGEENGKDYYFVTREVMQRDIAAGDFIEHAEFSGNLYGTSKVAVQAVQAMNRICVLDVDLQGVRNIKATDLRPIYISVQPPSLHVLEQRLRQRNTETEESLVKRLAAAQADMESSKEPGLFDVVIINDSLDQAYAELKEALSEEIKKAQRTGA

SEQ ID NO: 9948 - protein, 196 aa, Homo sapiens
MPGLGAAGPGHPGAGPVCPLDGPSSSPDYYFVTREVMQRDIAAGDFIEHAEFSGNLYGTSKVAVQAVQAMNRICVLDVDLQGVRNIKATDLRPIYISVQPPSLHVLEQRLRQRNTETEESLVKRLAAAQADMESRNQESSKDRRLRLAVCSRHPGPIQDQGSSIEPPPWQAIRQLCALGQHVEWRRCCPCGWNILG

SEQ ID NO: 9949 - protein, 428 aa, Homo sapiens
MLRTLLRRRLFSYPTKYYFMVLVLSLITFSVLRIHQKPEFVSVRHLELAGENPSSDINCTKVLQGDVNEIQKVKLEILTVKFKKRPRWTPDDYINMTSDCSSFIKRRKYIVEPLSKEEAEFPIAYSIVVHHKIEMLDRLLRAIYMPQNFYCIHVDTKSEDSYLAAVMGIASCFSNVFVASRLESVVYASWSRVQADLNCMKDLYAMSANWKYLINLCGMDFPIKTNLEIVRKLKLLMGENNLETERMPSHKEERWKKRYEVVNGKLTNTGTVKMLPPLETPLFSGSAYFVVSREYVGYVLQNEKIQKLMEWAQDTYSPDEYLWATIQRIPEVPGSLPASHKYDLSDMQAVARFVKWQYFEGDVSKGAPYPPCDGVHVRSVCIFGAGDLNWMLRKHHLFANKFDVDVDLFAIQCLDEHLRHKALETLKH

SEQ ID NO: 9950 - protein, 428 aa, Homo sapiens; identical to SEQ ID NO: 9949

SEQ ID NO: 9951 - protein, 220 aa, Homo sapiens
MITAQSALPEREAQESSTTDEDLAGRRAANGSSERGGAVSTPDYGEKKLPQALIIGVKKGGTRALLEAIRVHPDVRAELRKGVGVVQVGPWAPRAGGDAWGRRGGEAAAFHALRASRHRPERPKPPRGLCKPWRRCSGGSAERAGLQRKENGQCSAAYFACGNWGENGEGWNFIGVYRMPAIVAIGATYNYRPVISFEHFDDMLRYVAAFPLYTWLREGK

SEQ ID NO: 9952 - protein, 204 aa, Homo sapiens [sequence omitted]

SEQ ID NO: 9953 - protein, 443 aa, Homo sapiens
MAASPHTLSSRLLTGCVGGSVWYLERRTIQDSPHKFLHLLRNVNKQWITFQHFSFLKRMYVTQLNRSHNQQVRPKPEPVASPFLEKTSSGQAKAEIYEMRPLSPPSLSLSRKPNEKELIELEPDSVIEDSIDVGKETKEEKRWKEMKLQVYDLPGILARLSKIKLTALVVSTTAAGFALAPGPFDWPCFLLTSVGTGLASCAANSINQFFEVPFDSNMNRTKNRPLVRGQISPLLAVSFATCCAVPGVAILTLGVNPLTGALGLFNIFLYTCCYTPLKRISIANTWVGAVVGAIPPVMGWTAATGSLDAGAFLLGGILYSWQFPHFNALSWGLREDYSRGGYCMMSVTHPGLCRRVALRHCLALLVLSAAAPVLDITTWTFPIMALPINAYISYLGFRFYVDADRRSSRRLFFCSLWHLPLLLLLMLTCKRPSGGGDAGPPPS

SEQ ID NO: 9954 - protein, 443 aa, Homo sapiens; identical to SEQ ID NO: 9953

SEQ ID NO: 9955 - protein, 106 aa, Homo sapiens
MLRLISRKPPWSGVGSHTARQEWMEEIACCKTLSSDTTVGEGAAAQAPGGSPMTPLNASSDAQVAQPVGFHGLHAIIGSTFLTICLLRQLKFHFTSSHHFGFEAAV

SEQ ID NO: 9956 - protein, 122 aa, Homo sapiens [sequence omitted]

SEQ ID NO: 9957 - protein, 337 aa, Homo sapiens
MGVMAMLMLPLLLLGISGLLFIYQEVSRLWSKSAVQNKVVVITDAISGLGKECARVFHTGGARLVLCGKNWERLENLYDALISVADPSKQTFTPKLVLLDLSDISCVPDVAKEVLDCYGCVDILINNASVKVKGPAHKISLELDKKIMDANYFGPITLTKALLPNMISRRTGQIVLVNNIQGKFGIPFRTTYAASKHAALGFFDCLRAEVEEYDVVISTVSPTFIRSYHVYPEQGNWEASIWKFFFRKLTYGVHPVEVAEEVMRTVRRKKQEVFMANPIPKAAVYVRTFFPEFFFAVVACGVKEKLNVPEEGEPPTKIEDFLEVASFEMDEQHVRDP

SEQ ID NO: 9958 - protein, 382 aa, Homo sapiens [sequence omitted]

SEQ ID NO: 9959 - protein, 483 aa, Homo sapiens [sequence omitted]

SEQ ID NO: 9960 - protein, 403 aa, Homo sapiens [sequence omitted]

SEQ ID NO: 9961 - protein, 483 aa, Homo sapiens [sequence omitted]

SEQ ID NO: 9962 - protein, 444 aa, Homo sapiens [sequence omitted]

SEQ ID NO: 9963 - protein, 438 aa, Homo sapiens
MTMPVNGAHKDADLWSSHDKMLAQPLKDSDVEVYNIIKKESNRQRVGLELIASENFASRAVLEALGSCLNNKYSEGYPGQRYYGGTEFIDELETLCQKRALQAYKLDPQCWGVNVQPYSGSPANFAVYTALVEPHGRIMGLDLPDGGHLTHGFMTDKKKISATSIFFESMPYKVNPDTGYINYDQLEENARLFHPKLIIAGTSCYSRNLEYARLRKIADENGAYLMADMAHISGLVAAGVVPSPFEHCHVVTTTTHKTLRGCRAGMIFYRKGVKSVDPKTGKEILYNLESLINSAVFPGLQGGPHNHAIAGVAVALKQAMTLEFKVYQHQVVANCRALSEALTELGYKIVTGGSDNHLILVDLRSKGTDGGRAEKVLEACSIACNKNTCPGDRSALRPSGLRLGTPALTSRGLLEKDFQKRHWCQSHPERVQGETGRG

SEQ ID NO: 9964 - protein, 483 aa, Homo sapiens [sequence omitted]

SEQ ID NO: 9965 - protein, 473 aa, Homo sapiens
MATATEQWVLVEMVQALYEAPAYHLILEGILILWIIRLLFSKTYKLQERSDLTVKEKEELIEEWQPEPLVPPVPKDHPALNYNIVSGPPSHKTVVNGKECINFASFNFLGLLDNPRVKAAALASLKKYGVGTCGPRGFYGTFDVHLDLEDRLAKFMKTEEAIIYSYGFATIASAIPAYSKRGDIVFVDRAACFAIQKGLQASRSDIKLFKHNDMADLERLLKEQEIEDQKNPRKARVTRRFIVVEGLYMNTGTICPLPELVKLKYKYKARIFLEESLSFGVLGEHGRGVTEHYGINIDDIDLISANMENALASIGGFCCGRSFVIDHQRLSGQGYCFSASLPPLLAAAAIEALNIMEENPGIFAVLKEKCGQIHKALQGISGLKVVGESLSPAFHLQLEESTGSREQDVRLLQEIVDQCMNRSIALTQARYLEKEEKCLPPPSIRVVVTVEQTEEELERAASTIKEVAQAVLL

SEQ ID NO: 9966 - protein, 473 aa, Homo sapiens; identical to SEQ ID NO: 9965

SEQ ID NO: 9967 - protein, 373 aa, Homo sapiens
MVLRRSAHLPARLVFPPGMEELQAQLEKELEGGTLFEADFSLLDGIKANVSLCSQQHLAAPLVMLKLQPDGKLLPMVIQLQLPSTGSPPPPLFLPTDPPVVWLLAQCWVRSSDFQLRELQSHLLRGHLMAQVIVVATMRCLPSIHPIFKLCVERMNKVGLVWTWARSLNVLGLCVTSETHLSGCDSVSTIQTPQGHSHELASLHEGQVSTRVSGRPRMVWEQLRCYRFARPEPWASGLSQGPGSRDKPLQASESSAAKGGVSCREDPPRHTVGQGWHRTSHSSRGTVCGTQQGKKFDFESSSFGSLEIIWRLPVHTLNLKLQESHYGLRSIPLSGKVLLLLEHQIRAGVPGAPQYAGSSLQPQSGSRKRPGQA

SEQ ID NO: 9968 - protein, 118 aa, Homo sapiens
MASARGAKQSSPRVGTTRYTETSTVRVETSSHRVETSSRRVETSQRRSEGPSLSPSGKRLPRILEASSRHVESSSQRTETTSRHVRASSLRVETSLHCAESPTPRAKPAARQNEKTAR

SEQ ID NO: 9969 - protein, 118 aa, Homo sapiens; identical to SEQ ID NO: 9968

SEQ ID NO: 9970 - protein, 225 aa, Homo sapiens
MLGLDACELGAQLLELLRLALCARVLLADKEGGPPAVDEVLDEAVPEYRAPGRKSLLEIRQLDPDDRSLAKYKRVLLGPLPPAVDPSLPNVQVTRLTLLSEQAPGPVVMDLTGDLAVLKDQVFVLKEGVDYRVKISFKVHREIVSGLKCLHHTYRRGLRVDKTVYMVGSYGPSAQEYEFVTPVEEAPRGALVRGPYLVVSLFTDDDRTHHLSWEWGLCICQDWKD

SEQ ID NO: 9971 - protein, 525 aa, Homo sapiens
MSRQLLPVLLLLLLRASCPWGQEQGARSPSEEPPEEEIPKEDGILVLSRHTLGLALREHPALLVEFYAPWCGHCQALAPEYSKAAAVLAAESMVVTLAKVDGPAQRELAEEFGVTEYPTLKFFRNGNRTHPEEYTGPRDAEGIAEWLRRRVGPSAMRLEDEAAAQALIGGRDLVVIGFFQDLQDEDVATFLALAQDALDMTFGLTDRPRLFQQFGLTKDTVVLFKKFDEGRADFPVDEELGLDLGDLSRFLVTHSMRLVTEFNSQTSAKIFAARILNHLLLFVNQTLAAHRELLAGFGEAAPRFRGQVLFVVVDVAADNEHVLQYFGLKAEAAPTLRLVNLETTKKYAPVDGGPVTAASITAFCHAVLNGQVKPYLLSQEIPPDWDQRPVKTLVGKNFEQVAFDETKNVFVKFYAPWCTHCKEMAPAWEALAEKYQDHEDIIIAELDATANELDAFAVHGFPTLKYFPAGPGRKVIEYKSTRDLETFSKFLDNGGVLPTEEPPEEPAAPFPEPPANSTMGSKEEL

SEQ ID NO: 9972 - protein, 117 aa, Homo sapiens
MKMLQAPESVLAEHYQDLRRKPFYPALIRYMSSGPVVAMVWEGYNVVRASRAMIGHTDSAEAAPGTIRGDFSVHISRNVIHASDSVEGAQREIQLWFQSSELVSWADGGQHSSIHPA

SEQ ID NO: 9973 - protein, 117 aa, Homo sapiens
MPAPAAAEPQATQGALQTGFWGNKPTRGSSSRGLQPPAGVNFSSWPGGAPLALSRFCGTYRVWAPLETRDPMPEGSLALEQPGTIGRRALLDPGADPGGGEARWRATAARWGRDPAL

SEQ ID NO: 9974 - protein, 117 aa, Homo sapiens; identical to SEQ ID NO: 9972

SEQ ID NO: 9975 - protein, 187 aa, Homo sapiens
MGGLFWRSALRGLRCGPRAPGPSLLVRHGSGGPSWTRERTLVAVKPDGVQRRLVGDVIQRFERRGFTLVGMKMLQAPESVLAEHYQDLRRKPFYPALIRYMSSGPVVAMVWEGYNVVRASRAMIGHTDSAEAAPGTIRGDFSVHISRNVIHASDSVEGAQREIQLWFQSSELVSWADGGQHSSIHPA

SEQ ID NO: 9976 - protein, 766 aa, Homo sapiens
MLGDAVPFSKDWGGREVIGGRREPPARGGEEGAVCSCCLHLRGGRSSRRLRLPPRCPPDMPEEAGFPPAKRFRPGSGPPSRAGSFPPGRQVVMLLTAGSGGRGGGGGRRQQPPLAQPSASPYPEAVELQRRSLPIFQARGQLLAQLRNLDNAVLIGETGSGKTTQIPQYLYEGGISRQGIIAVTQPRRVAAISLATRVSDEKRTELGKLVGYTVRFDDVTSEDTRIKFLTDGMLLREAISDSLLRKYSCVILDEAHERTIHTDVLFGVVKAAQKRRKELGKLPLKVIVMSATMDVDLFSQYFNGAPVLYLEGRQHPIQVFYTKQPQNDYLHAALVSVFQIHQEAPSSQDILVFLTGQEEIEAMSKTCRDIAKHLPDGCPAMLVLPLYASLPYAQQLRVFQGAPKGYRKVIISTNIAETSITITGIKYVVDTGMVKAKKYNPDSGLEVLAVQRVSKTQAWQRTGRAGREDSGICYRLYTEDEFEKFDKMTVPEIQRCNLASVMLQLLAMKVPNVLTFDFMSKPSPDHIQAAIAQLDLLGALEHKDDQLTLTPMGRKMAAFPLEPKFAKTILMSPKFHCTEEILTIVSLLSVDSVLHNPPSRREEVQGVRKKFISSEGDHMTLLNIYRTFKNLGGNKDWCKENFVNSKNMTLVAEVRAQLRDICLKMSMPIASSRGDVESVRRCLAHSLFMSTAELQPDGTYATTDTHQPVAIHPSSVLFHCKPACVVYTELLYTNKCYMRDLCVIDAQWLYEAAPEYFRRKLRTARN

SEQ ID NO: 9977 - protein, 483 aa, Homo sapiens
MQVIVMSATMDVDLFSQYFNGAPVLYLEGRQHPIQVFYTKQPQNDYLHAALVSVFQIHQEAPSSQDILVFLTGQEEIEAMSKTCRDIAKHLPDGCPAMLVLPLYASLPYAQQLRVFQGAPKGYRKVIISTNIAETSITITGIKYVVDTGMVKAKKYNPDSGLEVLAVQRVSKTQAWQRTGRAGREDSGICYRLYTEDEFEKFDKMTVPEIQRCNLASVMLQLLAMKVPNVLTFDFMSKPSPDHIQAAIAQLDLLGALEHKDDQLTLTPMGRKMAAFPLEPKFAKTILMSPKFHCTEEILTIVSLLSVDSVLHNPPSRREEVQGVRKKFISSEGDHMTLLNIYRTFKNLGGNKDWCKENFVNSKNMTLVAEVRAQLRDICLKMSMPIASSRGDVESVRRCLAHSLFMSTAELQPDGTYATTDTHQPVAIHPSSVLFHCKPACVVYTELLYTNKCYMRDLCVIDAQWLYEAAPEYFRRKLRTARN

SEQ ID NO: 9978 - protein, 316 aa, Homo sapiens
MSAEVETSEGVDESEKKNSGALEKENQMRMADLSELLKEGTKEAHDRAENTQFVKDFLKGNIKKELFKLATTALYFTYSALEEEMERNKDHPAFAPLYFPMELHRKEALTKDMEYFFGENWEEQVQCPKAAQKYVERIHYIGQNEPELLVAHAYTRYMGDLSGGQVLKKVAQRALKLPSTGEGTQFYLFENVDNAQQFKQLYRARMNALDLNMKTKERIVEEANKAFEYNMQIFNELDQAGSTLARETLEDGFPVHDGKGDMRKCPFYAAEQDKGALEGSSCPFRTAMAVLRKPSLQFILAAGVALAAGLLAWYYM

SEQ ID NO: 9979 - protein, 316 aa, Homo sapiens; identical to SEQ ID NO: 9978

SEQ ID NO: 9980 - protein, 316 aa, Homo sapiens; identical to SEQ ID NO: 9978

SEQ ID NO: 9981 - protein, 316 aa, Homo sapiens; identical to SEQ ID NO: 9978

SEQ ID NO: 9982 - protein, 464 aa, Homo sapiens
MAASCLVLLALCLLLPLLLLGGWKRWRRGRAARHVVAVVLGDVGRSPRMQYHALSLAMHGFSVTLLGFCNSKPHDELLQNNRIQIVGLTELQSLAVGPRVFQYGVKVVLQAMYLLWKLMWREPGAYIFLQNPPGLPSIAVCWFVGCLCGSKLVIDWHNYGYSIMGLVHGPNHPLVLLAKWYEKFFGRLSHLNLCVTNAMREDLADNWHIRAVTVYDKPASFFKETPLDLQHRLFMKLGSMHSPFRARSEPEDPVTERSAFTERDAGSGLVTRLRERPALLVSSTSWTEDEDFSILLAALEKFEQLTLDGHNLPSLVCVITGKGPLREYYSRLIHQKHFQHIQVCTPWLEAEDYPLLLGSADLGVCLHTSSSGLDLPMKVVDMFGCCLPVCAVNFKCLHELVKHEENGLVFEDSEELAAQLQMLFSNFPDPAGKLNQFRKNLRESQQLRWDESWVQTVLPLVMDT

SEQ ID NO: 9983 - protein, 447 aa, Homo sapiens [sequence omitted]

SEQ ID NO: 9984 - protein, 1187 aa, Homo sapiens
MPFGLKLRRTRRYNVLSKNCFVTRIRLLDSNVIECTLSVESTGQECLEAVAQRLELRETHYFGLWFLSKSQQARWVELEKPLKKHLDKFANEPLLFFGVMFYVPNVSWLQQEATRYQYYLQVKKDVLEGRLRCTLDQVIRLAGLAVQADFGDYNQFDSQDFLREYVLFPMDLALEEAVLEELTQKVAQEHKAHSGILPAEAELMYINEVERLDGFGQEIFPVKDNHGNCVHLGIFFMGIFVRNRIGRQAVIYRWNDMGNITHNKSTILVELINKEETALFHTDDIENAKYISRLFATRHKFYKQNKICTEQSNSPPPIRRQPTWSRSSLPRQQPYILPPVHVQCGEHYSETHTSQDSIFHGNEEALYCNSHNSLDLNYLNGTVTNGSVCSVHSVNSLNCSQSFIQASPVSSNLSIPGSDIMRADYIPSHRHSAIIVPSYRPTPDYETVMRQMKRGILHTDSQSQSLRNLNIINTHAYNQPEDLVYSQPEMRERHPYTVPYGPQGVYSNKLVSPSDQRNPKNNVVPSKPGASAISHTVSTPELANMQLQGSHNYSTAHMLKNYLFRPPPPYPRPRPATSTPDLASHRHKYVSGSSPDLVTRKVQLSVKTFQEDSSPVVHQSLQEVSEPLTATKHHGTVNKRHSLEVMNSMVRGMEAMTLKSLHLPMARRNTLREQGPPEEGSGSHEVPQLPQYHHKKTFSDATMLIHSSESEEEEEEAPESVPQIPMLREKMEYSAQLQAALARIPNKPPPEYPGPRKSVSNGALRQDQASLPPAMARARVLRHGPAKAISMSRTDPPAVNGASLGPSISEPDLTSVKERVKKEPVKERPVSEMFSLEDSIIEREMMIRNLEKQKMAGLEAQKRPLMLAALNGLSVARVSGREENRVDATRVPMDERFRTLKKKLEEGMVFTEYEQIPKKKANGIFSTAALPENAERSRIREVVPYEENRVELIPTKENNTGYINASHIKVVVGGAEWHYIATQGPLPHTCHDFWQMVWEQGVNVIAMVTAEEEGGRTKSHRYWPKLGSKHSSATYGKFKVTTKFRTDSVCYATTGLKVKHLLSGQERTVWHLQYTDWPDHGCPEDVQGFLSYLEEIQSVRRHTNSMLEGTKNRHPPIVVHCSAGVGRTGVLILSELMIYCLEHNEKVEVPMMLRLLREQRMFMIQTIAQYKFVYQVLIQFLQNSRLI

SEQ ID NO: 9985 - protein, 112 aa, Homo sapiens
MSQINTPGRHSKAPVMPPQPWSWGVGLGSPSWCGILLPLQLTGRKRSPCIALNPAGSGFGGAGLLPRRLEGEEGVWPLRASKALCAVRIPPRALPESGRCFSAPAGSPGEVL

SEQ ID NO: 9986 - protein, 422 aa, Homo sapiens
MEPPASKVPEVPTAPATDAAPKRVEIQMPKPAEAPTAPSPAQTLENSEPAPVSQLQSRLEPKPQPPVAEATPRSQEATEAAPSCVGDMADTPRDAGLKQAPASRNEKAPVDFGYVGIDSILEQMRRKAMKQGFEFNIMVVGQSGLGKSTLINTLFKSKISRKSVQPTSEERIPKTIEIKSITHDIEEKGVRMKLTVIDTPGFGDHINNENCWQPIMKFINDQYEKYLQEEVNINRKKRIPDTRVHCCLYFIPATGHSLRPLDIEFMKRLSKVVNIVPVIAKADTLTLEERVHFKQRITADLLSNGIDVYPQKEFDEDSEDRLVNEKFREMIPFAVVGSDHEYQVNGKRILGRKTKWGTIEVENTTHCEFAYLRDLLIRTHMQNIKDITSSIHFEAYRVKRLNEGSSAMANGVEEKEPEAPEM

SEQ ID NO: 9987 - protein, 568 aa, Homo sapiens
MERDRISALKRSFEVEEVETPNSTPPRRVQTPLLRATVASSTQKFQDLGVKNSEPSARHVDSLSQRSPKASLRRVELSGPKAAEPVSRRTELSIDISSKQVENAGAIGPSRFGLKRAEVLGHKTPEPAPRRTEITIVKPQESAHRRMEPPASKVPEVPTAPATDAAPKRVEIQMPKPAEAPTAPSPAQTLENSEPAPVSQLQSRLEPKPQPPVAEATPRSQEATEAAPSCVGDMADTPRDAGLKQAPASRNEKAPVDFGYVGIDSILEQMRRKAMKQGFEFNIMVVGQSGLGKSTLINTLFKSKISRKSVQPTSEERIPKTIEIKSITHDIEEKGVRMKLTVIDTPGFGDHINNENCWQPIMKFINDQYEKYLQEEVNINRKKRIPDTRVHCCLYFIPATGHSLRPLDIEFMKRLSKVVNIVPVIAKADTLTLEERVHFKQRITADLLSNGIDVYPQKEFDEDSEDRLVNEKFREMIPFAVVGSDHEYQVNGKRILGRKTKWGTIEVENTTHCEFAYLRDLLIRTHMQNIKDITSSIHFEAYRVKRLNEGSSAMANGVEEKEPEAPEM

SEQ ID NO: 9988 - protein, 579 aa, Homo sapiens [sequence omitted]

SEQ ID NO: 9989 - protein, 568 aa, Homo sapiens; identical to SEQ ID NO: 9987

SEQ ID NO: 9990 - protein, 198 aa, Homo sapiens
ANAPPRRPCGGWSSRAPRRPSRCPGALSCPLTSRPSRWRTPGPSARPGSGSRGPRCWATRRQNRPLGGRRSPSSNPRSQPTGGWSPLPPRSPRCPLPLPPTQPPRGWRSRCPSLLRRPPPPAQPRPWRIQSLPLCLSCRAGWSPSPSPLWLRLHPGARRVSGSQLRWRHGRHPQRCRAQAGACITEREGPGGLRLRGD

SEQ ID NO: 9991 - protein, 524 aa, Homo sapiens
  VARIANT (1)...(524): Xaa = Any Amino Acid
MERDRISALKRSFEVEEVETPNSTPPRRVQTPLLRATVASSTQKFQDLGVKNSEPSARHVDSLSQRSPKASLRRVELSGPKAAEPVSRRTELSIDISSKQVENAGAIGPSRFGLKRAEVLGHKTPEPAPRRTEITIVKPQESAHRRMEPPASKVPEVPTAPATDAAPKRVEIQMPKPAEAPTAPSPAQTLENSEPAPVSQLQSRLEPKPQPPVAEATPRSQEATEAAPSCVGDMADTPRDAGLKQAPASRNEKAPVDFGYVGIDSILEQMRRKAMKQGFEFNIMVVGQSGLGKSTLINTLFKSKISRKSVQPTSEERIPKTIEIKSITHDIEEKGVRMKLTVIDTPGFGDHINNENCWQPIMKFINDQYEKYLQEEVNINRKKRIPDTRVHCCLYFIPATGHSLRPLDIEFMKRLSKVVNIVPVIAKADTLTLEERVHFKQRITADLLSNGIDVYPQKEFDEDSEDRLVNEKFREMIPFAVVGSDHEYQVNGKRILGRKTKWGTIEVENTTHCEFAYLRDLLIX

SEQ ID NO: 9992 - protein, 344 aa, Homo sapiens
MVLAISSCRTYSLSRRPRLGFITRPPHRFLSLLCPGLRIPQLSVLCAQPRPRAMAISSSSCELPLVAVCQVTSTPDKQQNFKTCAELVREAARLGACLAFLPEAFDFIARDPAETLHLSEPLGGKLLEEYTQLARECGLWLSLGGFHERGQDWEQTQKIYNCHVLLNSKGAVVATYRKTHLCDVEIPGQGPMCESNSTMPGPSLESPVSTPAGKIGLAVCYDMRFPELSLALAQAGAEILTYPSAFGSITGPAHWEVLLRARAIETQCYVVAAAQCGRHHEKRASYGHSMVVDPWGTVVARCSEGPGLCLARIDLNYLRQLRRHLPVFQHRRPDLYGNLGHPLS

SEQ ID NO: 9993 - protein, 291 aa, Homo sapiens
MAISSSSCELPLVAVCQVTSTPDKQQNFKTCAELVREAARLGACLAFLPEAFDFIARDPAETLHLSEPLGGKLLEEYTQLARECGLWLSLGGFHERGQDWEQTQKIYNCHVLLNSKGAVVATYRKTHLCDVEIPGQGPMCESNSTMPGPSLESPVSTPAGKIGLAVCYDMRFPELSLALAQAGAEILTYPSAFGSITGPAHWEVLLRARAIETQCYVVAAAQCGRHHEKRASYGHSMVVDPWGTVVARCSEGPGLCLARIDLNYLRQLRRHLPVFQHRRPDLYGNLGHPLS

SEQ ID NO: 9994 - protein, 327 aa, Homo sapiens
MLGFITRPPHRFLSLLCPGLRIPQLSVLCAQPRPRAMAISSSSCELPLVAVCQVTSTPDKQQNFKTCAELVREAARLGACLAFLPEAFDFIARDPAETLHLSEPLGGKLLEEYTQLARECGLWLSLGGFHERGQDWEQTQKIYNCHVLLNSKGAVVATYRKTHLCDVEIPGQGPMCESNSTMPGPSLESPVSTPAGKIGLAVCYDMRFPELSLALAQAGAEILTYPSAFGSITGPAHWEVLLRARAIETQCYVVAAAQCGRHHEKRASYGHSMVVDPWGTVVARCSEGPGLCLARIDLNYLRQLRRHLPVFQHRRPDLYGNLGHPLS

SEQ ID NO: 9995 - protein, 291 aa, Homo sapiens; identical to SEQ ID NO: 9993

SEQ ID NO: 9996 - protein, 487 aa, Homo sapiens
MQEFARRYFRRSQALLGQTDGGAAGKDTDSLVQYTKAPIQESLLSLSDDVSKLAVASFLALMRFMGDQSKPRGKDEMDLLYELLKLCQQEKLRDEIYCQVIKQVTGHPRPEHCTRGWSFLSLLTGFFPPSTRLMPYLTKFLQDSGPSQELARSSQEHLQRTVKYGGRRRMPPPGEMKAFLKGQAIRLLLIHLPGGVDYRTNIQTFTVAAEVQEELCRQMGITEPQEVQEFALFLIKEKSQLVRPLQPAEYLNSVVVDQDVSLHSRRLHWETPLHFDNSTYISTHYSQVLWDYLQGKLPVSAKADAQLARLAALQHLSKANRNTPSGQDLLAYVPKQLQRQVNTASIKNLMGQELRRLEGHSPQEAQISFIEAMSQLPLFGYTVYGVLRVSMQALSGPTLLGLNRQHLILMDPSSQSLYCRIALKSLQRLHLLSPLEEKGPPGLEVNYGSADNPQTIWFELPQAQELLYTTVFLIDSSASCTEWPSIN

SEQ ID NO: 9997 - protein, 1530 aa, Homo sapiens [sequence omitted]

SEQ ID NO: 9998 - protein, 487 aa, Homo sapiens; identical to SEQ ID NO: 9996

SEQ ID NO: 9999 - protein, 986 aa, Homo sapiens [sequence omitted]

SEQ ID NO: 10000 - protein, 487 aa, Homo sapiens; identical to SEQ ID NO: 9996

SEQ ID NO: 10001 - protein, 114 aa, Homo sapiens
MSKRRRRRSRAGGGPARASARLEVTIALPQGLCRLLPGSLQEGQLLGFLLLVSRLILQPVGDDPLDDEVCGEVAATVNLTEDAPSLGLLVWVGAIPVRDNFCLAVTHQVHLEVT

SEQ ID NO: 10002 - protein, 237 aa, Homo sapiens
MDFGGHGLSSHYSPGVPYYLQTFVSEIRRVVAGGVVGGMFFCTFPEMVDKLILLDTPLFLLESDEMENLLTYKRRAIEHVLQVEASQEPSHVFSLKQLLQRLLKSNSHLSEECGELLLQRGTTKVATGLVLNRDQRLAWAENSIDFISRELCAHSIRKLQAHVLLIKAVHGYFDSRQNYSEKESLSFMIDTMKSTLKEQFQFVEVPGNHCVHMSEPQHVASIISSFLQCTHMLPAQL

SEQ ID NO: 10003 - protein, 140 aa, Homo sapiens
MDFGGHGLSSHYSPGVPYYLQTFVSEIRRVVAALKWNRFSILGHSFGGVVGGMFFCTFPEMVDKLILLDTPLFLLESDEMENLLTYKRRAIEHVLQVEASQEPSHVFSLKQLLQRQRTALTSSAGSCVRIPSGSCRPMSC

SEQ ID NO: 10004 - protein, 203 aa, Homo sapiens
MSENAAPGLISELKLAVPWGHIAAKAWGSLQGPPVLCLHGWLDNASSFDRLIPLLPQDFYYVAMDFGGHGLSSHYSPGVPYYLQTFVSEIRRVVAALKWNRFSILGHSFGGVVGGMFFCTFPEMVDKLILLDTPLFLLESDEMENLLTYKRRAIEHVLQVEASQEPSHVFSLKQLLQRQRTALTSSAGSCVRIPSGSCRPMSC

SEQ ID NO: 10005 - protein, 146 aa, Homo sapiens
MSENAAPGLISELKLAVPWGHIAAKAWGSLQGPPVLCLHGWLDNASSFDRLIPLLPQDFYYVAMDFGGHGLSSHYSPGVPYYLQTFVSEIRRVVAALKWNRFSILGHSFGEYSGQELTGPGVGLGGKDRSCCPTPFPCTYEICKER

SEQ ID NO: 10006 - protein, 251 aa, Homo sapiens
MDFGGHGLSSHYSPGVPYYLQTFVSEIRRVVAALKWNRFSILGHSFGGVVGGMFFCTFPEMVDKLILLDTPLFLLESDEMENLLTYKRRAIEHVLQVEASQEPSHVFSLKQLLQRLLKSNSHLSEECGELLLQRGTTKVATGLVLNRDQRLAWAENSIDFISRELCAHSIRKLQAHVLLIKAVHGYFDSRQNYSEKESLSFMIDTMKSTLKEQFQFVEVPGNHCVHMSEPQHVASIISSFLQCTHMLPAQL

SEQ ID NO: 10007 - protein, 251 aa, Homo sapiens; identical to SEQ ID NO: 10006

SEQ ID NO: 10008 - protein, 187 aa, Homo sapiens
MKDNDIKRLLYTHLLCIFSIILSVFIPSLFLENFSILETHLTWLCICSGFVTAVNLVLYLVVKPNTSSKRSSLSHKVTGFLKCCIYFLMSCFSFHVIFVLYGAPLIELALETFLFAVILSTFTTVPCLCLLGPNLKAWLRVFSRNGVTSIWENSLQITTISSFVGAWLGALPIPLDWERPWQKQIAR

SEQ ID NO: 10009 - protein, 219 aa, Homo sapiens
MKDNDIKRLLYTHLLCIFSIILSVFIPSLFLENFSILETHLTWLCICSGFVTAVNLVLYLVVKPNTSSKRSSLSHKVTGFLKCCIYFLMSCFSFHVIFVLYGAPLIELALETFLFAVILSTFTTVPCLCLLGPNLKAWLRVFSRNGVTSIWENSLQITTISSFVGAWLGALPIPLDWERPWQVWPISCTLGATFGYVAGLVISPLWIYWNRKQLTYKNN

SEQ ID NO: 10010 - protein, 206 aa, Homo sapiens
MKDNDIKRLLYTHLLCIFSIILSVFIPSLFLENFSILETHLTWLCICSGFVTAVNLVLYLVVKPNTSSKRSSLSHKVTGFLKCCIYFLMSCFSFHVIFVLYGAPLIELALETFLFAVILSTFTTVPCLCLLGPNLKAWLRVFSRNGVTSIWENSLQITTISSFVGAWLGALPIPLDWERPWQMTVERKRSTYRSLHVPCRGLGTVK

SEQ ID NO: 10011 - protein, 231 aa, Homo sapiens
MPAKAPLGAARKSLLSAALAIQENTMKDNDIKRLLYTHLLCIFSIILSVFIPSLFLENFSILETHLTWLCICSGFVTAVNLVLYLVVKPNTSSKRSSLSHKVTGFLKCCIYFLMSCFSFHVIFVLYGAPLIELALETFLFAVILSTFTTVPCLCLLGPNLKAWLRVFSRNGVTSIWENSLQITTISSFVGAWLGALPIPLDWERPWQMTVERKRSTYRSLHVPCRGLGTVK

SEQ ID NO: 10012 - protein, 131 aa, Homo sapiens
MSCFSFHVIFVLYGAPLIELALETFLFAVILSTFTTVPCLCLLGPNLKAWLRVFSRNGVTSIWENSLQITTISSFVGAWLGALPIPLDWERPWQVWPISCTLGATFGYVAGLVISPLWIYWNRKQLTYKNN

SEQ ID NO: 10013 - protein, 244 aa, Homo sapiens
MPAKAPLGAARKSLLSAALAIQENTMKDNDIKRLLYTHLLCIFSIILSVFIPSLFLENFSILETHLTWLCICSGFVTAVNLVLYLVVKPNTSSKRSSLSHKVTGFLKCCIYFLMSCFSFHVIFVLYGAPLIELALETFLFAVILSTFTTVPCLCLLGPNLKAWLRVFSRNGVTSIWENSLQITTISSFVGAWLGALPIPLDWERPWQVWPISCTLGATFGYVAGLVISPLWIYWNRKQLTYKNN

SEQ ID NO: 10014 - protein, 119 aa, Homo sapiens
MCPLPLAAAAVAAPRAPLRLLNRGLAAAMSTAQSLKSVDYEVFGRVQEDEARKIGVVGWVKNTSKGTVTGQVQGPEDKVNSMKSWLSKVGSPSSRIDRTNFSNEKTISKLEYSNFSIRY

SEQ ID NO: 10015 - protein, 141 aa, Homo sapiens
RPGPVTGAGCAKQSHVSPPSRSRRSRCAPSPSPAPQQRARRRHVYRPVTQIRGLRGVRKSAGFFLKQYTEDEARKIGVVGWVKNTSKGTVTGQVQGPEDKVNSMKSWLSKVGSPSSRIDRTNFSNEKTISKLEYSNFSIRY

SEQ ID NO: 10016 - protein, 482 aa, Homo sapiens
MAALMTPGTGAPPAPGDFSGEGSQGLPDPSPEPKQLPELIRMKRDGGRLSEADIRGFVAAVVNGSAQGAQIGAMLMAIRLRGMDLEETSVLTQALAQSGQQLEWPEAWRQQLVDKHSTGGVGDKVSLVLAPALAACGCKVPMISGRGLGHTGGTLDKLESIPGFNVIQSPEQMQVLLDQAGCCIVGQSEQLVPADGILYAARDVTATVDSLPLITASILSKKLVEGLSALVVDVKFGGAAVFPNQEQARELAKTLVGVGASLGLRVAAALTAMDKPLGRCVGHALEVEEALLCMDGAGPPDLRDLVTTLGGALLWLSGHAGTQAQGAARVAAALDDGSALGRFERMLAAQGVDPGLARALCSGSPAERRQLLPRAREQEELLAPADGTVELVRALPLALVLHELGAGRSRAGEPLRLGVGAELLVDVGQRLRRGTPWLRVHRDGPALSGPQSRALQEALVLSDRAPFAAPSPFAELVLPPQQ

SEQ ID NO: 10017 - protein, 482 aa, Homo sapiens; identical to SEQ ID NO: 10016

SEQ ID NO: 10018 - protein, 482 aa, Homo sapiens; identical to SEQ ID NO: 10016

SEQ ID NO: 10019 - protein, 482 aa, Homo sapiens; identical to SEQ ID NO: 10016

SEQ ID NO: 10020 - protein, 482 aa, Homo sapiens; identical to SEQ ID NO: 10016

SEQ ID NO: 10021 - protein, 244 aa, Homo sapiens
KATGFSLPLCESTRHSTRHQVHLASEEDSFCLQCAPILHRGEPVLPPVHLWPCPVCRVEGEAGAGWESRSKFFHPKPVPGFQVAYVVFQKPSGVSAALALKGPLLVSTESHPVKSGIHKWISDYADSVPDPEALRVEVDTFMEAYDQKIAEEEAKAKEEEGVPDEEGWVKVTRRGRRPVLPRTEAASLRVLERERRKRSQKELLNYAWQHRESKMEHLAQLRKKFEEDKQRIELLRAQRKFRPY

SEQ ID NO: 10022 - protein, 244 aa, Homo sapiens; identical to SEQ ID NO: 10021

SEQ ID NO: 10023 - protein, 268 aa, Homo sapiens
MCAGKGPSRKCPARCIPETEHSCVVSTQVETQQHIPEPPNPHCLHQRQPPSQLSQHRVATADSAGEPVLPPVHLWPCPVCRVEGEAGAGWESRSKFFHPKPVPGFQVAYVVFQKPSGVSAALALKGPLLVSTESHPVKSGIHKWISDYADSVPDPEALRVEVDTFMEAYDQKIAEEEAKAKEEEGVPDEEGWVKVTRRGRRPVLPRTEAASLRVLERERRKRSQKELLNYAWQHRESKMEHLAQLRKKFEEDKQRIELLRAQRKFRPY

SEQ ID NO: 10024 - protein, 111 aa, Homo sapiens [sequence omitted]

SEQ ID NO: 10025 - protein, 123 aa, Homo sapiens
MLDDLMEKRKKKLDSVIEFSIPDSLLIRRITGRLIHPKSGRSYHEEFNPPKEPMKDDITGEPLIRRSDDNENALKIRLQAYDTQTTPLIEYFRKREIHSAIDASQTPDVVFASTLAAFSKATS

SEQ ID NO: 10026 - protein, 170 aa, Homo sapiens
MPMEIHLTVTVLMYHTRAASTSPRIPPILASLSGLAQVSLPSTVSGSSGSMTPSGRVDVQDILQQQLASKVLRVLHEEPGHLYVCWDMRMAWDVAHTLKQLVAAKLKLNEEQVEDYFFQLKEGLKLPAQNLTTEPALHYPRSQGLGRWRKVISPSLTSYFFTSFPIKPFT

SEQ ID NO: 10027 - protein, 332 aa, Homo sapiens
NGCCLRSPQALLRPQAQARDQETWTREGGESSSGCSPWSSQGDGVHAAPGRAEQGRPAGRSVRASGAEPGNERRAGPERAERRRAQERAGQRKGSRREQAACGKRGRCCRPAAQTLRRLRPPQREPSGAAISTPFSPVLALELRASRLQRRRANETASGRSHGGALRSRPALPGCSLLSLPPPAAPPPARRQRSAAGERRSRLSARWFPALPDRRAGATRKARLIRTSSGVELGLKPSCPARPECPRPHRHPRGLDGAGDGRRRRGVEGERRRRREELTGNPQATRGKTLNLSRTFHACRNENDSCDKKKIHLGGIWNLVSLRREGGGETPC

SEQ ID NO: 10028 - protein, 317 aa, Homo sapiens [sequence omitted]

SEQ ID NO: 10029 - protein, 259 aa, Homo sapiens
MKDVDNLKSIKEEWVCETGSDNQPLGNNQQSNCEYFVDSLFEEAQKVSSKCVSPAEQKKQVDVNIKLWKNGFTVNDDFRSYSDGASQQFLNSIKKGELPSELQGIFDKEEVDVKVEDKKNEICLSTKPVFQPFSGQGHRLGSATPKIVSKAKNIEVENKNNLSAVPLNNLEPITNIQIWLANGKRIVQKFNITHRVSHIKDFIEKYQGSQRSPPFSLATALPVLRLLDETLTLEEADLQNAVIIQRLQKTASFRELSEH

SEQ ID NO: 10030 - protein, 259 aa, Homo sapiens; identical to SEQ ID NO: 10029

SEQ ID NO: 10031 - protein, 435 aa, Homo sapiens
MSSHHTTFPFDPERRVRSTLKKVFGFDSFKTPLQESATMAVVKGNKDVFVCMPTGAGKSLCYQLPALLAKGITIVVSPLIALIQDQVDHLLTLKVRVSSLNSKLSAQERKELLADLEREKPQTKILYITPEMAASSSFQPTLNSLVSRHLLSYLVVDEAHCVSQWGHDFRPDYLRLGALRSRLGHAPCVALTATATPQVQEDVFAALHLKKPVAIFKTPCFRANLFYDVQFKELISDPYGNLKDFCLKALGQEADKGLSGCGIVYCRTREACEQLAIELSCRGVNAKAYHAGLKASERTLVQNDWMEEKVPVIVATISFGMGVDKANVRFVAHWNIAKSMAGYYQESGRAGRDGKPSWCRLYYSRNDRDQVSFLIRKEVAKLQEKRGNKASDKATIMAFDALVTFCEELGRWGRGHGKSLRAAWCSQVVSRHAEL

SEQ ID NO: 10032 - protein, 187 aa, Homo sapiens
MGSPRPPGMREPPGPSAVMPALPSTSTCPPRDQGTPEVQPTPAKDTWKGKRPRSQQENPESQPQKRPRPSAKPSVVAEVKGSVSASEQGTLNPTAQDPFQLSAPGVSLKEAANVVVKCLTPFYKEGKFASKELFKGFARHLSHLLTQKTSPGRSVKEEAQNLIRHFFHGRARCESEADWHGLCGPQR

SEQ ID NO: 10033 - protein, 991 aa, Homo sapiens
MSSHHTTFPFDPERRVRSTLKKVFGFDSFKTPLQESATMAVVKGNKDVFVCMPTGAGKSLCYQLPALLAKGITIVVSPLIALIQDQVDHLLTLKVRVSSLNSKLSAQERKELLADLEREKPQTKILYITPEMAASSSFQPTLNSLVSRHLLSYLVVDEAHCVSQWGHDFRPDYLRLGALRSRLGHAPCVALTATATPQVQEDVFAALHLKKPVAIFKTPCFRANLFYDVQFKELISDPYGNLKDFCLKALGQEADKGLSGCGIVYCRTREACEQLAIELSCRGVNAKAYHAGLKASERTLVQNDWMEEKVPVIVATISFGMGVDKANVRFVAHWNIAKSMAGYYQESGRAGRDGKPSWCRLYYSRNDRDQVSFLIRKEVAKLQEKRGNKASDKATIMAFDALVTFCEELGCRHAAIAKYFGDALPACAKGCDHCQNPTAVRRRLEALERSSSWSKTCIGPSQGNGFDPELYEGGRKGYGDFSRYDEGSGGSGDEGRDEAHKREWNLFYQKQMQLRKGKDPKIEEFVPPDENCPLKEASSRRIPRLTVKAREHCLRLLEEALSSNRQSTRTADEADLRAKAVELEHETFRNAKVANLYKASVLKKVADIHRASKDGQPYDMGGSAKSCSAQAEPPEPNEYDIPPASHVYSLKPKRVGAGFPKGSCPFQTATELMETTRIREQAPQPERGGEHEPPSRPCGLLDEDGSEPLPGPRGEVPGGSAHYGGPSPEKKAKSSSGGSSLAKGRASKKQQLLATAAHKDSQSIARFFCRRVESPALLASAPEAEGACPSCEGVQGPPMAPEKYTGEEDGAGGHSPAPPQTEECLRERPSTCPPRDQGTPEVQPTPAKDTWKGKRPRSQQENPESQPQKRPRPSAKPSVVAEVKGSVSASEQGTLNPTAQDPFQLSAPGVSLKEAANVVVKCLTPFYKEGKFASKELFKGFARHLSHLLTQKTSPGRSVKEEAQNLIRHFFHGRARCESEADWHGLCGPQR

SEQ ID NO: 10034 - protein, 991 aa, Homo sapiens; identical to SEQ ID NO: 10033

SEQ ID NO: 10035 - protein, 410 aa, Homo sapiens
MSSHHTTFPFDPERRVRSTLKKVFGFDSFKTPLQESATMAVVKGNKDVFVCMPTGAGKSLCYQLPALLAKGITIVVSPLIALIQDQVDHLLTLKVRVSSLNSKLSAQERKELLADLEREKPQTKILYITPEMAASSSFQPTLNSLVSRHLLSYLVVDEAHCVSQWGHDFRPDYLRLGALRSRLGHAPCVALTATATPQVQEDVFAALHLKKPVAIFKTPCFRANLFYDVQFKELISDPYGNLKDFCLKALGQEADKGLSGCGIVYCRTREACEQLAIELSCRGVNAKAYHAGLKASERTLVQNDWMEEKVPVIVATISFGMGVDKANVRFVAHWNIAKSMAGYYQESGRAGRDGKPSWCRLYYSRNDRDQVSFLIRKEVAKLQEKRGNKASDKATIMAFDALVTFCEELG

SEQ ID NO: 10036 - protein, 410 aa, Homo sapiens; identical to SEQ ID NO: 10035

SEQ ID NO: 10037 - protein, 142 aa, Homo sapiens
MYSGNRSGGHGYWDGGGAAGAEGPAPAGTLSPAPLFSPGTYERLALLLGSIGLLGVGNNLLVLVLYYKFQRLRTPTHLLLVNISLSDLLVSLFGVTFTFVSCLRNGWVWDTVGCVWDGFSGSLFASLCGRSSDNSSDQDFKI

SEQ ID NO: 10038 - protein, 402 aa, Homo sapiens
MYSGNRSGGHGYWDGGGAAGAEGPAPAGTLSPAPLFSPGTYERLALLLGSIGLLGVGNNLLVLVLYYKFQRLRTPTHLLLVNISLSDLLVSLFGVTFTFVSCLRNGWVWDTVGCVWDGFSGSLFGIVSIATLTVLAYERYIRVVHARVINFSWAWRAITYIWLYSLAWAGAPLLGWNRYILDVHGLGCTVDWKSKDANDSSFVLFLFLGCLVVPLGVIAHCYGHILYSIRMLRCVEDLQTIQVIKILKYEKKLAKMCFLMIFTFLVCWMPYIVICFLVVNGHGHLVTPTISIVSYLFAKSNTVYNPVIYVFMIRKFRRSLLQLLCLRLLRCQRPAKDLPAAGSEMQIRPIVMSQKDGDRPKKKVTFNSSSIIFIITSDESLSVDDSDKTNGSKVDVIQVRPL

SEQ ID NO: 10039 - protein, 131 aa, Homo sapiens
MAGILRLVVQWPPGRLQTVTKGVESLICTDWIRHKFTRSRIPEKVFQASPEDHEKYGGDPQNPHKLHIVTRIKSTRRRPYWEKDIIKMLGLEKAHTPQVHKNIPSVNAKLKVVKHLIRFVVSSQLFLKCIA

SEQ ID NO: 10040 - protein, 373 aa, Homo sapiens
MLIPFSMKNCFQLLCNCQVPAAGFKKTVKNGLILQSISNDVYQNLAVEDWIHDHMNLEGKPILFFWQNSPSVVIGRHQNPWQECNLNLMREEGIKLARRRSGGGTVYHDMGNINLTFFTTKKKYDRMENLKLIVRALNAVQPQLDVQATKRFDLLLDGQFKISGTASKIGRTTAYHHCTLLCSTDGTFLSSLLKSPYQGIRSNATASIPSLVKNLLEKDPTLTCEVLMNAVATEYAAYHQIDNHIHLINPTDETLFPGINSKAKELQTWEWIYGKTPKFSINTSFHVLYEQSHLEIKVFIDIKNGRIEICNIEAPDHWLPLEIRDKLNSSLIGSKFCPTETTMLTNILLRTCPQDHKLNSKWNILCEKIKGIM

SEQ ID NO: 10041 - protein, 161 aa, Homo sapiens [sequence omitted]

SEQ ID NO: 10042 - protein, 161 aa, Homo sapiens [sequence omitted]

SEQ ID NO: 10043 - protein, 166 aa, Homo sapiens [sequence omitted]

SEQ ID NO: 10044 - protein, 161 aa, Homo sapiens [sequence omitted]

SEQ ID NO: 10045 - protein, 161 aa, Homo sapiens [sequence omitted]

SEQ ID NO: 10046 - protein, 131 aa, Homo sapiens; identical to SEQ ID NO: 10039

SEQ ID NO: 10047 - protein, 326 aa, Homo sapiens
MGCRPKIFCRLLAKMANNDAVLKRLEQKGAEADQIIEYLKQQVSLLKEKAILQATLREEKKLRVENAKLKKEIEELKQELIQAEIQNGVKQIPFPSGTPLHANSMVSENVIQSTAVTTVSSGTKEQIKGGTGDEKKAKEKIEKKGEKKEKKQQSIAGSADSKPIDVSRLDLRIGCIITARKHPDADSLYVEEVDVGEIAPRTVVSGLVNHVPLEQMQNRMVILLCNLKPAKMRGVLSQAMVMCASSPEKIEILAPPNGSVPGDRITFDAFPGEPDKELNPKKKIWEQIQPDLHTNDECVATYKGVPFEVKGKGVCRAQTMSNSGIK

SEQ ID NO: 10048 - protein, 326 aa, Homo sapiens; identical to SEQ ID NO: 10047

SEQ ID NO: 10049 - protein, 312 aa, Homo sapiens
MANNDAVLKRLEQKGAEADQIIEYLKQQVSLLKEKAILQATLREEKKLRVENAKLKKEIEELKQELIQAEIQNGVKQIPFPSGTPLHANSMVSENVIQSTAVTTVSSGTKEQIKGGTGDEKKAKEKIEKKGEKKEKKQQSIAGSADSKPIDVSRLDLRIGCIITARKHPDADSLYVEEVDVGEIAPRTVVSGLVNHVPLEQMQNRMVILLCNLKPAKMRGVLSQAMVMCASSPEKIEILAPPNGSVPGDRITFDAFPGEPDKELNPKKKIWEQIQPDLHTNDECVATYKGVPFEVKGKGVCRAQTMSNSGIK

SEQ ID NO: 10050 - protein, 336 aa, Homo sapiens
MLPAVAVSEPVVLRFMIFCRLLAKMANNDAVLKRLEQKGAEADQIIEYLKQQVSLLKEKAILQATLREEKKLRVENAKLKKEIEELKQELIQAEIQNGVKQIPFPSGTPLHANSMVSENVIQSTAVTTVSSGTKEQIKGGTGDEKKAKEKIEKKGEKKEKKQQSIAGSADSKPIDVSRLDLRIGCIITARKHPDADSLYVEEVDVGEIAPRTVVSGLVNHVPLEQMQNRMVILLCNLKPAKMRGVLSQAMVMCASSPEKIEILAPPNGSVPGDRITFDAFPGEPDKELNPKKKIWEQIQPDLHTNDECVATYKGVPFEVKGKGVCRAQTMSNSGIK

SEQ ID NO: 10051 - protein, 312 aa, Homo sapiens
MCSPQESGMTALSARMLTRSRSLGPGAGPRGCREEPGPLRRREAAAEARKSHSPVKRPRKAQRLRVAYEGSDSEKGEGAEPLKVPVWEPQDWQQQLVNIRAMRNKKDAPVDHLGTEHCYDSSAPPKVRRYQVLLSLMLSSQTKDQVTAGAMQRLRARGLTVDSILQTDDATLGKLIYPVGFWRSKVKYIKQTSAILQQHYGGDIPASVAELVALPGVGPKMAHLAMAVAWGTVSGIAVDTHVHRIANRLRWTKKATKSPEETRAALEEWLPRELWHEINGLLVGFGQQTCLPVHPRCHACLNQALCPAAQGL

SEQ ID NO: 10052 - protein, 390 aa, Homo sapiens [sequence omitted]

SEQ ID NO: 10053 - protein, 373 aa, Homo sapiens
MGRAGLEAPPPPCGVTGTPGARGLQGRVGPRPQSLAFRGCPPRASSLPGSPRCRRRCHTMAFVTRQFMRSVSSSSTASASAKKIIVKHVTVIGGGLMGAGIAQVAAATGHTVVLVDQTEDILAKSKKGIEESLRKVAKKKFAENPKAGDEFVEKTLSTIATSTDAASVVHSTDLVVEAIVENLKVKNELFKRLDKFAAEHTIFASNTSSLQITSIANATTRQDRFAGLHFFNPVPVMKLVEVIKTPMTSQKTFESLVDFSKALGKHPVSCKDTPGFIVNRLLVPYLMEAIRLYERGDASKEDIDTAMKLGAGYPMGPFELLDYVGLDTTKFIVDGWHEMDAENPLHQPSPSLNKLVAENKFGKKTGEGFYKYK

SEQ ID NO: 10054 - protein, 68 aa, Homo sapiens
MKLVEVIKTPMTSQKTFESLVDFSKALGKHPVSCKDTPGFIVNRLLVPYLMEAIRLYERGPPGFPVGL

SEQ ID NO: 10055 - protein, 258 aa, Homo sapiens
MSWLLFLAHRVALAALPCRRGSRGFGMFYAVRRGRKTGVFLTWNECRAQVDRFPAARFKKFATEDEAWAFVRKSASPEVSEGHENQHGQESEAKASKRLREPLDGDGHESAEPYAKHMKPSVEPAPPVSRDTFSYMGDFVVVYTDGCCSSNGRRRPRAGIGVYWGPGHPLNVGIRLPGRQTNQRAEIHAACKAIEQAKTQNINKLVLYTDSMFTINGITNWVQGWKKNGWKTSAGKEVINKEDFVALERLTQGMDIQW

SEQ ID NO: 10056 - protein, 286 aa, Homo sapiens
MSWLLFLAHRVALAALPCRRGSRGFGMFYAVRRGRKTGVFLTWNECRAQVDRFPAARFKKFATEDEAWAFVRKSASPEVSEGHENQHGQESEAKASKRLREPLDGDGHESAEPYAKHMKPSVEPAPPVSRDTFSYMGDFVVVYTDGCCSSNGRRRPRAGIGVYWGPGHPLNVGIRLPGRQTNQRAEIHAACKAIEQAKTQNINKLVLYTDSMFTINGITNWVQGWKKNGWKTSAGKEVINKEDFVALERLTQGMDIQWMHVPGHSGFIGNEEADRLAREGAKQSED

SEQ ID NO: 10057 - protein, 564 aa, Homo sapiens
MLANSASVRILIKGGKVVNDDCTHEADVYIENGIIQQVGRELMIPGGAKVIDATGKLVIPGGIDTSTHFHQTFMNATCVDDFYHGTKAALVGGTTMIIGHVLPDKETSLVDAYEKCRGLADPKVCCDYALHVGITWWAPKVKAEMETLVREKGVNSFQMFMTYKDLYMLRDSELYQVLHACKDIGAIARVHAENGELVAEGAKEALDLGITGPEGIEISRPEELEAEATHRVITIANRTHCPIYLVNVSSISAGDVIAAAKMQGKVVLAETTTAHATLTGLHYYHQDWSHAAAYVTVPPLRLDTNTSTYLMSLLANDTLNIVASDHRPFTTKQKAMGKEDFTKIPHGVSGVQDRMSVIWERGVVGGKMDENRFVAVTSSNAAKLLNLYPRKGRIIPGADADVVVWDPEATKTISASTQVQGGDFNLYENMRCHGVPLVTISRGRVVYENGVFMCAEGTGKFCPLRSFPDTVYKKLVQREKTLKVRGVDRTPYLGDVAVVVHPGKKEMGTPLADTPTRPVTRHGGMRDLHESSFSLSGSQIDDHVPKRASARILAPPGGRSSGIW

SEQ ID NO: 10058 - protein, 375 aa, Homo sapiens
MLKMGSLWPRQGAKEALDLGITGPEGIEISRPEELEAEATHRVITIANRTHCPIYLVNVSSISAGDVIAAAKMQGKVVLAETTTAHATLTGLHYYHQDWSHAAAYVTVPPLRLDTNTSTYLMSLLANDTLNIVASDHRPFTTKQKAMGKEDFTKIPHGVSGVQDRMSVIWERGVVGGKMDENRFVAVTSSNAAKLLNLYPRKGRIIPGADADVVVWDPEATKTISASTQVQGGDFNLYENMRCHGVPLVTISRGRVVYENGVFMCAEGTGKFCPLRSFPDTVYKKLVQREKTLKVRGVDRTPYLGDVAVVVHPGKKEMGTPLADTPTRPVTRHGGMRDLHESSFSLSGSQIDDHVPKRASARILAPPGGRSSGIW

SEQ ID NO: 10059 - protein, 375 aa, Homo sapiens; identical to SEQ ID NO: 10058

SEQ ID NO: 10060 - protein, 175 aa, Homo sapiens
MFVMGVNHEKYDNNLKIVGSAFCTTNCLAPLAKVIHDNFGIVEGLMTIVHAITATQKTVDGPSGKLWRDGHGALQNIIPASTGTAKAMGKVIPELNGKLTGMAFCVPTAVSVVDLTCRLEKPAKYDDTKKVVKQASEGPLKGILGYTEHLISWYDNEFGYSNRMVDLMAHMASKE

SEQ ID NO: 10061 - protein, 205 aa, Homo sapiens [sequence omitted]

SEQ ID NO: 10062 - protein, 302 aa, Homo sapiens
MGKVKVGVNRFGRTGRLVTRAAFNSGKVDIVAINDPFIDLNYMVYMFQYDSTHSKFHGTVKAENGKLVINGNPITIFQERDPSKIKWGDAGAEYVMESTGVFTTIEKYDNNLKIVGSAFCTTNCLAPLAKVIHDNFGIVEGLMTIVHAITATQKTVDGPSGKLWRDGHGALQNIIPASTGTAKAMGKVIPELNGKLTGMAFCVPTAVSVVDLTCRLEKPAKYDDTKKVVKQASEGPLKGILGYTEHQVVSSDFNSNTHSSTFNAGAVIALNNHFFKLISWYDNEFGYSNRMVDLMAHMASKE

SEQ ID NO: 10063 - protein, 266 aa, Homo sapiens
MGKVKVGVNRFGRTGRLVTRAAFNSGKVDIVAINDPFIDLNYMVYMFQYDSTHSKFHGTVKAENGKLVINGNPITIFQERDPSKIKWGDAGAEYVMESTGVFTTIEKYDNNLKIVGSAFCTTNCLAPLAKVIHDNFGIVEGLMTIVHAITATQKTVDGPSGKLWRDGHGALQNIIPASTGTAKAMGKVIPELNGKLTGMAFCVPTAVSVVDLTCRLEKPAKYDDTKKVVKQASEGPLKGILGYTEHQEERDPHCWGVPATLSPPPH

SEQ ID NO: 10064 - protein, 120 aa, Homo sapiens
MPVSFPFSSGMTLPIAFAVPVEAGMMFWRAPWPSRHSFPEGPSTVFWVAVMAWTMVMSPSTIPKLSWMTLARGAKQLVVQKALPTILRLLSYFSWFTPMTNIGASAEGAEMMTLLAPPCK

SEQ ID NO: 10065 - protein, 208 aa, Homo sapiens
TSSQNISLPEYISEHFHEPFPEGFSKLEEFTQNTFVKICMEEPRFQANFPQTWLWISGPLCLYCAERLYRYMRSNKPVTIILVTSHPSDVMEIRMVKENFKARPGQYITLHCPSISALENHPFTLTMCPTETKATFGVHLKIVEDWTERFRDLLLPPSSQDSEILPFIQSRNYPKLYIDGPFGSPFEESLNYEVSLCMAGVIGVTPFA

SEQ ID NO: 10066 - protein, 240 aa, Homo sapiens
MRNAIIQGLFYGSLTFGIWTALLFIYLHHNHVSSWQKKSQEPLSAWSPGKKVHQQIIYGSEQIPKPHVIVKRTDEDKAKSMLGTDFNHTNPELHKELLKYGFNVIISRSLGIEREVPDTRSKMRLQKHYPARLPTASIVICFYNEECNALFQTMSSVTNLTPHYFLEEIILVDDMSKVDDLKEKLDYHLETFRGKVGTFLGTRASDGVTEIFPSERDSSAGRPSMSVSASSEEWKSIPAI

SEQ ID NO: 10067 - protein, 443 aa, Homo sapiens
MRNAIIQGLFYGSLTFGIWTALLFIYLHHNHVSSWQKKSQEPLSAWSPGKKVHQQIIYGSEQIPKPHVIVKRTDEDKAKSMLGTDFNHTNPELHKELLKYGFNVIISRSLGIEREVPDTRSKMRLQKHYPARLPTASIVICFYNEECNALFQTMSSVTNLTPHYFLEEIILVDDMSKVDDLKEKLDYHLETFRGKVKIIRNKKREGLIRARLIGASHASGDVLVFLDSHCEVNRVWLEPLLHAIAKDPKMVVCPLIDVIDDRTLEYKPSPLVRGTFDWNLQFKWDNVFSYEMDGPEGSTKPIRSPAMSGGIFAIRRHYFNEIGQYDKDMDFWGRENLELSLRIWMCGGQLFIIPCSRVGHISKKQTGKPSTIISAMTHNYLRLVHVWLDEYKEQFFLRKPGLKYVTYGNIRERVELRKRLGCKSFQWYLDNVFPELEASVNSL

SEQ ID NO: 10068 - protein, 130 aa, Homo sapiens
MRNAIIQGLFYGSLTFGIWTALLFIYLHHNHVSSWQKKSQEPLSAWSPGKKVHQQIIYGSEQIPKPHVIVKRTDEDKAKSMLGTDFNHTNPELHKELLKYGFNVIISRSLGIEREVPDTRSKICTVTLLP

SEQ ID NO: 10069 - protein, 130 aa, Homo sapiens; identical to SEQ ID NO: 10068

SEQ ID NO: 10070 - protein, 137 aa, Homo sapiens
MGSVTVRYFCYGCLFTSATWTVLLFVYFNFSEVTQPLKNACDYSDPNQIWIYNEEHELVLNSLLCLDMSETRSSDPPRLMKCHGSGGSQQWTFGKNNRLYQVSVGQCLRAVDPLGQKGSVAMAICDGSSSQQWHLEG

SEQ ID NO: 10071 - protein, 608 aa, Homo sapiens
MGSVTVRYFCYGCLFTSATWTVLLFVYFNFSEVTQPLKNVPVKGSGPHGPSPKKFYPRFTRGPSRVLEPQFKANKIDDVIDSRVEDPEEGHLKFSSELGMIFNERDQELRDLGYQKHAFNMLISDRLGYHRDVPDTRNAACKEKFYPPDLPAASVVICFYNEAFSALLRTVHSVIDRTPAHLLHEIILVDDDSDFDDLKGELDEYVQKYLPGKIKVIRNTKREGLIRGRMIGAAHATGEVLVFLDSHCEVNVMWLQPLLAAIREDRHTVVCPVIDIISADTLAYSSSPVVRGGFNWGLHFKWDLVPLSELGRAEGATAPIKSPTMAGGLFAMNRQYFHELGQYDSGMDIWGGENLEISFRIWMCGGKLFIIPCSRVGHIFRKRRPYGSPEGQDTMTHNSLRLAHVWLDEYKEQYFSLRPDLKTKSYGNISERVELRKKLGCKSFKWYLDNVYPEMQISGSHAKPQQPIFVNRGPKRPKVLQRGRLYHLQTNKCLVAQGRPSQKGGLVVLKACDYSDPNQIWIYNEEHELVLNSLLCLDMSETRSSDPPRLMKCHGSGGSQQWTFGKNNRLYQVSVGQCLRAVDPLGQKGSVAMAICDGSSSQQWHLEG

SEQ ID NO: 10072 - protein, 1134 aa, Homo sapiens [sequence omitted]

SEQ ID NO: 10073 - protein, 574 aa, Homo sapiens
MPRAPRCRAVRSLLRSHYREVLPLATFVRRLGPQGWRLVQRGDPAAFRALVAQCLVCVPWDARPPPAAPSFRQVSCLKELVARVLQRLCERGAKNVLAFGFALLDGARGGPPEAFTTSVRSYLPNTVTDALRGSGAWGLLLRRVGDDVLVHLLARCALFVLVAPSCAYQVCGPPLYQLGAATQARPPPHASGPRRRLGCERAWNHSVREAGVPLGLPAPGARRRGGSASRSLPLPKRPRRGAAPEPERTPVGQGSWAHPGRTRGPSDRGFCVVSPARPAEEATSLEGALSGTRHSHPSVGRQHHAGPPSTSRPPRPWDTPCPPVYAETKHFLYSSGDKEQLRPSFLLSSLRPSLTGARRLVETIFLGSRPWMPGTPRRLPRLPQRYWQMRPLFLELLGNHAQCPYGVLLKTHCPLRAAVTPAAGVCAREKPQGSVAAPEEEDTDPRRLVQLLRQHSSPWQVYGFVRACLRRLVPPGLWGSRHNERRFLRNTKKFISLGKHAKLSLQELTWKMSVRDCAWLRRSPGEEVVAVEGPGPRAECSRGSEKGAGRALVLLSPSSRGHTWLFAQDVEWTR

SEQ ID NO: 10074 - protein, 1175 aa, Homo sapiens [sequence omitted]

SEQ ID NO: 10075 - protein, 1117 aa, Homo sapiens
METFFRRHFRGKVPGPGEGQQRPSSVGLPTGKARRRSPAGQASSSLAQRRRSSAQLQGCLLSCGVRAQGSSRRRSSTVPPSCNPRFIVDKVLTPQPTTVGAQLLGAPLLLTGLVGMNEEEGVQEDVVAEASSAIQPGTKTPGPPPPRGAQPLLPLPRYLRRASSHLLPADAVYDHALWGLHGYYRRLSQRRPSGQHPGPGGRRASGTTAGTMLPTRVRPLSRRRQVALRRKAAGPQAWSALLAKAITKSGLQHLAPPPPTPGAPCSESERQIRSTVDWSESATYGEHIWFETNVSGDFCYVGEQYCVARMLKSVSRRKCAACKIVVHTPCIEQLEKINFRCKPSFRESGSRNVREPTFVRHHWVHRRRQDGKCRHCGKGFQQKFTFHSKEIVAISCSWCKQAYHSKVSCFMLQQIEEPCSLGVHAAVVIPPTWILRARRPQNTLKASKKKKRASFKRKSSKKGPEEGRWRPFIIRPTPSPLMKPLLVFVNPKSGGNQGAKIIQSFLWYLNPRQVFDLSQGGPKEALEMYRKVHNLRILACGGDGTVGWILSTLDQLRLKPPPPVAILPLGTGNDLARTLNWGGGYTDEPVSKILSHVEEGNVVQLDRWDLHAEPNPEAGPEDRDEGATDRLPLDVFNNYFSLGFDAHVTLEFHESREANPEKFNSRFRNKMFYAGTAFSDFLMGSSKDLAKHIRVVCDGMDLTPKIQDLKPQCVVFLNIPRYCAGTMPWGHPGEHHDFEPQRHDDGYLEVIGFTMTSLAALQVGGHGERLTQCREVVLTTSKAIPVQVDGEPCKLAASRIRIALRNQATMVQKAKRRSAAPLHSDQQPVPEQLRIQVSRVSMHDYEALHYDKEQLKEASVPLGTVVVPGDSDLELCRAHIERLQQEPDGAGAKSPTCQKLSPKWCFLDATTASRFYRIDRAQEHLNYVTEIAQDEIYILDPELLGASARPDLPTPTSPLPTSPCSPTPRSLQGDAAPPQGEELIEAAKRNDFCKLQELHRAGGDLMHRDEQSRTLLHHAVSTGSKDVVRYLLDHAPPEILDAVEENGETCLHQAAALGQRTICHYIVEAGASLMKTDQQGDTPRQRAEKAQDTELAAYLENRQHYQMIQREDQETAV

SEQ ID NO: 10076 - protein, 928 aa, Homo sapiens
MEPRDGSPEARSSDSESASASSSGSERDAGPEPDKAPRRLNKRRFPGLRLFGHRKAITKSGLQHLAPPPPTPGAPCSESERQIRSTVDWSESATYGEHIWFETNVSGDFCYVGEQYCVARMLKSVSRRKCAACKIVVHTPCIEQLEKINFRCKPSFRESGSRNVREPTFVRHHWVHRRRQDGKCRHCGKGFQQKFTFHSKEIVAISCSWCKQAYHSKVSCFMLQQIEEPCSLGVHAAVVIPPTWILRARRPQNTLKASKKKKRASFKRKSSKKGPEEGRWRPFIIRPTPSPLMKPLLVFVNPKSGGNQGAKIIQSFLWYLNPRQVFDLSQGGPKEALEMYRKVHNLRILACGGDGTVGWILSTLDQLRLKPPPPVAILPLGTGNDLARTLNWGGGYTDEPVSKILSHVEEGNVVQLDRWDLHAEPNPEAGPEDRDEGATDRLPLDVFNNYFSLGFDAHVTLEFHESREANPEKFNSRFRNKMFYAGTAFSDFLMGSSKDLAKHIRVVCDGMDLTPKIQDLKPQCVVFLNIPRYCAGTMPWGHPGEHHDFEPQRHDDGYLEVIGFTMTSLAALQVGGHGERLTQCREVVLTTSKAIPVQVDGEPCKLAASRIRIALRNQATMVQKAKRRSAAPLHSDQQPVPEQLRIQVSRVSMHDYEALHYDKEQLKEASVPLGTVVVPGDSDLELCRAHIERLQQEPDGAGAKSPTCQKLSPKWCFLDATTASRFYRIDRAQEHLNYVTEIAQDEIYILDPELLGASARPDLPTPTSPLPTSPCSPTPRSLQGDAAPPQGEELIEAAKRNDFCKLQELHRAGGDLMHRDEQSRTLLHHAVSTGSKDVVRYLLDHAPPEILDAVEENGETCLHQAAALGQRTICHYIVEAGASLMKTDQQGDTPRQRAEKAQDTELAAYLENRQHYQMIQREDQETAV

SEQ ID NO: 10077 - protein, 913 aa, Homo sapiens
MEPRDGSPEARSSDSESASASSSGSERDAGPEPDKAPRRLNKRRFPGLRLFGHRKAITKSGLQHLAPPPPTPGAPCSESERQIRSTVDWSESATYGEHIWFETNVSGDFCYVGEQYCVARMLQKSVSRRKCAACKIVVHTPCIEQLEKINFRCKPSFRESGSRNVREPTFVRHHWVHRRRQDGKCRHCGKGFQQKFTFHSKEIVAISCSWCKQAYHSKVSCFMLQQIEEPCSLGVHAAVVIPPTWILRARRPQNTLKASKKKKRASFKRKSSKKGPEEGRWRPFIIRPTPSPLMKPLLVFVNPKSGGNQGAKIIQSFLWYLNPRQVFDLSQGGPKEALEMYRKVHNLRILACGGDGTVGWILSTLDQLRLKPPPPVAILPLGTGNDLARTLNWGGGYTDEPVSKILSHVEEGNVVQLDRWDLHAEPNPEAGPEDRDEGATDRLPLDVFNNYFSLGFDAHVTLEFHESREANPEKFNSRFRNKMFYAGTAFSDFLMGSSKDLAKHIRVVCDGMDLTPKIQDLKPQCVVFLNIPRYCAGTMPWGHPGEHHDFEPQRHDDGYLEVIGFTMTSLAALQVGGHGERLTQCREVVLTTSKAIPVQVDGEPCKLAASRIRIALRNQATMVQKAKRRSAAPLHSDQQPVPEQLRIQVSRVSMHDYEALHYDKEQLKEASVPLGTVVVPGDSDLELCRAHIERLQQEPDGAGAKSPTCQKLSPKWCFLDATTASRFYRIDRAQEHLNYVTEIAQDEIYILDPELLGASARPDLPTPTSPLPTSPCSPTPRSLQGDAAPPQGEELIEAAKRNDFCKLQELHRAGGDLMHRDEQSRTLLHHAVSTGSKDVVRYLLDHAPPEILDAVEENGETCLHQAAALGQRTICHYIVEAGPSSRATLPGSGLRRLRTPSWPPTWRTGSTTR

SEQ ID NO: 10078 - protein, 829 aa, Homo sapiens
MGCAPSIHISERLVAEDAPSPAAPPLSSGGPRLPQGQKTAALPRTRGAGLLESELRDGSGKKVAVADVQFGPMRFHQDQLQVLLVFTKEDNQCNGFCRACEKAGFKCTVTKEAQAVLACFLDKHHDIIIIDHRNPRQLDAEALCRSIRSSKLSENTVIVGVVRRVDREELSVMPFISAGFTRRYVENPNIMACYNELLQLEFGEVRSQLKLRACNSVFTALENSEDAIEITSEDRFIQYANPAFETTMGYQSGELIGKELGEVPINEKKADLLDTINSCIRIGKEWQGIYYAKKKNGDNIQQNVKIIPVIGQGGKIRHYVSIIRVCNGNNKAEKISECVQSDTHTDNQTGKHKDRRKGSLDVKAVASRATEVSSQRRHSSMARIHSMTIEAPITKVINIINAAQESSPMPVTEALDRVLEILRTTELYSPQFGAKDDDPHANDLVGGLMSDGLRRLSGNEYVLSTKNTQMVSSNIITPISLDDVPPRIARAMENEEYWDFDIFELEAATHNRPLIYLGLKMFARFGICEFLHCSESTLRSWLQIIEANYHSSNPYHNSTHSADVLHATAYFLSKERIKETLDPIDEVAALIAATIHDVDHPGRTNSFLCNAGSELAILYNDTAVLESHHAALAFQLTTGDDKCNIFKNMERNDYRTLRQGIIDMVLATEMTKHFEHVNKFVNSINKPLATLEENGETDKNQEVINTMLRTPENRTLIKRMLIKCADVSNPCRPLQYCIEWAARISEEYFSQTDEEKQQGLPVVMPVFDRNTCSIPKSQISFIDYFITDMFDAWDAFVDLPDLMQHLDNNFKYWKGLDEMKLRNLRPPPE

SEQ ID NO: 10079 - protein, 781 aa, Homo sapiens
MGCAPSIHISERLVAEDAPSPAAPPLSSGGPRLPQGQKTAALPRTRGAGLLESELRDGSGKKVAVADVQFGPMRFHQDQLQVLLVFTKEDNQCNGFCRACEKAGFKCTVTKEAQAVLACFLDKHHDIIIIDHRNPRQLDAEALCRSIRSSKLSENTVIVGVVRRACNSVFTALENSEDAIEITSEDRFIQYANPAFETTMGYQSGELIGKELGEVPINEKKADLLDTINSCIRIGKEWQGIYYAKKKNGDNIQQNVKIIPVIGQGGKIRHYVSIIRVCNGNNKAEKISECVQSDTHTDNQTGKHKDRRKGSLDVKAVASRATEVSSQRRHSSMARIHSMTIEAPITKVINIINAAQESSPMPVTEALDRVLEILRTTELYSPQFGAKDDDPHANDLVGGLMSDGLRRLSGNEYVLSTKNTQMVSSNIITPISLDDVPPRIARAMENEEYWDFDIFELEAATHNRPLIYLGLKMFARFGICEFLHCSESTLRSWLQIIEANYHSSNPYHNSTHSADVLHATAYFLSKERIKETLDPIDEVAALIAATIHDVDHPGRTNSFLCNAGSELAILYNDTAVLESHHAALAFQLTTGDDKCNIFKNMERNDYRTLRQGIIDMVLATEMTKHFEHVNKFVNSINKPLATLEENGETDKNQEVINTMLRTPENRTLIKRMLIKCADVSNPCRPLQYCIEWAARISEEYFSQTDEEKQQGLPVVMPVFDRNTCSIPKSQISFIDYFITDMFDAWDAFVDLPDLMQHLDNNFKYWKGLDEMKLRNLRPPPE

SEQ ID NO: 10080 - protein, 783 aa, Homo sapiens
MGCAPSIHISERLVAEDAPSPAAPPLSSGGPRLPQGQKTAALPRTRGAGLLESELRDGSGKKVAVADVQFGPMRFHQDQLQVLLVFTKEDNQCNGFCRACEKAGFKCTVTKEAQAVLACFLDKHHDIIIIDHRNPRQLDAEALCRSIRSSKLSENTVIVGVVRRVDREELSVMPFISAGFTRRYVENPNIMACYNELLQLEFGEVRSQLKLRACNSVFTALENSEDAIEITSEDRFIQEWQGIYYAKKKNGDNIQQNVKIIPVIGQGGKIRHYVSIIRVCNGNNKAEKISECVQSDTHTDNQTGKHKDRRKGSLDVKAVASRATEVSSQRRHSSMARIHSMTIEAPITKVINIINAAQESSPMPVTEALDRVLEILRTTELYSPQFGAKDDDPHANDLVGGLMSDGLRRLSGNEYVLSTKNTQMVSSNIITPISLDDVPPRIARAMENEEYWDFDIFELEAATHNRPLIYLGLKMFARFGICEFLHCSESTLRSWLQIIEANYHSSNPYHNSTHSADVLHATAYFLSKERIKETLDPIDEVAALIAATIHDVDHPGRTNSFLCNAGSELAILYNDTAVLESHHAALAFQLTTGDDKCNIFKNMERNDYRTLRQGIIDMVLATEMTKHFEHVNKFVNSINKPLATLEENGETDKNQEVINTMLRTPENRTLIKRMLIKCADVSNPCRPLQYCIEWAARISEEYFSQTDEEKQQGLPVVMPVFDRNTCSIPKSQISFIDYFITDMFDAWDAFVDLPDLMQHLDNNFKYWKGLDEMKLRNLRPPPE

SEQ ID NO: 10081 - protein, 1113 aa, Homo sapiens
MSGREPSLEILPRTSLHSIPVTVEVKPVLPRAMPSSMGGGGGGSPSPVELRGALVGSVDPTLREQQLQQELLALKQQQQLQKQLLFAEFQKQHDHLTRQHEVQLQKHLKQQQEMLAAKQQQEMLAAKRQQELEQQRQREQQRQEELEKQRLEQQLLILRNKEKSKESAIASTEVKLRLQEFLLSKSKEPTPGGLNHSLPQHPKCWGAHHASLDQSSPPQSGPPGTPPSYKLPLPGPYDSRDDFPLRKTASEPNLKVRSRLKQKVAERRSSPLLRRKDGTVISTFKKRAVEITGAGPGASSVCNSAPGSGPSSPNSSHSTIAENGFTGSVPNIPTEMLPQHRALPLDSSPNQFSLYTSPSLPNISLGLQATVTVTNSHLTASPKLSTQQEAERQALQSLRQGGTLTGKFMSTSSIPGCLLGVALEGDGSPHGHASLLQHVLLLEQARQQSTLIAVPLHGQSPLVTGERVATSMRTVGKLPRHRPLSRTQSSPLPQSPQALQQLVMQQQHQQFLEKQKQQQLQLGKILTKTGELPRQPTTHPEETEEELTEQQEVLLGEGALTMPREGSTESESTQEDLEEEDEEEDGEEEEDCIQVKDEEGESGAEEGPDLEEPGAGYKKLFSDAQPLQPLQVYQAPLSLATVPHQALGRTQSSPAAPGGMKSPPDQPVKHLFTTGVVYDTFMLKHQCMCGNTHVHPEHAGRIQSIWSRLQETGLLSKCERIRGRKATLDEIQTVHSEYHTLLYGTSPLNRQKLDSKKLLGPISQKMYAVLPCGGIGVDSDTVWNEMHSSSAVRMAVGCLLELAFKVAAGELKNGFAIIRPPGHHAEESTAMGFCFFNSVAITAKLLQQKLNVGKVLIVDWDIHHGNGTQQAFYNDPSVLYISLHRYDNGNFFPGSGAPEEVGGGPGVGYNVNVAWTGGVDPPIGDVEYLTAFRTVVMPIAHEFSPDVVLVSAGFDAVEGHLSPLGGYSVTARCFGHLTRQLMTLAGGRVVLALEGGHDLTAICDASEACVSALLSVELQPLDEAVLQQKPNINAVATLEKVIEIQSKHWSCVQKFAAGLGRSLREAQAGETEEAETVSAMALLSVGAEQAQAAAAREHSPRPAEEPMEQEPAL

SEQ ID NO: 10082 - protein, 881 aa, Homo sapiens [sequence omitted]

SEQ ID NO: 10083 - protein, 1122 aa, Homo sapiens
MNSPNESDGMSGREPSLEILPRTSLHSIPVTVEVKPVLPRAMPSSMGGGGGGSPSPVELRGALVGSVDPTLREQQLQQELLALKQQQQLQKQLLFAEFQKQHDHLTRQHEVQLQKHLKQQQEMLAAKQQQEMLAAKRQQELEQQRQREQQRQEELEKQRLEQQLLILRNKEKSKESAIASTEVKLRLQEFLLSKSKEPTPGGLNHSLPQHPKCWGAHHASLDQSSPPQSGPPGTPPSYKLPLPGPYDSRDDFPLRKTASEPNLKVRSRLKQKVAERRSSPLLRRKDGTVISTFKKRAVEITGAGPGASSVCNSAPGSGPSSPNSSHSTIAENGFTGSVPNIPTEMLPQHRALPLDSSPNQFSLYTSPSLPNISLGLQATVTVTNSHLTASPKLSTQQEAERQALQSLRQGGTLTGKFMSTSSIPGCLLGVALEGDGSPHGHASLLQHVLLLEQARQQSTLIAVPLHGQSPLVTGERVATSMRTVGKLPRHRPLSRTQSSPLPQSPQALQQLVMQQQHQQFLEKQKQQQLQLGKILTKTGELPRQPTTHPEETEEELTEQQEVLLGEGALTMPREGSTESESTQEDLEEEDEEEDGEEEEDCIQVKDEEGESGAEEGPDLEEPGAGYKKLFSDAQPLQPLQVYQAPLSLATVPHQALGRTQSSPAAPGGMKSPPDQPVKHLFTTGVVYDTFMLKHQCMCGNTHVHPEHAGRIQSIWSRLQETGLLSKCERIRGRKATLDEIQTVHSEYHTLLYGTSPLNRQKLDSKKLLGPISQKMYAVLPCGGIGVDSDTVWNEMHSSSAVRMAVGCLLELAFKVAAGELKNGFAIIRPPGHHAEESTAMGFCFFNSVAITAKLLQQKLNVGKVLIVDWDIHHGNGTQQAFYNDPSVLYISLHRYDNGNFFPGSGAPEEVGGGPGVGYNVNVAWTGGVDPPIGDVEYLTAFRTVVMPIAHEFSPDVVLVSAGFDAVEGHLSPLGGYSVTARCFGHLTRQLMTLAGGRVVLALEGGHDLTAICDASEACVSALLSVELQPLDEAVLQQKPNINAVATLEKVIEIQSKHWSCVQKFAAGLGRSLREAQAGETEEAETVSAMALLSVGAEQAQAAAAREHSPRPAEEPMEQEPAL

SEQ ID NO: 10084 - protein, 1739 aa, Homo sapiens
MMRNKDKSQEEDSSLHSNASSHSASEEASGSDSGSQSESEQGSDPGSGHGSESNSSSESSESQSESESESAGSKSQPVLPEAKEKPASKKERIADVKKMWEEYPDVYGVRRSNRSRQEPSRFNIKEEASSGSESGSPKRRGQRQLKKQEKWKQEPSEDEQEQGTSAESEPEQKKVKARRPVPRRTVPKPRVKKQPKTQRGKRKKQDSSDEDDDDDEAPKRQTRRRAAKNVSYKEDDDFETDSDDLIEMTGEGVDEQQDNSETIEKVLDSRLGKKGATGASTTVYAIEANGDPSGDFDTEKDEGEIQYLIKWKGWSYIHSTWESEESLQQQKVKGLKKLENFKKKEDEIKQWLGKVSPEDVEYFNCQQELASELNKQYQIVERVIAVKTSKSTLGQTDFPAHSRKPAPSNEPEYLCKWMGLPYSECSWEDEALIGKKFQNCIDSFHSRNNSKTIPTRECKALKQRPRFVALKKQPAYLGGENLELRDYQLEGLNWLAHSWCKNNSVILADEMGLGKTIQTISFLSYLFHQHQLYGPFLIVVPLSTLTSWQREFEIWAPEINVVVYIGDLMSRNTIREYEWIHSQTKRLKFNALITTYEILLKDKTVLGSINWAFLGVDEAHRLKNDDSLLYKTLIDFKSNHRLLITGTPLQNSLKELWSLLHFIMPEKFEFWEDFEEDHGKGRENGYQSLHKVLEPFLLRRVKKDVEKSLPAKVEQILRVEMSALQKQYYKWILTRNYKALAKGTRGSTSGFLNIVMELKKCCNHCYLIKPPEENERENGQEILLSLIRSSGKLILLDKLLTRLRERGNRVLIFSQMVRMLDILAEYLTIKHYPFQRLDGSIKGEIRKQALDHFNADGSEDFCFLLSTRAGGLGINLASADTVVIFDSDWNPQNDLQAQARAHRIGQKKQVNIYRLVTKGTVEEEIIERAKKKMVLDHLVIQRMDTTGRTILENNSGRSNSNPFNKEELTAILKFGAEDLFKELEGEESEPQEMDIDEILRLAETRENEVSTSATDELLSQFKVANFATMEDEEELEERPHKDWDEIIPEEQRKKVEEEERQKELEEIYMLPRIRSSTKKAQTNDSDSDTESKRQAQRSSASESETEDSDDDKKPKRRGRPRSVRKDLVEGFTDAEIRRFIKAYKKFGLPLERLECIARDAELVDKSVADLKRLGELIHNSCVSAMQEYEEQLKENASEGKGPGKRRGPTIKISGVQVNVKSIIQHEEEFEMLHKSIPVDPEEKKKYCLTCRVKAAHFDVEWGVEDDSRLLLGIYEHGYGNWELIKTDPELKLTDKILPVETDKKPQGKQLQTRADYLLKLLRKGLEKKGAVTGGEEAKLKKRKPRVKKENKVPRLKEEHGIELSSPRHSDNPSEEGEVKDDGLEKSPMKKKQKKKENKENKEKQMSSRKDKEGDKERKKSKDKKEKPKSGDAKSSSKSKRSQGPVHITAGSEPVPIGEDEDDDLDQETFSICKERMRPVKKALKQLDKPDKGLNVQEQLEHTRNCLLKIGDRIAECLKAYSDQEHIKLWRRNLWIFVSKFTEFDARKLHKLYKMAHKKRSQEEEEQKKKDDVTGGKKPFRPEASGSSRDSLISQSHTSHNLHPQKPHLPASHGPQMHGHPRDNYNHPNKRHFSNADRGDWQRERKFNYGGGNNNPPWGSDRHHQYEQHWYKDHHYGDRRHMDAHRSGSYRPNNMSRKRPYDQYSSDRDHRGHRDYYDRYAKGCETPGANLCQELFLGRK

SEQ ID NO: 10085 - protein, 1739 aa, Homo sapiens; identical to SEQ ID NO: 10084

SEQ ID NO: 10086 - protein, 49 aa, Homo sapiens [sequence omitted]

SEQ ID NO: 10087 - protein, 1739 aa, Homo sapiens; identical to SEQ ID NO: 10084

SEQ ID NO: 10088 - protein, 66 aa, Homo sapiens
MVHHLSCGVNVESVNQRQSSQSWEGGSRWRLCLRESALCSLPLPHFTQLSLTFGQPQGAPVAPCLS

SEQ ID NO: 10089 - protein, 1857 aa, Homo sapiens [sequence omitted]

SEQ ID NO: 10090 - protein, 389 aa, Homo sapiens
MIRNGRGAAGGAEQPGPGGRRAVRVWCDGCYDMVHYGHSNQLRQARAMGDYLIVGVHTDEEIAKHKGPPVFTQEERYKMVQAIKWVDEVVPAAPYVTTLETLDKYNCDFCVHGNDITLTVDGRDTYEEVKQAGRYRECKRTQGVSTTDLVGRMLLVTKAHHSSQEMSSEYREYADSFGKCPGGRNPWTGVSQFLQTSQKIIQFASGKEPQPGETVIYVAGAFDLFHIGHVDFLEKVHRLAERPYIIAGLHFDQEVNHYKGKNYPIMNLHERTLSVLACRYVSEVVIGAPYAVTAELLSHFKVDLVCHGKTEIIPDRDGSDPYQEPKRRGIFRQIDSGSNLTTDLIVQRIITNRLEYEARNQKKEAKELAFLEAARQQAAQPLGERDGDF

SEQ ID NO: 10091 - protein, 219 aa, Homo sapiens
MPSAPLSGPVLALILNILKGYNFSWESVETPEQKGLTYHRIVEAFWFAYAKRTLLGDPKFVNVTEVVRNMTSEFFAAQLWAQISDNTTHTISYYKPKFYTPDDRGTAHLSVITEDGSAVSATSTINLYFGSKVCSPVSGILFNNEWTTSALPASPMSLGYPPHLPISSSQGSSRSRPCSQRSWWARTARSGWWWELLGARRSPQPLHWPSSTTSGSAMT

SEQ ID NO: 10092 - protein, 377 aa, Homo sapiens
MFNSLEQSQKGGLSVAVPGEIRGYELAHQRHGRLPWARLFQPSIQLARQGFPVGKGLAAVLENKRTVIEQQPVFEVFCRDRKVLREGERLTLPRVADTYETLAIEGAQAFYNGSLMAQIVKDIQAAVRGIVTAEDLNNYCAELIEHPLNISLGDAVLYMPSAPLSGPVLALILNILKGYNFSWESVETPEQKGLTYHRIVEAFWFAYAKRTLLGDPKFVNVTEVVRNMTSEFFAAQLWAQISDNTTHTISYYKPKFYTPDDRGTAHLSVITEDGSAVSATSTINLYFGSKVCSPVSGILFNNEWTTSALPASPMSLGYPPHLPISSSQGSSRSRPCSQRSWWARTARSGWWWELLGARRSPQPLHWPSSTTSGSAMT

SEQ ID NO: 10093 - protein, 406 aa, Homo sapiens
MFNSLEQSQKGGLSVAVPGEIRGYELAHQRHGRLPWARLFQPSIQLARQGFPVGKGLAAVLENKRTVIEQQPVLCEVFCRDRKVLREGERLTLPRVADTYETLAIEGAQAFYNGSLMAQIVKDIQAAVRGIVTAEDLNNYCAELIEHPLNISLGDAVLYMPSAPLSGPVLALILNILKGYNFSWESVETPEQKGLTYHRIVEAFWFAYAKRTLLGDPKPALGSRQVVRNMTSEFFAAQLWAQISDNTTHTISYYKPKFYTPDDRGTAHLSVITEDGSAVSATSTINLYFGSKVCSPVSGILFNNEWTTSALPASPMSLGYPPHLPISSSQGSSRSRPCSQRSWWARTARSGWWWELLGARRSPQPLHWYASPLFSLALPTPHSPQAMLITLPCPRPSSTTSGSAMT

SEQ ID NO: 10094 - protein, 387 aa, Homo sapiens
MPERWPPGWPLPACSTAWSRGLSVAVPGEIRGYELAHQRHGRLPWARLFQPSIQLARQGFPVGKGLAAVLENKRTVIEQQPVLCEVFCRDRKVLREGERLTLPRVADTYETLAIEGAQAFYNGSLMAQIVKDIQAAVRGIVTAEDLNNYCAELIEHPLNISLGDAVLYMPSAPLSGPVLALILNILKGYNFSWESVETPEQKGLTYHRIVEAFWFAYAKRTLLGDPKFVNVTEVVRNMTSEFFAAQLWAQISDNTTHTISYYKPKFYTPDDRGTAHLSVITEDGSAVSATSTINLYFGSKVCSPVSGILFNNEWTTSALPASPMSLGYPPHLPISSSQGSSRSRPCSQRSWWARTARSGWWWELLGARRSPQPLHWPSSTTSGSAMT

SEQ ID NO: 10095 - protein, 150 aa, Homo sapiens
MTSEFFAAQLWAQISDNTTHTISYYKPKFYTPDDRGTAHLSVITEDGSAVSATSTINLYFGSKVCSPVSGILFNNEWTTSALPASPMSLGYPPHLPISSSQGSSRSRPCSQRSWWARTARSGWWWELLGARRSPQPLHWPSSTTSGSAMT

SEQ ID NO: 10096 - protein, 378 aa, Homo sapiens
MFNSLEQSQKGGLSVAVPGEIRGYELAHQRHGRLPWARLFQPSIQLARQGFPVGKGLAAVLENKRTVIEQQPVLWHVFCRDRKVLREGERLTLPRVADTYETLAIEGAQAFYNGSLMAQIVKDIQAAVRGIVTAEDLNNYCAELIEHPLNISLGDAVLYMPSAPLSGPVLALILNILKGYNFSWESVETPEQKGLTYHRIVEAFWFAYAKRTLLGDPKFVNVTEVVRNMTSEFFAAQLWAQISDNTTHTISYYKPKFYTPDDRGTAHLSVITEDGSAVSATSTINLYFGSKVCSPVSGILFNNEWTTSALPASPMSLGYPPHLPISSSQGSSRSRPCSQRSWWARTARSGWWWELLGARRSPQPLHWPSSTTSGSAMT

SEQ ID NO: 10097 - protein, 378 aa, Homo sapiens
MFNSLEQSQKGGLSVAVPGEIRGYELAHQRHGRLPWARLFQPSIQLARQGFPVGKGLAAVLENKRTVIEQQPVLCEVFCRDRKVLREGERLTLPRVADTYETLAIEGAQAFYNGSLMAQIVKDIQAAVRGIVTAEDLNNYCAELIEHPLNISLGDAVLYMPSAPLSGPVLALILNILKGYNFSWESVETPEQKGLTYHRIVEAFWFAYAKRTLLGDPKFVNVTEVVRNMTSEFFAAQLWAQISDNTTHTISYYKPKFYTPDDRGTAHLSVITEDGSAVSATSTINLYFGSKVCSPVSGILFNNEWTTSALPASPMSLGYPPHLPISSSQGSSRSRPCSQRSWWARTARSGWWWELLGARRSPQPLHWPSSTTSGSAMT

SEQ ID NO: 10098 - protein, 150 aa, Homo sapiens; identical to SEQ ID NO: 10095

SEQ ID NO: 10099 - protein, 379 aa, Homo sapiens
MFNSLEQSQKGGLSVAVPGEIRGYELAHQRHGRLPWARLFQPSIQLARQGFPVGKGLAAVLENKRTVIEQQPVLCEVFCRDRKVLREGERLTLPRVADTYETLAIEGAQAFYNGSLMAQIVKDIQAAVRGIVTAEDLNNYCAELIEHPLNISLGDAVLYMPSAPLSGPVLALILNILKGYNFSWESVETPEQKGLTYHRIVEAFWFAYAKRTLLGDPKPALGSRQVVRNMTSEFFAAQLWAQISDNTTHTISYYKPKFYTPDDRGTAHLSVITEDGSAVSATSTINLYFGSKVCSPVSGILFNNEWTTSALPASPMSLGYPPHLPISSSQGSSRSRPCSQRSWWARTARSGWWWELLGARRSPQPLHWPSSTTSGSAMT

SEQ ID NO: 10100 - protein, 377 aa, Homo sapiens; identical to SEQ ID NO: 10092

SEQ ID NO: 10101 - protein, 219 aa, Homo sapiens; identical to SEQ ID NO: 10091

SEQ ID NO: 10102 - protein, 177 aa, Homo sapiens
MTSEFFAAQLWAQISDNTTHTISYYKPKFYTPDDRGTAHLSVITEDGSAVSATSTINLYFGSKVCSPVSGILFNNEWTTSALPASPMSLGYPPHLPISSSQGSSRSRPCSQRSWWARTARSGWWWELLGARRSPQPLHWYASPLFSLALPTPHSPQAMLITLPCPRPSSTTSGSAMT

SEQ ID NO: 10103 - protein, 219 aa, Homo sapiens; identical to SEQ ID NO: 10091

SEQ ID NO: 10104 - protein, 378 aa, Homo sapiens; identical to SEQ ID NO: 10097

SEQ ID NO: 10105 - protein, 219 aa, Homo sapiens; identical to SEQ ID NO: 10091

SEQ ID NO: 10106 - protein, 378 aa, Homo sapiens; identical to SEQ ID NO: 10097

SEQ ID NO: 10107 - protein, 113 aa, Homo sapiens
MALTVSASSVSPAWASRRDRPRPAANFCTQLQCLLWISMTFSSVATALMLGFCCKTASSKGCSSTLSRAETQASEASQMAVKSWPPSRASTTRPPARVISCLVKWPKHLAVTE

SEQ ID NO: 10108 - protein, 607 aa, Homo sapiens
MVCTRKTKTLVSTCVILSGMTNIICLLYVGWVTNYIASVYVRGQEPAPDKKLEEDKGDTLKIIERLDHLENVIKQHIQEAPAKPEEAEAEPFTDSSLFAHWGQELSPEGRRVALKQFQYYGYNAYLSDRLPLDRPLPDLRPSGCRNLSFPDSLPEVSIVFIFVNEALSVLLRSIHSAMERTPPHLLKEIILVDDNSSNEELKEKLTEYVDKVNSQKPGFIKVVRHSKQEGLIRSRVSGWRAATAPVVALFDAHVEFNVGWAEPVLTRIKENRKRIISPSFDNIKYDNFEIEEYPLAAQGFDWELWCRYLNPPKAWWKLENSTAPIRSPALIGCFIVDRQYFQEIGLLDEGMEVYGGENVELGIRVWQCGGSVEVLPCSRIAHIERAHKPYTEDLTAHVRRNALRVAEVWMDEFKSHVYMAWNIPQEDSGIDIGDITARKALRKQLQCKTFRWYLVSVYPEMRMYSDIIAYGVLQNSLKTDLCLDQGPDTENVPIMYICHGMTPQNVYYTSSQQIHVGILSPTVDDDDNRCLVDVNSRPRLIECSYAKAKRMKLHWQFSQGGPIQNRKSKRCLELQENSDLEFGFQLVLQKCSGQHWSITNVLRSLAS

SEQ ID NO: 10109 - protein, 76 aa, Homo sapiens
MSKAHPPELKKFMDKKLSLKLNGGRHVQGILRGFDPFMNLVIDECVEMATSGQQNNIGMVVIRGNSIIMLEALERV

SEQ ID NO: 10110 - protein, 460 aa, Homo sapiens
MSRSLDSARSFLERLEARGGREGAVLAGEFSDIQACSAAWKADGVCSTVAGSRPENVRKNRYKDVLPYDQTRVILSLLQEEGHSDYINGNFIRGVDGSLAYIATQGPLPHTLLDFWRLVWEFGVKVILMACREIENGRKRCERYWAQEQEPLQTGLFCITLIKEKWLNEDIMLRTLKVTFQKESRSVYQLQYMSWPDRGVPSSPDHMLAMVEEARRLQGSGPEPLCVHCSAGCGRTGVLCTVDYVRQLLLTQMIPPDFSLFDVVLKMRKQRPAAVQTEEQYRFLYHTVAQMFCSTLQNASPHYQNIKENCAPLYDDALFLRTPQALLAIPRPPGGVLRSISVPGSPGHAMADTYAVVQKRGAPAGAGSGTQTGTGTGTGARSAEEAPLYSKVTPRAQRPGAHAEDARGTLPGRVPADQSPAGSGAYEDVAGGAQTGGLGFNLRIGRPKGPRDPPAEWTRV

SEQ ID NO: 10111 - protein, 353 aa, Homo sapiens
MSRSLDSARSFLERLEARGGREGAVLAGEFSKRCERYWAQEQEPLQTGLFCITLIKEKWLNEDIMLRTLKVTFQKESRSVYQLQYMSWPDRGVPSSPDHMLAMVEEARRLQGSGPEPLCVHCSAGCGRTGVLCTVDYVRQLLLTQMIPPDFSLFDVVLKMRKQRPAAVQTEEQYRFLYHTVAQMFCSTLQNASPHYQNIKENCAPLYDDALFLRTPQALLAIPRPPGGVLRSISVPGSPGHAMADTYAVVQKRGAPAGAGSGTQTGTGTGTGARSAEEAPLYSKVTPRAQRPGAHAEDARGTLPGRVPADQSPAGSGAYEDVAGGAQTGGLGFNLRIGRPKGPRDPPAEWTRV

SEQ ID NO: 10112 - protein, 460 aa, Homo sapiens; identical to SEQ ID NO: 10110

SEQ ID NO: 10113 - protein, 1686 aa, Homo sapiens
MAQISSNSGFKECPSSHPEPTRAKDVDKEEALQMEAEALAKLQKDRQVTDNQRGFELSSSTRKKAQVYNKQDYDLMVFPESDSQKRALDIDVEKLTQAELEKLLLDDSFETKKTPVLPVTPILSPSFSAQLYFRPTIQRGQWPPGLPGPSTYALPSIYPSTYSKQAAFQNGFNPRMPTFPSTEPIYLSLPGQSPYFSYPLTPATPFHPQGSLPIYRPVVSTDMAKLFDKIASTSEFLKNGKARTDLEITDSKVSNLQVSPKSEDISKFDWLDLDPLSKPKVDNVEVLDHEEEKNVSSLLAKDPWDAVLLEERSTANCHLERKVNGKSLSVATVTRSQSLNIRTTQLAKAQGHISQKDPNGTSSLPTGSSLLQEVEVQNEEMAAFCRSITKLKTKFPYTNHRTNPGYLLSPVTAQRNICGENASVKVSIDIEGFQLPVTFTCDVSSTVEIIIMQALCWVHDDLNQVDVGSYVLKVCGQEEVLQNNHCLGSHEHIQNCRKWDTEIRLQLLTFSAMCQNLARTAEDDETPVDLNKHLYQIEKPCKEAMTRHPVEELLDSYHNQVELALQIENQHRAVDQVIKAVRKICSALDGVETLAITESVKKLKRAVNLPRSKTADVTSLFGGEDTSRSSTRGSLNPENPVQVSINQLTAAIYDLLRLHANSGRSPTDCAQSSKSVKEAWTTTEQLQFTIFAAHGISSNWVSNYEKYYLICSLSHNGKDLFKPIQSKKVGTYKNFFYLIKWDELIIFPIQISQLPLESVLHLTLFGILNQSSGSSPDSNKQRKGPEALGKVSLPLFDFKRFLTCGTKLLYLWTSSHTNSVPGTVTKKGYVMERIVLQVDFPSPAFDIIYTTPQVDRSIIQQHNLETLENDIKGKLLDILHKDSSLGLSKEDKAFLWEKRYYCFKHPNCLPKILASAPNWKWVNLAKTYSLLHQWPALYPLIALELLDSKFADQEVRSLAVTWIEAISDDELTDLLPQFVQALKYEIYLNSSLVQFLLSRALGNIQIAHNLYWLLKDALHDVQFSTRYEHVLGALLSVGGKRLREELLKQTKLVQLLGGVAEKVRQASGSARQVVLQRSMERVQSFFQKNKCRLPLKPSLVAKELNIKSCSFFSSNAVPLKVTMVNADPMGEEINVMFKVGEDLRQDMLALQMIKIMDKIWLKEGLDLRMVIFKCLSTGRDRGMVELVPASDTLRKIQVEYGVTGSFKDKPLAEWLRKYNPSEEEYEKASENFIYSCAGCCVATYVLGICDRHNDNIMLRSTGHMFHIDFGKFLGHAQMFGSFKRDRAPFVLTSDMAYVINGGEKPTIRFQLFVDLCCQAYNLIRKQTNLFLNLLSLMIPSGLPELTSIQDLKYVRDALQPQTTDAEATIFFTRLIESSLGSIATKFNFFIHNLAQLRFSGLPSNDEPILSFSPKTYSFRQDGRIKEVSVFTYHKKYNPDKHYIYVVRILREGQIEPSFVFRTFDEFQELHNKLSIIFPLWKLPGFPNRMVLGRTHIKDVAAKRKIELNSYLQSLMNASTDVAECDLVCTFFHPLLRDEKAEGIARSADAGSFSPTPGQIGGAVKLSISYRNGTLFIMVMHIKDLVTEDGADPNPYVKTYLLPDNHKTSKRKTKISRKTRNPTFNEMLVYSGYSKETLRQRELQLSVLSAESLRENFFLGGVTLPLKDFNLSKETVKWYQLTAATYL

SEQ ID NO: 10114 - protein, 174 aa, Homo sapiens [sequence omitted]

SEQ ID NO: 10115 - protein, 1854 aa, Homo sapiens
MPDSCGLHIPAAHAAPSRDARIAGLSARGRHRTTTPSKLPRRPSAQCRYRKCGSRFRRRPGARGVRLSPRRGGPERGGAAREGFSGASWSTMAKPTSKDSGLKEKFKILLGLGTPRPNPRSAEGKQTEFIITAEILRELSMECGLNNRIRMIGQICEVAKTKKFEEHAVEALWKAVADLLQPERPLEARHAVLALLKAIVQGQGERLGVLRALFFKVIKDYPSNEDLHERLEVFKALTDNGRHITYLEEELADFVLQWMDVGLSSEFLLVLVNLVKFNSCYLDEYIARMVQMICLLCVRTASSVDIEVSLQVLDAVVCYNCLPAESLPLFIVTLCRTINVKELCEPCWKLMRNLLGTHLGHSAIYNMCHLMEDRAYMEDAPLLRGAVFFVGMALWGAHRLYSLRNSPTSVLPSFYQAMACPNEVVSYEIVLSITRLIKKYRKELQVVAWDILLNIIERLLQQLQTLDSPELRTIVHDLLTTVEELCDQNEFHGSQERYFELVERCADQRPESSLLNLISYRAQSIHPAKDGWIQNLQALMERFFRSESRGAVRIKVLDVLSFVLLINRQFYEEELINSVVISQLSHIPEDKDHQVRKLATQLLVDLAEGCHTHHFNSLLDIIEKVMARSLSPPPELEERDVAAYSASLEDVKTAVLGLLVILQTKLYTLPASHATRVYEMLVSHIQLHYKHSYTLPIASSIRLQAFDFLLLLRADSLHRLGLPNKDGVVRFSPYCVCDYMEPERGSEKKTSGPLSPPTGPPGPAPAGPAVRLGSVPYSLLFRVLLQCLKQESDWKVLKLVLGRLPESLRYKVLIFTSPCSVDQLCSALCSMLSGPKTLERLRGAPEGFSRTDLHLAVVPVLTALISYHNYLDKTKQREMVYCLEQGLIHRCASQCVVALSICSVEMPDIIIKALPVLVVKLTHISATASMAVPLLEFLSTLARLPHLYRNFAAEQYASVFAISLPYTNPSKFNQYIVCLAHHVIAMWFIRCRLPFRKDFVPFITKGLRSNVLLSFDDTPEKDSFRARSTSLNERPKRIQTSLTSASLGSADENSVAQADDSLKNLHLELTETCLDMMARYVFSNFTAVPKRSPVGEFLLAGGRTKTWLVGNKLVTVTTSVGTGTRSLLGLDSGELQSGPESSSSPGVHVRQTKEAPAKLESQAGQQVSRGARDRVRSMSGGHGLRVGALDVPASQFLGSATSPGPRTAPAAKPEKASAGTRVPVQEKTNLAAYVPLLTQGWAEILVRRPTGNTSWLMSLENPLSPFSSDINNMPLQELSNALMAAERFKEHRDTALYKSLSVPAASTAKPPPLPRSNTVASFSSLYQSSCQGQLHRSVSWADSAVVMEEGSPGEVPVLVEPPGLEDVEAALGMDRRTDAYSRSSSVSSQEEKSLHAEELVGRGIPIERVVSSEGGRPSVDLSFQPSQPLSKSSSSPELQTLQDILGDPGDKADVGRLSPEVKARSQSGTLDGESAAWSASGEDSRGQPEGPLPSSSPRSPSGLRPRGYTISDSAPSRRGKRVERDALKSRATASNAEKVPGINPSFVFLQLYHSPFFGDESNKPILLPNESQSFERSVQLLDQIPSYDTHKIAVLYVGEGQSNSELAILSNEHGSYRYTEFLTGLGRLIELKDCQPDKVYLGGLDVCGEDGQFTYCWHDDIMQAVFHIATLMPTKDVDKHRCDKKRHLGNDFVSIVYNDSGEDFKLGTIKGQFNFVHVIVTPLDYECNLVSLQCRKDMEGLVDTSVAKIVSDRNLPFVARQMALHANMASQVHHSRSNPTDIYPSKWIARLRHIKRLRQRICEEAAYSNPSLPLVHPPSHSKAPAQTPAEPTPGYEVGQRKRLISSVEDFTEFV

SEQ ID NO: 10116 - protein, 289 aa, Homo sapiens [sequence omitted]

SEQ ID NO: 10117 - protein, 1875 aa, Homo sapiens
MPDSCGLHIPAAHAAPSRDARIAGLSARGRHRTTTPSKLPRRPSAQCRYRKCGSRFRRRPGARGVRLSPRRGGPERGGAAREGFSGASWSTMAKPTSKDSGLKEKFKILLGLGTPRPNPRSAEGKQTEFIITAEILRELSMECGLNNRIRMIGQICEVAKTKKFEEHAVEALWKAVADLLQPERPLEARHAVLALLKAIVQGQGERLGVLRALFFKVIKDYPSNEDLHERLEVFKALTDNGRHITYLEEELADFVLQWMDVGLSSEFLLVLVNLVKFNSCYLDEYIARMVQMICLLCVRTASSVDIEVSLQVLDAVVCYNCLPAESLPLFIVTLCRTINVKELCEPCWKLMRNLLGTHLGHSAIYNMCHLMEDRAYMEDAPLLRGAVFFVGMALWGAHRLYSLRNSPTSVLPSFYQAMACPNEVVSYEIVLSITRLIKKYRKELQVVAWDILLNIIERLLQQLQTLDSPELRTIVHDLLTTVEELCDQNEFHGSQERYFELVERCADQRPESSLLNLISYRAQSIHPAKDGWIQNLQALMERFFRSESRGAVRIKVLDVLSFVLLINRQFYEEELINSVVISQLSHIPEDKDHQVRKLATQLLVDLAEGCHTHHFNSLLDIIEKVMARSLSPPPELEERDVAAYSASLEDVKTAVLGLLVILQTKLYTLPASHATRVYEMLVSHIQLHYKHSYTLPIASSIRLQAFDFLLLLRADSLHRLGLPNKDGVVRFSPYCVCDYMEPERGSEKKTSGPLSPPTGPPGPAPAGPAVRLGSVPYSLLFRVLLQCLKQESDWKVLKLVLGRLPESLRYKVLIFTSPCSVDQLCSALCSMLSGPKTLERLRGAPEGFSRTDLHLAVVPVLTALISYHNYLDKTKQREMVYCLEQGLIHRCASQCVVALSICSVEMPDIIIKALPVLVVKLTHISATASMAVPLLEFLSTLARLPHLYRNFAAEQYASVFAISLPYTNPSKFNQYIVCLAHHVIAMWFIRCRLPFRKDFVPFITKGLRSNVLLSFDDTPEKDSFRARSTSLNERPKSLRIARPPKQGLNNSPPVKEFKESSAAEAFRCRSISVSEHVVRSRIQTSLTSASLGSADENSVAQADDSLKNLHLELTETCLDMMARYVFSNFTAVPKRSPVGEFLLAGGRTKTWLVGNKLVTVTTSVGTGTRSLLGLDSGELQSGPESSSSPGVHVRQTKEAPAKLESQAGQQVSRGARDRVRSMSGGHGLRVGALDVPASQFLGSATSPGPRTAPAAKPEKASAGTRVPVQEKTNLAAYVPLLTQGWAEILVRRPTGNTSWLMSLENPLSPFSSDINNMPLQELSNALMAAERFKEHRDTALYKSLSVPAASTAKPPPLPRSNTDSAVVMEEGSPGEVPVLVEPPGLEDVEAALGMDRRTDAYSRSSSVSSQEEKSLHAEELVGRGIPIERVVSSEGGRPSVDLSFQPSQPLSKSSSSPELQTLQDILGDPGDKADVGRLSPEVKARSQSGTLDGESAAWSASGEDSRGQPEGPLPSSSPRSPSGLRPRGYTISDSAPSRRGKRVERDALKSRATASNAEKVPGINPSFVFLQLYHSPFFGDESNKPILLPNESQSFERSVQLLDQIPSYDTHKIAVLYVGEGQSNSELAILSNEHGSYRYTEFLTGLGRLIELKDCQPDKVYLGGLDVCGEDGQFTYCWHDDIMQAVFHIATLMPTKDVDKHRCDKKRHLGNDFVSIVYNDSGEDFKLGTIKGQFNFVHVIVTPLDYECNLVSLQCRKDMEGLVDTSVAKIVSDRNLPFVARQMALHANMASQVHHSRSNPTDIYPSKWIARLRHIKRLRQRICEEAAYSNPSLPLVHPPSHSKAPAQTPAEPTPGYEVGQRKRLISSVEDFTEFV

SEQ ID NO: 10118 - protein, 1855 aa, Homo sapiens
MPDSCGLHIPAAHAAPSRDARIAGLSARGRHRTTTPSKLPRRPSAQCRYRKCGSRFRRRPGARGVRLSPRRGGPERGGAAREGFSGASWSTMAKPTSKDSGLKEKFKILLGLGTPRPNPRSAEGKQTEFIITAEILRELSMECGLNNRIRMIGQICEVAKTKKFEEHAVEALWKAVADLLQPERPLEARHAVLALLKAIVQGQGERLGVLRALFFKVIKDYPSNEDLHERLEVFKALTDNGRHITYLEEELADFVLQWMDVGLSSEFLLVLVNLVKFNSCYLDEYIARMVQMICLLCVRTASSVDIEVSLQVLDAVVCYNCLPAESLPLFIVTLCRTINVKELCEPCWKLMRNLLGTHLGHSAIYNMCHLMEDRAYMEDAPLLRGAVFFVGMALWGAHRLYSLRNSPTSVLPSFYQAMACPNEVVSYEIVLSITRLIKKYRKELQVVAWDILLNIIERLLQQLQTLDSPELRTIVHDLLTTVEELCDQNEFHGSQERYFELVERCADQRPESSLLNLISYRAQSIHPAKDGWIQNLQALMERFFRSESRGAVRIKVLDVLSFVLLINRQFYEEELINSVVISQLSHIPEDKDHQVRKLATQLLVDLAEGCHTHHFNSLLDIIEKVMARSLSPPPELEERDVAAYSASLEDVKTAVLGLLVILQTKLYTLPASHATRVYEMLVSHIQLHYKHSYTLPIASSIRLQAFDFLLLLRADSLHRLGLPNKDGVVRFSPYCVCDYMEPERGSEKKTSGPLSPPTGPPGPAPAGPAVRLGSVPYSLLFRVLLQCLKQESDWKVLKLVLGRLPESLRYKVLIFTSPCSVDQLCSALCSMLSGPKTLERLRGAPEGFSRTDLHLAVVPVLTALISYHNYLDKTKQREMVYCLEQGLIHRCASQCVVALSICSVEMPDIIIKALPVLVVKLTHISATASMAVPLLEFLSTLARLPHLYRNFAAEQYASVFAISLPYTNPSKFNQYIVCLAHHVIAMWFIRCRLPFRKDFVPFITKGLRSNVLLSFDDTPEKDSFRARSTSLNERPKSRIQTSLTSASLGSADENSVAQADDSLKNLHLELTETCLDMMARYVFSNFTAVPKRSPVGEFLLAGGRTKTWLVGNKLVTVTTSVGTGTRSLLGLDSGELQSGPESSSSPGVHVRQTKEAPAKLESQAGQQVSRGARDRVRSMSGGHGLRVGALDVPASQFLGSATSPGPRTAPAAKPEKASAGTRVPVQEKTNLAAYVPLLTQGWAEILVRRPTGNTSWLMSLENPLSPFSSDINNMPLQELSNALMAAERFKEHRDTALYKSLSVPAASTAKPPPLPRSNTVASFSSLYQSSCQGQLHRSVSWADSAVVMEEGSPGEVPVLVEPPGLEDVEAALGMDRRTDAYSRSSSVSSQEEKSLHAEELVGRGIPIERVVSSEGGRPSVDLSFQPSQPLSKSSSSPELQTLQDILGDPGDKADVGRLSPEVKARSQSGTLDGESAAWSASGEDSRGQPEGPLPSSSPRSPSGLRPRGYTISDSAPSRRGKRVERDALKSRATASNAEKVPGINPSFVFLQLYHSPFFGDESNKPILLPNESQSFERSVQLLDQIPSYDTHKIAVLYVGEGQSNSELAILSNEHGSYRYTEFLTGLGRLIELKDCQPDKVYLGGLDVCGEDGQFTYCWHDDIMQAVFHIATLMPTKDVDKHRCDKKRHLGNDFVSIVYNDSGEDFKLGTIKGQFNFVHVIVTPLDYECNLVSLQCRKDMEGLVDTSVAKIVSDRNLPFVARQMALHANMASQVHHSRSNPTDIYPSKWIARLRHIKRLRQRICEEAAYSNPSLPLVHPPSHSKAPAQTPAEPTPGYEVGQRKRLISSVEDFTEFV

SEQ ID NO: 10119 - protein, 1898 aa, Homo sapiens
MPDSCGLHIPAAHAAPSRDARIAGLSARGRHRTTTPSKLPRRPSAQCRYRKCGSRFRRRPGARGVRLSPRRGGPERGGAAREGFSGASWSTMAKPTSKDSGLKEKFKILLGLGTPRPNPRSAEGKQTEFIITAEILRELSMECGLNNRIRMIGQICEVAKTKKFEEHAVEALWKAVADLLQPERPLEARHAVLALLKAIVQGQGERLGVLRALFFKVIKDYPSNEDLHERLEVFKALTDNGRHITYLEEELADFVLQWMDVGLSSEFLLVLVNLVKFNSCYLDEYIARMVQMICLLCVRTASSVDIEVSLQVLDAVVCYNCLPAESLPLFIVTLCRTINVKELCEPCWKLMRNLLGTHLGHSAIYNMCHLMEDRAYMEDAPLLRGAVFFVGMALWGAHRLYSLRNSPTSVLPSFYQAMACPNEVVSYEIVLSITRLIKKYRKELQVVAWDILLNIIERLLQQLQTLDSPELRTIVHDLLTTVEELCDQNEFHGSQERYFELVERCADQRPESSLLNLISYRAQSIHPAKDGWIQNLQALMERFFRSESRGAVRIKVLDVLSFVLLINRQFYEEELINSVVISQLSHIPEDKDHQVRKLATQLLVDLAEGCHTHHFNSLLDIIEKVMARSLSPPPELEERDVAAYSASLEDVKTAVLGLLVILQTKLYTLPASHATRVYEMLVSHIQLHYKHSYTLPIASSIRLQAFDFLLLLRADSLHRLGLPNKDGVVRFSPYCVCDYMEPERGSEKKTSGPLSPPTGPPGPAPAGPAVRLGSVPYSLLFRVLLQCLKQESDWKVLKLVLGRLPESLRYKVLIFTSPCSVDQLCSALCSMLSGPKTLERLRGAPEGFSRTDLHLAVVPVLTALISYHNYLDKTKQREMVYCLEQGLIHRCASQCVVALSICSVEMPDIIIKALPVLVVKLTHISATASMAVPLLEFLSTLARLPHLYRNFAAEQYASVFAISLPYTNPSKFNQYIVCLAHHVIAMWFIRCRLPFRKDFVPFITKGLRSNVLLSFDDTPEKDSFRARSTSLNERPKSLRIARPPKQGLNNSPPVKEFKESSAAEAFRCRSISVSEHVVRSRIQTSLTSASLGSADENSVAQADDSLKNLHLELTETCLDMMARYVFSNFTAVPKRSPVGEFLLAGGRTKTWLVGNKLVTVTTSVGTGTRSLLGLDSGELQSGPESSSSPGVHVRQTKEAPAKLESQAGQQVSRGARDRVRSMSGGHGLRVGALDVPASQFLGSATSPGPRTAPAAKPEKASAGTRVPVQEKTNLAAYVPLLTQGWAEILVRRPTGNTSWLMSLENPLSPFSSDINNMPLQELSNALMAAERFKEHRDTALYKSLSVPAASTAKPPPLPRSNTVASFSSLYQSSCQGQLHRSVSWADSAVVMEEGSPGEVPVLVEPPGLEDVEAALGMDRRTDAYSRSSSVSSQEEKSLHAEELVGRGIPIERVVSSEGGRPSVDLSFQPSQPLSKSSSSPELQTLQDILGDPGDKADVGRLSPEVKARSQSGTLDGESAAWSASGEDSRGQPEGPLPSSSPRSPSGLRPRGYTISDSAPSRRGKRVERDALKSRATASNAEKVPGINPSFVFLQLYHSPFFGDESNKPILLPNESQSFERSVQLLDQIPSYDTHKIAVLYVGEGQSNSELAILSNEHGSYRYTEFLTGLGRLIELKDCQPDKVYLGGLDVCGEDGQFTYCWHDDIMQAVFHIATLMPTKDVDKHRCDKKRHLGNDFVSIVYNDSGEDFKLGTIKGQFNFVHVIVTPLDYECNLVSLQCRKDMEGLVDTSVAKIVSDRNLPFVARQMALHANMASQVHHSRSNPTDIYPSKWIARLRHIKRLRQRICEEAAYSNPSLPLVHPPSHSKAPAQTPAEPTPGYEVGQRKRLISSVEDFTEFV

SEQ ID NO: 10120 - protein, 421 aa, Homo sapiens
MQALRHVVCALSGGVDSAVAALLLRRRGYQVTGVFMKNWDSLDEHGVCTADKDCEDAYRVCQILDIPFHQVSYVKEYWNDVFSDFLNEYEKGRTPNPDIVCNKHIKFSCFFHYAVDNLGADAIATGHYARTSLEDEEVFEQKHVKKPEGLFRNRFEVRNAVKLLQAADSFKDQTFFLSQVSQDALRRTIFPLGGLTKEFVKKIAAENRLHHVLQKKESMGMCFIGKRNFEHFLLQYLQPRPGHFISIEDNKVLGTHKGWFLYTLGQRANIGGLREPWYVVEKDSVKGDVFVAPRTDHPALYRDLLRTSRVHWIAEEPPAALVRDKMMECHFRFRHQMALVPCVLTLNQDGTVWVTAVQAVRALATGQFAVFYKGDECLGSGKILRLGPSAYTLQKGQRRAGMATESPSDSPEDGPGLSPLL

SEQ ID NO: 10121 - protein, 203 aa, Homo sapiens
MGMCFIGKRNFEHFLLQYLQPRPGHFISIEDNKVLGTHKGWFLYTLGQRANIGGLREPWYVVEKDSVKGDVFVAPRTDHPALYRDLLRTSRVHWIAEEPPAALVRDKMMECHFRFRHQMALVPCVLTLNQDGTVWVTAVQAVRALATGQFAVFYKGDECLGSGKILRLGPSAYTLQKGQRRAGMATESPSDSPEDGPGLSPLL

SEQ ID NO: 10122 - protein, 144 aa, Homo sapiens
MKFFLLLFTIGFCWAQYSPNTQQGRTSIVHLFEWRWVDIALECERYLAPKGFGGVQVSPPNENVAIYNPFRPWWERYQPVSYKLCTRSGNEDEFRNMVTRCNNVGVRDCRLTGLLDLALEKDYVRSKIAEYMNHLIDIGVAGFR

SEQ ID NO: 10123 - protein, 252 aa, Homo sapiens
  VARIANT (1)...(252): Xaa = Any Amino Acid
MKFFLLLFTIGFCWAQYSPNTQQGRTSIVHLFEWRWVDIALECERYLAPKGFGGVQVSPPNENVAIYNPFRPWWERYQPVSYKLCTRSGNEDEFRNMVTRCNNVGVRIYVDAVINHMCGNAVSAGTSSTCGSYFNPGSRDFPAVPYSGWDFNDGKCKTGSGDIENYNDATQVRDCRLTGLLDLALEKDYVRSKIAEYMNHLIDIGVAGFRLDASKHMWPGDIKAILDKLHNLNSNWFPAGSKPFIYQEVHQX

SEQ ID NO: 10124 - protein, 252 aa, Homo sapiens; identical to SEQ ID NO: 10123
  VARIANT (1)...(252): Xaa = Any Amino Acid

SEQ ID NO: 10125 - protein, 252 aa, Homo sapiens; identical to SEQ ID NO: 10123
  VARIANT (1)...(252): Xaa = Any Amino Acid

SEQ ID NO: 10126 - protein, 86 aa, Homo sapiens
MVYHPNIEIEGNVCLNILRENWKPVLTINSIIYGLQYLYLEPNPEDPLNKKAAEVLQNNRQLLEQNVQPSMRDGYIGSTYFERCLK

SEQ ID NO: 10127 - protein, 288 aa, Homo sapiens
MANETQKVGAIHFPFPFTPYSIQEDFMAELYRVLEAGKIGIFESPTGTGKSLSLICGALSWLRDFEQKKREEEARLLETGTGPLHDEKDESLCLSSSCEGAAGTPRPAGEPAWVTQFVQKKEERDLVDRLKAEQARRKQREERLQQLQHRVQLKYAAKRLRQEEEERENLLRLSREMLETGPEAERLEQLESGEEELVLAEYESDEEKKVASRAPSDATSSRHPPDASFPAALNFLQRTRPSSVLSEDLLMQRAVAKHPALLPWQMSSSPLRPGSEWMRMRMTWRKNT

SEQ ID NO: 10128 - protein, 314 aa, Homo sapiens [sequence omitted]

SEQ ID NO: 10129 - protein, 489 aa, Homo sapiens
MANETQKVGAIHFPFPFTPYSIQEDFMAELYRVLEAGKIGIFESPTGTGKSLSLICGALSWLRDFEQKKREEEARLLETGTGPLHDEKDESLCLSSSCEGAAGTPRPAGEPAWVTQFVQKKEERDLVDRLKAEQARRKQREERLQQLQHRVQLKYAAKRLRQEEEERENLLRLSREMLETGPEAERLEQLESGEEELVLAEYESDEEKKVASRVDEDEDDLEEEHITKIYYCSRTHSQLAQFVHEVKKSPFGKDVRLVSLGSRQNLCVNEDVKSLGSVQLINDRCVDMQRSRHEKKKGAEEEKPKRRRQEKQAACPFYNHEQMGLLRDEALAEVKDMEQLLALGKEARACPYYGSRLAIPAAQLVVLPYQMLLHAATRQAAGIRLQDQVVIIDEAHNLIDTITGMHSVEVSGSQLCQAHSQLLQYVERYGKRLKAKNLMYLKQILYLLEKFVAVLGGESLVPLLTPGLQNSLGCFFLGCPSGHLSSLCF

SEQ ID NO: 10130 - protein, 457 aa, Homo sapiens
MGRRVGAWGISGEPRKLAADAASTRSQHPHTPTHTPAARQDSLARTSMVGNPENRKWPREGEGRGGASATTSAADRGEMAATEGVGEAAQGGEPGQPAQPPPQPHPPPPQQQHKEEMAAEAGEAVASPMDDGFVSLDSPSYVLYRDRAEWADIDPVPQNDGPNPVVQIIYSDKFRDVYDYFRAVLQRDERSERAFKLTRDAIELNAANYTVWHFRRVLLKSLQKDLHEEMNYITAIIEEQPKNYQVWHHRRVLVEWLRDPSQELEFIADILNQDAKNYHAWQHRQWVIQEFKLWDNELQYVDQLLKEDVRNNSVWNQRYFVISNTTGYNDRAVLEREVQYTLEMIKLVPHNESAWNYLKGILQDRGLSKYPNLLNQLLDLQPSHSSPYLIAFLVDIYEDMLENQCDNKEDILNKALELCEILAKEKDTIRKEYWRYIGRSLQSKHSTENDSPTNVQQ

SEQ ID NO: 10131 - protein, 421 aa, Homo sapiens
MGRRVGAWGISGEPRKLAADAASTRSQHPHTPTHTPAARQDSLARTSMVGNPENRKWPREGEGRGGASATTSAADRGEMAATEGVGEAAQGGEPGQPAQPPPQPHPPPPQQQHKEEMAAEAGEAVASPMDDGFVSLDSPSYVLYRDRAEWADIDPVPQNDGPNPVVQIIYSDKFRDVYDYFRAVLQRDERSERAFKLTRDAIELNAANYTVHHRRVLVEWLRDPSQELEFIADILNQDAKNYHAWQHRQWVIQEFKLWDNELQYVDQLLKEDVRNNSVWNQRYFVISNTTGYNDRAVLEREVQYTLEMIKLVPHNESAWNYLKGILQDRGLSKYPNLLNQLLDLQPSHSSPYLIAFLVDIYEDMLENQCDNKEDILNKALELCEILAKEKDTIRKEYWRYIGRSLQSKHSTENDSPTNVQQ

SEQ ID NO: 10132 - protein, 457 aa, Homo sapiens; identical to SEQ ID NO: 10130

SEQ ID NO: 10133 - protein, 205 aa, Homo sapiens [sequence omitted]

SEQ ID NO: 10134 - protein, 121 aa, Homo sapiens
  VARIANT (1)...(121): Xaa = Any Amino Acid
MWTPQIREKPFPPHPTPARRLLTVGGRAWVERGAELLPGSRSCSRAHLRLHRWRARSLRTKVRGRGILLPTRAQPAAQGGRRRAQRHDGRGQVSGDTFARRGAGASDASPLRLSSSAATAX

SEQ ID NO: 10135 - protein, 74 aa, Homo sapiens
MKVVDMFGCCLPVCAVNFKCLHELVKHEENGLVFEDSEELAAQLQVLFSNFPDPAGKLNQFRKNLRESQQLRWD

SEQ ID NO: 10136 - protein, 68 aa, Homo sapiens
MIGRIFSKGPGQKSFRLGPPVSVRTMVLCCGVKVATDHLSIKGCGFVRIKLYLQTQAVGWIWPAGCSL

SEQ ID NO: 10137 - protein, 74 aa, Homo sapiens; identical to SEQ ID NO: 10135

SEQ ID NO: 10138 - protein, 558 aa, Homo sapiens
MYRYLGEALLLSRAGPAALGSASADSAALLGWARGQPAAAPQPGLALAARRHYSEAVADREDDPNFFKMVEGFFDRGASIVEDKLVEDLRTRESEEQKRNRVRGILRIIKPCNHVLSLSFPIRRDDGSWEVIEGYRAQHSQHRTPCKGGIRYSTDVSVDEVKALASLMTYKCAVVDVPFGGAKAGVKINPKNYTDNELEKITRRFTMELAKKGFIGPGIDVPAPDMSTGEREMSWIADTYASTIGHYDINAHACVTGKPISQGGIHGRISATGRGVFHGIENFINEASYMSILGMTPGFGDKTFVVQGFGNVGLHSMRYLHRFGAKCIAVGESDGSIWNPDGIDPKELEDFKLQHGSILGFPKAKPYEGSILEADCDILIPAASEKQLTKSNAPRVKAKIIAEGANGPTTPEADKIFLERNIMVIPDLYLNAGGVTVSYFEWLKNLNHVSYGRLTFKYERDSNYHLLMSVQESLERKFGKHGGTIPIVPTAEFQDRISGASEKDIVHSGLAYTMERSARQIMRTAMKYNLGLDLRTAAYVNAIEKVFKVYNEAGVTFT

SEQ ID NO: 10139 - protein, 478 aa, Homo sapiens
MYRYLVEDLRTRESEEQKRNRVRGILRIIKPCNHVLSLSFPIRRDDGSWEVIEGYRAQHSQHRTPCKGGIRYSTDVSVDEVKALASLMTYKCAVVDVPFGGAKAGVKINPKNYTDNELEKITRRFTMELAKKGFIGPGIDVPAPDMSTGEREMSWIADTYASTIGHYDINAHACVTGKPISQGGIHGRISATGRGVFHGIENFINEASYMSILGMTPGFGDKTFVVQGFGNVGLHSMRYLHRFGAKCIAVGESDGSIWNPDGIDPKELEDFKLQHGSILGFPKAKPYEGSILEADCDILIPAASEKQLTKSNAPRVKAKIIAEGANGPTTPEADKIFLERNIMVIPDLYLNAGGVTVSYFEWLKNLNHVSYGRLTFKYERDSNYHLLMSVQESLERKFGKHGGTIPIVPTAEFQDRISGASEKDIVHSGLAYTMERSARQIMRTAMKYNLGLDLRTAAYVNAIEKVFKVYNEAGVTFT

SEQ ID NO: 10140 - protein, 391 aa, Homo sapiens
MTYKCAVVDVPFGGAKAGVKINPKNYTDNELEKITRRFTMELAKKGFIGPGIDVPAPDMSTGEREMSWIADTYASTIGHYDINAHACVTGKPISQGGIHGRISATGRGVFHGIENFINEASYMSILGMTPGFGDKTFVVQGFGNVGLHSMRYLHRFGAKCIAVGESDGSIWNPDGIDPKELEDFKLQHGSILGFPKAKPYEGSILEADCDILIPAASEKQLTKSNAPRVKAKIIAEGANGPTTPEADKIFLERNIMVIPDLYLNAGGVTVSYFEWLKNLNHVSYGRLTFKYERDSNYHLLMSVQESLERKFGKHGGTIPIVPTAEFQDRISGASEKDIVHSGLAYTMERSARQIMRTAMKYNLGLDLRTAAYVNAIEKVFKVYNEAGVTFT

SEQ ID NO: 10141 - protein, 558 aa, Homo sapiens; identical to SEQ ID NO: 10138

SEQ ID NO: 10142 - protein, 295 aa, Homo sapiens [sequence omitted]

SEQ ID NO: 10143 - protein, 295 aa, Homo sapiens [sequence omitted]

SEQ ID NO: 10144 - protein, 295 aa, Homo sapiens [sequence omitted]

SEQ ID NO: 10145 - protein, 253 aa, Homo sapiens
MELIQDTSRPPLEYVKGVPLIKYFAEALGPLQSFQARPDDLLISTYPKSGMETLKDTPAPRLLKTHLPLALLPQTLLDQKVKVVYVARNAKDVAVSYYHFYHMAKVHPEPGTWDSFLEKFMVGEVSYGSWYQHVQEWWELSRTHPVLYLFYEDMKENPKREIQKILEFVGRSLPEETVDFMVQHTSFKEMKKNPMTNYTTVPQEFMDHSISPFMRKGMAGDWKTTFTVAQNERFDADYAEKMAGCSLSFRSEL

SEQ ID NO: 10146 - protein, 295 aa, Homo sapiens [sequence omitted]

SEQ ID NO: 10147 - protein, 217 aa, Homo sapiens [sequence omitted]

SEQ ID NO: 10148 - protein, 348 aa, Homo sapiens
MGARGAPSRRRQAGRRLRYLPTGSFPFLLLLLLLCIQLGGGQKKKENLLAEKVEQLMEWSSRRSIFRMNGDKFRKFIKAPPRNYSMIVMFTALQPQRQCSVCRQANEEYQILANSWRYSSAFCNKLFFSMVDYDEGTDVFQQLNMNSAPTFMHFPPKGRPKRADTFDLQRIGFAAEQLAKWIADRTDVHIRVFRPPNYSGTIALALLVSLVGGLLYLRRNNLEFIYNKTGWAMVSLCIVFAMTSGQMWNHIRGPPYAHKNPHNGQVSYIHGSSQAQFVAESHIILVLNAAITMGMVLLNEAATSKGDVGKRRIICLVGLGLVVFFFSFLLSIFRSKYHGYPYSDLDFE

SEQ ID NO: 10149 - protein, 348 aa, Homo sapiens; identical to SEQ ID NO: 10148

SEQ ID NO: 10150 - protein, 249 aa, Homo sapiens
MFFSAALRARAAGLTAHWGRHVRNLHKTAMQNGAGGALFVHRDTPENNPDTPFDFTPENYKRIEAIVKNYPEGHKAAAVLPVLDLAQRQNGWLPISAMNKVAEVLQVPPMRVYEVATFYTMYNRKPVGKYHIQVCTTTPCMLRNSDSILEAIQKKLGIKVGETTPDKLFTLIEVECLGACVNAPMVQINDNYYEDLTAKDIEEIIDELKAGKIPKPGPRSGRFSCEPAGGLTSLTEPPKGPGFGVQAGL

SEQ ID NO: 10151 - protein, 79 aa, Homo sapiens
MRSTAEVTGKSQNSNTLAGAWGVKNRRREEVFPSLQKRNQSQAQLPGSQNQFIHQVALLPSFQLLATGRRCSKGFALRL

SEQ ID NO: 10152 - protein, 79 aa, Homo sapiens; identical to SEQ ID NO: 10151

SEQ ID NO: 10153 - protein, 68 aa, Homo sapiens
MEVGLCQAQDRGPEPKAVLRQFQTDLDNLEREIVARNEKLDLPYDYLKPSYIENISLSEIKYSGPQRP

SEQ ID NO: 10154 - protein, 160 aa, Homo sapiens
MLKMEPPGKLLPMVIQLRYYLLNTHLVAEVIAIVTIMCLPRLRPVFKPTHSMLLLLVAYPGYLPTSSGLWVFYDIHHLSMEFSRFKPTYTESIGQMSQKEEERCVEIVHLFHQRDDTVRVDPELQAWDQEIMEVGLCQAQDRGFPVSFQSRAQLCRFLAM

SEQ ID NO: 10155 - protein, 176 aa, Homo sapiens
MSRSVEEDSILWLLHLRCSVARSAGSCHGTRHLRLAEACWLVAPGPIFSLQSFGRSAVLHFSLGKMPSRGTWLKSACTPQKRLHSRLHLSSLPSPQGPSDWKLHIGTLPPGLRGRGCLLPVWPALLGSGGCHSHHQRSRRHRDRHFGWTPRPHGLQSGCGQHPGDGDAHSSGLTDD

SEQ ID NO: 10156 - protein, 288 aa, Homo sapiens
MKPSGEDQAALAAGPWEECFQAAVQLALRAGQIIRKALTEEKRVSTKTSAADLVTETDHLVEDLIISELRERFPSHRFIAEEAAASGAKCVLTHSPTWIIDPIDGTCNFVHRFPTVAVSIGFAVRQELEFGVIYHCTEERLYTGRRGRGAFCNGQRLRVSGETDLSKALVLTEIGPKRDPATLKLFLSNMERLLHAKAHGVRVIGSSTLALCHLASGAADAYYQFGLHCWDLAAATVIIREAGGIVIDTSGGPLDLMACRVVAASTREMAMLIAQALQTINYGRDDEK

SEQ ID NO: 10157 - protein, 225 aa, Homo sapiens
LFLSCERGFLHTGRFIAEEAAASGAKCVLTHSPTWIIDPIDGTCNFVHRFPTVAVSIGFAVRQELEFGVIYHCTEERLYTGRRGRGAFCNGQRLRVSGETDLSKALVLTEIGPKRDPATLKLFLSNMERLLHAKAHGVRVIGSSTLALCHLASGAADAYYQFGLHCWDLAAATVIIREAGGIVIDTSGGPLDLMACRVVAASTREMAMLIAQALQTINYGRDDEK

SEQ ID NO: 10158 - protein, 434 aa, Homo sapiens
MLRCLYHWHRPVLNRRWSRLCLLKQYLFTMKLQSPEFQSLFTEGLKSLTELFVKENHELRIAGGAVRDLLNGVKPQDIDFATTATPTQMKEMFQSAGIRMINNRGEKHGTITARLHEENFEITTLRIDVTTDGRHAEVEFTTDWQKDAERRDLTINSMFLGFDGTLFDYFNGYEDLKNKKVRFVGHAKQRIQEDYLRILRYFRFYGRIVDKPGDHDPETLEAIAENAKGLAGISGERIWVELKKILVGNHVNHLIHLIYDLDVAPYIGLPANASLEEFDKVSKNVDGFSPKPVTLLASLFKVQDDVTKLDLRLKIAKEEKNLGLFIVKNRKDLIKATDSSDPLKPYQDFIIDSREPDATTRVCELLKYQGEHCLLKEMQQWSIPPFPVSGHDIRKVGISSGKEIGALLQQLREQWKKSGYQMEKDELLSYIKKT

SEQ ID NO: 10159 - protein, 434 aa, Homo sapiens; identical to SEQ ID NO: 10158

SEQ ID NO: 10160 - protein, 434 aa, Homo sapiens; identical to SEQ ID NO: 10158

SEQ ID NO: 10161 - protein, 434 aa, Homo sapiens; identical to SEQ ID NO: 10158

SEQ ID NO: 10162 - protein, 1202 aa, Homo sapiens
MANKANTSGDFEKDDDAYKTEDSDDIHFEPVVQMPEKVELVTGEEDEKVLYSQRVKLFRFDAEVSQWKERGLGNLKILKNEVNGKLRMLMRREQVLKVCANHWITTTMNLKPLSGSDRAWMWLASDFSDGDAKLEQLAAKFKTPELAEEFKQKFEECQRLLLDIPLQTPHKLVDTGRAAKLIQRAEEMKSGLKDFKTFLTNDQTKVTEEENKGSGTGAAGASDTTIKPNPENTGPTLEWDNYDLREDALDDSVSSSSVHASPLASSPVRKNLFRFGESTTGFNFSFKSALSPSKSPAKLNQSGTSVGTDEESDVTQEEERDGQYFEPVVPLPDLVEVSSGEENKQVRIVMRRDQVLKLCANHRITPDMSLQNMKGTERVWVWTACDFADGERKVEHLAVRFKLQDVADSFKKIFDEAKTAQEKDSLITPHVSRSSTPRESPCGKIAVAVLEETTRERTDVIQGDDVADAASEVEVSSTSETTTKAVVSPPKFVFGSESVKSIFSSEKSKPFAFGNSSATGSLFGFSFNAPLKSNNSETSSVAQSGSESKVEPKKCELSKNSDIEQSSDSKVKNLFASFPTEESSINYTFKTPEKAKEKKKPEDSPSDDDVLIVYELTPTAEQKALATKLKLPPTFFCYKNRPDYVSEEEEDDEDFETAVKKLNGKLYLDGSEKCRPLEENTADNEKECIIVWEKKPTVEEKAKADTLKLPPTFFCGVCSDTDEDNGNGEDFQSELQKVQEAQKSQTEEITSTTDSVYTGGTEVMVPSFCKSEEPDSITKSISSPSVSSETMDKPVDLSTRKEIDTDSTSQGESKIVSFGFGSSTGLSFADLASSNSGDFAFGSKDKNFQWANTGAAVFGTQSVGTQSAGKVGEDEDGSDEEVVHNEDIHFEPIVSLPEVEVKSGEEDEEILFKERAKLYRWDRDVSQWKERGVGDIKILWHTMKNYYRILMRRDQVFKVCANHVITKTMELKPLNVSNNALVWTASDYADGEAKVEQLAVRFKTKEVADCFKKTFEECQQNLMKLQKGHVSLAAELSKETNPVVFFDVCADGEPLGRITMELFSNIVPRTAENFRALCTGEKGFGFKNSIFHRVIPDFVCQGGDITKHDGTGGQSIYGDKFEDENFDVKHTGPGLLSMANQGQNTNNSQFVITLKKAEHLDFKHVVFGFVKDGMDTVKKIESFGSPKGSVCRRITITECGQI

SEQ ID NO: 10163 - protein, 904 aa, Homo sapiens
MRRSKADVERYIASVQGSTPSPRQKSMKGFYFAKLYYEAKEYDLAKKYICTYINVQERDPKAHRFLGLLYELEENTDKAVECYRRSVELNPTQKDLVLKIAELLCKNDVTDGRAKYWLERAAKLFPGSPAIYKLKEQLLDCEGEDGWNKLFDLIQSELYVRPDDVHVNIRLVEVYRSTKRLKDAVAHCHEAERNIALRSSLEWNSCVVQTLKEYLESLQCLESDKSDWRATNTDLLLAYANLMLLTLSTRDVQESRELLQSFDSALQSVKSLGGNDELSATFLEMKGHFYMHAGSLLLKMGQHSSNVQWRALSELAALCYLIAFQVPRPKIKLIKGEAGQNLLEMMACDRLSQSGHMLLNLSRGKQDFLKEIVETFANKSGQSALYDALFSSQSPKDTSFLGSDDIGNIDVREPELEDLTRYDVGAIRAHNGSLQHLTWLGLQWNSLPALPGIRKWLKQLFHHLPHETSRLETNAPESICILDLEVFLLGVVYTSHLQLKEKCNSHHSSYQPLCLPLPVCKQLCTERQKSWWDAVCTLIHRKAVPGNVAKLRLLVQHEINTLRAQEKHGLQPALLVHWAECLQKTGSGLNSFYDQREYIGRSVHYWKKVLPLLKIIKKKNSIPEPIDPLFKHFHSVDIQASEIVEYEEDAHITFAILDAVNGNIEDAVTAFESIKSVVSYWNLALIFHRKAEDIENDALSPEEQEECKNYLRKTRDYLIKIIDDSDSNLSVVKKLPVPLESVKEMLNSVMQELEDYSEGGPLYKNGSLRNADSEIKHSTPSPTRYSLSPSKSYKYSPKTPPRWAEDQNSLLKMICQQVEAIKKEMQELKLNSSNSASPHRWPTENYGPDSVPDGYQGSQTFHGAPLTEAAHRHFTIEKHGDSKWIIYRFTKQLCGTERARAKIS

SEQ ID NO: 10164 - protein, 2320 aa, Homo sapiens
MNRLPPQQHIYAYPQQMHTPPVQSSSACMFSQEMYGPPALRFESPATGILSPRGDDYFNYNVQQTSTNPPLPEPGYFTKPPIAAHASRSAESKTIEFGKTNFVQPMPGEGLRPSLPTQAHTTQPTPFKFNSNFKSNDGDFTFSSPQVVTQPPPAAYSNSESLLGLLTSDKPLQGDGYSGAKPIPGGQTIGPRNTFNFGSKNVSGISFTENMGSSQQKNSGFRRSDDMFTFHGPGKSVFGTPTLETANKNHETDGGSAHGDDDDDGPHFEPVVPLPDKIEVKTGEEDEEEFFCNRAKLFRFDVESKEWKERGIGNVKILRHKTSGKIRLLMRREQVLKICANHYISPDMKLTPNAGSDRSFVWHALDYADELPKPEQLAIRFKTPEEAALFKCKFEEAQSILKAPGTNVAMASNQAVRIVKEPTSHDNKDICKSDAGNLNFEFQVAKKEGSWWHCNSCSLKNASTAKKCVSCQNLNPSNKELVGPPLAETVFTPKTSPENVQDRFALVTPKKEGHWDCSICLVRNEPTVSRCIACQNTKSANKSGSSFVHQASFKFGQGDLPKPINSDFRSVFSTKEGQWDCSACLVQNEGSSTKCAACQNPRKQSLPATSIPTPASFKFGTSETSKTLKSGFEDMFAKKEGQWDCSSCLVRNEANATRCVACQNPDKPSPSTSVPAPASFKFGTSETSKAPKSGFEGMFTKKEGQWDCSVCLVRNEASATKCIACQNPGKQNQTTSAVSTPASSETSKAPKSGFEGMFTKKEGQWDCSVCLVRNEASATKCIACQNPGKQNQTTSAVSTPASSETSKAPKSGFEGMFTKKEGQWDCSVCLVRNEASATKCIACQCPSKQNQTTAISTPASSEISKAPKSGFEGMFIRKGQWDCSVCCVQNESSSLKCVACDASKPTHKPIAEAPSAFTLGSEMKLHDSSGSQVGTGFKSNFSEKASKFGNTEQGFKFGHVDQENSPSFMFQGSSNTEFKSTKEGFSIPVSADGFKFGISEPGNQEKKSEKPLENGTGFQAQDISGQKNGRGVIFGQTSSTFTFADLAKSTSGEGFQFGKKDPNFKGFSGAGEKLFSSQYGKMANKANTSGDFEKDDDAYKTEDSDDIHFEPVVQMPEKVELVTGEEDEKVLYSQRVKLFRFDAEVSQWKERGLGNLKILKNEVNGKLRMLMRREQVLKVCANHWITTTMNLKPLSGSDRAWMWLASDFSDGDAKLEQLAAKFKTPELAEEFKQKFEECQRLLLDIPLQTPHKLVDTGRAAKLIQRAEEMKSGLKDFKTFLTNDQTKVTEEENKGSGTGAAGASDTTIKPNPENTGPTLEWDNYDLREDALDDSVSSSSVHASPLASSPVRKNLFRFGESTTGFNFSFKSALSPSKSPAKLNQSGTSVGTDEESDVTQEEERDGQYFEPVVPLPDLVEVSSGEENEQVVFSHRAELYRYDKDVGQWKERGIGDIKILQNYDNKQVRIVMRRDQVLKLCANHRITPDMSLQNMKGTERVWVWTACDFADGERKVEHLAVRFKLQDVADSFKKIFDEAKTAQEKDSLITPHVSRSSTPRESPCGKIAVAVLEETTRERTDVIQGDDVADAASEVEVSSTSETTTKAVVSPPKFVFGSESVKSIFSSEKSKPFAFGNSSATGSLFGFSFNAPLKSNNSETSSVAQSGSESKVEPKKCELSKNSDIEQSSDSKVKNLFASFPTEESSINYTFKTPEKAKEKKKPEDSPSDDDVLIVYELTPTAEQKALATKLKLPPTFFCYKNRPDYVSEEEEDDEDFETAVKKLNGKLYLDGSEKCRPLEENTADNEKECIIVWEKKPTVEEKAKADTLKLPPTFFCGVCSDTDEDNGNGEDFQSELQKVQEAQKSQTEEITSTTDSVYTGGTEVMVPSFCKSEEPDSITKSISSPSVSSETMDKPVDLSTRKEIDTDSTSQGESKIVSFGFGSSTGLSFADLASSNSGDFAFGSKDKNFQWANTGAAVFGTQSVGTQSAGKVGEDEDGSDEEVVHNEDIHFEPIVSLPEVEVKSGEEDEEILFKERAKLYRWDRDVSQWKERGVGDIKILWHTMKNYYRILMRRDQVFKVCANHVITKTMELKPLNVSNNALVWTASDYADGEAKVEQLAVRFKTKEVADCFKKTFEECQQNLMKLQKGHVSLAAELSKETNPVVFFDVCADGEPLGRITMELFSNIVPRTAENFRALCTGEKGFGFKNSIFHRVIPDFVCQGGDITKHDGTGGQSIYGDKFEDENFDVKHTGPGLLSMANQGQNTNNSQFVITLKKAEHLDFKHVVFGFVKDGMDTVKKIESFGSPKGSVCRRITITECGQI

SEQ ID NO: 10165 - protein, 893 aa, Homo sapiens
MRRSKADVERYIASVQGSTPSPRQKSMKGFYFAKLYYEAKEYDLAKKYICTYINVQERDPKAHRFLGLLYELEENTDKAVECYRRSVELNPTQKDLVLKIAELLCKNDVTDGRAKYWLERAAKLFPGSPAIYKLKEQLLDCEGEDGWNKLFDLIQSELYVRPDDVHVNIRLVEVYRSTKRLKDAVAHCHEAERNIALRSSLEWNSCVVQTLKEYLESLQCLESDKSDWRATNTDLLLAYANLMLLTLSTRDVQESRELLQSFDSALQSVKSLGGNDELSATFLEMKGHFYMHAGSLLLKMGQHSSNVQWRALSELAALCYLIAFQVPRPKIKLIKGEAGQNLLEMMACDRLSQSGHMLLNLSRGKQDFLKEIVETFANKSGQSALYDALFSSQSPKDTSFLGSDDIGNIDVREPELEDLTRYDVGAIRAHNGSLQHLTWLGLQWNSLPALPGIRKWLKQLFHHLPHETSRLETNAPESICILDLEVFLLGVVYTSHLQLKEKCNSHHSSYQPLCLPLPVCKQLCTERQKSWWDAVCTLIHRKAVPGNVAKLRLLVQHEINTLRAQEKHGLQPALLVHWAECLQKTGSGLNSFYDQREYIGRSVHYWKKVLPLLKIIKKKNSIPEPIDPLFKHFHSVDIQASEIVEYEEDAHITFAILDAVNGNIEDAVTAFESIKSVVSYWNLALIFHRKAEDIENDALSPEEQEECKNYLRKTRDYLIKIIDDSDSNLSVVKKLPVPLESVKEMLNSVMQELEDYSEGGPLYKNGSLRNADSEIKHSTPSPTRYSLSPSKSYKYSPKTPPRWAEDQNSLLKMICQQVEAIKKEMQELKLNSSNSASPHRWPTENYGPDSVPDGYQGSQTFHGAPLTVATTGPSVYYSQSPAYNSPVSSQTSS

SEQ ID NO: 10166 - protein, 893 aa, Homo sapiens; identical to SEQ ID NO: 10165

SEQ ID NO: 10167 - protein, 2320 aa, Homo sapiens; identical to SEQ ID NO: 10164

SEQ ID NO: 10168 - protein, 235 aa, Homo sapiens
MAAYKLVLIRHGESTWNLENRFSCWYDADLSPAGHEEAKRGGQALRDAGYEFDICLTSVQKRVIRTLWTVLDAIDQMWLPVVRTWRLNERHYGGLTGLNKAETAAKHGEAQVKIWRRSYDVPPPPMEPDHPFYSNISKDTIARALPFWNEEIVPQIKEGKRVLIAAHGNSLQGIAKHVEGLSEEAIMELNLPTGIPIVYELDKNLKPIKPMQFLGDEETVCKAIEAVAAQGKAKK

SEQ ID NO: 10169 - protein, 254 aa, Homo sapiens
MAAYKLVLIRHGESTWNLENRFSCWYDADLSPAGHEEAKRGGQALRDAGYEFDICLTSVQKRVIRTLWTVLDAIDQMWLPVVRTWRLNERHYGGLTGLNKAETAAKHGEAQVKIWRRSYDVPPPPMEPDHPFYSNISKDRRYADLTEDQLPSYESPKDTIARALPFWNEEIVPQIKEGKRVLIAAHGNSLQGIAKHVEGLSEEAIMELNLPTGIPIVYELDKNLKPIKPMQFLGDEETVCKAIEAVAAQGKAKK

SEQ ID NO: 10170 - protein, 254 aa, Homo sapiens; identical to SEQ ID NO: 10169

SEQ ID NO: 10171 - protein, 219 aa, Homo sapiens
MAAYKLVLIRHGESTWNLENRFSCWYDADLSPAGHEEAKRGGQALRDAGYEFDICLTSVQKRVIRTLWTVLDAIDQMWLPVVRTCVPPPPMEPDHPFYSNISKDRRYADLTEDQLPSYESPKDTIARALPFWNEEIVPQIKEGKRVLIAAHGNSLQGIAKHVEGLSEEAIMELNLPTGIPIVYELDKNLKPIKPMQFLGDEETVCKAIEAVAAQGKAKK

SEQ ID NO: 10172 - protein, 389 aa, Homo sapiens [sequence omitted]

SEQ ID NO: 10173 - protein, 540 aa, Homo sapiens [sequence omitted]

SEQ ID NO: 10174 - protein, 291 aa, Homo sapiens [sequence omitted]

SEQ ID NO: 10175 - protein, 290 aa, Homo sapiens
MLDHEYTTKEVFRKNFFNDWRKEMAVEEREVIKSLDKCDFTEIHRYFVDKAAARKVLSREEKQKLKEEAEKLQQEFGYCILDGHQEKIGNFKIEPPGLFRGRGDHPKMGMLKRRITPEDVVINCSRDSKIPEPPAGHQWKEVRSDNTVTWLAAWTESVQNSIKYIMLNPCSKLKGETAWQKFETARRLRGFVDEIRSQYRADWKSREMKTRQRAVALYFIDKGVQELTALYGEQGPPGRPLRQADHDQPEQAPPGADGRADGQGVPDLQRLHHSAGAAAGPDARRGQHSS

SEQ ID NO: 10176 - protein, 291 aa, Homo sapiens [sequence omitted]

SEQ ID NO: 10177 - protein, 268 aa, Homo sapiens [sequence omitted]

SEQ ID NO: 10178 - protein, 291 aa, Homo sapiens [sequence omitted]

SEQ ID NO: 10179 - protein, 383 aa, Homo sapiens [sequence omitted]

SEQ ID NO: 10180 - protein, 186 aa, Homo sapiens
MPVAGSELPRRPLPPAAQERDAEPRPPHGELQYLGQIQHILRCGVRKDDRTGTGTLSVFGMQARYSLRDEFPLLTTKRVFWKGVLEELLWFIKGSTNAKELSSKGVKIWDANGSRDFLDSLGFSTREEGDLGPVYGFQWRHFGAEYRDMESDYSGQGVDQLQRVIDTIKTNPDDRRIIMCAWNPRG

SEQ ID NO: 10181 - protein, 279 aa, Homo sapiens
MPVAGSELPRRPLPPAAQERDAEPRPPHGELQYLGQIQHILRCGVRKDDRTGTGTLSVFGMQARYSLRDEFPLLTTKRVFWKGVLEELLWFIKGSTNAKELSSKGVKIWDANGSRDFLDSLGFSTREEGDLGPVYGFQWRHFGAEYRDMESDLPLMALPPCHALCQFYVVNSELSCQLYQRSGDMGLGVPFNIASYALLTYMIAHITGLKPGDFIHTLGDAHIYLNHIEPLKIQLQREPRPFPKLRILRKVEKIDDFKAEDFQIEGYNPHPTIKMEMAV

SEQ ID NO: 10182 - protein, 230 aa, Homo sapiens
MPVAGSELPRRPLPPAAQERDAEPRPPHGELQYLGQIQHILRCGVRKDDRTGTGTLSVFGMQARYSLRDYSGQGVDQLQRVIDTIKTNPDDRRIIMCAWNPRDLPLMALPPCHALCQFYVVNSELSCQLYQRSGDMGLGVPFNIASYALLTYMIAHITGLKPGDFIHTLGDAHIYLNHIEPLKIQLQREPRPFPKLRILRKVEKIDDFKAEDFQIEGYNPHPTIKMEMAV

SEQ ID NO: 10183 - protein, 313 aa, Homo sapiens
MPVAGSELPRRPLPPAAQERDAEPRPPHGELQYLGQIQHILRCGVRKDDRTGTGTLSVFGMQARYSLRDEFPLLTTKRVFWKGVLEELLWFIKGSTNAKELSSKGVKIWDANGSRDFLDSLGFSTREEGDLGPVYGFQWRHFGAEYRDMESDYSGQGVDQLQRVIDTIKTNPDDRRIIMCAWNPRDLPLMALPPCHALCQFYVVNSELSCQLYQRSGDMGLGVPFNIASYALLTYMIAHITGLKPGDFIHTLGDAHIYLNHIEPLKIQLQREPRPFPKLRILRKVEKIDDFKAEDFQIEGYNPHPTIKMEMAV

SEQ ID NO: 10184 - protein, 208 aa, Homo sapiens
MEEHCFSRKWTPAETLHRWIVSLSSVPSLQRLLWTSLQPSGSLSWSPPYELASVSLLFYFAFSCGLSNHHPSLSSSAGSSDLPLMALPPCHALCQFYVVNSELSCQLYQRSGDMGLGVPFNIASYALLTYMIAHITGLKPGDFIHTLGDAHIYLNHIEPLKIQLQREPRPFPKLRILRKVEKIDDFKAEDFQIEGYNPHPTIKMEMAV

SEQ ID NO: 10185 - protein, 165 aa, Homo sapiens
MESDYSGQGVDQLQRVIDTIKTNPDDRRIIMCAWNPRDLPLMALPPCHALCQFYVVNSELSCQLYQRSGDMGLGVPFNIASYALLTYMIAHITGLKPGDFIHTLGDAHIYLNHIEPLKIQLQREPRPFPKLRILRKVEKIDDFKAEDFQIEGYNPHPTIKMEMAV

SEQ ID NO: 10186 - protein, 135 aa, Homo sapiens
MCAWNPRDLPLMALPPCHALCQFYVVNSELSCQLYQRSGDMGLGVPFNIASYALLTYMIAHITGLKPGDFIHTLGDAHIYLNHIEPLKIQLQREPRPFPKLRILRKVEKIDDFKAEDFQIEGYNPHPTIKMEMAV

SEQ ID NO: 10187 - protein, 274 aa, Homo sapiens
MPQFSVFVLCLNSKMPLKALRDLFDSMDKTSSSIPPIILLQFLHMAFPQFAEKGEQGQYLQQDANECWIQMMRVLQQKLEAIEDDSVKETDSSSASAATPSKKKSLIDQFFGVEFETTMKCTESEEEEVTKGKENQLQLSCFINQEVKYLFTGLKLRLQEEITKQSPTLQRNALYIKSSKISRLPAYLTIQMVRFFYKEKESVNAKVLKDVKFPLMLDMYELCTPELQEKMVSFRSKFKDLEDKKVNQQPNTSDKKSSPQKEVKYEPFSFADGK

SEQ ID NO: 10188 - protein, 468 aa, Homo sapiens
MVFKAQLFALTGVQPARQKVMVKGGTLKDDDWGNIKIKNGMTLLMMGSADALPEEPSAKTVFVEDMTEEQLASAMELPCGLTNLGNTCYMNATVQCIRSVPELKDALKRYAGALRASGEMASAQYITAALRDLFDSMDKTSSSIPPIILLQFLHMAFPQFAEKGEQGQYLQQDANECWIQMMRVLQQKLEAIEDDSVKETDSSSASAATPSKKKSLIDQFFGVEFETTMKCTESEEEEVTKGKENQLQLSCFINQEVKYLFTGLKLRLQEEITKQSPTLQRNALYIKSSKISRLPAYLTIQMVRFFYKEKESVNAKVLKDVKFPLMLDMYELCTPELQEKMVSFRSKFKDLEDKKVNQQPNTSDKKSSPQKEVKYEPFSFADDIGSNNCGYYDLQAVLTHQGRSSSSGHYVSWVKRKQDEWIKFDDDKVSIVTPEDILRLSGGGDWHIAYVLLYGPRRVEIMEEESEQ

SEQ ID NO: 10189 - protein, 468 aa, Homo sapiens; identical to SEQ ID NO: 10188

SEQ ID NO: 10190 - protein, 213 aa, Homo sapiens
MPRRAENWDEAEVGAEEAGVEEYGPEEDGGEESGAEESGPEESGPEELGAEEEMEAGRPRPVLRSVNSREPSQVIFCNRSPRVVLPVWLNFDGEPQPYPTLPPGTGRRIHSYRGHLWLFRDAGTHDGLLVNQTELFVPSLNVDGQPIFANITLPVYTLKERCLQVVRSLVKPENYRRLDIVRSLYEDLEDHPNVQKDLERLTQERIAHQRMGD

SEQ ID NO: 10191 - protein, 131 aa, Homo sapiens
MAQLRRRAAALPNAAAWHGPPHPQLPSPHDSSGPVLRSPCPRGEHIPPGETDRCKDRNKPGSCWRRKSRPCVAWEIDLPACWEMEGLRLCVGHRAWLIQHFLSGRTRWHFHLQPLVLPMDSWSSLDCFIVF

SEQ ID NO: 10192 - protein, 213 aa, Homo sapiens; identical to SEQ ID NO: 10190

SEQ ID NO: 10193 - protein, 91 aa, Homo sapiens
RPRPVLRSVNSREPSQVIFCNRSPRVVLPVWLNFDGEPQPYPTLPPGTGRRIHSYRGTGPALRPDPAGTIARSEAPLPPRGPFCRRGTEAP

SEQ ID NO: 10194 - protein, 225 aa, Homo sapiens
MSTEAQRVDDSPSTSGGSSDGDQRESVQQEPEREQVQPKKKEGKISSKTAAKLSTSAKRIQKELAEITLDPPPNCSTNITLKGNAHSILNWIFGFWMPTSAGPKGDNIYEWRSTILGPPGSVYEGGVFFLDITFSPDYPFKPPKVTFRTRIYHCNINSQGVICLDILKDNWSPALTISKVLLSICSLLTDCNPADPLVGSIATQYMTNRAEHDRMARQWTKRYAT

SEQ ID NO: 10195 - protein, 201 aa, Homo sapiens
MSTEAQRVDDSPSTSGGSSDGDQRESVQQEPEREQVQPKKKEGKISSKTAAKLSTSAKRIQKELAEITLDPPPNCSAGPKGDNIYEWRSTILGPPGSVYEGGVFFLDITFSPDYPFKPPKVTFRTRIYHCNINSQGVICLDILKDNWSPALTISKVLLSICSLLTDCNPADPLVGSIATQYMTNRAEHDRMARQWTKRYAT

SEQ ID NO: 10196 - protein, 163 aa, Homo sapiens
MTPGQLCSDTFNHVTLSSHKNISLKYNIYSEPPLFEVGAGPKGDNIYEWRSTILGPPGSVYEGGVFFLDITFSPDYPFKPPKVTFRTRIYHCNINSQGVICLDILKDNWSPALTISKVLLSICSLLTDCNPADPLVGSIATQYMTNRAEHDRMARQWTKRYAT

SEQ ID NO: 10197 - protein, 491 aa, Homo sapiens
MELSVLLFLALLTGLLLLLVQRHPNTHDRLPPGPRPLPLLGNLLQMDRRGLLKSFLRFREKYGDVFTVHLGPRPVVMLCGVEAIREALVDKAEAFSGRGKIAMVDPFFRGYGVIFANGNRWKVLRRFSVTTMRDFGMGKRSVEERIQEEAQCLIEELRKSKGALMDPTFLFQSITANIICSIVFGKRFHYQDQEFLKMLNLFYQTFSLISSVFGQLFELFSGFLKYFPGAHRQVYKNLQEINAYIGHSVEKHRETLDPSAPKDLIDTYLLHMEKEKSNAHSEFSHQNLNLNTLSLFFAGTETTSTTLRYGFLLMLKYPHVAERVYREIEQVIGPHRPPELHDRAKMPYTEAVIYEIQRFSDLLPMGVPHIVTQHTSFRGYIIPKDTEVFLILSTALHDPHYFEKPDAFNPDHFLDANGALKKTEAFIPFSLGKRICLGEGIARAELFLFFTTILQNFSMASPVAPEDIDLTPQECGVGKIPPTYQIRFLPR

SEQ ID NO: 10198 - protein, 220 aa, Homo sapiens
MAEEKEDPLSHFHMDTLLMTTHNLLFGGTKTVSTTLHHAFLALMKYPKVQARVQEEIDLVVGRARLPALKDRAAMPYTDAVIHEVQRFADIIPMNLPHRVTRDTAFRGFLIPKGTDVITLLNTVHYDPSQFLTPQEFNPEHFLDANQSFKKSPAFMPFSAGRRLCLGESLARMELFLYLTAILQSFSLQPLGAPEDIDLTPLSSGLGNLPRPFQLCLRPR

SEQ ID NO: 10199 - protein, 491 aa, Homo sapiens [sequence omitted]

SEQ ID NO: 10200 - protein, 377 aa, Homo sapiens
MELSVLLFLALLTGLLLLLVQRHPNSHGTLPPGPRPLPLLGNLLQMDRRGLLKSFLRFREKYGDVFTVHLGPRPVVMLCGVEAIREALVDNAEAFSGRGKIVIMDPVYQGYGMLFANGNRWKVLRRFSVTTMRDFGMGKRSVEERIQDEAQCLIEELRKSKGALVDPTFLFHSITANIICSIIFGKRFHYQDQEFLKTLNLFCQSFLLISSISSQLFELFSGFLKYFPGAHRQVYKNLQEINAYIGHSVEKHRETLDPSAPRDLIDTYLLHMEKEKSNPHSEFSHQNLIINTLSLFFAGTETTSTTLRYGFLLMLKYPHVAERVYKEIEQVVGPHRPPALDDRAKMPYTEAVIREIQRFADLLPMGVPHIVTQHTSF

SEQ ID NO: 10201 - protein, 220 aa, Homo sapiens
MAEKKEDPLSHFHMDTLLMTTHNLLFGGTETVGTTLRHAFLAFMKYPKVQAHVQEEINLVVGHVRLPALKDRAAMPYTDMVIHEVQRFADIIPMNLPHRITRDTAFHGFLIPKGTDVITLLNTVHYDPSQFLTPQEFNPEHFLDANQSFKKSPAFMPFSAGHRLCLGESLARMELFLYLTAILQSFSLQPLGAPEDIDLTPLSSGLGNLPRPFQLCLHPR

SEQ ID NO: 10202 - protein, 205 aa, Homo sapiens
MAHGPGALMLKCVVVGDGAVGKTCLLMSYANDAFPEEYVPTVFDHYAVSVTVGGKQYLLGLYDTAGQEDYDRLRPLSYPMTDVFLICFSVVNPASFQNVKEEWVPELKEYAPNVPFLLIGTQIDLRDDPKTLARLNDMKEKPICVEQGQKLAKEIGACCYVECSALTQKGLKTVFDEAIIAILTPKKHTVKKRIGSRCINCCLIT

SEQ ID NO: 10203 - protein, 157 aa, Homo sapiens
MPTTPSRRSTCPPSSTTTQEDYDRLRPLSYPMTDVFLICFSVVNPASFQNVKEEWVPELKEYAPNVPFLLIGTQIDLRDDPKTLARLNDMKEKPICVEQGQKLAKEIGACCYVECSALTQKGLKTVFDEAIIAILTPKKHTVKKRIGSRCINCCLIT

SEQ ID NO: 10204 - protein, 205 aa, Homo sapiens; identical to SEQ ID NO: 10202

SEQ ID NO: 10205 - protein, 284 aa, Homo sapiens
RAARRQQAGARGAGRARGGAWARPPPGRRGRGPGWRGAGRAAWPLPSAALPKVAVSPGAGRSYDPADPPGEAGPGRGRGRRVAGAAGGRGDRGRGGDPGGDRGGGSAPGPPPPPLLRGEPLHGAGGAALRRGAAATAADPPGGLGLSPGPGRGLRGDHARRPAGSSMAHGPGALMLKCVVVGDGAVGKTCLLMSYANDAFPEEYVPTVFDHYAVSVTVGGKQYLLGLYDTAGQIGACCYVECSALTQKGLKTVFDEAIIAILTPKKHTVKKRIGSRCINCCLIT

SEQ ID NO: 10206 - protein, 126 aa, Homo sapiens
MTDVFLICFSVVNPASFQNVKEEWVPELKEYAPNVPFLLIGTQIDLRDDPKTLARLNDMKEKPICVEQGQKLAKEIGACCYVECSALTQKGLKTVFDEAIIAILTPKKHTVKKRIGSRCINCCLIT

SEQ ID NO: 10207 - protein, 157 aa, Homo sapiens; identical to SEQ ID NO: 10203

SEQ ID NO: 10208 - protein, 185 aa, Homo sapiens [sequence omitted]

SEQ ID NO: 10209 - protein, 142 aa, Homo sapiens
MTKEHQVTTKPKLPIKHWVRTEKAIPLALEGKDLLAQAGRGSKKTAAYAILMLQLLLHRTATGPVVEHAVRGLVLAPTKELAQQAQSMIQWLATYCARDVRVANASAAEDSAFQRAVLMEKPDVLQPWCMLHAVVYTLFKRA

SEQ ID NO: 10210 - protein, 135 aa, Homo sapiens
MAALLLRHVGRHCLRAHFSPQLCIRNWSLPMAMSICHRGTGIALSAGVSLFGMSALLLPGNFESYLELVKSLCLGPALIHTAKFALVFPLMYHTWNGIRHLMWDLGKGLKIPQLYQSGVVVLVLTVLSSMGLAAM

SEQ ID NO: 10211 - protein, 169 aa, Homo sapiens
MAALLLRHVGRHCLRAHFSPQLCIRNAVPLGTTAKEEMERFWNKNIGSNRPLSPHITIYSWSLPMAMSICHRGTGIALSAGVSLFGMSALLLPGNFESYLELVKSLCLGPALIHTAKFALVFPLMYHTWNGIRHLMWDLGKGLKIPQLYQSGVVVLVLTVLSSMGLAAM

SEQ ID NO: 10212 - protein, 189 aa, Homo sapiens [sequence omitted]

SEQ ID NO: 10213 - protein, 105 aa, Homo sapiens
MAMSICHRGTGIALSAGVSLFGMSALLLPGNFESYLELVKSLCLGPALIHTAKFALVFPLMYHTWNGIRHLMWDLGKGLKIPQLYQSGVVVLVLTVLSSMGLAAM

SEQ ID NO: 10214 - protein, 156 aa, Homo sapiens
LSCLSLLSSRNYSAVPLGTTAKEEMERFWNKNIGSNRPLSPHITIYSWSLPMAMSICHRGTGIALSAGVSLFGMSALLLPGNFESYLELVKSLCLGPALIHTAKFALVFPLMYHTWNGIRHLMWDLGKGLKIPQLYQSGVVVLVLTVLSSMGLAAM

SEQ ID NO: 10215 - protein, 1036 aa, Homo sapiens
MASSVGNVADSTGLAELAHREYQAGDFEAAERHCMQLWRQEPDNTGVLLLLSSIHFQCRRLDRSAHFSTLAIKQNPLLAEAYSNLGNVYKERGQLQEAIEHYRHALRLKPDFIDGYINLAAALVAAGDMEGAVQAYVSALQYNPDLYCVRSDLGNLLKALGRLEEAKACYLKAIETQPNFAVAWSNLGCVFNAQGEIWLAIHHFEKAVTLDPNFLDAYINLGNVLKEARIFDRAVAAYLRALSLSPNHAVVHGNLACVYYEQGLIDLAIDTYRRAIELQPHFPDAYCNLANALKEKGSVAEAEDCYNTALRLCPTHADSLNNLANIKREQGNIEEAVRLYRKALEVFPEFAAAHSNLASVLQQQGKLQEALMHYKEAIRISPTFADAYSNMGNTLKEMQDVQGALQCYTRAIQINPAFADAHSNLASIHKDSGNIPEAIASYRTALKLKPDFPDAYCNLAHCLQIVCDWTDYDERMKKLVSIVADQLEKNRLPSVHPHHSMLYPLSHGFRKAIAERHGNLCLDKINVLHKPPYEHPKDLKLSDGRLRVGYVSSDFGNHPTSHLMQSIPGMHNPDKFEVFCYALSPDDGTNFRVKVMAEANHFIDLSQIPCNGKAADRIHQDGIHILVNMNGYTKGARNELFALRPAPIQAMWLGYPGTSGALFMDYIITDQETSPAEVAEQYSEKLAYMPHTFFIGDHANMFPHLKKKAVIDFKSNGHIYDNRIVLNGIDLKAFLDSLPDVKIVKMKCPDGGDNADSSNTALNMPVIPMNTIAEAVIEMINRGQIQITINGFSISNGLATTQINNKAATGEEVPRTIIVTTRSQYGLPEDAIVYCNFNQLYKIDPSTLQMWANILKRVPNSVLWLLRFPAVGEPNIQQYAQNMGLPQNRIIFSPVAPKEEHVRRGQLADVCLDTPLCNGHTTGMDVLWAGTPMVTMPGETLASRVAASQLTCLGCLELIAKNRQEYEDIAVKLGTDLEYLKKVRGKVWKQRISSPLFNTKQYTMELERLYLQMWEHYAAGNKPDHMIKPVEVTESA

SEQ ID NO: 10216 - protein, 920 aa, Homo sapiens
MLQGHFWLVREGIMISPSSPPPPNLFFFPLQIFPFPFTSFPSHLLSLTPPKACYLKAIETQPNFAVAWSNLGCVFNAQGEIWLAIHHFEKAVTLDPNFLDAYINLGNVLKEARIFDRAVAAYLRALSLSPNHAVVHGNLACVYYEQGLIDLAIDTYRRAIELQPHFPDAYCNLANALKEKGSVAEAEDCYNTALRLCPTHADSLNNLANIKREQGNIEEAVRLYRKALEVFPEFAAAHSNLASVLQQQGKLQEALMHYKEAIRISPTFADAYSNMGNTLKEMQDVQGALQCYTRAIQINPAFADAHSNLASIHKDSGNIPEAIASYRTALKLKPDFPDAYCNLAHCLQIVCDWTDYDERMKKLVSIVADQLEKNRLPSVHPHHSMLYPLSHGFRKAIAERHGNLCLDKINVLHKPPYEHPKDLKLSDGRLRVGYVSSDFGNHPTSHLMQSIPGMHNPDKFEVFCYALSPDDGTNFRVKVMAEANHFIDLSQIPCNGKAADRIHQDGIHILVNMNGYTKGARNELFALRPAPIQAMWLGYPGTSGALFMDYIITDQETSPAEVAEQYSEKLAYMPHTFFIGDHANMFPHLKKKAVIDFKSNGHIYDNRIVLNGIDLKAFLDSLPDVKIVKMKCPDGGDNADSSNTALNMPVIPMNTIAEAVIEMINRGQIQITINGFSISNGLATTQINNKAATGEEVPRTIIVTTRSQYGLPEDAIVYCNFNQLYKIDPSTLQMWANILKRVPNSVLWLLRFPAVGEPNIQQYAQNMGLPQNRIIFSPVAPKEEHVRRGQLADVCLDTPLCNGHTTGMDVLWAGTPMVTMPGETLASRVAASQLTCLGCLELIAKNRQEYEDIAVKLGTDLEYLKKVRGKVWKQRISSPLFNTKQYTMELERLYLQMWEHYAAGNKPDHMIKPVEVTESA

SEQ ID NO: 10217 - protein, 920 aa, Homo sapiens; identical to SEQ ID NO: 10216

SEQ ID NO: 10218 - protein, 1046 aa, Homo sapiens
MASSVGNVADSTEPTKRMLSFQGLAELAHREYQAGDFEAAERHCMQLWRQEPDNTGVLLLLSSIHFQCRRLDRSAHFSTLAIKQNPLLAEAYSNLGNVYKERGQLQEAIEHYRHALRLKPDFIDGYINLAAALVAAGDMEGAVQAYVSALQYNPDLYCVRSDLGNLLKALGRLEEAKACYLKAIETQPNFAVAWSNLGCVFNAQGEIWLAIHHFEKAVTLDPNFLDAYINLGNVLKEARIFDRAVAAYLRALSLSPNHAVVHGNLACVYYEQGLIDLAIDTYRRAIELQPHFPDAYCNLANALKEKGSVAEAEDCYNTALRLCPTHADSLNNLANIKREQGNIEEAVRLYRKALEVFPEFAAAHSNLASVLQQQGKLQEALMHYKEAIRISPTFADAYSNMGNTLKEMQDVQGALQCYTRAIQINPAFADAHSNLASIHKDSGNIPEAIASYRTALKLKPDFPDAYCNLAHCLQIVCDWTDYDERMKKLVSIVADQLEKNRLPSVHPHHSMLYPLSHGFRKAIAERHGNLCLDKINVLHKPPYEHPKDLKLSDGRLRVGYVSSDFGNHPTSHLMQSIPGMHNPDKFEVFCYALSPDDGTNFRVKVMAEANHFIDLSQIPCNGKAADRIHQDGIHILVNMNGYTKGARNELFALRPAPIQAMWLGYPGTSGALFMDYIITDQETSPAEVAEQYSEKLAYMPHTFFIGDHANMFPHLKKKAVIDFKSNGHIYDNRIVLNGIDLKAFLDSLPDVKIVKMKCPDGGDNADSSNTALNMPVIPMNTIAEAVIEMINRGQIQITINGFSISNGLATTQINNKAATGEEVPRTIIVTTRSQYGLPEDAIVYCNFNQLYKIDPSTLQMWANILKRVPNSVLWLLRFPAVGEPNIQQYAQNMGLPQNRIIFSPVAPKEEHVRRGQLADVCLDTPLCNGHTTGMDVLWAGTPMVTMPGETLASRVAASQLTCLGCLELIAKNRQEYEDIAVKLGTDLEYLKKVRGKVWKQRISSPLFNTKQYTMELERLYLQMWEHYAAGNKPDHMIKPVEVTESA

SEQ ID NO: 10219 - protein, 536 aa, Homo sapiens [sequence omitted]

SEQ ID NO: 10220 - protein, 536 aa, Homo sapiens [sequence omitted]

SEQ ID NO: 10221 - protein, 536 aa, Homo sapiens [sequence omitted]

SEQ ID NO: 10222 - protein, 347 aa, Homo sapiens
MEFSSPSREECPKPSGRVSIMAGSLTGLLLLQAVSWASDECLQPLQEQKQWALDGAEYRTIQANCTGTGIGYNIIWVPMASCDFSIRTYTYADTPDDFQLHNFSLPEEDTKLKIPLIHRALQLAQRPVSLLASPWTSPTWLKTKGAGNGKGPLKGQPRDIYHQTWARYIVKFLDAYAEHKLQFWAVTAENEPSAGLLSGYPFQCLGFTPEHQRDFIARDLGPTLANGTHHNVRLLMLDDQRLLLPHWAKVVLTDPEAAKYVHGIAVHWYLDFLAPAKATLRETHHLFPNTMLFASEACVGSKFWEQSVRLGSWDRGMQYSHSIITVSHPSLPSCKGDLRPISSLTKD

SEQ ID NO: 10223 - protein, 302 aa, Homo sapiens
MCLQPLQEQKQWALDGAEYRTIQANCTGTGIGYNIIWVPMASCDFSIRTYTYADTPDDFQLHNFSLPEEDTKLKIPLIHRALQLAQRPVSLLASPWTSPTWLKTKGAGNGKGPLKGQPRDIYHQTWARYIVKFLDAYAEHKLQFWAVTAENEPSAGLLSGYPFQCLGFTPEHQRDFIARDLGPTLANGTHHNVRLLMLDDQRLLLPHWAKVVLTDPEAAKYVHGIAVHWYLDFLAPAKATLRETHHLFPNTMLFASEACVGSKFWEQSVRLGSWDRGMQYSHSIITNLLYHVVGWTDWNPSL

SEQ ID NO: 10224 - protein, 41 aa, Homo sapiens
MNPLVGPEAGGGSATWSCLIKNAESARHGGPHTCNPTILGG

SEQ ID NO: 10225 - protein, 630 aa, Homo sapiens
MAAKTPSSEESGLPKLPVPPLQQTLATYLQCMRHLVSEEQFRKSQAIVQQFGAPGGLGETLQQKLLERQEKTANWVSEYWLNDMYLNNRLALPVNSSPAVIFARQHFPGTDDQLRFAASLISGVLSYKALLDSHSIPTDCAKGQLSGQPLCMKQYYGLFSSYRLPGHTQDTLVAQNSSIMPEPEHVIVACCNQFFVLDVVINFRRLSEGDLFTQLRKIVKMASNEDERLPPIGLLTSDGRSEWAEARTVLVKDSTNRDSLDMIERCICLVCLDAPGGVELSDTHRALQLLHGGGYSKNGANRWYDKSLQFVVGRDGTCGVVCEHSPFDGIVLVQCTEHLLKHMTQSSRKLIRADSVSELPAPRRLRWKCSPEIQGHLASSAEKLQRIVKNLDFIVYKFDNYGKTFIKKQKCSPDAFIQVALQLAFYRLHRRLVPTYESASIRRFQEGRVDNIRSATPEALAFVRAVTDHKAAVPASEKLLLLKDAIRAQTAYTVMAITGMAIDNHLLALRELARAMCKELPEMFMDETYLMSNRFVLSTSQVPTTTEMFCCYGPVVPNGYGACYNPQPETILFCISSFHSCKETSSSKFAKAVEESLIDMRDLCSLLPPTESKPLATKEKATRPSQGHQP

SEQ ID NO: 10226 - protein, 630 aa, Homo sapiens; identical to SEQ ID NO: 10225

SEQ ID NO: 10227 - protein, 666 aa, Homo sapiens
MWPECRDEALSTVGPHLCIPAPGLTKTPILEKVPRKMAAKTPSSEESGLPKLPVPPLQQTLATYLQCMRHLVSEEQFRKSQAIVQQFGAPGGLGETLQQKLLERQEKTANWVSEYWLNDMYLNNRLALPVNSSPAVIFARQHFPGTDDQLRFAASLISGVLSYKALLDSHSIPTDCAKGQLSGQPLCMKQYYGLFSSYRLPGHTQDTLVAQNSSIMPEPEHVIVACCNQFFVLDVVINFRRLSEGDLFTQLRKIVKMASNEDERLPPIGLLTSDGRSEWAEARTVLVKDSTNRDSLDMIERCICLVCLDAPGGVELSDTHRALQLLHGGGYSKNGANRWYDKSLQFVVGRDGTCGVVCEHSPFDGIVLVQCTEHLLKHMTQSSRKLIRADSVSELPAPRRLRWKCSPEIQGHLASSAEKLQRIVKNLDFIVYKFDNYGKTFIKKQKCSPDAFIQVALQLAFYRLHRRLVPTYESASIRRFQEGRVDNIRSATPEALAFVRAVTDHKAAVPASEKLLLLKDAIRAQTAYTVMAITGMAIDNHLLALRELARAMCKELPEMFMDETYLMSNRFVLSTSQVPTTTEMFCCYGPVVPNGYGACYNPQPETILFCISSFHSCKETSSSKFAKAVEESLIDMRDLCSLLPPTESKPLATKEKATRPSQGHQP

SEQ ID NO: 10228 - protein, 748 aa, Homo sapiens
MGLRTAKKRGLGGGGKWKREEGGGTRGRREVRPACFLQSGGRGDPGDVGGPAGNPGCSPHPRAATRPPPLPAHTPAHTPEWCGAASAEAAEPRRAGPHLCIPAPGLTKTPILEKVPRKMAAKTPSSEESGLPKLPVPPLQQTLATYLQCMRHLVSEEQFRKSQAIVQQFGAPGGLGETLQQKLLERQEKTANWVSEYWLNDMYLNNRLALPVNSSPAVIFARQHFPGTDDQLRFAASLISGVLSYKALLDSHSIPTDCAKGQLSGQPLCMKQYYGLFSSYRLPGHTQDTLVAQNSSIMPEPEHVIVACCNQFFVLDVVINFRRLSEGDLFTQLRKIVKMASNEDERLPPIGLLTSDGRSEWAEARTVLVKDSTNRDSLDMIERCICLVCLDAPGGVELSDTHRALQLLHGGGYSKNGANRWYDKSLQFVVGRDGTCGVVCEHSPFDGIVLVQCTEHLLKHMTQSSRKLIRADSVSELPAPRRLRWKCSPEIQGHLASSAEKLQRIVKNLDFIVYKFDNYGKTFIKKQKCSPDAFIQVALQLAFYRLHRRLVPTYESASIRRFQEGRVDNIRSATPEALAFVRAVTDHKAAVPASEKLLLLKDAIRAQTAYTVMAITGMAIDNHLLALRELARAMCKELPEMFMDETYLMSNRFVLSTSQVPTTTEMFCCYGPVVPNGYGACYNPQPETILFCISSFHSCKETSSSKFAKAVEESLIDMRDLCSLLPPTESKPLATKEKATRPSQGHQP

SEQ ID NO: 10229 - protein, 630 aa, Homo sapiens; identical to SEQ ID NO: 10225

SEQ ID NO: 10230 - protein, 112 aa, Homo sapiens
MHRYVHCSTTRNSKDLEPTEMSINDRVDKENVAHIHHGILCSHKKDEFMSFAGTWMKLETIILSKLSQTIVGTENQTPHVLTYKWELNKNTWTQGRELTHPGLLGGGGLRKG

SEQ ID NO: 10231 - protein, 80 aa, Homo sapiens
  VARIANT (1)...(80): Xaa = Any Amino Acid
MGRPNSSALDLRASRMASCGRTIFLEGRLQFGQALHGGAGADTLILGHSDAPLGALVIMDRGGHRHNLSLETALALGSCX

SEQ ID NO: 10232 - protein, 532 aa, Homo sapiens
MAPSFTARIQLFLLRALGFLIGLVGRAALVLGGPKFASKTPRPVTEPLLLLSGMQLAKLIRQRKVKCIDVVQAYINRIKDVNPMINGIVKYRFEEAMKEAHAVDQKLAEKQEDEATLENKWPFLGVPLTVKEAFQLQGMPNSSGLMNRRDAIAKTDATVVALLKGAGAIPLGITNCSELCMWYESSNKIYGRSNNPYDLQHIVGGSSGGEGCTLAAACSVIGVGSDIGGSIRMPAFFNGIFGHKPSPGVVPNKGQFPLAVGAQELFLCTGPMCRYAEDLAPMLKVMAGPGIKRLKLDTKVHLKDLKFYWMEHDGGSFLMSKVDQDLIMTQKKVVVHLETILGASVQHVKLKKMKYSFQLWIAMMSAKGHDGKEPVKFVDLLGDHGKHVSPLWELIKWCLGLSVYTIPSIGLALLEEKLRYSNEKYQKFKAVEESLRKELVDMLGDDGVFLYPSHPTVAPKHHVPLTRPFNFAYTGVFSALGLPVTQCPLGLNAKGLPLGIQVVAGPFNDHLTLAVAQYLEKTFGGWVCPGKF

SEQ ID NO: 10233 - protein, 570 aa, Homo sapiens
MEEATSKMTEIISEPTVTLENEGARNPQALGPCGIQAAMAPSFTARIQLFLLRALGFLIGLVGRAALVLGGPKFASKTPRPVTEPLLLLSGMQLAKLIRQRKVKCIDVVQAYINRIKDVNPMINGIVKYRFEEAMKEAHAVDQKLAEKQEDEATLENKWPFLGVPLTVKEAFQLQGMPNSSGLMNRRDAIAKTDATVVALLKGAGAIPLGITNCSELCMWYESSNKIYGRSNNPYDLQHIVGGSSGGEGCTLAAACSVIGVGSDIGGSIRMPAFFNGIFGHKPSPGVVPNKGQFPLAVGAQELFLCTGPMCRYAEDLAPMLKVMAGPGIKRLKLDTKVHLKDLKFYWMEHDGGSFLMSKVDQDLIMTQKKVVVHLETILGASVQHVKLKKMKYSFQLWIAMMSAKGHDGKEPVKFVDLLGDHGKHVSPLWELIKWCLGLSVYTIPSIGLALLEEKLRYSNEKYQKFKAVEESLRKELVDMLGDDGVFLYPSHPTVAPKHHVPLTRPFNFAYTGVFSALGLPVTQCPLGLNAKGLPLGIQVVAGPFNDHLTLAVAQYLEKTFGGWVCPGKF

SEQ ID NO: 10234 - protein, 99 aa, Homo sapiens
MWELPRDLLNSFTQNADSNMDNKVQAEVVSGGDEELVGNSSKGDCCYVLTERRVAFCPCPRDLWNFEIERDDLGYLVEEISKQQSVQKVTWVLLKTFHF

SEQ ID NO: 10235 - protein, 222 aa, Homo sapiens [sequence omitted]

SEQ ID NO: 10236 - protein, 222 aa, Homo sapiens [sequence omitted]

SEQ ID NO: 10237 - protein, 466 aa, Homo sapiens
MLLGGPPRSPRSGTSPKGPWSSTGHVQFGKSPQTWPRRTRPRSPEPAAPSGVRGSTWTRRRDSPRRAGPTALSRYVGHLWMGRRPPSPEARGPVPRSSAASRARRSLASPGISPGPLTATIGGAVAGGGPRQGRAEAHKEVFPGQRVGKMAAPMELFCWSGGWGLPSVDLDSLAVLTYARFTGAPLKVHKISNPWQSPSGTLPALRTSHGEVISVPHKIITHLRKEKYNADYDLSARQGADTLAFMSLLEEKLLPVLVHTFWIDTKNYVEVTRKWYAEAMPFPLNFFLPGRMQRQYMERLQLLTGEHRPEDEEELEKELYREARECLTLLSQRLGSQKFFFGDAPASLDAFVFSYLALLLQAKLPSGKLQVHLRGLHNLCAYCTHILSLYFPWDGAEVPPQRQTPAGPETEEEPYRRRNQILSVLAGLAAMVGYALLSGIVSIQRATPARAPGTRTLGMAEEDEEE

SEQ ID NO: 10238 - protein, 419 aa, Homo sapiens
MPLSRWLRSVGVFLLPAPYWAPRERWLGSLRRPSLVHGYPVLAWHSARCWCQAWTEEPRALCSSLRMNGDQNSDVYAQEKQDFVQHFSQIVRVLTEDEMGHPEIGDAIARLKEVLEYNAIGGKYNRGLTVVVAFRELVEPRKQDADSLQRAWTVGWCVELLQAFFLVADDIMDSSLTRRGQICWYQKPGVGLDAINDANLLEACIYRLLKLYCREQPYYLNLIELFLQSSYQTEIGQTLDLLTAPQGNVDLVRFTEKRYKSIVKYKTAFYSFYLPIAAAMYMAGIDGEKEHANAKKILLEMGEFFQIQDDYLDLFGDPSVTGKIGTDIQDNKCSWLVVQCLQRATPEQYQILKENYGQKEAEKVARVKALYEELDLPAVFLQYEEDSYSHIMALIEQYAAPLPPAVFLGLARKIYKRRK

SEQ ID NO: 10239 - protein, 419 aa, Homo sapiens; identical to SEQ ID NO: 10238

SEQ ID NO: 10240 - protein, 248 aa, Homo sapiens
MDSSLTRRGQICWYQKPGVGLDAINDANLLEACIYRLLKLYCREQPYYLNLIELFLQSSYQTEIGQTLDLLTAPQGNVDLVRFTEKRYKSIVKYKTAFYSFYLPIAAAMYMAGIDGEKEHANAKKILLEMGEFFQIQDDYLDLFGDPSVTGKIGTDIQDNKCSWLVVQCLQRATPEQYQILKENYGQKEAEKVARVKALYEELDLPAVFLQYEEDSYSHIMALIEQYAAPLPPAVFLGLARKIYKRRK

SEQ ID NO: 10241 - protein, 348 aa, Homo sapiens
MPRGRGGEIHVTSPRADQGSETPSCLEVQCWGSRAMSDLLLLGLIGGLTLLLLLTLLAFAGYSGLLAGVEVSAGSPPIRNVTVAYKFHMGLYGETGRLFTESCSISPKLRSIAVYYDNPHMVPPDKCRCAVGSILSEGEESPSPELIDLYQKFGFKVFSFPAPSHVVTATFPYTTILSIWLATRRVHPALDTYIKERKLCAYPRLEIYQEDQIHFMCPLARQGDFYVPEMKETEWKWRGLVEAIDTQVDGTGADTMSDTSSVSLEVSPGSRETSAATLSPGASSRGWDDGDTRSEHSYSESGASGSSFEELDLEGEGPLGESRLDPGTEPLGTTKWLWEPTAPEKGKE

SEQ ID NO: 10242 - protein, 1415 aa, Homo sapiens
MCGTEHAQLGEDGQQPPRCTSTTSSQSEPSEQLRRHQGKNLASEDPKKKRAQKPSHMRRNIRKLLREDQLEPVTKAAQQEELERRKRLEQQRKDYAAPIPTVPLEFLPEEIALRASDGPQLPPRVLAQEVICLDSSSGSEDEKSSRDEVIELSSGEEDTLHIVDSSESVSEDDEEEEKGGTHVNDVLNQRDALGRVLVNLNHPPEEENVFLAPQLARAVKPHQIGGIRFLYDNLVESLERFKTSSGFGCILAHSMGLGKTLQVISFIDVLFRHTPAKTVLAIVPVNTLQNWLAEFNMWLPPPEALPADNKPEEVQPRFFKVHILNDEHKTMASRAKVMADWVSEGGVLLMGYEMYRLLTLKKSFATGRPKKTKKRSHPVIIDLDEEDRQQEFRREFEKALCRPGPDVVICDEGHRIKNCQASTSQALKNIRSRRRVVLTGYPLQNNLIEYWCMVDFVRPDFLGTRQEFSNMFERPILNGQCIDSTPQDVRLMRYRSHVLHSLLEGFVQRRGHTVLKIHLPAKEENVILVRLSKIQRDLYTQFMDRFRDCGSSGWLGLNPLKAFCVCCKIWNHPDVLYEALQKESLANEQDLDVEELGSAGTSARCPPQGTKGKGEDSTLASSMGEATNSKFLQGVGFNPFQERGNNIVTYEWAKDLLTNYQTGVLENSPKMVLLFHLIEESVKLGDKILVFSQSLSTLALIEEFLGKREVPCPPGTEGQGAQKWVRNISYFRLDGSTPAFERERLINQFNDPSNLTTWLFLLSTRAGCLGVNLIGANRVVVFDASWNPCHDAQAVCRVYRYGQKKPCYIYRLVADYTLEKKIYDRQISKQGMSDRVVDDLNPMLNFTRKEVENLLHFVEKEPAPQVSLNVKGIKESVLQLACLKYPHLITKEPFEHESLLLNRKDHKLTKAEKKAAKKSYEEDKRTSVPYTRPSYAQYYPASDQSLTSIPAFSQRNWQPTLKGDEKPVASVRPVQSTPIPMMPRHVPLGGSVSSASSTNPSMNFPINYLQRAGVLVQKVVTTTDIVIPGLNSSTDVQARINAGESIHIIRGTKGTYIRTSDGRIFAVRATGKPKVPEDGRMAASGSQGPSCESTSNGRHSASSPKAPDPEGLARPVSPDSPEIISELQQYADVAAARESRQSSPSTNAALPGPPAQLMDSSAVPGTALGTEPRLGGHCLNSSLLVTGQPCGDRHPVLDLRGHKRKLATPPAAQESSRRRSRKGHLPAPVQPYEHGYPVSGGFAMPPVSLNHNLTTPFTSQAGENSLFMGSTPSYYQLSNLLADARLVFPVTTDPLVPAGPVSSSSTATSVTASNPSFMLNPSVPGILPSYSLPFSQPLLSEPRMFAPFPSPVLPSNLSRGMSIYPGYMSPHAGYPAGGLLRSQVPPFDSHEVAEVGFSSNDDEDKDDDVIEVTGK

SEQ ID NO: 10243 - protein, 352 aa, Homo sapiens
MRPWGSPYSSGQPTSAATGAGHAPGPWSCLEVQCWGSRAMSDLLLLGLIGGLTLLLLLTLLAFAGYSGLLAGVEVSAGSPPIRNVTVAYKFHMGLYGETGRLFTESCSISPKLRSIAVYYDNPHMVPPDKCRCAVGSILSEGEESPSPELIDLYQKFGFKVFSFPAPSHVVTATFPYTTILSIWLATRRVHPALDTYIKERKLCAYPRLEIYQEDQIHFMCPLARQGDFYVPEMKETEWKWRGLVEAIDTQVDGTGADTMSDTSSVSLEVSPGSRETSAATLSPGASSRGWDDGDTRSEHSYSESGASGSSFEELDLEGEGPLGESRLDPGTEPLGTTKWLWEPTAPEKGKE

SEQ ID NO: 10244 - protein, 402 aa, Homo sapiens
MDSSAVPGTALGTEPRLGGHCLNSSLLVTGQPCGDRHPVLDLRGHKRKLATPPAAQESSRRRSRKGHLPAPVQPYEHGCLEVQCWGSRAMSDLLLLGLIGGLTLLLLLTLLAFAGYSGLLAGVEVSAGSPPIRNVTVAYKFHMGLYGETGRLFTESCSISPKLRSIAVYYDNPHMVPPDKCRCAVGSILSEGEESPSPELIDLYQKFGFKVFSFPAPSHVVTATFPYTTILSIWLATRRVHPALDTYIKERKLCAYPRLEIYQEDQIHFMCPLARQGDFYVPEMKETEWKWRGLVEAIDTQVDGTGADTMSDTSSVSLEVSPGSRETSAATLSPGASSRGWDDGDTRSEHSYSESGASGSSFEELDLEGEGPLGESRLDPGTEPLGTTKWLWEPTAPEKGKE

SEQ ID NO: 10245 - protein, 313 aa, Homo sapiens
MSDLLLLGLIGGLTLLLLLTLLAFAGYSGLLAGVEVSAGSPPIRNVTVAYKFHMGLYGETGRLFTESCSISPKLRSIAVYYDNPHMVPPDKCRCAVGSILSEGEESPSPELIDLYQKFGFKVFSFPAPSHVVTATFPYTTILSIWLATRRVHPALDTYIKERKLCAYPRLEIYQEDQIHFMCPLARQGDFYVPEMKETEWKWRGLVEAIDTQVDGTGADTMSDTSSVSLEVSPGSRETSAATLSPGASSRGWDDGDTRSEHSYSESGASGSSFEELDLEGEGPLGESRLDPGTEPLGTTKWLWEPTAPEKGKE

SEQ ID NO: 10246 - protein, 259 aa, Homo sapiens
  VARIANT (1)...(259): Xaa = Any Amino Acid
PQVPKSKALEATKLAIEAGFRHIDSAHLYNNEEQVGLAIRSKIADGSVKREDIFYTSKLWCNSHRPELVRPALERSLKNLQLDYVDLYLIHFPVSVKPGEEVIPKDENGKILFDTVDLCATWEAVEKCKDAGLAKSIGVSNFNRRQLEMILNKPGLKYKPVCNQVECHPYFNQRKLLDFCKSKDIVLVAYSALGSHREEPWVDPNSPVLLEDPVLCALAKKHKRTPALIALRYQLQRGVVVLAKSYNEQRIRQNVQVRX

SEQ ID NO: 10247 - protein, 259 aa, Homo sapiens [sequence omitted]

SEQ ID NO: 10248 - protein, 105 aa, Homo sapiens
MFITVSSCASPNFQTSLENTSIDHDWFMVLCMEHHMFREIKNSDSGTWVKSTIHYIWISRSFAVEERYCHRENYRSRRKSMKVNDDTPLGTRKRYLFIHVIVVRD

SEQ ID NO: 10249 - protein, 760 aa, Homo sapiens
MCNPEEAALLRLEEVFSATLAHVNSLVLQPLLPAAPDPSDPWGRECLRLLQQLHKSSQQLWEVTEESLHSLQERLRYPDSTGLESLLLLRGADRVLQAHIEYIESYTSCMVVQAFQKAAKRRSEYWRGQRKALRQLLSGVSSEGSVGASLGQALHQPLAHHVQQYVLLLLSLGDTIGEHHPTRELVVNAVTLFGNLQSFMKQELDQAVATQALWHTLRGRLRDVLCTPAHRLLQDSQDVPVTVAPLRAERVLLFDDALVLLQGHNVHTFDLKLVWVDPGQDGCTFHLLTPEEEFSFCAKDSQGQAVWQWKVTWAVHQALHGKKDFPVLGAGLEPSQPPDCRCAEYTFQAEGRLCQATYEGEWCRGRPQGTLKWPDGRNHVGNFCQGLEHGFGIRLLPQASEDKFDCYKCHWREGSMCGYGICEYSTDEVYKGYFQEGLRHGFGVLESGPQAPQPFRYTGHWERGQRSGYGIEEDGDRGERYIGMWQAGQRHGPGVMVTQAGVCYQGTFQADKTVGPGILLSEDDSLYEGTFTRDLTLMGKGKVTFPNGFTLEGSFGSGAGRGLHTQGVLDTAALPPDPSSTCKRQLGVGAFPVESRWQGVYSPFRDFVCAGCPRDLQEALLGFDVQSSRELRRSQDYLSCERTHPEDSVGSMEDILEELLQHREPKALQLYLRKALSNSLHPLGKLLRTLMLTFQATYAGVGANKHLQELAQEEVKQHAQELWAAYRWARWQTGQLLPCDTSVPFPGISSALHLGGMPSV

SEQ ID NO: 10250 - protein, 479 aa, Homo sapiens
MCNPEEAALLRLEEVFSATLAHVNSLVLQPLLPAAPDPSDPWGRECLRLLQQLHKSSQQLWEVTEESLHSLQERLRYPDSTGLESLLLLRGADRVLQAHIEYIESYTSCMVVQAFQKAAKRRSEYWRGQRKALRQLLSGVSSEGSVGASLGQALHQPLAHHVQQYVLLLLSLGDTIGEHHPTRELVVNAVTLFGNLQSFMKQELDQAVATQALWHTLRGRLRDVLCTPAHRLLQDSQDVPVTVAPLRAERVLLFDDALVLLQGHNVHTFDLKLVWVDPGQDGCTFHLLTPEEEFSFCAKDSQGQAVWQWKVTWAVHQALHGKKDFPVLGAGLEPSQPPDCRCAEYTFQAEGRLCQATYEGEWCRGRPHGKGTLKWPDGRNHVGNFCQGLEHGFGIRLLPQASEDKFDCYKCHWREGSMCGYGICEYSTDEVYKGYFQEGLRHGFGVLESGPQAPQPFRYTGHWERGQRSGYGIEEDGDR

SEQ ID NO: 10251 - protein, 218 aa, Homo sapiens
MSMTLGYWDIRGLAHAIRLLLEYTDSSYEEKKYTMGDAPDYDRSQWLNEKFKLGLDFPNLPYLIDGAHKITQSNAILCYIARKHNLCGETEEEKIRVDILENQAMDVSNQLARVCYSPDFEKLKPEYLEELPTMMQHFSQFLGKRPWFVGDKITFVDFLAYDVLDLHRIFEPNCLDAFPNLKDFISRFEGLEKISAYMKSSRFLPKPLYTRVAVWGNK

SEQ ID NO: 10252 - protein, 195 aa, Homo sapiens
MSMTLGYWDIRGLAHAIRLLLEYTDSSYEEKKYTMGDAPDYDRSQWLNEKFKLGLDFPNLPYLIDGAHKITQSNAILCYIARKHNLCGETEEEKIRVDILENQAMDVSNQLARVCYSPDFEKLKPEYLEELPTMMQHFSQFLGKRPWFVGDKITFVDFLAYDVLDLHRIFEPNCLDAFPNLKDFISRFEVSCGIM

SEQ ID NO: 10253 - protein, 248 aa, Homo sapiens [sequence omitted]

SEQ ID NO: 10254 - protein, 95 aa, Homo sapiens
MSMTLGYWDIRGLAHAIRLLLEYTDSSYEEKKYTMGDAPDYDRSQWLNEKFKLGLDFPNVGRQKRRRFVWTFWRTRLWTSPISWPESATALTLRN

SEQ ID NO: 10255 - protein, 147 aa, Homo sapiens
MSFRFGQHLIKPSVVFLKTELSFALVNRKPVVPGHVLVCPLRPVERFHDLRPDEVADLFQTTQRVGTVVEKHFHGTSLTFSMQDGPEAGQTVKHVHVHVLPRKAGDFHRNDSIYEELQKHDKEDFPASWRSEEEMAAEAAALRVYFQ

SEQ ID NO: 10256 - protein, 147 aa, Homo sapiens; identical to SEQ ID NO: 10255

SEQ ID NO: 10257 - protein, 168 aa, Homo sapiens
MGEYATLYALAKMNGRPAFIPAQMHSTLAPIFRITLPVLHSATASRIPWQNYHLNDWMEEEYRHIPGRCVRLTGYPCSWTFYHHLRQEILQEFTLHDHVREEAQKFLRGLQAKWAGQATFVGVHVRRGDYVRVMPRVWKGVLADRLPAAGPGLVPGLLPPPGLCGHQR

SEQ ID NO: 10258 - protein, 78 aa, Homo sapiens
MNHPGSNGADGSRTAGGDPTFLPPPWGSSEASWNPNCWSHLRALPSPREGGSVPPALPNPALNHRFCSGSENKGGVSK

SEQ ID NO: 10259 - protein, 401 aa, Homo sapiens
MMKLCKPKNMGKEETQEATLSPQGPLPARPPATVWDVSAVAPGGPAAGQPRAAWPRRLTAAVKGFWATRPSFSTFYFVFAIFVVSTIFHCHQHLALVPAPWAYSARVVLAPRHLPREDLGMWTINAIGRLGNQMGEYATLYALAKMNGRPAFIPAQMHSTLAPIFRITLPVLHSATASRIPWQNYHLNDWMEEEYRHIPGEYVRFTGYPCSWTFYHHLRQEILQEFTLHDHVREEAQKFLRGLQVNGSRPGTFVGVHVRRGDYVHVMPKVWKGVVADRRYLQQALDWFRARYSSLIFVVTSNGMAWCRENIDTSHGDVVFAGDGIEGSPAKDFALLTQCNHTIMTIGTFGIWAAYLTGGDTIYLANYTLPDSPFLKIFKPEAAFLPEWTGIAADLSPLLKH

SEQ ID NO: 10260 - protein, 281 aa, Homo sapiens
MWTINAIGRLGNQMGEYATLYALAKMNGRPAFIPAQMHSTLAPIFRITLPVLHSATASRIPWQNYHLNDWMEEEYRHIPGEYVRFTGYPCSWTFYHHLRQEILQEFTLHDHVREEAQKFLRGLQVNGSRPGTFVGVHVRRGDYVHVMPKVWKGVVADRRYLQQALDWFRARYSSLIFVVTSNGMAWCRENIDTSHGDVVFAGDGIEGSPAKDFALLTQCNHTIMTIGTFGIWAAYLTGGDTIYLANYTLPDSPFLKIFKPEAAFLPEWTGIAADLSPLLKH

SEQ ID NO: 10261 - protein, 343 aa, Homo sapiens
MLVVQMPFSFPMAHFILFVFTVSTIFHVQQRLAKIQAMWELPVQIPVLASTSKALGPSQLRGMWTINAIGRLGNQMGEYATLYALAKMNGRPAFIPAQMHSTLAPIFRITLPVLHSATASRIPWQNYHLNDWMEEEYRHIPGEYVRFTGYPCSWTFYHHLRQEILQEFTLHDHVREEAQKFLRGLQVNGSRPGTFVGVHVRRGDYVHVMPKVWKGVVADRRYLQQALDWFRARYSSLIFVVTSNGMAWCRENIDTSHGDVVFAGDGIEGSPAKDFALLTQCNHTIMTIGTFGIWAAYLTGGDTIYLANYTLPDSPFLKIFKPEAAFLPEWTGIAADLSPLLKH

SEQ ID NO: 10262 - protein, 299 aa, Homo sapiens
MMKLCKPKNMGKEETQEATLSPQGPLPARPPATVWDVSAVAPGGPAAGQPRAAWPRRLTAAVKGFWATRPSFSTFYFVFAIFVVSTIFHCHQHLALVPAPWAYSARVVLAPRHLPREDLFTINSKGRLGNQMGEYATLYALAKMNGRPAFIPAQMHSTLAPIFRITLPVLHSATASRIPWQNYHLNDWMEEEYRHIPGRCVRLTGYPCSWTFYHHLRQEILQEFTLHDHVREEAQKFLRGLQAKWAGQATFVGVHVRRGDYVRVMPRVWKGVLADRLPAAGPGLVPGLLPPPGLCGHQR

SEQ ID NO: 10263 - protein, 369 aa, Homo sapiens
MNDFGRGWVKRLLSPQPCLLTMSSLLPTAVKGFWATRPSFSTFYFVFAIFVVSTIFHCHQHLALVPAPWAYSARVVLAPRHLPREDLGMWTINAIGRLGNQMGEYATLYALAKMNGRPAFIPAQMHSTLAPIFRITLPVLHSATASRIPWQNYHLNDWMEEEYRHIPGEYVRFTGYPCSWTFYHHLRQEILQEFTLHDHVREEAQKFLRGLQVNGSRPGTFVGVHVRRGDYVHVMPKVWKGVVADRRYLQQALDWFRARYSSLIFVVTSNGMAWCRENIDTSHGDVVFAGDGIEGSPAKDFALLTQCNHTIMTIGTFGIWAAYLTGGDTIYLANYTLPDSPFLKIFKPEAAFLPEWTGIAADLSPLLKH

SEQ ID NO: 10264 - protein, 137 aa, Homo sapiens [sequence omitted]

SEQ ID NO: 10265 - protein, 355 aa, Homo sapiens
MIEAEEQQPCKTDFYSELPKVELHAHLNGSISSHTMKKLIAQKPDLKIHDQMTVIDKGKKRTLEECFQMFQTIHQLTSSPEDILMVTKDVIKEFADDGVKYLELRSTPRRENATGMTKKTYVESILEGIKQSKQENLDIDVRYLIAVDRRGGPLVAKETVKLAEEFFLSTEGTVLGLDLSGDPTVGQAKDFLEPLLEAKKAGLKLALHLSEIPNQKKETQILLDLLPDRIGHGTFLNSGEGGSLDLVDFVRQHRIPLELCLTSNVKSQTVPSYDQHHFGFWYSIAHPSVICTDDKGVFATHLSQEYQLAAETFNLTQSQVWDLSYESINYIFASDSTRSELRKKWNHLKPRVLHI

SEQ ID NO: 10266 - protein, 71 aa, Homo sapiens [sequence omitted]

SEQ ID NO: 10267 - protein, 163 aa, Homo sapiens
MTLLKCWPKTHSPKEVMFLNKLEAILDVIEPSEFVKTMEPLFRQLAKCVSSPHFQVAERALYYWNNEYIMSLISDNAAKILPIMFPSLYHNSKTHWNKIIHGLIYNALNLFIEMEQKLFDDCTQQSKAEKLKEKLKMEVREEAWVKIENLAKANPQVLKTRVT

SEQ ID NO: 10268 - protein, 94 aa, Homo sapiens
MAFCVPTANMLVVDLTCHLKKPAKYGNTKKVMKEARKGPSRASWCYTEHQVVSSNYNSDIDLPLSTLGLALSSAITLSSSYSDMTRNLATATGW

SEQ ID NO: 10269 - protein, 484 aa, Homo sapiens
MAGAAGRVQDRALRRFPITLPVGDLSNLHLKEEKIKPDTNGAVVKTNANAEKTDEEEKEDRAAQSLLNKLIRSNLVDNTNQVEVLQRDPNSPLYSVKSFEELRLKPQLLQGVYAMGFNRPSKIQENALPLMLAEPPQNLIAQSQSGTGKTAAFVLAMLSQVEPANKYPQCLCLSPTYELALQTGKVIEQMGKFYPELKLAYAVRGNKLERGQKISEQIVIGTPGTVLDWCSKLKFIDPKKIKVFVLDEADVMIATQGHQDQSIRIQRMLPRNCQMLLFSATFEDSVWKFAQKVVPDPNVIKLKREEETLDTIKQYYVLCSSRDEKFQALCNLYGAITIAQAMIFCHTRKTASWLAAELSKEGHQVALLSGEMMVEQRAAVIERFREGKEKVLVTTNVCARGIDVEQVSVVINFDLPVDKDGNPDNETYLHRIGRTGRFGKRGLAVNMVDSKHSMNILNRIQEHFNKKIERLDTDDLDEIEKIAN

SEQ ID NO: 10270 - protein, 461 aa, Homo sapiens
MATDSWALAVDEQEAAAESLSNLHLKEEKIKPDTNEDRAAQSLLNKLIRSNLVDNTNQVEVLQRDPNSPLYSVKSFEELRLKPQLLQGVYAMGFNRPSKIQENALPLMLAEPPQNLIAQSQSGTGKTAAFVLAMLSQVEPANKYPQCLCLSPTYELALQTGKVIEQMGKFYPELKLAYAVRGNKLERGQKISEQIVIGTPGTVLDWCSKLKFIDPKKIKVFVLDEADVMIATQGHQDQSIRIQRMLPRNCQMLLFSATFEDSVWKFAQKVVPDPNVIKLKREEETLDTIKQYYVLCSSRDEKFQALCNLYGAITIAQAMIFCHTRKTASWLAAELSKEGHQVALLSGEMMVEQRAAVIERFREGKEKVLVTTNVCARGIDVEQVSVVINFDLPVDKDGNPDNETYLHRIGRTGRFGKRGLAVNMVDSKHSMNILNRIQEHFNKKIERLDTDDLDEIEKIAN

SEQ ID NO: 10271 - protein, 448 aa, Homo sapiens
MATDSWALAVDEQEAAAESLSNLHLKEEKIKPDTNGAVVKTNANAEKTDEEEKEDRAAQSLLNKLIRSNLVDNTNQVEVLQRDPNSPLYSVKSFEELRLPQNLIAQSQSGTGKTAAFVLAMLSQVEPANKYPQCLCLSPTYELALQTGKVIEQMGKFYPELKLAYAVRGNKLERGQKISEQIVIGTPGTVLDWCSKLKFIDPKKIKVFVLDEADVMIATQGHQDQSIRIQRMLPRNCQMLLFSATFEDSVWKFAQKVVPDPNVIKLKREEETLDTIKQYYVLCSSRDEKFQALCNLYGAITIAQAMIFCHTRKTASWLAAELSKEGHQVALLSGEMMVEQRAAVIERFREGKEKVLVTTNVCARGIDVEQVSVVINFDLPVDKDGNPDNETYLHRIGRTGRFGKRGLAVNMVDSKHSMNILNRIQEHFNKKIERLDTDDLDEIEKIAN

SEQ ID NO: 10272 - protein, 466 aa, Homo sapiens
MQLREKLSNLHLKEEKIKPDTNGAVVKTNANAEKTDEEEKEDRAAQSLLNKLIRSNLVDNTNQVEVLQRDPNSPLYSVKSFEELRLKPQLLQGVYAMGFNRPSKIQENALPLMLAEPPQNLIAQSQSGTGKTAAFVLAMLSQVEPANKYPQCLCLSPTYELALQTGKVIEQMGKFYPELKLAYAVRGNKLERGQKISEQIVIGTPGTVLDWCSKLKFIDPKKIKVFVLDEADVMIATQGHQDQSIRIQRMLPRNCQMLLFSATFEDSVWKFAQKVVPDPNVIKLKREEETLDTIKQYYVLCSSRDEKFQALCNLYGAITIAQAMIFCHTRKTASWLAAELSKEGHQVALLSGEMMVEQRAAVIERFREGKEKVLVTTNVCARGIDVEQVSVVINFDLPVDKDGNPDNETYLHRIGRTGRFGKRGLAVNMVDSKHSMNILNRIQEHFNKKIERLDTDDLDEIEKIAN

SEQ ID NO: 10273 - protein, 370 aa, Homo sapiens
MGFNRPSKIQENALPLMLAEPPQNLIAQSQSGTGKTAAFVLAMLSQVEPANKYPQCLCLSPTYELALQTGKVIEQMGKFYPELKLAYAVRGNKLERGQKISEQIVIGTPGTVLDWCSKLKFIDPKKIKVFVLDEADVMIATQGHQDQSIRIQRMLPRNCQMLLFSATFEDSVWKFAQKVVPDPNVIKLKREEETLDTIKQYYVLCSSRDEKFQALCNLYGAITIAQAMIFCHTRKTASWLAAELSKEGHQVALLSGEMMVEQRAAVIERFREGKEKVLVTTNVCARGIDVEQVSVVINFDLPVDKDGNPDNETYLHRIGRTGRFGKRGLAVNMVDSKHSMNILNRIQEHFNKKIERLDTDDLDEIEKIAN

SEQ ID NO: 10274 - protein, 479 aa, Homo sapiens
MATDSWALAVDEQEAAAESLSNLHLKEEKIKPDTNGAVVKTNANAEKTDEEEKEDRAAQSLLNKLIRSNLVDNTNQVEVLQRDPNSPLYSVKSFEELRLKPQLLQGVYAMGFNRPSKIQENALPLMLAEPPQNLIAQSQSGTGKTAAFVLAMLSQVEPANKYPQCLCLSPTYELALQTGKVIEQMGKFYPELKLAYAVRGNKLERGQKISEQIVIGTPGTVLDWCSKLKFIDPKKIKVFVLDEADVMIATQGHQDQSIRIQRMLPRNCQMLLFSATFEDSVWKFAQKVVPDPNVIKLKREEETLDTIKQYYVLCSSRDEKFQALCNLYGAITIAQAMIFCHTRKTASWLAAELSKEGHQVALLSGEMMVEQRAAVIERFREGKEKVLVTTNVCARGIDVEQVSVVINFDLPVDKDGNPDNETYLHRIGRTGRFGKRGLAVNMVDSKHSMNILNRIQEHFNKKIERLDTDDLDEIEKIAN

SEQ ID NO: 10275 - protein, 328 aa, Homo sapiens
MLSQVEPANKYPQCLCLSPTYELALQTGKVIEQMGKFYPELKLAYAVRGNKLERGQKISEQIVIGTPGTVLDWCSKLKFIDPKKIKVFVLDEADVMIATQGHQDQSIRIQRMLPRNCQMLLFSATFEDSVWKFAQKVVPDPNVIKLKREEETLDTIKQYYVLCSSRDEKFQALCNLYGAITIAQAMIFCHTRKTASWLAAELSKEGHQVALLSGEMMVEQRAAVIERFREGKEKVLVTTNVCARGIDVEQVSVVINFDLPVDKDGNPDNETYLHRIGRTGRFGKRGLAVNMVDSKHSMNILNRIQEHFNKKIERLDTDDLDEIEKIAN

SEQ ID NO: 10276 - protein, 370 aa, Homo sapiens; identical to SEQ ID NO: 10273

SEQ ID NO: 10277 - protein, 101 aa, Homo sapiens [sequence omitted]

SEQ ID NO: 10278 - protein, 1010 aa, Homo sapiens [sequence omitted]

SEQ ID NO: 10279 - protein, 1010 aa, Homo sapiens [sequence omitted]

SEQ ID NO: 10280 - protein, 369 aa, Homo sapiens
MADSAQAQKLVYLVTGGCGFLGEHVVRMLLQREPRLGELRVFDQHLGPWLEELKTGPVRVTAIQGDVTQAHEVAAAVAGAHVVIHTAGLVDVFGRASPKTIHEVNVQGTRNVIEACVQTGTRFLVYTSSMEVVGPNTKGHPFYRGNEDTPYEAVHRHPYPCSKALAEWLVLEANGRKVRGGLPLVTCALRPTGIYGEGHQIMRDFYRQGLRLGGWLFRAIPASVEHGRVYVGNVAWMHVLAARELEQRAALMGGQVYFCYDGSPYRSYEDFNMEFLGPCGLRLVGARPLLPYWLLVFLAALNALLQWLLRPLVLYAPLLNPYTLAVANTTFTVSTDKAQRHFGYEPLFSWEDSRTRTILWVQAATGSAQ

SEQ ID NO: 10281 - protein, 1175 aa, Homo sapiens
MDQEGGGDGQKAPSFQWRNYKLIVDPALDPALRRPSQKVYRYDGVHFSVNDSKYIPVEDLQDPRCHVRSKNRDFSLPVPKFKLDEFYIGQIPLKEVTFARLNDNVRETFLKDMCRKYGEVEEVEILLHPRTRKHLGLARVLFTSTRGAKETVKNLHLTSVMGNIIHAQLDIKGQQRMKYYELIVNGSYTPQTVPTGGKALSEKFQGSGAATETAESRRRSSSDTAAYPAGTTAVGTPGNGTPCSQDTSFSSSRQDTPSSFGQFTPQSSQGTPYTSRGSTPYSQDSAYSSRPDGPPPPEYPPPPPPPPHIYDFVNSLELMDRLGAQWGGMPMSFQMQTQMLTRLHQLRQGKGLIAASAGPPGGAFGEAFLPFPPPQEAAYGLPYALYAQGQEGRGAYSREAYHLPMPMAAEPLPSSSVSGEEARLPPREEAELAEGKTLPTAGTVGRVLAMLVQEMKSIMQRDLNRKMVENVAFGAFDQWWESKEEKAKPFQNAAKQQAKEEDKEKTKLKEPGLLSLVDWAKSGGTTGIEAFAFGSGLRGALRLPSFKVKRKEPSEISEASEEKRPRPSTPAEEDEDDPEQEKEAGEPGRPGTKPPKRDEERGKTQGKHRKSFALDSEGEEASQESSSEKDEEDDEEDEEDEDREEAVDTTKKETEVSDGEHKTVKSTLGSEEGEVPVPTPAPVEVPVPERVAGSPVTPLPEQEASPARPAGPTEESPPSAPLRPPEPPAGPPAPAPRPDERPSSPIPLLPPPKKRRKTVSFSAIEVVPAPEPPPATPPQAKFPGPASRKAPRGVERTIRNLPLDHASLVKSWPEEVSRGGRSRAGGRGRLTEEEEAEPGTEVDLAVLADLALTPARRGLPALPAVEDSEATETSDEAERPRPLLSHILLEHNYALAVKPTPPAPALRPPEPVPAPAALFSSPADEVLEAPEPRSEFEQMTILYDIWNSGLDSEDMSYLRLTYERLLQQTSGADWLNDTHWVHHTNILSDGPREHQTGSARSEGYYPISKKEKDKYLDVCPVSARQLEGVDTQFRKKKLRFGRSRIHEWGLFAMEPIAADEMVIEYVGQNIRQMVADMREKRYVQEGIGSSYLFRVDHDTIIDATKCGNLARFINHCCTPNCYAKVITIESQKKIVIYSKQPIGVDEEITYDYKFPLEDNKIPCLCGTESCRGSLN

SEQ ID NO: 10282 - protein, 1189 aa, Homo sapiens [sequence omitted]

SEQ ID NO: 10283 - protein, 196 aa, Homo sapiens
MADSAQAQKLVYLVTGGCGFLGEHVVRMLLQREPRLGELRVFDQHLGPWLEELKTGPVRVTAIQGDVTQAHEVAAAVAGAHVVIHTAGLVDVFGRASPKTIHEVNVQGTRNVIEACVQTGTRFLVYTSSMEVVGPNTKGHPFYRGNEDTPYEAVHRHPYPCSKALAEWLVLEANGRKAMLPGCTCWQPGSWSSGQP

SEQ ID NO: 10284 - protein, 369 aa, Homo sapiens; identical to SEQ ID NO: 10280

SEQ ID NO: 10285 - protein, 686 aa, Homo sapiens
MGPRSRERRAGAVQNTNDSSALSKRSLAARGYVQDPFAALLVPGAARRAPLIHRGYYVRARAVRHCVRAFLEQIGAPQAALRAQILSLGAGFDSLYFRLKTAGRLARAAVWEVDFPDVARRKAERIGETPELCALTGPFERGEPASALCFESADYCILGLDLRQLQRVEEALGAAGLDAASPTLLLAEAVLTYLEPESAAALIAWAAQRFPNALFVVYEQMRPQDAFGQFMLQHFRQLNSPLHGLERFPDVEAQRRRFLQAGWTACGAVDMNEFYHCFLPAEERRRVENIEPFDEFEEWHLKCAHYFILAASRGDTLSHTLVFPSSEAFPRVNPASPSGVFPASVVSSEGQVPNLKRYGHASVFLSPDVILSAGGFGEQEGRHCRVSQFHLLSRDCDSEWKGSQIGSCGTGVQWDGRLYHTMTRLSESRVLVLGGRLSPVSPALGVLQLHFFKSEDNNTEDLKVTITKAGRKDDSTLCCWRHSTTEVSCQNQEYLFVYGGRSVVEPVLSDWHFLHVGTMAWVRIPVEGEVPEARHSHSACTWQGGALIAGGLGASEEPLNSVLFLRPISCGFLWESVDIQPPITPRYSHTAHVLNGKLLLVGGIWIHSSSFPGVTVINLTTGLSSEYQIDTTYVPWPLMLHNHTSILLPEEQQLLLLGGGGNCFSFGTYFNPHTVTLDLSSLSAGQ

SEQ ID NO: 10286 - protein, 108 aa, Homo sapiens
MGVHVETISPGDWRTFPKRSQTCVMHYTGMLEDGKKFDSSRDRNKPFKFMLGKQEVIRGWEEGVVQMSVGQRAKLTISPDYAYGATGHPGIIPPHATLVFDVELLKLE

SEQ ID NO: 10287 - protein, 97 aa, Homo sapiens
MGVHVETISPGDWRTFPKRSQTCVMHYTDECGSESQTDYISRLCLWCHWAPRHHPTTCHSRLRCGASKTGMTGMASSLSSLFLDLPWRDLVPPDVCT

SEQ ID NO: 10288 - protein, 147 aa, Homo sapiens
MGVHVETISPGDWRTFPKRSQTCVMHYTGMLEDGKKFDSSRDRNKPFKFMLGKQEVIRGWEEGVVQMSVGQRAKLTISPDYAYGATGHPGIIPPHATLVFDLFLMFHSTLYRHLPRLNVFCHSALLPTPLFPLPLSPGMCVYLNYMP

SEQ ID NO: 10289 - protein, 402 aa, Homo sapiens
MGNCHTVGPNEALVVSGGCCGSDYKQYVFGGWAWAWWCISDTQRISLEIMTLQPRCEDVETAEGVALTVTGVAQVKIMTEKELLAVACEQFLGKNVQDIKNVVLQTLEGHLRSILGTLTVEQIYQDRDQFAKLVREVAAPDVGRMGIEILSFTIKDVYDKVDYLSSLGKTQTAVVQRDADIGVAEAERDAGIREAECKKEMLDVKFMADTKIADSKRAFELQKSAFSEEVNIKTAEAQLAYELQGAREQQKIRQEEIEIEVVQRKKQIAVEAQEILRTDKELIATVRRPAEAEAHRIQQIAEGEKVKQVLLAQAEAEKIRKIGEAEAAVIEAMGKAEAERMKLKAEAYQKYGDAAKMALVLEALPQVRLPPKRVLGFKCPCLTSWASARTSLGLASNTGTDG

SEQ ID NO: 10290 - protein, 428 aa, Homo sapiens
MGNCHTVGPNEALVVSGGCCGSDYKQYVFGGWAWAWWCISDTQRLSLEVMTILCRCENIETSEGVPLFVTGVAQVKIMTEKELLAVACEQFLGKNVQDIKNVVLQTLEGHLRSILGTLTVEQIYQDRDQFAKLVREVAAPDVGRMGIEILSFTIKDVYDKVDYLSSLGKTQTAVVQRDADIGVAEAERDAGIREAECKKEMLDVKFMADTKIADSKRAFELQKSAFSEEVNIKTAEAQLAYELQGAREQQKIRQEEIEIEVVQRKKQIAVEAQEILRTDKELIATVRRPAEAEAHRIQQIAEGEKVKQVLLAQAEAEKIRKIGEAEAAVIEAMGKAEAERMKLKAEAYQKYGDAAKMALVLEALPQIAAKIAAPLTKVDEIVVLSGDNSKVTSEVNRLLAELPASVHALTGVDLSKIPLIKKATGVQV

SEQ ID NO: 10291 - protein, 273 aa, Homo sapiens
MEALLLGAGLLLGAYVLVYYNLVKAPPCGGMGNLRGRTAVVTGANSGIGKMTALELARRGARVVLACRSQERGEAAAFDLRQESGNNEVIFMALDLASLASVRAFATAFLSSEPRLDILIHNAGPVNSELFLRHVPGWLRPLLRPLAWLVLRAPRGGAQTPLYCALQEGIEPLSGRYFANCHVEEVPPAARDDRAAHRLWEASKRLAGLGPGEDAEPDEDPQSEDSEAPSSLSTPHPEEPTVSQPYPSPQSSPDLSKMTHRIQAKVEPEIQLS

SEQ ID NO: 10292 - protein, 428 aa, Homo sapiens
MGNCHTVGPNEALVVSGGCCGSDYKQYVFGGWAWAWWCISDTQRISLEIMTLQPRCEDVETAEGVALTVTGVAQVKIMTEKELLAVACEQFLGKNVQDIKNVVLQTLEGHLRSILGTLTVEQIYQDRDQFAKLVREVAAPDVGRMGIEILSFTIKDVYDKVDYLSSLGKTQTAVVQRDADIGVAEAERDAGIREAECKKEMLDVKFMADTKIADSKRAFELQKSAFSEEVNIKTAEAQLAYELQGAREQQKIRQEEIEIEVVQRKKQIAVEAQEILRTDKELIATVRRPAEAEAHRIQQIAEGEKVKQVLLAQAEAEKIRKIGEAEAAVIEAMGKAEAERMKLKAEAYQKYGDAAKMALVLEALPQIAAKIAAPLTKVDEIVVLSGDNSKVTSEVNRLLAELPASVHALTGVDLSKIPLIKKATGVQV

SEQ ID NO: 10293 - protein, 286 aa, Homo sapiens
MALDLASLASVRAFATAFLSSEPRLDILIHNAGISSCGRTREAFNLLLRVNHIGPFLLTHLLLPCLKACAPSRVVVVASAAHCRGRLDFKRLDRPVVGWRQELRAYADTKLANVLFARELANQLEATGVTCYAAHPGPVNSELFLRHVPGWLRPLLRPLAWLVLRAPRGGAQTPLYCALQEGIEPLSGRYFANCHVEEVPPAARDDRAAHRLWEASKRLAGLGPGEDAEPDEDPQSEDSEAPSSLSTPHPEEPTVSQPYPSPQSSPDLSKMTHRIQAKVEPEIQLS

SEQ ID NO: 10294 - protein, 286 aa, Homo sapiens; identical to SEQ ID NO: 10293

SEQ ID NO: 10295 - protein, 286 aa, Homo sapiens; identical to SEQ ID NO: 10293

SEQ ID NO: 10296 - protein, 377 aa, Homo sapiens
MEALLLGAGLLLGAYVLVYYNLVKAPPCGGMGNLRGRTAVVTGANSGIGKMTALELARRGARVVLACRSQERGEAAAFDLRQESGNNEVIFMALDLASLASVRAFATAFLSSEPRLDILIHNAGISSCGRTREAFNLLLRVNHIGPFLLTHLLLPCLKACAPSRVVVVASAAHCRGRLDFKRLDRPVVGWRQELRAYADTKLANVLFARELANQLEATGVTCYAAHPGPVNSELFLRHVPGWLRPLLRPLAWLVLRAPRGGAQTPLYCALQEGIEPLSGRYFANCHVEEVPPAARDDRAAHRLWEASKRLAGLGPGEDAEPDEDPQSEDSEAPSSLSTPHPEEPTVSQPYPSPQSSPDLSKMTHRIQAKVEPEIQLS

SEQ ID NO: 10297 - protein, 379 aa, Homo sapiens
MTLQPRCEDVETAEGVALTVTGVAQVKIMTEKELLAVACEQFLGKNVQDIKNVVLQTLEGHLRSILGTLTVEQIYQDRDQFAKLVREVAAPDVGRMGIEILSFTIKDVYDKVDYLSSLGKTQTAVVQRDADIGVAEAERDAGIREAECKKEMLDVKFMADTKIADSKRAFELQKSAFSEEVNIKTAEAQLAYELQGAREQQKIRQEEIEIEVVQRKKQIAVEAQEILRTDKELIATVRRPAEAEAHRIQQIAEGEKVKQVLLAQAEAEKIRKIGEAEAAVIEAMGKAEAERMKLKAEAYQKYGDAAKMALVLEALPQIAAKIAAPLTKVDEIVVLSGDNSKVTSEVNRLLAELPASVHALTGVDLSKIPLIKKATGVQV

SEQ ID NO: 10298 - protein, 296 aa, Homo sapiens
MEALLLGAGLLLGAYVLVYYNLVKAPPCGGMGNLRGRTAVVTGISSCGRTREAFNLLLRVNHIGPFLLTHLLLPCLKACAPSRVVVVASAAHCRGRLDFKRLDRPVVGWRQELRAYADTKLANVLFARELANQLEATGVTCYAAHPGPVNSELFLRHVPGWLRPLLRPLAWLVLRAPRGGAQTPLYCALQEGIEPLSGRYFANCHVEEVPPAARDDRAAHRLWEASKRLAGLGPGEDAEPDEDPQSEDSEAPSSLSTPHPEEPTVSQPYPSPQSSPDLSKMTHRIQAKVEPEIQLS

SEQ ID NO: 10299 - protein, 379 aa, Homo sapiens; identical to SEQ ID NO: 10297

SEQ ID NO: 10300 - protein, 428 aa, Homo sapiens; identical to SEQ ID NO: 10292

SEQ ID NO: 10301 - protein, 379 aa, Homo sapiens; identical to SEQ ID NO: 10297

SEQ ID NO: 10302 - protein, 428 aa, Homo sapiens; identical to SEQ ID NO: 10292

SEQ ID NO: 10303 - protein, 327 aa, Homo sapiens
MTALELARRGARVVLACRSQERGEAAAFDLRQESGNNEVIFMALDLASLASVRAFATAFLSSEPRLDILIHNAGISSCGRTREAFNLLLRVNHIGPFLLTHLLLPCLKACAPSRVVVVASAAHCRGRLDFKRLDRPVVGWRQELRAYADTKLANVLFARELANQLEATGVTCYAAHPGPVNSELFLRHVPGWLRPLLRPLAWLVLRAPRGGAQTPLYCALQEGIEPLSGRYFANCHVEEVPPAARDDRAAHRLWEASKRLAGLGPGEDAEPDEDPQSEDSEAPSSLSTPHPEEPTVSQPYPSPQSSPDLSKMTHRIQAKVEPEIQLS

SEQ ID NO: 10304 - protein, 156 aa, Homo sapiens [sequence omitted]

SEQ ID NO: 10305 - protein, 217 aa, Homo sapiens
MATMLEGRCQTQPRSSPSGREASLWSSGFGMKLEAVTPFLGKYRPFVGRCCQTCTPKSWESLFHRSITDLGFCNVILVKEENTRFRGWLVRRLCYFLWSLEQHIPPCQDVPQKIMESTGVQNLLSGRVPGGTGEGQVPDLVKKEVQRILGHIQAPPRPFLVRLFSWALLRFLNCLFLNVQLHKGQMKMVQKAAQAVRPALHWVGDGGSRRAEAGPSP

SEQ ID NO: 10306 - protein, 199 aa, Homo sapiens
MVLLGLSEPIFQLPRSLASTPTAPTSPAMPDNASQAELMITLVTGLASLTSRTSMGIDNVGGMIWKTIGWKLISVSLTMYGALYLYERLSWTTHAKERAFKQQFVNYATGKLKMIASSTSANCSHQVKQQMATTFARLCQQADITQRQLEEEIARLPKEIDQWEKIQNNLKLLRNKAVQLEYELENFTKQFLPSRDEES

SEQ ID NO: 10307 - protein, 199 aa, Homo sapiens; identical to SEQ ID NO: 10306

SEQ ID NO: 10308 - protein, 199 aa, Homo sapiens; identical to SEQ ID NO: 10306

SEQ ID NO: 10309 - protein, 588 aa, Homo sapiens
MALYQRWRCLRLQGLQACRLHTAVVSTPPRWLAERLGLFEELWAAQVKRLASMAQKEPRTIKISLPGGQKIDAVAWNTTPYQLARQISSTLADTAVAAQVNGEPYDLERPLETDSDLRFLTFDSPEGKAVFWHSSTHVLGAAAEQFLGAVLCRGPSTEYGFYHDFFLGKERTIRGSELPVLERICQELTAAARPFRRLEASRDQLRQLFKAEYAHRGFSEVKTPTLFSTKLWEQSGHWEHYQEDMFAVQPPGSDRPPSSQSDDSTRHITDTLALKPMNCPAHCLMFAHRPRSWRELPLRLADFGALHRAEASGGLGGLTRLRCFQQDDAHIFCTTDQLEAEIQSCLDFLRSVYAVLGFSFRLALSTRPSGFLGDPCLWDQAEQVLKQALKEFGEPWDLNSGDGAFYGPKIDVHLHDALGRPHQCGTIQLDFQLPLRFDLQYKGQAGALERPVLIHRAVLGSVERLLGVLAESCGGKWPLWLSPFQVVVIPVGSEQEEYAKEAQQSLRAAGLVSDLDADSGLTLSRRIRRAQLAHYNFQFVVGQKEQSKRTVNIRTRDNRRLGEWDLPEAVQRLVELQNTRVPNAEEIF

SEQ ID NO: 10310 - protein, 718 aa, Homo sapiens
MALYQRWRCLRLQGLQACRLHTAVVSTPPRWLAERLGLFEELWAAQVKRLASMAQKEPRTIKISLPGGQKIDAVAWNTTPYQLARQISSTLADTAVAAQVNGEPYDLERPLETDSDLRFLTFDSPEGKAVFWHSSTHVLGAAAEQFLGAVLCRGPSTEYGFYHDFFLGKERTIRGSELPVLERICQELTAAARPFRRLEASRDQLRQLFKDNPFKLHLIEEKVTGPTATVYGCGTLVDLCQGPHLRHTGQIGGLKLLSNSSSLWRSSGAPETLQRVSGISFPTTELLRVWEAWREEAELRDHRRIGKEQELFFFHELSPGSCFFLPRGTRVYNALVAFIRAEYAHRGFSEVKTPTLFSTKLWEQSGHWEHYQEDMFAVQPPGSDRPPSSQSDDSTRHITDTLALKPMNCPAHCLMFAHRPRSWRELPLRLADFGALHRAEASGGLGGLTRLRCFQQDDAHIFCTTDQLEAEIQSCLDFLRSVYAVLGFSFRLALSTRPSGFLGDPCLWDQAEQVLKQALKEFGEPWDLNSGDGAFYGPKIDVHLHDALGRPHQCGTIQLDFQLPLRFDLQYKGQAGALERPVLIHRAVLGSVERLLGVLAESCGGKWPLWLSPFQVVVIPVGSEQEEYAKEAQQSLRAAGLVSDLDADSGLTLSRRIRRAQLAHYNFQFVVGQKEQSKRTVNIRTRDNRRLGEWDLPEAVQRLVELQNTRVPNAEEIF

SEQ ID NO: 10311 - protein, 909 aa, Homo sapiens
MLWALWPRWLADKMLPLLGAVLLQKREKRGPLWRHWRRETYPYYDLQVKVLRATNIRGTDLLSKADCYVQLWLPTASPSPAQTRIVANCSDPEWNETFHYQIHGAVKNVLELTLYDKDILGSDQLSLLLFDLRSLKCGQPHKHTFPLNHQDSQELQVEFVLEKSQVPASEVITNGVLVAHPCLRIQGTLRGDGTAPREEYGSRQLQLAVPGAYEKPQLLPLQPPTEPGLPPTFTFHVNPVLSSRLHVELMELLAAVQSGPSAELEAQTSKLGEGGILLSSLPLGQEEQCSVALGEGQEVALSMKVEMSSGDLDLRLGFDLSDGEQEFLDRRKQVVSKALQQVLGLSEALDSGQVPVVAVLGSGGGTRAMSSLYGSLAGLQELGLLDTVTYLSGVSGSTWCISTLYRDPAWSQVALQGPIERAQVHVCSSKMGALSTERLQYYTQELGVRERSGHSVSLIDLWGLLVEYLLYQEENPAKLSDQQEAVRQGQNPYPIYTSVNVRTNLSGEDFAEWCEFTPYEVGFPKYGAYVPTELFGSELFMGRLLQLQPEPRICYLQGMWGSAFATSLDEIFLKTAGSGLSFLEWYRGSVNITGRRRDVGRAHCWGGAPLNYKDHWAKEDATFPSISLSRPCLDDCQKPQLHNPSRLRTRLLTPQGPFSQAVLDIFTSRFTSAQSFNFTRGLCLHKDYVAGREFVAWKVTAFVPVRTHGFLADTHPDAFPNQLTPMRDCLYLVDGGFAINSPFPLALLPQRAVDLILSFDYSLEAPFERLAPAQVLKMTEKYCLDRGIPFPSIEVGPEDMEEARECYLFAKAEDPRSPIVLHFPLVNRTFRTHLAPGVERQTAEEKAFGDFVINRPDTPYGMMNFTYEPQDFYRLVALSRYNVLNNVETLKCALQLALDRHQARERAGA

SEQ ID NO: 10312 - protein, 3366 aa, Homo sapiens
MALRLGFTPSFFPSPIRAFIGREPKIERSDWVLAKAVRLNEAKSCIRAGSWTARIRRLQGVVKRLAPTWGQQEAPGLLSAVRLWQAQPITEGGNDLSDGATLAECDSLQYGGTVEVQTFTGGVVSAHTGAPEAGGPERRLGRPGGPRALEGGSRWPVAQNEASSQHALQPDASPSASSTGDNNPVILQASKGEPGSGTMQSSPSPAHPQLPVLQTQMVSDGMTGSNPVSPASSSSPASSGAGGISPQHIAQDSSLDGPPGPPDGATVPLEGFSLSQAADLANKGPKWEKSHAEIAEQAKHEAEIETRIAELRKEGFWSLKRLPKVPEPPRPKGHWDYLCEEMQWLSADFAQERRWKRGVARKVVRMVIRHHEEQRQKEERARREEQAKLRRIASTMAKDVRQFWSNVEKVVQFKQQSRLEEKRKKALDLHLDFIVGQTEKYSDLLSQSLNQPLTSSKAGSSPCLGSSSAASSPPPPASRLDDEDGDFQPQEDEEEDDEETIEVEEQQEGNDAEAQRREIELLRREGELPLEELLRSLPPQLLEGPSSPSQTPSSHDSDTRDGPEEGAEEEPPQVLEIKPPPSAVTQRNKQPWHPDEDDEEFTANEEEAEDEEDTIAAEEQLEGEVDHAMELSELAREGELSMEELLQQYAGAYAPGSGSSEDEDEDEVDANSSDCEPEGPVEAEEPPQEDSSSQSDSVEDRSEDEEDEHSEEEETSGSSASEESESEESEDAQSQSQADEEEEDDDFGVEYLLARDEEQSEADAGSGPPTPGPTTLGPKKEITDIAAAAESLQPKGYTLATTQVKTPIPLLLRGQLREYQHIGLDWLVTMYEKKLNGILADEMGLGKTIQTISLLAHLACEKGNWGPHLIIVPTSVMLNWEMELKRWCPSFKILTYYGAQKERKLKRQGWTKPNAFHVCITSYKLVLQDHQAFRRKNWRYLILDEAQNIKNFKSQRWQSLLNFNSQRRLLLTGTPLQNSLMELWSLMHFLMPHVFQSHREFKEWFSNPLTGMIEGSQEYNEGLVKRLHKVLRPFLLRRVKVDVEKQMPKKYEHVIRCRLSKRQRCLYDDFMAQTTTKETLATGHFMSVINILMQLRKVCNHPNLFDPRPVTSPFITPGICFSTASLVLRATDVHPLQRIDMGRFDLIGLEGRVSRYEADTFLPRHRLSRRVLLEVATAPDPPPRPKPVKMKVNRMLQPVPKQEGRTVVVVNNPRAPLGPVPVRPPPGPELSAQPTPGPVPQVLPASLMVSASPAGPPLIPASRPPGPVLLPPLQPNSGSLPQVLPSPLGVLSGTSRPPTPTLSLKPTPPAPVRLSPAPPPGSSSLLKPLTVPPGYTFPPAAATTTSTTTATATTTAVPAPTPAPQRLILSPDMQARLPSGEVVSIGQLASLAQRPVANAGGSKPLTFQIQGNKLTLTGAQVRQLAVGQPRPLQMPPTMVNNTGVVKIVVRQAPRDGLTPVPPLAPAPRPPSSGLPAVLNPRPTLTPGRLPTPTLGTARAPMPTPTLVRPLLKLVHSPSPEVSASAPGAAPLTISSPLHVPSSLPGPASSPMPIPNSSPLASPVSSTVSVPLSSSLPISVPTTLPAPASAPLTIPISAPLTVSASGPALLTSVTPPLAPVVPAAPGPPSLAPSGASPSASALTLGLATAPSLSSSQTPGHPLLLAPTSSHVPGLNSTVAPACSPVLVPASALASPFPSAPNPAPAQASLLAPASSASQALATPLAPMAAPQTAILAPSPAPPLAPLPVLAPSPGAAPVLASSQTPVPVMAPSSTPGTSLASASPVPAPTPVLAPSSTQTMLPAPVPSPLPSPASTQTLALAPALAPTLGGSSPSQTLSLGTGNPQGPFPTQTLSLTPASSLVPTPAQTLSLAPGPPLGPTQTLSLAPAPPLAPASPVGPAPAHTLTLAPASSSASLLAPASVQTLTLSPAPVPTLGPAAAQTLALAPASTQSPASQASSLVVSASGAAPLPVTMVSRLPVSKDEPDTLTLRSGPPSPPSTATSFGGPRPRRQPPPPPRSPFYLDSLEEKRKRQRSERLERIFQLSEAHGALAPVYGTEVLDFCTLPQPVASPIGPRSPGPSHPTFWTYTEAAHRAVLFPQQRLDQLSEIIERFIFVMPPVEAPPPSLHACHPPPWLAPRQAAFQEQLASELWPRARPLHRIVCNMRTQFPDLRLIQYDCGKLQTLAVLLRQLKAEGHRVLIFTQMTRMLDVLEQFLTYHGHLYLRLDGSTRVEQRQALMERFNADKRIFCFILSTRSGGVGVNLTGADTVVFYDSDWNPTMDAQAQDRCHRIGQTRDVHIYRLISERTVEENILKKANQKRMLGDMAIEGGNFTTAYFKQQTIRELFDMPLEEPSSSSVPSAPEEEEETVASKQTHILEQALCRAEDEEDIRAATQAKAEQVAELAEFNENDGFPAGEGEEAGRPGAEDEEMSRAEQEIAALVEQLTPIERYAMKFLEASLEEVSREELKQAEEQVEAARKDLDQAKEEVFRLPQEEEEGPGAGDESSCGTGGGTHRRSKKAKAPERPGTRVSERLRGARAETQGANHTPVISAHQTRSTTTPPRCSPARERVPRPAPRPRPTPASAPAAIPALVPVPVSAPVPISAPNPITILPVHILPSPPPPSQIPPCSSPACTPPPACTPPPAHTPPPAQTCLVTPSSPLLLGPPSVPISASVTNLPLGLRPEAELCAQALASPESLELASVASSETSSLSLVPPKDLLPVAVEILPVSEKNLSLTPSAPSLTLEAGSIPNGQEQEAPDSAEGTTLTVLPEGEELPLCVSESNGLELPPSAASDEPLQEPLEADRTSEELTEAKTPTSSPEKPQELVTAEVAAPSTSSSATSSPEGPSPARPPRRRTSADVEIRGQGTGRPGQPPGPKVLRKLPGRLVTVVEEKELVRRRRQQRGAASTLVPGVSETSASPGSPSVRSMSGPESSPPIGGPCEAAPSSSLPTPPQQPFIARRHIELGVTGGGSPENGDGALLAITPPAVKRRRGRPPKKNRSPADAGRGVDEAPSSTLKGKTNGADPVPGPETLIVADPVLEPQLIPGPQPLGPQPVHRPNPLLSPVEKRRRGRPPKARDLPIPGTISSAGDGNSESRTQPPPHPSPLTPLPPLLVCPTATVANTVTTVTISTSPPKRKRGRPPKNPPSPRPSQLPVLDRDSTSVLESCGLGRRRQPQGQGESEGSSSDEDGSRPLTRLARLRLEAEGMRGRKSGGSMVVAVIQDDLDLADSGPGGLELTPPVVSLTPKLRSTRLRPGSLVPPLETEKLPRKRAGAPVGGSPGLAKRGRLQPPSPLGPEGSVEESEAEASGEEEEGDGTPRRRPGPRRLVGTTNQGDQRILRSSAPPSLAGPAVSHRGRKAKT

SEQ ID NO: 10313 - protein, 3131 aa, Homo sapiens [sequence omitted]

SEQ ID NO: 10314 - protein, 3366 aa, Homo sapiens; identical to SEQ ID NO: 10312

SEQ ID NO: 10315 - protein, 3025 aa, Homo sapiens
MQWLSADFAQERRWKRGVARKVVRMVIRHHEEQRQKEERARREEQAKLRRIASTMAKDVRQFWSNVEKVVQFKQQSRLEEKRKKALDLHLDFIVGQTEKYSDLLSQSLNQPLTSSKAGSSPCLGSSSAASSPPPPASRLDDEDGDFQPQEDEEEDDEETIEVEEQQEGNDAEAQRREIELLRREGELPLEELLRSLPPQLLEGPSSPSQTPSSHDSDTRDGPEEGAEEEPPQVLEIKPPPSAVTQRNKQPWHPDEDDEEFTANEEEAEDEEDTIAAEEQLEGEVDHAMELSELAREGELSMEELLQQYAGAYAPGSGSSEDEDEDEVDANSSDCEPEGPVEAEEPPQEDSSSQSDSVEDRSEDEEDEHSEEEETSGSSASEESESEESEDAQSQSQADEEEEDDDFGVEYLLARDEEQSEADAGSGPPTPGPTTLGPKKEITDIAAAAESLQPKGYTLATTQVKTPIPLLLRGQLREYQHIGLDWLVTMYEKKLNGILADEMGLGKTIQTISLLAHLACEKGNWGPHLIIVPTSVMLNWEMELKRWCPSFKILTYYGAQKERKLKRQGWTKPNAFHVCITSYKLVLQDHQAFRRKNWRYLILDEAQNIKNFKSQRWQSLLNFNSQRRLLLTGTPLQNSLMELWSLMHFLMPHVFQSHREFKEWFSNPLTGMIEGSQEYNEGLVKRLHKVLRPFLLRRVKVDVEKQMPKKYEHVIRCRLSKRQRCLYDDFMAQTTTKETLATGHFMSVINILMQLRKVCNHPNLFDPRPVTSPFITPGICFSTASLVLRATDVHPLQRIDMGRFDLIGLEGRVSRYEADTFLPRHRLSRRVLLEVATAPDPPPRPKPVKMKVNRMLQPVPKQEGRTVVVVNNPRAPLGPVPVRPPPGPELSAQPTPGPVPQVLPASLMVSASPAGPPLIPASRPPGPVLLPPLQPNSGSLPQVLPSPLGVLSGTSRPPTPTLSLKPTPPAPVRLSPAPPPGSSSLLKPLTVPPGYTFPPAAATTTSTTTATATTTAVPAPTPAPQRLILSPDMQARLPSGEVVSIGQLASLAQRPVANAGGSKPLTFQIQGNKLTLTGAQVRQLAVGQPRPLQMPPTMVNNTGVVKIVVRQAPRDGLTPVPPLAPAPRPPSSGLPAVLNPRPTLTPGRLPTPTLGTARAPMPTPTLVRPLLKLVHSPSPEVSASAPGAAPLTISSPLHVPSSLPGPASSPMPIPNSSPLASPVSSTVSVPLSSSLPISVPTTLPAPASAPLTIPISAPLTVSASGPALLTSVTPPLAPVVPAAPGPPSLAPSGASPSASALTLGLATAPSLSSSQTPGHPLLLAPTSSHVPGLNSTVAPACSPVLVPASALASPFPSAPNPAPAQASLLAPASSASQALATPLAPMAAPQTAILAPSPAPPLAPLPVLAPSPGAAPVLASSQTPVPVMAPSSTPGTSLASASPVPAPTPVLAPSSTQTMLPAPVPSPLPSPASTQTLALAPALAPTLGGSSPSQTLSLGTGNPQGPFPTQTLSLTPASSLVPTPAQTLSLAPGPPLGPTQTLSLAPAPPLAPASPVGPAPAHTLTLAPASSSASLLAPASVQTLTLSPAPVPTLGPAAAQTLALAPASTQSPASQASSLVVSASGAAPLPVTMVSRLPVSKDEPDTLTLRSGPPSPPSTATSFGGPRPRRQPPPPPRSPFYLDSLEEKRKRQRSERLERIFQLSEAHGALAPVYGTEVLDFCTLPQPVASPIGPRSPGPSHPTFWTYTEAAHRAVLFPQQRLDQLSEIIERFIFVMPPVEAPPPSLHACHPPPWLAPRQAAFQEQLASELWPRARPLHRIVCNMRTQFPDLRLIQYDCGKLQTLAVLLRQLKAEGHRVLIFTQMTRMLDVLEQFLTYHGHLYLRLDGSTRVEQRQALMERFNADKRIFCFILSTRSGGVGVNLTGADTVVFYDSDWNPTMDAQAQDRCHRIGQTRDVHIYRLISERTVEENILKKANQKRMLGDMAIEGGNFTTAYFKQQTIRELFDMPLEEPSSSSVPSAPEEEEETVASKQTHILEQALCRAEDEEDIRAATQAKAEQVAELAEFNENDGFPAGEGEEAGRPGAEDEEMSRAEQEIAALVEQLTPIERYAMKFLEASLEEVSREELKQAEEQVEAARKDLDQAKEEVFRLPQEEEEGPGAGDESSCGTGGGTHRRSKKAKAPERPGTRVSERLRGARAETQGANHTPVISAHQTRSTTTPPRCSPARERVPRPAPRPRPTPASAPAAIPALVPVPVSAPVPISAPNPITILPVHILPSPPPPSQIPPCSSPACTPPPACTPPPAHTPPPAQTCLVTPSSPLLLGPPSVPISASVTNLPLGLRPEAELCAQALASPESLELASVASSETSSLSLVPPKDLLPVAVEILPVSEKNLSLTPSAPSLTLEAGSIPNGQEQEAPDSAEGTTLTVLPEGEELPLCVSESNGLELPPSAASDEPLQEPLEADRTSEELTEAKTPTSSPEKPQELVTAEVAAPSTSSSATSSPEGPSPARPPRRRTSADVEIRGQGTGRPGQPPGPKVLRKLPGRLVTVVEEKELVRRRRQQRGAASTLVPGVSETSASPGSPSVRSMSGPESSPPIGGPCEAAPSSSLPTPPQQPFIARRHIELGVTGGGSPENGDGALLAITPPAVKRRRGRPPKKNRSPADAGRGVDEAPSSTLKGKTNGADPVPGPETLIVADPVLEPQLIPGPQPLGPQPVHRPNPLLSPVEKRRRGRPPKARDLPIPGTISSAGDGNSESRTQPPPHPSPLTPLPPLLVCPTATVANTVTTVTISTSPPKRKRGRPPKNPPSPRPSQLPVLDRDSTSVLESCGLGRRRQPQGQGESEGSSSDEDGSRPLTRLARLRLEAEGMRGRKSGGSMVVAVIQDDLDLADSGPGGLELTPPVVSLTPKLRSTRLRPGSLVPPLETEKLPRKRAGAPVGGSPGLAKRGRLQPPSPLGPEGSVEESEAEASGEEEEGDGTPRRRPGPRRLVGTTNQGDQRILRSSAPPSLAGPAVSHRGRKAKT

SEQ ID NO: 10316 - protein, 3168 aa, Homo sapiens
MQSSPSPAHPQLPVLQTQMVSDGMTGSNPVSPASSSSPASSGAGGISPQHIAQDSSLDGPPGPPDGATVPLEGFSLSQAADLANKGPKWEKSHAEIAEQAKHEAEIETRIAELRKEGFWSLKRLPKVPEPPRPKGHWDYLCEEMQWLSADFAQERRWKRGVARKVVRMVIRHHEEQRQKEERARREEQAKLRRIASTMAKDVRQFWSNVEKVVQFKQQSRLEEKRKKALDLHLDFIVGQTEKYSDLLSQSLNQPLTSSKAGSSPCLGSSSAASSPPPPASRLDDEDGDFQPQEDEEEDDEETIEVEEQQEGNDAEAQRREIELLRREGELPLEELLRSLPPQLLEGPSSPSQTPSSHDSDTRDGPEEGAEEEPPQVLEIKPPPSAVTQRNKQPWHPDEDDEEFTANEEEAEDEEDTIAAEEQLEGEVDHAMELSELAREGELSMEELLQQYAGAYAPGSGSSEDEDEDEVDANSSDCEPEGPVEAEEPPQEDSSSQSDSVEDRSEDEEDEHSEEEETSGSSASEESESEESEDAQSQSQADEEEEDDDFGVEYLLARDEEQSEADAGSGPPTPGPTTLGPKKEITDIAAAAESLQPKGYTLATTQVKTPIPLLLRGQLREYQHIGLDWLVTMYEKKLNGILADEMGLGKTIQTISLLAHLACEKGNWGPHLIIVPTSVMLNWEMELKRWCPSFKILTYYGAQKERKLKRQGWTKPNAFHVCITSYKLVLQDHQAFRRKNWRYLILDEAQNIKNFKSQRWQSLLNFNSQRRLLLTGTPLQNSLMELWSLMHFLMPHVFQSHREFKEWFSNPLTGMIEGSQEYNEGLVKRLHKVLRPFLLRRVKVDVEKQMPKKYEHVIRCRLSKRQRCLYDDFMAQTTTKETLATGHFMSVINILMQLRKVCNHPNLFDPRPVTSPFITPGICFSTASLVLRATDVHPLQRIDMGRFDLIGLEGRVSRYEADTFLPRHRLSRRVLLEVATAPDPPPRPKPVKMKVNRMLQPVPKQEGRTVVVVNNPRAPLGPVPVRPPPGPELSAQPTPGPVPQVLPASLMVSASPAGPPLIPASRPPGPVLLPPLQPNSGSLPQVLPSPLGVLSGTSRPPTPTLSLKPTPPAPVRLSPAPPPGSSSLLKPLTVPPGYTFPPAAATTTSTTTATATTTAVPAPTPAPQRLILSPDMQARLPSGEVVSIGQLASLAQRPVANAGGSKPLTFQIQGNKLTLTGAQVRQLAVGQPRPLQMPPTMVNNTGVVKIVVRQAPRDGLTPVPPLAPAPRPPSSGLPAVLNPRPTLTPGRLPTPTLGTARAPMPTPTLVRPLLKLVHSPSPEVSASAPGAAPLTISSPLHVPSSLPGPASSPMPIPNSSPLASPVSSTVSVPLSSSLPISVPTTLPAPASAPLTIPISAPLTVSASGPALLTSVTPPLAPVVPAAPGPPSLAPSGASPSASALTLGLATAPSLSSSQTPGHPLLLAPTSSHVPGLNSTVAPACSPVLVPASALASPFPSAPNPAPAQASLLAPASSASQALATPLAPMAAPQTAILAPSPAPPLAPLPVLAPSPGAAPVLASSQTPVPVMAPSSTPGTSLASASPVPAPTPVLAPSSTQTMLPAPVPSPLPSPASTQTLALAPALAPTLGGSSPSQTLSLGTGNPQGPFPTQTLSLTPASSLVPTPAQTLSLAPGPPLGPTQTLSLAPAPPLAPASPVGPAPAHTLTLAPASSSASLLAPASVQTLTLSPAPVPTLGPAAAQTLALAPASTQSPASQASSLVVSASGAAPLPVTMVSRLPVSKDEPDTLTLRSGPPSPPSTATSFGGPRPRRQPPPPPRSPFYLDSLEEKRKRQRSERLERIFQLSEAHGALAPVYGTEVLDFCTLPQPVASPIGPRSPGPSHPTFWTYTEAAHRAVLFPQQRLDQLSEIIERFIFVMPPVEAPPPSLHACHPPPWLAPRQAAFQEQLASELWPRARPLHRIVCNMRTQFPDLRLIQYDCGKLQTLAVLLRQLKAEGHRVLIFTQMTRMLDVLEQFLTYHGHLYLRLDGSTRVEQRQALMERFNADKRIFCFILSTRSGGVGVNLTGADTVVFYDSDWNPTMDAQAQDRCHRIGQTRDVHIYRLISERTVEENILKKANQKRMLGDMAIEGGNFTTAYFKQQTIRELFDMPLEEPSSSSVPSAPEEEEETVASKQTHILEQALCRAEDEEDIRAATQAKAEQVAELAEFNENDGFPAGEGEEAGRPGAEDEEMSRAEQEIAALVEQLTPIERYAMKFLEASLEEVSREELKQAEEQVEAARKDLDQAKEEVFRLPQEEEEGPGAGDESSCGTGGGTHRRSKKAKAPERPGTRVSERLRGARAETQGANHTPVISAHQTRSTTTPPRCSPARERVPRPAPRPRPTPASAPAAIPALVPVPVSAPVPISAPNPITILPVHILPSPPPPSQIPPCSSPACTPPPACTPPPAHTPPPAQTCLVTPSSPLLLGPPSVPISASVTNLPLGLRPEAELCAQALASPESLELASVASSETSSLSLVPPKDLLPVAVEILPVSEKNLSLTPSAPSLTLEAGSIPNGQEQEAPDSAEGTTLTVLPEGEELPLCVSESNGLELPPSAASDEPLQEPLEADRTSEELTEAKTPTSSPEKPQELVTAEVAAPSTSSSATSSPEGPSPARPPRRRTSADVEIRGQGTGRPGQPPGPKVLRKLPGRLVTVVEEKELVRRRRQQRGAASTLVPGVSETSASPGSPSVRSMSGPESSPPIGGPCEAAPSSSLPTPPQQPFIARRHIELGVTGGGSPENGDGALLAITPPAVKRRRGRPPKKNRSPADAGRGVDEAPSSTLKGKTNGADPVPGPETLIVADPVLEPQLIPGPQPLGPQPVHRPNPLLSPVEKRRRGRPPKARDLPIPGTISSAGDGNSESRTQPPPHPSPLTPLPPLLVCPTATVANTVTTVTISTSPPKRKRGRPPKNPPSPRPSQLPVLDRDSTSVLESCGLGRRRQPQGQGESEGSSSDEDGSRPLTRLARLRLEAEGMRGRKSGGSMVVAVIQDDLDLADSGPGGLELTPPVVSLTPKLRSTRLRPGSLVPPLETEKLPRKRAGAPVGGSPGLAKRGRLQPPSPLGPEGSVEESEAEASGEEEEGDGTPRRRPGPRRLVGTTNQGDQRILRSSAPPSLAGPAVSHRGRKAKT

SEQ ID NO: 10317 - protein, 473 aa, Homo sapiens
MRAGPGPTVTLALVLAVAWAMELKPTAPPIFTGRPFVVAWDVPTQDCGPRLKVPLDLNAFDVQASPNEGFVNQNITIFYRDRLGLYPRFDSAGRSVHGGVPQNVSLWAHRKMLQKRVEHYIRTQESAGLAVIDWEDWRPVWVRNWQDKDVYRRLSRQLVASRHPDWPPDRIVKQAQYEFEFAAQQFMLETLRYVKAVRPRHLWGFYLFPDCYNHDYVQNWESYTGRCPDVEVARNDQLAWLWAESTALFPSVYLDETLASSRHGRNFVSFRVQEALRVARTHHANHALPVYVFTRPTYSRRLTGLSEMDLISTIGESAALGAAGVILWGDAGYTTSTETCQYLKDYLTRLLVPYVVNVSWATQYCSRAQCHGHGRCVRRNPSASTFLHLSTNSFRLVPGHAPGEPQLRPVGELSWADIDHLQTHFRCQCYLGWSGEQCQWDHRQAAGGASEAWAGSHLTSLLALAALAFTWTL

SEQ ID NO: 10318 - protein, 473 aa, Homo sapiens; identical to SEQ ID NO: 10317

SEQ ID NO: 10319 - protein, 473 aa, Homo sapiens; identical to SEQ ID NO: 10317

SEQ ID NO: 10320 - protein, 316 aa, Homo sapiens
MVWQQKTKAVVMLNRIVEKESVKCAQYWPTDDQEMLFKETGFSVKLLSEDVKSYYTVHLLQLENINSGETRTISHFHYTTWPDFGVPESPASFLNFLFKVRESGSLNPDHGPAVIHCSAGIGRSGTFSLVDTCLVLMEKGDDINIKQVLLNMRKYRMGLIQTPDQLRFSYMAIIEGAKCIKGDSSIQKRWKELSKEDLSPAFDHSPNKIMTEKYNGNRIGLEEEKLTGDRCTGLSSKMQDTMEENSESALRKRIREDRKATTAQKVQQMKQRLNENERKRKRWLYWQPILTKMGFMSVILVGAFVGWTLFFQQNAL

SEQ ID NO: 10321 - protein, 353 aa, Homo sapiens
MPTTIEREFEELDTQRRWQPLYLEIRNESHDYPHRVAKFPENRNRNRYRDVSPYDHSRVKLQNAENDYINASLVDIEEAQRSYILTQGPLPNTCCHFWLMVWQQKTKAVVMLNRIVEKESVKCAQYWPTDDQEMLFKETGFSVKLLSEDVKSYYTVHLLQLENINSGETRTISHFHYTTWPDFGVPESPASFLNFLFKVRESGSLNPDHGPAVIHCSAGIGRSGTFSLVDTCLVLMEKGDDINIKQVLLNMRKYRMGLIQTPDQLRFSYMAIIEGAKCIKGDSSIQKRWKELSKEDLSPAFDHSPNKIMTEKYNGNRIGLEEEKLTGDRCTGLSSKMQDTMEENSERPRLTDT

SEQ ID NO: 10322 - protein, 95 aa, Homo sapiens [sequence omitted]

SEQ ID NO: 10323 - protein, 387 aa, Homo sapiens
MPTTIEREFEELDTQRRWQPLYLEIRNESHDYPHRVAKFPENRNRNRYRDVSPYDHSRVKLQNAENDYINASLVDIEEAQRSYILTQGPLPNTCCHFWLMVWQQKTKAVVMLNRIVEKESVKCAQYWPTDDQEMLFKETGFSVKLLSEDVKSYYTVHLLQLENINSGETRTISHFHYTTWPDFGVPESPASFLNFLFKVRESGSLNPDHGPAVIHCSAGIGRSGTFSLVDTCLVLMEKGDDINIKQVLLNMRKYRMGLIQTPDQLRFSYMAIIEGAKCIKGDSSIQKRWKELSKEDLSPAFDHSPNKIMTEKYNGNRIGLEEEKLTGDRCTGLSSKMQDTMEENSESALRKRIREDRKATTAQKVQQMKQRLNENERKRKRPRLTDT

SEQ ID NO: 10324 - protein, 152 aa, Homo sapiens
MEKGDDINIKQVLLNMRKYRMGLIQTPDQLRFSYMAIIEGAKCIKGDSSIQKRWKELSKEDLSPAFDHSPNKIMTEKYNGNRIGLEEEKLTGDRCTGLSSKMQDTMEENSESALRKRIREDRKATTAQKVQQMKQRLNENERKRKRPRLTDT

SEQ ID NO: 10325 - protein, 316 aa, Homo sapiens; identical to SEQ ID NO: 10320

SEQ ID NO: 10326 - protein, 231 aa, Homo sapiens
MLDVKRSLKSGETRTISHFHYTTWPDFGVPESPASFLNFLFKVRESGSLNPDHGPAVIHCSAGIGRSGTFSLVDTCLVLMEKGDDINIKQVLLNMRKYRMGLIQTPDQLRFSYMAIIEGAKCIKGDSSIQKRWKELSKEDLSPAFDHSPNKIMTEKYNGNRIGLEEEKLTGDRCTGLSSKMQDTMEENSESALRKRIREDRKATTAQKVQQMKQRLNENERKRKRPRLTDT

SEQ ID NO: 10327 - protein, 415 aa, Homo sapiens
MPTTIEREFEELDTQRRWQPLYLEIRNESHDYPHRVAKFPENRNRNRYRDVSPYDHSRVKLQNAENDYINASLVDIEEAQRSYILTQGPLPNTCCHFWLMVWQQKTKAVVMLNRIVEKESVKCAQYWPTDDQEMLFKETGFSVKLLSEDVKSYYTVHLLQLENINSGETRTISHFHYTTWPDFGVPESPASFLNFLFKVRESGSLNPDHGPAVIHCSAGIGRSGTFSLVDTCLVLMEKGDDINIKQVLLNMRKYRMGLIQTPDQLRFSYMAIIEGAKCIKGDSSIQKRWKELSKEDLSPAFDHSPNKIMTEKYNGNRIGLEEEKLTGDRCTGLSSKMQDTMEENSESALRKRIREDRKATTAQKVQQMKQRLNENERKRKRWLYWQPILTKMGFMSVILVGAFVGWTLFFQQNAL

SEQ ID NO: 10328 - protein, 949 aa, Homo sapiens [sequence omitted]

SEQ ID NO: 10329 - protein, 325 aa, Homo sapiens
MDFYRYEVSPVALQRLRVALQKLSGTGFTWQDDYTQYVMDQELADLPKTYLRRPEASSPARPSKHSVGSERRYSREGGAALANALRRHLPFLEALSQAPASDVLARTHTAQDRPPAEGDDRFSESILTYVAHTSALTYPPGPRTQLREDLLPRTLGQLQPDELSPKVDSGVDRHHLMAALSAYAAQRPPAPPGEGSLEPQYLLRAPSRMPRPLLAPAAPQKWPSPLGDSEDPSSTGDGARIHTLLKDLQRQPAEVRGLSGLELDGMAELMAGLMQGVDHGVARGSPGRAALGESGEQADGPKATLRGDSFPDDGVQDDDDRLYQE

SEQ ID NO: 10330 - protein, 920 aa, Homo sapiens [sequence omitted]

SEQ ID NO: 10331 - protein, 465 aa, Homo sapiens
MLLLGLLLLLPLLAGARLLWNWWKLRSLHLPPLAPGFLHLLQPDLPIYLLGLTQKFGPIYRLHLGLQDKLVSRNYPDLSLGDYSLLWKAHKKLTRSALLLGIRDSMEPVVEQLTQEFCERMRAQPGTPVAIEEEFSLLTCSIICYLTFGDKIKDDNLMPAYYKCIQEVLKTWSHWSIQIVDVIPFLRFFPNPGLRRLKQAIEKRDHIVEMQLRQHKESLVAGQWRDMMDYMLQGVAQPSMEEGSGQLLEGHVHMAAVDLLIGGTETTANTLSWAVVFLLHHPEIQQRLQEELDHELGPGASSSRVPYKDRARLPLLNATIAEVLRLRPVVPLALPHRTTRPSSISGYDIPEGTVIIPNLQGAHLDETVWERPHEFWPDRFLEPGKNSRALAFGCGARVCLGEPLARLELFVVLTRLLQAFTLLPSGDALPSLQPLPHCSVILKMQPFQVRLQPRGMGAHSPGQSQ

SEQ ID NO: 10332 - protein, 495 aa, Homo sapiens
MLLLGLLLLLPLLAGARLLWNWWKLRSLHLPPLAPGFLHLLQPDLPIYLLGLTQKFGPIYRLHLGLQDVVVLNSKRTIEEAMVKKWADFAGRPEPLTYKLVSRNYPDLSLGDYSLLWKAHKKLTRSALLLGIRDSMEPVVEQLTQEFCERMRAQPGTPVAIEEEFSLLTCSIICYLTFGDKIKDDNLMPAYYKCIQEVLKTWSHWSIQIVDVIPFLRFFPNPGLRRLKQAIEKRDHIVEMQLRQHKESLVAGQWRDMMDYMLQGVAQPSMEEGSGQLLEGHVHMAAVDLLIGGTETTANTLSWAVVFLLHHPEIQQRLQEELDHELGPGASSSRVPYKDRARLPLLNATIAEVLRLRPVVPLALPHRTTRPSSISGYDIPEGTVIIPNLQGAHLDETVWERPHEFWPDRFLEPGKNSRALAFGCGARVCLGEPLARLELFVVLTRLLQAFTLLPSGDALPSLQPLPHCSVILKMQPFQVRLQPRGMGAHSPGQSQ

SEQ ID NO: 10333 - protein, 302 aa, Homo sapiens
MLGLWGQRLPAAWVLLLLPFLPLLLLAAPAPHRASYKPVIVVHGLFDSSYSFRHLLEYINETHPGTVVTVLDLFDGRESLRPLWEQVQGFREAVVPIMAKAPQGVHLICYSQGGLVCRALLSVMDDHNVDSFISLSSPQMGQYGDTDYLKWLFPTSMRSNLYRICYSPWGQEFSICNYWHDPHHDDLYLNASSFLALINGERDHPNATVWRKNFLRVGHLVLIGGPDDGVITPWQSSFFGFYDANETVLEMEEQLVYLRDSFGLKTLLARGAIVRCPMAGISHTAWHSNRTLYETCIEPWLS

SEQ ID NO: 10334 - protein, 302 aa, Homo sapiens; identical to SEQ ID NO: 10333

SEQ ID NO: 10335 - protein, 293 aa, Homo sapiens
MGSRAELCTLLGGFSFLLLLIPGEGAKGGSLRESQGVCSKQTLVVPLHYNESYSQPVYKPYLTLCAGRRICSTYRTMYRVMWREVRREVQQTHAVCCQGWKKRHPGALTCEAICAKPCLNGGVCVRPDQCECAPGWGGKHCHVDVDECRTSITLCSHHCFNTAGSFTCGCPHDLVLGVDGRTCMEGSPEPPTSASILSVAVREAEKDERALKQEIHELRGRLERLEQWAGQAGAWVRAVLPVPPEELQPEQVAELWGRGDRIESLSDQVLLLEERLGACSCEDNSLGLGVNHR

SEQ ID NO: 10336 - protein, 307 aa, Homo sapiens
MKSCGSMLGLWGQRLPAAWVLLLLPFLPLLLLAAPAPHRASYKPVIVVHGLFDSSYSFRHLLEYINETHPGTVVTVLDLFDGRESLRPLWEQVQGFREAVVPIMAKAPQGVHLICYSQGGLVCRALLSVMDDHNVDSFISLSSPQMGQYGDTDYLKWLFPTSMRSNLYRICYSPWGQEFSICNYWHDPHHDDLYLNASSFLALINGERDHPNATVWRKNFLRVGHLVLIGGPDDGVITPWQSSFFGFYDANETVLEMEEQLPARPTHQSELLLLRLVCLKPPRRKKPACRVQRQSESWGPGLSCALS

SEQ ID NO: 10337 - protein, 309 aa, Homo sapiens [sequence omitted]

SEQ ID NO: 10338 - protein, 308 aa, Homo sapiens
MKSCGSMLGLWGQRLPAAWVLLLLPFLPLLLLAAPAPHRASYKPVIVVHGLFDSSYSFRHLLEYINETHPGTVVTVLDLFDGRESLRPLWEQVQGFREAVVPIMAKAPQGVHLICYSQGGLVCRALLSVMDDHNVDSFISLSSPQMGQYGDTDYLKWLFPTSMRSNLYRICYSPWGQEFSICNYWHDPHHDDLYLNASSFLALINGERDHPNATVWRKNFLRVGHLVLIGGPDDGVITPWQSSFFGFYDANETVLEMEEQLVYLRDSFGLKTLLARGAIVRCPMAGISHTAWHSNRTLYETCIEPWLS

SEQ ID NO: 10339 - protein, 293 aa, Homo sapiens; identical to SEQ ID NO: 10335

SEQ ID NO: 10340 - protein, 302 aa, Homo sapiens; identical to SEQ ID NO: 10333

SEQ ID NO: 10341 - protein, 293 aa, Homo sapiens; identical to SEQ ID NO: 10335

SEQ ID NO: 10342 - protein, 293 aa, Homo sapiens; identical to SEQ ID NO: 10335

SEQ ID NO: 10343 - protein, 302 aa, Homo sapiens; identical to SEQ ID NO: 10333

SEQ ID NO: 10344 - protein, 180 aa, Homo sapiens
MAAAEEEDGGPEGPNRERGGAGATFECNICLETAREAVVSVCGHLYCWPCLHQWLETRPERQECPVCKAGISREKVVPLYGRGSQKPQDPRLKTPPRPQGQRPAPESRGGFQPFGDTGGFHFSFGVGAFPFGFFTTVFNAHEPFRRGTGVDLGQGHPASSWQDSLFLFLAIFFFFWLLSI

SEQ ID NO: 10345 - protein, 180 aa, Homo sapiens; identical to SEQ ID NO: 10344

SEQ ID NO: 10346 - protein, 61 aa, Homo sapiens [sequence omitted]

SEQ ID NO: 10347 - protein, 475 aa, Homo sapiens [sequence omitted]

SEQ ID NO: 10348 - protein, 322 aa, Homo sapiens [sequence omitted]

SEQ ID NO: 10349 - protein, 40 aa, Homo sapiens
MARDILFFFSQRLLRTALELDPHSELDQKLQKHIMKNLLK

SEQ ID NO: 10350 - protein, 297 aa, Homo sapiens
MWTALSELDDLVKQLWGTQEGRFGRRTQWAEGGLFTPYLQCWTLMSMDSEVLYCRTCSMRTWGCSQPARTSGMAASSSSIPQVSLMTVIEGFTESRITQGPLRSPCSSALGKMASIPLTLKPCPEKIQSLPQVVCEFLKRAAATGPSFWLGKETLKVPLALFALNRQRRCERLRKNPAVQAGSESFFHCAFGVTEPGCYGFIDADTVKSALFVPRLPASHATWMGKIHSKEHFKEKYAVDDVQDADEIAIVLTSQKPSVLLTLRGVNTDSSSVCREASFEGISKFKVNNTILHPEIV

SEQ ID NO: 10351 - protein, 259 aa, Homo sapiens
MATGTRYAGKVVVVTGGGRGIGAGIVRAFVNSGARVVICDKDESGGRALEQELPGAVFILCDVTQEDDVKTLVSETIRRFGRLDCVVNNAGHHPPPQRPEETSAQGFRQLLELNLLGTYTLTKNVINISSLVGAIGQAQAVPYVATKGAVTAMTKALALDESPYGVRVNCISPGNIWTPLWEELAALMPDPRATIREGMLAQPLGRMGQPAEVGAAAVFLASEANFCTGIELLVTGGAELGYGCKASRSTPVDAPDIPS

SEQ ID NO: 10352 - protein, 188 aa, Homo sapiens [sequence omitted]

SEQ ID NO: 10353 - protein, 1130 aa, Homo sapiens
MAHAGGGSGGSGAGGPAGRGLSGARWGRSGSAGHEKLPVHVEDALTYLDQVKIRFGSDPATYNGFLEIMKEFKSQSIDTPGVIRRVSQLFHEHPDLIVGFNAFLPLGYRIDIPKNGKLNIQSPLTSQENSHNHGDGAEDFKQQVPYKEDKPQVPLESDSVEFNNAISYVNKIKTRFLDHPEIYRSFLEILHTYQKEQLNTRGRPFRGMSEEEVFTEVANLFRGQEDLLSEFGQFLPEAKRSLFTGNGPCEMHSVQKNEHDKTPEHSRKRSRPSLLRPVSAPAKKKMKLRGTKDLSIAAVGKYGTLQEFSFFDKVRRVLKSQEVYENFLRCIALFNQELVSGSELLQLVSPFLGKFPELFAQFKSFLGVKELSFAPPMSDRSGDGISREIDYASCKRIGSSYRALPKTYQQPKCSGRTAICKEVLNDTWVSFPSWSEDSTFVSSKKTPYEEQLHRCEDERFELDVVLETNLATIRVLESVQKKLSRMAPEDQEKFRLDDSLGGTSEVIQRRAIYRIYGDKAPEIIESLKKNPVTAVPVVLKRLKAKEEEWREAQQGFNKIWREQYEKAYLKSLDHQAVNFKQNDTKALRSKSLLNEIESVYDEHQEQHSEGRSAPSSEPHLIFVYEDRQILEDAAALISYYVKRQPAIQKEDQGTIHQLLHQFVPSLFFSQQLDLGASEESADEDRDSPQGQTTDPSERKKPAPGPHSSPPEEKGAFGDAPATEQPPLPPPAPHKPLDDVYSLFFANNNWYFFLRLHQTLCSRLLKIYRQAQKQLLEYRTEKEREKLLCEGRREKGSDPAMELRLKQPSEVELEEYYPAFLDMVRSLLEGSIDPTQYEDTLREMFTIHAYVGFTMDKLVQNIARQLHHLVSDDVCLKVVELYLNEKKRGAAGGNLSSRCVRAARETSYQWKAERCMADENCFKVMFLQRKGQVIMTIELLDTEEAQTEDPVEVQHLARYVEQYVGTEGASSSPTEGFLLKPVFLQRNLKKFRRRWQSEQARALRGEARSSWKRLVGVESACDVDCRFKLSTHKMVFIVNSEDYMYRRGTLCRAKQVQPLVLLRHHQHFEEWHSRWLEDNVTVEAASLVQDWLMGEEDEDMVPCKTLCETVHVHGLPVTRYRVQYSRRPASP

SEQ ID NO: 10354 - protein, 353 aa, Homo sapiens
MAHAGGGSGGSGAGGPAGRGLSGARWGRSGSAGHEKLPVHVEDALTYLDQVKIRFGSDPATYNGFLEIMKEFKSQSIDTPGVIRRVSQLFHEHPDLIVGFNAFLPLGYRIDIPKNGKLNIQSPLTSQENSHNHGDGAEDFKQQVPYKEDKPQVPLESDSVEFNNAISYVNKIKTRFLDHPEIYRSFLEILHTYQKEQLNTRGRPFRGMSEEEVFTEVANLFRGQEDLLSEFGQFLPEAKRSLFTGNGPCEMHSVQKNEHDKTPEHSRKRSRPSLLRPVSAPAKKKMKLRGTKDLSIAAVGKYGTLQEFSFFDKVRRVLKSQEVYENFLRCIALFNQELVSGSELLQLVSPFLG

SEQ ID NO: 10355 - protein, 385 aa, Homo sapiens
MWGRLLLWPLVLGFSLSGGTQTPSVYDESGSTGGGDDSTPSILPAPRGYPGQVCANDSDTLELPDSSRALLLGWVPTRLVPALYGLVLVVGLPANGLALWVLATQAPRLPSTMLLMNLAAADLLLALALPPRIAYHLRGQRWPFGEAACRLATAALYGHMYGSVLLLAAVSLDRYLALVHPLRARALRGRRLALGLCMAAWLMAAALALPLTLQRQTFRLARSDRVLCHDALPLDAQASHWQPAFTCLALLGCFLPLLAMLLCYGATLHTLAASGRRYGHALRLTAVVLASAVAFFVPSNLLLLLHYSDPSPSAWGNLYGAYVPSLALSTLNSCVDPFIYYYVSAEFRDKVRAGLFQRSPGDTVASKASAEGGSRGMGTHSSLLQ

SEQ ID NO: 10356 - protein, 477 aa, Homo sapiens
MAAPILRSFSWGRWSGTLNLSVLLPLGLRKAHSGAQGLLAAQKARGLFKDFFPETGTKIELPELFDRGTASFPQTIYCGFDPTADSLHVGHLLALLGLFHLQRAGHNVIALVGGATARLGDPSGRTKEREALETERVRANARALRLGLEALAANHQQLFTDGRSWGSFTVLDNSAWYQKQHLVDFLAAVGGHFRMGTLLSRQSVQLRLKSPEGMSLAEFFYQVLQAYDFYYLFQRYGCRVQLGGSDQLGNIMSGYEFINKLTGEDVFGITVPLITSTTGAKLGKSAGNAVWLNRDKTSPFELYQFFVRQPDDSVERYLKLFTFLPLPEIDHIMQLHVKEPERRGPQKRLAAEVTKLVHGREGLDSAKRCTQALYHSSIDALEVMSDQELKELFKEAPFSEFFLDPGTSVLDTCRKANAIPDGPRGYRMITEGGVSINHQQVTNPESVLIVGQHILKNGLSLLKIGKRNFYIIKWLQL

SEQ ID NO: 10357 - protein, 477 aa, Homo sapiens; identical to SEQ ID NO: 10356

SEQ ID NO: 10358 - protein, 1083 aa, Homo sapiens
MDAALGCRTNIFQIQRSGGRKHTEKHASGGSTVHIHPQAAPVVCRHVLDTLIQLAKLSPFYKCETKAQEKFALVFSLSGRLILCEDVLDQALSSFSRQVFPSHFTQQRTKETNCESDRERGNKACSPCSSQSSSSGICTDFWDLLVKLDNMNVSRKGKNSVKSVPVSAGGEGETSPYSLEASPLGQLMNMLSHPVIRRSSLLTEKLLRLLSLISIALPENKVSEAQANSGSGASSTTTATSTTSTTTTTAASTTPTPPTAPTPVTSAPALVAATAISTIVVAASTTVTTPTTATTTVSSWGLLLLSSFSQVLTSHSCSEEGLEDAANVLLQLSRGDSGTRDTVLKLLLNGARHLGYTLCKQIGTLLAELREYNLEQQRRAQCETLSPDGLPEEQPQTTKLKGKMQSRFDMAENVVIVASQKRPLGGRELQLPSMSMLTSKTSTQKFFLRVLQVIIQLRDDTRRANKKAKQTGRLGSSGLGSASSIQAAVRQLEAEADAIIQMSESSQSEASVRREESPMDVDQPSPSAQDTQSIASDGTPQGEKEKEERPPELPLLSEQLSLDELWDMLGECLKELEESHDQHAVLVLQPAVEAFFLVHATERESKPPVRDTRESQLAHIKDEPPPLSPAPLTPATPSSLDPFFSREPSSMHISSSLPPDTQKFLRFAETHRTVLNQILRQSTTHLADGPFAVLVDYIRVLDFDVKRKYFRQELERLDEGLRKEDMAVHVRRDHVFEDSYRELHRKSPEEMKNRLYIVFEGEEGQDAGGLLREWYMIISREMFNPMYALFRTSPGDRVTYTINPSSHCNPNHLSYFKFVGRIVAKAVYDNRLLECYFTRSFYKHILGKSVRYTDMESEDYHFYQGLVYLLENDVSTLGYDLTFSTEVQEFGVCEVRDLKPNGANILVTEENKKEYVHLVCQMRMTGAIRKQLAAFLEGFYEIIPKRLISIFTEQELELLISGLPTIDIDDLKSNTEYHKYQSNSIQIQWFWRALRSFDQADRAKFLQFVTGTSKVPLQGFAALEGMNGIQKFQIHRDDRSTDRLPSAHTCFNQLDLPAYESFEKLRHMLLLAIQECSEGFGLA

SEQ ID NO: 10359 - protein, 3636 aa, Homo sapiens
MQSFNSTQQNETEPNQQVVGTEERIPIPLMDYILNVMKFVESILSNNTTDDHCQEFVNQKGLLPLVTILGLPNLPIDFPTSAACQAVAGVCKSILTLSHEPKVLQEGLLQLDSILSSLEPLHRPIESPGGSVLLRELACAGNVADATLSAQATPLLHALTAAHAYIMMFVHTCRVGQSEIRSISVNQWGSQLGLSVLSKLSQLYCSLVWESTVLLSLCTPNSLPSGCEFGQADMQKLVPKDEKAGTTQGGKRSDGEQDGAAGSMDASTQGLLEGIGLDGDTLAPMETDEPTASDSKGKSKITPAMAARIKQIKPLLSASSRLGRALAELFGLLVKLCVGSPVRQRRSHHAASTTTAPTPAARSTASALTKLLTKGLSWQPPPYTPTPRFRLTFFICSVGFTSPMLFDERKYPYHLMLQKFLCSGGHNALFETFNWALSMGGKVPVSEGLEHSDLPDGTGEFLDAWLMLVEKMVNPTTVLESPHSLPAKLPGGVQNFPQFSALRFLVVTQKAAFTCIKNLWNRKPLKVYGGRMAESMLAILCHILRGEPVIRERLSKEKEGSRGEEDTGQEEGGSRREPQVNQQQLQQLMDMGFTREHAMEALLNTSTMEQATEYLLTHPPPIMGGVVRDLSMSEEDQMMRAIAMSLGQDIPMDQRAESPEEVACRKEEEERKAREKQEEEEAKCLEKFQDADPLEQDELHTFTDTMLPGCFHLLDELPDTVYRVCDLIMTAIKRNGADYRDMILKQVVNQVWEAADVLIKAALPLTTSDTKTVSEWISQMATLPQASNLATRILLLTLLFEELKLPCAWVVESSGILNVLIKLLEVVQPCLQAAKEQKEVQTPKWITPVLLLIDFYEKTAISSKRRAQMTKYLQSNSNNWRWFDDRSGRWCSYSASNNSTIDSAWKSGETSVRFTAGRRRYTVQFTTMVQVNEETGNRRPVMLTLLRVPRLNKNSKNSNGQELEKTLEESKEMDIKRKENKGNDTPLALESTNTEKETSLEETKIGEILIQGLTEDMVTVLIRACVSMLGVPVDPDTLHATLRLCLRLTRDHKYAMMFAELKSTRMILNLTQSSGFNGFTPLVTLLLRHIIEDPCTLRHTMEKVVRSAATSGAGSTTSGVVSGSLGSREINYILRVLGPAACRNPDIFTEVANCCIRIALPAPRGSGTASDDEFENLRIKGPNAVQLVKTTPLKPSPLPVIPDTIKEVIYDMLNALAAYHAPEEDKSDPKPGVMTQEVGQLLQDMGDDVYQQYRSLTRQSSDFDTQSGFSINSQVFAADGASTETSASGTSQGEASTPEESRDGKKDKEGDRASEEGKQKGKGSKPLMPTSTILRLLAELVRSYVGIATLIANYSYTVGQSELIKEDCSVLAFVLDHLLPHTQNAEDKDTPALARLFLASLAAAGSGTDAQVALVNEVKAALGRALAMAESTEKHARLQAVMCIISTIMESCPSTSSFYSSATAKTQHNGMNNIIRLFLKKGLVNDLARVPHSLDLSSPNMANTVNAALKPLETLSRIVNQPSSLFGSKSASSKNKSEQDAQGASQDSSSNQQDPGEPGEAEVQEEDHDVTQTEVADGDIMDGEAETDSVVIAGQPEVLSSQEMQVENELEDLIDELLERDGGSGNSTIIVSRSGEDESQEDVLMDEAPSNLSQASTLQANREDSMNILDPEDEEEHTQEEDSSGSNEDEDDSQDEEEEEEEDEEDDQEDDEGEEGDEDDDDDGSEMELDEDYPDMNASPLVRFERFDREDDLIIEFDNMFSSATDIPPSPGNIPTTHPLMVRHADHSSLTLGSGSSTTRLTQGIGRSQRTLRQLTANTGHTIHVHYPGNRQPNPPLILQRLLGPSAAADILQLSSSLPLQSRGRARLLVGNDDVHIIARSDDELLDDFFHDQSTATSQAGKFVCIPTALTRWTEECKVLDAESMHDCVSVVKVSIVNHLEFLRDEELEERREKRRKQLAEEETKITDKGKEDKENRDQSAQCTASKSNDSTEQNLSDGTPMPDSYPTTPSSTDAATSESKETLGTLQSSQQQPTLPTPPALGEVPQELQSPAGEGGSSTQLLMPVEPEELGPTRPSGEAETTQMELSPAPTITSLSPERAEDSDALTAVSSQLEGSPMDTSSLASCTLEEAVGDTSAAGSSEQPRAGSSTPGDAPPAVAEVQGRSDGSGESAQPPEDSSPPASSESSSTRDSAVAISGADSRGILEEPLPSTSSEEEDPLAGISLPEGVDPSFLAALPDDIRREVLQNQLGIRPPTRTAPSTNSSAPAVVGNPGVTEVSPEFLAALPPAIQEEVLAQQRAEQQRRELAQNASSDTPMDPVTFIQTLPSDLRRSVLEDMEDSVLAVMPPDIAAEAQALRREQEARQRQLMHERLFGHSSTSALSAILRSPAFTSRLSGNRGVQYTRLAVQRGGTFQMGGSSSHNRPSGSNVDTLLRLRGRLLLDHEALSCLLVLLFVDEPKLNTSRLHRVLRNLCYHAQTRHWVIRSLLSILQRSSESELCIETPKLTTSEEKGKKSSKSCGSSSHENRPLDLLHKMESKSSNQLSWLSVSMDAALGCRTNIFQIQRSGGRKHTEKHASGGSTVHIHPQAAPVVCRHVLDTLIQLAKVFPSHFTQQRTKETNCESDRERGNKACSPCSSQSSSSGICTDFWDLLVKLDNMNVSRKGKNSVKSVPVSAGGEGETSPYSLEASPLGQLMNMLSHPVIRRSSLLTEKLLRLLSLISIALPENKVSEAQANSGSGASSTTTATSTTSTTTTTAASTTPTPPTAPTPVTSAPALVAATAISTIVVAASTTVTTPTTATTTVSISPTTKGSKSPAKVSDGGSSSTDFKMVSSGLTENQLQLSVEVLTSHSCSEEGLEDAANVLLQLSRGDSGTRDTVLKLLLNGARHLGYTLCKQIGTLLAELREYNLEQQRRAQCETLSPDGLPEEQPQTTKLKGKMQSRFDMAENVVIVASQKRPLGGRELQLPSMSMLTSKTSTQKFFLRVLQVIIQLRDDTRRANKKAKQTGRLGSSGLGSASSIQAAVRQLEAEADAIIQMVREGQRARRQQQAATSESSQSEASVRREESPMDVDQPSPSAQDTQSIASDGTPQGEKEKEERPPELPLLSEQLSLDELWDMLGECLKELEESHDQHAVLVLQPAVEAFFLVHATERESKPPVRDTRESQLAHIKDEPPPLSPAPLTPATPSSLDPFFSREPSSMHISSSLPPDTQKFLRFAETHRTVLNQILRQSTTHLADGPFAVLVDYIRVLDFDVKRKYFRQELERLDEGLRKEDMAVHVRRDHVFEDSYRELHRKSPEEMKNRLYIVFEGEEGQDAGGLLREWYMIISREMFNPMYALFRTSPGDRVTYTINPSSHCNPNHLSYFKFVGRIVAKAVYDNRLLECYFTRSFYKHILGKSVRYTDMESEDYHFYQGLVYLLENDVSTLGYDLTFSTEVQEFGVCEVRDLKPNGANILVTEENKKEYVHLVCQMRMTGAIRKQLAAFLEGFYEIIPKRLISIFTEQELELLISGLPTIDIDDLKSNTEYHKYQSNSIQIQWFWRALRSFDQADRAKFLQFVTGTSKVPLQGFAALEGMNGIQKFQIHRDDRSTDRLPSAHTCFNQLDLPAYESFEKLRHMLLLAIQECSEGFGLA

SEQ ID NO: 10360 - protein, 418 aa, Homo sapiens
MKVDRTKLKKTPTEAPADCRALIDKLKVCNDEQLLLELQQIKTWNIGKCELYHWVDLLDRFDGILADAGQTVENMSWMLVCDRPEREQLKMLLLAVLNFTALLIEYSFSRHLYSSIEHLTTLLASSDMQVVLAVLNLLYVFSKRSNYITRLGSDKRTPLLTRLQHLAESWGGKENGFGLAECCRDLHMMKYPPSATTLHFEFYADPGAEVKIEKRTTSNTLHYIHIEQLDKISESPSEIMESLTKMYSIPKDKQMLLFTHIRLAHGFSNHRKRLQAVQARLHAISILVYSNALQESANSILYNGLIEELVDVLQITDKQLMEIKAASLRTLTSIVHLERTPKLSSIIDCTGTASYHGFLPVLVRNCIQAMIDPSMDPYPHQFATALFSFLYHLASYDAGGEALVSCGMMEALLKVLYF

SEQ ID NO: 10361 - protein, 2952 aa, Homo sapiens
MQSFNSTQQNETEPNQQVVGTEERIPIPLMDYILNVMKFVESILSNNTTDDHCQEFVNQKGLLPLVTILGLPNLPIDFPTSAACQAVAGVCKSILTLSHEPKVLQEGLLQLDSILSSLEPLHRPIESPGGSVLLRELACAGNVADATLSAQATPLLHALTAAHAYIMMFVHTCRVGQSEIRSISVNQWGSQLGLSVLSKLSQLYCSLVWESTVLLSLCTPNSLPSGCEFGQADMQKLVPKDEKAGTTQGGKRSDGEQDGAAGSMDASTQGLLEGIGLDGDTLAPMETDEPTASDSKGKSKITPAMAARIKQIKPLLSASSRLGRALAELFGLLVKLCVGSPVRQRRSHHAASTTTAPTPAARSTASALTKLLTKGLSWQPPPYTPTPRFRLTFFICSVGFTSPMLFDERKYPYHLMLQKFLCSGGHNALFETFNWALSMGGKVPVSEGLEHSDLPDGTGEFLDAWLMLVEKMVNPTTVLESPHSLPAKLPGGVQNFPQFSALRFLVVTQKAAFTCIKNLWNRKPLKVYGGRMAESMLAILCHILRGEPVIRERLSKEKEGSRGEEDTGQEEGGSRREPQVNQQQLQQLMDMGFTREHAMEALLNTSTMEQATEYLLTHPPPIMGGVVRDLSMSEEDQMMRAIAMSLGQDIPMDQRAESPEEVACRKEEEERKAREKQEEEEAKCLEKFQDADPLEQDELHTFTDTMLPGCFHLLDELPDTVYRVCDLIMTAIKRNGADYRDMILKQVVNQVWEAADVLIKAALPLTTSDTKTVSEWISQMATLPQASNLATRILLLTLLFEELKLPCAWVVESSGILNVLIKLLEVVQPCLQAAKEQKEVQTPKWITPVLLLIDFYEKTAISSKRRAQMTKYLQSNSNNWRWFDDRSGRWCSYSASNNSTIDSAWKSGETSVRFTAGRRRYTVQFTTMVQVNEETGNRRPVMLTLLRVPRLNKNSKNSNGQELEKTLEESKEMDIKRKENKGNDTPLALESTNTEKETSLEETKIGEILIQGLTEDMVTVLIRACVSMLGVPVDPDTLHATLRLCLRLTRDHKYAMMFAELKSTRMILNLTQSSGFNGFTPLVTLLLRHIIEDPCTLRHTMEKVVRSAATSGAGSTTSGVVSGSLGSREINYILRVLGPAACRNPDIFTEVANCCIRIALPAPRGSGTASDDEFENLRIKGPNAVQLVKTTPLKPSPLPVIPDTIKEVIYDMLNALAAYHAPEEDKSDPKPGVMTQEVGQLLQDMGDDVYQQYRSLTRQSSDFDTQSGFSINSQVFAADGASTETSASGTSQGEASTPEESRDGKKDKEGDRASEEGKQKGKGSKPLMPTSTILRLLAELVRSYVGIATLIANYSYTVGQSELIKEDCSVLAFVLDHLLPHTQNAEDKDTPALARLFLASLAAAGSGTDAQVALVNEVKAALGRALAMAESTEKHARLQAVMCIISTIMESCPSTSSFYSSATAKTQHNGMNNIIRLFLKKGLVNDLARVPHSLDLSSPNMANTVNAALKPLETLSRIVNQPSSLFGSKSASSKNKSEQDAQGASQDSSSNQQDPGEPGEAEVQEEDHDVTQTEVADGDIMDGEAETDSVVIAGQPEVLSSQEMQVENELEDLIDELLERDGGSGNSTIIVSRSGEDESQEDVLMDEAPSNLSQASTLQANREDSMNILDPEDEEEHTQEEDSSGSNEDEDDSQDEEEEEEEDEEDDQEDDEGEEGDEDDDDDGSEMELDEDYPDMNASPLVRFERFDREDDLIIEFDNMFSSATDIPPSPGNIPTTHPLMVRHADHSSLTLGSGSSTTRLTQGIGRSQRTLRQLTANTGHTIHVHYPGNRQPNPPLILQRLLGPSAAADILQLSSSLPLQSRGRARLLVGNDDVHIIARSDDELLDDFFHDQSTATSQAGTLSSIPTALTRWTEECKVLDAESMHDCVSVVKVSIVNHLEFLRDEELEERREKRRKQLAEEETKITDKGKEDKENRDQSAQCTASKSNDSTEQNLSDGTPMPDSYPTTPSSTDAATSESKETLGTLQSSQQQPTLPTPPALGEVPQELQSPAGEGGSSTQLLMPVEPEELGPTRPSGEAETTQMELSPAPTITSLSPERAEDSDALTAVSSQLEGSPMDTSSLASCTLEEAVGDTSAAGSSEQPRAGSSTPGDAPPAVAEVQGRSDGSGESAQPPEDSSPPASSESSSTRDSAVAISGADSRGILEEPLPSTSSEEEDPLAGISLPEGVDPSFLAALPDDIRREVLQNQLGIRPPTRTAPSTNSSAPAVVGNPGVTEVSPEFLAALPPAIQEEVLAQQRAEQQRRELAQNASSDTPMDPVTFIQTLPSDLRRSVLEDMEDSVLAVMPPDIAAEAQALRREQEARQRQLMHERLFGHSSTSALSAILRSPAFTSRLSGNRGVQYTRLAVQRGGTFQMGGSSSHNRPSGSNVDTLLRLRGRLLLDHEALSCLLVLLFVDEPKLNTSRLHRVLRNLCYHAQTRHWVIRSLLSILQRSSESELCIETPKLTTSEEKGKKSSKSCGSSSHENRPLDLLHKMESKSSNQLSWLSVSMDAALGCRTNIFQIQRSGGRKHTEKHASGGSTVHIHPQAAPVVCRHVLDTLIQLAKVFPSHFTQQRTKETNCESDRERGNKACSPCSSQSSSSGICTDFWDLLVKLDNMNVSRKGKNSVKSVPVSAGGEGETSPYSLEASPLGQLMNMLSHPVIRRSSLLTEKLLRLLSLISIALPENKVSEAQANSGSGASSTTTATSTTSTTTTTAASTTPTPPTAPTPVTSAPALVAATAISTIVVAASTTVTTPTTATTTVSISPTTKGSKSPAKVSDGGSSSTDFKMVSSGLTENQLQLSVEVLTSHSCSEEGLEDAANVLLQLSRGDSGTRDTVLKLLLNGARHLGYTLCKQIGTLLAELREYNLEQQRRAQCETLSPDGLPEEQPQTTKLKGKMQSRFLRFRLS

SEQ ID NO: 10362 - protein, 461 aa, Homo sapiens
MKVDRTKLKKTPTEAPADCRALIDKLKVCNDEQLLLELQQIKTWNIGKCELYHWVDLLDRFDGILADAGQTVENMSWMLVCDRPEREQLKMLLLAVLNFTALLIEYSFSRHLYSSIEHLTTLLASSDMQVVLAVLNLLYVFSKRSNYITRLGSDKRTPLLTRLQHLAESWGGKENGFGLAECCRDLHMMKYPPSATTLHFEFYADPGAEVKIEKRTTSNTLHYIHIEQLDKISESPSEIMESLTKMYSIPKDKQMLLFTHIRLAHGFSNHRKRLQAVQARLHAISILVYSNALQESANSILYNGLIEELVDVLQITDKQLMEIKAASLRTLTSIVHLERTPKLSSIIDCTGTASYHGFLPVLVRNCIQAMIDPSMDPYPHQFATALFSFLYHLASYDAGGEALVSCGMMEALLKVIKFLGDEQDQITFVTRAVRVVDLITNLDMAAFQSHSGLSIFIYRLE

SEQ ID NO: 10363 - protein, 3636 aa, Homo sapiens; identical to SEQ ID NO: 10359

SEQ ID NO: 10364 - protein, 433 aa, Homo sapiens
MHISSSLPPDTQKFLRFAETHRTVLNQILRQSTTHLADGPFAVLVDYIRVLDFDVKRKYFRQELERLDEGLRKEDMAVHVRRDHVFEDSYRELHRKSPEEMKNRLYIVFEGEEGQDAGGLLREWYMIISREMFNPMYALFRTSPGDRVTYTINPSSHCNPNHLSYFKFVGRIVAKAVYDNRLLECYFTRSFYKHILGKSVRYTDMESEDYHFYQGLVYLLENDVSTLGYDLTFSTEVQEFGVCEVRDLKPNGANILVTEENKKEYVHLVCQMRMTGAIRKQLAAFLEGFYEIIPKRLISIFTEQELELLISGLPTIDIDDLKSNTEYHKYQSNSIQIQWFWRALRSFDQADRAKFLQFVTGTSKVPLQGFAALEGMNGIQKFQIHRDDRSTDRLPSAHTCFNQLDLPAYESFEKLRHMLLLAIQECSEGFGLA

SEQ ID NO: 10365 - protein, 1713 aa, Homo sapiens
  VARIANT (1)...(1713): Xaa = Any Amino Acid
MQSFNSTQQNETEPNQQVVGTEERIPIPLMDYILNVMKFVESILSNNTTDDHCQEFVNQKGLLPLVTILGLPNLPIDFPTSAACQAVAGVCKSILTLSHEPKVLQEGLLQLDSILSSLEPLHRPIESPGGSVLLRELACAGNVADATLSAQATPLLHALTAAHAYIMMFVHTCRVGQSEIRSISVNQWGSQLGLSVLSKLSQLYCSLVWESTVLLSLCTPNSLPSGCEFGQADMQKLVPKDEKAGTTQGGKRSDGEQDGAAGSMDASTQGLLEGIGLDGDTLAPMETDEPTASDSKGKSKITPAMAARIKQIKPLLSASSRLGRALAELFGLLVKLCVGSPVRQRRSHHAASTTTAPTPAARSTASALTKLLTKGLSWQPPPYTPTPRFRLTFFICSVGFTSPMLFDERKYPYHLMLQKFLCSGGHNALFETFNWALSMGGKVPVSEGLEHSDLPDGTGEFLDAWLMLVEKMVNPTTVLESPHSLPAKLPGGVQNFPQFSALRFLVVTQKAAFTCIKNLWNRKPLKVYGGRMAESMLAILCHILRGEPVIRERLSKEKEGSRGEEDTGQEEGGSRREPQVNQQQLQQLMDMGFTREHAMEALLNTSTMEQATEYLLTHPPPIMGGVVRDLSMSEEDQMMRAIAMSLGQDIPMDQRAESPEEVACRKEEEERKAREKQEEEEAKCLEKFQDADPLEQDELHTFTDTMLPGCFHLLDELPDTVYRVCDLIMTAIKRNGADYRDMILKQVVNQVWEAADVLIKAALPLTTSDTKTVSEWISQMATLPQASNLATRILLLTLLFEELKLPCAWVVESSGILNVLIKLLEVVQPCLQAAKEQKEVQTPKWITPVLLLIDFYEKTAISSKRRAQMTKYLQSNSNNWRWFDDRSGRWCSYSASNNSTIDSAWKSGETSVRFTAGRRRYTVQFTTMVQVNEETGNRRPVMLTLLRVPRLNKNSKNSNGQELEKTLEESKEMDIKRKENKGNDTPLALESTNTEKETSLEETKIGEILIQGLTEDMVTVLIRACVSMLGVPVDPDTLHATLRLCLRLTRDHKYAMMFAELKSTRMILNLTQSSGFNGFTPLVTLLLRHIIEDPCTLRHTMEKVVRSAATSGAGSTTSGVVSGSLGSREINYILRVLGPAACRNPDIFTEVANCCIRIALPAPRGSGTASDDEFENLRIKGPNAVQLVKTTPLKPSPLPVIPDTIKEVIYDMLNALAAYHAPEEADKSDPKPGVMTQEVGQLLQDMGDDVYQQYRSLTRQSSDFDTQSGFSINSQVFAADGASTETSASGTSQGEASTPEESRDGKKDKEGDRASEEGKQKGKGSKPLMPTSTILRLLAELVRSYVGIATLIANYSYTVGQSELIKEDCSVLAFVLDHLLPHTQNAEDKDTPALARLFLASLAAAGSGTDAQVALVNEVKAALGRALAMAESTEKHARLQAVMCIISTIMESCPSTSSFYSSATAKTQHNGMNNIIRLFLKKGLVNDLARVPHSLDLSSPNMANTVNAALKPLETLSRIVNQPSSLFGSKSASSKNKSEQDAQGASQDSSSNQQDPGEPGEAEVQEEDHDVTQTEVADGDIMDGEAETDSVVIAGQPEVLSSQEMQVENELEDLIDELLERDGGSGNSTIIVSRSGEDESQEDVLMDEAPSNLSQASTLQANREDSMNILDPEDEEEHTQEEDSSGSNEDEDDSQDEEEEEEEDEEDDQVRGX

SEQ ID NO: 10366 - protein, 175 aa, Homo sapiens [sequence omitted]

SEQ ID NO: 10367 - protein, 387 aa, Homo sapiens
MYAKGGKGSAVPSDSQAREKLALYVYEYLLHIGAQKSAQTFLSEIRWEKNITLGEPPGFLHSWWCVFWDLYCAAPDRREACEHSGEAKAFQDYSAAAAPSPVMGSMAPGDTMAAGSMAAGFFQPFMSPRFPGGPRPTLRMPSQPPAGLPGSQPLLPGAMEPSPRAQGHPSMGGPMQRVTPPRGMASVGPQSYGGGMRPPPNSLAGPGLPAMNMGPGVRGPWASPSGNSIPYSSSSPGSYTGPPGGGGPPGTPIMPSPGDSTNSSENMYTIMNPIGQGAGRANFPLGPGPEGPMAAMSAMEPHHVNGSLGSGDMDGLPKSSPGAVAGLSNAPGTPRDDGEMAAAGTFLHPFPSESVSDCVDSPPAAASGRRGLAGRPRRGGRGARARP

SEQ ID NO: 10368 - protein, 387 aa, Homo sapiens; identical to SEQ ID NO: 10367

SEQ ID NO: 10369 - protein, 385 aa, Homo sapiens
MYAKGGKGSAVPSDSQAREKLALYVYEYLLHIGAQKSAQTFLSEIRWEKNITLGEPPGFLHSWWCVFWDLYCAAPDRREACEHSGEAKAFQDYSAAAAPSPVMGSMAPGDTMAAGSMAAGFFQGPPGSQPSPHNPNAPMMGPHGQPFMSPRFPGGPRPTLRMPSQPPAGLPGSQPLLPGAMEPSPRAQGHPSMGGPMQRVTPPRGMASVGPQSYGGGMRPPPNSLAGPGLPAMNMGPGVRGPWASPSGNSIPYSSSSPGSYTGPPGGGGPPGTPIMPSPGDSTNSSENMYTIMNPIGQGAGRANFPLGPGPEGPMAAMSAMEPHHVNGSLGSGDMDGLPKSSPGAVAGLSNAPGTPRDDGEMAAAGTFLHPFPSESYSPGMTMSV

SEQ ID NO: 10370 - protein, 409 aa, Homo sapiens
MYAKGGKGSAVPSDSQAREKLALYVYEYLLHIGAQKSAQTFLSEIRWEKNITLGEPPGFLHSWWCVFWDLYCAAPDRREACEHSGEAKAFQDYSAAAAPSPVMGSMAPGDTMAAGSMAAGFFQGPPGSQPSPHNPNAPMMGPHGQPFMSPRFPGGPRPTLRMPSQPPAGLPGSQPLLPGAMEPSPRAQGHPSMGGPMQRVTPPRGMASVGPQSYGGGMRPPPNSLAGPGLPAMNMGPGVRGPWASPSGNSIPYSSSSPGSYTGPPGGGGPPGTPIMPSPGDSTNSSENMYTIMNPIGQGAGRANFPLGPGPEGPMAAMSAMEPHHVNGSLGSGDMDGLPKSSPGAVAGLSNAPGTPRDDGEMAAAGTFLHPFPSESVSDCVDSPPAAASGRRGLAGRPRRGGRGARARP

SEQ ID NO: 10371 - protein, 340 aa, Homo sapiens
MGNVPSAVKHCLSYQQLLREHLWIGDSVAGALDPAQETSQLSGLPEFVKIVEVGPRDGLQNEKVIVPTDIKIEFINRLSQTGLSVIEVTSFVSSRWVPQMADHTEVMKGIHQYPGVRYPVLTPNLQGFHHAVAAGATEISVFGAASESFSKKNINCSIEESMGKFEEVVKSARHMNIPARGYVSCALGCPYEGSITPQKVTEVSKRLYGMGCYEISLGDTIGVGTPGSMKRMLESVMKEIPPGALAVHCHDTYGQALANILTALQMGINVVDSAVSGLGGCPYAKGASGNVATEDLIYMLNGLGLNTGVNLYKVMEAGDFICKAVNKTTNSKVAQASFNA

SEQ ID NO: 10372 - protein, 513 aa, Homo sapiens
MTTQLPAYVAILLFYVSRASCQDTFTAAVYEHAAILPNATLTPVSREEALALMNRNLDILEGAITSAADQGAHIIVTPEDAIYGWNFNRDSLYPYLEDIPDPEVNWIPCNNRNRFGQTPVQERLSCLAKNNSIYVVANIGDKKPCDTSDPQCPPDGRYQYNTDVVFDSQGKLVARYHKQNLFMGENQFNVPKEPEIVTFNTTFGSFGIFTCFDILFHDPAVTLVKDFHVDTIVFPTAWMNVLPHLSAVEFHSAWAMGMRVNFLASNIHYPSKKMTGSGIYAPNSSRAFHYDMKTEEGKLLLSQLDSHPSHSAVVNWTSYASSIEALSSGNKEFKGTVFFDEFTFVKLTGVAGNYTVCQKDLCCHLSYKMSENIPNEVYALGAFDGLHTVEGRYYLQICTLLKCKTTNLNTCGDSAETASTRFEMFSLSGTFGTQYVFPEVLLSENQLAPGEFQVSTDGRLFSLKPTSGPVLTVTLFGRLYEKDWASNASSGLTAQARIIMLIVIAPIVCSLSW

SEQ ID NO: 10373 - protein, 537 aa, Homo sapiens
MHLFICILCNILYNKPLKHSLDFSMTTQLPAYVAILLFYVSRASCQDTFTAAVYEHAAILPNATLTPVSREEALALMNRNLDILEGAITSAADQGAHIIVTPEDAIYGWNFNRDSLYPYLEDIPDPEVNWIPCNNRNRFGQTPVQERLSCLAKNNSIYVVANIGDKKPCDTSDPQCPPDGRYQYNTDVVFDSQGKLVARYHKQNLFMGENQFNVPKEPEIVTFNTTFGSFGIFTCFDILFHDPAVTLVKDFHVDTIVFPTAWMNVLPHLSAVEFHSAWAMGMRVNFLASNIHYPSKKMTGSGIYAPNSSRAFHYDMKTEEGKLLLSQLDSHPSHSAVVNWTSYASSIEALSSGNKEFKGTVFFDEFTFVKLTGVAGNYTVCQKDLCCHLSYKMSENIPNEVYALGAFDGLHTVEGRYYLQICTLLKCKTTNLNTCGDSAETASTRFEMFSLSGTFGTQYVFPEVLLSENQLAPGEFQVSTDGRLFSLKPTSGPVLTVTLFGRLYEKDWASNASSGLTAQARIIMLIVIAPIVCSLSW

SEQ ID NO: 10374 - protein, 266 aa, Homo sapiens
MEAAAQFFVESPDVVYGPEAIEAQYEYRTTRVSREGGVLKLEQIRRDIRDFRSSAGLDKVIVLWTANTERFCEVIPGLNDTAENLLRTIELGLEVSPSTLFAVASILEGCAFLNGSPQNTLVPGALELAWQHRVFVGGDDFKSGQTKVKSVLVDFLIGSGLKTMSIVSYNHLGNNDGENLSAPLQFRSKEVSKSNVVDDMVQSNPVLYTPGEEPDHCVRGARARARGCPARGGRDPGKLLLHSRWSSSMCRTWVTASARWMSIPRS

SEQ ID NO: 10375 - protein, 558 aa, Homo sapiens
MEAAAQFFVESPDVVYGPEAIEAQYEYRTTRVSREGGVLKVHPTSTRFTFRTARQVPRLGVMLVGWGGNNGSTLTAAVLANRLRLSWPTRSGRKEANYYGSLTQAGTVSLGLDAEGQEVFVPFSAVLPMVAPNDLVFDGWDISSLNLAEAMRRAKVLDWGLQEQLWPHMEALRPRPSVYIPEFIAANQSARADNLIPGSRAQQLEQIRRDIRDFRSSAGLDKVIVLWTANTERFCEVIPGLNDTAENLLRTIELGLEVSPSTLFAVASILEGCAFLNGSPQNTLVPGALELAWQHRVFVGGDDFKSGQTKVKSVLVDFLIGSGLKTMSIVSYNHLGNNDGENLSAPLQFRSKEVSKSNVVDDMVQSNPVLYTPGEEPDHCVVIKYVPYVGDSKRALDEYTSELMLGGTNTLVLHNTCEDSLLAAPIMLDLALLTELCQRVSFCTDMDPEPQTFHPVLSLLSFLFKAPLVPPGSPVVNALFRQRSCIENILRACVGLPPQNHMLLEHKMERPGPSLKRVGPVAATYPMLNKKGPVPAATNGCTGDANGHLQEEPPMPTT

SEQ ID NO: 10376 - protein, 482 aa, Homo sapiens
MARKLSVLEVLLIIFCLIVVTIDILLLLLVLEETSDTSFTPECPEIPQSERIDCTPDQEVTEDICRWQYKCCWSPVADANVPRCFFPWNWGYEASNGHTNTSTGFTAQLKRLPSPSLFGNDVATTLFTAEYQTSNRFHFKITDFNNIRYEVSHENINLVDGIADASNLSYYVEVTDKPFSIKIMRTSNRRVLLDTSIGPLQFAQQYLQLSFRLPSANVYGLGEHVHQQYRHNMTWKTWPIFTRDATPTEGMINLYGAHTFFLCLEDARGSSFGVFLMNSNAMEVTLQPAPAITYRTIGGILDFYVFLGNTPEQVVQEYLELVGRPFFPPYWSLGFQLSRRDYGGINKLKEVVSRNRLAEIPYDVQYSDIDYMDGKKDFTVDEVAYSGLPDFVKELHDNGQKYLIIMNPGISKNSNYEPYNNGSLKRVWILGSNGFAVGEGYPGPTVFPDYTNPVCTEWWTDQVAKFHDHLEFDGVWIVSYYS

SEQ ID NO: 10377 - protein, 2537 aa, Homo sapiens [sequence omitted]

SEQ ID NO: 10378 - protein, 815 aa, Homo sapiens [sequence omitted]

SEQ ID NO: 10379 - protein, 283 aa, Homo sapiens
MDLWPGAWMLLLLLFLLLLFLLPTLWFCSPSAKYFFKMAFYNGWILFLAVLAIPVCAVRGRNVENMKILRLMLLHIKYLYGIRVEVRGAHHFPPSQPYVVVSNHQSSLDLLGMMEVLPGRCVPIAKRELLWAGSAGLACWLAGVIFIDRKRTGDAISVMSEVAQTLLTQDVRVWVFPEGTRNHNGSMLPFKRGAFHLAVQAQVPIVPIVMSSYQDFYCKKERRFTSGQCQVRVLPPVPTEGLTPDDVPALADRVRHSMLTVFREISTDGRGGGDYLKKPGGGG

SEQ ID NO: 10380 - protein, 225 aa, Homo sapiens
MPGTQTPAPAEDPHSGCRDPVPARPQACHPKSQETRFEGPLPPPPPAAAAPPPPAPAQTAQAPGFVVPTHAGTVGTLPLGGYVAPGYPLQLQPCTAYVPVYPVGTPYAGGTPGGTGVTSTLPPPPQGPGLALLEPRRPPHDYMPIAVLTTICCFWPTGIIAIFKAVQVRTALARGDMVSAEIASREARNFSFISLAVGIAAMVLCTILTVVIIIAAQHHENYWDP

SEQ ID NO: 10381 - protein, 854 aa, Homo sapiens [sequence omitted]

SEQ ID NO: 10382 - protein, 2003 aa, Homo sapiens [sequence omitted]

SEQ ID NO: 10383 - protein, 344 aa, Homo sapiens
MDERLLGPPPPGGGRGGLGLVSGEPGGPGEPPGGGDPGGGSGGVPGGRGKQDIGDILQQIMTITDQSLDEAQAKKHALNCHRMKPALFSVLCEIKEKTGLSIRSSQEEEPVDPQLMRLDNMLLAEGVAGPEKGGGSAAAAAAAAASGGGVSPDNSIEHSDYRSKLAQIRHIYHSELEKYEQACNEFTTHVMNLLREQSRTRPVAPKEMERMVSIIHRKFSAIQMQLKQSTCEAVMILRSRFLDARRKRRNFSKQATEVLNEYFYSHLSNPYPSEEAKEELAKKCGITVSQVSNWFGNKRIRYKKNIGKFQEEANIYAVKTAVSVTQGGHSRPSGRLTYLIRSSS

SEQ ID NO: 10384 - protein, 283 aa, Homo sapiens; identical to SEQ ID NO: 10379

SEQ ID NO: 10385 - protein, 256 aa, Homo sapiens
APPLPALPPPAPPAPPPRRCLHLSISALLPLRHPAPRLQHRPRTPTPAAGTLSQRDRRHVIRKVRTPRLSPSHFSPPAAAAPPPPAPAQTAQAPGFVVPTHAGTVGTLPLGGYVAPGYPLQLQPCTAYVPVYPVGTPYAGGTPGGTGVTSTLPPPPQGPGLALLEPRRPPHDYMPIAVLTTICCFWPTGIIAIFKAVQVRTALARGDMVSAEIASREARNFSFISLAVGIAAMVLCTILTVVIIIAAQHHENYWDP

SEQ ID NO: 10386 - protein, 287 aa, Homo sapiens
MVARMDLWPGAWMLLLLLFLLLLFLLPTLWFCSPSAKYFFKMAFYNGWILFLAVLAIPVCAVRGRNVENMKILRLMLLHIKYLYGIRVEVRGAHHFPPSQPYVVVSNHQSSLDLLGMMEVLPGRCVPIAKRELLWAGSAGLACWLAGVIFIDRKRTGDAISVMSEVAQTLLTQDVRVWVFPEGTRNHNGSMLPFKRGAFHLAVQAQVPIVPIVMSSYQDFYCKKERRFTSGQCQVRVLPPVPTEGLTPDDVPALADRVRHSMLTVFREISTDGRGGGDYLKKPGGGG

SEQ ID NO: 10387 - protein, 349 aa, Homo sapiens
MDERLLGPPPPGGGRGGLGLVSGEPGGPGEPPGGGDPGGGSGGVPGGRGKQDIGDILQQIMTITDQSLDEAQAKKHALNCHRMKPALFSVLCEIKEKTGLSIRSSQEEEPVDPQLMRLDNMLLAEGVAGPEKGGGSAAAAAAAAASGGGVSPDNSIEHSDYRSKLAQIRHIYHSELEKYEQACNEFTTHVMNLLREQSRTRPVAPKEMERMVSIIHRKFSAIQMQLKQSTCEAVMILRSRFLDARRKRRNFSKQATEVLNEYFYSHLSNPYPSEEAKEELAKKCGITVSQVSNWFGNKRIRYKKNIGKFQEEANIYAVKTAVSVTQGGHSRTSSPTPPSSAGGSHCHPG

SEQ ID NO: 10388 - protein, 430 aa, Homo sapiens
MDERLLGPPPPGGGRGGLGLVSGEPGGPGEPPGGGDPGGGSGGVPGGRGKQDIGDILQQIMTITDQSLDEAQAKKHALNCHRMKPALFSVLCEIKEKTGLSIRSSQEEEPVDPQLMRLDNMLLAEGVAGPEKGGGSAAAAAAAAASGGGVSPDNSIEHSDYRSKLAQIRHIYHSELEKYEQACNEFTTHVMNLLREQSRTRPVAPKEMERMVSIIHRKFSAIQMQLKQSTCEAVMILRSRFLDARRKRRNFSKQATEVLNEYFYSHLSNPYPSEEAKEELAKKCGITVSQVSNWFGNKRIRYKKNIGKFQEEANIYAVKTAVSVTQGGHSRTSSPTPPSSAGSGGSFNLSGSGDMFLGMPGLNGDSYSASQVESLRHSMGPGGYGDNLGGGQMYSPREMRANGSWQEAVTPSSVTSPTEGPGSVHSDTSN

SEQ ID NO: 10389 - protein, 430 aa, Homo sapiens; identical to SEQ ID NO: 10388

SEQ ID NO: 10390 - protein, 283 aa, Homo sapiens; identical to SEQ ID NO: 10379

SEQ ID NO: 10391 - protein, 435 aa, Homo sapiens
MGAGERVQAPPRAEATAGRGADRARTLEGSRMAAGTAVGAWVLVLSLWGAVVGAQNITARIGEPLVLKCKGAPKKPPQRLEWKLNTGRTEAWKVLSPQGGGPWDSVARVLPNGSLFLPAVGIQDEGIFRCQAMNRNGKETKSNYRVRVYQIPGKPEIVDSASELTAGVPNKVGTCVSEGSYPAGTLSWHLDGKPLVPNEKGVSVKEQTRRHPETGLFTLQSELMVTPARGGDPRPTFSCSFSPGLPRHRALRTAPIQPRVWEPVPLEEVQLVVEPEGGAVAPGGTVTLTCEVPAQPSPQIHWMKDGVPLPLPPSPVLILPEIGPQDQGTYSCVATHSSHGPQESRAVSISIIEPGEEGPTAGSVGGSGLGTLALALGILGGLGTAALLIGVILWQRRQRRGEERKAPENQEEEEERAELNQSEEPEAGESSTGGP

SEQ ID NO: 10392 - protein, 370 aa, Homo sapiens
MTITDQSLDEAQAKKHALNCHRMKPALFSVLCEIKEKTGLSIRSSQEEEPVDPQLMRLDNMLLAEGVAGPEKGGGSAAAAAAAAASGGGVSPDNSIEHSDYRSKLAQIRHIYHSELEKYEQACNEFTTHVMNLLREQSRTRPVAPKEMERMVSIIHRKFSAIQMQLKQSTCEAVMILRSRFLDARRKRRNFSKQATEVLNEYFYSHLSNPYPSEEAKEELAKKCGITVSQVSNWFGNKRIRYKKNIGKFQEEANIYAVKTAVSVTQGGHSRTSSPTPPSSAGSGGSFNLSGSGDMFLGMPGLNGDSYSASQVESLRHSMGPGGYGDNLGGGQMYSPREMRANGSWQEAVTPSSVTSPTEGPGSVHSDTSN

SEQ ID NO: 10393 - protein, 435 aa, Homo sapiens; identical to SEQ ID NO: 10391

SEQ ID NO: 10394 - protein, 373 aa, Homo sapiens
MGAGERVQAPPRAEATAGRGADRARTLEGSRMAAGTAVGAWVLVLSLWGAVVGAQNITARIGEPLVLKCKGAPKKPPQRLEWKLGGGPWDSVARVLPNGSLFLPAVGIQDEGIFRCQAMNRNGKETKSNYRVRVYQIPGKPEIVDSASELTAGVPNKVGTCVSEGSYPAGTLSWHLDGKPLVPNEKGVSVKEQTRRHPETGLFTLQSELMVTPARGGDPRPTFSCSFSPGLPRHRALRTAPIQPRVWEPVPLEEVQLVVEPEGGAVAPGGTVTLTCEVPAQPSPQIHWMKDVSDLERGAGRTRRGGANCRLCGRIRAGNSSPGPGDPGRPGDSRPAHWGHLVAKAATPRRGEEGPRKPGGRGGACRTESVGGT

SEQ ID NO: 10395 - protein, 113 aa, Homo sapiens [sequence omitted]

SEQ ID NO: 10396 - protein, 160 aa, Homo sapiens
MEAERPQEEEDGEQGPPQDEEGWPPPNSTTRPWRSAPPSPPPPGTRHTALGPRSASLLSLQTELLLDLVAEAQSRRLEEQRATFYTPQNPSSLAPAPLRPLEDREQLYSTILSHQCQRMEAQRSEPPLPPGGQELLELLLRVQGGGRMEEQRSRPPTHTC

SEQ ID NO: 10397 - protein, 225 aa, Homo sapiens; identical to SEQ ID NO: 10380

SEQ ID NO: 10398 - protein, 1080 aa, Homo sapiens [sequence omitted]

SEQ ID NO: 10399 - protein, 283 aa, Homo sapiens; identical to SEQ ID NO: 10379

SEQ ID NO: 10400 - protein, 370 aa, Homo sapiens; identical to SEQ ID NO: 10392

SEQ ID NO: 10401 - protein, 113 aa, Homo sapiens
MEAERPQEEEDGEQTELLLDLVAEAQSRRLEEQRATFYTPQNPSSLAPAPLRPLEDREQLYSTILSHQCQRMEAQRSEPPLPPGGQELLELLLRVQGGGRMEEQRSRPPTHTC

SEQ ID NO: 10402 - protein, 306 aa, Homo sapiens
MSSEKSGLPDSVPHTSPPPYNAPQPPAEPPAPPPQAAPSSHHHHHHHYHQSGTATLPRLGAGGLASSAATAQRGPSSSATLPRPPHHAPPGPAAGAPPPGCATLPRMPPDPYLQETRFEGPLPPPPPAAAAPPPPAPAQTAQAPGFVVPTHAGTVGTLPLGGYVAPGYPLQLQPCTAYVPVYPVGTPYAGGTPGGTGVTSTLPPPPQGPGLALLEPRRPPHDYMPIAVLTTICCFWPTGIIAIFKAVQVRTALARGDMVSAEIASREARNFSFISLAVGIAAMVLCTILTVVIIIAAQHHENYWDP

SEQ ID NO: 10403 - protein, 2003 aa, Homo sapiens [sequence omitted]

SEQ ID NO: 10404 - protein, 160 aa, Homo sapiens; identical to SEQ ID NO: 10396

SEQ ID NO: 10405 - protein, 1080 aa, Homo sapiens [sequence omitted]

SEQ ID NO: 10406 - protein, 430 aa, Homo sapiens; identical to SEQ ID NO: 10388

SEQ ID NO: 10407 - protein, 306 aa, Homo sapiens; identical to SEQ ID NO: 10402

SEQ ID NO: 10408 - protein, 306 aa, Homo sapiens; identical to SEQ ID NO: 10402

SEQ ID NO: 10409 - protein, 430 aa, Homo sapiens; identical to SEQ ID NO: 10388

SEQ ID NO: 10410 - protein, 1557 aa, Homo sapiens [sequence omitted]

SEQ ID NO: 10411 - protein, 3451 aa, Homo sapiens [sequence omitted]

SEQ ID NO: 10412 - protein, 4040 aa, Homo sapiens [sequence omitted]

SEQ ID NO: 10413 - protein, 497 aa, Homo sapiens
MGCEDPTRPTASREPPAPSAQFWRAPVTSNSVKSGRPQPRSTGCPHHPGRTASKSPTSWRTEGSLRVCRWMARPGPRNSRWEPRKRHGWELRENEEVPDGPTQLRALNLTEGFAVLHWKPPQNPVDTYDVQVTAPGAPPLQAETPGSAVDYPLHDLVLHTNYTATVRGLRGPNLTSPASITFTTGLEAPRDLEAKEVTPRTALLTWTEPPVRPAGYLLSFHTPGGQNQEILLPGGITSHQLLGLFPSTSYNARLQAMWGQSLLPPVSTSFTTGGLRIPFPRDCGEEMQNGAGASRTSTIFLNGNRERPLNVFCDMETDGGGWLVFQRRMDGQTDFWRDWEDYAHGFGNISGEFWLGNEALHSLTQAGDYSMRVDLRAGDEAVFAQYDSFHVDSAAEYYRLHLEGYHGTAGDSMSYHSGSVFSARDRDPNSLLISCAVSYRGAWWYRNCHYANLNGLYGSTVDHQGVSWYHWKGFEFSVPFTEMKLRPRNFRSPAGGG

SEQ ID NO: 10414 - protein, 4289 aa, Homo sapiens [sequence omitted]

SEQ ID NO: 10415 - protein, 673 aa, Homo sapiens
MRLSWSVAQGPFDSFVVQYEDTNGQPQALLVDGDQSKILISGLEPSTPYRFLLYGLHEGKRLGPLSAEGTTGLAPAGQTSEESRPRLSQLSVTDVTTSSLRLNWEAPPGAFDSFLLRFGVPSPSTLEPHPRPLLQRELMVPGTRHSAVLRDLRSGTLYSLTLYGLRGPHKADSIQGTARTLSPVLESPRDLQFSEIRETSAKVNWMPPPSRADSFKVSYQLADGGEPQSVQVDGQARTQKLQGLIPGARYEVTVVSVRGFEESEPLTGFLTTVPDGPTQLRALNLTEGFAVLHWKPPQNPVDTYDVQVTAPGAPPLQAETPGSAVDYPLHDLVLHTNYTATVRGLRGPNLTSPASITFTTGLEAPRDLEAKEVTPRTALLTWTEPPVRPAGYLLSFHTPGGQNQEILLPGGITSHQLLGLFPSTSYNARLQAMWGQSLLPPVSTSFTTGGLRIPFPRDCGEEMQNGAGASRTSTIFLNGNRERPLNVFCDMETDGGGWLVFQRRMDGQTDFWRDWEDYAHGFGNISGEFWLGNEALHSLTQAGDYSMRVDLRAGDEAVFAQYDSFHVDSAAEYYRLHLEGYHGTAGDSMSYHSGSVFSARDRDPNSLLISCAVSYRGAWWYRNCHYANLNGLYGSTVDHQGVSWYHWKGFEFSVPFTEMKLRPRNFRSPAGGG

SEQ ID NO: 10416 - protein, 2437 aa, Homo sapiens [sequence omitted]

SEQ ID NO: 10417 - protein, 409 aa, Homo sapiens
MRLSWSVAQGPFDSFVVQYEDTNGQPQALLVDGDQSKILISGLEPSTPYRFLLYGLHEGKRLGPLSAEGTTGLAPAGQTSEESRPRLSQLSVTDVTTSSLRLNWEAPPGAFDSFLLRFGVPSPSTLEPHPRPLLQRELMVPGTRHSAVLRDLRSGTLYSLTLYGLRGPHKADSIQGTARTLSPVLESPRDLQFSEIRETSAKVNWMPPPSRADSFKVSYQLADGGEPQSVQVDGQARTQKLQGLIPGARYEVTVVSVRGFEESEPLTGFLTTVPDGPTQLRALNLTEGFAVLHWKPPQNPVDTYDVQVTAPGAPPLQAETPGSAVDYPLHDLVLHTNYTATVRGLRGPNLTSPASITFTTGLEAPRDLEAKEVTPRTALLTWTEPPVRPAGYLLSFHTPGGQNQVPRPH

SEQ ID NO: 10418 - protein, 152 aa, Homo sapiens
MANLERTFIAIKPDGVQRGLVGEIIKRFEQKGFRLVAMKFLRASEEHLKQHYIDLKDRPFFPGLVKYMNSGPVVAMVWEGLNVVKTGRVMLGETNPADSKPGTIRGDFCIQVGRNIIHGSDSVKSAEKEISLWFKPEELVDYKSCAHDWVYE

SEQ ID NO: 10419 - protein, 292 aa, Homo sapiens
MVLLSTLGIVFQGEGPPISSCDTGTMANCERTFIAIKPDGVQRGLVGEIIKRFEQKGFRLVGLKFMQASEDLLKEHYVDLKDRPFFAGLVKYMHSGPVVAMVWEGLNVVKTGRVMLGETNPADSKPGTIRGDFCIQVGRTMANLERTFIAIKPDGVQRGLVGEIIKRFEQKGFRLVAMKFLRASEEHLKQHYIDLKDRPFFPGLVKYMNSGPVVAMVWEGLNVVKTGRVMLGETNPADSKPGTIRGDFCIQVGRNIIHGSDSVKSAEKEISLWFKPEELVDYKSCAHDWVYE

SEQ ID NO: 10420 - protein, 127 aa, Homo sapiens
MTFMQHHLKQTSWRILLSEESVPFFFFFFLETESPSCTPAWATRTKLRLKKKKKKAFTHSFFPRLLNFKQDNKGAISGNSCVVQQKMLGVEKGSILATSMSTLSMGVSLNLLIPSPVHSLFKTFTKL

SEQ ID NO: 10421 - protein, 152 aa, Homo sapiens; identical to SEQ ID NO: 10418

SEQ ID NO: 10422 - protein, 82 aa, Homo sapiens
MANLERTFIAIKPDGVQRGLVGEIIKRFEQKGFRLVAMKFLRASEEHLKQHYIDLKDRPFFPGLVKYMNSGPVVAMEHHSWQ

SEQ ID NO: 10423 - protein, 152 aa, Homo sapiens
MANCERTFIAIKPDGVQRGLVGEIIKRFEQKGFRLVGLKFMQASEDLLKEHYVDLKDRPFFAGLVKYMHSGPVVAMVWEGLNVVKTGRVMLGETNPADSKPGTIRGDFCIQVGRNIIHGSDSVESAEKEIGLWFHPEELVDYTSCAQNWIYE

SEQ ID NO: 10424 - protein, 611 aa, Homo sapiens
MPRRKRNAGSSSDGTEDSDFSTDLEHTDSSESDGTSRRSARVTRSSARLSQSSQDSSPVRNLQSFGTEEPAYSTRRVTRSQQQPTPVTPKKYPLRQTRSSGSETEQVVDFSDRETKNTADHDESPPRTPTGNAPSSESDIDISSPNVSHDESIAKDMSLKDSGSDLSHRPKRRRFHESYNFNMKCPTPGCNSLGHLTGKHERHFSISGCPLYHNLSADECKVRAQSRDKQIEERMLSHRQDDNNRHATRHQAPTERQLRYKEKVAELRKKRNSGLSKEQKEKYMEHRQTYGNTREPLLENLTSEYDLDLFRRAQARASEDLEKLRLQGQITEGSNMIKTIAFGRYELDTWYHSPYPEEYARLGRLYMCEFCLKYMKSQTILRRHMAKCVWKHPPGDEIYRKGSISVFEVDGKKNKIYCQNLCLLAKLFLDHKTLYYDVEPFLFYVMTEADNTGCHLIGYFSKEKNSFLNYNVSCILTMPQYMRQGYGKMLIDFSYLLSKVEEKVGSPERPLSDLGLISYRSYWKEVLLRYLHNFQGKEISIKEISQETAVNPVDIVSTLQALQMLKYWKGKHLVLKRQDLIDEWIAKEAKRSNSNKTMDPSCLKWTPPKGT

SEQ ID NO: 10425 - protein, 773 aa, Homo sapiens
METDESPSPLPCGPAGEAVMESRARPFQALPREQSPPPPLQTSSGAEVMDVGSGGDGQSELPAEDPFNFYGASLLSKGSFSKGRLLIDPNCSGHSPRTARHAPAVRKFSPDLKLLKDVKISVSFTESCRSKDRKVLYTGAERDVRAECGLLLSPVSGDVHACPFGGSVGDGVGIGGESADKKDEENELDQEKRVEYAVLDELEDFTDNLELDEEGAGGFTAKAIVQRDRVDEEALNFPYEDDFDNDVDALLEEGLCAPKKRRTEEKYGGDSDHPSDGETSVQPMMTKIKTVLKSRGRPPTEPLPDGWIMTFHNSGVPVYLHRESRVVTWSRPYFLGTGSIRKHDPPLSSIPCLHYKKMKDNEEREQSSDLTPSGDVSPVKPLSRSAELEFPLDEPDSMGADPGPPDEKDPLGAEAAPGALGQVKAKVEVCKDESVDLEEFRSYLEKRFDFEQVTVKKFRTWAERRQFNREMKRKQAESERPILPANQKLITLSVQDAPTKKEFVINPNGKSEVCILHEYMQRVLKVRPVYNFFECENPSEPFGASVTIDGVTYGSGTASSKKLAKNKAARATLEILIPDFVKQTSEEKPKDSEELEYFNHISIEDSRVYELTSKAGLLSPYQILHECLKRNHGMGDTSIKFEVVPGKNQKSEYVMACGKHTVRGWCKNKRVGKQLASQKILQLLHPHVKNWGSLLRMYGRESSKMVKQETSDKSVIELQQYAKKNKPNLHILSKLQEEMKRLAEEREETRKKPKMSIVASAQPGGEPLCTVDV

SEQ ID NO: 10426 - protein, 773 aa, Homo sapiens; identical to SEQ ID NO: 10425

SEQ ID NO: 10427 - protein, 490 aa, Homo sapiens
MMTKIKTVLKSRGRPPTEPLPDGWIMTFHNSGVPVYLHRESRVVTWSRPYFLGTGSIRKHDPPLSSIPCLHYKKMKDNEEREQSSDLTPSGDVSPVKPLSRSAELEFPLDEPDSMGADPGPPDEKDPLGAEAAPGALGQVKAKVEVCKDESVDLEEFRSYLEKRFDFEQVTVKKFRTWAERRQFNREMKRKQAESERPILPANQKLITLSVQDAPTKKEFVINPNGKSEVCILHEYMQRVLKVRPVYNFFECENPSEPFGASVTIDGVTYGSGTASSKKLAKNKAARATLEILIPDFVKQTSEEKPKDSEELEYFNHISIEDSRVYELTSKAGLLSPYQILHECLKRNHGMGDTSIKFEVVPGKNQKSEYVMACGKHTVRGWCKNKRVGKQLASQKILQLLHPHVKNWGSLLRMYGRESSKMVKQETSDKSVIELQQYAKKNKPNLHILSKLQEEMKRLAEEREETRKKPKMSIVASAQPGGEPLCTVDV

SEQ ID NO: 10428 - protein, 204 aa, Homo sapiens
MSCPRRAVPLGQRAGALGTRDSCRRGHLPHLSNSCSHSPTPCASQKATEMGVRLMVDAEQTYFQPAISRLTLEMQRKFNVEKLLIFNTYQCYLKDAYDNVTLDMELAHREGWCFGAKPVRGAYLAQERACASEIGYEDPINPMYEATNTMYHRCLDYVLEELKHNAKAKVMVASHNEDTVRFALRRMEELRLHPTVLWTAARHV

SEQ ID NO: 10429 - protein, 239 aa, Homo sapiens
MGIASRAEIEDWFTAETLGVSGTVDLLDWSSLIDSRTKLSKHLVVPNGQTGQLEPLLSRFAEEEELQMTRMLQRMDVLPKKATEMGVRLMVDAEQTYFQPAISRLTLEMQRKFNVEKLLIFNTYQCYLKDAYDNVTLDMELAHREGWCFGAKPVRGAYLAQERACASEIGYEDPINPMYEATNTMYHRCLDYVLEELKHNAKAKVMVASHNEDTVRFALRRMEELRLHPTVLWTAARHV

SEQ ID NO: 10430 - protein, 85 aa, Homo sapiens
MSVPGPSSPDGALTRPPYCLEAGEPTPGLSDTSPDEGLIEDLTIEDKAVEQLAEGLLSHYLPDLQRSKQALQELTLDLKYDVEYP

SEQ ID NO: 10431 - protein, 86 aa, Homo sapiens
MSVPGPSSPDGALTRPPYCLEAGEPTPGLSDTSPDEGLIEDLTIEDKAVEQLAEGLLSHYLPDLQRSKQALQELTLLRLNTIMPSW

SEQ ID NO: 10432 - protein, 80 aa, Homo sapiens
MSVPGPSSPDGALTRPPYCLEAGEPTPGLSDTSPDEGLIEDLTIEDKAVEQLAEGLLSHYLPDLQRSKQALQELTTKLYC

SEQ ID NO: 10433 - protein, 233 aa, Homo sapiens
MVPLVAVVSGPRAQLFACLLRLGTQQVGPLQLHTGASHAARNHYEVLVLGGGSGGITMAARMKRKVGAENVAIVEPSERHFYQPIWTLVGAGAKQLSSSGRPTASVIPSGVEWIKARVTELNPDKNCIHTDDDEKISYRYLIIALGIQLDYEKIKGLPEGFAHPKIGSNYSVKTVEKTWKALQDFKEGNAIFTFPNTPVKCAGAPQKIMYLSEAYFRKVCFLSGDRDEQGGQC

SEQ ID NO: 10434 - protein, 450 aa, Homo sapiens
MVPLVAVVSGPRAQLFACLLRLGTQQVGPLQLHTGASHAARNHYEVLVLGGGSGGITMAARMKRKVGAENVAIVEPSERHFYQPIWTLVGAGAKQLSSSGRPTASVIPSGVEWIKARVTELNPDKNCIHTDDDEKISYRYLIIALGIQLDYEKIKGLPEGFAHPKIGSNYSVKTVEKTWKALQDFKEGNAIFTFPNTPVKCAGAPQKIMYLSEAYFRKTGKRSKANIIFNTSLGAIFGVKKYADALQEIIQERNLTVNYKKNLIEVRADKQEAVFENLDKPGETQVISYEMLHVTPPMSPPDVLKTSPVADAAGWVDVDKETLQHRRYPNVFGIGDCTNLPTSKTAAAVAAQSGILDRTISVIMKNQTPTKKYDGYTSCPLVTGYNRVILAEFDYKAEPLETFPFDQSKERLSMYLMKADLMPFLYWNMMLRGYWGGPAFLRKLFHLGMS

SEQ ID NO: 10435 - protein, 432 aa, Homo sapiens
MVPLVAVVSGPRAQLFACLLRLGTQQVGPLQLHTGASHAARNHYEVLVLGGGSGGITMAARMKRKVGAENVAIVEPSERHFYQPIWTLVGAGAKQLSSSGRPTASVIPSGVEWIKARVTELNPDKNCIHTDDDEKISYRYLIIALGIQLDYEKIKGLPEGFAHPKIGSNYSVKTVEKTWKALQDFKEGNAIFTFPNTPVKCAGAPQKIMYLSEAYFRKTGKRSKANIIFNTSLGAIFGVKKYADALQEIIQERNLTVNYKKNLIEVRADKQEAVFENLDKPGETQVISYEMLHVTPPMSPPDVLKTSPVADAAGWVDVDKETLQHRRYPNVFGIGDCTNLPTSKTAAAVAAQSGILDRTISVIMKNQTPTKKYDGYTSCPLVTGYNRVILAEFDYKAEPLETFPFDQSKERLSMYLMKADLMPFLYWNMMLR

SEQ ID NO: 10436 - protein, 450 aa, Homo sapiens; identical to SEQ ID NO: 10434

SEQ ID NO: 10437 - protein, 494 aa, Homo sapiens
MVPLVAVVSGPRAQLFACLLRLGTQQVGPLQLHTGASHAARNHYEVLVLGGGSGGITMAARMKRKVGAENVAIVEPSERHFYQPIWTLVGAGAKQLSSSGRPTASVIPSGVEWIKARVTELNPDKNCIHTDDDEKISYRYLIIALGIQLDYEKVFLKGAWLPLYGNFSINDSFLKLEKTNEGDKTSTACFCLFISWIIKGLPEGFAHPKIGSNYSVKTVEKTWKALQDFKEGNAIFTFPNTPVKCAGAPQKIMYLSEAYFRKTGKRSKANIIFNTSLGAIFGVKKYADALQEIIQERNLTVNYKKNLIEVRADKQEAVFENLDKPGETQVISYEMLHVTPPMSPPDVLKTSPVADAAGWVDVDKETLQHRRYPNVFGIGDCTNLPTSKTAAAVAAQSGILDRTISVIMKNQTPTKKYDGYTSCPLVTGYNRVILAEFDYKAEPLETFPFDQSKERLSMYLMKADLMPFLYWNMMLRGYWGGPAFLRKLFHLGMS

SEQ ID NO: 10438 - protein, 450 aa, Homo sapiens; identical to SEQ ID NO: 10434

SEQ ID NO: 10439 - protein, 450 aa, Homo sapiens; identical to SEQ ID NO: 10434

SEQ ID NO: 10440 - protein, 131 aa, Homo sapiens
MSVPGPSSPDGALTRPPYCLEAGEPTPAFFKIFRQNQVVLLDTLEQEISKFKECHSMLDINALFAEAKHYHAKLVNIRKEMLMLHEKTSKLKKRALKLQQKRQKEELEREQQREKEFEREKQLTARPAKRM

SEQ ID NO: 10441 - protein, 172 aa, Homo sapiens
MSVPGPSSPDGALTRPPYCLEAGEPTPGLSDTSPDEGLIEDLTIEDKAVEQLAEGLLSHYLPDLQRSKQALQELTQNQVVLLDTLEQEISKFKECHSMLDINALFAEAKHYHAKLVNIRKEMLMLHEKTSKLKKRALKLQQKRQKEELEREQQREKEFEREKQLTARPAKRM

SEQ ID NO: 10442 - protein, 450 aa, Homo sapiens; identical to SEQ ID NO: 10434

SEQ ID NO: 10443 - protein, 183 aa, Homo sapiens
MPLTGYEVWLGTLFQNPQHGEPSLQRVPVAKMVCGPSGSQLVLLKLERSVTLNQRVALICLPPEWYVVPPGTKCEIAGWGETKGTGNDTVLNVALLNVISNQECNIKHRGRVRESEMCTEGLLAPVGACEGDYGGPLACFTHNCWVLEGIIIPNRVCARSRWPAVFTRVSVFVDWIHKVMRLG

SEQ ID NO: 10444 - protein, 331 aa, Homo sapiens
MLRGTELQHLLHAVVPGPWQEDVADAEECAGRCGPLMDCRAFHYNVSSHGCQLLPWTQHSPHTRLRRSGRCDLFQKKGKWGYTPTLRNGLEENFCRNPDGDPGGPWCYTTDPAVRFQSCGIKSCREAACVWCNGEEYRGAVDRTESGRECQRWDLQHPHQHPFEPGKFLDQGLDDNYCRNPDGSERPWCYTTDPQIEREFCDLPRCGSEAQPRQEATTVSCFRGKGEGYRGTANTTTAGVPCQRWDAQIPHQHRFTPEKYACKDLRENFCRNPDGSEAPWCFTLRPGMRAAFCYQIRRCTDDVRPQGEAQAWGLQSRAGSLEPEGRGEVSA

SEQ ID NO: 10445 - protein, 725 aa, Homo sapiens
MGLWWVTVQPPARRMGWLPLLLLLTQCLGVPGQRSPLNDFQVLRGTELQHLLHAVVPGPWQEDVADAEECAGRCGPLMDCRAFHYNVSSHGCQLLPWTQHSPHTRLRRSGRCDLFQKKDYVRTCIMNNGVGYRGTMATTVGGLPCQAWSHKFPNDHKYTPTLRNGLEENFCRNPDGDPGGPWCYTTDPAVRFQSCGIKSCREAACVWCNGEEYRGAVDRTESGRECQRWDLQHPHQHPFEPGKFLDQGLDDNYCRNPDGSERPWCYTTDPQIEREFCDLPRCGSEAQPRQEATTVSCFRGKGEGYRGTANTTTAGVPCQRWDAQIPHQHRFTPEKYACKDLRENFCRNPDGSEAPWCFTLRPGMRAAFCYQIRRCTDDVRPQDCYHGAGEQYRGTVSKTRKGVQCQRWSAETPHKPQFTFTSEPHAQLEENFCRNPDGDSHGPWCYTMDPRTPFDYCALRRCADDQPPSILDPPDQVQFEKCGKRVDRLDQRRSKLRVVGGHPGNSPWTVSLRNRQGQHFCGGSLVKEQWILTARQCFSSCHMPLTGYEVWLGTLFQNPQHGEPSLQRVPVAKMVCGPSGSQLVLLKLERSVTLNQRVALICLPPEWYVVPPGTKCEIAGWGETKGTGNDTVLNVALLNVISNQECNIKHRGRVRESEMCTEGLLAPVGACEGDYGGPLACFTHNCWVLEGIIIPNRVCARSRWPAVFTRVSVFVDWIHKVMRLG

SEQ ID NO: 10446 - protein, 637 aa, Homo sapiens
MLRGTELQHLLHAVVPGPWQEDVADAEECAGRCGPLMDCRAFHYNVSSHGCQLLPWTQHSPHTRLRRSGRCDLFQKKGKWGYTPTLRNGLEENFCRNPDGDPGGPWCYTTDPAVRFQSCGIKSCREAACVWCNGEEYRGAVDRTESGRECQRWDLQHPHQHPFEPGKFLDQGLDDNYCRNPDGSERPWCYTTDPQIEREFCDLPRCGSEAQPRQEATTVSCFRGKGEGYRGTANTTTAGVPCQRWDAQIPHQHRFTPEKYACKDLRENFCRNPDGSEAPWCFTLRPGMRAAFCYQIRRCTDDVRPQDCYHGAGEQYRGTVSKTRKGVQCQRWSAETPHKPQFTFTSEPHAQLEENFCRNPDGDSHGPWCYTMDPRTPFDYCALRRCDQVQFEKCGKRVDRLDQRRSKLRVVGGHPGNSPWTVSLRNRQGQHFCGGSLVKEQWILTARQCFSSCHMPLTGYEVWLGTLFQNPQHGEPSLQRVPVAKMVCGPSGSQLVLLKLERSVTLNQRVALICLPPEWYVVPPGTKCEIAGWGETKGTGNDTVLNVALLNVISNQECNIKHRGRVRESEMCTEGLLAPVGACEGDYGGPLACFTHNCWVLEGIIIPNRVCARSRWPAVFTRVSVFVDWIHKVMRLG

SEQ ID NO: 10447 - protein, 302 aa, Homo sapiens [sequence omitted]

SEQ ID NO: 10448 - protein, 281 aa, Homo sapiens [sequence omitted]

SEQ ID NO: 10449 - protein, 338 aa, Homo sapiens
MVAFAGWSLPVQYRDSHTDSHLHTRQHCSLFDVSHMLQTKILGSDRVKLMESLVVGDIAELRPNQGTLSLFTNEAGGILDDLIVTNTSEGHLYVVSNAGCWEKDLALMQDKVRELQNQGRDVGLEVLDNALLALQGPTAAQVLQAGVADDLRKLPFMTSAVMEVFGVSGCRVTRCGYTGEDGVEISVPVAGAVHLATAILKNPEVKLAGLAARDSLRLEAGLCLYGNDIDEHTTPVEGSLSWTLGKRRRAAMDFPGAKVIVPQLKGRVQRRRVGLMCEGAPMRAHSPILNMEGTKIGTVTSGCPSPSLKKNVAMGYVPCEYSRPGTMLLVELPSGPCF

SEQ ID NO: 10450 - protein, 213 aa, Homo sapiens
MSRVLVPCHVKGSVALQVGDVRTSQGRPGVLVIDVTFPSVAPFELQEITFKNYYTAFLSIRVRQYTSAHTPAKWVTCLRDYCLMPDPHSEEGAQEYVSLFKHQMLCDMARISELRLILRQPSPLWLSFTVEELQIYQQGPKSPSVTFPKWLSHPVPCEQPALLREGLPDPSRVSSEVQQMWALTEMIRASHTSARIGRFDVDGCYDLNLLSYT

SEQ ID NO: 10451 - protein, 403 aa, Homo sapiens
MQRAVSVVARLGFRLQAFPPALCRPLSCAQEVLRRTPLYDFHLAHGGKMVAFAGWSLPVQYRDSHTDSHLHTRQHCSLFDVSHMLQTKILGSDRVKLMESLVVGDIAELRPNQGTLSLFTNEAGGILDDLIVTNTSEGHLYVVSNAGCWEKDLALMQDKVRELQNQGRDVGLEVLDNALLALQGPTAAQVLQAGVADDLRKLPFMTSAVMEVFGVSGCRVTRCGYTGEDGVEISVPVAGAVHLATAILKNPEVKLAGLAARDSLRLEAGLCLYGNDIDEHTTPVEGSLSWTLGKRRRAAMDFPGAKVIVPQLKGRVQRRRVGLMCEGAPMRAHSPILNMEGTKIGTVTSGCPSPSLKKNVAMGYVPCEYSRPGTMLLVEVRRKQQMAVVSKMPFVPTNYYTLK

SEQ ID NO: 10452 - protein, 213 aa, Homo sapiens; identical to SEQ ID NO: 10450

SEQ ID NO: 10453 - protein, 403 aa, Homo sapiens; identical to SEQ ID NO: 10451

SEQ ID NO: 10454 - protein, 403 aa, Homo sapiens; identical to SEQ ID NO: 10451

SEQ ID NO: 10455 - protein, 776 aa, Homo sapiens
MNNSLENTISFEEYIRVKARSVPQHRMKEFLDSLASKGPEALQEFQQTATTTMVYQQGGNCIYTDSTEVAGSLLELACPVTTSVQPQTQQEQQIQVQQPQQVQVQVQVQQSPQQVSAQLSPQLTVHQPTEQPIQVQVQIQGQAPQSAAPSIQTPSLQSPSPSQLQAAQIQVQHVQAAQQIQAAEIPEEHIPHQQIQAQLVAGQSLAGGQQIQIQTVGALSPPPSQQGSPREGERRVGTASVLQPVKKRKVDMPITVSYAISGQPVATVLAIPQGQQQSYVSLRPDLLTVDSAHLYSATGTITSPTGETWTIPVYSAQPRGDPQQQSITHIAIPQEAYNAVHVSGSPTALAAVKLEDDKEKMVGTTSVVKNSHEEVVQTLANSLFPAQFMNGNIHIPVAVQAVAGTYQNTAQTVHIWDPQQQPQQQTPQEQTPPPQQQQQQLQVTCSAQTVQVAEVEPQSQPQPSPELLLPNSLKPEEGLEVWKNWAQTKNAELEKDAQNRLAPIGRRQLLRFQEDLISSAVAELNYGLCLMTREARNGEGEPYDPDVLYYIFLCIQKYLFENGRVDDIFSDLYYVRFTEWLHEVLKDVQPRVTPLGYVLPSHVTEEMLWECKQLGAHSPSTLLTTLMFFNTKYFLLKTVDQHMKLAFSKVLRQTKKNPSNPKDKSTSIRYLKALGIHQTGQKVTDDMYAEQTENPENPLRCPIKLYDFYLFKCPQSVKGRNDTFYLTPEPVVAPNSPIWYSVQPISREQMGQMLTRILVIREIQEAIAVANASTMH

SEQ ID NO: 10456 - protein, 632 aa, Homo sapiens
MNNSLENTISFEEYIRVKARSVPQHRMKEFLDSLASKGPEALQEFQQTATTTMVYQQGGNCIYTDSTEVAGSLLELACPVTTSVQPQTQQEQQIQVQQPQQVQVQVQVQQSPQQVSAQLSPQLTVHQPTEQPIQVQVQIQGQAPQSAAPSIQTPSLQSPSPSQLQAAQIQVQHVQAAQQIQAAEIPEEHIPHQQIQAQLVAGQSLAGGQQIQIQTVGALSPPPSQQGSPREGERRVGTASVLQPVKKRKVDMPITVSYAISGQPVATVLAIPQGQQQSYVSLRPDLLTVDSAHLYSATGTITSPTGETWTIPVYSAQPRGDPQQQSITHIAIPQEAYNAVHVSGSPTALAAVKLEDDKEKMVGTTSVVKNSHEEVVQTLANSLFPAQFMNGNIHIPVAVQAVAGTYQNTAQTVHIWDPQQQPQQQTPQEQTPPPQQQQQQLQVTCSAQTVQVAEVEPQSQPQPSPELLLPNSLKPEEGLEVWKNWAQTKNAELEKDAQNRLAPIGRRQLLRFQEDLISSAVAELNYGLCLMTREARNGEGEPYDPDVLYYIFLCIQKYLFENGRVDDIFSDLYYVRFTEWLHEVLKDVQPRVTPLGYVLPSHVTEEMLWECKQLGAHSPSTLLTTLMFFNTK

SEQ ID NO: 10457 - protein, 776 aa, Homo sapiens; identical to SEQ ID NO: 10455

SEQ ID NO: 10458 - protein, 584 aa, Homo sapiens
MCYTHALFLQRQLRPRRSEAGRFRPRALRPDVSVARSAVTKSAGLYWRGPDGRGLCGAVLGDTRRCPVLAMADYLISGGTSYVPDDGLTAQQLFNCGDGLTYNDFLILPGYIDFTADQVDLTSALTKKITLKTPLVSSPMDTVTEAGMAIAMALTGGIGFIHHNCTPEFQANEVRKVKKYEQGFITDPVVLSPKDRVRDVFEAKARHGFCGIPITDTGRMGSRLVGIISSRDIDFLKEEEHDCFLEEIMTKREDLVVAPAGITLKEANEILQRSKKGKLPIVNEDDELVAIIARTDLKKNRDYPLASKDAKKQLLCGAAIGTHEDDKYRLDLLAQAGVDVVVLDSSQGNSIFQINMIKYIKDKYPNLQVIGGNVVTAAQAKNLIDAGVDALRVGMGSGSICITQEVLACGRPQATAVYKVSEYARRFGVPVIADGGIQNVGHIAKALALGASTVMMGSLLAATTEAPGEYFFSDGIRLKKYRGMGSLDAMDKHLSSQNRYFSEADKIKVAQGVSGAVQDKGSIHKFVPYLIAGIQHSCQDIGAKSLTQVRAMMYSGELKFEKRTSSAQVEGGVHSLHSYEKRLF

SEQ ID NO: 10459 - protein, 776 aa, Homo sapiens; identical to SEQ ID NO: 10455

SEQ ID NO: 10460 - protein, 776 aa, Homo sapiens; identical to SEQ ID NO: 10455

SEQ ID NO: 10461 - protein, 584 aa, Homo sapiens; identical to SEQ ID NO: 10458

SEQ ID NO: 10462 - protein, 525 aa, Homo sapiens [sequence omitted]

SEQ ID NO: 10463 - protein, 185 aa, Homo sapiens
MSLTKWSLRAMPAPASKVEEWVRSTTDTLAVGTRKAMPVSFPFSSGMTLPTALAAPVEAGMMFWLLSYFSWFTPMTNMGASAEGAEMMTLLAPPCLPKAHFFHSVFHSLLEDGDGISIDDKLPVLSLDGAMEFAMGGIILEHLWGSPCSTHHVVEVNEGVIDGNNIHFTRVKSSPGDQAPNTTKS

SEQ ID NO: 10464 - protein, 510 aa, Homo sapiens
MKLGTVERQGAMGIWKELFCELSPLEFRLYLSNEEHTCVENCSLLRCESVGPAHSDGRFELVFSGKKLALRASSQDEAEDWLDLVREALQKVRPQQEDEWVNVQYSDQPEEPPEAPQGCLSPSDLLSEPAALQGTQSDWSSAQVPELDAIKESLLYLYMDRTWMPYIFSLPLEALKCFRIRNNEKMLSDSHGVETIRDILPDTSLGGPSFFKIITAKAVLKLQAGNAEEAALWRDLVRKVLASYLETAEEAVTLGGSLDENCQEVLKFATRENGFLLQYLVAIPMEKGLDSQGCFCAGCSRQIGFSFVRPKLCAFSGLYYCDICHQDDASVIPARIIHNWDLTKRPICRQALKFLTQIRAQPLINLQMVNASLYEHVERMHLIGRSREQLKLLGDYLGLCRSGALKELSKRLNHRNYLLESPHRFRVADLRQIADEVYEGFLKALIEFASQHVYHCDLCTQRSFICQICQHHDIIFPSEFDTTVRCAKCKTVFHQSCQAVVKKGCPRCAR

SEQ ID NO: 10465 - protein, 103 aa, Homo sapiens
MKCGSCFRYESLDHMAWVTIWANSIAARAELSHPLLERTSTQAWTSRTALLRISSVSDCNSALSCMRDRKRKIKTLCQKLPLKATLSKFRMGLLGPLTFRSCS

SEQ ID NO: 10466 - protein, 125 aa, Homo sapiens
MGRGTVEQIVYLVHCGIIEPLMNLLPAKDTKIILVILDAISNIFQAAEKLGETEKLSIMIEECGGVDKIEALQNHENESVYKASLSLTEKYFSVEEEEDQNVVPETTSEGYTFQVQDGAPGTFNF

SEQ ID NO: 10467 - protein, 271 aa, Homo sapiens
MGIFDQDVSDQNSVDCPQLYKPGQLNLLFNKRKFFICVLHGIYTSLVLFFIPYGAFYNVAGEDGQHIADYQSFAVTMATSLVIVVSVQIALDTSYWTFINHVFIWGSIAIYFSILFTMHSNGIFGIFPNQFPFVGNARHSLTQKCIWLVILLTTVASVMPVVAFRFLKVDLYPTLSDQIRRWQKAQKKARPPSSRRPRTRRSSSRRSGYAFAHQEGYGELITSGKNMRAKNPPPTSGLEKTHYNSTSWIENLCKKTTDTVSSFSQDKTVKL

SEQ ID NO: 10468 - protein, 271 aa, Homo sapiens; identical to SEQ ID NO: 10467

SEQ ID NO: 10469 - protein, 310 aa, Homo sapiens
MFCSEKKLREVERIVKANDREYNEKFQYADNRIHTSKYNILTFLPINLFEQFQRVANAYFLCLLILQLIPEISSLTWFTTIVPLVLVITMTAVKDATDDYFRHKSDNQVNNRQSEVLINSKLQNEKWMNVKVGDIIKLENNQFVAADLLLLSSSEPHGLCYVETAELDGETNLKVRHALSVTSELGADISRLAGFDGIVVCEVPNNKLDKFMGILSWKDSKHSLNNEKIILRGCILRNTSWCFGMVIFAGPDTKLMQNSGKTKFKRTSIDRLMNTLVLWEIQSGRVKLGTNSELSSFGMKERRALCSPDS

SEQ ID NO: 10470 - protein, 1065 aa, Homo sapiens
MNVKVGDIIKLENNQFVAADLLLLSSSEPHGLCYVETAELDGETNLKVRHALSVTSELGADISRLAGFDGIVVCEVPNNKLDKFMGILSWKDSKHSLNNEKIILRGCILRNTSWCFGMVIFAGPDTKLMQNSGKTKFKRTSIDRLMNTLVLWIFGFLICLGIILAIGNSIWESQTGDQFRTFLFWNEGEKSSVFSGFLTFWSYIIILNTVVPISLYVSVEVIRLGHSYFINWDRKMYYSRKAIPAVARTTTLNEELGQIEYIFSDKTGTLTQNIMTFKRCSINGRIYGEVHDDLDQKTEITQEKEPVDFSVKSQADREFQFFDHHLMESIKMGDPKVHEFLRLLALCHTVMSEENSAGELIYQVQSPDEGALVTAARNFGFIFKSRTPETITIEELGTLVTYQLLAFLDFNNTRKRMSVIVRNPEGQIKLYSKGADTILFEKLHPSNEVLLSLTSDHLSEFAGEGLRTLAIAYRDLDDKYFKEWHKMLEDANAATEERDERIAGLYEEIERDLMLLGATAVEDKLQEGVIETVTSLSLANIKIWVLTGDKQETAINIGYACNMLTDDMNDVFVIAGNNAVEVREELRKAKQNLFGQNRNFSNGHVVCEKKQQLELDSIVEETITGDYALIINGHSLAHALESDVKNDLLELACMCKTVICCRVTPLQKAQVVELVKKYRNAVTLAIGDGANDVSMIKSAHIGVGISGQEGLQAVLASDYSFAQFRYLQRLLLVHGRWSYFRMCKFLCYFFYKNFAFTLVHFWFGFFCGFSAQTVYDQWFITLFNIVYTSLPVLAMGIFDQDVSDQNSVDCPQLYKPGQLNLLFNKRKFFICVLHGIYTSLVLFFIPYGAFYNVAGEDGQHIADYQSFAVTMATSLVIVVSVQIALDTSYWTFINHVFIWGSIAIYFSILFTMHSNGIFGIFPNQFPFVGNARHSLTQKCIWLVILLTTVASVMPVVAFRFLKVDLYPTLSDQIRRWQKAQKKARPPSSRRPRTRRSSSRRSGYAFAHQEGYGELITSGKNMRAKNPPPTSGLEKTHYNSTSWIENLCKKTTDTVSSFSQDKTVKL

SEQ ID NO: 10471 - protein, 412 aa, Homo sapiens
MCKTVICCRVTPLQKAQVVELVKKYRNAVTLAIGDGANDVSMIKSAHIGVGISGQEGLQAVLASDYSFAQFRYLQRLLLVHGRWSYFRMCKFLCYFFYKNFAFTLVHFWFGFFCGFSAQTVYDQWFITLFNIVYTSLPVLAMGIFDQDVSDQNSVDCPQLYKPGQLNLLFNKRKFFICVLHGIYTSLVLFFIPYGAFYNVAGEDGQHIADYQSFAVTMATSLVIVVSVQIALDTSYWTFINHVFIWGSIAIYFSILFTMHSNGIFGIFPNQFPFVGNARHSLTQKCIWLVILLTTVASVMPVVAFRFLKVDLYPTLSDQIRRWQKAQKKARPPSSRRPRTRRSSSRRSGYAFAHQEGYGELITSGKNMRAKNPPPTSGLEKTHYNSTSWIENLCKKTTDTVSSFSQDKTVKL

SEQ ID NO: 10472 - protein, 431 aa, Homo sapiens [sequence omitted]

SEQ ID NO: 10473 - protein, 380 aa, Homo sapiens
MAGQRTCQRRSSRAGPGKMQEPPKSIEEFLKFQNWDYWPREIHFRDDDKWSCTLKKIKEDSSFVSIYTHLWENVPRIFEALLIMESKLKEYSLILQNHTSEIFKWKSMISETSSYRKLERYGEFLKKYHKKKKIMLSDEMETEKNIEGCSFTGFKANELTQLPRHLDAEQIYLFILKAHNFDERVFKIWKTHFLSEASIALLHDSFWWWFLHKFRPDRENQDCLFDRISESYVTLFMSIPLSRKDAFFQIYPDCLAQAIYATFHEAFPESSYLFNDEFKEDLGNNIFLWCSGLKPQKGFWIHWKLKELSTTTIHGSKKAPAKSVKERIADSQEHISTSIDFNIIKILNNPRAYTLPISKEESRLSRLATKTPSKGYQETS

SEQ ID NO: 10474 - protein, 1010 aa, Homo sapiens
MGAYARASGVCARGCLDSAGPWTMSRALRPPLPPLCFFLLLLAAAGARAGGYETCPTVQPNMLNVHLLPHTHDDVGWLKTVDQYFYGIKNDIQHAGVQYILDSVISALLADPTRRFIYVEIAFFSRWWHQQTNATQEVVRDLVRQGRLEFANGGWVMNDEAATHYGAIVDQMTLGLRFLEDTFGNDGRPRVAWHIDPFGHSREQASLFAQMGFDGFFFGRLDYQDKWVRMQKLEMEQVWRASTSLKPPTADLFTGVLPNGYNPPRNLCWDVLCVDQPLVEDPRSPEYNAKELVDYFLNVATAQGRYYRTNHTVMTMGSDFQYENANMWFKNLDKLIRLVNAQAKGSSVHVLYSTPACYLWELNKANLTWSVKHDDFFPYADGPHQFWTGYFSSRPALKRYERLSYNFLQVCNQLEALVGLAANVGPYGSGDSAPLNEAMAVLQHHDAVSGTSRQHVANDYARQLAAGWGPCEVLLSNALARLRGFKDHFTFCQQLNISICPLSQTAARFQVIVYNPLGRKVNWMVRLPVSEGVFVVKDPNGRTVPSDVVIFPSSDSQAHPPELLFSASLPALGFSTYSVAQVPRWKPQARAPQPIPRRSWSPALTIENEHIRATFDPDTGLLMEIMNMNQQLLLPVRQTFFWYNASIGDNESDQASGAYIFRPNQQKPLPVSRWAQIHLVKTPLVQEVHQNFSAWCSQVVRLYPGQRHLELEWSVGPIPVGDTWGKEVISRFDTPLETKGRFYTDSNGREILERRRDYRPTWKLNQTEPVAGNYYPVNTRIYITDGNMQLTVLTDRSQGGSSLRDGSLELMVHRRLLKDDGRGVSEPLMENGSGAWVRGRHLVLLDTAQAAAAGHRLLAEQEVLAPQVVLAPGGGAAYNLGAPPRTQFSGLRRDLPPSVHLLTLASWGPEMVLLRLEHQFAVGEDSGRNLSAPVTLNLRDLFSTFTITRLQETTLVANQLREAASRLKWTTNTGPTPHQTPYQLDPANITLEPMEIRTFLASVQWKEVDG

SEQ ID NO: 10475 - protein, 346 aa, Homo sapiens [sequence omitted]

SEQ ID NO: 10476 - protein, 1011 aa, Homo sapiens
MGAYARASGVCARGCLDSAGPWTMSRALRPPLPPLCFFLLLLAAAGARAGGYETCPTVQPNMLNVHLLPHTHDDVGWLKTVDQYFYGIKNDIQHAGVQYILDSVISALLADPTRRFIYVEIAFFSRWWHQQTNATQEVVRDLVRQGRLEFANGGWVMNDEAATHYGAIVDQMTLGLRFLEDTFGNDGRPRVAWHIDPFGHSREQASLFAQMGFDGFFFGRLDYQDKWVRMQKLEMEQVWRASTSLKPPTADLFTGVLPNGYNPPRNLCWDVLCVDQPLVEDPRSPEYNAKELVDYFLNVATAQGRYYRTNHTVMTMGSDFQYENANMWFKNLDKLIRLVNAQQAKGSSVHVLYSTPACYLWELNKANLTWSVKHDDFFPYADGPHQFWTGYFSSRPALKRYERLSYNFLQVCNQLEALVGLAANVGPYGSGDSAPLNEAMAVLQHHDAVSGTSRQHVANDYARQLAAGWGPCEVLLSNALARLRGFKDHFTFCQQLNISICPLSQTAARFQVIVYNPLGRKVNWMVRLPVSEGVFVVKDPNGRTVPSDVVIFPSSDSQAHPPELLFSASLPALGFSTYSVAQVPRWKPQARAPQPIPRRSWSPALTIENEHIRATFDPDTGLLMEIMNMNQQLLLPVRQTFFWYNASIGDNESDQASGAYIFRPNQQKPLPVSRWAQIHLVKTPLVQEVHQNFSAWCSQVVRLYPGQRHLELEWSVGPIPVGDTWGKEVISRFDTPLETKGRFYTDSNGREILERRRDYRPTWKLNQTEPVAGNYYPVNTRIYITDGNMQLTVLTDRSQGGSSLRDGSLELMVHRRLLKDDGRGVSEPLMENGSGAWVRGRHLVLLDTAQAAAAGHRLLAEQEVLAPQVVLAPGGGAAYNLGAPPRTQFSGLRRDLPPSVHLLTLASWGPEMVLLRLEHQFAVGEDSGRNLSAPVTLNLRDLFSTFTITRLQETTLVANQLREAASRLKWTTNTGPTPHQTPYQLDPANITLEPMEIRTFLASVQWKEVDG

SEQ ID NO: 10477 - protein, 119 aa, Homo sapiens
MQLSAELQSDTEEILSKAVRLVQACVDVLSSNGWLSSALAAMELAQMVTQAMWSKDSYLKQLPHFISEHIKRCTDKGVKSVFDIMEMEDEERNTILQLTDSQITDVARFCNCYPNIELS

SEQ ID NO: 10478 - protein, 62 aa, Homo sapiens
MSPSAGVAKIPSCRHMTASFTNLVTRRNWMSSSDETSDLGGSFRLAKILSMSEFKSFLFTPS

SEQ ID NO: 10479 - protein, 222 aa, Homo sapiens
MAEKPKLHYFNARGRMESTRWLLAAAGVEFEEKFIKSAEDLDKLRNDGYLMFQQVPMVEIDGMKLVQTRAILNYIASKYNLYGKDIKERALIDMYIEGIADLGEMILLLPVCPPEEKDAKLALIKEKIKNRYFPAFEKVLKSHGQDYLVGNKLSRADIHLVELLYYVEELDSSLISSFPLLKALKTRISNLPTVKKFLQPGSPRKPPMDEKSLEEARKIFRF

SEQ ID NO: 10480 - protein, 322 aa, Homo sapiens
MVAGESGLGKSTLVHSLFLTDLYKDRKLLSAEERISQTVEILKHTVDIEEKGVKLKLTIVDTPGFGDAVNNTECWKPITDYVDQQFEQYFRDESGLNRKNIQDNRVHCCLYFISPFGHGLRPVDVGFMKALHEKVNIVPLIAKADCLVPSEIRKLKERIREEIDKFGIHVYQFPECDSDEDEDFKQQDRELKESAPFAVIGSNTVVEAKGQRVRGRLYPWGIVEVENQAHCDFVKLRNMLIRTHMHDLKDVTCDVHYENYRAHCIQQMTSKLTQDSRMESPIPILPLPTPDAETEKLIRMKDEELRRMQEMLQRMKQQMQDQ

SEQ ID NO: 10481 - protein, 346 aa, Homo sapiens
MDSLAAPQDRLVEQLLSPRTQAQRRLKDIDKQYVGFATLPNQVHRKSVKKGFDFTLMVAGESGLGKSTLVHSLFLTDLYKDRKLLSAEERISQTVEILKHTVDIEEKGVKLKLTIVDTPGFGDAVNNTECWKPITDYVDQQFEQYFRDESGLNRKNIQDNRVHCCLYFISPFGHGLRPVDVGFMKALHEKVNIVPLIAKADCLVPSEIRKLKERIREEIDKFGIHVYQFPECDSDEDEDFKQQDRELKESAPFAVIGSNTVVEAKGQRVRGRLYPWGIVEGALRLREAAQHAHPHAYARPQGRDVRRALRELPRALHPADDQQTDPGQPHGEPHPDPAAAHPGRRD

SEQ ID NO: 10482 - protein, 378 aa, Homo sapiens
MDSLAAPQDRLVEQLLSPRTQAQRRLKDIDKQYVGFATLPNQVHRKSVKKGFDFTLMVAGESGLGKSTLVHSLFLTDLYKDRKLLSAEERISQTVEILKHTVDIEEKGVKLKLTIVDTPGFGDAVNNTECWKPITDYVDQQFEQYFRDESGLNRKNIQDNRVHCCLYFISPFGHGLRPVDVGFMKALHEKVNIVPLIAKADCLVPSEIRKLKERIREEIDKFGIHVYQFPECDSDEDEDFKQQDRELKESAPFAVIGSNTVVEAKGQRVRGRLYPWGIVEVENQAHCDFVKLRNMLIRTHMHDLKDVTCDVHYENYRAHCIQQMTSKLTQDSRMESPIPILPLPTPDAETEKLIRMKDEELRRMQEMLQRMKQQMQDQ

SEQ ID NO: 10483 - protein, 322 aa, Homo sapiens; identical to SEQ ID NO: 10480

SEQ ID NO: 10484 - protein, 369 aa, Homo sapiens
MSTGLRYKSKLATPEDKQDIDKQYVGFATLPNQVHRKSVKKGFDFTLMVAGESGLGKSTLVHSLFLTDLYKDRKLLSAEERISQTVEILKHTVDIEEKGVKLKLTIVDTPGFGDAVNNTECWKPITDYVDQQFEQYFRDESGLNRKNIQDNRVHCCLYFISPFGHGLRPVDVGFMKALHEKVNIVPLIAKADCLVPSEIRKLKERIREEIDKFGIHVYQFPECDSDEDEDFKQQDRELKESAPFAVIGSNTVVEAKGQRVRGRLYPWGIVEVENQAHCDFVKLRNMLIRTHMHDLKDVTCDVHYENYRAHCIQQMTSKLTQDSRMESPIPILPLPTPDAETEKLIRMKDEELRRMQEMLQRMKQQMQDQ

SEQ ID NO: 10485 - protein, 369 aa, Homo sapiens
MSTGLRYKSKLATPGEPSDIDKQYVGFATLPNQVHRKSVKKGFDFTLMVAGESGLGKSTLVHSLFLTDLYKDRKLLSAEERISQTVEILKHTVDIEEKGVKLKLTIVDTPGFGDAVNNTECWKPITDYVDQQFEQYFRDESGLNRKNIQDNRVHCCLYFISPFGHGLRPVDVGFMKALHEKVNIVPLIAKADCLVPSEIRKLKERIREEIDKFGIHVYQFPECDSDEDEDFKQQDRELKESAPFAVIGSNTVVEAKGQRVRGRLYPWGIVEVENQAHCDFVKLRNMLIRTHMHDLKDVTCDVHYENYRAHCIQQMTSKLTQDSRMESPIPILPLPTPDAETEKLIRMKDEELRRMQEMLQRMKQQMQDQ

SEQ ID NO: 10486 - protein, 299 aa, Homo sapiens [sequence omitted]

SEQ ID NO: 10487 - protein, 194 aa, Homo sapiens
MVVSGRRLLTALLQAQKWPFQPSRDMRLVQFWAPHLVGPHLGLETGNGRGIINLNAFDPTLPKTMTQFLEQGEATLSVARRALAAQLPVLPWSEVTFLAPVTWPDKVVCVGMNYVDHCKEQNVPVPKEPIIFSKFASSIVGPYDEVVLPPQSQEVDWEVELAVVIGKKGKHIKVRWKGWAPRPECSRGPSSCLS

SEQ ID NO: 10488 - protein, 299 aa, Homo sapiens [sequence omitted]

SEQ ID NO: 10489 - protein, 367 aa, Homo sapiens
MDAQCSAKVNARKRRKEAPGPNGATEEDGVPSKVQRCAVGLRQPAPFSDEIEVDFSKPYVRVTMEEASRGTPCERPVRVYADGIFDLFHSGHARALMQAKNLFPNTYLIVGVCSDELTHNFKGFTVMNENERYDAVQHCRYVDEVVRNAPWTLTPEFLAEHRIDFVAHDDIPYSSAGSDDVYKHIKEAGMFAPTQRTEGISTSDIITRIVRDYDVYARRNLQRGYTAKELNVSFINEKKYHLQERVDKVKKKVKDVEEKSKEFVQKVEEKSIDLIQKWEEKSREFIGSFLEMFGPEGALKHMLKEGKGRMLQAISPKQSPSSSPTRERSPSPSFRWPFSGKTSPPCSPANLSRHKAAAYDISEDEED

SEQ ID NO: 10490 - protein, 267 aa, Homo sapiens
MDAQCSAKVNARKRRKEAPGPNGATEEDGVPSKVQRCAVGLRQPAPFSDEIEVDFSKPYVRVTMEEASRGTPCERPVRVYADGIFDLFHSGHARALMQAKNLFPNTYLIVGVCSDELTHNFKGFTVMNENERYDAVQHCRYVDEVVRNAPWTLTPEFLAEHRIDFVAHDDIPYSSAGSDDVYKHIKEAGMFAPTQRTEGISTSDIITRIVRDYDVYARRNLQRGYTAKELNVSFINVSSSLTPEFPDSVGDISPPTPSQLNWLCSWL

SEQ ID NO: 10491 - protein, 367 aa, Homo sapiens; identical to SEQ ID NO: 10489

SEQ ID NO: 10492 - protein, 362 aa, Homo sapiens [sequence omitted]

SEQ ID NO: 10493 - protein, 267 aa, Homo sapiens; identical to SEQ ID NO: 10490

SEQ ID NO: 10494 - protein, 209 aa, Homo sapiens
MVSSPCTQASSRTCSRILGLSLGTAALFAAGANVALLLPNWDVTYLLRGLLGRHAMLGTGLWGGGLMVLTAAILISLMGWRYGCFSKSGLCRSVLTALLSGGLALLGALICFVTSGVALKDGPFCMFDVSSFNQTQAWKYGYPFKDLHSRNYLYDRSLWNSVCLEPSAAVVWHVSLFSALLCISLLQLLLVVVHVINSLLGLFCSLCEK

SEQ ID NO: 10495 - protein, 285 aa, Homo sapiens [sequence omitted]

SEQ ID NO: 10496 - protein, 314 aa, Homo sapiens
MLVSGRRRLLTVLLQAQKWPFQPSRDMRLVQFRAPHLVGPHLGLETGNGGGVINLNAFDPTLPKTMTQFLEQGEATLSVARRALAAQLPVLPRSEVTFLAPVTRPDKVVCVGMNYVDHCKEQNVPVPKEPIIFSKFASSIVGPYDEVVLPPQSQEVDWEVELAVVIGKKGKHIKATDAMAHVAGFTVAHDVSARDWQMRRNGKQWLLGKTFDTFCPLGPALVTKDSVADPHNLKICCRVNGEVVQSGNTNQMVFKTEDLIAWVSQFVTFYPGDVILTGTPPGVGVFRKPPVFLKKGDEVQCEIEELGVIINKVV

SEQ ID NO: 10497 - protein, 195 aa, Homo sapiens
MLVSGRRRLLTVLLQAQKWPFQPSRDMRLVQFRAPHLVGPHLGLETGNGGGVINLNAFDPTLPKTMTQFLEQGEATLSVARRALAAQLPVLPRSEVTFLAPVTRPDKVVCVGMNYVDHCKEQNVPVPKEPIIFSKFASSIVGPYDEVVLPPQSQEVDWEVELAVVIGKKGKHIKVRWKGWAPSPECSRGPSSCLS

SEQ ID NO: 10498 - protein, 314 aa, Homo sapiens; identical to SEQ ID NO: 10496

SEQ ID NO: 10499 - protein, 314 aa, Homo sapiens; identical to SEQ ID NO: 10496

SEQ ID NO: 10500 - protein, 314 aa, Homo sapiens; identical to SEQ ID NO: 10496

SEQ ID NO: 10501 - protein, 1174 aa, Homo sapiens [sequence omitted]

SEQ ID NO: 10502 - protein, 837 aa, Homo sapiens
MPLPFGLKLKRTRRYTVSSKSCLVARIQLLNNEFVEFTLSVESTGQESLEAVAQRLELREVTYFSLWYYNKQNQRRWVDLEKPLKKQLDKYALEPTVYFGVVFYVPSVSQLQQEITRYQYYLQLKKDILEGSIPCTLEQAIQLAGLAVQADFGDFDQYESQDFLQKFALFPVGWLQDEKVLEEATQKVALLHQKYRGLTAPDAEMLYMQEVERMDGYGEESYPAKDSQGSDISIGACLEGIFVKHKNGRHPVVFRWHDIANMSHNKSFFALELANKEETIQFQTEDMETAKYIWRLCVARHKFYRLNQCNLQTQTVTVNPIRRRSSSRMSLPKPQPYVMPPPPQLHYNGHYTEPYASSQDNLFVPNQNGYYCHSQTSLDRAQIDLNGRIRNGSVYSAHSTNSLNNPQPYLQPSPMSSNPSITGSDVMRPDYLPSHRHSAVIPPSYRPTPDYETVMKQLNRGLVHAERQSHSLRNLNIGSSYAYSRPAALVYSQPEIREHAQLPSPAAAHCPFSLSYSFHSPSPYPYPAERRPVVGAVSVPELTNAQLQAQDYPSPNIMRTQVYRPPPPYPPPRPANSTPDLSRHLYISSSNPDLITRRVHHSVQTFQEDSLPVAHSLQEVSEPLTAARHAQLHKRNSIEVAGLSHGLEGLRLKERTLSASAAEVAPRAVSVGSQPSVFTERTQREGPEEAEGLRYGHKKSLSDATMLIHSSEEEEDEDFEEESGARAPPARAREPRPGLAQDPPGCPRVLLAGPLHILEPKAHVPDAEKRMMDSSPVRTTAEAQRPWRDGLLMPSMSESDLTTSGRYRARRDSLKKRPVSDLLSGKKNIVEGLPPLG

SEQ ID NO: 10503 - protein, 837 aa, Homo sapiens; identical to SEQ ID NO: 10502

SEQ ID NO: 10504 - protein, 234 aa, Homo sapiens
MAEDKASVKAQVTSLLGELQESQSRLEAATKECQALEGRRKLAQLQVAYHQLFQEYDNHIKSSVVGSERKRGMQLEDLKQQLQQAEEALVAKQEVIDKLKEEAEQHKIVMETVPVLKAQADIYKADFQAERQAREKLAEKKELLQEQLEQLQREYSKLKASCQESARIEDMRKRHVEVSQAPLPPAPAYLSSPLALPSQRRSPPEEPPDFCCPKCQYQAPDMDTLQIHVMECIE

SEQ ID NO: 10505 - protein, 80 aa, Homo sapiens
MFPLVKSALNRLQVRSIQQTMARQSHQKRTPDFHDKYGNAVLASGATFCIVTWTYVATQVGIEWNLSPVGRVTPKEWRNQ

SEQ ID NO: 10506 - protein, 1509 aa, Homo sapiens
MDPSMGVNSVTISVEGMTCNSCVWTIEQQIGKVNGVHHIKVSLEEKNATIIYDPKLQTPKTLQEAIDDMGFDAVIHNPDPLPVLTDTLFLTVTASLTLPWDHIQSTLLKTKGVTDIKIYPQKRTVAVTIIPSIVNANQIKELVPELSLDTGTLEKKSGACEDHSMAQAGEVVLKMKVEGMTCHSCTSTIEGKIGKLQGVQRIKVSLDNQEATIVYQPHLISVEEMKKQIEAMGFPAFVKKQPKYLKLGAIDVERLKNTPVKSSEGSQQRSPSYTNDSTATFIIDGMHCKSCVSNIESTLSALQYVSSIVVSLENRSAIVKYNASSVTPESLRKAIEAVSPGLYRVSITSEVESTSNSPSSSSLQKIPLNVVSQPLTQETVINIDGMTCNSCVQSIEGVISKKPGVKSIRVSLANSNGTVEYDPLLTSPETLRGAIEDMGFDATLSDTNEPLVVIAQPSSEMPLLTSTNEFYTKGMTPVQDKEEGKNSSKCYIQVTGMTCASCVANIERNLRREEGIYSILVALMAGKAEVRYNPAVIQPPMIAEFIRELGFGATVIENADEGDGVLELVVRGMTCASCVHKIESSLTKHRGILYCSVALATNKAHIKYDPEIIGPRDIIHTIESLGFEASLVKKDRSASHLDHKREIRQWRRSFLVSLFFCIPVMGLMIYMMVMDHHFATLHHNQNMSKEEMINLHSSMFLERQILPGLSVMNLLSFLLCVPVQASELLANIFFFGGWYFYIQAYKALKHKTANMDVLIVLATTIAFAYSLIILLVAMYERAKVNPITFFDTPPMLFVFIALGRWLEHIAKGKTSEALAKLISLQATEATIVTLDSDNILLSEEQVDVELVQRGDIIKVVPGGKFPVDGRVIEGHSMVDESLITGEAMPVAKKPGSTVIAGSINQNGSLLICATHVGADTTLSQIVKLVEEAQTSKAPIQQFADKLSGYFVPFIVFVSIATLLVWIVIGFLNFEIVETYFPGYNRSISRTETIIRFAFQASITVLCIACPCSLGLATPTAVMVGTGVGAQNGILIKGGEPLEMAHKVKVVVFDKTGTITHGTPVVNQVKVLTESNRISHHKILAIVGTAESNSEHPLGTAITKYCKQELDTETLGTCIDFQVVPGCGISCKVTNIEGLLHKNNWNIEDNNIKNASLVQIDASNEQSSTSSSMIIDAQISNALNAQQYKVLIGNREWMIRNGLVINNDVNDFMTEHERKGRTAVLVAVDDELCGLIAIADTVKPEAELAIHILKSMGLEVVLMTGDNSKTARSIASQVGITKVFAEVLPSHKVAKVKQLQEEGKRVAMVGDGINDSPALAMANVGIAIGTGTDVAIEAADVVLIRNDLLDVVASIDLSRETVKRIRINFVFALIYNLVGIPIAAGVFMPIGLVLQPWMGSAAMAASSVSVVLSSLFLKLYRKPTYESYELPARSQIGQKSPSEISVHVGIDDTSRNSPKLGLLDRIVNYSRASINSLLSDKRSLNSVVTSEPDKHSLLVGDFREDDDTAL

SEQ ID NO: 10507 - protein, 1500 aa, Homo sapiens
MDPSMGVNSVTISVEGMTCNSCVWTIEQQIGKVNGVHHIKVSLEEKNATIIYDPKLQTPKTLQEAIDDMGFDAVIHNPDPLPVLTDTLFLTVTASLTLPWDHIQSTLLKTKGVTDIKIYPQKRTVAVTIIPSIVNANQIKELVPELSLDTGTLEKKSGACEDHSMAQAGEVVLKMKVEGMTCHSCTSTIEGKIGKLQGVQRIKVSLDNQEATIVYQPHLISVEEMKKQIEAMGFPAFVKKQPKYLKLGAIDVERLKNTPVKSSEGSQQRSPSYTNDSTATFIIDGMHCKSCVSNIESTLSALQYVSSIVVSLENRSAIVKYNASSVTPESLRKAIEAVSPGLYRVSITSEVESTSNSPSSSSLQKIPLNVVSQPLTQETVINIDGMTCNSCVQSIEGVISKKPGVKSIRVSLANSNGTVEYDPLLTSPETLRGAIEDMGFDATLSDTNEPLVVIAQPSSEMPLLTSTNEFYTKGMTPVQDKEEGKNSSKCYIQVTGMTCASCVANIERNLRREEGIYSILVALMAGKAEVRYNPAVIQPPMIAEFIRELGFGATVIENADEGDGVLELVVRGMTCASCVHKIESSLTKHRGILYCSVALATNKAHIKYDPEIIGPRDIIHTIESLGFEASLVKKDRSASHLDHKREIRQWRRSFLVSLFFCIPVMGLMIYMMVMDHHFATLHHNQNMSKEEMINLHSSMFLERQILPGLSVMNLLSFLLCVPVQFFGGWYFYIQAYKALKHKTANMDVLIVLATTIAFAYSLIILLVAMYERAKVNPITFFDTPPMLFVFIALGRWLEHIAKGKTSEALAKLISLQATEATIVTLDSDNILLSEEQVDVELVQRGDIIKVVPGGKFPVDGRVIEGHSMVDESLITGEAMPVAKKPGSTVIAGSINQNGSLLICATHVGADTTLSQIVKLVEEAQTSKAPIQQFADKLSGYFVPFIVFVSIATLLVWIVIGFLNFEIVETYFPGYNRSISRTETIIRFAFQASITVLCIACPCSLGLATPTAVMVGTGVGAQNGILIKGGEPLEMAHKVKVVVFDKTGTITHGTPVVNQVKVLTESNRISHHKILAIVGTAESNSEHPLGTAITKYCKQELDTETLGTCIDFQVVPGCGISCKVTNIEGLLHKNNWNIEDNNIKNASLVQIDASNEQSSTSSSMIIDAQISNALNAQQYKVLIGNREWMIRNGLVINNDVNDFMTEHERKGRTAVLVAVDDELCGLIAIADTVKPEAELAIHILKSMGLEVVLMTGDNSKTARSIASQVGITKVFAEVLPSHKVAKVKQLQEEGKRVAMVGDGINDSPALAMANVGIAIGTGTDVAIEAADVVLIRNDLLDVVASIDLSRETVKRIRINFVFALIYNLVGIPIAAGVFMPIGLVLQPWMGSAAMAASSVSVVLSSLFLKLYRKPTYESYELPARSQIGQKSPSEISVHVGIDDTSRNSPKLGLLDRIVNYSRASINSLLSDKRSLNSVVTSEPDKHSLLVGDFREDDDTAL

SEQ ID NO: 10508 - protein, 422 aa, Homo sapiens
MTAAHAKALISYLELEEAPKLLLGSEAILANPQSAFLTCNISRDHHLSGSVKPPRRDCKVNSSQKSVLWKNVSFYLTCLLSCFPQCSEMATQGHGYPHTQILKATLGYNSGNVQQGKVRVSCFHAVKKAMQYGFLNFNSFNLDEYEHYEKAENGDLNWLIPDRFIAFCGPHSRARLESGYHQHSPETYIQYFKNHNVTTIIRLNKRIYDAKRFTDAGFDHHDLFFADGSTPTDAIVKRFLDICENAEGAIAVHCKAGLGRTGTLIACYIMKHYRMTAAETIAWVRICRPGLVIGPQQQFLVMKQTSLWLEGDYFRQKLKGQENGQHRAAFSKLLSGVDDISINGVENQDQQEPKPYGDDDEINGVTQGDRSRALKRRRQSKTNDILLPSPLAVLTFTLCSVVIWWIVCDYILPILLSKTVLH

SEQ ID NO: 10509 - protein, 257 aa, Homo sapiens
MQYGFLNFNSFNLDEYEHYEKAENGDLNWLIPDRFIAFCGPHSRARLESGYHQHSPETYIQYFKNHNVTTIIRLNKRIYDAKRFTDAGFDHHDLFFADGSTPTDAIVKRFLDICENAEGAIAVHCKAGLGRTGTLIACYIMKHYRMTAAETIAWVRICRPGLVIGPQQQFLVMKQTSLWLEGDYFRQKLKGQENGQHRAAFSKLLSGVDDISINGVENQDQQEPKPYGDDDEINGVTQGDRSRALKRRRQSKTNDIR

SEQ ID NO: 10510 - protein, 417 aa, Homo sapiens
MTAAHAKALISYLELEEAPKLLLGSEAILANPQSAFLTCNISRDHHLSGSVKPPRRDCKVNSSQKSVLWKNVSFYLTCLLSCFPQCSEMATQGHGYPHTQILKATLGYNSGNVQQGKVRVSCFHAVKKAMQYGFLNFNSFNLDEYEHYEKAENGDLNWLIPDRFIAFCGPHSRARLESGYHQHSPETYIQYFKNHNVTTIIRLNKRIYDAKRFTDAGFDHHDLFFADGSTPTDAIVKRFLDICENAEGAIAVHCKAGLGRTGTLIACYIMKHYRMTAAETIAWVRICRPGLVIGPQQQFLVMKQTSLWLEGDYFRQKLKGQENGQHRAAFSKLLSGVDDISINGVENQDQQEPKPYGDDDEINGVTQGDRSRALKRRRQSKTNDILLPSPLAVLTFTLCSVVIWWIVCDYILPILLS

SEQ ID NO: 10511 - protein, 273 aa, Homo sapiens
MQYGFLNFNSFNLDEYEHYEKAENGDLNWLIPDRFIAFCGPHSRARLESGYHQHSPETYIQYFKNHNVTTIIRLNKRIYDAKRFTDAGFDHHDLFFADGSTPTDAIVKRFLDICENAEGAIAVHCKAGLGRTGTLIACYIMKHYRMTAAETIAWVRICRPGLVIGPQQQFLVMKQTSLWLEGDYFRQKLKGQENGQHRAAFSKLLSGVDDISINGVENQDQQEPKPYGDDDEINGVTQGDRSRALKRRRQSKTNDILLPCFSPFQGLKLFCIK

SEQ ID NO: 10512 - protein, 242 aa, Homo sapiens
MVGVNLPQKAGGFLMKKELNYFAKALESPERPFLAILGGAKVADKIQLINNMLDKVNEMIIGGGMAFTFLKVLNNMEIGTSLFDEEGAKIVKDLMSKAEKNGVKITLPVDFVTADKFDENAKTGQATVASGIPAGWMGLDCGPESSKKYAEAVTRAKQIVWNGPVGVFEWEAFARGTKALMDEVVKATSRGCITIIGGGDTATCCAKWNTEDKVSHVSTGGGASLELLEGKVLPGVDALSNI

SEQ ID NO: 10513 - protein, 417 aa, Homo sapiens
MSLSNKLTLDKLDVKGKRVVMRVDFNVPMKNNQITNNQRIKAAVPSIKFCLDNGAKSVVLMSHLGRPDGVPMPDKYSLEPVAVELKSLLGKDVLFLKDCVGPEVEKACANPAAGSVILLENLRFHVEEEGKGKDASGNKVKAEPAKIEAFRASLSKLGDVYVNDAFGTAHRAHSSMVGVNLPQKAGGFLMKKELNYFAKALESPERPFLAILGGAKVADKIQLINNMLDKVNEMIIGGGMAFTFLKVLNNMEIGTSLFDEEGAKIVKDLMSKAEKNGVKITLPVDFVTADKFDENAKTGQATVASGIPAGWMGLDCGPESSKKYAEAVTRAKQIVWNGPVGVFEWEAFARGTKALMDEVVKATSRGCITIIGGGDTATCCAKWNTEDKVSHVSTGGGASLELLEGKVLPGVDALSNI

SEQ ID NO: 10514 - protein, 410 aa, Homo sapiens
MSLSNKLTLDKLDVKGKRVVMRVDFNVPMKNNQITNNQRIKAAVPSIKFCLDNGAKSVVLMSHLGRPDGVPMPDKYSLEPVAVELKSLLGKDVLFLKDCVGPEVEKACANPAAGSVILLENLRFHVEEEGKGKDASGNKVKAEPAKIEAFRASLSKLGDVYVNDAFGTAHRAHSSMVGVNLPQKAGGFLMKKELNYFAKALESPERPFLAILGGAKVADKIQLINNMLDKVNEMIIGGGMAFTFLKVLNNMEIGTSLFDEEGAKIVKDLMSKAEKNGVKITLPVDFVTADKFDENAKTGQATVASGIPAGWMGLDCGPESSKKYAEAVTRAKQIVWNGPVGVFEWEAFARGTKALMDEVVKATSRGCITIIGGGDTATCCAKWNTEDKVSHVSTGGGASLELLEVPVHSP

SEQ ID NO: 10515 - protein, 417 aa, Homo sapiens; identical to SEQ ID NO: 10513

SEQ ID NO: 10516 - protein, 354 aa, Homo sapiens
MPRRSLHAAAVLLLVILKEQPSSPAPVNGSKWTYFGPDGENSWSKKYPSCGGLLQSPIDLHSDILQYDASLTPLEFQGYNLSANKQFLLTNNGHSVKLNLPSDMHIQGLQSRYSATQLHLHWGNPNDPHGSEHTVSGQHFAAELHIVHYNSDLYPDASTASNKSEGLAVLAVLIEMGSFNPSYDKIFSHLQHVKYKGQEAFVPGFNIEELLPERTAEYYRYRGSLTTPPCNPTVLWTVFRNPVQISQEQLLALETALYCTHMDDPSPREMINNFRQVQKFDERLVYTSFSQVQVCTAAGLSLGIILSLALAGILGICIVVVVSIWLFRRKSIKKGDNKGVIYKPATKMETEAHA

SEQ ID NO: 10517 - protein, 413 aa, Homo sapiens
MPRRSLHAAAVLLLVILKEQPSSPAPVNGSKWTYFGPDGENSWSKKYPSCGGLLQSPIDLHSDILQYDASLTPLEFQGYNLSANKQFLLTNNGHSVKLNLPSDMHIQGLQSRYSATQLHLHWGNPNDPHGSEHTVSGQHFAAELHIVHYNSDLYPDASTASNKSEGLAVLAVLIEMGSFNPSYDKIFSHLQHVKYKGQEAFVPGFNIEELLPERTAEYYRYRGSLTTPPCNPTVLWTVFRNPVQISQEQLLALETALYCTHMDDPSPREMINNFRQVQKFDERLVYTSFSQVQVCTAAGLSLVSKKVITRESFTSQPPRWRLRPTLEVPGAPGHIQEGPCFGPYTLRLSGHLRHLKVFSVAQSANMPGLRDPLLGASLPWDHGHPRAIRSMDGMHSQTKQQEFKAACCNCVRL

SEQ ID NO: 10518 - protein, 355 aa, Homo sapiens
MPRRSLHAAAVLLLVILKEQPSSPAPVNGKHGSLCPGPDGENSWSKKYPSCGGLLQSPIDLHSDILQYDASLTPLEFQGYNLSANKQFLLTNNGHSVKLNLPSDMHIQGLQSRYSATQLHLHWGNPNDPHGSEHTVSGQHFAAELHIVHYNSDLYPDASTASNKSEGLAVLAVLIEMGSFNPSYDKIFSHLQHVKYKGQEAFVPGFNIEELLPERTAEYYRYRGSLTTPPCNPTVLWTVFRNPVQISQEQLLALETALYCTHMDDPSPREMINNFRQVQKFDERLVYTSFSQVQVCTAAGLSLGIILSLALAGILGICIVVVVSIWLFRRKSIKKGDNKGVIYKPATKMETEAHA

SEQ ID NO: 10519 - protein, 343 aa, Homo sapiens
MPRRSLHAAAVLLLVILKEQPSSPAPVNGSKWTYFGPDGENSWSKKYPSCGGLLQSPIDLHSDILQYDASLTPLEFQGYNLSANKQFLLTNNGHSVKLNLPSDMHIQGLQSRYSATQLHLHWGNPNDPHGSEHTVSGQHFAAELHIVHYNSDLYPDASTASNKSEGLAVLAVLIEMGSFNPSYDKIFSHLQHVKYKGQEAFVPGFNIEELLPERTAEYYRYRGSLTTPPCNPTVLWTVFRNPVQISQEQLLALETALYCTHMDDPSPREMINNFRQVQKFDERLVYTSFSQGIILSLALAGILGICIVVVVSIWLFRRKSIKKGDNKGVIYKPATKMETEAHA

SEQ ID NO: 10520 - protein, 283 aa, Homo sapiens
MPRRSLHAAAVLLLVILKEQPSSPAPVNGSKWTYFVKLNLPSDMHIQGLQSRYSATQLHLHWGNPNDPHGSEHTVSGQHFAAELHIVHYNSDLYPDASTASNKSEGLAVLAVLIEMGSFNPSYDKIFSHLQHVKYKGQEAFVPGFNIEELLPERTAEYYRYRGSLTTPPCNPTVLWTVFRNPVQISQEQLLALETALYCTHMDDPSPREMINNFRQVQKFDERLVYTSFSQGIILSLALAGILGICIVVVVSIWLFRRKSIKKGDNKGVIYKPATKMETEAHA

SEQ ID NO: 10521 - protein, 258 aa, Homo sapiens
MPGNRVHCCLYFIAPSGHGLKPLDIEFTKHLHEKVNIIPLIAKADTLMPEECQQFKKQDHLPLAVVGSNTIIEVNGKRVIGRQYPWSVAEVENGEHCDFTVLRNMLIRQKRERAEEKLELGFFKLLIEANSCRLFMTEHTQDLKDVTNNVHYENYGIRKLAAVTYHGVDNKKNKGQLTKSPLAQMEEERREQVAKIKKMEMEMEQVFEMKVKEKVQKLKDSEAEAFRKCRVWDAQRGPEQGEGKRSSVRVGGGDVKPP

SEQ ID NO: 10522 - protein, 86 aa, Homo sapiens
MPGNRVHCCLYFIAPSGHGLKPLDIEFTKHLHEKVNIIPLIAKADTLMPEECQQFKKQIKKSKNIKLKYMNFQKQMMKKKKNLLKR

SEQ ID NO: 10523 - protein, 23 aa, Homo sapiens
MQWIIVIAGSLLSITLIVNLRTT

SEQ ID NO: 10524 - protein, 123 aa, Homo sapiens
MHAQSEIIQEIPENGNSVVGNRTETLQVGQYRVRLVPKKSVDVVNQVIKYKPAVAWQTGKPLSIEEIEVAPPKANEVRITIIATVVCHTDTYTLSGADPKGCFPVILGHEVAWNCGKRWRGSY

SEQ ID NO: 10525 - protein, 2446 aa, Homo sapiens [sequence omitted]

SEQ ID NO: 10526 - protein, 2492 aa, Homo sapiens
MTAEPMSESKLNTLVQKLHDFLAHSSEESEETSSPPRLAMNQNTDKISGSGSNSDMMENSKEEGTSSSEKSKSSGSSRSKRKPSIVTKYVESDDEKPLDDETVNEDASNENSENDITMQSLPKGTVIVQPEPVLNEDKDDFKGPEFRSRSKMKTENLKKRGEDGLHGIVSCTACGQQVNHFQKDSIYRHPSLQVLICKNCFKYYMSDDISRDSDGMDEQCRWCAEGGNLICCDFCHNAFCKKCILRNLGRKELSTIMDENNQWYCYICHPEPLLDLVTACNSVFENLEQLLQQNKKKIKVDSEKSNKVYEHTSRFSPKKTSSNCNGEEKKLDDSCSGSVTYSYSALIVPKEMIKKAKKLIETTANMNSSYVKFLKQATDNSEISSATKLRQLKAFKSVLADIKKAHLALEEDLNSEFRAMDAVNKEKNTKEHKVIDAKFETKARKGEKPCALEKKDISKSEAKLSRKQVDSEHMHQNVPTEEQRTNKSTGGEHKKSDRKEEPQYEPANTSEDLDMDIVSVPSSVPEDIFENLETAMEVQSSVDHQGDGSSGTEQEVESSSVKLNISSKDNRGGIKSKTTAKVTKELYVKLTPVSLSNSPIKGADCQEVPQDKDGYKSCGLNPKLEKCGLGQENSDNEHLVENEVSLLLEESDLRRSPRVKTTPLRRPTETNPVTSNSDEECNETVKEKQKLSVPVRKKDKRNSSDSAIDNPKPNKLPKSKQSETVDQNSDSDEMLAILKEVSRMSHSSSSDTDINEIHTNHKTLYDLKTQAGKDDKGKRKRKSSTSGSDFDTKKGKSAKSSIISKKKRQTQSESSNYDSELEKEIKSMSKIGAARTTKKRIPNTKDFDSSEDEKHSKKGMDNQGHKNLKTSQEGSSDDAERKQERETFSSAEGTVDKDTTIMELRDRLPKKQQASASTDGVDKLSGKEQSFTSLEVRKVAETKEKSKHLKTKTCKKVQDGLSDIAEKFLKKDQSDETSEDDKKQSKKGTEEKKKPSDFKKKVIKMEQQYESSSDGTEKLPEREEICHFPKGIKQIKNGTTDGEKKSKKIRDKTSKKKDELSDYAEKSTGKGDSCDSSEDKKSKNGAYGREKKRCKLLGKSSRKRQDCSSSDTEKYSMKEDGCNSSDKRLKRIELRERRNLSSKRNTKEIQSGSSSSDAEESSEDNKKKKQRTSSKKKAVIVKEKKRNSLRTSTKRKQADITSSSSSDIEDDDQNSIGEGSSDEQKIKPVTENLVLSSHTGFCQSSGDEALSKSVPVTVDDDDDDNDPENRIAKKMLLEEIKANLSSDEDGSSDDEPEEGKKRTGKQNEENPGDEEAKNQVNSESDSDSEESKKPRYRHRLLRHKLTVSDGESGEEKKTKPKEHKEVKGRNRRKVSSEDSEDSDFQESGVSEEVSESEDEQRPRTRSAKKAELEENQRSYKQKKKRRRIKVQEDSSSENKSNSEEEEEEKEEEEEEEEEEEEEEEDENDDSKSPGKGRKKIRKILKDDKLRTETQNALKEEEERRKRIAEREREREKLREVIEIEDASPTKCPITTKLVLDEDEETKEPLVQVHRNMVIKLKPHQVDGVQFMWDCCCESVKKTKKSPGSGCILAHCMGLGKTLQVVSFLHTVLLCDKLDFSTALVVCPLNTALNWMNEFEKWQEGLKDDEKLEVSELATVKRPQERSYMLQRWQEDGGVMIIGYEMYRNLAQGRNVKSRKLKEIFNKALVDPGPDFVVCDEGHILKNEASAVSKAMNSIRSRRRIILTGTPLQNNLIEYHCMVNFIKENLLGSIKEFRNRFINPIQNGQCADSTMVDVRVMKKRAHILYEMLAGCVQRKDYTALTKFLPPKHEYVLAVRMTSIQCKLYQYYLDHLTGVGNNSEGGRGKAGAKLFQDFQMLSRIWTHPWCLQLDYISKENKGYFDEDSMDEFIASDSDETSMSLSSDDYTKKKKKGKKGKKDSSSSGSGSDNDVEVIKVWNSRSRGGGEGNVDETGNNPSVSLKLEESKATSSSNPSSPAPDWYKDFVTDADAEVLEHSGKMVLLFEILRMAEEIGDKVLVFSQSLISLDLIEDFLELASREKTEDKDKPLIYKGEGKWLRNIDYYRLDGSTTAQSRKKWAEEFNDETNVRGRLFIISTKAGSLGINLVAANRVIIFDASWNPSYDIQSIFRVYRFGQTKPVYVYRFLAQGTMEDKIYDRQVTKQSLSFRVVDQQQVERHFTMNELTELYTFEPDLLDDPNSEKKKKRDTPMLPKDTILAELLQIHKEHIVGYHEHDSLLDHKEEEELTEEERKAAWAEYEAEKKGLTMRFNIPTGTNLPPVSFNSQTPYIPFNLGALSAMSNQQLEDLINQGREKVVEATNSVTAVRIQPLEDIISAVWKENMNLSEAQVQALALSRQASQELDVKRREAIYNDVLTKQQMLISCVQRILMNRRLQQQYNQQQQQQMTYQQATLGHLMMPKPPNLIMNPSNYQQIDMRGMYQPVAGGMQPPPLQRAPPPMRSKNPGPSQGKSM

SEQ ID NO: 10527 - protein, 2454 aa, Homo sapiens
MTAEPMSESKLNTLVQKLHDFLAHSSEESEETSSPPRLAMNQNTDKISGSGSNSDMMENSKEEGTSSSEKSKSSGSSRSKRKPSIVTKYVESDDEKPLDDETVNEDASNENSENDITMQSLPKEDGLHGIVSCTACGQQVNHFQKDSIYRHPSLQVLICKNCFKYYMSDDISRDSDGMDEQCRWCAEGGNLICCDFCHNAFCKKCILRNLGRKELSTIMDENNQWYCYICHPEPLLDLVTACNSVFENLEQLLQQNKKKIKVDSEKSNKVYEHTSRFSPKKTSSNCNGEEKKLDDSCSGSVTYSYSALIVPKEMIKKAKKLIETTANMNSSYVKFLKQATDNSEISSATKLRQLKAFKSVLADIKKAHLALEEDLNSEFRAMDAVNKEKNTKEHKVIDAKFETKARKGEKPCALEKKDISKSEAKLSRKQVDSEHMHQNVPTEEQRTNKSTGGEHKKSDRKEEPQYEPANTSEDLDMDIVSVPSSVPEDIFENLETAMEVQSSVDHQGDGSSGTEQEVESSSVKLNISSKDNRGGIKSKTTAKVTKELYVKLTPVSLSNSPIKGADCQEVPQDKDGYKSCGLNPKLEKCGLGQENSDNEHLVENEVSLLLEESDLRRSPRVKTTPLRRPTETNPVTSNSDEECNETVKEKQKLSVPVRKKDKRNSSDSAIDNPKPNKLPKSKQSETVDQNSDSDEMLAILKEVSRMSHSSSSDTDINEIHTNHKTLYDLKTQAGKDDKGKRKRKSSTSGSDFDTKKGKSAKSSIISKKKRQTQSESSNYDSELEKEIKSMSKIGAARTTKKRIPNTKDFDSSEDEKHSKKGMDNQGHKNLKTSQEGSSDDAERKQERETFSSAEGTVDKDTTIMELRDRLPKKQQASASTDGVDKLSGKEQSFTSLEVRKVAETKEKSKHLKTKTCKKVQDGLSDIAEKFLKKDQSDETSEDDKKQSKKGTEEKKKPSDFKKKVIKMEQQYESSSDGTEKLPEREEICHFPKGIKQIKNGTTDGEKKSKKIRDKTSKKKDELSDYAEKSTGKGDSCDSSEDKKSKNGAYGREKKRCKLLGKSSRKRQDCSSSDTEKYSMKEDGCNSSDKRLKRIELRERRNLSSKRNTKEIQSGSSSSDAEESSEDNKKKKQRTSSKKKAVIVKEKKRNSLRTSTKRKQADITSSSSSDIEDDDQNSIGEGSSDEQKIKPVTENLVLSSHTGFCQSSGDEALSKSVPVTVDDDDDDNDPENRIAKKMLLEEIKANLSSDEDGSSDDEPEEGKKRTGKQNEENPGDEEAKNQVNSESDSDSEESKKPRYRHRLLRHKLTVSDGESGEEKKTKPKEHKEVKGRNRRKVSSEDSEDSDFQESGVSEEVSESEDEQRPRTRSAKKAELEENQRSYKQKKKRRRIKVQEDSSSENKSNSEEEEEEKEEEEEEEEEEEEEEEDENDDSKSPGKGRKKIRKILKDDKLRTETQNALKEEEERRKRIAEREREREKLREVIEIEDASPTKCPITTKLVLDEDEETKEPLVQVHRNMVIKLKPHQVDGVQFMWDCCCESVKKTKKSPGSGCILAHCMGLGKTLQVVSFLHTVLLCDKLDFSTALVVCPLNTALNWMNEFEKWQEGLKDDEKLEVSELATVKRPQERSYMLQRWQEDGGVMIIGYEMYRNLAQGRNVKSRKLKEIFNKALVDPGPDFVVCDEGHILKNEASAVSKAMNSIRSRRRIILTGTPLQNNLIEYHCMVNFIKENLLGSIKEFRNRFINPIQNGQCADSTMVDVRVMKKRAHILYEMLAGCVQRKDYTALTKFLPPKHEYVLAVRMTSIQCKLYQYYLDHLTGVGNNSEGGRGKAGAKLFQDFQMLSRIWTHPWCLQLDYISKENKGYFDEDSMDEFIASDSDETSMSLSSDDYTKKKKKGKKGKKDSSSSGSGSDNDVEVIKVWNSRSRGGGEGNVDETGNNPSVSLKLEESKATSSSNPSSPAPDWYKDFVTDADAEVLEHSGKMVLLFEILRMAEEIGDKVLVFSQSLISLDLIEDFLELASREKTEDKDKPLIYKGEGKWLRNIDYYRLDGSTTAQSRKKWAEEFNDETNVRGRLFIISTKAGSLGINLVAANRVIIFDASWNPSYDIQSIFRVYRFGQTKPVYVYRFLAQGTMEDKIYDRQVTKQSLSFRVVDQQQVERHFTMNELTELYTFEPDLLDDPNSEKKKKRDTPMLPKDTILAELLQIHKEHIVGYHEHDSLLDHKEEEELTEEERKAAWAEYEAEKKGLTMRFNIPTGTNLPPVSFNSQTPYIPFNLGALSAMSNQQLEDLINQGREKVVEATNSVTAVRIQPLEDIISAVWKENMNLSEAQVQALALSRQASQELDVKRREAIYNDVLTKQQMLISCVQRILMNRRLQQQYNQQQQQQMTYQQATLGHLMMPKPPNLIMNPSNYQQIDMRGMYQPVAGGMQPPPLQRAPPPMRSKNPGPSQGKSM

SEQ ID NO: 10528 - protein, 1826 aa, Homo sapiens [sequence omitted]

SEQ ID NO: 10529 - protein, 2453 aa, Homo sapiens
MNQNTDKISGSGSNSDMMENSKEEGTSSSEKSKSSGSSRSKRKPSIVTKYVESDDEKPLDDETVNEDASNENSENDITMQSLPKGTVIVQPEPVLNEDKDDFKGPEFRSRSKMKTENLKKRGEDGLHGIVSCTACGQQVNHFQKDSIYRHPSLQVLICKNCFKYYMSDDISRDSDGMDEQCRWCAEGGNLICCDFCHNAFCKKCILRNLGRKELSTIMDENNQWYCYICHPEPLLDLVTACNSVFENLEQLLQQNKKKIKVDSEKSNKVYEHTSRFSPKKTSSNCNGEEKKLDDSCSGSVTYSYSALIVPKEMIKKAKKLIETTANMNSSYVKFLKQATDNSEISSATKLRQLKAFKSVLADIKKAHLALEEDLNSEFRAMDAVNKEKNTKEHKVIDAKFETKARKGEKPCALEKKDISKSEAKLSRKQVDSEHMHQNVPTEEQRTNKSTGGEHKKSDRKEEPQYEPANTSEDLDMDIVSVPSSVPEDIFENLETAMEVQSSVDHQGDGSSGTEQEVESSSVKLNISSKDNRGGIKSKTTAKVTKELYVKLTPVSLSNSPIKGADCQEVPQDKDGYKSCGLNPKLEKCGLGQENSDNEHLVENEVSLLLEESDLRRSPRVKTTPLRRPTETNPVTSNSDEECNETVKEKQKLSVPVRKKDKRNSSDSAIDNPKPNKLPKSKQSETVDQNSDSDEMLAILKEVSRMSHSSSSDTDINEIHTNHKTLYDLKTQAGKDDKGKRKRKSSTSGSDFDTKKGKSAKSSIISKKKRQTQSESSNYDSELEKEIKSMSKIGAARTTKKRIPNTKDFDSSEDEKHSKKGMDNQGHKNLKTSQEGSSDDAERKQERETFSSAEGTVDKDTTIMELRDRLPKKQQASASTDGVDKLSGKEQSFTSLEVRKVAETKEKSKHLKTKTCKKVQDGLSDIAEKFLKKDQSDETSEDDKKQSKKGTEEKKKPSDFKKKVIKMEQQYESSSDGTEKLPEREEICHFPKGIKQIKNGTTDGEKKSKKIRDKTSKKKDELSDYAEKSTGKGDSCDSSEDKKSKNGAYGREKKRCKLLGKSSRKRQDCSSSDTEKYSMKEDGCNSSDKRLKRIELRERRNLSSKRNTKEIQSGSSSSDAEESSEDNKKKKQRTSSKKKAVIVKEKKRNSLRTSTKRKQADITSSSSSDIEDDDQNSIGEGSSDEQKIKPVTENLVLSSHTGFCQSSGDEALSKSVPVTVDDDDDDNDPENRIAKKMLLEEIKANLSSDEDGSSDDEPEEGKKRTGKQNEENPGDEEAKNQVNSESDSDSEESKKPRYRHRLLRHKLTVSDGESGEEKKTKPKEHKEVKGRNRRKVSSEDSEDSDFQESGVSEEVSESEDEQRPRTRSAKKAELEENQRSYKQKKKRRRIKVQEDSSSENKSNSEEEEEEKEEEEEEEEEEEEEEEDENDDSKSPGKGRKKIRKILKDDKLRTETQNALKEEEERRKRIAEREREREKLREVIEIEDASPTKCPITTKLVLDEDEETKEPLVQVHRNMVIKLKPHQVDGVQFMWDCCCESVKKTKKSPGSGCILAHCMGLGKTLQVVSFLHTVLLCDKLDFSTALVVCPLNTALNWMNEFEKWQEGLKDDEKLEVSELATVKRPQERSYMLQRWQEDGGVMIIGYEMYRNLAQGRNVKSRKLKEIFNKALVDPGPDFVVCDEGHILKNEASAVSKAMNSIRSRRRIILTGTPLQNNLIEYHCMVNFIKENLLGSIKEFRNRFINPIQNGQCADSTMVDVRVMKKRAHILYEMLAGCVQRKDYTALTKFLPPKHEYVLAVRMTSIQCKLYQYYLDHLTGVGNNSEGGRGKAGAKLFQDFQMLSRIWTHPWCLQLDYISKENKGYFDEDSMDEFIASDSDETSMSLSSDDYTKKKKKGKKGKKDSSSSGSGSDNDVEVIKVWNSRSRGGGEGNVDETGNNPSVSLKLEESKATSSSNPSSPAPDWYKDFVTDADAEVLEHSGKMVLLFEILRMAEEIGDKVLVFSQSLISLDLIEDFLELASREKTEDKDKPLIYKGEGKWLRNIDYYRLDGSTTAQSRKKWAEEFNDETNVRGRLFIISTKAGSLGINLVAANRVIIFDASWNPSYDIQSIFRVYRFGQTKPVYVYRFLAQGTMEDKIYDRQVTKQSLSFRVVDQQQVERHFTMNELTELYTFEPDLLDDPNSEKKKKRDTPMLPKDTILAELLQIHKEHIVGYHEHDSLLDHKEEEELTEEERKAAWAEYEAEKKGLTMRFNIPTGTNLPPVSFNSQTPYIPFNLGALSAMSNQQLEDLINQGREKVVEATNSVTAVRIQPLEDIISAVWKENMNLSEAQVQALALSRQASQELDVKRREAIYNDVLTKQQMLISCVQRILMNRRLQQQYNQQQQQQMTYQQATLGHLMMPKPPNLIMNPSNYQQIDMRGMYQPVAGGMQPPPLQRAPPPMRSKNPGPSQGKSM

SEQ ID NO: 10530 - protein, 2492 aa, Homo sapiens; identical to SEQ ID NO: 10526

SEQ ID NO: 10531 - protein, 52 aa, Homo sapiens
RVTLESVKAASELYSPLSEVTEINEALAENPRLVNKSCYEDGWLIKMTLSNP

SEQ ID NO: 10532 - protein, 367 aa, Homo sapiens
MRKGKGPICLFSRPTLRPSRSKVSLIEGRGANMAARWRFWCVSVTMVVALLIVCDVPSASAQRKKEMVLSEKVSQLMEWTNKRPVIRMNGDKFRRLVKAPPRNYSVIVMFTALQLHRQCVVCKQADEEFQILANSWRYSSAFTNRIFFAMVDFDEGSDVFQMLNMNSAPTFINFPAKGKPKRGDTYELQVRGFSAEQIARWIADRTDVNIRVIRPPNYAGPLMLGLLLAVIGGLVYLRRSNMEFLFNKTGWAFAALCFVLAMTSGQMWNHIRGPPYAHKNPHTGHVNYIHGSSQAQFVAETHIVLLFNGGVTLGMVLLCEAATSDMDIGKRKIMCVAGIGLVVLFFSWMLSIFRSKYHGYPYSFLMS

SEQ ID NO: 10533 - protein, 367 aa, Homo sapiens; identical to SEQ ID NO: 10532

SEQ ID NO: 10534 - protein, 314 aa, Homo sapiens
MLVSGRRRLLTALLQAQKWPFQPSRDMRLVQFRAPHLVGPHLGLETGNGGGVINLNAFDPTLPKTMTQFLEQGEATLSVARRALAAQLPVLPWSEVTFLAPVTWPDKVVCVGMNYVDHCKEQNVPVPKEPIIFSKFASSIVGPYDEVVLPPQSQEVDWEVELAVVIGKKGKHIKATDAMAHVAGFTVAHDVSARDWLTRRNGKQWLLGKTFDTFCPLGPALVTKDSVADPHNLKICCRVNGEVVQSSNTNQMVFKTEDLIAWVSQFVTFYPGDVILTGTPPGVGVFRKPPVFLKKGDEVQCEIEELGVIINKVV

SEQ ID NO: 10535 - protein, 314 aa, Homo sapiens; identical to SEQ ID NO: 10534

SEQ ID NO: 10536 - protein, 314 aa, Homo sapiens; identical to SEQ ID NO: 10534

SEQ ID NO: 10537 - protein, 314 aa, Homo sapiens; identical to SEQ ID NO: 10534

SEQ ID NO: 10538 - protein, 361 aa, Homo sapiens [sequence omitted]

SEQ ID NO: 10539 - protein, 288 aa, Homo sapiens [sequence omitted]

SEQ ID NO: 10540 - protein, 683 aa, Homo sapiens [sequence omitted]

SEQ ID NO: 10541 - protein, 892 aa, Homo sapiens
MANETQKVGAIHFPFPFTPYSIQEDFMAELYRVLEAGKIGIFESPTGTGKSLSLICGALSWLRDFEQKKREEEARLLETGTGPLHDEKDESLCLSSSCEGAAGTPRPAGEPAWVTQFVQKKEERDLVNRLKAEQARRKQREERLQQLQHRVQLKYAAKRLRQEEEETENLLRLSREMLETGPEAERLEQLESGEEELVLAEYESDEEKKVASGVDEDEDDLEEEHITKIYYCSRTHSQLAQFVHEVKKSPFGKDVRLVSLGSQQNLCVNEDVRSLGSVQLINDRCVDMQRSRHACPFYNHEQMGLLRDEALAEVKDMEQLLALGKEARACPYYRSRLAIPAAQLVVLPYQMLLHAATRQAAGIRLQDQVVIIDEAHNLIDTITGMHSVEVSGSQLCQAHSQLLQYMERYGKRLKAKNLMYLKQILYLLEKFVAVLGGNIKQNPNTQSLSQTGTELKTINDFLFQSQIDNINLFKVQRYCEKSMISRKLFGFTERYGAVFSSREQPKLAGFQQFLQSLQPRTTEALAAPADESQASVPQPASPLMHIEGFLAALTTANQDGRVILSRQGSLSESTLKFLLLNPAVHFAQVVKECRAVVIAGGTMQPVRTPFPAPRAPGVGMRWGLGRDALSVLFSPGAPSQKGQHLPLVICSGISNQPLEFTFQKRDLPQMMDEVGRILCNLCGVVSGGVVCFFPSYEYLRQVHAHWEKGGLLGRLAARKKIFQEPKSAHQVEQVLLAYSRCIQACGQERGQVTEALLLSVVGGKMSEGINFSDNLGRCVVMVGMPFPNIRSAELQEKMAYLDQTLPRAPGQAPPGKALVENLCMKAVNQSIGRAIRHQKDFASIVLLDQRYARPPVLAKLPAWIRARVEVKATFGPAIAAVQKFHREKSASS

SEQ ID NO: 10542 - protein, 361 aa, Homo sapiens [sequence omitted]

SEQ ID NO: 10543 - protein, 314 aa, Homo sapiens
MANETQKVGAIHFPFPFTPYSIQEDFMAELYRVLEAGKIGIFESPTGTGKSLSLICGALSWLRDFEQKKREEEARLLETGTGPLHDEKDESLCLSSSCEGAAGTPRPAGEPAWVTQFVQKKEERDLVNRLKAEQARRKQREERLQQLQHRVQLKYAAKRLRQEEEETENLLRLSREMLETGPEAERLEQLESGEEELVLAEYESDEEKKVASGVDEDEDDLEEEHITKIYYCSRTHSQLAQFVHEVKKSPFGKDVRLVSLGSQQNLCVNEDVRSLGSVQLINDRCVDMQRSRHGSHQDHGVAAGGLERVRQGWQ

SEQ ID NO: 10544 - protein, 683 aa, Homo sapiens [sequence omitted]

SEQ ID NO: 10545 - protein, 683 aa, Homo sapiens [sequence omitted]

SEQ ID NO: 10546 - protein, 370 aa, Homo sapiens
MGLLRDEALAEVKDMEQLLALGKEARACPYYRSRLAIPAAQLVVLPYQMLLHAATRQAAGIRLQDQVVIIDEAHNLIDTITGMHSVEVSGSQLCQAHSQLLQYMERYGKRLKAKNLMYLKQILYLLEKFVAVLGGNIKQNPNTQSLSQTGTELKTINDFLFQSQIDNINLFKVQRYCEKSMISRKLFGFTERYGAVFSSREQPKLAGFQQFLQSLQPRTTEALAAPADESQASVPQPASPLMHIEGFLAALTTANQDGRVILSRQGSLSESTLKFLLLNPAVHFAQVVKECRAVVIAGGTMQPVSDFRQQLLACAGVEAERVVEFSCVFGPSLILPGHVIPPDNICPLSSAAGSPTSRWNSRSRKETCLR

SEQ ID NO: 10547 - protein, 798 aa, Homo sapiens [sequence omitted]

SEQ ID NO: 10548 - protein, 1349 aa, Homo sapiens
MMQGNTCHRMSFHPGRGCPRGRGGHGARPSAPSFRPQNLRLLHPQQPPVQYQYEPPSAPSTTFSNSPAPNFLPPRPDFVPFPPPMPPSAQGPLPPCPIRPPFPNHQMRHPFPVPPCFPPMPPPMPCPNNPPVPGAPPGQGTFPFMMPPPSMPHPPPPPVMPQQVNYQYPPGYSHHNFPPPSFNSFQNNPSSFLPSANNSSSPHFRHLPPYPLPKAPSERRSPERLKHYDDHRHRDHSHGRGERHRSLDRRERGRSPDRRRQDSRYRSDYDRGRTPSRHRSYERSRERERERHRHRDNRRSPSLERSYKKEYKRSGRSYGLSVVPEPAGCTPELPGEIIKNTDSWAPPLEIVNHRSPSREKKRARWEEEKDRWSDNQSSGKDKNYTSIKEKEPEETMPDKNEEEEEELLKPVWIRCTHSENYYSSDPMDQVGDSTVVGTSRLRDLYDKFEEELGSRQEKAKAARPPWEPPKTKLDEDLESSSESECESDEDSTCSSSSDSEVFDVIAEIKRKKAHPDRLHDELWYNDPGQMNDGPLCKCSAKARRTGIRHSIYPGEEAIKPCRPMTNNAGRLFHYRITVSPPTNFLTDRPTVIEYDDHEYIFEGFSMFAHAPLTNIPLCKVIRFNIDYTIHFIEEMMPENFCVKGLELFSLFLFRDILELYDWNLKDGGKEVLSMHQILLYLLRCSKALVPEEEIANMLQWEELEWQKYAEECKGMIVTNPGTKPSSVRIDQLDREQFNPDVITFPIIVHFGIRPAQLSYAGDPQYQKLWKSYVKLRHLLANSPKVKQTDKQKLAQREEALQKIRQKNTMRREVTVELSSQGFWKTGIRSDVCQHAMMLPVLTHHIRYHQCLMHLDKLIGYTFQDRCLLQLAMTHPSHHLNFGMNPDHARNSLSNCGIRQPKYGDRKVHHMHMRKKGINTLINIMSRLGQDDPTPSRINHNERLEFLGDAVVEFLTSVHLYYLFPSLEEGGLATYRTAIVQNQHLAMLAKKLELDRFMLYAHGPDLCRESDLRHAMANCFEALIGAVYLEGSLEEAKQLFGRLLFNDPDLREVWLNYPLHPLQLQEPNTDRQLIETSPVLQKLTEFEEAIGVIFTHVRLLARAFTLRTVGFNHLTLGHNQRMEFLGDSIMQLVATEYLFIHFPDHHEGHLTLLRSSLVNNRTQAKVAEELGMQEYAITNDKTKRPVALRTKTLADLLESFIAALYIDKDLEYVHTFMNVCFFPRLKEFILNQDWNDPKSQLQQCCLTLRTEGKEPDIPLYKTLQTVGPSHARTYTVAVYFKGERIGCGKGPSIQQAEMGAAMDALEKYNFPQMAHQKRFIERKYRQELKEMRWEREHQEREPDETEDIKK

SEQ ID NO: 10549 - protein, 1120 aa, Homo sapiens
PPPPPVMPQQVNYQYPPGYSHHNFPPPSFNSFQNNPSSFLPSANNSSSPHFRHLPPYPLPKAPSERRSPERLKHYDDHRHRDHSHGRGERHRSLDRRERGRSPDRRRQDSRYRSDYDRGRTPSRHRSYERSSRSPSREKKRARWEEEKDRWSDNQSSGKDKNYTSIKEKEPEETMPDKNEEEEEELLKPVWIRCTHSENYYSSDPMDQVGDSTVVGTSRLRDLYDKFEEELGSRQEKAKAARPPWEPPKTKLDEDLESSSESECESDEDSTCSSSSDSEVFDVIAEIKRKKAHPDRLHDELWYNDPGQMNDGPLCKCSAKARRTGIRHSIYPGEEAIKPCRPMTNNAGRLFHYRITVSPPTNFLTDRPTVIEYDDHEYIFEGFSMFAHAPLTNIPLCKVIRFNIDYTIHFIEEMMPENFCVKGLELFSLFLFRDILELYDWNLKDGGKEVLSMHQILLYLLRCSKALVPEEEIANMLQWEELEWQKYAEECKGMIVTNPGTKPSSVRIDQLDREQFNPDVITFPIIVHFGIRPAQYQKLWKSYVKLRHLLANSPKVKQTDKQKLAQREEALQKIRQKNTMRREVTVELSSQGFWKTGIRSDVCQHAMMLPVLTHHIRYHQCLMHLDKLIGYTFQDRCLLQLAMTHPSHHLNFGMNPDHARNSLSNCGIRQPKYGDRKVHHMHMRKKGINTLINIMSRLGQDDPTPSRINHNERLEFLGDAVVEFLTSVHLYYLFPSLEEGGLATYRTAIVQNQHLAMLAKKLELDRFMLYAHGPDLCRESDLRHAMANCFEALIGAVYLEGSLEEAKQLFGRLLFNDPDLREVWLNYPLHPLQLQEPNTDRQLIETSPVLQKLTEFEEAIGVIFTHVRLLARAFTLRTVGFNHLTLGHNQRMEFLGDSIMQLVATEYLFIHFPDHHEGHLTLLRSSLVNNRTQAKVAEELGMQEYAITNDKTKRPVALRTKTLADLLESFIAALYIDKDLEYVHTFMNVCFFPRLKEFILNQDWNDPKSQLQQCCLTLRTEGKEPDIPLYKTLQTVGPSHARTYTVAVYFKGERIGCGKGPSIQQAEMGAAMDALEKYNFPQMAHQKRFIERKYRQELKEMRWEREHQEREPDETEDIKK

SEQ ID NO: 10550 - protein, 1349 aa, Homo sapiens; identical to SEQ ID NO: 10548

SEQ ID NO: 10551 - protein, 1349 aa, Homo sapiens; identical to SEQ ID NO: 10548

SEQ ID NO: 10552 - protein, 148 aa, Homo sapiens
MGLSPDAPEDEAGIKKAAENIKALIEHEMKNGIPANRIVLGGFSQGGALSLYTALTCPHPLAGIVASSCWLPLHRAFPQAAKGSGKGLTILQCHGELDPMVPVRFGTLTAVVTPARVQFKTYSGVMHSCCPQEMAAVKEFLEKLLPSV

SEQ ID NO: 10553 - protein, 49 aa, Homo sapiens
MVPVRFGTLTAVVTPARVQFKTYSGVMHSCCPQEMAAVKEFLEKLLPSV

SEQ ID NO: 10554 - protein, 148 aa, Homo sapiens; identical to SEQ ID NO: 10552

SEQ ID NO: 10555 - protein, 1220 aa, Homo sapiens [sequence omitted]

SEQ ID NO: 10556 - protein, 1044 aa, Homo sapiens
MGSLGQREDLQDEDRNSAFTWKVQANNRAYNGQFKEKVILCWQRKKYKTNVIRTAKYNFYSFLPLNLYEQFHRVSNLFFLIIIILQSIPDISTLPWFSLSTPMVCLLFIRATRDLVDDMGRHKSDRAINNRPCQILMGKSFKQKKWQDLCVGDVVCLRKDNIVPADMLLLASTEPSSLCYVETVDIDGETNLKFRQALMVTHKELATIKKMASFQGTVTCEAPNSRMHHFVGCLEWNDKKYSLDIGNLLLRGCRIRNTDTCYGLVIYAGFDTKIMKNCGKIHLKRTKLDLLMNKLVVVIFISVVLVCLVLAFGFGFSVKEFKDHHYYLSGVHGSSVAAESFFVFWSFLILLSVTIPMSMFILSEFIYLGNSVFIDWDVQMYYKPQDVPAKARSTSLNDHLGQVEYIFSDKTGTLTQNILTFNKCCISGRVYGEPLPLEQVRRREAALPQCGPAAPRADQRGRGRAGVLAPAGHLPHGDDQLLYQAASPDEGALVTAARNFGYVFLSRTQDTVTIMELGEERVYQVLAIMDFNSTRKRMSVLVRKPEGAICLYTKGADTVIFERLHRRGAMEFATEEALAAFAQETLRTLCLAYREVAEDIYEDWQQRHQEASLLLQNRAQALQQVYNEMEQDLRLLGATAIEDRLQDGVPETIKCLKKSNIKIWVLTGDKQETAVNIGFACELLSENMLILEEKEISRILETYWENSNNLLTRESLSQVKLALVINGDFLDKLLVSLRKEPRALAQNVNMDEAWQELGQSRRDFLYARRLSLLCRRFGLPLAAPPAQDSRARRSSEVLQERAFVDLASKCQAVICCRVTPKQKALIVALVKKYHQVVTLAIGDGANDINMIKTADVGVGLAGQEGMQAVQNSDFVLGQFCFLQRLLLVHGRWSYVRICKFLRYFFYKSMASMMVQVWFACYNGFTGQDVSAEQSLEKPELYVVGQKDELFNYWVFVQAIAHGVTTSLVNFFMTLWISRDTAGPASFSDHQSFAVVVALSCLLSITMEVILIIKYWTALCVATILLSLGFYAIMTTTTQSFWLFR

SEQ ID NO: 10557 - protein, 196 aa, Homo sapiens
MLLLASTEPSSLCYVETVDIDGETNLKFRQALMVTHKELATIKKMASFQGTVTCEAPNSRMHHFVGCLEWNDKKYSLDIGNLLLRGCRIRNTDTCYGLVIYAGFDTKIMKNCGKIHLKRTKLDLLMNKLVVVIFISVVLVCLVLAFGFGFSVKEFKDHHYYLSGVHGSSVAAESFFVFWSFLILLSVTIPMSMFIL

SEQ ID NO: 10558 - protein, 535 aa, Homo sapiens
MGSSATEIEELENTTFKYLTGEQTEKMWQRLKGILRCLVKQLERGDVNVVDLKKNIEYAASVLEAVYIDETRRLLDTEDELSDIQTDSVPSEVRDWLASTFTRKMGMTKKKPEEKPKFRSIVHAVQAGIFVERMYRKTYHMVGLAYPAAVIVTLKDVDKWSFDVFALNEASGEHSLKFMIYELFTRYDLINRFKIPVSCLITFAEALEVGYSKYKNPYHNLIHAADVTQTVHYIMLHTGIMHWLTELEILAMVFAAAIHDYEHTGTTNNFHIQTRSDVAILYNDRSVLENHHVSAAYRLMQEEEMNILINLSKDDWRDLRNLVIEMVLSTDMSGHFQQIKNIRNSLQQPEGIDRAKTMSLILHAADISHPAKSWKLHYRWTMALMEEFFLQGDKEAELGLPFSPLCDRKSTMVAQSQIGFIDFIVEPTFSLLTDSTEKIVIPLIEEASKAETSSYVASSSTTIVGLHIADALRRSNTKGSMSDGSYSPDYSLAAVDLKSFKNNLVDIIQQNKERWKELAAQEARTSSQKCEFIHQ

SEQ ID NO: 10559 - protein, 155 aa, Homo sapiens
MGSSATEIEELENTTFKYLTGEQTEKMWQRLKGILRCLVKQLERGDVNVVDLKKNIEYAASVLEAVYIDETRRLLDTEDELSDIQTDSVPSEVRDWLASTFTRKMGMTKKKPEEKPKFRSIVHAVQAGIFVERMYRKTYHMVGLAYPAAVIVTLK

SEQ ID NO: 10560 - protein, 545 aa, Homo sapiens
MGSSATEIEELENTTFKYLTGEQTEKMWQRLKGILRCLVKQLERGDVNVVDLKKNIEYAASVLEAVYIDETRRLLDTEDELSDIQTDSVPSEVRDWLASTFTRKMGMTKKKPEEKPKFRSIVHAVQAGIFVERMYRKTYHMVGLAYPAAVIVTLKDVDKWSFDVFALNEASGEHSLKFMIYELFTRYDLINRFKIPVSCLITFAEALEVGYSKYKNPYHNLIHAADVTQTVHYIMLHTGIMHWLTELEILAMVFAAAIHDYEHTGTTNNFHIQTRSDVAILYNDRSVLENHHVSAAYRLMQEEEMNILINLSKDDWRDLRNLVIEMVLSTDMSGHFQQIKNIRNSLQQPEGIDRAKTMSLILHAADISHPAKSWKLHYRWTMALMEEFFLQGDKEAELGLPFSPLCDRKSTMVAQSQIGFIDFIVEPTFSLLTDSTEKIVIPLIEEASKAETSSYVASSSTTIVGLHIADALRRSNTKGSMSDGSYSPDYSLAAVDLKSFKNNLVDIIQQNKERWKELAAQGESDLHKNSEDLVNAEEKHDETHS

SEQ ID NO: 10561 - protein, 545 aa, Homo sapiens; identical to SEQ ID NO: 10560

SEQ ID NO: 10562 - protein, 529 aa, Homo sapiens
MDDHVTIRKKHLQRPIFRLRCLVKQLERGDVNVVDLKKNIEYAASVLEAVYIDETRRLLDTEDELSDIQTDSVPSEVRDWLASTFTRKMGMTKKKPEEKPKFRSIVHAVQAGIFVERMYRKTYHMVGLAYPAAVIVTLKDVDKWSFDVFALNEASGEHSLKFMIYELFTRYDLINRFKIPVSCLITFAEALEVGYSKYKNPYHNLIHAADVTQTVHYIMLHTGIMHWLTELEILAMVFAAAIHDYEHTGTTNNFHIQTRSDVAILYNDRSVLENHHVSAAYRLMQEEEMNILINLSKDDWRDLRNLVIEMVLSTDMSGHFQQIKNIRNSLQQPEGIDRAKTMSLILHAADISHPAKSWKLHYRWTMALMEEFFLQGDKEAELGLPFSPLCDRKSTMVAQSQIGFIDFIVEPTFSLLTDSTEKIVIPLIEEASKAETSSYVASSSTTIVGLHIADALRRSNTKGSMSDGSYSPDYSLAAVDLKSFKNNLVDIIQQNKERWKELAAQGESDLHKNSEDLVNAEEKHDETHS

SEQ ID NO: 10563 - protein, 519 aa, Homo sapiens
MDDHVTIRKKHLQRPIFRLRCLVKQLERGDVNVVDLKKNIEYAASVLEAVYIDETRRLLDTEDELSDIQTDSVPSEVRDWLASTFTRKMGMTKKKPEEKPKFRSIVHAVQAGIFVERMYRKTYHMVGLAYPAAVIVTLKDVDKWSFDVFALNEASGEHSLKFMIYELFTRYDLINRFKIPVSCLITFAEALEVGYSKYKNPYHNLIHAADVTQTVHYIMLHTGIMHWLTELEILAMVFAAAIHDYEHTGTTNNFHIQTRSDVAILYNDRSVLENHHVSAAYRLMQEEEMNILINLSKDDWRDLRNLVIEMVLSTDMSGHFQQIKNIRNSLQQPEGIDRAKTMSLILHAADISHPAKSWKLHYRWTMALMEEFFLQGDKEAELGLPFSPLCDRKSTMVAQSQIGFIDFIVEPTFSLLTDSTEKIVIPLIEEASKAETSSYVASSSTTIVGLHIADALRRSNTKGSMSDGSYSPDYSLAAVDLKSFKNNLVDIIQQNKERWKELAAQEARTSSQKCEFIHQ

SEQ ID NO: 10564 - protein, 511 aa, Homo sapiens
MGKKINKLFCFNFLVQCFRGKSKPSKCQIRKKVKNHIERLLDTEDELSDIQTDSVPSEVRDWLASTFTRKMGMTKKKPEEKPKFRSIVHAVQAGIFVERMYRKTYHMVGLAYPAAVIVTLKDVDKWSFDVFALNEASGEHSLKFMIYELFTRYDLINRFKIPVSCLITFAEALEVGYSKYKNPYHNLIHAADVTQTVHYIMLHTGIMHWLTELEILAMVFAAAIHDYEHTGTTNNFHIQTRSDVAILYNDRSVLENHHVSAAYRLMQEEEMNILINLSKDDWRDLRNLVIEMVLSTDMSGHFQQIKNIRNSLQQPEGIDRAKTMSLILHAADISHPAKSWKLHYRWTMALMEEFFLQGDKEAELGLPFSPLCDRKSTMVAQSQIGFIDFIVEPTFSLLTDSTEKIVIPLIEEASKAETSSYVASSSTTIVGLHIADALRRSNTKGSMSDGSYSPDYSLAAVDLKSFKNNLVDIIQQNKERWKELAAQGESDLHKNSEDLVNAEEKHDETHS

SEQ ID NO: 10565 - protein, 552 aa, Homo sapiens
MGSSATEIEELENTTFKYLTGEQTEKMWQRLKGILRCLVKQLERGDVNVVDLKKNIEYAASVLEAVYIDETRRLLDTEDELSDIQTDSVPSEVRDWLASTFTRKMGMTKKKPEEKPKFRSIVHAVQAGIFVERMYRKTYHMVGLAYPAAVIVTLKDVDKWSFDVFALNEASGEHSLKFMIYELFTRYDLINRFKIPVSCLITFAEALEVGYSKYKNPYHNLIHAADVTQTVHYIMLHTGIMHWLTELEILAMVFAAAIHDYEHTGTTNNFHIQTRSDVAILYNDRSVLENHHVSAAYRLMQEEEMNILINLSKDDWRDLRNLVIEMVLSTDMSGHFQQIKNIRNSLQQPEGIDRAKTMSLILHAADISHPAKSWKLHYRWTMALMEEFFLQGDKEAELGLPFSPLCDRKSTMVAQSQIGFIDFIVEPTFSLLTDSTEKIVIPLIEEASKAETSSYVASSSTTIVGLHIADALRRSNTKGSMSDGSYSPDYSLAAVDLKSFKNNLVDIIQQNKERWKELAAQGSVVYEALLPSLSVFTSPLRVWITSSRFLLL

SEQ ID NO: 10566 - protein, 51 aa, Homo sapiens
MGSSATEIEELENTTFKYLTGEQTEKMWQRLKGIKDDSLRRHQKRIYNGSP

SEQ ID NO: 10567 - protein, 518 aa, Homo sapiens
MGKKINKLFCFNFLVQCFRGKSKPSKCQIRKKVKNHIERLLDTEDELSDIQTDSVPSEVRDWLASTFTRKMGMTKKKPEEKPKFRSIVHAVQAGIFVERMYRKTYHMVGLAYPAAVIVTLKDVDKWSFDVFALNEASGEHSLKFMIYELFTRYDLINRFKIPVSCLITFAEALEVGYSKYKNPYHNLIHAADVTQTVHYIMLHTGIMHWLTELEILAMVFAAAIHDYEHTGTTNNFHIQTRSDVAILYNDRSVLENHHVSAAYRLMQEEEMNILINLSKDDWRDLRNLVIEMVLSTDMSGHFQQIKNIRNSLQQPEGIDRAKTMSLILHAADISHPAKSWKLHYRWTMALMEEFFLQGDKEAELGLPFSPLCDRKSTMVAQSQIGFIDFIVEPTFSLLTDSTEKIVIPLIEEASKAETSSYVASSSTTIVGLHIADALRRSNTKGSMSDGSYSPDYSLAAVDLKSFKNNLVDIIQQNKERWKELAAQGSVVYEALLPSLSVFTSPLRVWITSSRFLLL

SEQ ID NO: 10568 - protein, 501 aa, Homo sapiens
MGKKINKLFCFNFLVQCFRGKSKPSKCQIRKKVKNHIERLLDTEDELSDIQTDSVPSEVRDWLASTFTRKMGMTKKKPEEKPKFRSIVHAVQAGIFVERMYRKTYHMVGLAYPAAVIVTLKDVDKWSFDVFALNEASGEHSLKFMIYELFTRYDLINRFKIPVSCLITFAEALEVGYSKYKNPYHNLIHAADVTQTVHYIMLHTGIMHWLTELEILAMVFAAAIHDYEHTGTTNNFHIQTRSDVAILYNDRSVLENHHVSAAYRLMQEEEMNILINLSKDDWRDLRNLVIEMVLSTDMSGHFQQIKNIRNSLQQPEGIDRAKTMSLILHAADISHPAKSWKLHYRWTMALMEEFFLQGDKEAELGLPFSPLCDRKSTMVAQSQIGFIDFIVEPTFSLLTDSTEKIVIPLIEEASKAETSSYVASSSTTIVGLHIADALRRSNTKGSMSDGSYSPDYSLAAVDLKSFKNNLVDIIQQNKERWKELAAQEARTSSQKCEFIHQ

SEQ ID NO: 10569 - protein, 178 aa, Homo sapiens
MDHQECLALGVHPSSEWSLGMDISKMALTLLPSPLSRSIIMGSSATEIEELENTTFKYLTGEQTEKMWQRLKGIYVVQICRKVTKKAICRDTATNKISLRKRLKPRDCDWSCLCQQGERRSNGLVLMSGARVPLPATCTLERSQPGPIQEILPKMTAWKCRAPPTEWTTEARDEKGSP

SEQ ID NO: 10570 - protein, 657 aa, Homo sapiens
MEGGPQEADRLDELEYEEVELYKSSHRDKLGLMVCYRTDDEEDLGIYVGEVNPNSIAAKDGRIREGDRIIQINGVDVQNREEAVAILSQEENTNISLLVARPESQLAKRWKDSDRDDFLDDFGSENEGELRARKLKSPPAQQPGNEEEKGAPDAGPGLSNSQELDSGVGRTDESTRNEESSEHDLLGDEPPSSTNTPGSLRKFGLQGDALQSRDFHFSMDSLLAEGAGLGGGDVPGLTDEEYERYRELLEIKCHLENGNQLGLLFPRASGGNSALDVNRNESLGHEMAMLEEELRHLEFKCRNILRAQKMQQLRERCMKAWLLEEESLYDLAASEPKKHELSDISELPEKSDKDSTSAYNTGESCRSTPLLVEPLPESPLRRAMAGNSNLNRTPPGPAVATPAKAAPPPGSPAKFRSLSRDPEAGRRQHAEERGRRNPKTGLTLERVGPESSPYLSRRHRGQGQEGEHYHSCVQLAPTRGLEELGHGPLSLAGGPRVGGVAAAATEAPRMEWKVKVRSDGTRYVAKRPVRDRLLKARALKIREERSGMTTDDDAVSEMKMGRYWSKEERKQHLIRAREQRKRREFMMQSRLECLREQQNGDSKPELNIIALSHRKTMKKRNKKILDNWITIQEMLAHGARSADGKRVYNPLLSVTTV

SEQ ID NO: 10571 - protein, 694 aa, Homo sapiens
MALGKLRPPTPPMVILEPYVLSELPPISHEYYDPAEFMEGGPQEADRLDELEYEEVELYKSSHRDKLGLMVCYRTDDEEDLGIYVGEVNPNSIAAKDGRIREGDRIIQINGVDVQNREEAVAILSQEENTNISLLVARPESQLAKRWKDSDRDDFLDDFGSENEGELRARKLKSPPAQQPGNEEEKGAPDAGPGLSNSQELDSGVGRTDESTRNEESSEHDLLGDEPPSSTNTPGSLRKFGLQGDALQSRDFHFSMDSLLAEGAGLGGGDVPGLTDEEYERYRELLEIKCHLENGNQLGLLFPRASGGNSALDVNRNESLGHEMAMLEEELRHLEFKCRNILRAQKMQQLRERCMKAWLLEEESLYDLAASEPKKHELSDISELPEKSDKDSTSAYNTGESCRSTPLLVEPLPESPLRRAMAGNSNLNRTPPGPAVATPAKAAPPPGSPAKFRSLSRDPEAGRRQHAEERGRRNPKTGLTLERVGPESSPYLSRRHRGQGQEGEHYHSCVQLAPTRGLEELGHGPLSLAGGPRVGGVAAAATEAPRMEWKVKVRSDGTRYVAKRPVRDRLLKARALKIREERSGMTTDDDAVSEMKMGRYWSKEERKQHLIRAREQRKRREFMMQSRLECLREQQNGDSKPELNIIALSHRKTMKKRNKKILDNWITIQEMLAHGARSADGKRVYNPLLSVTTV

SEQ ID NO: 10572 - protein, 673 aa, Homo sapiens
MTAPPISHEYYDPAEFMEGGPQEADRLDELEYEEVELYKSSHRDKLGLMVCYRTDDEEDLGIYVGEVNPNSIAAKDGRIREGDRIIQINGVDVQNREEAVAILSQEENTNISLLVARPESQLAKRWKDSDRDDFLDDFGSENEGELRARKLKSPPAQQPGNEEEKGAPDAGPGLSNSQELDSGVGRTDESTRNEESSEHDLLGDEPPSSTNTPGSLRKFGLQGDALQSRDFHFSMDSLLAEGAGLGGGDVPGLTDEEYERYRELLEIKCHLENGNQLGLLFPRASGGNSALDVNRNESLGHEMAMLEEELRHLEFKCRNILRAQKMQQLRERCMKAWLLEEESLYDLAASEPKKHELSDISELPEKSDKDSTSAYNTGESCRSTPLLVEPLPESPLRRAMAGNSNLNRTPPGPAVATPAKAAPPPGSPAKFRSLSRDPEAGRRQHAEERGRRNPKTGLTLERVGPESSPYLSRRHRGQGQEGEHYHSCVQLAPTRGLEELGHGPLSLAGGPRVGGVAAAATEAPRMEWKVKVRSDGTRYVAKRPVRDRLLKARALKIREERSGMTTDDDAVSEMKMGRYWSKEERKQHLIRAREQRKRREFMMQSRLECLREQQNGDSKPELNIIALSHRKTMKKRNKKILDNWITIQEMLAHGARSADGKRVYNPLLSVTTV

SEQ ID NO: 10573 - protein, 322 aa, Homo sapiens
MIPGDGIGPELMLHVKSVFRHACVPVDFEEVHVSSNADEEDIRNAIMAIRRNRVALKGNIETNHNLPPSHKSRNNILRTSLDLYANVIHCKSLPGVVTRHKDIDILIVRENTEGEYSSLEHESVAGVVESLKIITKAKSLRIAEYAFKLAQESGRKKVTAVHKANIMKLGDGLFLQCCREVAARYPQITFENMIVDNTTMQLVSRPQQFDVMVMPNLYGNIVNNVCAGLVGGPGLVAGANYGHVYAVFETATRNTGKSIANKNIANPTATLLASCMMLDHLKLHSYATSIRKAVLASMDNENVRFPSHPTLLPRPVSPCSLL

SEQ ID NO: 10574 - protein, 775 aa, Homo sapiens
MGCNMCVVQKPEEQYKVMLQVNGKELSKLSQEQTLQALRSSKEPLVIQVLRRSPRLRGDSSCHDLQLVDSGTQTDITFEHIMALGKLRPPTPPMVILEPYVLSELPPISHEYYDPAEFMEGGPQEADRLDELEYEEVELYKSSHRDKLGLMVCYRTDDEEDLGIYVGEVNPNSIAAKDGRIREGDRIIQINGVDVQNREEAVAILSQEENTNISLLVARPESQLAKRWKDSDRDDFLDDFGSENEGELRARKLKSPPAQQPGNEEEKGAPDAGPGLSNSQELDSGVGRTDESTRNEESSEHDLLGDEPPSSTNTPGSLRKFGLQGDALQSRDFHFSMDSLLAEGAGLGGGDVPGLTDEEYERYRELLEIKCHLENGNQLGLLFPRASGGNSALDVNRNESLGHEMAMLEEELRHLEFKCRNILRAQKMQQLRERCMKAWLLEEESLYDLAASEPKKHELSDISELPEKSDKDSTSAYNTGESCRSTPLLVEPLPESPLRRAMAGNSNLNRTPPGPAVATPAKAAPPPGSPAKFRSLSRDPEAGRRQHAEERGRRNPKTGLTLERVGPESSPYLSRRHRGQGQEGEHYHSCVQLAPTRGLEELGHGPLSLAGGPRVGGVAAAATEAPRMEWKVKVRSDGTRYVAKRPVRDRLLKARALKIREERSGMTTDDDAVSEMKMGRYWSKEERKQHLIRAREQRKRREFMMQSRLECLREQQNGDSKPELNIIALSHRKTMKKRNKKILDNWITIQEMLAHGARSADGKRVYNPLLSVTTV

SEQ ID NO: 10575 - protein, 335 aa, Homo sapiens
MIPGDGIGPELMLHVKSVFRHACVPVDFEEVHVSSNADEEDIRNAIMAIRRNRVALKGNIETNHNLPPSHKSRNNILRTSLDLYANVIHCKSLPGVVTRHKDIDILIVRENTEGEYSSLEHESVAGVVESLKIITKAKSLRIAEYAFKLAQESGRKKVTAVHKANIMKLGDGLFLQCCREVAARYPQITFENMIVDNTTMQLVSRPQQFDVMVMPNLYGNIVNNVCAGLVGGPGLVAGANYGHVYAVFETATRNTGKSIANKNIANPTATLLASCMMLDHLKLHSYATSIRKAVLASMDNENMHTPDIGGQGTTSEAIQDVIRHIRVINGRAVEA

SEQ ID NO: 10576 - protein, 347 aa, Homo sapiens
MIPGDGIGPELMLHVKSVFRHACVPVDFEEVHVSSNADEEDIRNAIMAIRRNRVALKGNIETNHNLPPSHKSRNNILRTSLDLYANVIHCKSLPGVVTRHKDIDILIVRENTEGEYSSLEHESVAGVVESLKIITKAKSLRIAEYAFKLAQESGRKKVTAVHKANIMKLGDGLFLQCCREVAARYPQITFENMIVDNTTMQLVSRPQQFDVMVMPNLYGNIVNNVCAGLVGGPGLVAGANYGHVYAVFETATRNTGKSIANKNIANPTATLLASCMMLDHLKLHSYATSIRKAVLASMDNENGLVCAEPACVLQMHTPDIGGQGTTSEAIQDVIRHIRVINGRAVEA

SEQ ID NO: 10577 - protein, 625 aa, Homo sapiens
MVCYRTDDEEDLGIYVGEVNPNSIAAKDGRIREGDRIIQINGVDVQNREEAVAILSQEENTNISLLVARPESQLAKRWKDSDRDDFLDDFGSENEGELRARKLKSPPAQQPGNEEEKGAPDAGPGLSNSQELDSGVGRTDESTRNEESSEHDLLGDEPPSSTNTPGSLRKFGLQGDALQSRDFHFSMDSLLAEGAGLGGGDVPGLTDEEYERYRELLEIKCHLENGNQLGLLFPRASGGNSALDVNRNESLGHEMAMLEEELRHLEFKCRNILRAQKMQQLRERCMKAWLLEEESLYDLAASEPKKHELSDISELPEKSDKDSTSAYNTGESCRSTPLLVEPLPESPLRRAMAGNSNLNRTPPGPAVATPAKAAPPPGSPAKFRSLSRDPEAGRRQHAEERGRRNPKTGLTLERVGPESSPYLSRRHRGQGQEGEHYHSCVQLAPTRGLEELGHGPLSLAGGPRVGGVAAAATEAPRMEWKVKVRSDGTRYVAKRPVRDRLLKARALKIREERSGMTTDDDAVSEMKMGRYWSKEERKQHLIRAREQRKRREFMMQSRLECLREQQNGDSKPELNIIALSHRKTMKKRNKKILDNWITIQEMLAHGARSADGKRVYNPLLSVTTV

SEQ ID NO: 10578 - protein, 769 aa, Homo sapiens
MGCNMCVVQKPEEQYKVMLQVNGKELSKLSQEQTLQALRSSKEPLVIQVLRRSPRLRGDSSCHDLQLVDSGTQTDITFEHIMALGKLRPPTPPMVILEPPPISHEYYDPAEFMEGGPQEADRLDELEYEEVELYKSSHRDKLGLMVCYRTDDEEDLGIYVGEVNPNSIAAKDGRIREGDRIIQINGVDVQNREEAVAILSQEENTNISLLVARPESQLAKRWKDSDRDDFLDDFGSENEGELRARKLKSPPAQQPGNEEEKGAPDAGPGLSNSQELDSGVGRTDESTRNEESSEHDLLGDEPPSSTNTPGSLRKFGLQGDALQSRDFHFSMDSLLAEGAGLGGGDVPGLTDEEYERYRELLEIKCHLENGNQLGLLFPRASGGNSALDVNRNESLGHEMAMLEEELRHLEFKCRNILRAQKMQQLRERCMKAWLLEEESLYDLAASEPKKHELSDISELPEKSDKDSTSAYNTGESCRSTPLLVEPLPESPLRRAMAGNSNLNRTPPGPAVATPAKAAPPPGSPAKFRSLSRDPEAGRRQHAEERGRRNPKTGLTLERVGPESSPYLSRRHRGQGQEGEHYHSCVQLAPTRGLEELGHGPLSLAGGPRVGGVAAAATEAPRMEWKVKVRSDGTRYVAKRPVRDRLLKARALKIREERSGMTTDDDAVSEMKMGRYWSKEERKQHLIRAREQRKRREFMMQSRLECLREQQNGDSKPELNIIALSHRKTMKKRNKKILDNWITIQEMLAHGARSADGKRVYNPLLSVTTV

SEQ ID NO: 10579 - protein, 694 aa, Homo sapiens; identical to SEQ ID NO: 10571

SEQ ID NO: 10580 - protein, 105 aa, Homo sapiens [sequence omitted]

SEQ ID NO: 10581 - protein, 105 aa, Homo sapiens [sequence omitted]

SEQ ID NO: 10582 - protein, 205 aa, Homo sapiens
MKVLLLTGLGALFFAYYWDDNFDPGGLDYLVLNHIGGAPAGTRARSPQATRWLMQVNFVSYVQLTSRALPSLTDSKGSLVVVSSLLGRVPTSFSTPYSAAKFALDGFFGSLRRELDVQDVNVAITMCVLGLRDRASAAEAVRGVTRVKAAPGPKAALAVIRGGATRAAGVFYPWRFRLLCLLRRWLPRPRAWFIRQELNVTAAAA

SEQ ID NO: 10583 - protein, 105 aa, Homo sapiens [sequence omitted]

SEQ ID NO: 10584 - protein, 286 aa, Homo sapiens
MKVLLLTGLGALFFAYYWDDNFDPASLQGARVLLTGANAGVGEELAYHYARLGSHLVLTAHTEALLQKVVGNCRKLGAPKVFYIAADMASPEAPESVVQFALDKLGGLDYLVLNHIGGAPAGTRARSPQATRWLMQVNFVSYVQLTSRALPSLTDSKGSLVVVSSLLGRVPTSFSTPYSAAKFALDGFFGSLRRELDVQDVNVAITMCVLGLRDRASAAEAVRGVTRVKAAPGPKAALAVIRGGATRAAGVFYPWRFRLLCLLRRWLPRPRAWFIRQELNVTAAAA

SEQ ID NO: 10585 - protein, 345 aa, Homo sapiens
MSKPHSEAGTAFIQTQQLHAAMADTFLEHMCRLDIDSPPITARNTGIICTIGPASRSVETLKEMIKSGMNVARLNFSHGTHEYHAETIKNVRTATESFASDPILYRPVAVALDTKGPEIRTGLIKGSGTAEVELKKGATLKITLDNAYMEKCDENILWLDYKNICKVVEVGSKIYVDDGLISLQVKQKGADFLVTEVENGGSLGSKKGVNLPGAAVDLPAVSEKDIQDLKFGVEQDVDMVFASFIRKASDVHEVRKVLGEKGKNIKIISKIENHEGVRRQFDEILEASDGIMVARGDLGIEIPAEKVFLAQKMMIGRCNRAGKPVICATQAYAGEHDQEAPPHSG

SEQ ID NO: 10586 - protein, 531 aa, Homo sapiens
MSKPHSEAGTAFIQTQQLHAAMADTFLEHMCRLDIDSPPITARNTGIICTIGPASRSVETLKEMIKSGMNVARLNFSHGTHEYHAETIKNVRTATESFASDPILYRPVAVALDTKGPEIRTGLIKGSGTAEVELKKGATLKITLDNAYMEKCDENILWLDYKNICKVVEVGSKIYVDDGLISLQVKQKGADFLVTEVENGGSLGSKKGVNLPGAAVDLPAVSEKDIQDLKFGVEQDVDMVFASFIRKASDVHEVRKVLGEKGKNIKIISKIENHEGVRRFDEILEASDGIMVARGDLGIEIPAEKVFLAQKMMIGRCNRAGKPVICATQMLESMIKKPRPTRAEGSDVANAVLDGADCIMLSGETAKGDYPLEAVRMQHLIAREAEAAMFHRKLFEELVRASSHSTDLMEAMAMGSVEASYKCLAAALIVLTESGRSAHQVARYRPRAPIIAVTRNPQTARQAHLYRGIFPVLCKDPVQEAWAEDVDLRVNFAMNVGKARGFFKKGDVVIVLTGWRPGSGFTNTMRVVPVP

SEQ ID NO: 10587 - protein, 566 aa, Homo sapiens
MQWSSERGERLLTPGACSSEVPSAVPSRSGGTSAAMSKPHSEAGTAFIQTQQLHAAMADTFLEHMCRLDIDSPPITARNTGIICTIGPASRSVETLKEMIKSGMNVARLNFSHGTHEYHAETIKNVRTATESFASDPILYRPVAVALDTKGPEIRTGLIKGSGTAEVELKKGATLKITLDNAYMEKCDENILWLDYKNICKVVEVGSKIYVDDGLISLQVKQKGADFLVTEVENGGSLGSKKGVNLPGAAVDLPAVSEKDIQDLKFGVEQDVDMVFASFIRKASDVHEVRKVLGEKGKNIKIISKIENHEGVRRFDEILEASDGIMVARGDLGIEIPAEKVFLAQKMMIGRCNRAGKPVICATQMLESMIKKPRPTRAEGSDVANAVLDGADCIMLSGETAKGDYPLEAVRMQHLIAREAEAAMFHRKLFEELVRASSHSTDLMEAMAMGSVEASYKCLAAALIVLTESGRSAHQVARYRPRAPIIAVTRNPQTARQAHLYRGIFPVLCKDPVQEAWAEDVDLRVNFAMNVGKARGFFKKGDVVIVLTGWRPGSGFTNTMRVVPVP

SEQ ID NO: 10588 - protein, 552 aa, Homo sapiens
MTQPFNYSAFERIIFAGTSAAMSKPHSEAGTAFIQTQQLHAAMADTFLEHMCRLDIDSPPITARNTGIICTIGPASRSVETLKEMIKSGMNVARLNFSHGTHEYHAETIKNVRTATESFASDPILYRPVAVALDTKGPEIRTGLIKGSGTAEVELKKGATLKITLDNAYMEKCDENILWLDYKNICKVVEVGSKIYVDDGLISLQVKQKGADFLVTEVENGGSLGSKKGVNLPGAAVDLPAVSEKDIQDLKFGVEQDVDMVFASFIRKASDVHEVRKVLGEKGKNIKIISKIENHEGVRRFDEILEASDGIMVARGDLGIEIPAEKVFLAQKMMIGRCNRAGKPVICATQMLESMIKKPRPTRAEGSDVANAVLDGADCIMLSGETAKGDYPLEAVRMQHLIAREAEAAIYHLQLFEELRRLAPITSDPTEATAVGAVEASFKCCSGAIIVLTKSGRSAHQVARYRPRAPIIAVTRNPQTARQAHLYRGIFPVLCKDPVQEAWAEDVDLRVNFAMNVGKARGFFKKGDVVIVLTGWRPGSGFTNTMRVVPVP

SEQ ID NO: 10589 - protein, 531 aa, Homo sapiens
MSKPHSEAGTAFIQTQQLHAAMADTFLEHMCRLDIDSPPITARNTGIICTIGPASRSVETLKEMIKSGMNVARLNFSHGTHEYHAETIKNVRTATESFASDPILYRPVAVALDTKGPEIRTGLIKGSGTAEVELKKGATLKITLDNAYMEKCDENILWLDYKNICKVVEVGSKIYVDDGLISLQVKQKGADFLVTEVENGGSLGSKKGVNLPGAAVDLPAVSEKDIQDLKFGVEQDVDMVFASFIRKASDVHEVRKVLGEKGKNIKIISKIENHEGVRRFDEILEASDGIMVARGDLGIEIPAEKVFLAQKMMIGRCNRAGKPVICATQMLESMIKKPRPTRAEGSDVANAVLDGADCIMLSGETAKGDYPLEAVRMQHLIAREAEAAIYHLQLFEELRRLAPITSDPTEATAVGAVEASFKCCSGAIIVLTKSGRSAHQVARYRPRAPIIAVTRNPQTARQAHLYRGIFPVLCKDPVQEAWAEDVDLRVNFAMNVGKARGFFKKGDVVIVLTGWRPGSGFTNTMRVVPVP

SEQ ID NO: 10590 - protein, 345 aa, Homo sapiens; identical to SEQ ID NO: 10585

SEQ ID NO: 10591 - protein, 128 aa, Homo sapiens [sequence omitted]

SEQ ID NO: 10592 - protein, 150 aa, Homo sapiens
MLGAALRRCAVAATTRADPRGLLHSARTPGPAVAIQSVRCYSHGSQETDEEFDARWVTYFNKPDIDAWELRKGINTLVTYDMVPEPKIIDAALRACRRLNDFASTVRILEVVKDKAGPHKEIYPYVIQELRPTLNELGISTPEELGLDKV

SEQ ID NO: 10593 - protein, 126 aa, Homo sapiens
MNLAPLECQATAGSRCSWPSGGSTCSAGASRHCFTGCGVPSRPGAWQWHGSTGWMPKGQSSWCGPCQPSRSLCHSRAPWSFPCLPAPGPLRFQGRGERGSIRPPQPGKRGRPRAPPSTRVQTAFNP

SEQ ID NO: 10594 - protein, 384 aa, Homo sapiens [sequence omitted]

SEQ ID NO: 10595 - protein, 414 aa, Homo sapiens
MQTFLKGKRVGYWLSEKKIKKLNFQAFAELCRKRGMEVVQLNLSRPIEEQGPLDVIIHKLTDVILEADQNDSQSLELVHRFQEYIDAHPETIVLDPLPAIRTLLDRSKSYELIRKIEAYMEDDRICSPPFMELTSLCGDDTMRLLEKNGLTFPFICKTRVAHGTNSHEMAIVFNQEGLNAIQPPCVVQNFINHNAVLYKVFVVGESYTVVQRPSLKNFSAGTSDRESIFFNSHNVSKPESSSVLTELDKIEGVFERPSDEVIRELSRALRQALGVSLFGIDIIINNQTGQHAVIDINAFPGYEGVSEFFTDLLNHIATVLQGQSTAMAATGDVALLRHSKLLAEPAGGLVGERTCSASPGCCGSMMGQDAPWKAEADAGGTAKLPHQRLGCNAGVSPSFQQHCVASLATKASSQ

SEQ ID NO: 10596 - protein, 314 aa, Homo sapiens
MQTFLKGKRVGYWLSEKKIKKLNFQAFAELCRKRGMEVVQLNLSRPIEEQGPLDVIIHKLTDVILEADQNDSQSLELVHRFQEYIDAHPETIVLDPLPAIRTLLDRSKSYELIRKIEAYMEDDRICSPPFMELTSLCGDDTMRLLEKNGLTFPFICKTRVAHGTNSHEMAIVFNQEGLNAIQPPCVVQNFINHNAVLYKVFVVGESYTVVQRPSLKNFSAGTSDRESIFFNSHNVSKPESSSVLTELDKIEGVFERPSDEVIRELSRALRQALGVSLFGIDIIINNQTGQHAVIDINAFPGDCQVCFIEGWKTD

SEQ ID NO: 10597 - protein, 414 aa, Homo sapiens; identical to SEQ ID NO: 10595

SEQ ID NO: 10598 - protein, 415 aa, Homo sapiens
MHAHTRTHTKLSCLLVCPPEAGTCWSLRSTWSGPDVRCVYWLNLSRPIEEQGPLDVIIHKLTDVILEADQNDSQSLELVHRFQEYIDAHPETIVLDPLPAIRTLLDRSKSYELIRKIEAYMEDDRICSPPFMELTSLCGDDTMRLLEKNGLTFPFICKTRVAHGTNSHEMAIVFNQEGLNAIQPPCVVQNFINHNAVLYKVFVVGESYTVVQRPSLKNFSAGTSDRESIFFNSHNVSKPESSSVLTELDKIEGVFERPSDEVIRELSRALRQALGVSLFGIDIIINNQTGQHAVIDINAFPGYEGVSEFFTDLLNHIATVLQGQSTAMAATGDVALLRHSKLLAEPAGGLVGERTCSASPGCCGSMMGQDAPWKAEADAGGTAKLPHQRLGCNAGVSPSFQQHCVASLATKASSQ

SEQ ID NO: 10599 - protein, 241 aa, Homo sapiens
MAEEQPQVELFVKAGSDGAKIGNCPFSQRLFMVLWLKGVTFNVTTVDTKRRTETVQKLCPGGQLPFLLYGTEVHTDTNKIEEFLEAVLCPPRYPKLAALNPESNTAGLDIFAKFSAYIKNSNPALNDNLEKGLLKALKVLDNYLTSPLPEEVDETSAEDEGVSQRKFLDGNELTLADCNLLPKLHIVQVVCKKYRGFTIPEAFRGVHRYLSNAYAREEFASTCPDDEEIELAYEQVAKALK

SEQ ID NO: 10600 - protein, 428 aa, Homo sapiens
MAENDVDNELLDYEDDEVETAAGGDGAEAPAKKDVKGSYVSIHSSGFRDFLLKPELLRAIVDCGFEHPSEVQHECIPQAILGMDVLCQAKSGMGKTAVFVLATLQQLEPVTGQVSVLVMCHTRELAFQISKEYERFSKYMPNVKVAVFFGGLSIKKDEEVLKKNCPHIVVGTPGRILALARNKSLNLKHIKHFILDECDKMLEQLDMRRDVQEIFRMTPHEKQVMMFSATLSKEIRPVCRKFMQDPMEIFVDDETKLTLHGLQQYYVKLKDNEKNRKLFDLLDVLEFNQVVIFVKSVQRCIALAQLLVEQNFPAIAIHRGMPQEERLSRYQQFKDFQRRILVATNLFGRGMDIERVNIAFNYDMPEDSDTYLHRVARAGRFGTKGLAITFVSDENDAKILNDVQDRFEVNISELPDEIDISSYIEQTR

SEQ ID NO: 10601 - protein, 77 aa, Homo sapiens
MEVEQYRREREHEFQSKQQAAMGSQGNLSAEVEQATRRQVQGMQSSQQRNRERVLAQLLGMVCDVRPQVHPNYRISA

SEQ ID NO: 10602 - protein, 290 aa, Homo sapiens
MAENDVDNELLDYEDDEVETAAGGDGAEAPAKKDVKGSYVSIHSSGFRDFLLKPELLRAIVDCGFEHPSEVQHECIPQAILGMDVLCQAKSGMGKTAVFVLATLQQLEPVTGQVSVLVMCHTRELAFQISKEYERFSKYMPNVKVAVFFGGLSIKKDEEVLKKNCPHIVVGTPGRILALARNKSLNLKHIKHFILDECDKMLEQLDMRRDVQEIFRMTPHEKQVMMFSATLSKEIRPVCRKFMQDVNTLLPSLPPLPARCLLPFLALFLRLPCHSSAKKAACAQLGVMTP

SEQ ID NO: 10603 - protein, 63 aa, Homo sapiens [sequence omitted]

SEQ ID NO: 10604 - protein, 428 aa, Homo sapiens; identical to SEQ ID NO: 10600

SEQ ID NO: 10605 - protein, 428 aa, Homo sapiens; identical to SEQ ID NO: 10600

SEQ ID NO: 10606 - protein, 428 aa, Homo sapiens; identical to SEQ ID NO: 10600

SEQ ID NO: 10607 - protein, 428 aa, Homo sapiens; identical to SEQ ID NO: 10600

SEQ ID NO: 10608 - protein, 212 aa, Homo sapiens
MWTMSSWTMKMMRWRQQLGEMGLRPLPRRMSRAPMSPSTALAFVTSCSSQSCSGPLSTVALSIRQKVAVFFGGLSIKKDEEVLKKNCPHIVVGTPGRILALARNKSLNLKHIKHFILDECDKMLEQLDMRRDVQEIFRMTPHEKQVMMFSATLSKEIRPVCRKFMQDVNTLLPSLPPLPARCLLPFLALFLRLPCHSSAKKAACAQLGVMTP

SEQ ID NO: 10609 - protein, 426 aa, Homo sapiens
MAENDVDNELLDYEDDEVETAAGGDGAEAPAKKDVKGSYVSIHSSGFRDFLLKPELLRAIVDCGFEHPSEVQHECIPQAILGMDVLCQAKSGMGKTAVFVLATLQQLEPVTGQVSVLVMCHTRELAFQISKEYERFSKYMPNVKVAVFFGGLSIKKDEEVLKKNCPHIVVGTPGRILALARNKSLNLKHIKHFILDECDKMLEQLDMRRDVQEIFRMTPHEKQVMMFSATLSKEIRPVCRKFMQDPMEIFVDDETKLTLHGLQQYYVKLKDNEKNRKLFDLLDVLEFNQVVIFVKSVQRCIALAQLLVEQNFPAIAIHRGMPQEERLSRYQQFKDFQRRILVATNLFGRGMDIERVNIAFNYDMPEDSDTYLHRVARAGRFGTKGLAITFVSDENDAKILNDVQDRFEVNISELPDEIDISSYSEY

SEQ ID NO: 10610 - protein, 428 aa, Homo sapiens; identical to SEQ ID NO: 10600

SEQ ID NO: 10611 - protein, 290 aa, Homo sapiens; identical to SEQ ID NO: 10602

SEQ ID NO: 10612 - protein, 118 aa, Homo sapiens
MASQSQGIQQLLQAEKRAAEKVADARKRKARRLKQAKEEAQMEVEQYRREREHEFQSKQQAAMGSQGNLSAEVEQATRRQVQGMQSSQQRNRERVLAQLLGMVCDVRPQVHPNYRISA

SEQ ID NO: 10613 - protein, 290 aa, Homo sapiens; identical to SEQ ID NO: 10602

SEQ ID NO: 10614 - protein, 335 aa, Homo sapiens
MGKVKVGVNGFGRIGRLVTRAAFNSGKVDIVAINDPFIDLNYMVYMFQYDSTHGKFHGTVKAENGKLVINGNPITIFQERDPSKIKWGDAGAEYVVESTGVFTTMEKAGAHLQGGAKRVIISAPSADAPMFVMGVNHEKYDNSLKIISNASCTTNCLAPLAKVIHDNFGIVEGLMTTVHAITATQKTVDGPSGKLWRDGRGALQNIIPASTGAAKAVGKVIPELNGKLTGMAFRVPTANVSVVDLTCRLEKPAKYDDIKKVVKQASEGPLKGILGYTEHQVVSSDFNSDTHSSTFDAGAGIALNDHFVKLISWYDNEFGYSNRVVDLMAHMASKE

SEQ ID NO: 10615 - protein, 214 aa, Homo sapiens
MGKVKVGVNGFGRIGRLVTRAAFNSGKVDIVAINDPFIDLNYMVYMFQYDSTHGKFHGTVKAENGKLVINGNPITIFQERDPSKIKWGDAGAEYVVESTGVFTTMEKAGAHLQGGAKRVIISAPSADAPMFVMGVNHEKYDNSLKIISNASCTTNCLAPLAKVIHDNFGIVEGLMTTVHAITATQKTVDGPSGKLWRDGRGALQNIIRCGQGHP

SEQ ID NO: 10616 - protein, 335 aa, Homo sapiens; identical to SEQ ID NO: 10614

SEQ ID NO: 10617 - protein, 525 aa, Homo sapiens
MSHLPMKLLRKKIEKRNLKLRQRNLKFQGASNLTLSETQNGDVSEETMGSRKVKKSKQKPMNVGLSETQNGGMSQEAVGNIKVTKSPQKSTVLTNGEAAMQSSNSESKKKKKKKRKMVNDAEPDTKKAKTENKGKSEEESAETTKETENNVEKPDNDEDESEVPSLPLGLTGAFEDTSFASLCNLVNENTLKAIKEMGFTNMTEIQHKSIRPLLEGRDLLAAAKTGSGKTLAFLIPAVELIVKLRFMPRNGTGVLILSPTRELAMQTFGVLKELMTHHVHTYGLIMGGSNRSAEAQKLGNGINIIVATPGRLLDHMQNTPGFMYKNLQCLVIDEADRILDVGFEEELKQIIKLLPTRRQTMLFSATQTRKVEDLARISLKKEPLYVGVDDDKANATVDGLEQGYVVCPSEKRFLLLFTFLKKNRKKKLMVFFSSCMSVKYHYELLNYIDLPVLAIHGKQKQNKRTTTFFQFCKMKASRKSEEVVVDLATRKPRKLRNPKSLNTLARNHLTAGSSLTEHMPSFHLE

SEQ ID NO: 10618 - protein, 670 aa, Homo sapiens
MSHLPMKLLRKKIEKRNLKLRQRNLKFQGASNLTLSETQNGDVSEETMGSRKVKKSKQKPMNVGLSETQNGGMSQEAVGNIKVTKSPQKSTVLTNGEAAMQSSNSESKKKKKKKRKMVNDAEPDTKKAKTENKGKSEEESAETTKETENNVEKPDNDEDESEVPSLPLGLTGAFEDTSFASLCNLVNENTLKAIKEMGFTNMTEIQHKSIRPLLEGRDLLAAAKTGSGKTLAFLIPAVELIVKLRFMPRNGTGVLILSPTRELAMQTFGVLKELMTHHVHTYGLIMGGSNRSAEAQKLGNGINIIVATPGRLLDHMQNTPGFMYKNLQCLVIDEADRILDVGFEEELKQIIKLLPTRRQTMLFSATQTRKVEDLARISLKKEPLYVGVDDDKANATVDGLEQGYVVCPSEKRFLLLFTFLKKNRKKKLMVFFSSCMSVKYHYELLNYIDLPVLAIHGKQKQNKRTTTFFQFCNADSGTLLCTDVAARGLDIPEVDWIVQYDPPDDPKEYIHRVGRTARGLNGRGHALLILRPEELGFLRYLKQSKVPLSEFDFSWSKISDIQSQLEKLIEKNYFLHKSAQEAYKSYIRAYDSHSLKQIFNVNNLNLPQVALSFGFKVPPFVDLNVNSNEGKQKKRGGGGGFGYQKTKKVEKSKIFKHISKKSSDSRQFSH

SEQ ID NO: 10619 - protein, 470 aa, Homo sapiens
MGQNLILNMNDHGFVVCAFNRTVSKVDDFLANEAKGTKVVGAQSLKEMVSKLKKPRRIILLVKAGQAVDDFIEKLVPLLDTGDIIIDGGNSEYRDTTRRCRDLKAKGILFVGSGVSGGEEGARYGPSLMPGGNKEAWPHIKTIFQGIAAKVGTGEPCCDWVGDEGAGHFVKMVHNGIEYGDMQLICEAYHLMKDVLGMAQDEMAQAFEDWNKTELDSFLIEITANILKFQDTDGKHLLPKIRDSAGQKGTGKWTAISALEYGVPVTLIGEAVFARCLSSLKDERIQASKKLKGPQKFQFDGDKKSFLEDIRKALYASKIISYAQGFMLLRQAATEFGWTLNYGGIALMWRGGCIIRSVFLGKIKDAFDRNPELQNLLLDDFFKSAVENCQDSWRRAVSTGVQAGIPMPCFTTALSFYDGYRHEMLPASLIQAQRDYFGAHTYELLAKPGQFIHTNWTGHGGTVSSSSYNA

SEQ ID NO: 10620 - protein, 419 aa, Homo sapiens [sequence omitted]

SEQ ID NO: 10621 - protein, 483 aa, Homo sapiens
MAQADIALIGLAVMGQNLILNMNDHGFVVCAFNRTVSKVDDFLANEAKGTKVVGAQSLKEMVSKLKKPRRIILLVKAGQAVDDFIEKLVPLLDTGDIIIDGGNSEYRDTTRRCRDLKAKGILFVGSGVSGGEEGARYGPSLMPGGNKEAWPHIKTIFQGIAAKVGTGEPCCDWVGDEGAGHFVKMVHNGIEYGDMQLICEAYHLMKDVLGMAQDEMAQAFEDWNKTELDSFLIEITANILKFQDTDGKHLLPKIRDSAGQKGTGKWTAISALEYGVPVTLIGEAVFARCLSSLKDERIQASKKLKGPQKFQFDGDKKSFLEDIRKALYASKIISYAQGFMLLRQAATEFGWTLNYGGIALMWRGGCIIRSVFLGKIKDAFDRNPELQNLLLDDFFKSAVENCQDSWRRAVSTGVQAGIPMPCFTTALSFYDGYRHEMLPASLIQAQRDYFGAHTYELLAKPGQFIHTNWTGHGGTVSSSSYNA

SEQ ID NO: 10622 - protein, 470 aa, Homo sapiens; identical to SEQ ID NO: 10619

SEQ ID NO: 10623 - protein, 215 aa, Homo sapiens
MSFPSFGRQSFYRNPVEEVVRFLDKKHPCRYRVYNLCSERAYDPKHFYNRVGRIMIDDHNVPTLHEMVVFTKEVNEWMAQDLENMVAIHCKGGKGRTRTMVCAFLIASDIFLTAEKAGIILEKGKEIKPTAKKFQGVETPSQNRYVGYFAQVKHLYNWNLSPRRILFIKRFIIYSIRGYVHDLKVQIVMEKKVVFSGTSLGNCSILHDITRQSIN

SEQ ID NO: 10624 - protein, 90 aa, Homo sapiens
KYISKPRYNNCPKRCPIWNNSIYYLRGIILSIFIIITLITLNIHFALASTIPIILLVFAACEAAVGLALLVSVSNIYSLDYVQNLSLLQC

SEQ ID NO: 10625 - protein, 326 aa, Homo sapiens [sequence omitted]

SEQ ID NO: 10626 - protein, 199 aa, Homo sapiens
MDLKQSHSVRLNDGHVMPMLGFGTYAPDHTPKSKAGEATEVAIDAGFRHIDAAFFYQNEEEVGKAIREKIADGPVKREDIFYTTELWTTFFRPELVRPALEGSLKKLQLDYVDLFIIHNPLAMKPGEELLPKDASGNIIFDTVDLRDTWEALEKCKEAGLTKSIGVSNFNHKLLELILNKPGLKYKPTCNQVECHPYLN

SEQ ID NO: 10627 - protein, 323 aa, Homo sapiens
MDPKYQRVELNDGHFMPVLGFGTYAPPEVPRNRAVEVTKLAIEAGFRHIDSAYLYNNEEQVGLAIRSKIADGSVKREDIFYTSKLWCTFFQPQMVQPALESSLKKLQLDYVDLYLLHFPMALKPGETPLPKDENGKVIFDTVDLSATWEVMEKCKDAGLAKSIGVSNFNCRQLEMILNKPGLKYKPVCNQVECHPYLNQSKLLDFCKSKDIVLVAHSALGTQRHKLWVDPNSPVLLEDPVLCALAKKHKRTPALIALRYQLQRGVVVLAKSYNEQRIRENIQVFEFQLTSEDMKVLDGLNRNYRYVVMDFLMDHPDYPFSDEY

SEQ ID NO: 10628 - protein, 323 aa, Homo sapiens; identical to SEQ ID NO: 10627

SEQ ID NO: 10629 - protein, 103 aa, Homo sapiens
MVNFRNVVDGQPFTNWYDNGSNQVAFGRGNRGFIVFNNDDWTFSLTLQTGLPAGTYCDVISGDKINGNCTGIKIYVSDDGKAHFSISNSAEDPFIAIHAESKL

SEQ ID NO: 10630 - protein, 375 aa, Homo sapiens
MSVSGLKAELKFLASIFDKNHERFRIVSWKLDELHCQFLVPQQGSPHSLPPPLTLHCNITESYPSSSPIWFVDSEDPNLTSVLERLEDTKNNNLLRQQLKWLICELCSLYNLPKHLDVEMLDQPLPTGQNGTTEEVTSEEEEEEEEMAEDIEDLDHYEMKEEEPISGKKSEDEGIEKENLAILEKIRKTQRQDHLNGAVSGSVQASDRLMKELRDIYRSQSYKTGIYSVELINDSLYDWHVKLQKVDPDSPLHSDLQILKEKEGIEYILLNFSFKDNFPFDPPFVRVVLPVLSGGYVLGGGALCMELLTKQGWSSAYSIESVIMQINATLVKGKARVQFGANKNQYNLARAQQSYNSIVQIHEKNGWYTPPKEDG

SEQ ID NO: 10631 - protein, 314 aa, Homo sapiens
MSVSGLKAELKFLASIFDKNHERFRIVSWKLDELHCQFLVPQQGSPHSLPPPLTLHCNITESYPSSSPIWFVDSEDPNLTSVLERLEDTKNNNLLRQQLKWLICELCSLYNLPKHLDVEMLDQPLPTGQNGTTEEVTSEEEEEEEEMAEDIEDLDHYEMKEEEPISGKKSEDEGIEKENLAILEKIRKTQRQDHLNGAVSGSVQASDRLMKELRDIYRSQSYKTGIYSVELINDSLYDWHVKLQKVDPDSPLHSDLQILKEKEGIEYILLNFSFKDNFPFDPPFVRVVLPVLSGGLVHPSKGRWLNMLTVVCLD

SEQ ID NO: 10632 - protein, 122 aa, Homo sapiens
MRGVGMRQAKGTDVGGHGYPTGTPTKGATNSVKDMARGSTNLKMVLDISENMLEIKSTVKALLYIQMDPDMKESGQMTCGTAMAYTTTSIMTPTLESGLLIKGMGKAPIYTRRRAVSMLAPG

SEQ ID NO: 10633 - protein, 309 aa, Homo sapiens
MSDLGSEELEEEGENDIGEYEGGRNEAGERHGRGRARLPNGDTYEGSYEFGKRHGQGIYKFKNGARYIGEYVRNKKHGQGTFIYPDGSRYEGEWANDLRHGHGVYYYINNDTYTGEWFAHQRHGQGTYLYAETGSKYVGTWVNGQQEGTAELIHLNHRYQGKFLNKNPVGPGKYVFDVGCEQHGEYRLTDMERGEEEEEEELVTVVPKWKATQITELALWTPTLPKKPTSTDGPGQDAPGAESAGEPGEEAQALLEGFEGEMDMRPGDEDADVLREESREYDQEEFRYDMDEGNINSEEEETRQSDLQD

SEQ ID NO: 10634 - protein, 298 aa, Homo sapiens [sequence omitted]

SEQ ID NO: 10635 - protein, 43 aa, Homo sapiens
MPSSIFLDHRVGHEEEGQQQHTCVYCGCQGQQVPDQTGCGKVL

SEQ ID NO: 10636 - protein, 246 aa, Homo sapiens [sequence omitted]

SEQ ID NO: 10637 - protein, 477 aa, Homo sapiens
MLEEEIYGANSPIWESGFTMPPSEGTQLVPRPASVSAAVVPSTPIFSPSMGGGSNSSLSLDSAGAEPMPGEKRTLPENLTLEDAKRLRVMGDIPMELVNEVMLTITDPAAMLGPETSLLSANAARDETARLEERRGIIEFHVIGNSLTPKANRRVLLWLVGLQNVFSHQLPRMPKEYIARLVFDPKHKTLALIKDGRVIGGICFRMFPTQGFTEIVFCAVTSNEQVKGYGTHLMNHLKEYHIKHNILYFLTYADEYAIGYFKKQGFSKDIKVPKSRYLGYIKDYEGATLMECELNPRIPYTELSHIIKKQKEVIIKKLIERKQAQIRKVYPGLSCFKEGVRQIPVESVPGIRETGWKPLGKEKGKELKDPDQLYTTLKNLLAQIKSHPSAWPFMEPVKKSEAPDYYEVIRFPIDLKTMTERLRSRYYVTRKLFVADLQRVIANCREYNPPDSEYCRCASALEKFFYFKLKEGGLIDK

SEQ ID NO: 10638 - protein, 837 aa, Homo sapiens
MAEPSQAPTPAPAAQPRPLQSPAPAPTPTPAPSPASAPIPTPTPAPAPAPAAAPAGSTGTGGPGVGSGGAGSGGDPARPGLSQQQRASQRKAQVRGLPRAKKLEKLGVFSACKANETCKCNGWKNPKPPTAPRMDLQQPAANLSELCRSCEHPLADHVSHLENVSEDEINRLLGMVVDVENLFMSVHKEEDTDTKQVYFYLFKLLRKCILQMTRPVVEGSLGSPPFEKPNIEQGVLNFVQYKFSHLAPRERQTMFELSKMFLLCLNYWKLETPAQFRQRSQAEDVATYKVNYTRWLCYCHVPQSCDSLPRYETTHVFGRSLLRSIFTVTRRQLLEKFRVEKDKLVPEKRTLILTHFPKFLSMLEEEIYGANSPIWESGFTMPPSEGTQLVPRPASVSAAVVPSTPIFSPSMGGGSNSSLSLDSAGAEPMPGEKRTLPENLTLEDAKRLRVMGDIPMELVNEVMLTITDPAAMLGPETSLLSANAARDETARLEERRGIIEFHVIGNSLTPKANRRVLLWLVGLQNVFSHQLPRMPKEYIARLVFDPKHKTLALIKDGRVIGGICFRMFPTQGFTEIVFCAVTSNEQVKGYGTHLMNHLKEYHIKHNILYFLTYADEYAIGYFKKQGFSKDIKVPKSRYLGYIKDYEGATLMECELNPRIPYTELSHIIKKQKEIIKKLIERKQAQIRKVYPGLSCFKEGVRQIPVESVPGIRETGWKPLGKEKGKELKDPDQLYTTLKNLLAQIKSHPSAWPFMEPVKKSEAPDYYEVIRFPIDLKTMTERLRSRYYVTRKLFVADLQRVIANCREYNPPDSEYCRCASALEKFFYFKLKEGGLIDK

SEQ ID NO: 10639 - protein, 213 aa, Homo sapiens
MAAPAVSGLSRQVRCFSTSVVRPFAKLVRPPVQVYGIEGRYATALYSAASKQNKLEQVEKELLRVAQILKEPKVAASVLNPYVKRSIKVKSLNDITAKERFSPLTTNLINLLAENGRLSNTQGVVSAFSTMMSVHRGEVPCTVTSASPLEEATLSELKTVLKSFLSQGQVLKLEAKTDPSILGGMIVRIGEKYVDMSVKTKIQKLGRAMREIV

SEQ ID NO: 10640 - protein, 158 aa, Homo sapiens
MAAPAVSGLSRQVRCFSTSVVRPFAKLVRPPVQVYGIEGRYATALYSAASKQNKLEQVEKELLRVAQILKEPKVAASVLNPYVKRSIKVKSLNDITAKERFSPLTTNLINLLAENGRLSNTQGVVSAFSTMMSVHRGEVPCTVTSASVSNGLLLLCLP

SEQ ID NO: 10641 - protein, 213 aa, Homo sapiens; identical to SEQ ID NO: 10639

SEQ ID NO: 10642 - protein, 83 aa, Homo sapiens
MMSVHRGEVPCTVTSASPLEEATLSELKTVLKSFLSQGQVLKLEAKTDPSILGGMIVRIGEKYVDMSVKTKIQKLGRAMREIV

SEQ ID NO: 10643 - protein, 108 aa, Homo sapiens
MILQRLFRFSSVIRSAVSVHLRRNIGVTAVAFNKELDPIQKLFVDKIREYKSKRQTSGGPVDASSEYQQELERELFKLKQMFGNADMNTFPTFKFEDPKFEVIEKPQA

SEQ ID NO: 10644 - protein, 114 aa, Homo sapiens [sequence omitted]

SEQ ID NO: 10645 - protein, 108 aa, Homo sapiens; identical to SEQ ID NO: 10643

SEQ ID NO: 10646 - protein, 63 aa, Homo sapiens
MILQRLFRFSSVIRSAVSVHLRRNIGVTAVAFNKELDPIQKLSISKSWRGSFLSSSKCLVMQT

SEQ ID NO: 10647 - protein, 583 aa, Homo sapiens
MAAAAVSESWPELELAERERRRELLLTGPGLEERVRAAGGQLPPRLFTLPLLHYLEVSGCGSLRAPGPGLAQGLPQLHSLVLRRNALGPGLSPELGPLPALRVLDLSGNALEALPPGQGLGPAEPPGLPQLQSLNLSGNRLRELPADLARCAPRLQSLNLTGNCLDSFPAELFRPGALPLLSELAAADNCLRELSPDIAHLASLKTLDLSNNQLSEIPAELADCPKLKEINFRGNKLRDKRLEKMVSGCQTRSILEYLRVGGRGGGKGKGRAEGSEKEESRRKRRERKQRREGGDGEEQDVGDAGRLLLRVLHVSENPVPLTVRVSPEVRDVRPYIVGAVVRGMDLQPGNALKRFLTSQTKLHEDLCEKRTAATLATHELRAVKGPLLYCARPPQDLKIVPLGRKEAKAKELVRQLQLEAEEQRKQKKRQSVSGLHRYLHLLDGNENYPCLVDADGDVISFPPITNSEKTKVKKTTSDLFLEVTSATSLQICKDVMDALILKMAEMKKYTLENKEEGSLSDTEADAVSGQLPDPTTNPSAGKDGPSLLVVEQVRVVDLEGSLKVVYPSKADLATAPPHVTVVR

SEQ ID NO: 10648 - protein, 583 aa, Homo sapiens; identical to SEQ ID NO: 10647

SEQ ID NO: 10649 - protein, 214 aa, Homo sapiens
MGRRPARCYRYCKNKPYPKSRFCRGVPDAKIRIFDLGRKKAKVDEFPLCGHMVSDEYEQLSSEALEAARICANKYMVKSCGKDGFHIRVRLHPFHVIRINKMLSCAGADRLQTGMRGAFGKPQGTVARVHIGQVIMSIRTKLQNKEHVIEALRRAKFKFPGRQKIHISKKWGFTKFNADEFEDMVAEKRLIPDGCGVKYIPSRGPLDKWRALHS

SEQ ID NO: 10650 - protein, 214 aa, Homo sapiens; identical to SEQ ID NO: 10649

SEQ ID NO: 10651 - protein, 214 aa, Homo sapiens; identical to SEQ ID NO: 10649

SEQ ID NO: 10652 - protein, 131 aa, Homo sapiens
MGCSKGPWRQAFQVDVHVSDLALPQCRLQTGMRGAFGKPQGTVARVHIGQVIMSIRTKLQNKEHVIEALRRAKFKFPGRQKIHISKKWGFTKFNADEFEDMVAEKRLIPDGCGVKYIPSRGPLDKWRALHS

SEQ ID NO: 10653 - protein, 216 aa, Homo sapiens
MGRRPARCYRYCKNKPYPKSRFCRGVPDAKIRIFDLGRKKAKVDEFPLCGHMVSDEYEQLSSEALEAARICANKYMVKSCGKDGFHIRVRLHPFHVIRINKMLSCAGADRSTSQRSGASPSSMLMNLKTWWLKSGSSQMAVGSSTSPVVALWTSGGPCTHEGFQCAAPLLILTNKFYFLSTYVFVSTFLTGKELPLGTFGSLPFHFRNRLTTQPCS

SEQ ID NO: 10654 - protein, 130 aa, Homo sapiens
MAAENNCGVEPPPCGGPVLGTDPMFYTSRLFFSLQYYCLFLRSRVGVEATVPSYLCLCPASSPHFRALDTLLGPLCAFSVLFPGDVPRALSDVKGSPGKTGAAASCVLQGAPDAFPLGLEVDLVPRARKS

SEQ ID NO: 10655 - protein, 445 aa, Homo sapiens
MMAAMATARVRMGPRCAQALWRMPWLPVFLSLAAAAAAAAAEQQVPLVLWSSDRDLWAPAADTHEGHITSDLQLSTYLDPALELGPRNVLLFLQDKNALDLAPSSLVLPAVDWYAVSTLTTYLQEKLGASPLHVDLATLRELKLNASLPALLLIRLPYTASSGLMAPREVLTGNDEVIGQVLSTLKSEDVPYTAALTAVRPSRVARDVAVVAGGLGRQLLQKQPVSPVIHPPVSYNDTAPRILFWAQNFSVAYKDQWEDLTPLTFGVQELNLTGSFWNDSFARLSLTYERLFGTTVTFKFILANRLYPVSARHWFTMERLEVHSNGSVAYFNASQVTGPSIYSFHCEYVSSLSKKGSLLVARTQPSPWQMMLQDFQIQAFNVMGEQFSYASDCASFFSPGIWMGLLTSLFMLFIFTYGLHMILSLKTMDRFDDHKGPTISLTQIV

SEQ ID NO: 10656 - protein, 470 aa, Homo sapiens
MMAAMATARVRMGPRCAQALWRMPWLPVFLSLAAAAAAAAAEQQVPLVLWSSDRDLWAPAADTHEGHITSDLQLSTYLDPALELGPRNVLLFLQDKLSIEDFTAYGGVFGNKQDSAFSNLENALDLAPSSLVLPAVDWYAVSTLTTYLQEKLGASPLHVDLATLRELKLNASLPALLLIRLPYTASSGLMAPREVLTGNDEVIGQVLSTLKSEDVPYTAALTAVRPSRVARDVAVVAGGLGRQLLQKQPVSPVIHPPVSYNDTAPRILFWAQNFSVAYKDQWEDLTPLTFGVQELNLTGSFWNDSFARLSLTYERLFGTTVTFKFILANRLYPVSARHWFTMERLEVHSNGSVAYFNASQVTGPSIYSFHCEYVSSLSKKGSLLVARTQPSPWQMMLQDFQIQAFNVMGEQFSYASDCASFFSPGIWMGLLTSLFMLFIFTYGLHMILSLKTMDRFDDHKGPTISLTQIV

SEQ ID NO: 10657 - protein, 220 aa, Homo sapiens [sequence omitted]

SEQ ID NO: 10658 - protein, 220 aa, Homo sapiens [sequence omitted]

SEQ ID NO: 10659 - protein, 470 aa, Homo sapiens
MATNIEQIFRSFVVSKFREIQQELSSGRNEGQLNGETNTPIEGNQAGDAAASARSLPNEEIVQKIEEVLSGVLDTELRYKPDKAQLLEIAKANAAAMCAKAGVPLPPNLKPAPPPTIEEKVAKKSGGATIEELTEKCKQIAQSKEDDDVIVNKPHVSDEEEEEPPFYHHPFKLSEPKPIFFNLNIAAAKPTPPKSQVTLTKEFPVSSGSQHRKKEADSVYGEWVPVEKNGEENKDDDNVFSSNLPSEPVDISTAMSERALAQKRLSENAFDLEAMSMLNRAQERIDAWAQLNSIPGQFTGSTGVQVLTQEQLANTGAQAWIKKDQFLRAAPVTGGMGAVLMRKMGWREGEGLGKNKEGNKEPILVDFKTDRKGLVAVGERAQKRSGNFSAAMKDLSGKHPVSALMEICPDHRKHFLFRVLINGSAYQPSFASPNKKHAKATAATVVLQAMGLVPKDLMANATCFRSASRR

SEQ ID NO: 10660 - protein, 2303 aa, Homo sapiens [sequence omitted]

SEQ ID NO: 10661 - protein, 2459 aa, Homo sapiens [sequence omitted]

SEQ ID NO: 10662 - protein, 1451 aa, Homo sapiens
MMSSYERSMMSYERSMMSPMAERSMMSAYERSMMSAYERSMMSPMAERSMMSAYERSMMSAYERSMMSPMADRSMMSMGADRSMMSSYSAADRSMMSSYSAADRSMMSSYTADRSMMSMAADSYTDSYTDTYTEAYMVPPLPPEEPPTMPPLPPEEPPMTPPLPPEEPPEGPALPTEQSALTAENTWPTEVPSSPSEESVSQPEPPVSQSEISEPSAVPTDYSVSASDPSVLVSEAAVTVPEPPPEPESSITLTPVESAVVAEEHEVVPERPVTCMVSETPAMSAEPTVLASEPPVMSETAETFDSMRASGHVASEVSTSLLVPAVTTPVLAESILEPPAMAAPESSAMAVLESSAVTVLESSTVTVLESSTVTVLEPSVVTVPEPPVVAEPDYVTIPVPVVSALEPSVPVLEPAVSVLQPSMIVSEPSVSVQESTVTVSEPAVTVSEQTQVIPTEVAIESTPMILESSIMSSHVMKGINLSSGDQNLAPEIGMQEIALHSGEEPHAEEHLKGDFYESEHGINIDLNINNHLIAKEMEHNTVCAAGTSPVGEIGEEKILPTSETKQRTVLDTYPGVSEADAGETLSSTGPFALEPDATGTSKGIEFTTASTLSLVNKYDVDLSLTTQDTEHDMVISTSPSGGSEADIEGPLPAKDIHLDLPSNNNLVSKDTEEPLPVKESDQTLAALLSPKESSGGEKEVPPPPKETLPDSGFSANIEDINEADLVRPLLPKDMERLTSLRAGIEGPLLASDVGRDRSAASPVVSSMPERASESSSEEKDDYEIFVKVKDTHEKSKKNKNRDKGEKEKKRDSSLRSRSKRSKSSEHKSRKRTSESRSRARKRSSKSKSHRSQTRSRSRSRRRRRSSRSRSKSRGRRSVSKEKRKRSPKHRSKSRERKRKRSSSRDNRKTVRARSRTPSRRSRSHTPSRRRRSRSVGRRRSFSISPSRRSRTPSRRSRTPSRRSRTPSRRSRTPSRRSRTPSRRSRTPSRRRRSRSVVRRRSFSISPVRLRRSRTPLRRRFSRSPIRRKRSRSSERGRSPKRLTDLDKAQLLEIAKANAAAMCAKAGVPLPPNLKPAPPPTIEEKVAKKSGGATIEELTEKCKQIAQSKEDDDVIVNKPHVSDEEEEEPPFYHHPFKLSEPKPIFFNLNIAAAKPTPPKSQVTLTKEFPVSSGSQHRKKEADSVYGEWVPVEKNGEENKDDDNVFSSNLPSEPVDISTAMSERALAQKRLSENAFDLEAMSMLNRAQERIDAWAQLNSIPGQFTGSTGVQVLTQEQLANTGAQAWIKKDQFLRAAPVTGGMGAVLMRKMGWREGEGLGKNKEGNKEPILVDFKTDRKGLVAVGERAQKRSGNFSAAMKDLSGKHPVSALMEICNKRRWQPPEFLLVHDSGPDHRKHFLFRVLINGSAYQPSFASPNKKHAKATAATVVLQAMGLVPKDLMANATCFRSASRR

SEQ ID NO: 10663 - protein, 2392 aa, Homo sapiens
MATNIEQIFRSFVVSKFREIQQELSSGRNEGQLNGETNTPIEGNQAGDAAASARSLPNEEIVQKIEEVLSGVLDTELRYKPDLKEGSRKSRCVSVQTDPTDEIPTKKSKKHKKHKNKKKKKKKEKEKKYKRQPEESESKTKSHDDGNIDLESDSFLKFDSEPSAVALELPTRAFGPSETNESPAVVLEPPVVSMEVSEPHILETLKPATKTAELSVVSTSVISEQSEQSVAVMPEPSMTKILDSFAAAPVPTTTLVLKSSEPVVTMSVEYQMKSVLKSVESTSPEPSKIMLVEPPVAKVLEPSETLVVSSETPTEVYPEPSTSTTMDFPESSAIEALRLPEQPVDVPSEIADSSMTRPQELPELPKTTALELQESSVASAMELPGPPATSMPELQGPPVTPVLELPGPSATPVPELPGPLSTPVPELPGPPATAVPELPGPSVTPVPQLSQELPGLPAPSMGLEPPQEVPEPSVMAQELPGLPLVTAAVELPEQPAVTVAMELTEQPVTTTELEQPVGMTTVEHPGHPEVTTATGLLGQPEATMVLELPGQPVATTALELPGQPSVTGVPELPGLPSATRALELSGQPVATGALELPGPLMAAGALEFSGQSGAAGALELLGQPLATGVLELPGQPGAPELPGQPVATVALEISVQSVVTTSELSTMTVSQSLEVPSTTALESYNTVAQELPTTLVGETSVTVGVDPLMAPESHILASNTMETHILASNTMDSQMLASNTMDSQMLASNTMDSQITMDSQMLATSSMDSQMLATSSMDSQMLATSSMDSQMLATSSMDSQMLATSTMDSQMLATSTMDSQMLATSSMDSQMLASGTMDSQMLASGTMDAQMLASGTMDAQMLASSTQDSAMLGSKSPDPYRLAQDPYRLAQDPYRLGHDPYRLGHDAYRLGQDPYRLGHDPYRLTPDPYRMSPRPYRIAPRSYRIAPRPYRLAPRPLMLASRRSMMMSYAAERSMMSSYERSMMSYERSMMSPMAERSMMSAYERSMMSAYERSMMSPMAERSMMSAYERSMMSAYERSMMSPMADRSMMSMGADRSMMSSYSAADRSMMSSYSAADRSMMSSYTADRSMMSMAADSYTDSYTDTYTEAYMVPPLPPEEPPTMPPLPPEEPPMTPPLPPEEPPEGPALPTEQSALTAENTWPTEVPSSPSEESVSQPEPPVSQSEISEPSAVPTDYSVSASDPSVLVSEAAVTVPEPPPEPESSITLTPVESAVVAEEHEVVPERPVTCMVSETPAMSAEPTVLASEPPVMSETAETFDSMRASGHVASEVSTSLLVPAVTTPVLAESILEPPAMAAPESSAMAVLESSAVTVLESSTVTVLESSTVTVLEPSVVTVPEPPVVAEPDYVTIPVPVVSALEPSVPVLEPAVSVLQPSMIVSEPSVSVQESTVTVSEPAVTVSEQTQVIPTEVAIESTPMILESSIMSSHVMKGINLSSGDQNLAPEIGMQEIALHSGEEPHAEEHLKGDFYESEHGINIDLNINNHLIAKEMEHNTVCAAGTSPVGEIGEEKILPTSETKQRTVLDTYPGVSEADAGETLSSTGPFALEPDATGTSKGIEFTTASTLSLVNKYDVDLSLTTQDTEHDMVISTSPSGGSEADIEGPLPAKDIHLDLPSNNNLVSKDTEEPLPVKESDQTLAALLSPKESSGGEKEVPPPPKETLPDSGFSANIEDINEADLVRPLLPKDMERLTSLRAGIEGPLLASDVGRDRSAASPVVSSMPERASESSSEEKDDYEIFVKVKDTHEKSKKNKNRDKGEKEKKRDSSLRSRSKRSKSSEHKSRKRTSESRSRARKRSSKSKSHRSQTRSRSRSRRRRRSSRSRSKSRGRRSVSKEKRKRSPKHRSKSRERKRKRSSSRDNRKTVRARSRTPSRRSRSHTPSRRRRSRSVGRRRSFSISPSRRSRTPSRRSRTPSRRSRTPSRRSRTPSRRSRTPSRRSRTPSRRRRSRSVVRRRSFSISPVRLRRSRTPLRRRFSRSPIRRKRSRSSERGRSPKRLTDLDKAQLLEIAKANAAAMCAKAGVPLPPNLKPAPPPTIEEKVAKKSGGATIEELTEKCKQIAQSKEDDDVIVNKPHVSDEEEEEPPFYHHPFKLSEPKPIFFNLNIAAAKPTPPKSQVTLTKEFPVSSGSQHRKKEADSVYGEWVPVEKNGEENKDDDNVFSSNLPSEPVDISTAMSERALAQKRLSENAFDLEAMSMLNRAQERIDAWAQLNSIPGQFTGSTGVQVLTQEQLANTGAQAWIKKDQFLRAAPVTGGMGAVLMRKMGWREGEGLGKNKEGNKEPILVDFKTDRKGLVAVGERAQKRSGNFSAAMKDLSGKHPVSALMEICNKRRWQPPEFLLVHDSGPDHRKHFLFRVLRNGALTRPNCMFFLNRY

SEQ ID NO: 10664 - protein, 2108 aa, Homo sapiens [sequence omitted]

SEQ ID NO: 10665 - protein, 2386 aa, Homo sapiens
MATNIEQIFRSFVVSKFREIQQELSSGRNEGQLNGETNTPIEGNQAGDAAASARSLPNEEIVQKIEEVLSGVLDTELRYKPDLKEGSRKSRCVSVQTDPTDEIPTKKSKKHKKHKNKKKKKKKEKEKKYKRQPEESESKTKSHDDGNIDLESDSFLKFDSEPSAVALELPTRAFGPSETNESPAVVLEPPVVSMEVSEPHILETLKPATKTAELSVVSTSVISEQSEQSVAVMPEPSMTKILDSFAAAPVPTTTLVLKSSEPVVTMSVEYQMKSVLKSVESTSPEPSKIMLVEPPVAKVLEPSETLVVSSETPTEVYPEPSTSTTMDFPESSAIEALRLPEQPVDVPSEIADSSMTRPQELPELPKTTALELQESSVASAMELPGPPATSMPELQGPPVTPVLELPGPSATPVPELPGPLSTPVPELPGPPATAVPELPGPSVTPVPQLSQELPGLPAPSMGLEPPQEVPEPSVMAQELPGLPLVTAAVELPEQPAVTVAMELTEQPVTTTELEQPVGMTTVEHPGHPEVTTATGLLGQPEATMVLELPGQPVATTALELPGQPSVTGVPELPGLPSATRALELSGQPVATGALELPGPLMAAGALEFSGQSGAAGALELLGQPLATGVLELPGQPGAPELPGQPVATVALEISVQSVVTTSELSTMTVSQSLEVPSTTALESYNTVAQELPTTLVGETSVTVGVDPLMAPESHILASNTMETHILASNTMDSQMLASNTMDSQMLATSTMDSQMLATSSMDSQMLATSSMDSQMLATSSMDSQMLATSSMDSQMLATSTMDSQMLATSTMDSQMLATSSMDSQMLASGTMDSQMLASGTMDAQMLASGTMDAQMLASSTQDSAMLGSKSPDPYRLAQDPYRLAQDPYRLGHDPYRLGHDAYRLGQDPYRLGHDPYRLTPDPYRMSPRPYRIAPRSYRIAPRPYRLAPRPLMLASRRSMMMSYAAERSMMSSYERSMMSYERSMMSPMAERSMMSAYERSMMSAYERSMMSPMAERSMMSAYERSMMSAYERSMMSPMADRSMMSMGADRSMMSSYSAADRSMMSSYSAADRSMMSSYTADRSMMSMAADSYTDSYTDTYTEAYMVPPLPPEEPPTMPPLPPEEPPMTPPLPPEEPPEGPALPTEQSALTAENTWPTEVPSSPSEESVSQPEPPVSQSEISEPSAVPTDYSVSASDPSVLVSEAAVTVPEPPPEPESSITLTPVESAVVAEEHEVVPERPVTCMVSETPAMSAEPTVLASEPPVMSETAETFDSMRASGHVASEVSTSLLVPAVTTPVLAESILEPPAMAAPESSAMAVLESSAVTVLESSTVTVLESSTVTVLEPSVVTVPEPPVVAEPDYVTIPVPVVSALEPSVPVLEPAVSVLQPSMIVSEPSVSVQESTVTVSEPAVTVSEQTQVIPTEVAIESTPMILESSIMSSHVMKGINLSSGDQNLAPEIGMQEIALHSGEEPHAEEHLKGDFYESEHGINIDLNINNHLIAKEMEHNTVCAAGTSPVGEIGEEKILPTSETKQRTVLDTYPGVSEADAGETLSSTGPFALEPDATGTSKGIEFTTASTLSLVNKYDVDLSLTTQDTEHDMVISTSPSGGSEADIEGPLPAKDIHLDLPSNNNLVSKDTEEPLPVKESDQTLAALLSPKESSGGEKEVPPPPKETLPDSGFSANIEDINEADLVRPLLPKDMERLTSLRAGIEGPLLASDVGRDRSAASPVVSSMPERASESSSEEKDDYEIFVKVKDTHEKSKKNKNRDKGEKEKKRDSSLRSRSKRSKSSEHKSRKRTSESRSRARKRSSKSKSHRSQTRSRSRSRRRRRSSRSRSKSRGRRSVSKEKRKRSPKHRSKSRERKRKRSSSRDNRKTVRARSRTPSRRSRSHTPSRRRRSRSVGRRRSFSISPSRRSRTPSRRSRTPSRRSRTPSRRSRTPSRRSRTPSRRSRTPSRRRRSRSVVRRRSFSISPVRLRRSRTPLRRRFSRSPIRRKRSRSSERGRSPKRLTDLDKAQLLEIAKANAAAMCAKAGVPLPPNLKPAPPPTIEEKVAKKSGGATIEELTEKCKQIAQSKEDDDVIVNKPHVSDEEEEEPPFYHHPFKLSEPKPIFFNLNIAAAKPTPPKSQVTLTKEFPVSSGSQHRKKEADSVYGEWVPVEKNGEENKDDDNVFSSNLPSEPVDISTAMSERALAQKRLSENAFDLEAMSMLNRAQERIDAWAQLNSIPGQFTGSTGVQVLTQEQLANTGAQAWIKKDQFLRAAPVTGGMGAVLMRKMGWREGEGLGKNKEGNKEPILVDFKTDRKGLVAVGERAQKRSGNFSAAMKDLSGKHPVSALMEICNKRRWQPPEFLLVHDSGPDHRKHFLFRVLRNGALTRPNCMFFLNRY

SEQ ID NO: 10666 - protein, 2305 aa, Homo sapiens
MATNIEQIFRSFVVSKFREIQQELSSGRNEGQLNGETNTPIEGNQAGDAAASARSLPNEEIVQKIEEVLSGVLDTELRYKPVSLFLPSLECNGVISAHRNLRLPDLKEGSRKSRCVSVQTDPTDEIPTKKSKKHKKHKNKKKKKKKEKEKKYKRQPEESESKTKSHDDGNIDLESDSFLKFDSEPSAVALELPTRAFGPSETNESPAVVLEPPVVSMEVSEPHILETLKPATKTAELSVVSTSVISEQSEQSVAVMPEPSMTKILDSFAAAPVPTTTLVLKSSEPVVTMSVEYQMKSVLKSVESTSPEPSKIMLVEPPVAKVLEPSETLVVSSETPTEVYPEPSTSTTMDFPESSAIEALRLPEQPVDVPSEIADSSMTRPQELPELPKTTALELQESSVASAMELPGPPATSMPELQGPPVTPVLELPGPSATPVPELPGPLSTPVPELPGPPATAVPELPGPSVTPVPQLSQELPGLPAPSMGLEPPQEVPEPSVMAQELPGLPLVTAAVELPEQPAVTVAMELTEQPVTTTELEQPVGMTTVEHPGHPEVTTATGLLGQPEATMVLELPGQPVATTALELPGQPSVTGVPELPGLPSATRALELSGQPVATGALELPGPLMAAGALEFSGQSGAAGALELLGQPLATGVLELPGQPGAPELPGQPVATVALEISVQSVVTTSELSTMTVSQSLEVPSTTALESYNTVAQELPTTLVGETSVTVGVDPLMAPESHILASNTMETHILASNTMDSQMLASNTMDSQMLASNTMDSQMLASSTMDSQMLATSSMDSQMLATSSMDSQMLATSTMDSQMLATSSMDSQMLATSSMDSQMLATSSMDSQMLATSSMDSQMLATSTMDSQMLATSTMDSQMLATSSMDSQMLASGTMDSQMLASGTMDAQMLASGTMDAQMLASSTQDSAMLGSKSPDPYRLAQDPYRLAQDPYRLGHDPYRLGHDAYRLGQDPYRLGHDPYRLTPDPYRMSPRPYRIAPRSYRIAPRPYRLAPRPLMLASRRSMMMSYAAERSMMSSYERSMMSYERSMMSPMAERSMMSAYERSMMSAYERSMMSPMAERSMMSAYERSMMSAYERSMMSPMADRSMMSMGADRSMMSSYSAADRSMMSSYSAADRSMMSSYTADRSMMSMAADSYTDSYTDTYTEAYMVPPLPPEEPPTMPPLPPEEPPMTPPLPPEEPPEGPALPTEQSALTAENTWPTEVPSSPSEESVSQPEPPVSQSEISEPSAVPTDYSVSASDPSVLVSEAAVTVPEPPPEPESSITLTPVESAVVAEEHEVVPERPVTCMVSETPAMSAEPTVLASEPPVMSETAETFDSMRASGHVASEVSTSLLVPAVTTPVLAESILEPPAMAAPESSAMAVLESSAVTVLESSTVTVLESSTVTVLEPSVVTVPEPPVVAEPDYVTIPVPVVSALEPSVPVLEPAVSVLQPSMIVSEPSVSVQESTVTVSEPAVTVSEQTQVIPTEVAIESTPMILESSIMSSHVMKGINLSSGDQNLAPEIGMQEIALHSGEEPHAEEHLKGDFYESEHGINIDLNINNHLIAKEMEHNTVCAAGTSPVGEIGEEKILPTSETKQRTVLDTYPGVSEADAGETLSSTGPFALEPDATGTSKGIEFTTASTLSLVNKYDVDLSLTTQDTEHDMVISTSPSGGSEADIEGPLPAKDIHLDLPSNNNLVSKDTEEPLPVKESDQTLAALLSPKESSGGEKEVPPPPKETLPDSGFSANIEDINEADLVRPLLPKDMERLTSLRAGIEGPLLASDVGRDRSAASPVVSSMPERASESSSEEKDDYEIFVKVKDTHEKSKKNKNRDKGEKEKKRDSSLRSRSKRSKSSEHKSRKRTSESRSRARKRSSKSKSHRSQTRSRSRSRRRRRSSRSRSKSRGRRSVSKEKRKRSPKHRSKSRERKRKRSSSRDNRKTVRARSRTPSRRSRSHTPSRRRRSRSVGRRRSFSISPSRRSRTPSRRSRTPSRRSRTPSRRSRTPSRRSRTPSRRSRTPSRRRRSRSVVRRRSFSISPVRLRRSRTPLRRRFSRSPIRRKRSRSSERGRSPKRLTDLDKAQLLEIAKANAAAMCAKAGVPLPPNLKPAPPPTIEEKVAKKSGGATIEELTEKCKQIAQSKEDDDVIVNKPHVSDEEEEEPPFYHHPFKLSEPKPIFFNLNIAAAKPTPPKSQVTLTKEFPVSSGSQHRKKEADSVYGEWVPVEKNGEENKDDDNVFSSNLPSEPVDISTAMSERALAQKRLSENAFDLEAMSMLNRAQERVCSSFLKKIIIYHQPTHTNVPVLMSK

SEQ ID NO: 10667 - protein, 2054 aa, Homo sapiens
  VARIANT (1)...(2054): Xaa = Any Amino Acid
MATNIEQIFRSFVVSKFREIQQELSSGRNEGQLNGETNTPIEGNQAGDAAASARSLPNEEIVQKIEEVLSGVLDTELRYKPDLKEGSRKSRCVSVQTDPTDEIPTKKSKKHKKHKNKKKKKKKEKEKKYKRQPEESESKTKSHDDGNIDLESDSFLKFDSEPSAVALELPTRAFGPSETNESPAVVLEPPVVSMEVSEPHILETLKPATKTAELSVVSTSVISEQSEQSVAVMPEPSMTKILDSFAAAPVPTTTLVLKSSEPVVTMSVEYQMKSVLKSVESTSPEPSKIMLVEPPVAKVLEPSETLVVSSETPTEVYPEPSTSTTMDFPESSAIEALRLPEQPVDVPSEIADSSMTRPQELPELPKTTALELQESSVASAMELPGPPATSMPELQGPPVTPVLELPGPSATPVPELPGPLSTPVPELPGPPATAVPELPGPSVTPVPQLSQELPGLPAPSMGLEPPQEVPEPSVMAQELPGLPLVTAAVELPEQPAVTVAMELTEQPVTTTELEQPVGMTTVEHPGHPEVTTATGLLGQPEATMVLELPGQPVATTALELPGQPSVTGVPELPGLPSATRALELSGQPVATGALELPGPLMAAGALEFSGQSGAAGALELLGQPLATGVLELPGQPGAPELPGQPVATVALEISVQSVVTTSELSTMTVSQSLEVPSTTALESYNTVAQELPTTLVGETSVTVGVDPLMAPESHILASNTMETHILASNTMDSQMLASNTMDSQMLASNTMDSQMLASSTMDSQMLATSSMDSQMLATSSMDSQMLATSTMDSQMLATSSMDSQMLATSSMDSQMLATSSMDSQMLATSSMDSQMLATSTMDSQMLATSTMDSQMLATSSMDSQMLASGTMDSQMLASGTMDAQMLASGTMDAQMLASSTQDSAMLGSKSPDPYRLAQDPYRLAQDPYRLGHDPYRLGHDAYRLGQDPYRLGHDPYRLTPDPYRMSPRPYRIAPRSYRIAPRPYRLAPRPLMLASRRSMMMSYAAERSMMSSYERSMMSYERSMMSPMAERSMMSAYERSMMSAYERSMMSPMAERSMMSAYERSMMSAYERSMMSPMADRSMMSMGADRSMMSSYSAADRSMMSSYSAADRSMMSSYTADRSMMSMAADSYTDSYTDTYTEAYMVPPLPPEEPPTMPPLPPEEPPMTPPLPPEEPPEGPALPTEQSALTAENTWPTEVPSSPSEESVSQPEPPVSQSEISEPSAVPTDYSVSASDPSVLVSEAAVTVPEPPPEPESSITLTPVESAVVAEEHEVVPERPVTCMVSETPAMSAEPTVLASEPPVMSETAETFDSMRASGHVASEVSTSLLVPAVTTPVLAESILEPPAMAAPESSAMAVLESSAVTVLESSTVTVLESSTVTVLEPSVVTVPEPPVVAEPDYVTIPVPVVSALEPSVPVLEPAVSVLQPSMIVSEPSVSVQESTVTVSEPAVTVSEQTQVIPTEVAIESTPMILESSIMSSHVMKGINLSSGDQNLAPEIGMQEIALHSGEEPHAEEHLKGDFYESEHGINIDLNINNHLIAKEMEHNTVCAAGTSPVGEIGEEKILPTSETKQRTVLDTYPGVSEADAGETLSSTGPFALEPDATGTSKGIEFTTASTLSLVNKYDVDLSLTTQDTEHDMVISTSPSGGSEADIEGPLPAKDIHLDLPSNNNLVSKDTEEPLPVKESDQTLAALLSPKESSGGEKEVPPPPKETLPDSGFSANIEDINEADLVRPLLPKDMERLTSLRAGIEGPLLASDVGRDRSAASPVVSSMPERASESSSEEKDDYEIFVKVKDTHEKSKKNKNRDKGEKEKKRDSSLRSRSKRSKSSEHKSRKRTSESRSRARKRSSKSKSHRSQTRSRSRSRRRRRSSRSRSKSRGRRSVSKEKRKRSPKHRSKSRERKRKRSSSRDNRKTVRARSRTPSRRSRSHTPSRRRRSRSVGRRRSFSISPSRRSRTPSRRSRTPSRRSRTPSRRSRTPSRRSRTPSRRSRTPSRRRRSRSVVRRRSFSISPVRLRRSRTPLRRRFSRSPIRRKRSRSSERGRSPKRLTDLX

SEQ ID NO: 10668 - protein, 2426 aa, Homo sapiens [sequence omitted]

SEQ ID NO: 10669 - protein, 2325 aa, Homo sapiens [sequence omitted]

SEQ ID NO: 10670 - protein, 183 aa, Homo sapiens
MIKLFSLKQQKKEEESAGGTKGSSKKASAAQLRIQKDINELNLPKTCDISFSDPDDLLNFKLVICPDEGFYKSGKFVFSFKVGQGYPHDPPKVKCETMVYHPNIDLEGNVCLNILREDWKPVLTINSIIYGLQYLFLEPNPEDPLNKEAAEVLQNNRRLFEQNVQRSMRGGYIGSTYFERCLK

SEQ ID NO: 10671 - protein, 183 aa, Homo sapiens; identical to SEQ ID NO: 10670

SEQ ID NO: 10672 - protein, 485 aa, Homo sapiens
MNGPLVYAGFALQLGSISAGPGSVSPHLHVPWDLGMAGLSGQIQSPSREGGFAHALLLPSDLRSEQDPTDEDPCRGVGPALITTRWRSPRGRSRGRPSTGGGVVRGGRCDVCGKVFSQRSNLLRHQKIHTGERPFVCSECGRSFSRSSHLLRHQLTHTEERPFVCGDCGQGFVRSARLEEHRRVHTGEQPFRCAECGQSFRQRSNLLQHQRIHGDPPGPGAKPPAPPGAPEPPGPFPCSECRESFARRAVLLEHQAVHTGDKSFGCVECGERFGRRSVLLQHRRVHSGERPFACAECGQSFRQRSNLTQHRRIHTGERPFACAECGKAFRQRPTLTQHLRVHTGEKPFACPECGQRFSQRLKLTRHQRTHTGEKPYHCGECGLGFTQVSRLTEHQRIHTGERPFACPECGQSFRQHANLTQHRRIHTGERPYACPECGKAFRQRPTLTQHLRTHRREKPFACQDCGRRFHQSTKLIQHQRVHSAE

SEQ ID NO: 10673 - protein, 183 aa, Homo sapiens; identical to SEQ ID NO: 10670

SEQ ID NO: 10674 - protein, 775 aa, Homo sapiens
MILRCHPLHKRRFLPKAAAAEGTARGGRGRHWPQIPDLVPSMRPAVLGSPDRAPPEDEGPVMVKLEDSEEEGEAALWDPGPEAARLRFRCFRYEEATGPQEALAQLRELCRQWLRPEVRSKEQMLELLVLEQFLGALPPEIQARVQGQRPGSPEEAAALVDGLRREPGGPRRWVTVQVQGQEVLSEKMEPSSFQPLPETEPPTPEPGPKTPPRTMQESPLGLQVKEESEVTEDSDFLESGPLAATQESVPTLLPEEAQRCGTVLDQIFPHSKTGPEGPSWREHPRALWHEEAGGIFSPGFALQLGSISAGPGSVSPHLHVPWDLGMAGLSGQIQSPSREGGFAHALLLPSDLRSEQDPTDEDPCRGVGPALITTRWRSPRGRSRGRPSTGGGVVRGGRCDVCGKVFSQRSNLLRHQKIHTGERPFVCSECGRSFSRSSHLLRHQLTHTEERPFVCGDCGQGFVRSARLEEHRRVHTGEQPFRCAECGQSFRQRSNLLQHQRIHGDPPGPGAKPPAPPGAPEPPGPFPCSECRESFARRAVLLEHQAVHTGDKSFGCVECGERFGRRSVLLQHRRVHSGERPFACAECGQSFRQRSNLTQHRRIHTGERPFACAECGKAFRQRPTLTQHLRVHTGEKPFACPECGQRFSQRLKLTRHQRTHTGEKPYHCGECGLGFTQVSRLTEHQRIHTGERPFACPECGQSFRQHANLTQHRRIHTGERPYACPECGKAFRQRPTLTQHLRTHRREKPFACQDCGRRFHQSTKLIQHQRVHSAE

SEQ ID NO: 10675 - protein, 161 aa, Homo sapiens
MRPAVLGSPDRAPPEDEGPVMVKLEDSEEEGEAALWDPGPEAARLRFRCFRYEEATGPQEALAQLRELCRQWLRPEVTVQVQGQEVLSEKMEPSSFQPLPETEPPTPEPGPKTPPRTMQESPLGLQVKEESEVTEDSDFLESGPLAATQESVPTLLPEEAQ

SEQ ID NO: 10676 - protein, 996 aa, Homo sapiens
MILRCHPLHKRRFLPKAAAAEGTARGGRGRHWPQIPDLVPSMRPAVLGSPDRAPPEDEGPVMVKLEDSEEEGEAALWDPGPEAARLRFRCFRYEEATGPQEALAQLRELCRQWLRPEVRSKEQMLELLVLEQFLGALPPEIQARVQGQRPGSPEEAAALVDGLRREPGGPRRWVTVQVQGQEVLSEKMEPSSFQPLPETEPPTPEPGPKTPPRTMQESPLGLQVKEESEVTEDSDFLESGPLAATQESVPTLLPEEAQRCGTVLDQIFPHSKTGPEGPSWREHPRALWHEEAGGIFSPGFALQLGSISAGPGSVSPHLHVPWDLGMAGLSGQIQSPSREGGFAHALLLPSDLRSEQDPTDEDPCRGVGPALITTRWRSPRGRSRGRPSTGGGVVRGGRCDVCGKVFSQRSNLLRHQKIHTGERPFVCSECGRSFSRSSHLLRHQLTHTEERPFVCGDCGQGFVRSARLEEHRRVHTGEQPFRCAECGQSFRQRSNLLQHQRIHGDPPGPGAKPPAPPGAPEPPGPFPCSECRESFARRAVLLEHQAVHTGDKSFGCVECGERFGRRSVLLQHRRVHSGERPFACAECGQSFRQRSNLTQHRRIHTGERPFACAECGKAFRQRPTLTQHLRVHTGEKPFACPECGQRFSQRLKLTRHQRTHTGEKPYHCGECGLGFTQVSRLTEHQRIHTGERPFACPECGQSFRQHANLTQHRRIHTVGAGPGGPENSRIWPSAAERVRGAGPGRSRTTGAEAGRAVGAERSGAARQAGRVAAAAEEAAAAGPRSGGDAGGGGGPGGRGPGPRGGGSGGGGGRMIKLFSLKQQKKEEESAGGTKGSSKKASAAQLRIQKDINELNLPKTCDISFSDPDDLLNFKLVICPDEGFYKSGKFVFSFKVGQGYPHDPPKVKCETMVYHPNIDLEGNVCLNILREDWKPVLTINSIIYGLQYLFLEPNPEDPLNKEAAEVLQNNRRLFEQNVQRSMRGGYIGSTYFERCLK

SEQ ID NO: 10677 - protein, 996 aa, Homo sapiens; identical to SEQ ID NO: 10676

SEQ ID NO: 10678 - protein, 435 aa, Homo sapiens
MVIDGNSEDDLYMMDIFSEVMGRDKSATYIWKNNFHEKGPGETDESHKESSQHVTQLVLSNKSICIMQKWGGKREVMYTAFRALGRSVDYVQVCDSDTMLDPASSVEMVKVLEEDPMVGGVGGDVQILNKYDSWISFLSSVRYWMAFNIERACQSYFGCVQCISGPLGMYRNSLLHEFVEDWYNQEFMGNQCSFGDDRHLTNRVLSLGYATKYTARSKCLTETPIEYLRWLNQQTRWSKSYFREWLYNAMWFHKHHLWMTYEAIITGFFPFFLIATVIQLFYRGKIWNILLFLLTVQLVGLIKSSFASCLRGNIVMVFMSLYSVLYMSSLLPAKMFAIATINKAGWGTSGRKTIVVNFIGLIPVSVWFTILLGGVIFTIYKESKRPFSESKQTVLIVGTLLYACYWVMLLTLYVVLINKCGRRKKGQQYDMVLDV

SEQ ID NO: 10679 - protein, 1251 aa, Homo sapiens
MELSDVRCLTGSEELYTIHPTPPAGDGRSASRPQRLLWQTAVRHITEQRFIHGHRGGSGSGSGGSGKASDPAGGGPNHHAPQLSGDSALPLYSLGPGERAHSTCGTKVFPERSGSGSASGSGGGGDLGFLHLDCAPSNSDFFLNGGYSYRGVIFPTLRNSFKSRDLERLYQRYFLGQRRKSEVVMNVLDVLTKLTLLVLHLSLASAPMDPLKGILLGFFTGIEVVICALVVVRKDTTSHTYLQYSGVVTWVAMTTQILAAGLGYGLLGDGIGYVLFTLFATYSMLPLPLTWAILAGLGTSLLQVILQVVIPRLAVISINQVVAQAVLFMCMNTAGIFISYLSDRAQRQAFLETRRCVEARLRLETENQRQERLVLSVLPRFVVLEMINDMTNVEDEHLQHQFHRIYIHRYENVSILFADVKGFTNLSTTLSAQELVRMLNELFARFDRLAHEHHCLRIKILGDCYYCVSGLPEPRQDHAHCCVEMGLSMIKTIRYVRSRTKHDVDMRIGIHSGSVLCGVLGLRKWQFDVWSWDVDIANKLESGGIPGRIHISKATLDCLNGDYNVEEGHGKERNEFLRKHNIETYLIKQPEDSLLSLPEDIVKESVSSSDRRNSGATFTEGSWSPELPFDNIVGKQNTLAALTRNSINLLPNHLAQALHVQSGPEEINKRIEHTIDLRSGDKLRREHIKPFSLMFKDSSLEHKYSQMRDEVFKSNLVCAFIVLLFITAIQSLLPSSRVMPMTIQFSILIMLHSALVLITTAEDYKCLPLILRKTCCWINETYLARNVIIFASILINFLGAILNILWCDFDKSIPLKNLTFNSSAVFTDICSYPEYFVFTGVLAMVTCAVFLRLNSVLKLAVLLIMIAIYALLTETVYAGLFLRYDNLNHSGEDFLGTKEVSLLLMAMFLLAVFYHGQQLEYTARLDFLWRVQAKEEINEMKELREHNENMLRNILPSHVARHFLEKDRDNEELYSQSYDAVGVMFASIPGFADFYSQTEMNNQGVECLRLLNEIIADFDELLGEDRFQDIEKIKTIGSTYMAVSGLSPEKQQCEDKWGHLCALADFSLALTESIQEINKHSFNNFELRIGISHGSVVAGVIGAKKPQYDIWGKTVNLASRMDSTGVSGRIQVPEETYLILKDQGFAFDYRGEIYVKGISEQEGKIKTYFLLGRVQPNPFILPPRRLPGQYSLAAVVLGLVQSLNRQRQKQLLNENNNTGIIKGHYNRRTLLSPSGTEPGAQAEGTDKSDLP

SEQ ID NO: 10680 - protein, 1390 aa, Homo sapiens
MVVLRSSLELHNHSAASATGSLDLSSDFLSLEHIGRRRLRSAGAAQKKPAATTAKAGDGSSVKEVETYHRTRALRSLRKDAQNSSDSSFEKNVEITEQLANGRHFTRQLARQQADKKKEEHREDKVIPVTRSLRARNIVQSTEHLHEDNGDVEVRRSCRIRSRYSGVNQSMLFDKLITNTAEAVLQKMDDMKKMRRQRMRELEDLGVFNETEESNLNMYTRGKQKDIQRTDEETTDNQEGSVESSEEGEDQEHEDDGEDEDDEDDDDDDDDDDDDDDEDDEDEEDGEEENQKRYYLRQRKATVYYQAPLEKPRHQRKPNIFYSGPASPARPRYRLSSAGPRSPYCKRMNRRRHAIHSSDSTSSSSSEDEQHFERRRKRSRNRAINRCLPLNFRKDELKGIYKDRMKIGASLADVDPMQLDSSVRFDSVGGLSNHIAALKEMVVFPLLYPEVFEKFKIQPPRGCLFYGPPGTGKTLVARALANECSQGDKRVAFFMRKGADCLSKWVGESERQLRLLFDQAYQMRPSIIFFDEIDGLAPVRSSRQDQIHSSIVSTLLALMDGLDSRGEIVVIGATNRLDSIDPALRRPGRFDREFLFSLPDKEARKEILKIHTRDWNPKPLDTFLEELAENCVGYCGADIKSICAEAALCALRRRYPQIYTTSEKLQLDLSSINISAKDFEVAMQKMIPASQRAVTSPGQALSTVVKPLLQNTVDKILEALQRVFPHAEFRTNKTLDSDISCPLLESDLAYSDDDVPSVYENGLSQKSSHKAKDNFNFLHLNRNACYQPMSFRPRILIVGEPGFGQGSHLAPAVIHALEKFTVYTLDIPVLFGVSTTSPEETCAQVIREAKRTAPSIVYVPHIHVWWEIVGPTLKATFTTLLQNIPSFAPVLLLATSDKPHSALPEEVQELFIRDYGEIFNVQLPDKEERTKFFEDLILKQAAKPPISKKKAVLQALEVLPVAPPPEPRSLTAEEVKRLEEQEEDTFRELRIFLRNVTHRLAIDKRFRVFTKPVDPDEVPDYVTVIKQPMDLSSVISKIDLHKYLTVKDYLRDIDLICSNALEYNPDRDPGDRLIRHRACALRDTAYAIIKEELDEDFEQLCEEIQESRKKRGCSSSKYAPSYYHVMPKQNSTLVGDKRSDPEQNEKLKTPSTPVACSTPAQLKRKIRKKSNWYLGTIKKRRKISQAKDDSQNAIDHKIESDTEETQDTSVDHNETGNTGESSVEENEKQQNASESKLELRNNSNTCNIENELEDSRKTTACTELRDKIACNGDASSSQIIHISDENEGKEMCVLRMTRARRSQVEQQQLITVEKALAILSQPTPSLVVDHERLKNLLKTVVKKSQNYNIFQLENLYAVISQCIYRHRKDHDKTSLIQKMEQEVENFSCSR

SEQ ID NO: 10681 - protein, 602 aa, Homo sapiens
MSFRPRILIVGEPGFGQGSHLAPAVIHALEKFTVYTLDIPVLFGVSTTSPEETCAQVIREAKRTAPSIVYVPHIHVWWEIVGPTLKATFTTLLQNIPSFAPVLLLATSDKPHSALPEEVQELFIRDYGEIFNVQLPDKEERTKFFEDLILKQAAKPPISKKKAVLQALEVLPVAPPPEPRSLTAEEVKRLEEQEEDTFRELRIFLRNVTHRLAIDKRFRVFTKPVDPDEVPDYVTVIKQPMDLSSVISKIDLHKYLTVKDYLRDIDLICSNALEYNPDRDPGDRLIRHRACALRDTAYAIIKEELDEDFEQLCEEIQESRKKRGCSSSKYAPSYYHVMPKQNSTLVGDKRSDPEQNEKLKTPSTPVACSTPAQLKRKIRKKSNWYLGTIKKRRKISQAKDDSQNAIDHKIESDTEETQDTSVDHNETGNTGESSVEENEKQQNASESKLELRNNSNTCNIENELEDSRKTTACTELRDKIACNGDASSSQIIHISDENEGKEMCVLRMTRARRSQVEQQQLITVEKALAILSQPTPSLVVDHERLKNLLKTVVKKSQNYNIFQLENLYAVISQCIYRHRKDHDKTSLIQKMEQEVENFSCSR

SEQ ID NO: 10682 - protein, 1390 aa, Homo sapiens; identical to SEQ ID NO: 10680

SEQ ID NO: 10683 - protein, 641 aa, Homo sapiens [sequence omitted]

SEQ ID NO: 10684 - protein, 939 aa, Homo sapiens
MVVLRSSLELHNHSAASATGSLDLSSDFLSLEHIGRRRLRSAGAAQKKPAATTAKAGDGSSVKEVETYHRTRALRSLRKDAQNSSDSSFEKNVEITEQLANGRHFTRQLARQQADKKKEEHREDKVIPVTRSLRARNIVQSTEHLHEDNGDVEVRRSCRIRSRYSGVNQSMLFDKLITNTAEAVLQKMDDMKKMRRQRMRELEDLGVFNETEESNLNMYTRGKQKDIQRTDEETTDNQEGSVESSEEGEDQEHEDDGEDEDDEDDDDDDDDDDDDDDEDDEDEEDGEEENQKRYYLRQRKATVYYQAPLEKPRHQRKPNIFYSGPASPARPRYRLSSAGPRSPYCKRMNRRRHAIHSSDSTSSSSSEDEQHFERRRKRSRNRAINRCLPLNFRKDELKGIYKDRMKIGASLADVDPMQLDSSVRFDSVGGLSNHIAALKEMVVFPLLYPEVFEKFKIQPPRGCLFYGPPGTGKTLVARALANECSQGDKRVAFFMRKGADCLSKWVGESERQLRLLFDQAYQMRPSIIFFDEIDGLAPVRSSRQDQIHSSIVSTLLALMDGLDSRGEIVVIGATNRLDSIDPALRRPGRFDREFLFSLPDKEARKEILKIHTRDWNPKPLDTFLEELAENCVGYCGADIKSICAEAALCALRRRYPQIYTTSEKLQLDLSSINISAKDFEVAMQKMIPASQRAVTSPGQALSTVVKPLLQNTVDKILEALQRVFPHAEFRTNKTLDSDISCPLLESDLAYSDDDVPSVYENGLSQKSSHKAKDNFNFLHLNRNACYQPMSFRPRILIVGEPGFGQGSHLAPAVIHALEKFTVYTLDIPVLFGVSTTSPEETCAQVIREAKRTAPSIVYVPHIHVWWEIVGPTLKATFTTLLQNIPSFAPVLLLATSDKPHSALPEEVIYVGRYHYTFKKSCFYHNNHNLLKKFKCCRSE

SEQ ID NO: 10685 - protein, 537 aa, Homo sapiens
MPAPTQLFFPLIRNCELSRIYGTACYCHHKHLCCSSSYIPQSRLRYTPHPAYATFCRPKENWWQYTQGRRYASTPQKFYLTPPQVNSILKANEYSFKVPEFDGKNVSSILGFDSNQLPANAPIEDRRSAATCLQTRGMLLGVFDGHAGCACSQAVSERLFYYIAVSLLPHETLLEIENAVESGRALLPILQWHKHPNDYFSKEASKLYFNSLRTYWQELIDLNTGESTDIDVKEALINAFKRLDNDISLEAQVGDPNSFLNYLVLRVAFSGATACVAHVDGVDLHVANTGDSRAMLGVQEEDGSWSAVTLSNDHNAQNERELERLKLEHPKSEAKSVVKQDRLLGLLMPFRAFGDVKFKWSIDLQKRVIESGPDQLNDNEYTKFIPPNYHTPPYLTAEPEVTYHRLRPQDKFLVLATDGLWETMHRQDVVRIVGEYLTGMHHQQPIAVGGYKVTLGQMHGLLTERRTKMSSVFEDQNAATHLIRHAVGNNEFGTVDHERLSKMLSLPEELARMYRDDITIIVVQFNSHVVGAYQNQE

SEQ ID NO: 10686 - protein, 573 aa, Homo sapiens
MLSAPCCDDRRMCVCPGPRRIGIPVRSSSLPLFSDAMPAPTQLFFPLIRNCELSRIYGTACYCHHKHLCCSSSYIPQSRLRYTPHPAYATFCRPKENWWQYTQGRRYASTPQKFYLTPPQVNSILKANEYSFKVPEFDGKNVSSILGFDSNQLPANAPIEDRRSAATCLQTRGMLLGVFDGHAGCACSQAVSERLFYYIAVSLLPHETLLEIENAVESGRALLPILQWHKHPNDYFSKEASKLYFNSLRTYWQELIDLNTGESTDIDVKEALINAFKRLDNDISLEAQVGDPNSFLNYLVLRVAFSGATACVAHVDGVDLHVANTGDSRAMLGVQEEDGSWSAVTLSNDHNAQNERELERLKLEHPKSEAKSVVKQDRLLGLLMPFRAFGDVKFKWSIDLQKRVIESGPDQLNDNEYTKFIPPNYHTPPYLTAEPEVTYHRLRPQDKFLVLATDGLWETMHRQDVVRIVGEYLTGMHHQQPIAVGGYKVTLGQMHGLLTERRTKMSSVFEDQNAATHLIRHAVGNNEFGTVDHERLSKMLSLPEELARMYRDDITIIVVQFNSHVVGAYQNQE

SEQ ID NO: 10687 - protein, 448 aa, Homo sapiens
MADRGCPLEAAPLPAEVRESLAELELELSEGDITQKGYEKKRAKLLARYIPLIQGIDPSLQAENRIPGPSQTTAAAPKQQKSRPTASRDERFRSDVHTEAVQAALAKYKERKMPMPSKRRSVLVHSSVETYTPPDTSSASEDEGSLRRPGRLTSTPLQSHSSVEPWLDRVIQGSSTSSSASSTSSHPGGRPTTAPSAAATPGAAATTALAGLEAHTHIDLHSAPPDVTTGLVEHSYFERPQVASVRSVPRGCSGSMLETADGVPVNSRVSSKIQQLLNTLKRPKRPPLKEFFVDDFEELLEVQQPDPNQPKPEGSETSVLRGEPLTAGVPRPPSLLATLQRWGTTQPKSPCLTALDTTGKAVYTLTYGKLWSRSLKLAYTLLNKLTSKNEPLLKPGDRVALVFPNSDPVMFMVAFYGCLLAELVPVPIEVPLTRKVANPWLRSRVVRF

SEQ ID NO: 10688 - protein, 219 aa, Homo sapiens
  VARIANT (1)...(219): Xaa = Any Amino Acid
MADRGCPLEAAPLPAEVRESLAELELELSEGDITQKGYEKKRAKLLARYIPLIQGIDPSLQAENRIPGPSQTTAAAPKQQKSRPTASRDERFRSDVHTEAVQAALAKYKERKMPMPSKRRSVLVHSSVETYTPPDTSSASEDEGSLRRPGRLTSTPLQSHSSVEPWLDRVIQGSSTSSSASSTSSHPGGRPTTAPSAAATPGAAATTALAGLEAHTHIX

SEQ ID NO: 10689 - protein, 1569 aa, Homo sapiens [sequence omitted]

SEQ ID NO: 10690 - protein, 939 aa, Homo sapiens
MADRGCPLEAAPLPAEVRESLAELELELSEGDITQKGYEKKRAKLLARYIPLIQGIDPSLQAENRIPGPSQTTAAAPKQQKSRPTASRDERFRSDVHTEAVQAALAKYKERKMPMPSKRRSVLVHSSVETYTPPADLHSAPPDVTTGLVEHSYFERPQVASVRSVPRGCSGSMLETADGVPVNSRVSSKIQQLLNTLKRPKRPPLKEFFVDDFEELLEVQQPDPNQPKPEGSETSVLRGEPLTAGVPRPPSLLATLQRWGTTQPKSPCLTALDTTGKAVYTLTYGKLWSRSLKLAYTLLNKLTSKNEPLLKPGDRVALVFPNSDPVMFMVAFYGCLLAELVPVPIEVPLTRKDAGSQQVGFLLGSCGVFLALTTDACQKGLPKAQTGEVAAFKGWPPLSWLVIDGKHLAKPPKDWHPLAQDTGTGTAYIEYKTSKEGSTVGVTVSHASLLAQCRALTQACGYSEAETLTNVLDFKRDAGLWHGVLTSVMNRMHVVSVPYALMKANPLSWIQKVCFYKARAALVKSRDMHWSLLAQRGQRDVSLSSLRMLIVADGANPWSISSCDAFLNVFQSRGLRPEVICPCASSPEALTVAIRRPPDLGGPPPRKAVLSMNGLSYGVIRVDTEEKLSVLTVQDVGQVMPGANVCVVKLEGTPYLCKTDEVGEICVSSSATGTAYYGLLGITKNVFEAVPVTTGGAPIFDRPFTRTGLLGFIGPDNLVFIVGKLDGLMVTGVRRHNADDVVATALAVEPMKFVYRGRIAVFSVTVLHDDRIVLVAEQRPDASEEDSFQWMSRVLQAIDSIHQVGVYCLALVPANTLPKAPLGGIHISETKQRFLEGTLHPCNVLMCPHTCVTNLPKPRQKQPEVGPASMIVGNLVAGKRIAQASGRELAHLEDSDQARKFLFLADVLQWRAHTTPDHPLFLLLNAKGTVTSTATCVQL

SEQ ID NO: 10691 - protein, 99 aa, Homo sapiens
MCAHVHGGRRGAAQDCADPVLLQALQGPGPAGPRRKHHVRVQGQRGHLPPGEVPGAAVLESWLLAAWRPSFPVVNVPFCSRLIYFSFSGPLISHFHVTF

SEQ ID NO: 10692 - protein, 1024 aa, Homo sapiens [sequence omitted]

SEQ ID NO: 10693 - protein, 726 aa, Homo sapiens
MICGKEIEVMGVISPDDFSSGRCFQLGGGSTAISHSSQVARKCFSNPFKSVCKPSSKENRQNDFQNCKPRHDPYTPNSLVMPRPDKNHQWVFNKNCFPLVDVVIDPYLVYHLRPHQKEGIIFLYECVMGMRMNGRCGAILADEMGLGKTLQCISLIWTLQCQGPYGGKPVIKKTLIVTPGSLVNNWKKEFQKWLGSERIKIFTVDQDHKVEEFIKSIFYSVLIISYEMLLRSLDQIKNIKFDLLICDEGHRLKNSAIKTTTALISLSCEKRIILTGTPIQNDLQEFFALIDFVNPGILGSLSSYRKIYEEPIILSREPSASEEEKELGERRAAELTCLTGLFILRRTQEIINKYLPPKIENVVFCRPGALQIELYRKLLNSQVVRFCLQGLLENSPHLICIGALKKLCNHPCLLFNSIKEKECSSTCDKNEEKSLYKGLLSVFPADYNPLLFTEKESGKLQVLSKLLAVIHELRPTEKVVLVSNYTQTLNILQEVCKRHGYAYTRLDGQTPISQRQQIVDGFNSQHSSFFIFLLSSKAGGVGLNLIGGSHLILYDIDWNPATDIQAMSRVWRDGQKYPVHIYRLLTTGTIEEKIYQRQISKQGLCGAVVDLTKTSEHIQFSVEELKNLFTLHESSDCVTHDLLDCECTGEEVHTGDSLEKFIVSRDCQLGPHHQKSNSLKPLSMSQLKQWKHFSGDHLNLTDPFLERITENVSFIFQNITTQATGT

SEQ ID NO: 10694 - protein, 499 aa, Homo sapiens
MLLRSLDQIKNIKFDLLICDEGHRLKNSAIKTTTALISLSCEKRIILTGTPIQNDLQEFFALIDFVNPGILGSLSSYRKIYEEPIILSREPSASEEEKELGERRAAELTCLTGLFILRRTQEIINKYLPPKIENVVFCRPGALQIELYRKLLNSQVVRFCLQGLLENSPHLICIGALKKLCNHPCLLFNSIKEKECSSTCDKNEEKSLYKGLLSVFPADYNPLLFTEKESGKLQVLSKLLAVIHELRPTEKVVLVSNYTQTLNILQEVCKRHGYAYTRLDGQTPISQRQQIVDGFNSQHSSFFIFLLSSKAGGVGLNLIGGSHLILYDIDWNPATDIQAMSRVWRDGQKYPVHIYRLLTTGTIEEKIYQRQISKQGLCGAVVDLTKTSEHIQFSVEELKNLFTLHESSDCVTHDLLDCECTGEEVHTGDSLEKFIVSRDCQLGPHHQKSNSLKPLSMSQLKQWKHFSGDHLNLTDPFLERITENVSFIFQNITTQATGT

SEQ ID NO: 10695 - protein, 299 aa, Homo sapiens
MVGKARSSNFTLSEKLDLLKLVKPYVKILEEHTNKHSVIVEKNRCWDIIAVNYNAIGVDRPPRTAQGLRTLYKRLKEYAKQELLQQKETQSDFKSNISEPTKKVMEMIPQISSFCLVRDRNHIQSANLDEEAQAGTSSLQVMLDHHPVAITVEVKQEEDIKPPPPLVLNSQQSDTLEQREEHELVHVMERSLSPSLSSVDMRMTSSPSSIPRRDDFFRHESGEHFRSLLGYDPQILQMLKEEHQIILENQKNFGLYVQEKRDGLKRRQQLEEELLRAKIEVEKLKAIRLRHDLPEYNSL

SEQ ID NO: 10696 - protein, 910 aa, Homo sapiens
MRRSAAPSQLQGNSFKKPKFIPPGRSNPGLNEEITKLNPDIKLFEGVAINNTFLPSQNDLRICSLNLPSEESTREINNRDNCSGKYCFEAPTLATLDPPHTVHSAPKEVAVSKEQEEKSDSLVKYFSVVWCKPSKKKHKKWEGDAVLIVKGKSFILKNLEGKDIGRGIGYKFKELEKIEEGQTLMICGKEIEVMGVISPDDFSSGRCFQLGGGSTAISHSSQVARKCFSNPFKSVCKPSSKENRQNDFQNCKPRHDPYTPNSLVMPRPDKNHQWVFNKNCFPLVDVVIDPYLVYHLRPHQKEGIIFLYECVMGMRMNGRCGAILADEMGLGKTLQCISLIWTLQCQGPYGGKPVIKKTLIVTPGSLVNNWKKEFQKWLGSERIKIFTVDQDHKVEEFIKSIFYSVLIISYEMLLRSLDQIKNIKFDLLICDEGHRLKNSAIKTTTALISLSCEKRIILTGTPIQNDLQEFFALIDFVNPGILGSLSSYRKIYEEPIILSREPSASEEEKELGERRAAELTCLTGLFILRRTQEIINKYLPPKIENVVFCRPGALQIELYRKLLNSQVVRFCLQGLLENSPHLICIGALKKLCNHPCLLFNSIKEKECSSTCDKNEEKSLYKGLLSVFPADYNPLLFTEKESGKLQVLSKLLAVIHELRPTEKVVLVSNYTQTLNILQEVCKRHGYAYTRLDGQTPISQRQQIVDGFNSQHSSFFIFLLSSKAGGVGLNLIGGSHLILYDIDWNPATDIQAMSRVWRDGQKYPVHIYRLLTTGTIEEKIYQRQISKQGLCGAVVDLTKTSEHIQFSVEELKNLFTLHESSDCVTHDLLDCECTGEEVHTGDSLEKFIVSRDCQLGPHHQKSNSLKPLSMSQLKQWKHFSGDHLNLTDPFLERITENVSFIFQNITTQATGT

SEQ ID NO: 10697 - protein, 185 aa, Homo sapiens
MAVHQWLDIPKKWNKIKLVVTQEDVELAYQEAMMNMARLNGTAAGLMHTFNAHAATDIKGFGIWGHVQNLAKQQRNEVSFVIHNLPVLAKMAAASKACGNMFGLMHRTCPETSGGLLICLPHQQAARFCAEIKSPKYGEGHQAWIIGIVEKGNCTARIIDKPWIIEVAPQVATQNMNPTRGHLLI

SEQ ID NO: 10698 - protein, 50 aa, Homo sapiens [sequence omitted]

SEQ ID NO: 10699 - protein, 131 aa, Homo sapiens
  VARIANT (1)...(131): Xaa = Any Amino Acid
MRNKNLRYEAATSDTYRKGKNNDNTRPAPPPKSCCCELRLQKRTHIVADKTQARRMFESQSALSLVPVTSYVQLPGPIPYSDCRLRTEDAPLLSLHFDLLFPLKTRRPAFPKTAWPWLCTLFTTDQNSMVX

SEQ ID NO: 10700 - protein, 922 aa, Homo sapiens [sequence omitted]

SEQ ID NO: 10701 - protein, 818 aa, Homo sapiens [sequence omitted]

SEQ ID NO: 10702 - protein, 915 aa, Homo sapiens [sequence omitted]

SEQ ID NO: 10703 - protein, 870 aa, Homo sapiens [sequence omitted]

SEQ ID NO: 10704 - protein, 863 aa, Homo sapiens [sequence omitted]

SEQ ID NO: 10705 - protein, 649 aa, Homo sapiens
MASVSALTEELDSITSELHAVEIQIQELTERQQELIQKKKVLTKKIKQCLEDSDAGASNEYDSSPAAWNKEDFPWSGKVKDILQNVFKLEKFRPLQLETINVTMAGKEVFLVMPTGGGKSLCYQLPALCSDGFTLVICPLISLMEDQLMVLKQLGISATMLNASSSKEHVKWVHAEMVNKNSELKLIYVTPEKIAKSKMFMSRLEKAYEARRFTRIAVDEVHCCSQWGHDFRPDYKALGILKRQFPNASLIGLTATATNHVLTDAQKILCIEKCFTFTASFNRPNLYYEVRQKPSNTEDFIEDIVKLINGRYKGQSGIIYCFSQKDSEQVTVSLQNLGIHAGAYHANLEPEDKTTVHRKWSANEIQVVVATVAFGMGIDKPDVRFVIHHSMSKSMENYYQESGRAGRDDMKADCILYYGFGDIFRISSMVVMENVGQQKLYEMVSYCQNISKCRRVLMAQHFDEVWNSEACNKMCDNCCKDSAFERKNITEYCRDLIKILKQAEELNEKLTPLKLIDSWMGKGAAKLRVAGVVAPTLPREDLEKIIAHFLIQQYLKEDYSFTAYATISYLKIGPKANLLNNEAHAITMQVTKSTQNSFRAESSQTCHSEQGDKKMEEKNSGNFQKKAANMLQQSGSKNTGAKKRKIDDA

SEQ ID NO: 10706 - protein, 649 aa, Homo sapiens; identical to SEQ ID NO: 10705

SEQ ID NO: 10707 - protein, 649 aa, Homo sapiens; identical to SEQ ID NO: 10705

SEQ ID NO: 10708 - protein, 649 aa, Homo sapiens; identical to SEQ ID NO: 10705

SEQ ID NO: 10709 - protein, 601 aa, Homo sapiens [sequence omitted]

SEQ ID NO: 10710 - protein, 609 aa, Homo sapiens [sequence omitted]

SEQ ID NO: 10711 - protein, 562 aa, Homo sapiens
MMMPVVDPVVREKQLQQELLLIQQQQQIQKQLLIAEFQKQHENLTRQHQAQLQEHIKLQQELLAIKQQQELLEKEQKLEQQRQEQEVERHRREQQLPPLRGKDRGRERAVASTEVKQKLQEFLLSKSATKDTPTNGKNHSVSRHPKLWYTAAHHTSLDQSSPPLSGTSPSYKYTLPGAQDAKDDFPLRKTASEPNLKVRSRLKQKVAERRSSPLLRRKDGNVVTSFKKRMFEVTESSVSSSSPGSGPSSPNNGPTGSVTENETSVLPPTPHAEQMVSQQRILIHEDSMNLLSLYTSPSLPNITLGLPAVPSQLNASNSLKEKQKCETQTLRQGVPLPGQYGGSIPASSSHPHVTLEGKPPNSSHQALLQHLLLKEQMRQQKLLVAGGVPLHPQSPLATKERISPGIRGTHKLPRHRPLNRTQSAPLPQSTLAQLVIQQQHQQFLEKQKQYQQQIHMNKLLSKSIEQLKQPGSHLEEAEEELQGDQAMQEDRAPSSGNSTRSDSSACVDDTLGQVGAVKVKEEPVDSDEDAQIQEMESGEQAAFMQQVIGKDLAPGFVIKVII

SEQ ID NO: 10712 - protein, 559 aa, Homo sapiens
MMMPVVDPVVREKQLQQELLLIQQQQQIQKQLLIAEFQKQHENLTRQHQAQLQEHIKELLAIKQQQELLEKEQKLEQQRQEQEVERHRREQQLPPLRGKDRGRERAVASTEVKQKLQEFLLSKSATKDTPTNGKNHSVSRHPKLWYTAAHHTSLDQSSPPLSGTSPSYKYTLPGAQDAKDDFPLRKTASEPNLKVRSRLKQKVAERRSSPLLRRKDGNVVTSFKKRMFEVTESSVSSSSPGSGPSSPNNGPTGSVTENETSVLPPTPHAEQMVSQQRILIHEDSMNLLSLYTSPSLPNITLGLPAVPSQLNASNSLKEKQKCETQTLRQGVPLPGQYGGSIPASSSHPHVTLEGKPPNSSHQALLQHLLLKEQMRQQKLLVAGGVPLHPQSPLATKERISPGIRGTHKLPRHRPLNRTQSAPLPQSTLAQLVIQQQHQQFLEKQKQYQQQIHMNKLLSKSIEQLKQPGSHLEEAEEELQGDQAMQEDRAPSSGNSTRSDSSACVDDTLGQVGAVKVKEEPVDSDEDAQIQEMESGEQAAFMQQVIGKDLAPGFVIKVII

SEQ ID NO: 10713 - protein, 593 aa, Homo sapiens
MHSMISSVDVKSEVPVGLEPISPLDLRTDLRMMMPVVDPVVREKQLQQELLLIQQQQQIQKQLLIAEFQKQHENLTRQHQAQLQEHIKLQQELLAIKQQQELLEKEQKLEQQRQEQEVERHRREQQLPPLRGKDRGRERAVASTEVKQKLQEFLLSKSATKDTPTNGKNHSVSRHPKLWYTAAHHTSLDQSSPPLSGTSPSYKYTLPGAQDAKDDFPLRKTASEPNLKVRSRLKQKVAERRSSPLLRRKDGNVVTSFKKRMFEVTESSVSSSSPGSGPSSPNNGPTGSVTENETSVLPPTPHAEQMVSQQRILIHEDSMNLLSLYTSPSLPNITLGLPAVPSQLNASNSLKEKQKCETQTLRQGVPLPGQYGGSIPASSSHPHVTLEGKPPNSSHQALLQHLLLKEQMRQQKLLVAGGVPLHPQSPLATKERISPGIRGTHKLPRHRPLNRTQSAPLPQSTLAQLVIQQQHQQFLEKQKQYQQQIHMNKLLSKSIEQLKQPGSHLEEAEEELQGDQAMQEDRAPSSGNSTRSDSSACVDDTLGQVGAVKVKEEPVDSDEDAQIQEMESGEQAAFMQQVIGKDLAPGFVIKVII

SEQ ID NO: 10714 - protein, 1011 aa, Homo sapiens
MHSMISSVDVKSEVPVGLEPISPLDLRTDLRMMMPVVDPVVREKQLQQELLLIQQQQQIQKQLLIAEFQKQHENLTRQHQAQLQEHIKELLAIKQQQELLEKEQKLEQQRQEQEVERHRREQQLPPLRGKDRGRERAVASTEVKQKLQEFLLSKSATKDTPTNGKNHSVSRHPKLWYTAAHHTSLDQSSPPLSGTSPSYKYTLPGAQDAKDDFPLRKTASEPNLKVRSRLKQKVAERRSSPLLRRKDGNVVTSFKKRMFEVTESSVSSSSPGSGPSSPNNGPTGSVTENETSVLPPTPHAEQMVSQQRILIHEDSMNLLSLYTSPSLPNITLGLPAVPSQLNASNSLKEKQKCETQTLRQGVPLPGQYGGSIPASSSHPHVTLEGKPPNSSHQALLQHLLLKEQMRQQKLLVAGGVPLHPQSPLATKERISPGIRGTHKLPRHRPLNRTQSAPLPQSTLAQLVIQQQHQQFLEKQKQYQQQIHMNKLLSKSIEQLKQPGSHLEEAEEELQGDQAMQEDRAPSSGNSTRSDSSACVDDTLGQVGAVKVKEEPVDSDEDAQIQEMESGEQAAFMQQPFLEPTHTRALSVRQAPLAAVGMDGLEKHRLVSRTHSSPAASVLPHPAMDRPLQPGSATGIAYDPLMLKHQCVCGNSTTHPEHAGRIQSIWSRLQETGLLNKCERIQGRKASLEEIQLVHSEHHSLLYGTNPLDGQKLDPRILLGDDSQKFFSSLPCGGLGVDSDTIWNELHSSGAARMAVGCVIELASKVASGELKNGFAVVRPPGHHAEESTAMGFCFFNSVAITAKYLRDQLNISKILIVDLDVHHGNGTQQAFYADPSILYISLHRYDEGNFFPGSGAPNEVGTGLGEGYNINIAWTGGLDPPMGDVEYLEAFRTIVKPVAKEFDPDMVLVSAGFDALEGHTPPLGGYKVTAKCFGHLTKQLMTLADGRVVLALEGGHDLTAICDASEACVNALLGNELEPLAEDILHQSPNMNAVISLQKIIEIQSMSLKFS

SEQ ID NO: 10715 - protein, 590 aa, Homo sapiens
MHSMISSVDVKSEVPVGLEPISPLDLRTDLRMMMPVVDPVVREKQLQQELLLIQQQQQIQKQLLIAEFQKQHENLTRQHQAQLQEHIKELLAIKQQQELLEKEQKLEQQRQEQEVERHRREQQLPPLRGKDRGRERAVASTEVKQKLQEFLLSKSATKDTPTNGKNHSVSRHPKLWYTAAHHTSLDQSSPPLSGTSPSYKYTLPGAQDAKDDFPLRKTASEPNLKVRSRLKQKVAERRSSPLLRRKDGNVVTSFKKRMFEVTESSVSSSSPGSGPSSPNNGPTGSVTENETSVLPPTPHAEQMVSQQRILIHEDSMNLLSLYTSPSLPNITLGLPAVPSQLNASNSLKEKQKCETQTLRQGVPLPGQYGGSIPASSSHPHVTLEGKPPNSSHQALLQHLLLKEQMRQQKLLVAGGVPLHPQSPLATKERISPGIRGTHKLPRHRPLNRTQSAPLPQSTLAQLVIQQQHQQFLEKQKQYQQQIHMNKLLSKSIEQLKQPGSHLEEAEEELQGDQAMQEDRAPSSGNSTRSDSSACVDDTLGQVGAVKVKEEPVDSDEDAQIQEMESGEQAAFMQQVIGKDLAPGFVIKVII

SEQ ID NO: 10716 - protein, 945 aa, Homo sapiens [sequence omitted]

SEQ ID NO: 10717 - protein, 1030 aa, Homo sapiens [sequence omitted]

SEQ ID NO: 10718 - protein, 66 aa, Homo sapiens [sequence omitted]

SEQ ID NO: 10719 - protein, 405 aa, Homo sapiens
MKLGGMHSPFRARLEPEEPATEPSAFMERDAGSGLVMCLCEWPALLVSSTGWTEDEDFSILLAALESRGVAVHVPVPGHWVGQPGDSGGGGEFEQLTLDGHNLPSLVCITGSQEWFGARAMCSGGCGRAGGVLVSPVHNTDKRLGPPSGGPRPAGCKCRAVRQGSGCTHPCGSRGSWDASRRARMGPDWSCRGVELLGKGSLLAGSVLGLGPLGRVRDGSMAVSALLCEGKGPLTEYYSCLIHQKHFQHIQEGWAWGWGTVAQVWEGSGFGRYRDDVSNSVASPSEMVLLCLRLFPRLIFPNGESWLGPDASLELHLPASRSVDLGVCLHTFSSGLDLPMKVVDMFGCYLPACAVNFKCLNELVKHEENGLVFEDSEELAAQLQMLFSNFPDPAGKLNQFRKNLR

SEQ ID NO: 10720 - protein, 91 aa, Homo sapiens
CVSASGQPCWSAAQAGQVCTTPGTLGLEDEDFSILLAALEKFEQLTLDGHNLPSLVCITGKGPLTEYYSCLIHQKHFQHIQVCTPWLEAED

SEQ ID NO: 10721 - protein, 115 aa, Homo sapiens
MAATGANAEKAESHNDCPVRLLNPNIAKMKEDILYHFNLTTSRHNFPALFGDVKFVCVGGSPSRMKAFIRCVGAELGLDCPGRDYPNICAGTDRYAMYKVGPVLSVSVWSPALWS

SEQ ID NO: 10722 - protein, 310 aa, Homo sapiens
MAATGANAEKAESHNDCPVRLLNPNIAKMKEDILYHFNLTTSRHNFPALFGDVKFVCVGGSPSRMKAFIRCVGAELGLDCPGRDYPNICAGTDRYAMYKVGPVLSVSHGMGIPSISIMLHELIKLLYYARCSNVTIIRIGTSGGIGLEPGTVVITEQAVDTCFKAEFEQIVLGKRVIRKTDLNKKLVQELLLCSAELSEFTTVVGNTMCTLDFYEGQGRLDGALCSYTEKDKQAYLEAAYAAGVRNIEMESSVFAAMCSACGLQAAVVCVTLLNRLEGDQISSPRNVLSEYQQRPQRLVSYFIKKKLSKA

SEQ ID NO: 10723 - protein, 310 aa, Homo sapiens; identical to SEQ ID NO: 10722

SEQ ID NO: 10724 - protein, 310 aa, Homo sapiens; identical to SEQ ID NO: 10722

SEQ ID NO: 10725 - protein, 310 aa, Homo sapiens; identical to SEQ ID NO: 10722

SEQ ID NO: 10726 - protein, 282 aa, Homo sapiens
MKEDILYHFNLTTSRHNFPALFGDVKFVCVGGSPSRMKAFIRCVGAELGLDCPGRDYPNICAGTDRYAMYKVGPVLSVSHGMGIPSISIMLHELIKLLYYARCSNVTIIRIGTSGGIGLEPGTVVITEQAVDTCFKAEFEQIVLGKRVIRKTDLNKKLVQELLLCSAELSEFTTVVGNTMCTLDFYEGQGRLDGALCSYTEKDKQAYLEAAYAAGVRNIEMESSVFAAMCSACGLQAAVVCVTLLNRLEGDQISSPRNVLSEYQQRPQRLVSYFIKKKLSKA

SEQ ID NO: 10727 - protein, 105 aa, Homo sapiens
MGDVEKGKKIFIMKCSQCHTVEKGGKHKTGPNLHGLFGRKTGQAPGYSYTAANKNKGIIWGEDTLMEYLENPKKYIPGTKMIFVGIKKKEERADLIAYLKKATNE

SEQ ID NO: 10728 - protein, 105 aa, Homo sapiens; identical to SEQ ID NO: 10727

SEQ ID NO: 10729 - protein, 105 aa, Homo sapiens; identical to SEQ ID NO: 10727

SEQ ID NO: 10730 - protein, 71 aa, Homo sapiens
MKNRRREEVFLSLQKRNQSQAQLPGSQNQFIHQAAPLPSFHLLATGRRCSKGFALRLREEAAGRTAGVPGF

SEQ ID NO: 10731 - protein, 71 aa, Homo sapiens; identical to SEQ ID NO: 10730

SEQ ID NO: 10732 - protein, 71 aa, Homo sapiens; identical to SEQ ID NO: 10730

SEQ ID NO: 10733 - protein, 71 aa, Homo sapiens; identical to SEQ ID NO: 10730

SEQ ID NO: 10734 - protein, 807 aa, Homo sapiens [sequence omitted]

SEQ ID NO: 10735 - protein, 783 aa, Homo sapiens [sequence omitted]

SEQ ID NO: 10736 - protein, 889 aa, Homo sapiens
MATASPRSDTSNNHSGRLQLQVTVSSAKLKRKKNWFGTAIYTEVVVDGEITKTAKSSSSSNPKWDEQLTVNVTPQTTLEFQVWSHRTLKADALLGKATIDLKQALLIHNRKLERVKEQLKLSLENKNGIAQTGELTVVLDGLVIEQENITNCSSSPTIEIQENGDALHENGEPSARTTARLAVEGTNGIDNHVPTSTLVQNSCCSYVVNGDNTPSSPSQVAARPKNTPAPKPLASEPADDTVNGESSSFAPTDNASVTGTPVVSEENALSPNCTSTTVEDPPVQEILTSSENNECIPSTSAELESEARSILEPDTSNSRSSSAFEAAKSRQPDGCMDPVRQQSGNANTETLPSGWEQRKDPHGRTYYVDHNTRTTTWERPQPLPPGWERRVDDRRRVYYVDHNTRTTTWQRPTMESVRNFEQWQSQRNQLQGAMQQFNQRYLYSASMLAAENDPYGPLPPGWEKRVDSTDRVYFVNHNTKTTQWEDPRTQGLQNEEPLPEGWEIRYTREGVRYFVDHNTRTTTFKDPRNGKSSVTKGGPQIAYERGFRWKLAHFRYLCQSNALPSHVKINVSRQTLFEDSFQQIMALKPYDLRRRLYVIFRGEEGLDYGGLAREWFFLLSHEVLNPMYCLFEYAGKNNYCLQINPASTINPDHLSYFCFIGRFIAMALFHGKFIDTGFSLPFYKRMLSKKLTIKDLESIDTEFYNSLIWIRDNNIEECGLEMYFSVDMEILGKVTSHDLKLGGSNILVTEENKDEYIGLMTEWRFSRGVQEQTKAFLDGFNEVVPLQWLQYFDEKELEVQFVKETDNEVRMRLLQFVTGTCRLPLGGFAELMGSNGPQKFCIEKVGKDTWLPRSHTCFNRLDLPPYKSYEQLKEKLLFAIEETEGFGQE

SEQ ID NO: 10737 - protein, 807 aa, Homo sapiens [sequence omitted]

SEQ ID NO: 10738 - protein, 472 aa, Homo sapiens [sequence omitted]

SEQ ID NO: 10739 - protein, 246 aa, Homo sapiens [sequence omitted]

SEQ ID NO: 10740 - protein, 521 aa, Homo sapiens
MGMMLRRSDEKPRFKSIVHAVQAGIFVERMYRRTSNMVGLSYPPAVIEALKDVDKWSFDVFSLNEASGDHALKFIFYELLTRYDLISRFKIPISALVSFVEALEVGYSKHKNPYHNLMHAADVTQTVHYLLYKTGVANWLTELEIFAIIFSAAIHDYEHTGTTNNFHIQTRSDPAILYNDRSVLENHHLSAAYRLLQDDEEMNILINLSKDDWREFRTLVIEMVMATDMSCHFQQIKAMKTALQQPEAIEKPKALSLMLHTADISHPAKAWDLHHRWTMSLLEEFFRQGDREAELGLPFSPLCDRKSTMVAQSQVGFIDFIVEPTFTVLTDMTEKIVSPLIDETSQTGGTGQRRSSLNSISSSDAKRSGVKTSGSEGSAPINNSVISVDYKSFKATWTEVVHINRERWRAKVPKEEKAKKEAEEKARLAAEEQQKEMEAKSQAEEGASGKAEKKTSGETKNQVNGTRANKSDNPRGKNSKAEKSSGEQQQNGDFKDGKNKTDKKDHSNIGNDSKKTDDSQE

SEQ ID NO: 10741 - protein, 596 aa, Homo sapiens
MGMMLRRSDEKPRFKSIVHAVQAGIFVERMYRRTSNMVGLSYPPAVIEALKDVDKWSFDVFSLNEASGDHALKFIFYELLTRYDLISRFKIPISALVSFVEALEVGYSKHKNPYHNLMHAADVTQTVHYLLYKTGVANWLTELEIFAIIFSAAIHDYEHTGTTNNFHIQTRSDPAILYNDRSVLENHHLSAAYRLLQDDEEMNILINLSKDDWREFRTLVIEMVMATDMSCHFQQIKAMKTALQQPEAIEKPKALSLMLHTADISHPAKAWDLHHRWTMSLLEEFFRQGDREAELGLPFSPLCDRKSTMVAQSQVGFIDFIVEPTFTVLTDMTEKIVSPLIDETSQTGGTGQRRSSLNSISSSDAKRSGVKTSGSEGSAPINNSVISVDYKSFKATWTEVVHINRERWRAKVPKEEKAKKEAEEKARLAAEEQQKEMEAKSQAEEGASGKAEKKTSGETKNQVNGTRANKSDNPRGKNSKAEKSSGEQQQNGDFKDGKNKTDKKDHSNIGNDSKKTDGTKQRSHGSPAPSTSSTCRLTLPVIKPPLRHFKRPAYASSSYAPSVSKKTDEHPARYKMLDQRIKMKKIQNISHNWNRK

SEQ ID NO: 10742 - protein, 74 aa, Homo sapiens
  VARIANT (1)...(74): Xaa = Any Amino Acid
ANEAGDKNARPLARFSRSKSQNCLWNSLIDGLTGNVKEKPRPTIVHDPRPPEEILADELPQLDSPEVLVKTSFX

SEQ ID NO: 10743 - protein, 596 aa, Homo sapiens; identical to SEQ ID NO: 10741

SEQ ID NO: 10744 - protein, 120 aa, Homo sapiens
MWYRAGTMALCDSSRQRLPWQACSGACHIDRCPQVHLAPSHRQGPLCIGTVSPPRDPTTARTPSRGASGPSPRRSRCSQWPRTACPQAWPGTSWQWGSRRRSRGCASASPAWEDRAAAEE

SEQ ID NO: 10745 - protein, 384 aa, Homo sapiens
MVVGESGLGKSTLINSLFLTDLYSPEYPGPSHRIKKTVQVEQSKVLIKEGGVQLLLTIVDTPGFGDAVDNSNCWQPVIDYIDSKFEDYLNAESRVNRRQMPDNRVQCCLYFIAPSGHGLKPLDIEFMKRLHEKVNIIPLIAKADTLTPEECQQFKKQIMKEIQEHKIKIYEFPETDDEEENKLVKKIKDRLPLAVVGSNTIIEVNGKRVRGRQYPWGVAEVENGEHCDFTILRNMLIRTHMQDLKDVTNNVHYENYRSRKLAAVTYNGVDNNKNKGQLTKSPLAQMEEERREHVAKMKKMEMEMEQVFEMKVKEKVQKLKDSEAELQRRHEQMKKNLEAQHKELEEKRRQFEDEKANWEAQQRILEQQNSSRTLEKNKKKGKIF

SEQ ID NO: 10746 - protein, 384 aa, Homo sapiens; identical to SEQ ID NO: 10745

SEQ ID NO: 10747 - protein, 258 aa, Homo sapiens [sequence omitted]

SEQ ID NO: 10748 - protein, 384 aa, Homo sapiens; identical to SEQ ID NO: 10745

SEQ ID NO: 10749 - protein, 434 aa, Homo sapiens
MPSETHAMLATLARVAALRRTCLFSGRGGGRGLWTGRPQSDMNNIKPLEGVKILDLTRVLAGPFATMNLGDLGAEVIKVERPGAGDDTRTWGPPFVGTESTYYLSVNRNKKSIAVNIKDPKGVKIIYCSITGYGQTGPISQRAGYDAVASAVSGLMHITGPENGDPVRPGVAMTDLATGLYAYGAIMAGLIQKYKTGKGLFIDCNLLSSQVACLSHIAANYLIGQKEAKRWGTAHGSIVPYQAFKTKDGYIVVGAGNNQQFATVCKILDLPELIDNSKYKTNHLRVHNRKELIKILSERFEEELTSKWLYLFEGSGVPYGPINNMKNVFAEPQNAVSGFQSLLHSLAHGPFLHLQGSARVLHNGLVMEMEHPTVGKISVPGPAVRYSKFKMSEARPPPLLGQHTTHILKEVLRYDDRAIGELLSAGVVDQHETH

SEQ ID NO: 10750 - protein, 195 aa, Homo sapiens [sequence omitted]

SEQ ID NO: 10751 - protein, 296 aa, Homo sapiens
MPSETHAMLATLARVAALRRTCLFSGRGGGRGLWTGRPQSDMNNIKPLEGVKILDLTRVLAGPFATMNLGDLGAEVIKVERPGAGDDTRTWGPPFVGTESTYYLSVNRNKKSIAVNIKDPKGVKIIKELAAVCDVFVENYVPGKLSAMGLGYEDIDEIAPHIIYCSITGYGQTGPISQRAGYDAVASAVSGLMHITGPENGDPVRPGVAMTDLATGLYAYGAIMAGLIQKYKTGKGLFIDCNLLSSQVACLSHIAANYLIGQKEAKRWGTAHGSIVPYQMRKRVCYFPEETQPVSG

SEQ ID NO: 10752 - protein, 522 aa, Homo sapiens
MLSVCVSAAVARDLTRKEGGIVKRTGTIVDVPVGEELLGRVVDALGNAIDGKGPMGSKTHKIIPRTSVWEPMPTGIKAVDSLVPIGRGQHELIIGDRRTGKTSIAIDTIINQKHFNDRSEEKKKLYCIYVAIGRKRSTVAQLVKRLTDADAVKYTTVVSAMASDAALLQYLAPYSDCSMGEYFRDDGKYTLVIYDDLSKQAVAYCQMSLLLHRTPWSTMKQAAGTMKLELAQDREVAAFAQFGSDLNAPTQQLLSRGVRLTELLKQGQYPPMVTEQQVAVICAGGENIEDIPKEVLTDCAHLVKANSTQGCKNNVNVVNTPRSNLKKTADVDVRQIGFHRQKDVKIVTMEKKRGFLAHIWNKEVQDLIRDYLEEGKKWWIGQNVMPLKKHQDNKYPADVAANGPPKPLSCTYLSRNFIRISSKGDKCLLKYYFICQTGDFLDGDAHYERNGNNSHLYQRHKKTKRGVAIARDKMPPDFQDHVIPGQEIKAKSFYSPVDSDETGDKIRYNSKRRHWRTGMLGL

SEQ ID NO: 10753 - protein, 376 aa, Homo sapiens
MGLLAFLKTQFVLHLLVGFVFVVSGLVINFVQLCTLALWPVSKQLYRRLNCRLAYSLWSQLVMLLEWWSCTECTLFTDQATVERFGKEHAVIILNHNFEIDFLCGWTMCERFGVLGSSKVLAKKELLYVPLIGWTWYFLEIVFCKRKWEEDRDTVVEGLRRLSDYPEYMWFLLYCEGTRFTETKHRVSMEVAAAKGLPVLKYHLLPRTKGFTTAVKCLRGTVAAVYDVTLNFRGNKNPSLLGILYGKKYEADMCVRRFPLEDIPLDEKEAAQWLHKLYQEKDALQEIYNQKGMFPGEQFKPARRPWTLLNFLSWATILLSPLFSFVLGVFASGSPLLILTFLGFVGAASFGVRRLIGVTEIEKGSSYGNQEFKKKE

SEQ ID NO: 10754 - protein, 127 aa, Homo sapiens
MQPLACNTSAPRRDVLLALALHLGSGFKRPARKACLPSFWKQHVPGRVPAPFSTELVPKPKASPLGPRGMGPATPLTPPWLCPIPLPWGRPGGCRHPAPYSCLSGPGCKNNFCVKDVTLICWSGVDT

SEQ ID NO: 10755 - protein, 376 aa, Homo sapiens; identical to SEQ ID NO: 10753

SEQ ID NO: 10756 - protein, 376 aa, Homo sapiens; identical to SEQ ID NO: 10753

SEQ ID NO: 10757 - protein, 1218 aa, Homo sapiens [sequence omitted]

SEQ ID NO: 10758 - protein, 1211 aa, Homo sapiens [sequence omitted]

SEQ ID NO: 10759 - protein, 1211 aa, Homo sapiens [sequence omitted]

SEQ ID NO: 10760 - protein, 375 aa, Homo sapiens
MMCQSEARQGPELRAAKWLHFPQLALRRRLGQLSCMSRPALKLRSWPLTVLYYLLPFGALRPLSRVGWRPVSRVALYKSVPTRLLSRAWGRLNQVELPHWLRRPVYSLYIWTFGVNMKEAAVEDLHHYRNLSEFFRRKLKPQARPVCGLHSVISPSDGRILNFGQVKNCEVEQVKGVTYSLESFLGPRMCTEDLPFPPAASCDSFKNQLVTREGNELYHCVIYLAPGDYHCFHSPTDWTVSHRRHFPGSLMSVNPGMARWIKELFCHNERVVLTGDWKHGFFSLTAVGATNVGSIRIYFDRDLHTNSPRHSKGSYNDFSFVTHTNREGVPMRKGEHLGEFNLGSTIVLIFEAPKDFNFQLKTGQKIRFGEALGSL

SEQ ID NO: 10761 - protein, 250 aa, Homo sapiens
MTRGGGGCLLGGGDPALPGSKPLLPFQISPSDGRILNFGQVKNCEVEQVKGVTYSLESFLGPRMCTEDLPFPPAASCDSFKNQLVTREGNELYHCVIYLAPGDYHCFHSPTDWTVSHRRHFPGSLMSVNPGMARWIKELFCHNERVVLTGDWKHGFFSLTAVGATNVGSIRIYFDRDLHTNSPRHSKGSYNDFSFVTHTNREGVPMRKGEHLGEFNLGSTIVLIFEAPKDFNFQLKTGQKIRFGEALGSL

SEQ ID NO: 10762 - protein, 375 aa, Homo sapiens; identical to SEQ ID NO: 10760

SEQ ID NO: 10763 - protein, 375 aa, Homo sapiens; identical to SEQ ID NO: 10760

SEQ ID NO: 10764 - protein, 375 aa, Homo sapiens; identical to SEQ ID NO: 10760

SEQ ID NO: 10765 - protein, 314 aa, Homo sapiens [sequence omitted]

SEQ ID NO: 10766 - protein, 375 aa, Homo sapiens; identical to SEQ ID NO: 10760

SEQ ID NO: 10767 - protein, 475 aa, Homo sapiens
MPTAWASGEKLRSSTPARWPPGWPLPPCSTARSRGLSVAVPGEIRGYELAHQRHGRLPWARLFQPSIQLARQGFPVGKGLAAALENKRTVIEQQPVLCEVFCRDRKVLREGERLTLPQLADTYETLAIEGAQAFYNGSLTAQIVKDIQAAGGIVTAEDLNNYRAELIEHPLNISLGDAVLYMPSAPLSGPVLALILNILKGYNFSRESVETPEQKGLTYHRIVEAFRFAYAKRTLLGDPKFVDVTEVVRNMTSEFFAAQLRAQISDDTTHPISYYKPEFYTPDDGGTAHLSVVAEDGSAVSATSTINLYFGSKVRSPVSGILFNNEMDDFSSPSITNEFGVPPSPANFIQPGKQPLSSMCPTIMVGQDGQVRMVVGAAGGTQITTATALAIIYNLWFGYDVKRAVEEPRLHNQLLPNVTTVERNIDQAVTAALETRHHHTQIASTFIAVVQAIVRTAGGWAAASDSRKGGEPAGY

SEQ ID NO: 10768 - protein, 568 aa, Homo sapiens
MKKKLVVLGLLAVVLVLVIVGLCLWLPSASKEPDNHVYTRAAVAADAKQCSKIGRDALRDGGSAVDAAIAALLCVGLMNAHSMGIGGGLFLTIYNSTTRKAEVINAREVAPRLAFATMFNSSEQSQKGGLSVAVPGEIRGYELAHQRHGRLPWARLFQPSIQLARQGFPVGKGLAAALENKRTVIEQQPVFEVFCRDRKVLREGERLTLPQLADTYETLAIEGAQAFYNGSLTAQIVKDIQAAGGIVTAEDLNNYRAELIEHPLNISLGDAVLYMPSAPLSGPVLALILNILKGYNFSRESVETPEQKGLTYHRIVEAFRFAYAKRTLLGDPKFVDVTEVVRNMTSEFFAAQLRAQISDDTTHPISYYKPEFYTPDDGGTAHLSVVAEDGSAVSATSTINLYFGSKVRSPVSGILFNNEMDDFSSPSITNEFGVPPSPANFIQPGKQPLSSMCPTIMVGQDGQVRMVVGAAGGTQITTATALAIIYNLWFGYDVKRAVEEPRLHNQLLPNVTTVERNIDQAVTAALETRHHHTQIASTFIAVVQAIVRTAGGWAAASDSRKGGEPAGY

SEQ ID NO: 10769 - protein, 569 aa, Homo sapiens [sequence omitted]

SEQ ID NO: 10770 - protein, 569 aa, Homo sapiens [sequence omitted]

SEQ ID NO: 10771 - protein, 366 aa, Homo sapiens
MKKKLVVLGLLAVVLVLVIVGLCLWLPSASKEPDNHVYTRAAVAADAKQCSKIGRDALRDGGSAVDAAIAALLCVGLMNAHSMGIGGGLFLTIYNSTTRKAEVINAREVAPRLAFATMFNSSEQSQKGGLSVAVPGEIRGYELAHQRHGRLPWARLFQPSIQLARQGFPVGKGLAAALENKRTVIEQQPVLCEVFCRDRKVLREGERLTLPQLADTYETLAIEGAQAFYNGSLTAQIVKDIQAAGGIVTAEDLNNYRAELIEHPLNISLGDAVLYMPSAPLSGPVLALILNILKGYNFSRESVETPEQKGLTYHRIVEAFRFAYAKRTLLGDPKFVDVTEASSGVSAGGPQHDLRVLRCPAPGPDL

SEQ ID NO: 10772 - protein, 252 aa, Homo sapiens
MTSEFFAAQLRAQISDDTTHPISYYKPEFYTPDDGGTAHLSVVAEDGSAVSATSTINLYFGSKVRSPVSGILFNNEMDDFSSPSITNEFGVPPSPANFIQPGKQPLSSMCPTIMVGQDGQVRMVVGAAGGTQITTATALVCVTPFLPGRAHPAQPPSHADHTPMPQAIIYNLWFGYDVKRAVEEPRLHNQLLPNVTTVERNIDQAVTAALETRHHHTQIASTFIAVVQAIVRTAGGWAAASDSRKGGEPAGY

SEQ ID NO: 10773 - protein, 568 aa, Homo sapiens
MKKKLVVLGLLAVVLVLVIVGLCLWLPSASKEPDNHVYTRAAVAADAKQCSKIGRDALRDGGSAVDAAIAALLCVGLMNAHSMGIGGGLFLTIYNSTTRGLSVAVPGEIRGYELAHQRHGRLPWARLFQPSIQLARQGFPVGKGLAAALENKRTVIEQQPVLCEVFCRDRKVLREGERLTLPQLADTYETLAIEGAQAFYNGSLTAQIVKDIQAAGGIVTAEDLNNYRAELIEHPLNISLGDAVLYMPSAPLSGPVLALILNILKGYNFSRESVETPEQKGLTYHRIVEAFRFAYAKRTLLGDPKPALGSRQVVRNMTSEFFAAQLRAQISDDTTHPISYYKPEFYTPDDGGTAHLSVVAEDGSAVSATSTINLYFGSKVRSPVSGILFNNEMDDFSSPSITNEFGVPPSPANFIQPGKQPLSSMCPTIMVGQDGQVRMVVGAAGGTQITTATALVCVTPFLPGRAHPAQPPSHADHTPMPQAIIYNLWFGYDVKRAVEEPRLHNQLLPNVTTVERNIDQAVTAALETRHHHTQIASTFIAVVQAIVRTAGGWAAASDSRKGGEPAGY

SEQ ID NO: 10774 - protein, 569 aa, Homo sapiens
MKKKLVVLGLLAVVLVLVIVGLCLWLPSASKEPDNHVYTRAAVAADAKQCSKIGRDALRDGGSAVDAAIAALLCVGLMNAHSMGIGGGLFLTIYNSTTRKAEVINAREVAPRLAFATMFNSSEQSQKGGLSVAVPGEIRGYELAHQRHGRLPWARLFQPSIQLARQGFPVGKGLAAALENKRTVIEQQPVLWYVFCRDRKVLREGERLTLPQLADTYETLAIEGAQAFYNGSLTAQIVKDIQAAGGIVTAEDLNNYRAELIEHPLNISLGDAVLYMPSAPLSGPVLALILNILKGYNFSRESVETPEQKGLTYHRIVEAFRFAYAKRTLLGDPKFVDVTEVVRNMTSEFFAAQLRAQISDDTTHPISYYKPEFYTPDDGGTAHLSVVAEDGSAVSATSTINLYFGSKVRSPVSGILFNNEMDDFSSPSITNEFGVPPSPANFIQPGKQPLSSMCPTIMVGQDGQVRMVVGAAGGTQITTATALAIIYNLWFGYDVKRAVEEPRLHNQLLPNVTTVERNIDQAVTAALETRHHHTQIASTFIAVVQAIVRTAGGWAAASDSRKGGEPAGY

SEQ ID NO: 10775 - protein, 557 aa, Homo sapiens
MKKKLVVLGLLAVVLVLVIVGLCLWLPSASKEPDNHVYTRAAVAADAKQCSKIGRDALRDGGSAVDAAIAALLCVGLMNAHSMGIGGKAEVINAREVAPRLAFATMFNSSEQSQKGGLSVAVPGEIRGYELAHQRHGRLPWARLFQPSIQLARQGFPVGKGLAAALENKRTVIEQQPVLCEVFCRDRKVLREGERLTLPQLADTYETLAIEGAQAFYNGSLTAQIVKDIQAAGGIVTAEDLNNYRAELIEHPLNISLGDAVLYMPSAPLSGPVLALILNILKGYNFSRESVETPEQKGLTYHRIVEAFRFAYAKRTLLGDPKFVDVTEVVRNMTSEFFAAQLRAQISDDTTHPISYYKPEFYTPDDGGTAHLSVVAEDGSAVSATSTINLYFGSKVRSPVSGILFNNEMDDFSSPSITNEFGVPPSPANFIQPGKQPLSSMCPTIMVGQDGQVRMVVGAAGGTQITTATALAIIYNLWFGYDVKRAVEEPRLHNQLLPNVTTVERNIDQAVTAALETRHHHTQIASTFIAVVQAIVRTAGGWAAASDSRKGGEPAGY

SEQ ID NO: 10776 - protein, 569 aa, Homo sapiens [sequence omitted]

SEQ ID NO: 10777 - protein, 354 aa, Homo sapiens
MKKKLVVLGLLAVVLVLVIVGLCLWLPSASKEPDNHVYTRAAVAADAKQCSKIGRDALRDGGSAVDAAIAALLCVGLMNAHSMGIGGKAEVINAREVAPRLAFATMFNSSEQSQKGGLSVAVPGEIRGYELAHQRHGRLPWARLFQPSIQLARQGFPVGKGLAAALENKRTVIEQQPVLCEVFCRDRKVLREGERLTLPQLADTYETLAIEGAQAFYNGSLTAQIVKDIQAAGGIVTAEDLNNYRAELIEHPLNISLGDAVLYMPSAPLSGPVLALILNILKGYNFSRESVETPEQKGLTYHRIVEAFRFAYAKRTLLGDPKFVDVTEASSGVSAGGPQHDLRVLRCPAPGPDL

SEQ ID NO: 10778 - protein, 569 aa, Homo sapiens [sequence omitted]

SEQ ID NO: 10779 - protein, 225 aa, Homo sapiens
MTSEFFAAQLRAQISDDTTHPISYYKPEFYTPDDGGTAHLSVVAEDGSAVSATSTINLYFGSKVRSPVSGILFNNEMDDFSSPSITNEFGVPPSPANFIQPGKQPLSSMCPTIMVGQDGQVRMVVGAAGGTQITTATALAIIYNLWFGYDVKRAVEEPRLHNQLLPNVTTVERNIDQAVTAALETRHHHTQIASTFIAVVQAIVRTAGGWAAASDSRKGGEPAGY

SEQ ID NO: 10780 - protein, 557 aa, Homo sapiens; identical to SEQ ID NO: 10775

SEQ ID NO: 10781 - protein, 569 aa, Homo sapiens [sequence omitted]

SEQ ID NO: 10782 - protein, 126 aa, Homo sapiens
MSIGVPIKVLHEAEGHIVTCETNTGEVYRGKLIEAEDNMNCQMSNITVTYRDGRVAQLEQVYIRGSKIRFLILPDMLKNAPMLKSMKNKNQGSGAGRGKAAILKAQVAARGRGRGMGRGNIFQKRR

SEQ ID NO: 10783 - protein, 225 aa, Homo sapiens; identical to SEQ ID NO: 10779

SEQ ID NO: 10784 - protein, 541 aa, Homo sapiens
MKKKLVVLGLLAVVLVLVIVGLCLWLPSASKEPDNHVYTRAAVAADAKQCSKIGRDALRDGGSAVDAAIAALLCVGLMNAHSMGIGGGLFLTIYNSTTRGLSVAVPGEIRGYELAHQRHGRLPWARLFQPSIQLARQGFPVGKGLAAALENKRTVIEQQPVLCEVFCRDRKVLREGERLTLPQLADTYETLAIEGAQAFYNGSLTAQIVKDIQAAGGIVTAEDLNNYRAELIEHPLNISLGDAVLYMPSAPLSGPVLALILNILKGYNFSRESVETPEQKGLTYHRIVEAFRFAYAKRTLLGDPKPALGSRQVVRNMTSEFFAAQLRAQISDDTTHPISYYKPEFYTPDDGGTAHLSVVAEDGSAVSATSTINLYFGSKVRSPVSGILFNNEMDDFSSPSITNEFGVPPSPANFIQPGKQPLSSMCPTIMVGQDGQVRMVVGAAGGTQITTATALAIIYNLWFGYDVKRAVEEPRLHNQLLPNVTTVERNIDQAVTAALETRHHHTQIASTFIAVVQAIVRTAGGWAAASDSRKGGEPAGY

SEQ ID NO: 10785 - protein, 569 aa, Homo sapiens [sequence omitted]

SEQ ID NO: 10786 - protein, 252 aa, Homo sapiens; identical to SEQ ID NO: 10772

SEQ ID NO: 10787 - protein, 569 aa, Homo sapiens [sequence omitted]

SEQ ID NO: 10788 - protein, 214 aa, Homo sapiens
MNVFRILGDLSHLLAMILLLGKIWRSKCCKGISGKSQILFALVFTTRYLDLFTNFISIYNTVMKVVFLLCAYVTVYMIYGKFRKTFDSENDTFRLEFLLVPVIGLSFLENYSFTLLEILWTFSIYLESVAILPQLFMISKTGEAETITTHYLFFLGLYRALYLANWIRRYQTENFYDQIAVVSGVVQTIFYCDFFYLYVTKVLKGKKLSLPMPI

SEQ ID NO: 10789 - protein, 214 aa, Homo sapiens; identical to SEQ ID NO: 10788

SEQ ID NO: 10790 - protein, 214 aa, Homo sapiens; identical to SEQ ID NO: 10788

SEQ ID NO: 10791 - protein, 234 aa, Homo sapiens
MEPHRVPHRAASSATFKQLHPQQVMRPQGEQEKMISRCQDEIAHWQKEGLWIPAKSLFSSGTTGFASALQSKQWGMGCNECTHPSCQHSLSMLGIGQCVECESGVLVLDPTSGPKWKVACNKCNVVAHCFENAHRVRVSADTCSVCEAALLDVDFNKAKSPLPGDETQHMGCVFCDPVFQELVELKHAASCHPMHRGGPGRRQGRGRGRARRPPGKPNPRRPKDKMSALAAYFV

SEQ ID NO: 10792 - protein, 506 aa, Homo sapiens
MKTVLMVAEKPSLAQSIAKILSRGSLSSHKGLNGACSVHEYTGTFAGQPVRFKMTSVCGHVMTLDFLGKYNKWDKVDPAELFSQAPTEKKEANPKLNMVKFLQVEGRGCDYIVLWLDCDKEGENICFEVNTDKDRSLLLDWDRVRVFDREIAQMFLNMTKLEKEAQVEATSRKEKAKQRPLALNTVEMLRVASSSLGMGPQHAMQTAERLYTQGYISYPRTETTHYPENFDLKGSLRQQANHPYWADTVKRLLAEGINRPRKGHDAGDHPPITPMKSATEAELGGDAWRLYEYITRHFIATVSHDCKYLQSTISFRIGPELFTCSGKTVLSPGHTTGPAFLLCAFMGRQTFYIVNPGALYIAGTDASIPVHINNICQRNYVTVESGRRLKPTNLGIVLVHGYYKIDAELVLPTIRSAVEKQLNLIAQGKADYRQVLGHTLDVFKRKFHYFVDSIAGRVCLWPAPHQRGVSLSARPVPGDPGPHVGPAPRSGLQASVGQVSDTSWLG

SEQ ID NO: 10793 - protein, 755 aa, Homo sapiens
MKTVLMVAEKPSLAQSIAKILSRGSLSSHKGLNGACSVHEYTGTFAGQPVRFKMTSVCGHVMTLDFLGKYNKWDKVDPAELFSQAPTEKKEANPKLNMVKFLQVEGRGCDYIVLWLDCDKEGENICFEVLDAVLPVMNKAHGGEKTVFRARFSSITDTDICNAMACLGEPDHNEALSVDARQELDLRIGCAFTSSLISFGPCQTPTLGFCVERHDKIQSFKPETYWVLQAKVNTDKDRSLLLDWDRVRVFDREIAQMFLNMTKLEKEAQVEATSRKEKAKQRPLALNTVEMLRMGPQHAMQTAERLYTQGYISYPRTETTHYPENFDLKGSLRQQANHPYWADTVKRLLAEGINRPRKGHDAGDHPPITPMKSATEAELGTALIPYPVCFQGGKGELRQHFIATVSHDCKYLQSTISFRIGPELFTCSGKTVLSPGHTTGPAFLLCAFMGRQTFYIVSGDGRPRSVPLEESLPTCQRGDAFPVGEVKMLEKQTNPPDYLTEAELITLMEKHGIGTDASIPVHINNICQRNYVTVESGRRLKPTNLGIVLVHGYYKIDAELVLPTIRSAVEKQLNLIAQGKADYRQVLGHTLDVFKRKFHYFVDSIAGMDELMEVSFSPLAATGKPLSRCGKCHRFMKYIQAKPSRLHCSHCDETYTLPQNGTIKLYKELRCPLDDFELVLWSSGSRGKSYPLCPYCYNHPPFRDMKKEVAEGSRGGNQRWQCEKGSTGHCWLRGCRKGPRAKPPTQSCRREARGW

SEQ ID NO: 10794 - protein, 862 aa, Homo sapiens
MKTVLMVAEKPSLAQSIAKILSRGSLSSHKGLNGACSVHEYTGTFAGQPVRFKMTSVCGHVMTLDFLGKYNKWDKVDPAELFSQAPTEKKEANPKLNMVKFLQVEGRGCDYIVLWLDCDKEGENICFEVLDAVLPVMNKAHGGEKTVFRARFSSITDTDICNAMACLGEPDHNEALSVDARQELDLRIGCAFTRFQTKYFQGKYGDLDSSLISFGPCQTPTLGFCVERHDKIQSFKPETYWVLQAKVNTDKDRSLLLDWDRVRVFDREIAQMFLNMTKLEKEAQVEATSRKEKAKQRPLALNTVEMLRVASSSLGMGPQHAMQTAERLYTQGYISYPRTETTHYPENFDLKGSLRQQANHPYWADTVKRLLAEGINRPRKGHDAGDHPPITPMKSATEAELGGDAWRLYEYITRHFIATVSHDCKYLQSTISFRIGPELFTCSGKTVLSPGFTEVMPWQSVPLEESLPTCQRGDAFPVGEVKMLEKQTNPPDYLTEAELITLMEKHGIGTDASIPVHINNICQRNYVTVESGRRLKPTNLGIVLVHGYYKIDAELVLPTIRSAVEKQLNLIAQGKADYRQVLGHTLDVFKRKFHYFVDSIAGMDELMEVSFSPLAATGKPLSRCGKCHRFMKYIQAKPSRLHCSHCDETYTLPQNGTIKLYKELRCPLDDFELVLWSSGSRGKSYPLCPYCYNHPPFRDMKKGMGCNECTHPSCQHSLSMLGIGQCVECESGVLVLDPTSGPKWKVACNKCNVVAHCFENAHRVRVSADTCSVCEAALLDVDFNKAKSPLPGDETQHMGCVFCDPVFQELVELKHAASCHPMHRGGPGRRQGRGRGRARRPPGKPNPRRPKDKMSALAAYFV

SEQ ID NO: 10795 - protein, 862 aa, Homo sapiens; identical to SEQ ID NO: 10794

SEQ ID NO: 10796 - protein, 447 aa, Homo sapiens
MQASLPVQEYLFMPFDQAHKQYETARHLPPPLYVLFVQATAYGQACDKTLSVAIEGSVDEAKALFKPPEDSQDDESDSDAEEEQTTKRRRPTLGVQLDDKRKEMLKRHPLSVMLDLKCKDDSVLHLTFYYLMNLNIMTVKAKVTTAMELITPISAGDLLSPDSVLSCLYPGDHGKKTPNPANQYQFDKVGILTLSDYVLELGHPYLWVQKLGGLHFPKEQPQQTVIADHSLSASHMETTMKLLKTRVQSRLALHKQFASLEHGIVPVTSDCQYLFPAKVVSRLVKWVTVAHEDYMELHFTKDIVDAGLAGDTNLYYMALIERGTAKLQAAVVLNPGYSSIPPVFQLCLNWKGEKTNSNDDNIRAMEGEVNVCYKELCGPWPSHQLLTNQLQRLCVLLDVYLETESHDDSVEGPKEFPQEKMCLRLFRGPSRMKPFKYNHPQGFFSHR

SEQ ID NO: 10797 - protein, 802 aa, Homo sapiens
MCSSSPSMQSLSCPPSFLQSHHATTSLGGLRAELPASTPRFRSAAPSLLPVLYGARASFAPPPAVAYSRCQVLGAVRCSALFKITYASSEATVPGHLHHLPQWNASCVKAHNNPCGGTTMSSESSKKRKPKVIRSDGAPAEGKRNRSDTEQEGKYYSEEAEVDLRDPGRDYELYKYTCQELQRLMAEIQDLKSRGGKDVAIEIEERRIQSCVHFMTLKKLNRLAHIRLKKGRDQTHEAKQKVDAYHLQLQNLLYEVMHLQKEITKCLEFKSKHEEIDLVSLEEFYKEAPPDISKAEVTMGDPHQQTLARLDWELEQRKRLAEKYRECLSNKEKILKEIEVKKEYLSSLQPRLNSIMQASLPVQEYLFMPFDQAHKQYETARHLPPPLYVLFVQATAYGQACDKTLSVAIEGSVDEAKALFKPPEDSQDDESDSDAEEEQTTKRRRPTLGVQLDDKRKEMLKRHPLSVMLDLKCKDDSVLHLTFYYLMNLNIMTVKAKVTTAMELITPISAGDLLSPDSVLSCLYPGDHGKKTPNPANQYQFDKVGILTLSDYVLELGHPYLWVQKLGGLHFPKEQPQQTVIADHSLSASHMETTMKLLKTRVQSRLALHKQFASLEHGIVPVTSDCQYLFPAKVVSRLVKWVTVAHEDYMELHFTKDIVDAGLAGDTNLYYMALIERGTAKLQAAVVLNPGYSSIPPVFQLCLNWKGEKTNSNDDNIRAMEGEVNVCYKELCGPWPSHQLLTNQLQRLCVLLDVYLETESHDDSVEGPKEFPQEKMCLRLFRGPSRMKPFKYNHPQGFFSHR

SEQ ID NO: 10798 - protein, 683 aa, Homo sapiens
MSSESSKKRKPKVIRSDGAPAEGKRNRSDTEQEGKYYSEEAEVDLRDPGRDYELYKYTCQELQRLMAEIQDLKSRGGKDVAIEIEERRIQSCVHFMTLKKLNRLAHIRLKKGRDQTHEAKQKVDAYHLQLQNLLYEVMHLQKEITKCLEFKSKHEEIDLVSLEEFYKEAPPDISKAEVTMGDPHQQTLARLDWELEQRKRLAEKYRECLSNKEKILKEIEVKKEYLSSLQPRLNSIMQASLPVQEYLFMPFDQAHKQYETARHLPPPLYVLFVQATAYGQACDKTLSVAIEGSVDEAKALFKPPEDSQDDESDSDAEEEQTTKRRRPTLGVQLDDKRKEMLKRHPLSVMLDLKCKDDSVLHLTFYYLMNLNIMTVKAKVTTAMELITPISAGDLLSPDSVLSCLYPGDHGKKTPNPANQYQFDKVGILTLSDYVLELGHPYLWVQKLGGLHFPKEQPQQTVIADHSLSASHMETTMKLLKTRVQSRLALHKQFASLEHGIVPVTSDCQYLFPAKVVSRLVKWVTVAHEDYMELHFTKDIVDAGLAGDTNLYYMALIERGTAKLQAAVVLNPGYSSIPPVFQLCLNWKGEKTNSNDDNIRAMEGEVNVCYKELCGPWPSHQLLTNQLQRLCVLLDVYLETESHDDSVEGPKEFPQEKMCLRLFRGPSRMKPFKYNHPQGFFSHR

SEQ ID NO: 10799 - protein, 284 aa, Homo sapiens
MAPRLCSISVTARRLLGGPGPRAGDVASAAAARFYSKDNEGSWFRSLFVHKVDPRKDAHSTLLSKKETSNLYKIQFHNVKPEYLDAYNSLTEAVLPKLHLDEDYPCSLVGNWNTWYGEQDQAVHLWRFSGGYPALMDCMNKLKNNKEYLEFRRERSQMLLSRRNQLLLEFSFWNEPQPRMGPNIYELRTYKLKPGTMIEWGNNWARAIKYRQENQEAVGGFFSQIGELYVVHHLWAYKDLQSREETRNAAWRKRGWDENVYYTVPLVRHMESRIMIPLKISPLQ

SEQ ID NO: 10800 - protein, 813 aa, Homo sapiens
MCSSSPSMQSLSCPPSFLQSHHATTSLGGLRAELPASTPRFRSAAPSLLPVLYGARASFAPPPAVAYSRCQVLGAVRCSALFKITYASSEATVPGHLHHLPQWNASCVKAHNNPCGGTTMSSESSKKRKPKVIRSDGAPAEGKRNRSDTEQEGKYYSEEAEVDLRDPGRDYELYKYTCQELQRLMAEIQDLKSRGGKDVAIEIEERRIQSCVHFMTLKKLNRLAHIRLKKGRDQTHEAKQKVDAYHLQLQNLLYEVMHLQKEITKCLEFKSKHEEIDLVSLEEFYKEAPPDISKAEVTMGDPHQQTLARLDWELEQRKRLAEKYRECLSNKEKILKEIEVKKEYLSSLQPRLNSIMQASLPVQEYLFMPFDQAHKQYETARHLPPPLYVLFVQATAYGQACAHMKSSQPPRQDKTLSVAIEGSVDEAKALFKPPEDSQDDESDSDAEEEQTTKRRRPTLGVQLDDKRKEMLKRHPLSVMLDLKCKDDSVLHLTFYYLMNLNIMTVKAKVTTAMELITPISAGDLLSPDSVLSCLYPGDHGKKTPNPANQYQFDKVGILTLSDYVLELGHPYLWVQKLGGLHFPKEQPQQTVIADHSLSASHMETTMKLLKTRVQSRLALHKQFASLEHGIVPVTSDCQYLFPAKVVSRLVKWVTVAHEDYMELHFTKDIVDAGLAGDTNLYYMALIERGTAKLQAAVVLNPGYSSIPPVFQLCLNWKGEKTNSNDDNIRAMEGEVNVCYKELCGPWPSHQLLTNQLQRLCVLLDVYLETESHDDSVEGPKEFPQEKMCLRLFRGPSRMKPFKYNHPQGFFSHR

SEQ ID NO: 10801 - protein, 683 aa, Homo sapiens; identical to SEQ ID NO: 10798

SEQ ID NO: 10802 - protein, 683 aa, Homo sapiens; identical to SEQ ID NO: 10798

SEQ ID NO: 10803 - protein, 398 aa, Homo sapiens
MRLREPLLSGSAAMPGASLQRACRLLVAVCALHLGVTLVYYLAGRDLSRLPQLVGVSTPLQGGSNSAAAIGQSSGELRTGGARPPPPLGASSQPRPGGDSSPVVDSGPGPASNLTSVPVPHTTALSLPACPEESPLLVGPMLIEFNMPVDLELVAKQNPNVKMGGRYAPRDCVSPHKVAIIIPFRNRQEHLKYWLYYLHPVLQRQQLDYGIYVINQAGDTIFNRAKLLNVGFQEALKDYDYTCFVFSDVDLIPMNDHNAYRCFSQPRHISVAMDKFGFSLPYVQYFGGVSALSKQQFLTINGFPNNYWGWGGEDDDIFNRLVFRGMSISRPNAVVGRCRMIRHSRDKKNEPNPQRFDRIAHTKETMLSDGLNSLTYQVLDVQRYPLYTQITVDIGTPS

SEQ ID NO: 10804 - protein, 398 aa, Homo sapiens; identical to SEQ ID NO: 10803

SEQ ID NO: 10805 - protein, 398 aa, Homo sapiens; identical to SEQ ID NO: 10803

SEQ ID NO: 10806 - protein, 862 aa, Homo sapiens [sequence omitted]

SEQ ID NO: 10807 - protein, 1020 aa, Homo sapiens
MQSCARAWGLRLGRGVGGGRRLAGGSGPCWAPRSRDSSSGGGDSAAAGASRLLERLLPRHDDFARRHIGPGDKDQREMLQTLGLASIDELIEKTVPANIRLKRPLKMEDPVCENEILATLHAISSKNQIWRSYIGMGYYNCSVPQTILRNLLENSGWITQYTPYQPEVSQGRLESLLNYQTMVCDITGLDMANASLLDEGTAAAEALQLCYRHNKRRKFLVDPRCHPQTIAVVQTRAKYTGVLTELKLPCEMDFSGKDVSGVLFQYPDTEGKVEDFTELVERAHQSGSLACCATDLLALCILRPPGEFGVDIALGSSQRFGVPLGYGGPHAAFFAVRESLVRMMPGRMVGVTRDATGKEVYRLALQTREQHIRRDKATSNICTAQALLANMAAMFAIYHGSHGLEHIARRVHNATLILSEGLKRAGHQLQHDLFFDTLKIQCGCSVKEVLGRAAQRQINFRLFEDGTLGISLDETVNEKDLDDLLWIFGCESSAELVAESMGEECRGIPGSVFKRTSPFLTHQVFNSYHSETNIVRYMKKLENKDISLVHSMIPLGSCTMKLNSSSELAPITWKEFANIHPFVPLDQAQGYQQLFRELEKDLCELTGYDQVCFQPNSGAQGEYAGLATIRAYLNQKGEGHRTVCLIPKSAHGTNPASAHMAGMKIQPVEVDKYGNIDAVHLKAMVDKHKENLAAIMITYPSTNGVFEENISDVCDLIHQHGGQVYLDGANMNAQVGICRPGDFGSDVSHLNLHKTFCIPHGGGGPGMGPIGVKKHLAPFLPNHPVISLKRNEDACPVGTVSAAPWGSSSILPISWAYIKMMGGKGLKQATETAILNANYMAKRLETHYRILFRGARGYVGHEFILDTRPFKKSANIEAVDVAKRLQDYGFHAPTMSWPVAGTLMVEPTESEDKAELDRFCDAMISIRQEIADIEEGRIDPRVNPLKMSPHSLTCVTSSHWDRPYSREVAAFPLPFVKPENKFWPTIARIDDIYGDQHLVCTCPPMEVYESPFSEQKRASS

SEQ ID NO: 10808 - protein, 157 aa, Homo sapiens
MTRLALHELKNLTQYSWLLDGFPRTLPQAEALDRAYQIDTVINLNVPFEVIKQRLTARWIHPASGRVYNIEFNPPKTVGIDDLTGEPLIQREDDKPETVIKRLKAYEDQTKPVLEYYQKKGVLETFSGTETNKIWPYVYAFLQTKVPQRSQKASVTP

SEQ ID NO: 10809 - protein, 227 aa, Homo sapiens
MGASARLLRAVIMGAPGSGKGTVSSRITTHFELKHLSSGDLLRDNMLRGTEIGVLAKAFIDQGKLIPDDVMTRLALHELKNLTQYSWLLDGFPRTLPQAEALDRAYQIDTVINLNVPFEVIKQRLTARWIHPASGRVYNIEFNPPKTVGIDDLTGEPLIQREDDKPETVIKRLKAYEDQTKPVLEYYQKKGVLETFSGTETNKIWPYVYAFLQTKVPQRSQKASVTP

SEQ ID NO: 10810 - protein, 227 aa, Homo sapiens; identical to SEQ ID NO: 10809

SEQ ID NO: 10811 - protein, 1174 aa, Homo sapiens
MYDADEDMQYDEDDDEITPDLWQEACWIVISSYFDEKGLVRQQLDSFDEFIQMSVQRIVEDAPPIDLQAEAQHASGEVEEPPRYLLKFEQIYLSKPTHWERDGAPSPMMPNEARLRNLTYSAPLYVDITKTVIKEGEEQLQTQHQKTFIGKIPIMLRSTYCLLNGLTDRDLCELNECPLDPGGYFIINGSEKVLIAQEKMATNTVYVFAKKDSKYAYTGECRSCLENSSRPTSTIWVSMLARGGQGAKKSAIGQRIVATLPYIKQEVPIIIVFRALGFVSDRDILEHIIYDFEDPEMMEMVKPSLDEAFVIQEQNVALNFIGSRGAKPGVTKEKRIKYAKEVLQKEMLPHVGVSDFCETKKAYFLGYMVHRLLLAALGRRELDDRDHYGNKRLDLAGPLLAFLFRGMFKNLLKEVRIYAQKFIDRGKDFNLELAIKTRIISDGLKYSLATGNWGDQKKAHQARAGVSQVLNRLTFASTLSHLRRLNSPIGRDGKLAKPRQLHNTLWGMVCPAETPEGHAVGLVKNLALMAYISVGSQPSPILEFLEEWSMENLEEISPAAIADATKIFVNGCWVGIHKDPEQLMNTLRKLRRQMDIIVSEVSMIRDIREREIRIYTDAGRICRPLLIVEKQKLLLKKRHIDQLKEREYNNYSWQDLVASGVVEYIDTLEEETVMLAMTPDDLQEKEVAYCSTYTHCEIHPSMILGVCASIIPFPDHNQSPRNTYQSAMGKQAMGVYITNFHVRMDTLAHVLYYPQKPLVTTRSMEYLRFRELPAGINSIVAIASYTGYNQEDSVIMNRSAVDRGFFRSVFYRSYKEQESKKGFDQEEVFEKPTRETCQGMRHAIYDKLDDDGLIAPGVRVSGDDVIIGKTVTLPENEDELESTNRRYTKRDCSTFLRTSETGIVDQVMVTLNQEGYKFCKIRVRSVRIPQIGDKFASRHGQKGTCGIQYRQEDMPFTCEGITPDIIINPHAIPSRMTIGHLIECLQGKVSANKGEIGDATPFNDAVNVQKISNLLSDYGYHLRGNEVLYNGFTGRKITSQIFIGPTYYQRLKHMVDDKIHSRARGPIQILNRQPMEGRSRDGGLRFGEMERDCQIAHGAAQFLRERLFEASDPYQVHVCNLCGIMAIANTRTHTYECRGCRNKTQISLVRMPYACKLLFQELMSMSIAPRMMSV

SEQ ID NO: 10812 - protein, 1174 aa, Homo sapiens; identical to SEQ ID NO: 10811

SEQ ID NO: 10813 - protein, 91 aa, Homo sapiens
VRYNNYDRAVINTVPYDVVHRWYTAHRTLTIELRRPENEFWVKLKPGRVLFIDNWRVLHGRECFTGYRQLCGCYLTRDDVLNTARLLGLQA

SEQ ID NO: 10814 - protein, 1178 aa, Homo sapiens
MLKFRTVHGGLRLLGIRRTSTAPAASPNVRRLEYKPIKKVMVANRGEIAIRVFRACTELGIRTVAIYSEQDTGQMHRQKADEAYLIGRGLAPVQAYLHIPDIIKVAKENNVDAVHPGYGFLSERADFAQACQDAGVRFIGPSPEVVRKMGDKVEARAIAIAAGVPVVPGTDAPITSLHEAHEFSNTYGFPIIFKAAYGGGGRGMRVVHSYEELEENYTRAYSEALAAFGNGALFVEKFIEKPRHIEVQILGDQYGNILHLYERDCSIQRRHQKVVEIAPAAHLDPQLRTRLTSDSVKLAKQVGYENAGTVEFLVDRHGKHYFIEVNSRLQVEHTVTEEITDVDLVHAQIHVAEGRSLPDLGLRQENIRINGCAIQCRVTTEDPARSFQPDTGRIEVFRSGEGMGIRLDNASAFQGAVISPHYDSLLVKVIAHGKDHPTAATKMSRALAEFRVRGVKTNIAFLQNVLNNQQFLAGTVDTQFIDENPELFQLRPAQNRAQKLLHYLGHVMVNGPTTPIPVKASPSPTDPVVPAVPIGPPPAGFRDILLREGPEGFARAVRNHPGLLLMDTTFRDAHQSLLATRVRTHDLKKIAPYVAHNFSKLFSMENWGGATFDVAMRFLYECPWRRLQELRELIPNIPFQMLLRGANAVGYTNYPDNVVFKFCEVAKENGMDVFRVFDSLNYLPNMLLGMEAAGSAGGVVEAAISYTGDVADPSRTKYSLQYYMGLAEELVRAGTHILCIKDMAGLLKPTACTMLVSSLRDRFPDLPLHIHTHDTSGAGVAAMLACAQAGADVVDVAADSMSGMTSQPSMGALVACTRGTPLDTEVPMERVFDYSEYWEGARGLYAAFDCTATMKSGNSDVYENEIPGGQYTNLHFQAHSMGLGSKFKEVKKAYVEANQMLGDLIKVTPSSKIVGDLAQFMVQNGLSRAEAEAQAEELSFPRSVVEFLQGYIGVPHGGFPEPFRSKVLKDLPRVEGRPGASLPPLDLQALEKELVDRHGEEVTPEDVLSAAMYPDVFAHFKDFTATFGPLDSLNTRLFLQGPKIAEEFEVELERGKTLHIKALAVSDLNRAGQRQVFFELNGQLRSILVKDTQAMKEMHFHPKALKDVKGQIGAPMPGKVIDIKVVAGAKVAKGQPLCVLSAMKMETVVTSPMEGTVRKVHVTKDMTLEGDDLILEIE

SEQ ID NO: 10815 - protein, 1178 aa, Homo sapiens; identical to SEQ ID NO: 10814

SEQ ID NO: 10816 - protein, 1178 aa, Homo sapiens; identical to SEQ ID NO: 10814

SEQ ID NO: 10817 - protein, 1178 aa, Homo sapiens; identical to SEQ ID NO: 10814

SEQ ID NO: 10818 - protein, 1178 aa, Homo sapiens; identical to SEQ ID NO: 10814

SEQ ID NO: 10819 - protein, 1178 aa, Homo sapiens; identical to SEQ ID NO: 10814

SEQ ID NO: 10820 - protein, 769 aa, Homo sapiens
MPMLCPPEYMVCFLHRLISALRYYWDEYKASNPHASFSEEAYIPPQVFYNGKVDYFDLQRLGGLLSHLRKTLKDDLASKANIVIDPLELQSTAMDDLDEDEEPAPAMAQRPMQALAVGGPLPLPRPGWLSSPTLGRANRFLSTAAVSLMTPRRPLSTSEKVKVRTLSVEQRTREDIEGSHWNEGLLLGRPPEEPEQPLTENSLLEVLDGAVMMYNLSVHQQLGKMVGVSDDVNEYAMALRDTEDKLRRCPKRRKDILAELTKSQKVFSEKLDHLSRRLAWVHATVYSQEKMLDIYWLLRVCLRTIEHGDRTGSLFAFMPEFYLSVAINSYSALKNYFGPVHSMEELPGYEETLTRLAAILAKHFADARIVGTDIRDSLMQALASYVCYPHSLRAVERIPEEQRIAMVRNLLAPYEQRPWAQTNWILVRLWRGCGFGYRYTRLPHLLKTKLEDANLPSLQKPCPSTLLQQHMADLLQQGPDVAPSFLNSVLNQLNWAFSEFIGMIQEIQQAAERLERNFVDSRQLKVCATCFDLSVSLLRVLEMTITLVPEIFLDWTRPTSEMLLRRLAQLLNQVLNRVTAERNLFDRVVTLRLPGLESVDHYPILVAVTGILVQLLVRGPASEREQATSVLLADPCFQLRSICYLLGQPEPPAPGTALPAPDRKRFSLQSYADYISADELAQVEQMLAHLTSASAQAAAASLPTSEEDLCPICYAHPISAVFQPCGHKSCKACINQHLMNNKDCFFCKTTHIQPPCLPVSSLVGAQPWP

SEQ ID NO: 10821 - protein, 1326 aa, Homo sapiens
MASKGAGMSFSRKSYRLTSDAEKSRVTGIVQEKLLNDYLNRIFSSSEHAPPAATSRKPLNFQNLPEHLDQLLQVDNEEEESQGQVEGRLGPSTVVLDHTGGFEGLLLVDDDLLGVIGHSNFGTIRSTTCVYKGKWLYEVLISSQGLMQIGWCTISCRFNQEEGVGDTHNSYAYDGNRVRKWNVTTTNYGKAWAAGDIVSCLIDLDDGTLSFCLNGVSLGTAFENLSRGLGMAYFPAISLSFKESVAFNFGSRPLRYHFVKMADPPSADLVRAQRLLGCFRAVLSVELDPVEGRLLDKESSKWRLRGQPTVLLTLAHIFHHFAPLLRKVYLVEAVLMSFLLGIVEKGTPTQAQSVVHQVLDLLWLFMEDYEVQDCLKQLMMSLLRLYRFSPIVPDLGLQIHYLRLTIAILRHEKSRKFLLSNVLFDVLRSVVFFYIKSPLRVEEAGLQELIPTTWWPHCSSREGKESTEMKEETAEERLRRRAYERGCQRLRKRIEVVEELQVQILKLLLDNKDDNGGEASRYIFLTKFRKFLQENASGRGNMPMLCPPEYMVCFLHRLISALRYYWDEYKASNPHASFSEEAYIPPQVFYNGKVDYFDLQRLGGLLSHLRKTLKDDLASKANIVIDPLELQSTAMDDLDEDEEPAPAMAQRPMQALAVGGPLPLPRPGWLSSPTLGRANRFLSTAAVSLMTPRRPLSTSEKVKVRTLSVEQRTREDIEGSHWNEGLLLGRPPEEPEQPLTENSLLEVLDGAVMMYNLSVHQQLGKMVGVSDDVNEYAMALRDTEDKLRRCPKRRKDILAELTKSQKVFSEKLDHLSRRLAWVHATVYSQEKMLDIYWLLRVCLRTIEHGDRTGSLFAFMPEFYLSVAINSYSALKNYFGPVHSMEELPGYEETLTRLAAILAKHFADARIVGTDIRDSLMQALASYVCYPHSLRAVERIPEEQRIAMVRNLLAPYEQRPWAQTNWILVRLWRGCGFGYRYTRLPHLLKTKLEDANLPSLQKPCPSTLLQQHMADLLQQGPDVAPSFLNSVLNQLNWAFSEFIGMIQEIQQAAERLERNFVDSRQLKVCATCFDLSVSLLRVLEMTITLVPEIFLDWTRPTSEMLLRRLAQLLNQVLNRVTAERNLFDRVVTLRLPGLESVDHYPILVAVTGILVQLLVRGPASEREQATSVLLADPCFQLRSICYLLGQPEPPAPGTALPAPDRKRFSLQSYADYISADELAQVEQMLAHLTSASAQAAAASLPTSEEDLCPICYAHPISAVFQPCGHKSCKACINQHLMNNKDCFFCKTTIVSLCPSPVSHTTTSNLLACLYPHWWEPSHGPNCA

SEQ ID NO: 10822 - protein, 442 aa, Homo sapiens
MPASGAPTPSRHVSLPTLAGYEETLTRLAAILAKHFADARIVGTDIRDSLMQALASYVCYPHSLRAVERIPEEQRIAMVRNLLAPYEQRPWAQTNWILVRLWRGCGFGYRYTRLPHLLKTKLEDANLPSLQKPCPSTLLQQHMADLLQQGPDVAPSFLNSVLNQLNWAFSEFIGMIQEIQQAAERLERNFVDSRQLKVCATCFDLSVSLLRVLEMTITLVPEIFLDWTRPTSEMLLRRLAQLLNQVLNRVTAERNLFDRVVTLRLPGLESVDHYPILVAVTGILVQLLVRGPASEREQATSVLLADPCFQLRSICYLLGQPEPPAPGTALPAPDRKRFSLQSYADYISADELAQVEQMLAHLTSASAQAAAASLPTSEEDLCPICYAHPISAVFQPCGHKSCKACINQHLMNNKDCFFCKTTIVSVEDWEKGANTSTTSSAA

SEQ ID NO: 10823 - protein, 83 aa, Homo sapiens
MPTPSLLCSSPVATSPASKWAPQLGGGESSRYMQGSPHPLPCCRACINQHLMNNKDCFFCKTTIVSVEDWEKGANTSTTSSAA

SEQ ID NO: 10824 - protein, 1310 aa, Homo sapiens
MASKGAGMSFSRKSYRLTSDAEKSRVTGIVQEKLLNDYLNRIFSSSEHAPPAATSRKPLNFQNLPEHLDQLLQVDNEEEESQGQVEGRLGPSTVVLDHTGGFEGLLLVDDDLLGVIGHSNFGTIRSTTCVYKGKWLYEVLISSQGLMQIGWCTISCRFNQEEGVGDTHNSYAYDGNRVRKWNVTTTNYGKAWAAGDIVSCLIDLDDGTLSFCLNGVSLGTAFENLSRGLGMAYFPAISLSFKESVAFNFGSRPLRYHFVKMADPPSADLVRAQRLLGCFRAVLSVELDPVEGRLLDKESSKWRLRGQPTVLLTLAHIFHHFAPLLRKVYLVEAVLMSFLLGIVEKGTPTQAQSVVHQVLDLLWLFMEDYEVQDCLKQLMMSLLRLYRFSPIVPDLGLQIHYLRLTIAILRHEKSRKFLLSNVLFDVLRSVVFFYIKSPLRVEEAGLQELIPTTWWPHCSSREGKESTEMKEETAEERLRRRAYERGCQRLRKRIEVVEELQVQILKLLLDNKDDNGGEASRYIFLTKFRKFLQENASGRGNMPMLCPPEYMVCFLHRLISALRYYWDEYKASNPHASFSEEAYIPPQVFYNGKVDYFDLQRLGGLLSHLRKTLKDDLASKANIVIDPLELQSTAMDDLDEDEEPAPAMAQRPMQALAVGGPLPLPRPGWLSSPTLGRANRFLSTAAVSLMTPRRPLSTSEKVKVRTLSVEQRTREDIEGSHWNEGLLLGRPPEEPEQPLTENSLLEVLDGAVMMYNLSVHQQLGKMVGVSDDVNEYAMALRDTEDKLRRCPKRRKDILAELTKSQKVFSEKLDHLSRRLAWVHATVYSQEKMLDIYWLLRVCLRTIEHGDRTGSLFAFMPEFYLSVAINSYSALKNYFGPVHSMEELPGYEETLTRLAAILAKHFADARIVGTDIRDSLMQALASYVCYPHSLRAVERIPEEQRIAMVRNLLAPYEQRPWAQTNWILVRLWRGCGFGYRYTRLPHLLKTKLEDANLPSLQKPCPSTLLQQHMADLLQQGPDVAPSFLNSVLNQLNWAFSEFIGMIQEIQQAAERLERNFVDSRQLKVCATCFDLSVSLLRVLEMTITLVPEIFLDWTRPTSEMLLRRLAQLLNQVLNRVTAERNLFDRVVTLRLPGLESVDHYPILVAVTGILVQLLVRGPASEREQATSVLLADPCFQLRSICYLLGQPEPPAPGTALPAPDRKRFSLQSYADYISADELAQVEQMLAHLTSASAQAAAASLPTSEEDLCPICYAHPISAVFQPCGHKSCKACINQHLMNNKDCFFCKTTHIQPPCLPVSSLVGAQPWP

SEQ ID NO: 10825 - protein, 1311 aa, Homo sapiens
MASKGAGMSFSRKSYRLTSDAEKSRVTGIVQEKLLNDYLNRIFSSSEHAPPAATSRKPLNFQNLPEHLDQLLQVDNEEEESQGQVEGRLGPSTVVLDHTGGFEGLLLVDDDLLGVIGHSNFGTIRSTTCVYKGKWLYEVLISSQGLMQIGWCTISCRFNQEEGVGDTHNSYAYDGNRVRKWNVTTTNYGKAWAAGDIVSCLIDLDDGTLSFCLNGVSLGTAFENLSRGLGMAYFPAISLSFKESVAFNFGSRPLRYHFVKMADPPSADLVRAQRLLGCFRAVLSVELDPVEGRLLDKESSKWRLRGQPTVLLTLAHIFHHFAPLLRKVYLVEAVLMSFLLGIVEKGTPTQAQSVVHQVLDLLWLFMEDYEVQDCLKQLMMSLLRLYRFSPIVPDLGLQIHYLRLTIAILRHEKSRKFLLSNVLFDVLRSVVFFYIKSPLRVEEAGLQELIPTTWWPHCSSREGKESTEMKEETAEERLRRRAYERGCQRLRKRIEVVEELQVQILKLLLDNKDDNGGEASRYIFLTKFRKFLQENASGRGNMPMLCPPEYMVCFLHRLISALRYYWDEYKASNPHASFSEEAYIPPQVFYNGKVDYFDLQRLGGLLSHLRKTLKDDLASKANIVIDPLELQSTAMDDLDEDEEPAPAMAQRPMQALAVGGPLPLPRPGWLSSPTLGRANRFLSTAAVSLMTPRRPLSTSEKVKVRTLSVEQRTREDIEGSHWNEGLLLGRPPEEPEQPLTENSLLEVLDGAVMMYNLSVHQQLGKMVGVSDDVNEYAMALRDTEDKLRRCPKRRKDILAELTKSQKVFSEKLDHLSRRLAWVHATVYSQEKMLDIYWLLRVCLRTIEHGDRTGSLFAFMPEFYLSVAINSYSALKNYFGPVHSMEELPGYEETLTRLAAILAKHFADARIVGTDIRDSLMQALASYVCYPHSLRAVERIPEEQRIAMVRNLLAPYEQRPWAQTNWILVRLWRGCGFGYRYTRLPHLLKTKLEDANLPSLQKPCPSTLLQQHMADLLQQGPDVAPSFLNSVLNQLNWAFSEFIGMIQEIQQAAERLERNFVDSRQLKVCATCFDLSVSLLRVLEMTITLVPEIFLDWTRPTSEMLLRRLAQLLNQVLNRVTAERNLFDRVVTLRLPGLESVDHYPILVAVTGILVQLLVRGPASEREQATSVLLADPCFQLRSICYLLGQPEPPAPGTALPAPDRKRFSLQSYADYISADELAQVEQMLAHLTSASAQAAAASLPTSEEDLCPICYAHPISAVFQPCGHKSCKACINQHLMNNKDCFFCKTTIVSVEDWEKGANTSTTSSAA

SEQ ID NO: 10826 - protein, 1310 aa, Homo sapiens
MASKGAGMSFSRKSYRLTSDAEKSRVTGIVQEKLLNDYLNRIFSSSEHAPPAATSRKPLNFQNLPEHLDQLLQVDNEEEESQGQVEGRLGPSTVVLDHTGGFEGLLLVDDDLLGVIGHSNFGTIRSTTCVYKGKWLYEVLISSQGLMQIGWCTISCRFNQEEGVGDTHNSYAYDGNRVRKWNVTTTNYGKAWAAGDIVSCLIDLDDGTLSFCLNGVSLGTAFENLSRGLGMAYFPAISLSFKESVAFNFGSRPLRYHFVKMADPPSADLVRAQRLLGCFRAVLSVELDPVEGRLLDKESSKWRLRGQPTVLLTLAHIFHHFAPLLRKVYLVEAVLMSFLLGIVEKGTPTQAQSVVHQVLDLLWLFMEDYEVQDCLKQLMMSLLRLYRFSPIVPDLGLQIHYLRLTIAILRHEKSRKFLLSNVLFDVLRSVVFFYIKSPLRVEEAGLQELIPTTWWPHCSSREGKESTEMKEETAEERLRRRAYERGCQRLRKRIEVVEELQVQILKLLLDNKDDNGGEASRYIFLTKFRKFLQENASGRGNMPMLCPPEYMVCFLHRLISALRYYWDEYKASNPHASFSEEAYIPPQVFYNGKVDYFDLQRLGGLLSHLRKTLKDDLASKANIVIDPLELQSTAMDDLDEDEEPAPAMAQRPMQALAVGGPLPLPRPGWLSSPTLGRANRFLSTAAVSLMTPRRPLSTSEKVKVRTLSVEQRTREDIEGSHWNEGLLLGRPPEEPEQPLTENSLLEVLDGAVMMYNLSVHQQLGKMVGVSDDVNEYAMALRDTEDKLRRCPKRRKDILAELTKSQKVFSEKLDHLSRRLAWVHATVYSQEKMLDIYWLLRVCLRTIEHGDRTGSLFAFMPEFYLSVAINSYSALKNYFGPVHSMEELPGYEETLTRLAAILAKHFADARIVGTDIRDSLMQALASYVCYPHSLRAVERIPEEQRIAMVRNLLAPYEQRPWAQTNWILVRLWRGCGFGYRYTRLPHLLKTKLEDANLPSLQKPCPSTLLQQHMADLLQQGPDVAPSFLNSVLNQLNWAFSEFIGMIQEIQQAAERLERNFVDSRQLKVCATCFDLSVSLLRVLEMTITLVPEIFLDWTRPTSEMLLRRLAQLLNQVLNRVTAERNLFDRVVTLRLPGLESVDHYPILVAVTGILVQLLVRGPASEREQATSVLLADPCFQLRSICYLLGQPEPPAPGTALPAPDRKRFSLQSYADYISADELAQVEQMLAHLTSASAQAAAASLPTSEEDLCPICYAHPISAVFQPCGHKSCKACINQHLMNNKDCFFCKTTIIQPPCLPVSSLVGAQPWP

SEQ ID NO: 10827 - protein, 1326 aa, Homo sapiens; identical to SEQ ID NO: 10821

SEQ ID NO: 10828 - protein, 228 aa, Homo sapiens
MASGCKIGPSILNSDLANLGAECLRMLDSGADYLHLDVMDGHFVPNITFGHPVVESLRKQLGQDPFFDMHMMVSKPEQWVKPMAVAGANQYTFHLEATENPGALIKDIRENGMKVGLAIKPGTSVEYLAPWANQIDMALVMTVEPGFGGQKFMEDMMPKVHWLRTQFPSLDIEVDGGVGPDTVHKCAEAGANMIVSGSAIMRSEDPRSVINLLRNVCSEAAQKRSLDR

SEQ ID NO: 10829 - protein, 191 aa, Homo sapiens
MASGCKIGPSILNSDLANLGAECLRMLDSGADYLHLDVMDGHFVPNITFGHPVVESLRKQLGQDPFFDMHMMVSKPEQWVKPMAVAGANQYTFHLEATENPGALIKDIRENGMKVGLAIKPGTSVEYLAPWANQIDMALVMTVEPGFGGQKFMEDMMPKVHWLRTQFPSLDIEVDGGVGPDTVHKCAEELT

SEQ ID NO: 10830 - protein, 178 aa, Homo sapiens
MHMMVSKPEQWVKPMAVAGANQYTFHLEATENPGALIKDIRENGMKSCSVTQAEVQWHSQGPLQVGLAIKPGTSVEYLAPWANQIDMALVMTVEPGFGGQKFMEDMMPKVHWLRTQFPSLDIEVDGGVGPDTVHKCAEAGANMIVSGSAIMRSEDPRSVINLLRNVCSEAAQKRSLDR

SEQ ID NO: 10831 - protein, 589 aa, Homo sapiens
MPTVSVKRDLLFQALGRTYTDEEFDELCFEFGLELDEITSEKEIISKEQGNVKAAGASDVVLYKIDVPANRYDLLCLEGLVRGLQVFKERIKAPVYKRVMPDGKIQKLIITEETAKIRPFAVAAVLRNIKFTKDRYDSFIELQEKLHQNICRKRALVAIGTHDLDTLSGPFTYTAKRPSDIKFKPLNKTKEYTACELMNIYKTDNHLKHYLHIIENKPLYPVIYDSNGVVLSMPPIINGDHSRITVNTRNIFIECTGTDFTKAKIVLDIIVTMFSEYCENQFTVEAAEVVFPNGKSHTFPELAYRKEMVRADLINKKVGIRETPENLAKLLTRMYLKSEVIGDGNQIEIEIPPTRADIIHACDIVEDAAIAYGYNNIQMTLPKTYTIANQFPLNKLTELLRHDMAAAGFTEALTFALCSQEDIADKLGVDISATKAVHISNPKTAEFQVARTTLLPGLLKTIAANRKMPLPLKLFEISDIVIKDSNTDVGAKNYRHLCAVYYNKNPGFEIIHGLLDRIMQLLDVPPGEDKGGYVIKASEGPAFFPGRCAEIFARGQSVGKLGVLHPDVITKFELTMPCSSLEINIGPFL

SEQ ID NO: 10832 - protein, 387 aa, Homo sapiens
MKALILVGGYGTRLRPLTLSTPKPLVDFCNKPILLHQVEALAAAGVDHVILAVSYMSQVLEKEMKAQEQRLGIRISMSHEEEPLGTAGPLALARDLLSETADPFFVLNSDVICDFPFQAMVQFHRHHGQEGSILVTKVEEPSKYGVVVCEADTGRIHRFVEKPQVFVSNKINAGMYILSPAVLQRIQLQPTSIEKEVFPIMAKEGQLYAMELQGFWMDIGQPKDFLTGMCLFLQSLRQKQPERLCSGPGIVGNVLVDPSARIGQNCSIGPNVSLGPGVVVEDGVCIRRCTVLRDARIRSHSWLESCIVGWRCRVGQWVSLWAGLGGERGGECACLPDKAYPLLEVRMENVTVLGEDVIVNDELYLNGASVLPHKSIGESVPEPRIIM

SEQ ID NO: 10833 - protein, 360 aa, Homo sapiens
MKALILVGGYGTRLRPLTLSTPKPLVDFCNKPILLHQVEALAAAGVDHVILAVSYMSQVLEKEMKAQEQRLGIRISMSHEEEPLGTAGPLALARDLLSETADPFFVLNSDVICDFPFQAMVQFHRHHGQEGSILVTKVEEPSKYGVVVCEADTGRIHRFVEKPQVFVSNKINAGMYILSPAVLQRIQLQPTSIEKEVFPIMAKEGQLYAMELQGFWMDIGQPKDFLTGMCLFLQSLRQKQPERLCSGPGIVGNVLVDPSARIGQNCSIGPNVSLGPGVVVEDGVCIRRCTVLRDARIRSHSWLESCIVGWRCRVGQWVRMENVTVLGEDVIVNDELYLNGASVLPHKSIGESVPEPRIIM

SEQ ID NO: 10834 - protein, 360 aa, Homo sapiens; identical to SEQ ID NO: 10833

SEQ ID NO: 10835 - protein, 387 aa, Homo sapiens; identical to SEQ ID NO: 10832

SEQ ID NO: 10836 - protein, 297 aa, Homo sapiens
MKIDEKCVEADEETFESEELSEDKEEFVGYGQKFFIAGFRRSMRLCRRKSHLSPLHASVCCTGSCYSAVGAPYEEVVRYQRRPSDKYRLIVLMGPSGVGVNELRRQLIEFNPSHFQSAVPHTTRTKKSYEMNGREYHYVSKETFENLIYSHRMLEYGEYKGHLYGTSVDAVQTVLVEGKICVMDLEPQDIQGVRTHELKPYVIFIKPSNMRCMKQSRKNAKVITDYYVDMKFKDEDLQEMENLAQRMETQFGQFFDHVIVNDSLHDACAQLLSAIQKAQEEPQWVPATWISSDTESQ

SEQ ID NO: 10837 - protein, 293 aa, Homo sapiens [sequence omitted]

SEQ ID NO: 10838 - protein, 443 aa, Homo sapiens
MRIVCLVKNQQPLGATIKRHEMTGDILVARIIHGGLAERSGLLYAGDKLVEVNGVSVEGLDPEQVIHILAMSRGTIMFKVVPVSDPPVNSQQMEDPDIPCMDAGLPFQKGDILQIVDQNDALWWQARKISDPATCAGLVPSNHLLKRKQREFWWSQPYQPHTCLKSTLYKEEFVGYGQKFFIAGFRRSMRLCRRKSHLSPLHASVCCTGSCYSAVGAPYEEVVRYQRRPSDKYRLIVLMGPSGVGVNELRRQLIEFNPSHFQSAVPHTTRTKKSYEMNGREYHYVSKETFENLIYSHRMLEYGEYKGHLYGTSVDAVQTVLVEGKICVMDLEPQDIQGVRTHELKPYVIFIKPSNMRCMKQSRKNAKVITDYYVDMKFKDEDLQEMENLAQRMETQFGQFFDHVIVNDSLHDACAQLLSAIQKAQEEPQWVPATWISSDTESQ

SEQ ID NO: 10839 - protein, 337 aa, Homo sapiens [sequence omitted]

SEQ ID NO: 10840 - protein, 782 aa, Homo sapiens
MVLFNYIIPVSMYVTVEMQKFLGSYFITWDEDMFDEETGEGPLVNTSDLNEELGQVEYIFTDKTGTLTENNMEFKECCIEGHVYVPHVICNGQVLPESSGIDMIDSSPSVNGREREELFFRALCLCHTVQVKDDDSVDGPRKSPDGGKSCVYISSSPDEVALVEGVQRLGFTYLRLKDNYMEILNRENHIERFELLEILSFDSVRRRMSVIVKSATGEIYLFCKGADSSIFPRVIEGKVDQIRARVERNAVEGLRTLCVAYKRLIQEEYEGICKLLQAAKVALQDREKKLAEAYEQIEKDLTLLGATAVEDRLQEKAADTIEALQKAGIKVWVLTGDKMETAAATCYACKLFRRNTQLLELTTKRIEEQSLHDVLFELSKTVLRHSGSLTRDNLSGLSADMQDYGLIIDGAALSLIMKPREDGSSGNYRELFLEICRSCSAVLCCRMAPLQKAQIVKLIKFSKEHPITLAIGDGANDVSMILEAHVGIGVIGKEGRQAARNSDYAIPKFKHLKKMLLVHGHFYYIRISELVQYFFYKNVCFIFPQFLYQFFCGFSQQTLYDTAYLTLYNISFTSLPILLYSLMEQHVGIDVLKRDPTLYRDVAKNALLRWRVFIYWTLLGLFDALVFFFGAYFVFENTTVTSNGQIFGNWTFGTLVFTVMVFTVTLKLALDTHYWTWINHFVIWGSLLFYVVFSLLWGGVIWPFLNYQRMYYVFIQMLSSGPAWLAIVLLVTISLLPDVLKKVLCRQLWPTATERVQTKSQCLSVEQSTIFMLSQTSSSLSF

SEQ ID NO: 10841 - protein, 237 aa, Homo sapiens [sequence omitted]

SEQ ID NO: 10842 - protein, 885 aa, Homo sapiens
MSHPDYRMNLRPLGTPRGVSAVAGPHDIGASPGDKKSKNRSTRGKKKSIFETYMSKEDVSEGLKRGTLIQGVLRINPKKFHEAFIPSPDGDRDIFIDGVVARNRALNGDLVVVKLLPEEHWKVVKPESNDKETEAAYESDIPEELCGHHLPQQSLKSYNDSPDVIVEAQFDGSDSEDGHGITQNVLVDGVKKLSVCVSEKGREDGDAPVTKDETTCISQDTRALSEKSLQRSAKVVYILEKKHSRAATGFLKLLADKNSELFRKYALFSPSDHRVPRIYVPLKDCPQDFVARPKDYANTLFICRIVDWKEDCNFALGQLAKSLGQAGEIEPETEGILTEYGVDFSDFSSEVLECLPQGLPWTIPPEEFSKRRDLRKDCIFTIDPSTARDLDDALSCKPLADGNFKVGVHIADVSYFVPEGSDLDKVAAERATSVYLVQKVVPMLPRLLCEELCSLNPMSDKLTFSVIWTLTPEGKILDEWFGRTIIRSCTKLSYEHAQSMIESPTEKIPAKELPPISPEHSSEEVHQAVLNLHGIAKQLRQQRFVDGALRLDQLKLAFTLDHETGLPQGCHIYEYRESNKLVEEFMLLANMAVAHKIHRAFPEQALLRRHPPPQTRMLSDLVEFCDQMGLPVDFSSAGALNKSLTQTFGDDKYSLARKEVLTNMCSRPMQMALYFCSGLLQDPAQFRHYALNVPLYTHFTSPIRRFADVLVHRLLAAALGYRERLDMAPDTLQKQADHCNDRRMASKRVQELSTSLFFAVLVKESGPLESEAMVMGILKQAFDVLVLRYGVQKRIYCNALALRSHHFQKVGKKPELTLVWEPEDMEQEPAQQVITIFSLVEVVLQAESTALKYSAILKRPGTQGHLGPEKEEEESDGEPEDSSTS

SEQ ID NO: 10843 - protein, 817 aa, Homo sapiens
MSHPDYRMNLRPLGTPRGVSAVAGPHDIGASPGDKKSKNRSTRGKKKSIFETYMSKEDVSEGLKRGTLIQGVLRINPKKFHEAFIPSPDGDRDIFIDGVVARNRALNGDLVVVKLLPEEHWKVVKPESNDKETEAAYESDIPEELCGHHLPQQSLKSYNDSPDVIVEAQFDGSDSEDGHGITQNVLVDGVKKLSVCVSEKGREDGDAPVTKDETTCISQDTRALSEKSLQRSAKVVYILEKKHSRAATGFLKLLADKNSELFRKYALFSPSDHRVPRIYVPLKDCPQDFVARPKDYANTLFICRIVDWKEDCNFALGQLAKSLGQAGEIEPETEGILTEYGVDFSDFSSEVLECLPQGLPWTIPPEEFSKRRDLRKDCIFTIDPSTARDLDDALSCKPLADGNFKVGVHIADVSYFVPEGSDLDKVAAERATSVYLVQKVVPMLPRLLCEELCSLNPMSDKLTFSVIWTLTPEGKILDEWFGRTIIRSCTKLSYEHAQSMIESPTEKIPAKELPPISPEHSSEEVHQAVLNLHGIAKQLRQQRFVDGALRLDQLKLAFTLDHETGLPQGCHIYEYRESNKLVEEFMLLANMAVAHKIHRAFPEQALLRRHPPPQTRMLSDLVEFCDQMGLPVDFSSAGALNKSLTQTFGDDKYSLARKEVLTNMCSRPMQMALYFCSGLLQDPAQFRHYALNVPLYTHFTSPIRRFADVLVHRLLAAALGYRERLDMAPDTLQKQADHCNDRRMASKRVQELSTSLFFAVLVKVSPPAWCPSPPSGSRPSWAPAHQEASRSPGQCQEVPWLQHCPCRRVAPWSQKPW

SEQ ID NO: 10844 - protein, 609 aa, Homo sapiens
MSGWESYYKTEGDEEAEEEQEENLEASGDYKYSGRDSLIFLVDASKAMFESQSEDELTPFDMSIQCIQSVYISKIISSDRDLLAVVFYGTEKDKNSVNFKNIYVLQELDNPGAKRILELDQFKGQQGQKRFQDMMGHGSDYSLSEVLWVCANLFSDVQFKMSHKRIMLFTNEDNPHGNDSAKASRARTKAGDLRDTGIFLDLMHLKKPGGFDISLFYRDIISIAEDEDLRVHFEESSKLEDLLRKVRAKETRKRALSRLKLKLNKDIVISVGIYNLVQKALKPPPIKLYRETNEPVKTKTRTFNTSTGGLLLPSDTKRSQIYGSRQIILEKEETEELKRFDDPGLMLMGFKPLVLLKKHHYLRPSLFVYPEESLVIGSSTLFSALLIKCLEKEVAALCRYTPRRNIPPYFVALVPQEEELDDQKIQVTPPGFQLVFLPFADDKRKMPFTEKIMATPEQVGKMKAIVEKLRFTYRSDSFENPVLQQHFRNLEALALDLMEPEQAVDLTLPKVEAMNKRLGSLVDEFKELVYPPDYNPEGKVTKRKHDNEGSGSKRPKVEYSEEELKTHISKGTLGKFTVPMLKEACRAYGLKSGLKKQELLEALTKHFQD

SEQ ID NO: 10845 - protein, 609 aa, Homo sapiens; identical to SEQ ID NO: 10844

SEQ ID NO: 10846 - protein, 115 aa, Homo sapiens [sequence omitted]

SEQ ID NO: 10847 - protein, 145 aa, Homo sapiens
MNELQRRLGPRGLVVLGFPCNQFGHQENAKNEEILNSLKYVRPGGGFEPNFMLFEKCEVNGAGAHPLFAFLREALPAPSDDATALMTDPKLITWSPVCRNDVAWNFEKFLVGPDGVPLRRYSRRFQTIDIEPDIEALLSQGPSCA

SEQ ID NO: 10848 - protein, 94 aa, Homo sapiens [sequence omitted]

SEQ ID NO: 10849 - protein, 200 aa, Homo sapiens
MCKSSSGQFTLLNIRAYTYILCMCVYVCLCVFFLTDEASQKMSKQQPTQFINPETPGYVGFANLPNQVHRKSVKKGFEFTLMVVGESGLGKSTLINSLFLTDLYPERVIPGAAEKIERTVQIEASTVEIEERGVKLRLTVVDTPGYGDAINCRDCFKTIISYIDEQFERYLHDESGLNRRHIIDNRVHCCFYFISPFGHG

SEQ ID NO: 10850 - protein, 159 aa, Homo sapiens
MSKQQPTQFINPETPGYVGFANLPNQVHRKSVKKGFEFTLMVVGESGLGKSTLINSLFLTDLYPERVIPGAAEKIERTVQIEASTVEIEERGVKLRLTVVDTPGYGDAINCRDCFKTIISYIDEQFERYLHDESGLNRRHIIDNRVHCCFYFISPFGHG

SEQ ID NO: 10851 - protein, 278 aa, Homo sapiens
MCKSSSGQFTLLNIRAYTYILCMCVYVCLCVFFLTDEASQKMSKQQPTQFINPETPGYVGFANLPNQVHRKSVKKGFEFTLMVVGESGLGKSTLINSLFLTDLYPERVIPGAAEKIERTVQIEASTVEIEERGVKLRLTVVDTPGYGDAINCRDCFKTIISYIDEQFERYLHDESGLNRRHIIDNRVHCCFYFISPFGHGLKPLDVAFMKAIHNKVNIVPVIAKADTLTLKERERLKKRITSKSITYLMQNQMKMKILKSRLDFSRLASHSLWLDPIS

SEQ ID NO: 10852 - protein, 396 aa, Homo sapiens [sequence omitted]

SEQ ID NO: 10853 - protein, 278 aa, Homo sapiens; identical to SEQ ID NO: 10851

SEQ ID NO: 10854 - protein, 457 aa, Homo sapiens [sequence omitted]

SEQ ID NO: 10855 - protein, 441 aa, Homo sapiens
MCVCQTMEVGQYGKNASRAGDRGVLLEPFIHQVGGHSSMMRYDDHTVCKPLISREQRFYESLPPEMKEFTPEYKGVVSVCFEGDSDGYINLVAYPYVESETVEQDDTTEREQPRRKHSRRSLHRSGSGSDHKEEKASLSLETSESSQEAKSPKVELHSHSEVPFQMLDGNSGLSSEKISHNPWSLRCHKQQLSRMRSESKDRKLYKFLLLENVVHHFKYPCVLDLKMGTRQHGDDASAEKAARQMRKCEQSTSATLGVRVCGMQVYQLDTGHYLCRNKYYGRGLSIEGFRNALYQYLHNGLDLRRDLFEPILSKLRGLKAVLERQASYRFYSSSLLVIYDGKECRAESCLDRRSEMRLKHLDMVLPEVASSCGPSTSPSNTSPEAGPSSQPKVDVRMIDFAHSTFKGFRDDPTVHDGPDRGYVFGLENLISIMEQMRDENQ

SEQ ID NO: 10856 - protein, 441 aa, Homo sapiens; identical to SEQ ID NO: 10855

SEQ ID NO: 10857 - protein, 690 aa, Homo sapiens
MGVRQQLALLLLLLLLLWGLGQPVWPVAVALTLRWLLGDPTCCVLLGLAMLARPWLGPWVPHGLSLAAAALALTLLPARLPPGLRWLPADVIFLAKILHLGLKIRGCLSRQPPDTFVDAFERRARAQPGRALLVWTGPGAGSVTFGELDARACQAAWALKAELGDPASLCAGEPTALLVLASQAVPALCMWLGLAKLGCPTAWINPHGRGMPLAHSVLSSGARVLVVDPDLRESLEEILPKLQAENIRCFYLSHTSPTPGVGALGAALDAAPSHPVPADLRAGITWRSPALFIYTSGTTGLPKPAILTHERVLQMSKMLSLSGATADDVVYTVLPLYHVMGLVVGILGCLDLGATCVLAPKFSTSCFWDDCRQHGVTVILYVGELLRYLCNIPQQPEDRTHTVRLAMGNGLRADVWETFQQRFGPIRIWEVYGSTEGNMGLVNYVGRCGALGKMSCLLRMLSPFELVQFDMEAAEPVRDNQGFCIPVGLGEPGLLLTKVVSQQPFVGYRGPRELSERKLVRNVRQSGDVYYNTGDVLAMDREGFLYFRDRLGDTFRWKGENVSTHEVEGVLSQVDFLQQVNVYGVCVPGCEGKVGMAAVQLAPGQTFDGEKLYQHVRAWLPAYATPHFIRIQDAMEVTSTFKLMKTRLVREGFNVGIVVDPLFVLDNRAQSFRPLTAEMYQAVCEGTWRL

SEQ ID NO: 10858 - protein, 454 aa, Homo sapiens
MALQLGRLSSGPCWLVARGGCGGPRAWSQCGGGGLRAWSQRSAAGRVCRPPGPAGTEQSRGLGHGSTSRGGPWVGTGLAAALAGLVGLATAAFGHVQRAEMLPKTSGTRATSLGRPEEEEDELAHRCSSFMAPPVTDLGELRRRPGDMKTKMELLILETQAQVCQALAQVDGGANFSVDRWERKEGGGGISCVLQDGCVFEKAGVSISVVHGNLSEEAAKQMRSRGKVLKTKDGKLPFCAMGVSSVIHPKNPHAPTIHFNYRYFEVEEADGNKQWWFGGGCDLTPTYLNQEDAVHFHRTLKEACDQHGPDLYPKFKKWCDDYFFIAHRGERRGIGGIFFDDLDSPSKEEVFRFVQSCARAVVPSYIPLVKKHCDDSFTPQEKLWQQLRRGRYVEFNLLYDRGTKFGLFTPGSRIESILMSLPLTARWEYMHSPSENSKEAEILEVLRHPRDWVR

SEQ ID NO: 10859 - protein, 775 aa, Homo sapiens
MASRAVVRARRCPQCPQVRAAAAAPAWAALPLSRSLPPCSNSSSFSMPLFLLLLLVLLLLLEDAGAQQGDGCGHTVLGPESGTLTSINYPQTYPNSTVCEWEIRVKMGERVRIKFGDFDIEDSDSCHFNYLRIYNGIGVSRTEIGKYCGLGLQMNHSIESKGNEITLLFMSGIHVSGRGFLASYSVIDKQDLITCLDTASNFLEPEFSKYCPAGCLLPFAEISGTIPHGYRDSSPLCMAGVHAGVVSNTLGGQISVVISKGIPYYESSLANNVTSVVGHLSTSLFTFKTSGCYGTLGMESGVIADPQITASSVLEWTDHTGQENSWKPKKARLKKPGPPWAAFATDEYQWLQIDLNKEKKITGIITTGSTMVEHNYYVSAYRILYSDDGQKWTVYREPGVEQDKIFQGNKDYHQDVRNNFLPPIIARFIRVNPTQWQQKIAMKMELLGCQFIPKGRPPKLTQPPPPRNSNDLKNTTAPPKIAKGRAPKFTQPLQPRSSNEFPAQTEQTTASPDIRNTTVTPNVTKDVALAAVLVPVLVMVLTTLILILVCAWHWRNRKKKTEGTYDLPYWDRAGWWKGMKQFLPAKAVDHEETPVRYSSSEVNHLSPREVTTVLQADSAEYAQPLVGGIVGTLHQRSTFKPEEGKEAGYADLDPYNSPGQEVYHAYAEPLPITGPEYATPIIMDMSGHPTTSVGQPSTSTFKATGNQPPPLVGTYNTLLSRTDSCSSAQAQYDTPKAGKPGLPAPDELVYQVPQSTQEVSGAGRDGECDVFKEIL

SEQ ID NO: 10860 - protein, 775 aa, Homo sapiens; identical to SEQ ID NO: 10859

SEQ ID NO: 10861 - protein, 64 aa, Homo sapiens
MDPPFYLFTLSLIMRHHISSHSLGHHSHCPLPWMPSNVCLLVGDCEDPRIQYSWPRGPLLATGC

SEQ ID NO: 10862 - protein, 206 aa, Homo sapiens
MAVKKIAIFGATGQTGLTTLAQAVQAGYEVTVLVRDSSRLPSEGPRPAHVVVGDVLQAADVDKTVAGQDAVIVLLGTRNDLSPTTVMSEGARNIVAAMKAHGVDKVVACTSAFLLWDPTKVPPRLQAVTDDHIRMHKVLRESGLKYVAVMPPHIGDQPLTGAYTVTLDGRGPSRVISKHDLGHFMLRCLTTDEYDGHSTYPSHQYQ

SEQ ID NO: 10863 - protein, 211 aa, Homo sapiens
MAVKKIAIFGATGQTGLTTLAQAALCSSLPTGYEVTVLVRDSSRLPSEGPRPAHVVVGDVLQAADVDKTVAGQDAVIVLLGTRNDLSPTTVMSEGARNIVAAMKAHGVDKVVACTSAFLLWDPTKVPPRLQAVTDDHIRMHKVLRESGLKYVAVMPPHIGDQPLTGAYTVTLDGRGPSRVISKHDLGHFMLRCLTTDEYDGHSTYPSHQYQ

SEQ ID NO: 10864 - protein, 285 aa, Homo sapiens
MSDDFLWFEGIAFPTMGFRSETLRKVRDEFVIRDEDVIILTYPKSGTNWLAEILCLMHSKGDAKWIQSVPIWERSPWVESEIGYTALSETESPRLFSSHLPIQLFPKSFFSSKAKVIYLMRNPRDVLVSGYFFWKNMKFIKKPKSWEEYFEWFCQGTVLYGSWFDHIHGWMPMREEKNFLLLSYEELKQDTGRTIEKICQFLGKTLEPEELNLILKNSSFQSMKENKMSNYSLLSVDYVVDKAQLLRKGVSGDWKNHFTVAQAEDFDKLFQEKMADLPRELFPWE

SEQ ID NO: 10865 - protein, 130 aa, Homo sapiens
MSDDFLWFEGIAFPTMGFRSETLRKVRDEFVIRDEDVIILTYPKSGTNWLAEILCLMHSKGDAKWIQSVPIWERSPWVESEIGYTALSETESPRLFSSHLPIQLFPKSFFSSKAKCYMGHGLTTFMAGCP

SEQ ID NO: 10866 - protein, 294 aa, Homo sapiens
MAGTVRCQSQRCSPLSCGPDKAPALSPGSCCPRCLPRPASCMAFGDPHYRTFDGRLLHFQGSCSYVLAKDCHSGDFSVHVTNDDRGRSGVAWTQEVAVLLGDMAVRLLQDGAVTVDGHPVALPFLQEPLLYVELRGHTVILHAQPGLQVLWDGQSQVEVSVPGSYQGRTCGLCGNFNGFAQDDLQGPEGLLLPSEAAFGNSWQVQEGRGYPPGLELPPVLLQMEWSRRAQEQLLWDLELLTGVELGLFWPPQAQFFGPRGQAQQAWSQCCQPGGSTGGDPEQPILKASCDGSRL

SEQ ID NO: 10867 - protein, 301 aa, Homo sapiens
MAASLTCASGLRLHVDLVEKPRTGIMAAETRNVAGAEAPPPQKRYYRQRAHSNPMADHTLRYPVKPEEMDWSELYPEFFAPLTQNQSHDDPKDKKEKRAQAQVEFADIGCGYGGLLVELSPLFPDTLILGLEIRVKVSDYVQDRIRALRAAPAGGFQNIACLRSNAMKHLPNFFYKGQLTKMFFLFPDPHFKRTKHKWRIISPTLLAEYAYVLRVGGLVYTITDVLELHDWMCTHFEEHPLFERVPLEDLSEDPVVGHLGTSTEEGKKVLRNGGKNFPAIFRRIQDPVLQAVTSQTSLPGH

SEQ ID NO: 10868 - protein, 233 aa, Homo sapiens
MDWSELYPEFFAPLTQNQSHDDPKDKKEKRAQAQVEFADIGCGYGGLLVELSPLFPDTLILGLEIRVKVSDYVQDRIRALRAAPAGGFQNIACLRSNAMKHLPNFFYKGQLTKMFFLFPDPHFKRTKHKWRIISPTLLAEYAYVLRVGGLVYTITDVLELHDWMCTHFEEHPLFERVPLEDLSEDPVVGHLGTSTEEGKKVLRNGGKNFPAIFRRIQDPVLQAVTSQTSLPGH

SEQ ID NO: 10869 - protein, 180 aa, Homo sapiens
MAASLTCASGLRLHVDLVEKPRTGIMAAETRNVAGAEAPPPQKRYYRQRAHSNPMADHTLRYPVKPEEMDWSELYPEFFAPLTQNQSHDDPKDKKEKRAQAQVEFADIGCGYGGLLADKDVLPLPRPTFQADKAQVANHQSHPASRICLRAKSWGAGVYHNRCAGATRLDVHSFRRAPTV

SEQ ID NO: 10870 - protein, 273 aa, Homo sapiens
MAMPHWLRHLVPGPWGRLCRDWDQMFAFAQRHVERREAEAAMRNGGQPEKDLESGAHLTHFLFREELPAQSILGNVTELLLAGVDTVSNTLSWALYELSRHPEVQTALHSEITAALSPGSSAYPSATVLSQLPLLKAVVKEVLRLYPVVPGNSRVPDKDIHVGDYIIPKNTLVTLCHYATSRDPAQFPEPNSFRPARWLGEGPTPHPFASLPFGFGKRSCMGRRLAELELQMALAQILTHFEVQPEPGAAPVRPKTRTVLVPERSINLQFLDR

SEQ ID NO: 10871 - protein, 273 aa, Homo sapiens; identical to SEQ ID NO: 10870

SEQ ID NO: 10872 - protein, 508 aa, Homo sapiens
MTQTLKYASRVFHRVRWAPELGASLGYREYHSARRSLADIPGPSTPSFLAELFCKGGLSRLHELQVQGAAHFGPVWLASFGTVRTVYVAAPALVEELLRQEGPRPERCSFSPWTEHRRCRQRACGLLTAEGEEWQRLRSLLAPLLLRPQAAARYAGTLNNVVCDLVRRLRRQRGRGTGPPALVRDVAGEFYKFGLEGIAAVLLGSRLGCLEAQVPPDTETFIRAVGSVFVSTLLTMAMPHWLRHLVPGPWGRLCRDWDQMFAFAQRHVERREAEAAMRNGGQPEKDLESGAHLTHFLFREELPAQSILGNVTELLLAGVDTVSNTLSWALYELSRHPEVQTALHSEITAALSPGSSAYPSATVLSQLPLLKAVVKEVLRLYPVVPGNSRVPDKDIHVGDYIIPKNTLVTLCHYATSRDPAQFPEPNSFRPARWLGEGPTPHPFASLPFGFGKRSCMGRRLAELELQMALAQILTHFEVQPEPGAAPVRPKTRTVLVPERSINLQFLDR

SEQ ID NO: 10873 - protein, 96 aa, Homo sapiens
MKSHPSRAQLTRVSASASQQRLNQEQPQEMRGRECSGCRGVVRSPGEGIEGQPKSKPVWKPKGLCPSVQEPGGIAESPFSGEAYRPLRKTCSVASL

SEQ ID NO: 10874 - protein, 171 aa, Homo sapiens [sequence omitted]

SEQ ID NO: 10875 - protein, 171 aa, Homo sapiens [sequence omitted]

SEQ ID NO: 10876 - protein, 175 aa, Homo sapiens
MCRPHQRRLPSIGQMHCHSGEVADPIGRDGGARPGCGRGRTWYKRGGRPGSCRFADATAEENRVLLAMVNPTVFFDIAVDGEPLGRVSFELFADKVPKTAENFRALSTGEKGFGYKGSCFHRIIPGFMCQGGDFTRHNGTGGKSIYGEKFEHEYCGGHGALWVQEWQDQQEDHHC

SEQ ID NO: 10877 - protein, 232 aa, Homo sapiens
MCRPHQRRLPSIGQMHCHSGEVADPIGRDGGARPGCGRGRTWYKRGGRPGSCRFADATAEENRVLLAMVNPTVFFDIAVDGEPLGRVSFELFADKVPKTAENFRALSTGEKGFGYKGSCFHRIIPGFMCQGGDFTRHNGTGGKSIYGEKFEDENFILKHTGPGILSMANAGPNTNGSQFFICTAKTEWLDGKHVVFGKVKEGMNIVEAMERFGSRNGKTSKKITIADCGQLE

SEQ ID NO: 10878 - protein, 105 aa, Homo sapiens
MCQGGDFTRHNGTGGKSIYGEKFEDENFILKHTGPGILSMANAGPNTNGSQFFICTAKTEWLDGKHVVFGKVKEGMNIVEAMERFGSRNGKTSKKITIADCGQLE

SEQ ID NO: 10879 - protein, 232 aa, Homo sapiens; identical to SEQ ID NO: 10877

SEQ ID NO: 10880 - protein, 173 aa, Homo sapiens
MVNPTVFFDIAVDGEPLGRVSFEVGRAAACGNGAQKVGRGRENFRALSTGEKGFGYKGSCFHRIIPGFMCQGGDFTRHNGTGGKSIYGEKFEDENFILKHTGPGILSMANAGPNTNGSQFFICTAKTEWLDGKHVVFGKVKEGMNIVEAMERFGSRNGKTSKKITIADCGQLE

SEQ ID NO: 10881 - protein, 422 aa, Homo sapiens
MRCVSLLLDADKRIKVAKPVVEMDGDEMTRIIWQFIKEKLILPHVDIQLKYFDLGLPNRDQTDDQVTIDSALATQKYSVAVKCATITPDEARVEEFKLKKMWKSPNGTIRNILGGTVFREPIICKNIPRLVPGWTKPITIGRHAHGDQYKATDFVADRAGTFKMVFTPKDGSGVKEWEVYNFPAGGVGMGMYNTDESISGFAHSCFQYAIQKKWPLYMSTKNTILKAYDGRFKDIFQEIFDKHYKTDFDKNKIWYEHRLIDDMVAQVLKSSGGFVWACKNYDGDVQSDILAQGFGSLGLMTSVLVCPDGKTIEAEAAHGTVTRHYREHQKGRPTSTNPIASIFAWTRGLEHRGKLDGNQDLIRFAQMLEKVCVETVESGAMTKDLAGCIHGLSNVKLNEHFLNTTDFLDTIKSNLDRALGRQ

SEQ ID NO: 10882 - protein, 452 aa, Homo sapiens
MAGYLRVVRSLCRASGSRPAWAPAALTAPTSQEQPRRHYADKRIKVAKPVVEMDGDEMTRIIWQFIKEKLILPHVDIQLKYFDLGLPNRDQTDDQVTIDSALATQKYSVAVKCATITPDEARVEEFKLKKMWKSPNGTIRNILGGTVFREPIICKNIPRLVPGWTKPITIGRHAHGDQYKATDFVADRAGTFKMVFTPKDGSGVKEWEVYNFPAGGVGMGMYNTDESISGFAHSCFQYAIQKKWPLYMSTKNTILKAYDGRFKDIFQEIFDKHYKTDFDKNKIWYEHRLIDDMVAQVLKSSGGFVWACKNYDGDVQSDILAQGFGSLGLMTSVLVCPDGKTIEAEAAHGTVTRHYREHQKGRPTSTNPIASIFAWTRGLEHRGKLDGNQDLIRFAQMLEKVCVETVESGAMTKDLAGCIHGLSNVKLNEHFLNTTDFLDTIKSNLDRALGRQ

SEQ ID NO: 10883 - protein, 114 aa, Homo sapiens
MVGYKNIYFEKKYTLYAKEAMPSTNLTSNSQVYYRKICSVKKANISSSSSQVSMKIPYKLLSNFSQECCRNWTLMKEILSDSLEFVIVKVSKAQILKINLVQYVVPFVIKCNFG

SEQ ID NO: 10884 - protein, 154 aa, Homo sapiens
MAPARAGCCPLLLLLLGLWVAEVLVRAKPKDMTSSQWFKTQHVQPSPQACNSAMSIINKYTERCKDLNTFLHEPFSSVAITCQTPNIACKNSCKNCHQSHGPMSLTMGELTSGKYPNCRYKEKHLNTPYIVACDPPQQGDPGYPLVPVHLDKVV

SEQ ID NO: 10885 - protein, 241 aa, Homo sapiens
MFVFLSDVWLDQVEVLEKLRIMFAGYSPAPPTCFILCGNFSSAPYGKNQVQALKDSLKTLADIICEYPDIHQSRFVFVPGPEDPGFGSILPRPPLAESITNEFRQRVPFSVFTTNPCRIQYCTQEITVFREDLVNKMCRNCVRFPSSNLAIPNHFVKTILSQGHLTPLPLYVCPVYWAYDYALRVYPVPDLLVIADKYDPFTTTNTECLCINPGSFPRSGFSFKVFYPSNKTVEDSKLQGF

SEQ ID NO: 10886 - protein, 533 aa, Homo sapiens
MKMRRYKLFLMFCMAGLCLISFLHFFKTLSYVTFPRELASLSPNLVSSFFWNNAPVTPQASPEPGGPDLLRTPLYSHSPLLQPLPPSKAAEELHRVDLVLPEDTTEYFVRTKAGGVCFKPGTKMLERPPPGRPEEKPEGANGSSARRPPRYLLSARERTGGRGARRKWVECVCLPGWHGPSCGVPTVVQYSNLPTKERLVPREVPRRVINAINVNHEFDLLDVRFHELGDVVDAFVVCESNFTAYGEPRPLKFREMLTNGTFEYIRHKVLYVFLDHFPPGGRQDGWIADDYLRTFLTQDGVSRLRNLRPDDVFIIDDADEIPARDGVLFLKLYDGWTEPFAFHMRKSLYGFFWKQPGTLEVVSGCTVDMLQAVYGLDGIRLRRRQYYTMPNFRQYENRTGHILVQWSLGSPLHFAGWHCSWCFTPEGIYFKLVSAQNGDFPRWGDYEDKRDLNYIRGLIRTGGWFDGTQQEYPPADPSEHMYAPKYLLKNYDRFHYLLDNPYQEPRSTAAGGWRHRGPEGRPPARGKLDEAEV

SEQ ID NO: 10887 - protein, 192 aa, Homo sapiens
MHKAGLLGLCARAWNSVRMASSGMTRRDPLANKVALVTASTDGIGFAIARRLAQDGAHVVVSSRKQQNVDQAVATLQGEGLSVTGTVCHVGKAEDRERLVATAVKLHGGIDILVSNAAVNPFFGSIMDVTEEVWDKLWMDKEKEESMKETLRIRRLGEPEDCAGIVSFLCSEDASYITGETVVVGGGTPSRL

SEQ ID NO: 10888 - protein, 232 aa, Homo sapiens
MHKAGLLGLCARAWNSVRMASSGMTRRDPLANKVALVTASTDGIGFAIARRLAQDGAHVVVSSRKQQNVDQAVATLQGEGLSVTGTVCHVGKAEDRERLVATAVKLHGGIDILVSNAAVNPFFGSIMDVTEEVWDKTLDINVKAPALMTKAVVPEMEKRGGGSVVIVSSIAAFSPSPGFSPYNVSKTALLGLNNTLAIELAPRNIRVNCLHLDLSRLASAGCSGWTRKKRKA

SEQ ID NO: 10889 - protein, 108 aa, Homo sapiens
MEIKKATKIIRIIALIKKSLYEKDTCTRMFIAAQFAMAKMWNQPKYPSINELIKKLWHMYTMEYYSAIKRNELMAFAVTWMRLETVILSEVTREWKTKHPMFSLISGS

SEQ ID NO: 10890 - protein, 141 aa, Homo sapiens [sequence omitted]

SEQ ID NO: 10891 - protein, 302 aa, Homo sapiens
MVRSRQMCNTNMSVPTDGAVTTSQIPASEQETLDLDAGVSEHSGDWLDQDSVSDQFSVEFEVESLDSEDYSLSEEGQELSDEDDEVYQVTVYQAGESDTDSFEEDPEISLADYWKCTSCNEMNPPLPSHCNRCWALRENWLPEDKGKDKGEISEKAKLENSTQAEEGFDVPDCKKTIVNDSRESCVEENDDKITQASQSQESEDYSQPSTSSSIIYSSQEDVKEFEREETQDKEESVESSLPLNAIEPCVICQGRPKNGCIVHGKTGHLMACFTCAKKLKKRNKPCPVCRQPIQMIVLTYFP

SEQ ID NO: 10892 - protein, 327 aa, Homo sapiens
MVRSRQMCNTNMSVPTDGAVTTSQIPASEQETLVRPKPLLLKLLKSVGAQKDTYTMKEDLDAGVSEHSGDWLDQDSVSDQFSVEFEVESLDSEDYSLSEEGQELSDEDDEVYQVTVYQAGESDTDSFEEDPEISLADYWKCTSCNEMNPPLPSHCNRCWALRENWLPEDKGKDKGEISEKAKLENSTQAEEGFDVPDCKKTIVNDSRESCVEENDDKITQASQSQESEDYSQPSTSSSIIYSSQEDVKEFEREETQDKEESVESSLPLNAIEPCVICQGRPKNGCIVHGKTGHLMACFTCAKKLKKRNKPCPVCRQPIQMIVLTYFP

SEQ ID NO: 10893 - protein, 224 aa, Homo sapiens
MVRSRQMCNTNMSVPTDGAVTTSQIPASEQETLDYWKCTSCNEMNPPLPSHCNRCWALRENWLPEDKGKDKGEISEKAKLENSTQAEEGFDVPDCKKTIVNDSRESCVEENDDKITQASQSQESEDYSQPSTSSSIIYSSQEDVKEFEREETQDKEESVESSLPLNAIEPCVICQGRPKNGCIVHGKTGHLMACFTCAKKLKKRNKPCPVCRQPIQMIVLTYFP

SEQ ID NO: 10894 - protein, 108 aa, Homo sapiens
MVRSRQMCNTNMSVPTDGAVTTSQIPASEQETLVRPKPLLLKLLKSVGAQKDTYTMKEVLFYLGQYIMTKRLYDEKQQHISNDCANLFPLVDLSIRELYISNYITLGI

SEQ ID NO: 10895 - protein, 412 aa, Homo sapiens [sequence omitted]

SEQ ID NO: 10896 - protein, 136 aa, Homo sapiens
MVRSRQMCNTNMSVPTDGAVTTSQIPASEQETLVRPKPLLLKLLKSVGAQKDTYTMKEFEREETQDKEESVESSLPLNAIEPCVICQGRPKNGCIVHGKTGHLMACFTCAKKLKKRNKPCPVCRQPIQMIVLTYFP

SEQ ID NO: 10897 - protein, 497 aa, Homo sapiens
MVRSRQMCNTNMSVPTDGAVTTSQIPASEQETLVRPKPLLLKLLKSVGAQKDTYTMKEVLFYLGQYIMTKRLYDEKQQHIVYCSNDLLGDLFGVPSFSVKEHRKIYTMIYRNLVVVNQQESSDSGTSVSENRCHLEGGSDQKDLVQELQEEKPSSSHLVSRPSTSSRRRAISETEENSDELSGERQRKRHKSDSISLSFDESLALCVIREICCERSSSSESTGTPSNPDLDAGVSEHSGDWLDQDSVSDQFSVEFEVESLDSEDYSLSEEGQELSDEDDEVYQVTVYQAGESDTDSFEEDPEISLADYWKCTSCNEMNPPLPSHCNRCWALRENWLPEDKGKDKGEISEKAKLENSTQAEEGFDVPDCKKTIVNDSRESCVEENDDKITQASQSQESEDYSQPSTSSSIIYSSQEDVKEFEREETQDKEESVESSLPLNAIEPCVICQGRPKNGCIVHGKTGHLMACFTCAKKLKKRNKPCPVCRQPIQMIVLTYFP

SEQ ID NO: 10898 - protein, 253 aa, Homo sapiens
MVRSRQMCNTNMSVPTDGAVTTSQIPASEQETLVRPKPLLLKLLKSVGAQKDTYTMKEVLFYLGQYIMTKRLYDEKQQHIVYCSNDLLGDLFGVPSFSVKEHRKIYTMIYRNLVVVNQQESSDSGTSVSENRCHLEGGSDQKDLVQELQEEKPSSSHLVSRPSTSSRRRAISETEFEREETQDKEESVESSLPLNAIEPCVICQGRPKNGCIVHGKTGHLMACFTCAKKLKKRNKPCPVCRQPIQMIVLTYFP

SEQ ID NO: 10899 - protein, 138 aa, Homo sapiens [sequence omitted]

SEQ ID NO: 10900 - protein, 170 aa, Homo sapiens
MAAYKLVLIRHGESAWNLENRFSGWYDADLSPAGHEEAKRGGQALRDAGYEFDICFTSVQKRAIRTLWTVLDAIDQMWLPVVRTWRLNERHYGGLTGLNKAETAAKHGEAQVKIWRRSYDVPPPPMEPDHPFYSNISKDRRYADLTEDQLPSCESLKDTIARALPSGMKK

SEQ ID NO: 10901 - protein, 117 aa, Homo sapiens [sequence omitted]

SEQ ID NO: 10902 - protein, 99 aa, Homo sapiens
MEPDHPFYSNISKDRRYADLTEDQLPSCESLKDTIGQECFLVCVLESLPALFHGSEMPLGPVQVYLSLISESCSSCLTLPHGSSVHLSITVLNPFSISV

SEQ ID NO: 10903 - protein, 325 aa, Homo sapiens
MAASCVLLHTGQKMPLIGLGTWKSEPGQVKAAVKYALSVGYRHIDCAAIYGNEPEIGEALKEDVGPGKAVPREELFVTSKLWNTKHHPEDVEPALRKTLADLQLEYLDLYLMHWPYAFERGDNPFPKNADGTICYDSTHYKETWKALEALVAKGLVQALGLSNFNSRQIDDILSVASVRPAVLQVECHPYLAQNELIAHCQARGLEVTAYSPLGSSDRAWRDPDEPVLLEEPVVLALAEKYGRSPAQILLRWQVQRKVICIPKSITPSRILQNIKVFDFTFSPEEMKQLNALNKNWRYIVPMLTVDGKRVPRDAGHPLYPFNDPY

SEQ ID NO: 10904 - protein, 214 aa, Homo sapiens
MHWPYAFERGDNPFPKNADGTICYDSTHYKETWKALEALVAKGLVQALGLSNFNSRQIDDILSVASVRPAVLQVECHPYLAQNELIAHCQARGLEVTAYSPLGSSDRAWRDPDEPVLLEEPVVLALAEKYGRSPAQILLRWQVQRKVICIPKSITPSRILQNIKVFDFTFSPEEMKQLNALNKNWRYIVPMLTVDGKRVPRDAGHPLYPFNDPY

SEQ ID NO: 10905 - protein, 325 aa, Homo sapiens; identical to SEQ ID NO: 10903

SEQ ID NO: 10906 - protein, 325 aa, Homo sapiens; identical to SEQ ID NO: 10903

SEQ ID NO: 10907 - protein, 325 aa, Homo sapiens; identical to SEQ ID NO: 10903

SEQ ID NO: 10908 - protein, 325 aa, Homo sapiens; identical to SEQ ID NO: 10903

SEQ ID NO: 10909 - protein, 108 aa, Homo sapiens
MHFPGSCLLLGQVPSPHPDSPCCPQRSPMLPLGTDVTHGWIRPAMLPGCLAWTGLLGSRGLRASYSRGERWTWDMAAVCRWSHSAWFPFILREWPWVLLPPPNSQCML

SEQ ID NO: 10910 - protein, 410 aa, Homo sapiens
MEAENAGSYSLQQAQAFYTFPFQQLMAEAPNMAVVNEQQMPEEVPAPAPAQEPVQEAPKGRKRKPRTTEPKQPVEPKKPVESKKSGKSAKSKEKQEKITDTFKVKRKVDRFNGVSEAELLTKTLPDILTFNLDIVIIGINPGLMAAYKGHHYPGPGNHFWKCLFMSGLSEVQLNHMDDHTLPGKYGIGFTNMVERTTPGSKDLSSKEFREGGRILVQKLQKYQPRIAVFNGKCIYEIFSKEVFGVKVKNLEFGLQPHKIPDTETLCYVMPSSSARCAQFPRAQDKVHYYIKLKDLRDQLKGIERNMDVQEVQYTFDLQLAQEDAKKMAVKEEKYDPGYEAAYGGAYGENPCSSEPCGFSSNGLIESVELRGESAFSGIPNGQWMTQSFTDQIPSFSNHCGTQEQEEESHA

SEQ ID NO: 10911 - protein, 410 aa, Homo sapiens; identical to SEQ ID NO: 10910

SEQ ID NO: 10912 - protein, 425 aa, Homo sapiens
MEYSGAITVHCNLCFPSLSDSHAYSLQQAQAFYTFPFQQLMAEAPNMAVVNEQQMPEEVPAPAPAQEPVQEAPKGRKRKPRTTEPKQPVEPKKPVESKKSGKSAKSKEKQEKITDTFKVKRKVDRFNGVSEAELLTKTLPDILTFNLDIVIIGINPGLMAAYKGHHYPGPGNHFWKCLFMSGLSEVQLNHMDDHTLPGKYGIGFTNMVERTTPGSKDLSSKEFREGGRILVQKLQKYQPRIAVFNGKCIYEIFSKEVFGVKVKNLEFGLQPHKIPDTETLCYVMPSSSARCAQFPRAQDKVHYYIKLKDLRDQLKGIERNMDVQEVQYTFDLQLAQEDAKKMAVKEEKYDPGYEAAYGGAYGENPCSSEPCGFSSNGLIESVELRGESAFSGIPNGQWMTQSFTDQIPSFSNHCGTQEQEEESHA

SEQ ID NO: 10913 - protein, 129 aa, Homo sapiens
MEPDHPFYSNISKDRRYADLTEDQLPSCESLKDTIARALPFWNEEIVPQIKEGKRVLIAAHGNSLRGIVKHLEGLSEEAIMELNLPTGIPIVYELDKNLKPIKPMQFLGDEETVRKAMEAVAAQGKAKK

SEQ ID NO: 10914 - protein, 254 aa, Homo sapiens
MAAYKLVLIRHGESAWNLENRFSGWYDADLSPAGHEEAKRGGQALRDAGYEFDICFTSVQKRAIRTLWTVLDAIDQMWLPVVRTWRLNERHYGGLTGLNKAETAAKHGEAQVKIWRRSYDVPPPPMEPDHPFYSNISKDRRYADLTEDQLPSCESLKDTIARALPFWNEEIVPQIKEGKRVLIAAHGNSLRGIVKHLEGLSEEAIMELNLPTGIPIVYELDKNLKPIKPMQFLGDEETVRKAMEAVAAQGKAKK

SEQ ID NO: 10915 - protein, 254 aa, Homo sapiens; identical to SEQ ID NO: 10914

SEQ ID NO: 10916 - protein, 201 aa, Homo sapiens
MAAYKLVLIRHGESAWNLENRFSGWYDADLSPAGHEEAKRGGQALRDAGYEFDICFTSVKIWRRSYDVPPPPMEPDHPFYSNISKDRRYADLTEDQLPSCESLKDTIARALPFWNEEIVPQIKEGKRVLIAAHGNSLRGIVKHLEGLSEEAIMELNLPTGIPIVYELDKNLKPIKPMQFLGDEETVRKAMEAVAAQGKAKK

SEQ ID NO: 10917 - protein, 352 aa, Homo sapiens
MKPALLEVMRMNRICRMVLATCLGSFILVIFYFQSMLHPVMRRNPFGVDICCRKGSRSPLQELYNPIQLELSNTAVLHQMRRDQVTDTCRANSATSRKRRVLTPNDLKHLVVDEDHELIYCYVPKVACTNWKRLMMVLTGRGKYSDPMEIPANEAHVSANLKTLNQYSIPEINHRLKSYMKFLFVREPFERLVSAYRNKFTQKYNISFHKRYGTKIIKRQRKNATQEALRKGDDVKFEEFVAYLIDPHTQREEPFNEHWQTVYSLCHPCHIHYDLVGKYETLEEDSNYVLQLAGVGSYLKFPTYAKSTRTTDEMTTEFFQNISSEHQTQLYEVYKLDFLMFNYSVPSYLKLE

SEQ ID NO: 10918 - protein, 636 aa, Homo sapiens [sequence omitted]

SEQ ID NO: 10919 - protein, 1096 aa, Homo sapiens [sequence omitted]

SEQ ID NO: 10920 - protein, 1307 aa, Homo sapiens [sequence omitted]

SEQ ID NO: 10921 - protein, 1206 aa, Homo sapiens
MYGHQFCPENLKKLILSETTIFDVLPTFFYHANKVVCMASLEVYVRRGYIAYELNSLQHRQLPDGTCVVEFQFMLPSSHPNRMTVPISITNPDLLRHSTELFMDSGFSPLCQRMGAMVAFRRFEDFTRNFDEVISCFANVPKDTPLFSEARTSLYSEDDCKSLREEPIHILNVSIQCADHLEDEALVPILRTFVQSKKNILVDYGLRRITFLIAQEKEFPKFFTFRARDEFAEDRIYRHLEPALAFQLELNRMRNFDLTAVPCANHKMHLYLGAAKVKEGVEVTDHRFFIRAIIRHSDLITKEASFEYLQNEGERLLLEAMDELEVAFNNTSVRTDCNHIFLNFVPTVIMDPFKIEESVRYMVMRYGSRLWKLRVLQAEVKINIRQTTTGSAVPIRLFITNESGYYLDISLYKEVTDSRSGNIMFHSFGNKQGPQHGMLINTPYVTKDLLQAKRFQAQTLGTTYIYDFPEMFRQALFKLWGSPDKYPKDILTYTELVLDSQGQLVEMNRLPGGNEVGMVAFKMRFKTQEYPEGRDVIVIGNDITFRIGSFGPGEDLLYLRASEMARAEGIPKIYVAANSGARIGMAEEIKHMFHVAWVDPEDPHKGFKYLYLTPQDYTRISSLNSVHCKHIEEGGESRYMITDIIGKDDGLGVENLRGSGMIAGESSLAYEEIVTISLVTCRAIGIGAYLVRLGQRVIQVENSHIILTGASALNKVLGREVYTSNNQLGGVQIMHYNGVSHITVPDDFEGVYTILEWLSYMPKDNHSPVPIITPTDPIDREIEFLPSRAPYDPRWMLAGRPHPTLKGTWQSGFFDHGSFKEIMAPWAQTVVTGRARLGGIPVGVIAVETRTVEVAVPADPANLDSEAKIIQQAGQVWFPDSAYKTAQAIKDFNREKLPLMIFANWRGFSGGMKDMYDQVLKFGAYIVDGLRQYKQPILIYIPPYAELRGGSWVVIDATINPLCIEMYADKESRGGVLEPEGTVEIKFRKKDLIKSMRRIDPAYKKLMEQLGEPDLSDKDRKDLEGRLKAREDLLLPIYHQVAVQFADFHDTPGRMLEKGVISDILEWKTARTFLYWRLRRLLLEDQVKQEILQASGELSHVHIQSMLRRWFVETEGAVKAYLWDNNQVVVQWLEQHWQAGDGPRSTIRENITYLKHDSVLKTIRGLVEENPEVAVDCVIYLSQHISPAERAQVVHLLSTMDSPAST

SEQ ID NO: 10922 - protein, 120 aa, Homo sapiens
  VARIANT (1)...(120): Xaa = Any Amino Acid
WLLQGVPPVPSTGPGTQWCTGTSADAHPKANQGATGLGPGPHILFRILPFLERAPRPKAPCCSSWTRRRLRAESCLRPPRCRKCSFWARRRCFRICCLVLSSGRTRPAGVPGAWGRDAPX

SEQ ID NO: 10923 - protein, 882 aa, Homo sapiens
MAADKGPAAGPRSRAAMAQWRKKKGLRKRRGAASQARGSDSEDGEFEIQAEDDARARKLGPGRPLPTFPTSECTSDVEPDTREMVRAQNKKKKKSGGFQSMGLSYPVFKGIMKKGYKVPTPIQRKTIPVILDGKDVVAMARTGSGKTACFLLPMFERLKTHSAQTGARALILSPTRELALQTLKFTKELGKFTGLKTALILGGDRMEDQFAALHENPDIIIATPGRLVHVAVEMSLKLQSVEYVVFDEADRLFEMGFAEQLQEIIARLPGGHQTVLFSATLPKLLVEFARAGLTEPVLIRLDVDTKLNEQLKTSFFLVREDTKAAVLLHLLHNVVRPQDQTVVFVATKHHAEYLTELLTTQRVSCAHIYSALDPTARKINLAKFTLGKCSTLIVTDLAARGLDIPLLDNVINYSFPAKGKLFLHRVGRVARAGRSGTAYSLVAPDEIPYLLDLHLFLGRSLTLARPLKEPSGVAGVDGMLGRVPQSVVDEEDSGLQSTLEASLELRGLARVADNAQQQYVRSRPAPSPESIKRAKEMDLVGLGLHPLFSSRFEEEELQRLRLVDSIKNYRSRATIFEINASSRDLCSQVMRAKRQKDRKAIARFQQGQQGRQEQQEGPVGPAPSRPALQEKQPEKEEEEEAGESVEDIFSEVVGRKRQRSGPNRGAKRRREEARQRDQEFYIPYRPKDFDSERGLSISGEGGAFEQQAAGAVLDLMGDEAQNLTRGRQQLKWDRKKKRFVGQSGQEDKKKIKTESGRYISSSYKRDLYQKWKQKQKIDDRDSDEEGASDRRGPERRGGKRDRGQAGASRPHAPGTPAGRVRPELKTKQQILKQRRRAQKLHFLQRGGLKQLSARNRRRVQELQQGAFGRGARSKKGKMRKRM

SEQ ID NO: 10924 - protein, 137 aa, Homo sapiens
MQCGLVGKIIKRFEQKGFRLVAMKFLPASEEHLKQHYIDLKDRPFFPGLVKYMNSGPVVAMVWEGLNVVKTGRVMLGETNPADSKPGTIRGDFCIQVGRNIIHGSDSVKSAEKEISLRFKPEELVDYKSCAHDWVYE

SEQ ID NO: 10925 - protein, 67 aa, Homo sapiens
MQCGLVGKIIKRFEQKGFRLVAMKFLPASEEHLKQHYIDLKDRPFFPGLVKYMNSGPVVAMEHHSWQ

SEQ ID NO: 10926 - protein, 3081 aa, Homo sapiens [sequence omitted]

SEQ ID NO: 10927 - protein, 2066 aa, Homo sapiens [sequence omitted]

SEQ ID NO: 10928 - protein, 1125 aa, Homo sapiens [sequence omitted]

SEQ ID NO: 10929 - protein, 2066 aa, Homo sapiens [sequence omitted]

SEQ ID NO: 10930 - protein, 599 aa, Homo sapiens
MDPGDAAILESSLRILYRLFESVLPPLPAALQSRMNVIDHVRDMAAAGLHSNVRLLSSLLLTMSNNNPELFSPPQKYQLLVYHADSLFHDKEYRNAVSKYTMALQQKKALSKTSKVRPSTGNSASTPQSQCLPSEIEVKYKMAECYTMLKQDKDAIAILDGIPSRQRTPKINMMLANLYKKAGQERPSVTSYKEVLRQCPLALDAILGLLSLSVKGAEVASMTMNVIQTVPNLDWLSVWIKAYAFVHTGDNSRAISTICSLEKKSLLRDNVDLLGSLADLYFRAGDNKNSVLKFEQAQMLDPYLIKGMDVYGYLLAREGRLEDVENLGCRLFNISDQHAEPWVVSGCHSFYSKRYSRALYLGAKAIQLNSNSVQALLLKGAALRNMGRVQEAIIHFREAIRLAPCRLDCYEGLIECYLASNSIREAMVMANNVYKTLGANAQTLTLLATVCLEDPVTQEKAKTLLDKALTQRPDYIKAVVKKAELLSREQKYEDGIALLRNALANQSDCVLHRILGDFLVAVNEYQEAMDQYSIALSLDPNDQKSLEGMQKMEKEESPTDATQEEDVDDMEGSGEEGDLEGSDSEAAQWADQEQWFGMQ

SEQ ID NO: 10931 - protein, 599 aa, Homo sapiens; identical to SEQ ID NO: 10930

SEQ ID NO: 10932 - protein, 202 aa, Homo sapiens [sequence omitted]

SEQ ID NO: 10933 - protein, 252 aa, Homo sapiens
MAFALLASVPPVFGLYTSFFPVLIYSLLGTGRHLSTGTFAILSLMTGSAVERLVPEPLVGNLSGIEKEQLDAQRVGVAAAVAFGSGALMLSAWVREGGGARGWFAPPLDGDSASSPPQLGMFVLQLGVLSTFLSEPVVKALTSGAALHVLLSQLPSLLGLSLPRQIGCFSLFKTLASLLTALPRSSPAELTISALSLALLVPVKELNVRFRDRLPTPIPGEVVLVLLASVLCFTSSVDTRYQVQIVGLLPGG

SEQ ID NO: 10934 - protein, 202 aa, Homo sapiens [sequence omitted]

SEQ ID NO: 10935 - protein, 363 aa, Homo sapiens
MAPAGRPGAKKGILERLESGEVVIGDGSFLITLEKRGYVKAGLWTPEAVIEHPDAVRQLHMEFLRAGSNVMQTFTFSASEDNMESKWEDVNAAACDLAREVAGKGDALVAGGICQTSIYKYQKDEARIKKLFRQQLEVFAWKNVDFLIAEYFEHVEEAVWAVEVLKESDRPVAVTMCIGPEGDMHDITPGECAVRLVKAGASIVGVNCRFGPDTSLKTMELMKEGLEWAGLKAHLMVQPLGFHAPDCGKEGFVDLPEYPFGLESRVATRWDIQKYAREAYNLGVRYIGGCCGFEPYHIRAIAEELAPERGFLPPASEKHGSWGSGLDMHTKPWIRARARREYWENLLPASGRPFCPSLSKPDF

SEQ ID NO: 10936 - protein, 126 aa, Homo sapiens
MAPAGRPGAKKGILERLESGEVVIGDGSFLITLEKRGYVKAGLWTPEAVIEHPDAVRQLHMEFLRAGSNVMQTFTFSASEDNMESKWEDVNAAACDLAREVAGKGDALVAGGICQTSIYKYQKDEA

SEQ ID NO: 10937 - protein, 363 aa, Homo sapiens; identical to SEQ ID NO: 10935

SEQ ID NO: 10938 - protein, 156 aa, Homo sapiens
MAPAGRPGAKKGILERLESGEVVIGDGSFLITLEKRGYVKAGLWTPEAVIEHPDAVRQLHMEFLRAGSNVMQTFTFSASEDNMESKWEDVNAAACDLAREVAGKGDALVAGGICQTSIYKYQKDEARIKKLFRQQLEVFAWKNVDFLIAEGLPSLA

SEQ ID NO: 10939 - protein, 466 aa, Homo sapiens [sequence omitted]

SEQ ID NO: 10940 - protein, 466 aa, Homo sapiens [sequence omitted]

SEQ ID NO: 10941 - protein, 466 aa, Homo sapiens [sequence omitted]

SEQ ID NO: 10942 - protein, 466 aa, Homo sapiens [sequence omitted]

SEQ ID NO: 10943 - protein, 175 aa, Homo sapiens
MSGSRDVTYSAFAENVNAGTETIITENVAVTTDTQHIYTFFTFPIPALPLLESGESNINISAGLTVNCFQENKIHHCVILWAQWRAEPQPLPNIKKPNEVTGSRANEHTTPSPLFPSIRRAKIKSPKYGEGHQAWIIGIVEKGNCTARIIDKPRIIEVAPQVATQNANPSPGATS

SEQ ID NO: 10944 - protein, 479 aa, Homo sapiens
MYCLQMGLPPTENWNFYMAFSFFRVAAILQGVYKRSLTGQASSTYAEQTGKLTEFVSNLAWDFAVKEGFRVFKEMPFTNPLTRSYHTWARPQSQWCPTGSRSYSSVPEASPAHTSRGGLVISPESLSPPVRELYHRLKHFMEQRVYPAEPELQSHQASAARWSPSPLIEDLKVCNCSAPDTGNMELLVRYGTEAQKARWLIPLLEGKARSCFAMTEPQVASSDATNIEASIREEDSFYVINGHKWWITGILDPRCQLCVFMGKTDPHAPRHRQQSVLLVPMDTPGIKIIRPLTVYGLEDAPGGHGEVRFEHVRVPKENMVLGPGRGFEIAQGRLGPGRIHHCMRLIGFSERALALMKARVKSRLAFGKPLVEQGTVLADIAQSRVEIEQARLLVLRAAHLMDLAGNKAAALDIAMIKMVAPSMASRVIDRAIQAFGAAGLSSDYPLAQFFTWARALRFADGPDEVHRATVAKLELKHRI

SEQ ID NO: 10945 - protein, 1063 aa, Homo sapiens
MCVRSCFQSPRLQWVWRTAFLKHTQRRHQGSHRWTHLGGSTYRAVIFDMGGVLIPSPGRVAAEWEVQNRIPSGTILKALMEGGENGPWMRFMRAEITAEGFLREFGRLCSEMIVESCMEGICKPDPRIYKLCLEQLGLQPSESIFLDDLGTNLKEAARLGIHTIKVNDPETAVKELEALLGFTLRVGVPNTRPVKKTMEIPKDSLQKYLKDLLGIQTTGPLELLQFDHGQSNPTYYIRLANRDLVLRKKPPGTLLPSAHAIEREFRIMKALANAGVPVPNVLDLCEDSSVIGTPFYVMEYCPGLIYKDPSLPGLEPSHRRAIYTAMNTVLCKIHSVDLQAVGLEDYGKQGDYIPRQVRTWVKQYRASETSTIPAMERLIEWLPLHLPRQQRTTVVHGDFRLDNLVFHPEEPEVLAVLDWELSTLGDPLADVAYSCLAHYLPSSFPVLRGINDCDLTQLGIPAAEEYFRMYCLQMGLPPTENWNFYMAFSFFRVAAILQGVYKRSLTGQASSTYAEQTGKLTEFVSNLAWDFAVKEGFRVFKEMPFTNPLTRSYHTWARPQSQWCPTGSRSYSSVPEASPAHTSRGGLVISPESLSPPVRELYHRLKHFMEQRVYPAEPELQSHQASAARWSPSPLIEDLKEKAKAEGLWNLFLPLEADPEKKYGAGLTNVEYAHLCELMGTSLYAPEVCNCSAPDTGNMELLVRYGTEAQKARWLIPLLEGKARSCFAMTEPQVASSDATNIEASIREEDSFYVINGHKWWITGILDPRCQLCVFMGKTDPHAPRHRQQSVLLVPMDTPGIKIIRPLTVYGLEDAPGGHGEVRFEHVRVPKENMVLGPGRGFEIAQGRLGPGRIHHCMRLIGFSERALALMKARVKSRLAFGKPLVEQGTVLADIAQSRVEIEQARLLVLRAAHLMDLAGNKAAALDIAMIKMVAPSMASRVIDRAIQKTSLQEAWSLFQARRRGFAEGQGGSGTESGKLVFRLSVPGWAGTVTSLQPFSPSLSACGNLDTFWEASQGCGTCLLWQLQGSCLASLVSRGAATAGGGLETQDLGAWENGMQPTL

SEQ ID NO: 10946 - protein, 492 aa, Homo sapiens
MLEYLSLTFLISVKIQGDYIPRQVRTWVKQYRASETSTIPAMERLIEWLPLHLPRQQRTTVVHGDFRLDNLVFHPEEPEVLAVLDWELSTLGDPLADVAYSCLAHYLPSSFPVLRGINDCDLTQLGIPAAEEYFRMYCLQMGLPPTENWNFYMAFSFFRVAAILQGVYKRSLTGQASSTYAEQTGKLTEFVSNLAWDFAVKEGFRVFKEMPFTNPLTRSYHTWARPQSQWCPTGSRSYSSVPEASPAHTSRGGLVISPESLSPPVRELYHRLKHFMEQRVYPAEPELQSHQASAARWSPSPLIEDLKEKAKAEGLWNLFLPLEADPEKKYGAGLTNVEYAHLCELMGTSLYAPEVCNCSAPDTGNMELLVRYGTEAQKARWLIPLLEGKARSCFAMTEPQVASSDATNIEASIREEDSFYVINGHKWWITGILDPRCQLCVFMGKTDPHAPRHRQQSVLLVPMDTPGIKIIRPLTVYGLEDAPGCFLPSFSL

SEQ ID NO: 10947 - protein, 378 aa, Homo sapiens
MLPPQPSAAHQGRGGRSGLLPKGPAMLCRLCWLVSYSLAVLLLGCLLFLRKAAKPAGDPTAHQPFWAPPTPRHSRCPPNHTVSSASLSLPSRHRLFLTYRHCRNFSILLEPSGCSKDTFLLLAIKSQPGHVERRAAIRSTWGRVGGWARGRQLKLVFLLGVAGSAPPAQLLAYESREFDDILQWDFTEDFFNLTLKELHLQRWVVAACPQAHFMLKGDDDVFVHVPNVLEFLDGWDPAQDLLVGDVIRQALPNRNTKVKYFIPPSMYRATHYPPYAGGGGYVMSRATVRRLQAIMEDAELFPIDDVFVGMCLRRLGLSPMHHAGFKTFGIRRPLDPLDPCLYRGLLLVHRLSPLEMWTMWALVTDEGLKCAAGPIPQR

SEQ ID NO: 10948 - protein, 378 aa, Homo sapiens; identical to SEQ ID NO: 10947

SEQ ID NO: 10949 - protein, 378 aa, Homo sapiens; identical to SEQ ID NO: 10947

SEQ ID NO: 10950 - protein, 104 aa, Homo sapiens
MSPVSSALCLPGPVAHCGSDPTPAARPGVPLTVFHVVLPLAHIVVAIHSVYLAPQAVPLGLPVPPLPQGLRLFWALRDWHGGCFCKAGGCWKGVRDIWGSARPV

SEQ ID NO: 10951 - protein, 428 aa, Homo sapiens
METFDPTELPELLKLYYRRLFPYSQYYRWLNYGGVIKNYFQHREFSFTLKDDIYIRYQSFNNQSDLEKEMQKMNPYKIDIGAVYSHRPNQHNTVKLGAFQAQEKELVFDIDMTDYDDVRRCCSSADICPKCWTLMTMAIRIIDRALKGKYQQFLNGDFGFKHRLWVYSGRRGVHCWVCDESVRKLSSAVRSGIVEYLSLVKGGQDVKKKVHLSEKIHPFIRKSINIIKKYFEEYALVNQDILENKESWDKILALVPETIHDELQQSFQKSHNSLQRWEHLKKVASRYQNNIKNDKYGPWLEWEIMLQYCFPRLDINVSKGINHLLKSPFSVHPKTGRISVPIDLQKVDQFDPFTVPTISFICRELDAISTNEEEKEENEAESDVKHRTRDYKKTSLAPYVKVFEHFLENLDKSRKGELLKKSDLQKDF

SEQ ID NO: 10952 - protein, 215 aa, Homo sapiens
MPGEATETVPATEQELPQPQAETGSGTESDSDESVPELEEQDSTQATTQQAQLAAAAEIDEEPVSKAKQSRSEKKARKAMSKLGLRQVTGVTRVTIRKSKNILFVITKPDVYKSPASDTYIVFGEAKIEDLSQQAQLAAAEKFKVQGEAVSNIQENTQTPTVQEESEEEEVDETGVEVKDIELVMSQANVSRAKAVRALKNNSNDIVNAIMELTM

SEQ ID NO: 10953 - protein, 278 aa, Homo sapiens
QSIEGQDFGFKHRLWVYSGRRGVHCWVCDESVRKLSSAVRSGIVEYLSLVKGGQDVKKKVHLSEKIHPFIRKSINIIKKYFEEYALVNQDILENKESWDKILALVPETIHDELQQSFQKSHNSLQRWEHLKKVASRYQNNIKNDKYGPWLEWEIMLQYCFPRLDINVSKGINHLLKSPFSVHPKTGRISVPIDLQKVDQFDPFTVPTISFICRELDAISTNEEEKEENEAESDVKHRTRDYKKTSLAPYVKVFEHFLENLDKSRKGELLKKSDLQKDF

SEQ ID NO: 10954 - protein, 215 aa, Homo sapiens; identical to SEQ ID NO: 10952

SEQ ID NO: 10955 - protein, 215 aa, Homo sapiens; identical to SEQ ID NO: 10952

SEQ ID NO: 10956 - protein, 97 aa, Homo sapiens
MSLEALGHTVSSCFSSSLQVGLFTEIGPMSCFISRHSIPSEMEFDPNSNPPCYKTMDEDIVIQQDDEIRLKIVGTRVDKNDIFAIGSLMDDYLGLVS

SEQ ID NO: 10957 - protein, 172 aa, Homo sapiens
MFYHISLEHEILLHPRYFGPNLLNTVKQKLFTEVEGTCTGKYGFVIAVTTIDNIGAGVIQPGRGFVLYPVKYKAIVFRPFKGEVVDAVVTQVNKVGLFTEIGPMSCFISRHSIPSEMEFDPNSNPPCYKTMDEDIVIQQDDEIRLKIVGTRVDKNDIFAIGSLMDDYLGLVS

SEQ ID NO: 10958 - protein, 706 aa, Homo sapiens [sequence omitted]

SEQ ID NO: 10959 - protein, 214 aa, Homo sapiens
MGLAGVCALRRSAGYILVGGAGGQSAAAAARRCSEGEWASGGVRSFSRAAAAMAPIKVGDAIPAVEVFEGEPGNKVNLAELFKGKKGVLFGVPGAFTPGCSKTHLPGFVEQAEALKAKGVQVVACLSVNDAFVTGEWGRAHKAEGKVRLLADPTGAFGKETDLLLDDSLVSIFGNRRLKRFSMVVQDGIVKALNVEPDGTGLTCSLAPNIISQL

SEQ ID NO: 10960 - protein, 422 aa, Homo sapiens
MSSQVVGIEPLYIKAEPASPDSPKGSSETETEPPVALAPGPAPTRCLPGHKEEEDGEGAGPGEQGGGKLVLSSLPKRLCLVCGDVASGYHYGVASCEACKAFFKRTIQGSIEYSCPASNECEITKRRRKACQACRFTKCLRVGMLKEGVRLDRVRGGRQKYKRRPEVDPLPFPGPFPAGPLAVAGGPRKTAPVNALVSHLLVVEPEKLYAMPDPAGPDGHLPAVATLCDLFDREIVVTISWAKSIPGFSSLSLSDQMSVLQSVWMEVLVLGVAQRSLPLQDELAFAEDLVLDEEGARAAGLGELGAALLQLVRRLQALRLEREEYVLLKALALANSDSVHIEDAEAVEQLREALHEALLEYEAGRAGPGGGAERRRAGRLLLTLPLLRQTAGKVLAHFYGVKLEGKVPMHKLFLEMLEAMMD

SEQ ID NO: 10961 - protein, 423 aa, Homo sapiens
MSSQVVGIEPLYIKAEPASPDSPKGSSETETEPPVALAPGPAPTRCLPGHKEEEDGEGAGPGEQGGGKLVLSSLPKRLCLVCGDVASGYHYGVASCEACKAFFKRTIQGSIEYSCPASNECEITKRRRKACQACRFTKCLRVGMLKEGVRLDRVRGGRQKYKRRPEVDPLPFPGPFPAGPLAVAGGPRKTAAPVNALVSHLLVVEPEKLYAMPDPAGPDGHLPAVATLCDLFDREIVVTISWAKSIPGFSSLSLSDQMSVLQSVWMEVLVLGVAQRSLPLQDELAFAEDLVLDEEGARAAGLGELGAALLQLVRRLQALRLEREEYVLLKALALANSDSVHIEDAEAVEQLREALHEALLEYEAGRAGPGGGAERRRAGRLLLTLPLLRQTAGKVLAHFYGVKLEGKVPMHKLFLEMLEAMMD

SEQ ID NO: 10962 - protein, 420 aa, Homo sapiens
MSSQVVGIEPLYIKAEPASPDSPKGSSETETEPPVALAPGPAPTRCLPGHKEEEDGEGAGPGEQGGGKLVLSSLPKRLCLVCGDVASGYHYGVASCEACKAFFKRTIQGSIEYSCPASNECEITKRRRKACQACRFTKCLRVGMLKEVQTRRGSRKLCSAGGRSRLRSGGGPGPPSAGCRRCAASGAPPAAVAPARRRSGSGRGAGMGLAGVCALRRSAGYILVGGAGGQSAAAAARRCSEGEWASGGVRSFSRAAAAMAPIKVGDAIPAVEVFEGEPGNKVNLAELFKGKKGVLFGVPGAFTPGCSKTHLPGFVEQAEALKAKGVQVVACLSVNDAFVTGEWGRAHKAEGKVRLLADPTGAFGKETDLLLDDSLVSIFGNRRLKRFSMVVQDGIVKALNVEPDGTGLTCSLAPNIISQL

SEQ ID NO: 10963 - protein, 212 aa, Homo sapiens
MPDPAGPDGHLPAVATLCDLFDREIVVTISWAKSIPGFSSLSLSDQMSVLQSVWMEVLVLGVAQRSLPLQDELAFAEDLVLDEEGARAAGLGELGAALLQLVRRLQALRLEREEYVLLKALALANSDSVHIEDAEAVEQLREALHEALLEYEAGRAGPGGGAERRRAGRLLLTLPLLRQTAGKVLAHFYGVKLEGKVPMHKLFLEMLEAMMD

SEQ ID NO: 10964 - protein, 168 aa, Homo sapiens
  VARIANT (1)...(168): Xaa = Any Amino Acid
MSSQVVGIEPLYIKAEPASPDSPKGSSETETEPPVALAPGPAPTRCLPGHKEEEDGEGAGPGEQGGGKLVLSSLPKRLCLVCGDVASGYHYGVASCEACKAFFKRTIQGSIEYSCPASNECEITKRRRKACQACRFTKCLRVGMLKEGERWAGAGRGLGESGTRARWX

SEQ ID NO: 10965 - protein, 214 aa, Homo sapiens; identical to SEQ ID NO: 10959

SEQ ID NO: 10966 - protein, 423 aa, Homo sapiens; identical to SEQ ID NO: 10961

SEQ ID NO: 10967 - protein, 598 aa, Homo sapiens
MSASAQQLAEELQIFGLDCEEALIEKLVELCVQYGQNEEGMVGELIAFCTSTHKVGLTSEILNSFEHEFLSKRLSKARHSTCKDSGHAGARDIVSIQELIEVEEEEEILLNSYTTPSKGSQKRAISTPETPLTKRSVSTRSPHQLLSPSSFSPSATPSQKYNSRSNRGEVVTSFGLAQGVSWSGRGGAGNISLKVLGCPEALTGSYKSMFQKLPDIREVLTCKIEELGSELKEHYKIEAFTPLLAPAQEPVTLLGQIGCDSNGKLNNKSVILEGDREHSSGAQIPVDLSELKEYSLFPGQVVIMEGINTTGRKLVATKLYEGVPLPFYQPTEEDADFEQSMVLVACGPYTTSDSITYDPLLDLIAVINHDRPDVCILFGPFLDAKHEQVENCLLTSPFEDIFKQCLRTIIEGTRSSGSHLVFVPSLRDVHHEPVYPQPPFSYSDLSREDKKQVQFVSEPCSLSINGVIFGLTSTDLLFHLGAEEISSSSGTSDRFSRILKHILTQRSYYPLYPPQEDMAIDYESFYVYAQLPVTPDVLIIPSELRYFVKDVLGCVCVNPGRLTKGQVGGTFARLYLRRPAADGAERQSPCIAVQVVRI

SEQ ID NO: 10968 - protein, 91 aa, Homo sapiens
MIQLVPHNSSWNYLKGILQDRGLSKYPNLLNQLLDLQPSHSSPYLIAFLVGIYEDMLENQCVNKEDILNNALGLCEILAKEKDMIRKEYWR

SEQ ID NO: 10969 - protein, 205 aa, Homo sapiens [sequence omitted]

SEQ ID NO: 10970 - protein, 92 aa, Homo sapiens
MAVCTLHQEEGQGRSHMQYSETHQCHTRPAGGESSAPHAGGLGCSRAIRCSSFSHGTKRVKEQLLEAPGRGHLAAVTGDFAVHLCSLAVPWE

SEQ ID NO: 10971 - protein, 70 aa, Homo sapiens
IRGRLRTKSLSFHQGAPRGRRELQVHLLLLQEIPLPTGCLDELLKAAECPAAGELWPEPKDEGGSLTLLL

SEQ ID NO: 10972 - protein, 121 aa, Homo sapiens [sequence omitted]

SEQ ID NO: 10973 - protein, 130 aa, Homo sapiens [sequence omitted]

SEQ ID NO: 10974 - protein, 475 aa, Homo sapiens
MAAKSQPNIPKAKSLDGVTNDRTASQGQWGRAWEVDWFSLASVIFLLLFAPFIVYYFIMACDQYSCALTGPVVDIVTGHARLSDIWAKTPPITRKAAQLYTLWVTFQVLLYTSLPDFCHKFLPGYVGGIQEGAVTPAGVVNKYQINGLQAWLLTHLLWFANAHLLSWFSPTIIFDNWIPLLWCANILGYAVSTFAMVKGYFFPTSARDCKFTGNFFYNYMMGIEFNPRIGKWFDFKLFFNGRPGIVAWTLINLSFAAKQRELHSHVTNAMVLVNVLQAIYVIDFFWNETWYLKTIDICHDHFGWYLGWGDCVWLPYLYTLQGLYLVYHPVQLSTPHAVGVLLLGLVGYYIFRVANHQKDLFRRTDGRCLIWGRKPKVIECSYTSADGQRHHSKLLVSGFWGVARHFNYVGDLMGSLAYCLACGGGHLLPYFYIIYMAILLTHRCLRDEHRCASKYGRDWERYTAAVPYRLLPGIF

SEQ ID NO: 10975 - protein, 475 aa, Homo sapiens; identical to SEQ ID NO: 10974

SEQ ID NO: 10976 - protein, 86 aa, Homo sapiens
MKPGLATCPRQVNGEARKSARWSQLLSGREQGDPGAQIRQCQPLPFSMYREHSVPSEATVPDPWEAGLAFAPFQNEGRLGPIARAI

SEQ ID NO: 10977 - protein, 415 aa, Homo sapiens
MQMSYAIRCAFYQLLLAALMLVAMLQLLYLSLLSGLHGQEEQDQYFEFFPPSPRSVDQVKAQLRTALASGGVLDASGDYRVYRGLLKTTMDPNDVILATHASVDNLLHLSGLLERWEGPLSVSVFAATKEEAQLATVLAYALSSHCPDMRARVAMHLVCPSRYEAAVPDPREPGEFALLRSCQEVFDKLARVAQPGINYALGTNVSYPNNLLRNLAREGANYALVIDVDMVPSEGLWRGLREMLDQSNQWGGTALVVPAFEIRRARRMPMNKNELVQLYQVGEVRPFYYGLCTPCQAPTNYSRWVNLPEESLLRPAYVVPWQDPWEPFYVAGGKVPTFDERFRQYGFNRISQACELHVAGFDFEVLNEGFLVHKGFKEALKFHPQKEAENQHNKILYRQFKQELKAKYPNSPRRC

SEQ ID NO: 10978 - protein, 415 aa, Homo sapiens; identical to SEQ ID NO: 10977

SEQ ID NO: 10979 - protein, 297 aa, Homo sapiens
MSDRYLEQRISIKFCVKLNKSASETHHLLKEAYGDEVMSRARVFDWHKRFKEGREDVRDDARSGRPVTHRTDDNIQKVKDLVCSNRQLTVRMMAEELNLDKETVRLILKENLNMRKISAKVISGVLKGEPKPRKLDFRSDLSKETRKNSSCLRKKVTGSETWSYLQGEAGGEMPLPVSHPRVHYSASQLLQASSSTSLPPRSYEQGWYVPASDAGPRPMVECRVPEAMLVQTWFRHSNQKQVHVISLTSLTVTYCNWTGVVTHLSPHCLKTIPYTAPVLFGLEFAENWRLLDTNFLS

SEQ ID NO: 10980 - protein, 129 aa, Homo sapiens
MEPNHPFYSNISKDRRYADLTEDLLPSCESLKDTIARALTFWNEEIVPQIKEGKRVLIAAHGNSLRGIAKHLEGLSEEAIMELNLPTGIPIVYEWDKNLKPIKPMQFLGDEEMVRKAMEAVAAQGKAKK

SEQ ID NO: 10981 - protein, 98 aa, Homo sapiens
  VARIANT (1)...(98): Xaa = Any Amino Acid
MKRWYAKPWKLWLPRARPRSEGQQGGYCPQECFLVWVLQSLPALFRDSEMPLGPVQVCLSLISESCSTCLALPHGSSVHLSITVLNLFPDQYNKGVMX

SEQ ID NO: 10982 - protein, 129 aa, Homo sapiens; identical to SEQ ID NO: 10980

SEQ ID NO: 10983 - protein, 129 aa, Homo sapiens; identical to SEQ ID NO: 10980

SEQ ID NO: 10984 - protein, 392 aa, Homo sapiens
MSTRESFNPESYELDKSFRLTRFTELKGTGCKVPQDVLQKLLESLQENHFQEDEQFLGAVMPRLGIGMDTCVIPLRHGGLSLVQTTDYIYPIVDDPYMMGRIACANVLSDLYAMGVTECDNMLMLLGVSNKMTDRERDKVMPLIIQGFKDAAEEAGTSVTGGQTVLNPWIVLGGVATTVCQPNEFIMPDNAVPGDVLVLTKPLGTQVAVAVHQWLDIPEKWNKIKLVVTQEDVELAYQEAMMNMARLNRTAAGLMHTFNAHAATDITGFGILGHAQNLAKQQRNEVSFVIHNLPVLAKMAAVSKACGNMFGLMHGTCPETSGGLLICLPREQAARFCAEIKSPKYGEGHQAWIIGIVEKGNRTARIIDKPRIIEVAPQVATQNVNPTPGATS

SEQ ID NO: 10985 - protein, 321 aa, Homo sapiens
MSTRESFNPESYELDKSFRLTRFTELKGTGCKVPQDVLQKLLESLQENHFQEDEQFLGAVMPRLGIGMDTCVIPLRHGGLSLVQTTDYIYPIVDDPYMMGRIACANVLSDLYAMGVTECDNMLMLLGVSNKMTDRERDKVMPLIIQGFKDAAEEAGTSVTGGQTVLNPWIVLGGVATTVCQPNEFIMPDNAVPGDVLVLTKPLGTQVAVAVHQWLDIPEKWNKIKLVVTQEDVELAYQEAMMNMARLNRTGGLLICLPREQAARFCAEIKSPKYGEGHQAWIIGIVEKGNRTARIIDKPRIIEVAPQVATQNVNPTPGATS

SEQ ID NO: 10986 - protein, 392 aa, Homo sapiens; identical to SEQ ID NO: 10984

SEQ ID NO: 10987 - protein, 392 aa, Homo sapiens; identical to SEQ ID NO: 10984

SEQ ID NO: 10988 - protein, 392 aa, Homo sapiens; identical to SEQ ID NO: 10984

SEQ ID NO: 10989 - protein, 216 aa, Homo sapiens
MESQEPTESSQNGKQYIISEELISEGKWVKLEKTTYMDPTGKTRTWESVKRTTRKEQTADGVAVIPVLQRTLHYECIVLVKQFRPPMGGYCIEFPAGLIDDGETPEAAALRELEEETGYKGDIAECSPAVCMDPGLSNCTIHIVTVTINGDDAENARPKPKPEFVEVISLPKNDLLQRLDALVAEEHLTVDARVYSYALALKHANAKPFEVPFLKF

SEQ ID NO: 10990 - protein, 219 aa, Homo sapiens
MESQEPTESSQNGKQYIISEELISEGKWVKLEKTTYMDPTGKTRTWESVKRTTRKEQTADGVAVIPVLQRTLHYECIVLVKQFRPPMGGYCIEFPAGLIDDGETPEAAALRELEEETGYKGDIAECSPAVCMDPGLSNCTIHIVTVTINGDDAENARPKPKPGDGEFVEVISLPKNDLLQRLDALVAEEHLTVDARVYSYALALKHANAKPFEVPFLKF

SEQ ID NO: 10991 - protein, 155 aa, Homo sapiens
MFITVSSCASPNFQTSLENASIDHDWFMVLCMEHHMFREIKNSDSGTWVKSTIHYIWISRSFAVEERYCHRENYRSRRKSMKVNDDTPLGTRKMVFIYTYNRCKRLEEACHLKTFLIPSYVVHFVHTTLWSAASPTSWRISVLKCTSEHGYVWRN

SEQ ID NO: 10992 - protein, 288 aa, Homo sapiens [sequence omitted]

SEQ ID NO: 10993 - protein, 288 aa, Homo sapiens [sequence omitted]

SEQ ID NO: 10994 - protein, 47 aa, Homo sapiens
MWPLPSATQRRASCSPLSYAGLGSDGKWNLVMTRNCFPTKSTWRWQC

SEQ ID NO: 10995 - protein, 93 aa, Homo sapiens
MWVLPFCQQFWFLRKSPSIRHEISGSKNSIFFVQIKTCVSSMMTHLVPHKAKPAAAATSVDTLGSSQSQAHCSCHIPGLTVQQVLFSRQESKC

SEQ ID NO: 10996 - protein, 83 aa, Homo sapiens
MGREEQKKIGSVSEPPEKKSEPSTASRVTEPIHLPGGTTAVISPSGHWEALLERVCPETPRRSCGKDSRGPGVLASGPGVMCP

SEQ ID NO: 10997 - protein, 92 aa, Homo sapiens
MAKESTQGHRSYLLTCCIAQKPSCRWSGSCGGWLPAGSTSGLLKSMWPLPSATQRRASCSPLSYAGLGSDGKWNLVMTRNCFPTKSTWRWQC

SEQ ID NO: 10998 - protein, 976 aa, Homo sapiens
MLAACGWAVAALSWTAGTARKFSDVLHTIKEHAFVASEYPVILSIEDHCSIAQQRNMAQYFKKVLGDTLLTKPVEISADGLPSPNQLKRKILIKHKKLAEGSAYEEVPTSMMYSENDISNSIKNGILYLEDPVNHEWYPHYFVLTSSKIYYSEETSSDQGNEDEEEPKEVSSSTELHSNEKWFHGKLGAGRDGRHIAERLLTEYCIETGAPDGSFLVRESETFVGDYTLSFWRNGKVQHCRIHSRQDAGTPKFFLTDNLVFDSLYDLITHYQQVPLRCNEFEMRLSEPVPQTNAHESKEWYHASLTRAQAEHMLMRVPRDGAFLVRKRNEPNSYAISFRAEGKIKHCRVQQEGQTVMLGNSEFDSLVDLISYYEKHPLYRKMKLRYPINEEALEKIGTAEPDYGALYEGRNPGFYVEANPMPTFKCAVKALFDYKAQREDELTFIKSAIIQNVEKQEGGWWRGDYGGKKQLWFPSNYVEEMVNPVALEPEREHLDENSPLGDLLRGVLDVPACQIAIRPEGKNNRLFVFSISMASVAHWSLDVAADSQEELQDWVKKIREVAQTADARLTEGKIMERRKKIALELSELVVYCRPVPFDEEKIGTERACYRDMSSFPETKAEKYVNKAKGKKFLQYNRLQLSRIYPKGQRLDSSNYDPLPMWICGSQLVALNFQTPDKPMQMNQALFMTGRHCGYVLQPSTMRDEAFDPFDKSSLRGLEPCAISIEVLGARHLPKNGRGIVCPFVEIEVAGAEYDSTKQKTEFVVDNGLNPVWPAKPFHFQISNPEFAFLRFVVYEEDMFSDQNFLAQATFPVKGLKTGYRAVPLKNNYSEDLELASLLIKIDIFPAKQENGDLSPFSGTSLRERGSDASGQLFHGRAREGSFESRYQQPFEDFRISQEHLADHFDSRERSKDTLPFCPGPQEGLGSMETTASSCTPASLESSRCCAPCRMPRTGFFGSSPLWRPSGSRSLKPGFQQ

SEQ ID NO: 10999 - protein, 606 aa, Homo sapiens
MLAACGWAVAALSWTAGTARKFSDVLHTIKEHAFVASEYPVILSIEDHCSIAQQRNMAQYFKKVLGDTLLTKPVEISADGLPSPNQLKRKILIKHKKLAEGSAYEEVPTSMMYSENDISNSIKNGILYLEDPVNHEWYPHYFVLTSSKIYYSEETSSDQGNEDEEEPKEVSSSTELHSNEKWFHGKLGAGRDGRHIAERLLTEYCIETGAPDGSFLVRESETFVGDYTLSFWRNGKVQHCRIHSRQDAGTPKFFLTDNLVFDSLYDLITHYQQVPLRCNEFEMRLSEPVPQTNAHESKEWYHASLTRAQAEHMLMRVPRDGAFLVRKRNEPNSYAISFRAEGKIKHCRVQQEGQTVMLGNSEFDSLVDLISYYEKHPLYRKMKLRYPINEEALEKIGTAEPDYGALYEGRNPGFYVEANPMPTFKCAVKALFDYKAQREDELTFIKSAIIQNVEKQEGGWWRGDYGGKKQLWFPSNYVEEMVNPVALEPEREHLDENSPLGDLLRGVLDVPACQIAIRPEGKNNRLFVFSISMASVAHWSLDVAADSQEELQDWVKKIREVAQTADARVRFCWNLLGGSVWARQAAEASSSQHRPPQSSGAADGLC

SEQ ID NO: 11000 - protein, 1290 aa, Homo sapiens
MAGAASPCANGCGPGAPSDAEVLHLCRSLEVGTVMTLFYSKKSQRPERKTFQVKLETRQITWSRGADKIEGAIDIREIKEIRPGKTSRDFDRYQEDPAFRPDQSHCFVILYGMEFRLKTLSLQATSEDEVNMWIKGLTWLMEDTLQAPTPLQIERWLRKQFYSVDRNREDRISAKDLKNMLSQVNYRVPNMRFLRERLTDLEQRSGDITYGQFAQLYRSLMYSAQKTMDLPFLEASTLRAGERPELCRVSLPEFQQFLLDYQGELWAVDRLQVQEFMLSFLRDPLREIEEPYFFLDEFVTFLFSKENSVWNSQLDAVCPDTMNNPLSHYWISSSHNTYLTGDQFSSESSLEAYARCLRMGCRCIELDCWDGPDGMPVIYHGHTLTTKIKFSDVLHTIKEHAFVASEYPVILSIEDHCSIAQQRNMAQYFKKVLGDTLLTKPVEISADGLPSPNQLKRKILIKHKKLAEGSAYEEVPTSMMYSENDISNSIKNGILYLEDPVNHEWYPHYFVLTSSKIYYSEETSSDQGNEDEEEPKEVSSSTELHSNEKWFHGKLGAGRDGRHIAERLLTEYCIETGAPDGSFLVRESETFVGDYTLSFWRNGKVQHCRIHSRQDAGTPKFFLTDNLVFDSLYDLITHYQQVPLRCNEFEMRLSEPVPQTNAHESKEWYHASLTRAQAEHMLMRVPRDGAFLVRKRNEPNSYAISFRAEGKIKHCRVQQEGQTVMLGNSEFDSLVDLISYYEKHPLYRKMKLRYPINEEALEKIGTAEPDYGALYEGRNPGFYVEANPMPTFKCAVKALFDYKAQREDELTFIKSAIIQNVEKQEGGWWRGDYGGKKQLWFPSNYVEEMVNPVALEPEREHLDENSPLGDLLRGVLDVPACQIAIRPEGKNNRLFVFSISMASVAHWSLDVAADSQEELQDWVKKIREVAQTADARLTEGKIMERRKKIALELSELVVYCRPVPFDEEKIGTERACYRDMSSFPETKAEKYVNKAKGKKFLQYNRLQLSRIYPKGQRLDSSNYDPLPMWICGSQLVALNFQTPDKPMQMNQALFMTGRHCGYVLQPSTMRDEAFDPFDKSSLRGLEPCAISIEVLGARHLPKNGRGIVCPFVEIEVAGAEYDSTKQKTEFVVDNGLNPVWPAKPFHFQISNPEFAFLRFVVYEEDMFSDQNFLAQATFPVKGLKTGYRAVPLKNNYSEDLELASLLIKIDIFPAKENGDLSPFSGTSLRERGSDASGQLFHGRAREGSFESRYQQPFEDFRISQEHLADHFDSRERRAPRRTRVNGDNRL

SEQ ID NO: 11001 - protein, 1290 aa, Homo sapiens; identical to SEQ ID NO: 11000

SEQ ID NO: 11002 - protein, 384 aa, Homo sapiens
MAFPCRRSLTAKTLACLLVGVSFLALQQWFLQAPRSPREERSPQEETPEGPTDAPAADEPPSELVPGPPCVANASANATADFEQLPARIQDFLRYRHCRHFPLLWDAPAKCAGGRGVFLLLAVKSAPEHYERRELIRRTWGQERSYGGRPVRRLFLLGTPGPEDEARAERLAELVALEAREHGDVLQWAFADTFLNLTLKHLHLLDWLAARCPHARFLLSGDDDVFVHTANVVRFLQAQPPGRHLFSGQLMEGSVPIRDSWSKYFVPPQLFPGSAYPVYCSGGGFLLSGPTARALRAAARHTPLFPIDDAYMGMCLERAGLAPSGHEGIRPFGVQLPGAQQSSFDPCMYRELLLVHRFAPYEMLLMWKALHSPALSCDRGHRVS

SEQ ID NO: 11003 - protein, 82 aa, Homo sapiens
ESQRRRSPCQPFIGSGTHEVQLVPGTVHSLKQLKGLSPDTDATLSRMHGPGLTLSMEEVGSARGGRMVARDTESLVLGLWLS

SEQ ID NO: 11004 - protein, 526 aa, Homo sapiens [sequence omitted]

SEQ ID NO: 11005 - protein, 871 aa, Homo sapiens
MSDSGSQLGSMGSLTMKSQLQITVISAKLKENKKNWFGPSPYVEVTVDGQSKKTEKCNNTNSPKWKQPLTVIVTPVSKLHFRVWSHQTLKSDVLLGTAALDIYETLKSNNMKLEEVVVTLQLGGDKEPTETIGDLSICLDGLQLESEVVTNGETTCSENGVSLCLPRLECNSAISAHCNLCLPGLSDSPISASRVAGFTGASQNDDGSRSKDETRVSTNGSDDPEDAGAGENRRVSGNNSPSLSNGGFKPSRPPRPSRPPPPTPRRPASVNGSPSATSESDGSSTGSLPPTNTNTNTSEGATSGLIIPLTISGGSGPRPLNPVTQAPLPPGWERRVDNMGRIYYVDHFTRTTTWQRPTLESVRNYEQWQLQRSQLQGAMQQFNQRFIYGNQDLFATSQSKEFDPLGPLPPGWEKRTDSNGRVYFVNHNTRITQWEDPRSQGQLNEKPLPEGWEMRFTVDGIPYFVDHNRRTTTYIDPRTGKSALDNGPQIAYVRDFKAKVQYFRFWCQQLAMPQHIKITVTRKTLFEDSFQQIMSFSPQDLRRRLWVIFPGEEGLDYGGVAREWFFLLSHEVLNPMYCLFEYAGKDNYCLQINPASYINPDHLKYFRFIGRFIAMALFHGKFIDTGFSLPFYKRILNKPVGLKDLESIDPEFYNSLIWVKENNIEECDLEMYFSVDKEILGEIKSHDLKPNGGNILVTEENKEEYIRMVAEWRLSRGVEEQTQAFFEGFNEILPQQYLQYFDAKELEVLLCGMQEIDLNDWQRHAIYRHYARTSKQIMWFWQFVKEIDNEKRMRLLQFVTGTCRLPVGGFADLMGSNGPQKFCIEKVGKENWLPRSHTCFNRLDLPPYKSYEQLKEKLLFAIEETEGFGQE

SEQ ID NO: 11006 - protein, 443 aa, Homo sapiens
MSDSGSQLGSMGSLTMKSQLQITVISAKLKENKKNWFGPSPYVEVTVDGQSKKTEKCNNTNSPKWKQPLTVIVTPVSKLHFRVWSHQTLKSDVLLGTAALDIYETLKSNNMKLEEVVVTLQLGGDKEPTETIGDLSICLDGLQLESEVVTNGETTCSESASQNDDGSRSKDETRVSTNGSDDPEDAGAGENRRVSGNNSPSLSNGGFKPSRPPRPSRPPPPTPRRPASVNGSPSATSESDGSSTGSLPPTNTNTNTSEGATSGLIIPLTISGGSGPRPLNPVTQAPLPPGWERRVDNMGRIYYVDHFTRTTTWQRPTLESVRNYEQWQLQRSQLQGAMQQFNQRFIYGNQDLFATSQSKEFDPLGPLPPGWEKRTDSNGRVYFVNHNTRITQWEDPRSQGQLNEKPLPEGWEMRFTVDGIPYFVDHNRRTTTYIDPRTGKSAL

SEQ ID NO: 11007 - protein, 887 aa, Homo sapiens
MHFTVALWRQRCLLCHVQVFQPIGGMSDSGSQLGSMGSLTMKSQLQITVISAKLKENKKNWFGPSPYVEVTVDGQSKKTEKCNNTNSPKWKQPLTVIVTPVSKLHFRVWSHQTLKSDVLLGTAALDIYETLKSNNMKLEEVVVTLQLGGDKEPTETIGDLSICLDGLQLESEVVTNGETTCSESASQNDDGSRSKDETRVSTNGSDDPEDAGAGENRRVSGNNSPSLSNGGFKPSRPPRPSRPPPPTPRRPASVNGSPSATSESDGSSTGSLPPTNTNTNTSEGATSGLIIPLTISGGSGPRPLNPVTQAPLPPGWEQRVDQHGRVYYVDHVEKRTTWDRPEPLPPGWERRVDNMGRIYYVDHFTRTTTWQRPTLESVRNYEQWQLQRSQLQGAMQQFNQRFIYGNQDLFATSQSKEFDPLGPLPPGWEKRTDSNGRVYFVNHNTRITQWEDPRSQGQLNEKPLPEGWEMRFTVDGIPYFVDHNRRTTTYIDPRTGKSALDNGPQIAYVRDFKAKVQYFRFWCQQLAMPQHIKITVTRKTLFEDSFQQIMSFSPQDLRRRLWVIFPGEEGLDYGGVAREWFFLLSHEVLNPMYCLFEYAGKDNYCLQINPASYINPDHLKYFRFIGRFIAMALFHGKFIDTGFSLPFYKRILNKPVGLKDLESIDPEFYNSLIWVKENNIEECDLEMYFSVDKEILGEIKSHDLKPNGGNILVTEENKEEYIRMVAEWRLSRGVEEQTQAFFEGFNEILPQQYLQYFDAKELEVLLCGMQEIDLNDWQRHAIYRHYARTSKQIMWFWQFVKEIDNEKRMRLLQFVTGTCRLPVGGFADLMGSNGPQKFCIEKVGKENWLPRSHTCFNRLDLPPYKSYEQLKEKLLFAIEETEGFGQE

SEQ ID NO: 11008 - protein, 903 aa, Homo sapiens
MSDSGSQLGSMGSLTMKSQLQITVISAKLKENKKNWFGPSPYVEVTVDGQSKKTEKCNNTNSPKWKQPLTVIVTPVSKLHFRVWSHQTLKSDVLLGTAALDIYETLKSNNMKLEEVVVTLQLGGDKEPTETIGDLSICLDGLQLESEVVTNGETTCSENGVSLCLPRLECNSAISAHCNLCLPGLSDSPISASRVAGFTGASQNDDGSRSKDETRVSTNGSDDPEDAGAGENRRVSGNNSPSLSNGGFKPSRPPRPSRPPPPTPRRPASVNGSPSATSESDGSSTGSLPPTNTNTNTSEGATSGLIIPLTISGGSGPRPLNPVTQAPLPPGWEQRVDQHGRVYYVDHVEKRTTWDRPEPLPPGWERRVDNMGRIYYVDHFTRTTTWQRPTLESVRNYEQWQLQRSQLQGAMQQFNQRFIYGNQDLFATSQSKEFDPLGPLPPGWEKRTDSNGRVYFVNHNTRITQWEDPRSQGQLNEKPLPEGWEMRFTVDGIPYFVDHNRRTTTYIDPRTGKSALDNGPQIAYVRDFKAKVQYFRFWCQQLAMPQHIKITVTRKTLFEDSFQQIMSFSPQDLRRRLWVIFPGEEGLDYGGVAREWFFLLSHEVLNPMYCLFEYAGKDNYCLQINPASYINPDHLKYFRFIGRFIAMALFHGKFIDTGFSLPFYKRILNKPVGLKDLESIDPEFYNSLIWVKENNIEECDLEMYFSVDKEILGEIKSHDLKPNGGNILVTEENKEEYIRMVAEWRLSRGVEEQTQAFFEGFNEILPQQYLQYFDAKELEVLLCGMQEIDLNDWQRHAIYRHYARTSKQIMWFWQFVKEIDNEKRMRLLQFVTGTCRLPVGGFADLMGSNGPQKFCIEKVGKENWLPRSHTCFNRLDLPPYKSYEQLKEKLLFAIEETEGFGQE

SEQ ID NO: 11009 - protein, 903 aa, Homo sapiens; identical to SEQ ID NO: 11008

SEQ ID NO: 11010 - protein, 315 aa, Homo sapiens
MYKSRIFLIEPRNGPRRTSDQSHRSSPASEFGTVRPVLFRATLRNSASGIWLSSAMASLEVSRSPRRSRRELEVRSPRQNKYSVLLPTYNERENLPLIVWLLVKSFSESGINYEIIIIDDGSPDGTRDVAEQLEKIYGSDRILLRPREKKLGLGTAYIHGMKHATGNYIIIMDADLSHHPKFIPEFIRKQKEGNFDIVSGTRYKGNGGVYGWDLKRKIISRGANFLTQILLRPGASDLTGSFRLYRKEVLEKLIEKCVSKGYVFQMEMIVRARQLNYTIGEVPISFVDRVYGESKLGGNEIVSFLKGLLTLFATT

SEQ ID NO: 11011 - protein, 134 aa, Homo sapiens [sequence omitted]

SEQ ID NO: 11012 - protein, 268 aa, Homo sapiens
MEAREGGGAGPAARGPEGQPAPEARVHFRVARFIMQASVKLGMRSIPIATACTIYHKFFCETSLDACDPYLIAMSSIYLAGKVEEQHLQTRDIINVSNRYFNPSGEPLELDSRFWELRDSIVQCQLLMLRVLRFQVSFQHPHKYLLHYLLSLKKWLNRHSWQRIPVAVTAWALLRDSYHGGLCLRFQDQHITVAVLYLALQVCGVEVPAEVEAEKPWWQMIHKLATRALIGDYEDGILHENETSHETTASAEGPLSQATRTAQLFSRG

SEQ ID NO: 11013 - protein, 228 aa, Homo sapiens
MEAREGGGAGPAARGPEGQPAPEARVHFRVARFIMQASVKLGMRSIPIATACTIYHKFFCETSLDACDPYLIAMSSIYLAGKVEEQHLQTRDIINVSNRYFNPSGEPLELDSRFWELRDSIVQCQLLMLRVLRFQVSFQHPHKYLLHYLLSLKKWLNRHSWQRIPVAVTAWALLRDSYHGGLCLRFQDQHITVAVLYLALQVCGVEVPAEVEAEKPWWQIYTTDTEIP

SEQ ID NO: 11014 - protein, 109 aa, Homo sapiens [sequence omitted]

SEQ ID NO: 11015 - protein, 228 aa, Homo sapiens
MEAREGGGAGPAARGPEGQPAPEARVHFRVARFIMQASVKLGMRSIPIATACTIYHKFFCETSLDACDPYLIAMSSIYLAGKVEEQHLQTRDIINVSNRYFNPSGEPLELDSRFWELRDSIVQCQLLMLRVLRFQVSFQHPHKYLLHYLLSLKKWLNRHSWQRIPVAVTAWALLRDSYHGGLCLRFQDQHITVAVLYLALQVCGVEVPAEVEAEKPWWQVFGDDLTNH

SEQ ID NO: 11016 - protein, 241 aa, Homo sapiens [sequence omitted]

SEQ ID NO: 11017 - protein, 128 aa, Homo sapiens
MRSIPIATACTIYHKFFCETSLDACDPYLIAMSSIYLAGKVEEQHLQTRDIINVSNRYFNPSGEPLELDSRFWELRDSIVQCQLLMLRVLRFQVSFQHPHKCLVTTLPIIDNIVSDLIQIYTTDTEIP

SEQ ID NO: 11018 - protein, 112 aa, Homo sapiens [sequence omitted]

SEQ ID NO: 11019 - protein, 145 aa, Homo sapiens
MEAREGGGAGPAARGPEGQPAPEARVHFRVARFIMQASVKLGMRSIPIATACTIYHKFFCETSLDACDPYLIAMSSIYLAGKVEEQHLQTRDIINVSNRYFNPSGEPLELDSRFWELRDSIVQCQLLMLRVLRFQVSFQHPHKSG

SEQ ID NO: 11020 - protein, 108 aa, Homo sapiens
MGVQVETISPGDGRTFPKRGQTCVVHYTGMLEDGKKFDSSRDRNKPFKFMLGKQEVIRGWEEGVAQMSVGQRAKLTISPDYAYGATGHPGIIPPHATLVFDVELLKLE

SEQ ID NO: 11021 - protein, 108 aa, Homo sapiens; identical to SEQ ID NO: 11020

SEQ ID NO: 11022 - protein, 108 aa, Homo sapiens; identical to SEQ ID NO: 11020

SEQ ID NO: 11023 - protein, 349 aa, Homo sapiens
MASKKVCIVGSGNWGSAIAKIVGGNAAQLAQFDPRVTMWVFEEDIGGKKLTEIINTQHENVKYLPGHKLPPNVVAVPDVVQAAEDADILIFVVPHQFIGKICDQLKGHLKANATGISLIKGVDEGPNGLKLISEVIGERLGIPMSVLMGANIASEVADEKFCETTIGCKDPAQGQLLKELMQTPNFRITVVQEVDTVEICGALKNVVAVGAGFCDGLGFGDNTKAAVIRLGLMEMIAFAKLFCSGPVSSATFLESCGVADLITTCYGGRNRKVAEAFARTGKSIEQLEKELLNGQKLQGPETARELYSILQHKGLVDKFPLFMAVYKVCYEGQPVGEFIHCLQNHPEHM

SEQ ID NO: 11024 - protein, 349 aa, Homo sapiens; identical to SEQ ID NO: 11023

SEQ ID NO: 11025 - protein, 133 aa, Homo sapiens
MEEDQELERKISGLKTSMAEGERKTALEMVQAAGTDRHCVTFVLHEEDHTLGNSLRYMIMKNPEVEFCGYTTTHPSESKINLRIQTRGTLPAVEPFQRGLNELMNVCQHVLDKFEASIKDYKDQKASRNESTF

SEQ ID NO: 11026 - protein, 116 aa, Homo sapiens
MAEGERKTALEMVQAAGTDRHCVTFVLHEEDHTLGNSLRYMIMKNPEVEFCGYTTTHPSESKINLRIQTRGTLPAVEPFQRGLNELMNVCQHVLDKFEASIKDYKDQKASRNESTF

SEQ ID NO: 11027 - protein, 147 aa, Homo sapiens [sequence omitted]

SEQ ID NO: 11028 - protein, 59 aa, Homo sapiens
MYTLTKVAIRYWQSKRSMMPPWPGMVLAKSLILKARLNPLAKNPPKGPMSEAKVERAML

SEQ ID NO: 11029 - protein, 445 aa, Homo sapiens
MTELRQRVAHEPVAPPEDKESESEAKVDGETASDSESRAESAPLPVSADDTPEVLNRALSNLSSRWKNWWVRGILTLAMIAFFFIIIYLGPMVLMIIVMCVQIKCFHEIITIGYNVYHSYDLPWFRTLSWYFLLCVNYFFYGETVTDYFFTLVQREEPLRILSKYHRFISFTLYLIGFCMFVLSLVKKHYRLQFYMFGWTHVTLLIVVTQSHLVIHNLFEGMIWFIVPISCVICNDIMAYMFGFFFGRTPLIKLSPKKTWEGFIGGFFATVVFGLLLSYVMSGYRCFVCPVEYNNDTNSFTVDCEPSDLFRLQEYNIPGVIQSVIGWKTVRMYPFQIHSIALSTFASLIGPFGGFFASGFKRAFKIKDFANTIPGHGGIMDRFDCQYLMATFVNVYIASFIRGPNPSKLIQQFLTLRPDQQLHIFNTLRSHLIDKGMLTSTTEDE

SEQ ID NO: 11030 - protein, 839 aa, Homo sapiens
MDCYTANWNPLGDSAFYRKYELYSMDWDLKEELRDCLVAAAPYGGPIALLRNPWRKEKAASVRPVLDIYSASGMPLASLLWKSGPVVSLGWSAEEELLCVQEDGAVLVYGLHGDFRRHFSMGNEVLQNRVLDARIFHTEFGSGVAILTGAHRFTLSANVGDLKLRRMPEVPGLQSAPSCWTVLCQDRVAHILLAVGPDLYLLDHAACSAVTPPGLAPGVSSFLQMAVSFTYRHLALFTDTGYIWMGTASLKEKLCEFNCNIRAPPKQMVWCSRPRSKERAVVVAWERRLMVVGDAPESIQFVLDEDSYLVPELDGVRIFSRSTHEFLHEVPAASEEIFKIASMAPGALLLEAQKEYEKESQKADEYLREIQELGQLTQAVQQCIEAAGHEHQPDMQKSLLRAASFGKCFLDRFPPDSFVHMCQDLRVLNAVRDYHIGIPLTYSQYKQLTIQVLLDRLVLRRLYPLAIQICEYLRLPEVQGVSRILAHWACYKVQQKDVSDEDVARAINQKLGDTPGVSYSDIAARAYGCGRTELAIKLLEYEPRSGEQVPLLLKMKRSKLALSKAIESGDTDLVFTVLLHLKNELNRGDFFMTLRNQPMALSLYRQFCKHQELETLKDLYNQDDNHQELGSFHIRASYAAEERIEGRVAALQTAADAFYKAKNEFAAKATEDQMRLLRLQRRLEDELGGQFLDLSLHDTVTTLILGGHNKRAEQLARDFRIPDKRLWWLKLTALADLEDWEELEKFSKSKKSPIGYLPFVEICMKQHNKYEAKKYASRVGPEQKVKALLLVGDVAQAADVAIEHRNEAELSLVLSHCTGATDGATADKIQRARAQAQKK

SEQ ID NO: 11031 - protein, 802 aa, Homo sapiens
MDSWFILVLLGSGLICVSANNATTVAPSVGITRLINSSTAEPVKEEAKTSNPTSSLTSLSVAPTFSPNITLGPTYLTTVNSSDSDNGTTRTASTNSIGITISPNGTWLPDNQFTDARTEPWEGNSSTAATTPETFPPSGNSDSKDRRDETPIIAVMVALSSLLVIVFIIIVLYMLRFKKYKQAGSHSNSFRLSNGRTEDVEPQSVPLLARSPSTNRKYPPLPVDKLEEEINRRMADDNKLFREEFNALPACPIQATCEAASKEENKEKNRYVNILPYDHSRVHLTPVEGVPDSDYINASFINGYQEKNKFIAAQGPKEETVNDFWRMIWEQNTATIVMVTNLKERKECKCAQYWPDQGCWTYGNIRVSVEDVTVLVDYTVRKFCIQQVGDMTNRKPQRLITQFHFTSWPDFGVPFTPIGMLKFLKKVKACNPQYAGAIVVHCSAGVGRTGTFVVIDAMLDMMHTERKVDVYGFVSRIRAQRCQMVQTDMQYVFIYQALLEHYLYGDTELEVTSLETHLQKIYNKIPGTSNNGLEEEFKKLTSIKIQNDKMRTGNLPANMKKNRVLQIIPYEFNRVIIPVKRGEENTDYVNASFIDGYRQKDSYIASQGPLLHTIEDFWRMIWEWKSCSIVMLTELEERGQEKCAQYWPSDGLVSYGDITVELKKEEECESYTVRDLLVTNTRENKSRQIRQFHFHGWPEVGIPSDGKGMISIIAAVQKQQQQSGNHPITVHCSAGAGRTGTFCALSTVLERVKAEGILDVFQTVKSLRLQRPHMVQTLEQYEFCYKVVQEYIDAFSDYANFK

SEQ ID NO: 11032 - protein, 323 aa, Homo sapiens
MWLFRAPMPAPSLCAFLLTSQLLEYEPRSGEQVPLLLKMKRSKLALSKAIESGDTDLVFTVLLHLKNELNRGDFFMTLRNQPMALSLYRQFCKHQELETLKDLYNQDDNHQELGSFHIRASYAAEERIEGRVAALQTAADAFYKAKNEFAAKATEDQMRLLRLQRRLEDELGGQFLDLSLHDTVTTLILGGHNKRAEQLARDFRIPDKRLWWLKLTALADLEDWEELEKFSKSKKSPIGYLPFVEICMKQHNKYEAKKYASRVGPEQKVKALLLVGDVAQAADVAIEHRNEAELSLVLSHCTGATDGATADKIQRARAQAQKK

SEQ ID NO: 11033 - protein, 429 aa, Homo sapiens
MGAPLEVLQNRVLDARIFHTEFGSGVAILTGAHRFTLSANVGDLKLRRMPEVPGLQSAPSCWTVLCQDRVAHILLAVGPDLYLLDHAACSAVTPPGLAPGVSSFLQMAVSFTYRHLALFTDTGYIWMGTASLKEKLCEFNCNIRAPPKQMVWCSRPRSKERAVVVAWERRLMVVGDAPESIQFVLDEDSYLVPELDGVRIFSRSTHEFLHEVPAASEEIFKIASMAPGALLLEAQKEYEKESQKADEYLREIQELGQLTQAVQQCIEAAGHEHQPDMQKSLLRAASFGKCFLDRFPPDSFVHMCQDLRVLNAVRDYHIGIPLTYSQYKQLTIQVLLDRLVLRRLYPLAIQICEYLRLPEVQGVSRILAHWACYKVQQKDVSDEDVARAINQKLGDTPGVSYSDIAARAYGCGRTELAIKVWVPSPPQTL

SEQ ID NO: 11034 - protein, 516 aa, Homo sapiens
MDCYTANWNPLGDSAFYRKYELYSMDWDLKEELRDCLVAAAPYGGPIALLRNPWRKEKAASVRPVLDIYSASGMPLASLLWKSGPVVSLGWSAEEELLCVQEDGAVLVYGLHGDFRRHFSMGNEVLQNRVLDARIFHTEFGSGVAILTGAHRFTLSANVGDLKLRRMPEVPGLQSAPSCWTVLCQDRVAHILLAVGPDLYLLDHAACSAVTPPGLAPGVSSFLQMAVSFTYRHLALFTDTGYIWMGTASLKEKLCEFNCNIRAPPKQMVWCSRPRSKERAVVVAWERRLMVVGDAPESIQFVLDEDSYLVPELDGVRIFSRSTHEFLHEVPAASEEIFKIASMAPGALLLEAQKEYEKESQKADEYLREIQELGQLTQAVQQCIEAAGHEHQPDMQKSLLRAASFGKCFLDRFPPDSFVHMCQDLRVLNAVRDYHIGIPLTYSQYKQLTIQVLLDRCNRRMSQMRMWLEPLTRSWGTRLVSLTPTLLHEPMVVAARSWPSSCWSMSHAQGSRYPFS

SEQ ID NO: 11035 - protein, 802 aa, Homo sapiens; identical to SEQ ID NO: 11031

SEQ ID NO: 11036 - protein, 695 aa, Homo sapiens
MDCYTANWNPLGDSAFYRKYELYSMDWDLKEELRDCLVAAAPYGGPIALLRNPWRKEKAASVRPVLDIYSASGMPLASLLWKSGPVVSLGWSAEEELLCVQEDGAVLVYGLHGDFRRHFSMGNEVLQNRVLDARIFHTEFGSGVAILTGAHRFTLSANVGDLKLRRMPEVPGLQSAPSCWTVLCQDRVAHILLAVGPDLYLLDHAACSAVTPPGLAPGVSSFLQMAVSFTYRHLALFTDTGYIWMGTASLKEKLCEFNCNIRAPPKQMVWCSRPRSKERAVVVAWERRLMVVGDAPESIQYKQLTIQVLLDRLVLRRLYPLAIQICEYLRLPEVQGVSRILAHWACYKVQQKDVSDEDVARAINQKLGDTPGVSYSDIAARAYGCGRTELAIKLLEYEPRSGEQVPLLLKMKRSKLALSKAIESGDTDLVFTVLLHLKNELNRGDFFMTLRNQPMALSLYRQFCKHQELETLKDLYNQDDNHQELGSFHIRASYAAEERIEGRVAALQTAADAFYKAKNEFAAKATEDQMRLLRLQRRLEDELGGQFLDLSLHDTVTTLILGGHNKRAEQLARDFRIPDKRLWWLKLTALADLEDWEELEKFSKSKKSPIGYLPFVEICMKQHNKYEAKKYASRVGPEQKVKALLLVGDVAQAADVAIEHRNEAELSLVLSHCTGATDGATADKIQRARAQAQKK

SEQ ID NO: 11037 - protein, 802 aa, Homo sapiens; identical to SEQ ID NO: 11031

SEQ ID NO: 11038 - protein, 793 aa, Homo sapiens
MDSWFILVLLGSGLICVSANNATTVAPSVGITRLINSSTAEPVKEEAKTSNPTSSLTSLSVAPTFSPNITLGPTYLTTVNSSDSDNGTTRTASTNSIGITISPNGTWLPDNQFTDARTEPWEGNSSTAATTPETFPPSDETPIIAVMVALSSLLVIVFIIIVLYMLRFKKYKQAGSHSNSFRLSNGRTEDVEPQSVPLLARSPSTNRKYPPLPVDKLEEEINRRMADDNKLFREEFNALPACPIQATCEAASKEENKEKNRYVNILPYDHSRVHLTPVEGVPDSDYINASFINGYQEKNKFIAAQGPKEETVNDFWRMIWEQNTATIVMVTNLKERKECKCAQYWPDQGCWTYGNIRVSVEDVTVLVDYTVRKFCIQQVGDMTNRKPQRLITQFHFTSWPDFGVPFTPIGMLKFLKKVKACNPQYAGAIVVHCSAGVGRTGTFVVIDAMLDMMHTERKVDVYGFVSRIRAQRCQMVQTDMQYVFIYQALLEHYLYGDTELEVTSLETHLQKIYNKIPGTSNNGLEEEFKKLTSIKIQNDKMRTGNLPANMKKNRVLQIIPYEFNRVIIPVKRGEENTDYVNASFIDGYRQKDSYIASQGPLLHTIEDFWRMIWEWKSCSIVMLTELEERGQEKCAQYWPSDGLVSYGDITVELKKEEECESYTVRDLLVTNTRENKSRQIRQFHFHGWPEVGIPSDGKGMISIIAAVQKQQQQSGNHPITVHCSAGAGRTGTFCALSTVLERVKAEGILDVFQTVKSLRLQRPHMVQTLEQYEFCYKVVQEYIDAFSDYANFK

SEQ ID NO: 11039 - protein, 793 aa, Homo sapiens; identical to SEQ ID NO: 11038

SEQ ID NO: 11040 - protein, 793 aa, Homo sapiens; identical to SEQ ID NO: 11038

SEQ ID NO: 11041 - protein, 353 aa, Homo sapiens
MDCYTANWNPLGDSAFYRKYELYSMDWDLKEELRDCLVAAAPYGGPIALLRNPWRKEKAASVRPVLDIYSASGMPLASLLWKSGPVVSLGWSAEEELLCVQEDGAVLVYGLHGDFRRHFSMGNEVLQNRVLDARIFHTEFGSGVAILTGAHRFTLSANVGDLKLRRMPEVPGLQSAPSCWTVLCQDRVAHILLAVGPDLYLLDHAACSAVTPPGLAPGVSSFLQMAVSFTYRHLALFTDTGYIWMGTASLKEKLCEFNCNIRAPPKQMVWCSRPRSKERAVVVAWERRLMVVGDAPESIQFVLDEDSYLVPELDGVRIFSRSTHEFLHEVPGGRVPAGDPGAGPADPGRAAVH

SEQ ID NO: 11042 - protein, 793 aa, Homo sapiens; identical to SEQ ID NO: 11038

SEQ ID NO: 11043 - protein, 894 aa, Homo sapiens
MEPRDGSPEARSSDSESASTSSSGSERDAGPEPDKAPRRLNKRRFPGLRLFGHRKAITKSGLQHLAPPPPTPGARCSESERQIRSTVDWSESATYGEHIWFETNVSRDFCYVGEQYCVARMLQKSVSRRKCAACKIVVHTPCIEQLEKINFCCKPSFRESGSRNVLEPTFVWHHWVHRRRQDSKCRHCGKGFQQKFTFHSKEIVAISCSWCKQAYHSKVSCFVLQQIEEPCSLGVHAAVVIPPTWILRARRPQNTLKASKKKKRASFKRKSSKKGPEEGRWRPFIIRPTPSPLMKPLLVFVNPKSGGNQGAKIIQSFLWYLNPRQVFDLSQGGPKEALEMYRKVHNLRILACGGDGTVGWILSTLDQLRLKPPPPVAILPLGTGNDLARTLNWGGGYTDEPVSKILSHVEEGNVVQLDRWDLHAEPNPEAGPEDRDEGATDRLPLDVFNNYFSLGFDAHVTLEFHESREANPEKFNSRFRNKMFYAGTAFSDFLMGSSKDLAKHIRVVCDGMDLTPKIQDLKPQCVVFLNIPRYCAGTMPCGHPGEHHDFEPQRHDDGYLEVIGFTMTSLAALQVGGHGERLTQCREVVLTTSKAIPVQVDGEPCKLAASRIRIALRNQATMVQKAKRRSAAPLHSDQQPVPEQLRIQVRRVSMHDYEALHYDKEQLKEASVPLGTVVVPGDSDLELCRAHIERLQQEPDGAGAKSPTCQKLSPKWCFLDATTASRFYRINRAQEHLNYVTEIAQDEIYILDPELLGASARPDLPTPTSPLPTSPCSPTPRSLQGDAAPPQGEELIEAAKRNDFCKLQELHRAGGDIMHRDKQSRTLLHHAVSTGSKDVVRYLLDHAPPEILDAVEENGETCLHQAAALGQRTICHYIVEAGARPAGRHSPAAG

SEQ ID NO: 11044 - protein, 362 aa, Homo sapiens
MNESPQTNEFKGTTEEAPAKESPHTSEFKGAALVSPISKRIFGVFLVLLDVTLLLADLIFTDSKLYIPLEYRSISLAIGLFFLMDVLLRVFVEGWTHLVRLLRLIILIRIFHLLHQKRQLEKLMRRLVSENKRRYTRDGFDLDLTYVTERIIAMSFPSSGRQSFYRNPIEEVVRFLDKKHRNHYRVYNLCSERAYDPKHFHNRVSRIMIDDHNVPTLHEMVVFTKEVNEWMAQDLENIVAIHCKGGKGRTGTMVCALLIASEIFLTAEESLYYFGERRTNKTHSNKFQGVETPSQNRYVGYFAQVKHLYNWNLPPRRILFIKRFIIYSIRGDVCDLKVQVVMEKKVVFSSTSLGNCSVRENM

SEQ ID NO: 11045 - protein, 445 aa, Homo sapiens
MNESPQTNEFKGTTEEAPAKESPHTSEFKGAALVSPISKRIFGVFLVLLDVTLLLADLIFTDSKLYIPLEYRSISLAIGLFFLMDVLLRVFVEGWTHLVRLLRLIILIRIFHLLHQKRQLEKLMRRLVSENKRRYTRDGFDLDLTYVTERIIAMSFPSSGRQSFYRNPIEEVVRFLDKKHRNHYRVYNLCSERAYDPKHFHNRVSRIMIDDHNVPTLHEMVVFTKEVNEWMAQDLENIVAIHCKGGKGRTGTMVCALLIASEIFLTAEESLYYFGERRTNKTHSNKFQGVETPSQNRYVGYFAQVKHLYNWNLPPRRILFIKRFIIYSIRGDVCDLKVQVVMEKKVVFSSTSLGNCSILHDIETDKILINVYDGPPLYDDVKVQFFSSNLPKYYDNCPFFFWFNTSFIQNNRLCLPRNELDNPHKQKAWKIYPPEFAVEILFGEK

SEQ ID NO: 11046 - protein, 510 aa, Homo sapiens
MDGFYDQQVPFMVPGKSRSEECRGRPVIDRKRKFLDTDLAHDSEELFQDLSQLQEAWLAEAQVPDDEQFVPDFQSDNLVLHAPPPTKIKRELHSPSSELSSCSHEQALGANYGEKCLYNYCAYDRKPPSGFKPLTPPTTPLSPTHQNPLFPPPQATLPTSGHAPAAGPVQGVGPAPAPHSLPEPGPQQQTFAVPRPPHQPLQMPKMMPENQYPSEQRFQRQLSEPCHPFPPQPGVPGDNRPSYHRQMSEPIVPAAPPPPQGFKQEYHDPLYEHGVPGMPGPPAHGFQSPMGIKQEPRDYCVDSEVPNCQSSYMRGGYFSSSHEGFSYEKDPRLYFDDTCVVPERLEGKVKQEPTMYREGPPYQRRGSLQLWQFLVTLLDDPANAHFIAWTGRGMEFKLIEPEEVARRWGIQKNRPAMNYDKLSRSLRYYYEKGIMQKVAGERYVYKFVCDPDALFSMAFPDNQRPFLKAESECHLSEEDTLPLTHFEDSPAYLLDMDRCSSLPYAEGFAY

SEQ ID NO: 11047 - protein, 522 aa, Homo sapiens
MLHGGSLFPQKLLNAETSQSGIRDAESTMDGFYDQQVPFMVPGKSRSEECRGRPVIDRKRKFLDTDLAHDSEAQVPDDEQFVPDFQSDNLVLHAPPPTKIKRELHSPSSELSSCSHEQALGANYGEKCLYNYCAYDRKPPSGFKPLTPPTTPLSPTHQNPLFPPPQATLPTSGHAPAAGPVQGVGPAPAPHSLPEPGPQQQTFAVPRPPHQPLQMPKMMPENQYPSEQRFQRQLSEPCHPFPPQPGVPGDNRPSYHRQMSEPIVPAAPPPPQGFKQEYHDPLYEHGVPGMPGPPAHGFQSPMGIKQEPRDYCVDSEVPNCQSSYMRGGYFSSSHEGFSYEKDPRLYFDDTCVVPERLEGKVKQEPTMYREGPPYQRRGSLQLWQFLVTLLDDPANAHFIAWTGRGMEFKLIEPEEVARRWGIQKNRPAMNYDKLSRSLRYYYEKGIMQKVAGERYVYKFVCDPDALFSMAFPDNQRPFLKAESECHLSEEDTLPLTHFEDSPAYLLDMDRCSSLPYAEGFAY

SEQ ID NO: 11048 - protein, 791 aa, Homo sapiens [sequence omitted]

SEQ ID NO: 11049 - protein, 510 aa, Homo sapiens; identical to SEQ ID NO: 11046

SEQ ID NO: 11050 - protein, 308 aa, Homo sapiens
MPKMMPENQYPSEQRFQRQLSEPCHPFPPQPGVPGDNRPSYHRQMSEPIVPAAPPPPQGFKQEYHDPLYEHGVPGMPGPPAHGFQSPMGIKQEPRDYCVDSEVPNCQSSYMRGGYFSSSHEGFSYEKDPRLYFDDTCVVPERLEGKVKQEPTMYREGPPYQRRGSLQLWQFLVTLLDDPANAHFIAWTGRGMEFKLIEPEEVARRWGIQKNRPAMNYDKLSRSLRYYYEKGIMQKVAGERYVYKFVCDPDALFSMAFPDNQRPFLKAESECHLSEEDTLPLTHFEDSPAYLLDMDRCSSLPYAEGFAY

SEQ ID NO: 11051 - protein, 107 aa, Homo sapiens
MSISFKLILRFIAIPTEVLNRFWNPVQNSAKDLSRHFFQEDIQMSKEYVKSFSASLIIRKMQIRITMSHYLIPIRMAIFLKQKKKKGVAAMENNTLVPQQNKYRITI

SEQ ID NO: 11052 - protein, 741 aa, Homo sapiens
MAEPVSPLKHFVLAKKAITAIFDQLLEFVTEGSHFVEATYKNPELDRIATEDDLVEMQGYKDKLSIIGEVLSRRHMKVAFFGRTSSGKSSVINAMLWDKVLPSGIGHITNCFLSVEGTDGDKAYLMTEGSDEKKSVKTVNQLAHALHMDKDLKAGCLVRVFWPKAKCALLRDDLVLVDSPGTDVTTELDSWIDKFCLDADVFVLVANSESTLMNTEKHFFHKVNERLSKPNIFILNNRWDASASEPEYMEDVRRQHMERCLHFLVEELKVVNALEAQNRIFFVSAKEVLSARKQKAQGMPESGVALAEGFHARLQEFQNFEQIFEECISQSAVKTKFEQHTIRAKQILATVKNIMDSVNLAAEDKRHYSVEEREDQIDRLDFIRNQMNLLTLDVKKKIKEVTEEVANKVSCAMTDEICRLSVLVDEFCSEFHPNPDVLKIYKSELNKHIEDGMGRNLADRCTDEVNALVLQTQQEIIENLKPLLPAGIQDKLHTLIPCKKFDLSYNLNYHKLCSDFQEDIVFRFSLGWSSLVHRFLGPRNAQRVLLGLSEPIFQLPRSLASTPTAPTTPATPDNASQEELMITLVTGLASVTSRTSMGIIIVGGVIWKTIGWKLLSVSLTMYGALYLYERLSWTTHAKERAFKQQFVNYATEKLRMIVSSTSANCSHQVKQQIATTFARLCQQVDITQKQLEEEIARLPKEIDQLEKIQNNSKLLRNKAVQLENELENFTKQFLPSSNEES

SEQ ID NO: 11053 - protein, 355 aa, Homo sapiens
MNLLTLDVKKKIKEVTEEVANKVSCAMTDEICRLSVLVDEFCSEFHPNPDVLKIYKSELNKHIEDGMGRNLADRCTDEVNALVLQTQQEIIENLKPLLPAGIQDKLHTLIPCKKFDLSYNLNYHKLCSDFQEDIVFRFSLGWSSLVHRFLGPRNAQRVLLGLSEPIFQLPRSLASTPTAPTTPATPDNASQEELMITLVTGLASVTSRTSMGIIIVGGVIWKTIGWKLLSVSLTMYGALYLYERLSWTTHAKERAFKQQFVNYATEKLRMIVSSTSANCSHQVKQQIATTFARLCQQVDITQKQLEEEIARLPKEIDQLEKIQNNSKLLRNKAVQLENELENFTKQFLPSSNEES

SEQ ID NO: 11054 - protein, 741 aa, Homo sapiens; identical to SEQ ID NO: 11052

SEQ ID NO: 11055 - protein, 370 aa, Homo sapiens
MAEPVSPLKHFVLAKKAITAIFDQLLEFVTEGSHFVEATYKNPELDRIATEDDLVEMQGYKDKLSIIGEVLSRRHMKVAFFGRTSSGKSSVINAMLWDKVLPSGIGHITNCFLSVEGTDGDKAYLMTEGSDEKKSVKTVNQLAHALHMDKDLKAGCLVRVFWPKAKCALLRDDLVLVDSPGTDVTTELDSWIDKFCLDADVFVLVANSESTLMNTEKHFFHKVNERLSKPNIFILNNRWDASASEPEYMEDVRRQHMERCLHFLVEELKVVNALEAQNRIFFVSAKEVLSARKQKAQGMPESGVALAEGFHARLQEFQNFEQIFEECISQSAVKTKFEQHTIRAKQILATVKNIMDSVNLAAEDKRFHVQ

SEQ ID NO: 11056 - protein, 658 aa, Homo sapiens
MAEPVSPLKHFVLAKKAITAIFDQLLEFVTEGSHFVEATYKNPELDRIATEDDLVEMQGYKDKLSIIGEVLSRRHMKVAFFGRTSSGKSSVINAMLWDKVLPSGIGHITNCFLSVEGTDGDKAYLMTEGSDEKKSVKTVNQLAHALHMDKDLKAGCLVRVFWPKAKCALLRDDLVLVDSPGTDVTTELDSWIDKFCLDADVFVLVANSESTLMNTEKHFFHKVNERLSKPNIFILNNRWDASASEPEYMEDVRRQHMERCLHFLVEELKVVNALEAQNRIFFVSAKEVLSARKQKAQGMPESGVALAEGFHARLQEFQNFEQIFEVSCAMTDEICRLSVLVDEFCSEFHPNPDVLKIYKSELNKHIEDGMGRNLADRCTDEVNALVLQTQQEIIENLKPLLPAGIQDKLHTLIPCKKFDLSYNLNYHKLCSDFQEDIVFRFSLGWSSLVHRFLGPRNAQRVLLGLSEPIFQLPRSLASTPTAPTTPATPDNASQEELMITLVTGLASVTSRTSMGIIIVGGVIWKTIGWKLLSVSLTMYGALYLYERLSWTTHAKERAFKQQFVNYATEKLRMIVSSTSANCSHQVKQQIATTFARLCQQVDITQKQLEEEIARLPKEIDQLEKIQNNSKLLRNKAVQLENELENFTKQFLPSSNEES

SEQ ID NO: 11057 - protein, 741 aa, Homo sapiens; identical to SEQ ID NO: 11052

SEQ ID NO: 11058 - protein, 630 aa, Homo sapiens
MAEPVSPLKHFVLAKKAITAIFDQLLEFVTEGSHFVEATYKNPELDRIATEDDLVEMQGYKDKLSIIGEVLSRRHMKVAFFGRTSSGKSSVINAMLWDKVLPSGIGHITNCFLSVEGTDGDKAYLMTEGSDEKKSVKTVNQLAHALHMDKDLKAGCLVRVFWPKAKCALLRDDLVLVDSPGTDVTTELDSWIDKFCLDADVFVLVANSESTLMNTEKHFFHKVNERLSKPNIFILNNRWDASASEPEYMEDVRRQHMERCLHFLVEELKVVNALEAQNRIFFVSAKEVLSARKQKAQGMPESGVALAEGFHARLQEFQNFEQIFEECISQSAVKTKFEQHTIRAKQILATVKNIMDSVNLAAEDKRHYSVEEREDQIDRLDFIRNQMNLLTLDVKKKIKEVTEEVANKVSCAMTDEICRLSVLVDEFCSEFHPNPDVLKIYKSLPRSLASTPTAPTTPATPDNASQEELMITLVTGLASVTSRTSMGIIIVGGVIWKTIGWKLLSVSLTMYGALYLYERLSWTTHAKERAFKQQFVNYATEKLRMIVSSTSANCSHQVKQQIATTFARLCQQVDITQKQLEEEIARLPKEIDQLEKIQNNSKLLRNKAVQLENELENFTKQFLPSSNEES

SEQ ID NO: 11059 - protein, 56 aa, Homo sapiens
MPFLQGQEAEGLLRKEGAVSCFWFSQTICFSLSPLGGKVNWWPKRLLLCQSRSLES

SEQ ID NO: 11060 - protein, 406 aa, Homo sapiens
MIHTNLKKKFSCCVLVFLLFAVICVWKEKKKGSYYDSFKLQTKEFQVLKSLGKLAMGSDSQSVSSSSTQDPHRGRQTLGSLRGLAKAKPEASFQVWNKDSSSKNLIPRLQKIWKNYLSMNKYKVSYKGPGPGIKFSAEALRCHLRDHVNVSMVEVTDFPFNTSEWEGYLPKESIRTKAGPWGRCAVVSSAGSLKSSQLGREIDDHDAVLRFNGAPTANFQQDVGTKTTIRLMNSQLVTTEKRFLKDSLYNEGILIVWDPSVYHSDIPKWYQNPDYNFFNNYKTYRKLHPNQPFYILKPQMPWELWDILQEISPEEIQPNPPSSGMLGIIIMMTLCDQVDIYEFLPSKRKTDVCYYYQKFFDSACTMGAYHPLLYEKNLVKHLNQGTDEDIYLLGKATLPGFRTIHC

SEQ ID NO: 11061 - protein, 406 aa, Homo sapiens; identical to SEQ ID NO: 11060

SEQ ID NO: 11062 - protein, 115 aa, Homo sapiens
MTGGSGQDFLALSIDFCRFSVGQFFEVLLQLSYGHVITCVGCLRKLNSLVSGNTTSFHPSLHDLLSEFFFHCVHLIISTTSAAQDRSPSFPESLVPEVWDGGSTALVGTANGFQE

SEQ ID NO: 11063 - protein, 406 aa, Homo sapiens; identical to SEQ ID NO: 11060

SEQ ID NO: 11064 - protein, 68 aa, Homo sapiens
MGVVFSQLLVKFEFPREYIYPPGKTAPDSGECLSIPPLLCKGALGKHTHTHTHTRVPRSLSFNPRVTE

SEQ ID NO: 11065 - protein, 605 aa, Homo sapiens
MKASSRFKAHQDALPRLPVPPLQQSLDHYLKALQPIVSEEEWAHTKQLVDEFQASGGVGERLQKGLERRARKTENWLSEWWLKTAYLQYRQPVVIYSSPGVMLPKQDFVDLQGQLRFAAKLIEGVLDFKVMIDNETLPVEYLGGKPLCMNQYYQILSSCRVPGPKQDTVSNFSKTKKPPTHITVVHNYQFFELDVYHSDGTPLTADQIFVQLEKIWNSSLQTNKEPVGILTSNHRNSWAKAYNTLIKDKVNRDSVRSIQKSIFTVCLDATMPRVSEDVYRSHVAGQMLHGGGSRLNSGNRWFDKTLQFIVAEDGSCGLVYEHAAAEGPPIVTLLDYVIEYTKKPELVRSPMVPLPMPKKLRFNITPEIKSDIEKAKQNLSIMIQDLDITVMVFHHFGKDFPKSEKLSPDAFIQMALQLAYYRIYGQACATYESASLRMFHLGRTDTIRSASMDSLTFVKAMDDSSVTEHQKVELLRKAVQAHRGYTDRAIRGEAFDRHLLGLKLQAIEDLVSMPDIFMDTSYAIAMHFHLSTSQVPAKTDCVMFFGPVVPDGYGVCYNPMEAHINFSLSAYNSCAETNAARLAHYLEKALLDMRALLQSHPRAKL

SEQ ID NO: 11066 - protein, 626 aa, Homo sapiens
MLAFAARTVVKPLGFLKPFSLMKASSRFKAHQDALPRLPVPPLQQSLDHYLKALQPIVSEEEWAHTKQLVDEFQASGGVGERLQKGLERRARKTENWLSEWWLKTAYLQYRQPVVIYSSPGVMLPKQDFVDLQGQLRFAAKLIEGVLDFKVMIDNETLPVEYLGGKPLCMNQYYQILSSCRVPGPKQDTVSNFSKTKKPPTHITVVHNYQFFELDVYHSDGTPLTADQIFVQLEKIWNSSLQTNKEPVGILTSNHRNSWAKAYNTLIKDKVNRDSVRSIQKSIFTVCLDATMPRVSEDVYRSHVAGQMLHGGGSRLNSGNRWFDKTLQFIVAEDGSCGLVYEHAAAEGPPIVTLLDYVIEYTKKPELVRSPMVPLPMPKKLRFNITPEIKSDIEKAKQNLSIMIQDLDITVMVFHHFGKDFPKSEKLSPDAFIQMALQLAYYRIYGQACATYESASLRMFHLGRTDTIRSASMDSLTFVKAMDDSSVTEHQKVELLRKAVQAHRGYTDRAIRGEAFDRHLLGLKLQAIEDLVSMPDIFMDTSYAIAMHFHLSTSQVPAKTDCVMFFGPVVPDGYGVCYNPMEAHINFSLSAYNSCAETNAARLAHYLEKALLDMRALLQSHPRAKL

SEQ ID NO: 11067 - protein, 467 aa, Homo sapiens
MKASSRFKAHQDALPRLPVPPLQQSLDHYLKALQPIVSEEEWAHTKQLVDEFQASGGVGERLQKGLERRARKTENWLSEWWLKTAYLQYRQPVVIYSSPGVMLPKQDFVDLQGQLRFAAKLIEGVLDFKVMIDNETLPVEYLGGKPLCMNQYYQILSSCRVPGPKQDTVSNFSKTKKPPTHITVVHNYQFFELDVYHSDGTPLTADQIFVQLEKIWNSSLQTNKEPVGILTSNHRNSWAKAYNTLIKDKVNRDSVRSIQKSIFTVCLDATMPRVSEDVYRSHVAGQMLHGGGSRLNSGNRWFDKTLQFIVAEDGSCGLVYEHAAAEGPPIVTLLDYVIEYTKKPELVRSPMVPLPMPKKLRFNITPEIKSDIEKAKQNLSIMIQDLDITVMVFHHFGKDFPKSEKLSPDAFIQMALQLAYYRIYGQACATYESASLRMFHLGRTDTIRSASMDSLTFVKAMDDSSVT

SEQ ID NO: 11068 - protein, 626 aa, Homo sapiens; identical to SEQ ID NO: 11066

SEQ ID NO: 11069 - protein, 626 aa, Homo sapiens; identical to SEQ ID NO: 11066

SEQ ID NO: 11070 - protein, 294 aa, Homo sapiens
MSWIKEGELSLWERFCANIIKAGPMPKHIAFIMDGNRRYAKKCQVERQEGHSQGFNKLAETLRWCLNLGILEVTVYAFSIENFKRSKSEVDGLMDLARQKFSRLMEEKCFLNVCFAYTSRHEISNAVREMAWGVEQGLLDPSDISESLLDKCLYTNRSPHPDILIRTSGEVRLSDFLLWQTSHSCLVFQPVLWPEYTFWNLFEAILQFQMNHSVLQKARDMYAEERKRQQLERDQATVTEQLLREGLQASGDAQLRRTRLHKLSARREERVQGFLQALELKRADWLARLGTASA

SEQ ID NO: 11071 - protein, 334 aa, Homo sapiens
MSWIKEGELSLWERFCANIIKAGPMPKHIAFIMDGNRRYAKKCQVERQEGHSQGFNKLAETLRWCLNLGILEVTVYAFSIENFKRSKSEVDGLMDLARQKFSRLMEEKEKLQKHGVCIRVLGDLHLLPLDLQELIAQAVQATKNYNKCFLNVCFAYTSRHEISNAVREMAWGVEQGLLDPSDISESLLDKCLYTNRSPHPDILIRTSGEVRLSDFLLWQTSHSCLVFQPVLWPEYTFWNLFEAILQFQMNHSVLQQKARDMYAEERKRQQLERDQATVTEQLLREGLQASGDAQLRRTRLHKLSARREERVQGFLQALELKRADWLARLGTASA

SEQ ID NO: 11072 - protein, 333 aa, Homo sapiens
MSWIKEGELSLWERFCANIIKAGPMPKHIAFIMDGNRRYAKKCQVERQEGHSQGFNKLAETLRWCLNLGILEVTVYAFSIENFKRSKSEVDGLMDLARQKFSRLMEEKEKLQKHGVCIRVLGDLHLLPLDLQELIAQAVQATKNYNKCFLNVCFAYTSRHEISNAVREMAWGVEQGLLDPSDISESLLDKCLYTNRSPHPDILIRTSGEVRLSDFLLWQTSHSCLVFQPVLWPEYTFWNLFEAILQFQMNHSVLQKARDMYAEERKRQQLERDQATVTEQLLREGLQASGDAQLRRTRLHKLSARREERVQGFLQALELKRADWLARLGTASA

SEQ ID NO: 11073 - protein, 66 aa, Homo sapiens
  VARIANT (1)...(66): Xaa = Any Amino Acid
MRLLIILKDSTYSVGGIWASLYNAVTIEDVQKLAAFMKKFWRCISYKHILTRIYSVLEQHTKFKVX

SEQ ID NO: 11074 - protein, 139 aa, Homo sapiens [sequence omitted]

SEQ ID NO: 11075 - protein, 100 aa, Homo sapiens [sequence omitted]

SEQ ID NO: 11076 - protein, 228 aa, Homo sapiens
MKSRIPVVLLACGSFNPITNMHLRMFEVARDHLHQTGMYQVIQGIISPVNDTYGKKDLAASHHRVAMARLALQTSDWIRVDPWESEQAQWMETVKVLRHHHSKLLRSPPQMEGPDHGKALFSTPAAVPELKLLCGADVLKTFQTPNLWKDAHIQEIVEKFGLVCVGRVGHDPKGYIAESPILRMHQHNIHLAKEPRKVPDSRCCHHVHQGPWPLHQGQYLERQKHPEH

SEQ ID NO: 11077 - protein, 215 aa, Homo sapiens
MYQVIQGIISPVNDTYGKKDLAASHHRVAMARLALQTSDWIRVDPWESEQAQWMETVKVLRHHHSKLLRSPPQMEGPDHGKALFSTPAAVPELKLLCGADVLKTFQTPNLWKDAHIQEIVEKFGLVCVGRVGHDPKGYIAESPILRMHQHNIHLAKEPVQNEISATYIRRALGQGQSVKYLIPDAVITYIKDHGLYTKGSTWKGKSTQSTEGKTS

SEQ ID NO: 11078 - protein, 98 aa, Homo sapiens
MKSRIPVVLLACGSFNPITNMHLRMFEVARDHLHQTGMYQVIQGIISPVNDTYGKKDLAASHHRVAMARLALQTSDWIRVDPWESEQAQWMETVKVLR

SEQ ID NO: 11079 - protein, 98 aa, Homo sapiens
MKSRIPVVLLACGSFNPITNMHLRMFEVARDHLHQTDFCLSRPLFPRVHFSQHNQGKKKMGKSVHEVVGARLCLCPQKHQASPSKSPRTEVCKREEAN

SEQ ID NO: 11080 - protein, 170 aa, Homo sapiens
MKSRIPVVLLACGSFNPITNMHLRMFEVARDHLHQTGMYQVIQGIISPVNDTYGKKDLAASHHRVAMARLALQTSDWIRVDPWESEQAQWMETVKVLRHHHSKLLRSPPQMEGPDHGKALFSTPAGILKRILQTLFEHLTGTDSGLRLRTETASPSPHLKLETGYEWSCA

SEQ ID NO: 11081 - protein, 63 aa, Homo sapiens
MYQVIQGIISPVNDTYGKKDLAASHHRVAMARLALQTSDWIRVDPWESEQAQWMETVKVLSCA

SEQ ID NO: 11082 - protein, 215 aa, Homo sapiens; identical to SEQ ID NO: 11077

SEQ ID NO: 11083 - protein, 252 aa, Homo sapiens
MKSRIPVVLLACGSFNPITNMHLRMFEVARDHLHQTGMYQVIQGIISPVNDTYGKKDLAASHHRVAMARLALQTSDWIRVDPWESEQAQWMETVKVLRHHHSKLLRSPPQMEGPDHGKALFSTPAAVPELKLLCGADVLKTFQTPNLWKDAHIQEIVEKFGLVCVGRVGHDPKGYIAESPILRMHQHNIHLAKEPVQNEISATYIRRALGQGQSVKYLIPDAVITYIKDHGLYTKGSTWKGKSTQSTEGKTS

SEQ ID NO: 11084 - protein, 252 aa, Homo sapiens; identical to SEQ ID NO: 11083

SEQ ID NO: 11085 - protein, 1762 aa, Homo sapiens [sequence omitted]

SEQ ID NO: 11086 - protein, 2270 aa, Homo sapiens [sequence omitted]

SEQ ID NO: 11087 - protein, 2725 aa, Homo sapiens [sequence omitted]

SEQ ID NO: 11088 - protein, 129 aa, Homo sapiens
MVSISRPRDPPASDSQSAGITGMSHRARWLACFLKKLQKFPNIFFQIIVGGVASTSQDMHTYAACTFLAASMKEGKQGIQRNQESVQLGAIEACVMWLLENEFIQSTEASDGTEGKCDFSVAIYSLFLL

SEQ ID NO: 11089 - protein, 153 aa, Homo sapiens
MCHPRTYIFSDCHSRVLEQLRGNVLLNGLSLEADITANLDSPRVTVAQLDWDVATVHQLSAFQPDVVITADVLYCPEAIVSLVGVLRRLAACWEHQRAPEVYMAFTVRNPETCQVFTTELGWAGIRWEAEAHHDQKLFPYGEHLEMAMLNLTL

SEQ ID NO: 11090 - protein, 106 aa, Homo sapiens
MTFPQRGHTRFLTKPSPLQLPHPWTHSVPHKAKLAAAATSLDTFGSSQSQARGSCHIPGHTRFLTKPSPLQLPHPWAYGAAGAFLKTGIKVLGTWQKGDTWRPNAG

SEQ ID NO: 11091 - protein, 81 aa, Homo sapiens
MAPEENAGTKLLLQSFERRFLAARTLRSFPWQTCCIAQKPSCPWSGSCGGWLPAGSTSGLLRSTWPLPSATQRRARCSPPS

SEQ ID NO: 11092 - protein, 187 aa, Homo sapiens
MERSAFMELDAGSRLVMHLREWPALLVSSTGWTEFEQLTLDGHNLPSLVCVITGSVDLGVCLHMSSSGLDLPMKVVDMFGCCLPVCAVNFKCLHELVKHEENGLVFEDSEELAALQMLFSNFPDPAGKLNQFWKNLRESQQLRWDESWVQTVLPLVMDIQLLGQRLKPRDPCCPSRSFFSESQGKPF

SEQ ID NO: 11093 - protein, 221 aa, Homo sapiens [sequence omitted]

SEQ ID NO: 11094 - protein, 125 aa, Homo sapiens
MRWWGEPRWAPQGSGVFSRQLSGSLGSLCSLHELVKHEENGLVFEDSEELAALQMLFSNFPDPAGKLNQFWKNLRESQQLRWDESWVQTVLPLVMDIQLLGQRLKPRDPCCPSRSFFSESQGKPF

SEQ ID NO: 11095 - protein, 187 aa, Homo sapiens; identical to SEQ ID NO: 11092

SEQ ID NO: 11096 - protein, 71 aa, Homo sapiens
MKNRRREEVFPSLRKRNQSQAQLPGSQNQFIHQAAPLPSFQLLATGRRCSKGFALRLREEAAGRTAGVPGF

SEQ ID NO: 11097 - protein, 301 aa, Homo sapiens
MTAEYACTRKQFNKRLSEFGLIQEKFALMAQKAYVMESMTYLTAGMLDQPGFPDCSIEAAMVKVFSSEAAWQCVSEALQILGGLGYTRDYPYERILRDTRILLIFEGTNEILRMYIALTGLQHAGRILTTRIHELKQAKVSTVMDTVGRRLRDSLGRTVDLGLTGNHGVVHPSLADSANKFEENTYCFGRTVETLLLRFGKTIMEEQLVLKRVANILINLYGMTAVLSRASRSIRIGLRNHDHEVLLANTFCVEAYLQNLFSLSQLDKYAPENLDEQIKKVSQQILEKRAYICAHPLDRTC

SEQ ID NO: 11098 - protein, 621 aa, Homo sapiens
MSGCGLFLRTTAAARACRGLVVSTANRRLLRTSPPVRAFAKELFLGKIKKKEVFPFPEVSQDELNEINQFLGPVEKFFTEEVDSRKIDQEGKIPDETLEKLKSLGLFGLQVPEEYGGLGFSNTMYSRLGEIISMDGSITVTLAAHQAIGLKGIILAGTEEQKAKYLPKLASGEHIAAFCLTEPASGSDAASIRSRATLSEDKKHYILNGSKVWITNGGLANIFTVFAKTEVVDSDGSVKDKITAFIVERDFGGVTNGKPEDKLGIRGSNTCEVHFENTKIPVENILGEVGDGFKVAMNILNSGRFSMGSVVAGLLKRLIEMTAEYACTRKQFNKRLSEFGLIQEKFALMAQKAYVMESMTYLTAGMLDQPGFPDCSIEAAMVKVFSSEAAWQCVSEALQILGGLGYTRDYPYERILRDTRILLIFEGTNEILRMYIALTGLQHAGRILTTRIHELKQAKVSTVMDTVGRRLRDSLGRTVDLGLTGNHGVVHPSLADSANKFEENTYCFGRTVETLLLRFGKTIMEEQLVLKRVANILINLYGMTAVLSRASRSIRIGLRNHDHEVLLANTFCVEAYLQNLFSLSQLDKYAPENLDEQIKKVSQQILEKRAYICAHPLDRTC

SEQ ID NO: 11099 - protein, 621 aa, Homo sapiens; identical to SEQ ID NO: 11098

SEQ ID NO: 11100 - protein, 302 aa, Homo sapiens
MKAPGRLVLIILCSVVFSAVYILLCCWAGLPLCLATCLDHHFPTGSRPTVPGPLHFSGYSSVPDGKPLVREPCRSCAVVSSSGQMLGSGLGAEIDSAECVFRMNQAPTVGFEADVGQRSTLRVVSHTSVPLLLRNYSHYFQKARDTLYMVWGQGRHMDRVLGGRTYRTLLQLTRMYPGLQVYTFTERMMAYCDQIFQDETGKNRRQSGSFLSTGWFTMILALELCEEIVVYGMVSDSYCREKSHPSVPYHYFEKGRLDECQMYLAHEQAPRSAHRFITEKAVFSRWAKKRPIVFAHPSWRTE

SEQ ID NO: 11101 - protein, 302 aa, Homo sapiens; identical to SEQ ID NO: 11100

SEQ ID NO: 11102 - protein, 302 aa, Homo sapiens; identical to SEQ ID NO: 11100

SEQ ID NO: 11103 - protein, 218 aa, Homo sapiens
MLGSGLGAEIDSAECVFRMNQAPTVGFEADVGQRSTLRVVSHTSVPLLLRNYSHYFQKARDTLYMVWGQGRHMDRVLGGRTYRTLLQLTRMYPGLQVYTFTERMMAYCDQIFQDETGKNRRQSGSFLSTGWFTMILALELCEEIVVYGMVSDSYCREKSHPSVPYHYFEKGRLDECQMYLAHEQAPRSAHRFITEKAVFSRWAKKRPIVFAHPSWRTE

SEQ ID NO: 11104 - protein, 572 aa, Homo sapiens
MSFQGKKSIPRITSDRLLIRGGRIVNDDQSFYADVHVEDGLIKQIGENLIVPGGIKTIDAHGLMVLPGGVDVHTRLQMPVLGMTPADDFCQGTKAALAGGTTMILDHVFPDTGVSLLAAYEQWRERADSAACCDYSLHVDITRWHESIKEELEALVKEKGVNSFLVFMAYKDRCQCSDSQMYEIFSIIRDLGALAQVHAENGDIVEEEQKRLLELGITGPEGHVLSHPEEVEAEAVYRAVTIAKQANCPLYVTKVMSKGAADAIAQAKRRGVVVFGEPITASLGTDGSHYWSKNWAKAAAFVTSPPVNPDPTTADHLTCLLSSGDLQVTGSAHCTFTTAQKAVGKDNFALIPEGTNGIEERMSMVWEKCVASGKMDENEFVAVTSTNAAKIFNFYPRKGRVAVGSDADLVIWNPKATKIISAKTHNLNVEYNIFEGVECRGAPAVVISQGRVALEDGKMFVTPGAGRFVPRKTFPDFVYKRIKARNRLAEIHGVPRGLYDGPVHEVMVPAKPGSGAPARASCPGKISVPPVRNLHQSGFSLSGSQADDHIARRTAQKIMAPPGGRSNITSLS

SEQ ID NO: 11105 - protein, 509 aa, Homo sapiens
MVLPGGVDVHTRLQMPVLGMTPADDFCQGTKAALAGGTTMILDHVFPDTGVSLLAAYEQWRERADSAACCDYSLHVDITRWHESIKEELEALVKEKGVNSFLVFMAYKDRCQCSDSQMYEIFSIIRDLGALAQVHAENGDIVEEEQKRLLELGITGPEGHVLSHPEEVEAEAVYRAVTIAKQANCPLYVTKVMSKGAADAIAQAKRRGVVVFGEPITASLGTDGSHYWSKNWAKAAAFVTSPPVNPDPTTADHLTCLLSSGDLQVTGSAHCTFTTAQKAVGKDNFALIPEGTNGIEERMSMVWEKCVASGKMDENEFVAVTSTNAAKIFNFYPRKGRVAVGSDADLVIWNPKATKIISAKTHNLNVEYNIFEGVECRGAPAVVISQGRVALEDGKMFVTPGAGRFVPRKTFPDFVYKRIKARNRLAEIHGVPRGLYDGPVHEVMVPAKPGSGAPARASCPGKISVPPVRNLHQSGFSLSGSQADDHIARRTAQKIMAPPGGRSNITSLS

SEQ ID NO: 11106 - protein, 509 aa, Homo sapiens; identical to SEQ ID NO: 11105

SEQ ID NO: 11107 - protein, 509 aa, Homo sapiens; identical to SEQ ID NO: 11105

SEQ ID NO: 11108 - protein, 509 aa, Homo sapiens; identical to SEQ ID NO: 11105

SEQ ID NO: 11109 - protein, 572 aa, Homo sapiens; identical to SEQ ID NO: 11104

SEQ ID NO: 11110 - protein, 572 aa, Homo sapiens; identical to SEQ ID NO: 11104

SEQ ID NO: 11111 - protein, 512 aa, Homo sapiens
MSFQGKKSIPRITSDRLLIRGGRIVNDDQSFYADVHVEDGLIKQIGENLIVPGGIKTIDAHGLMVLPGGVDVHTRLQMPVLGMTPADDFCQGTKAALAGGTTMILDHVFPDTGVSLLAAYEQWRERADSAACCDYSLHVDITRWHESIKEELEALVKEKGVNSFLVFMAYKDRCQCSDSQMYEIFSIIRDLGALAQVHAENGDIVEEEQKRLLELGITGPEGHVLSHPEEVEAEAVYRAVTIAKQANCPLYVTKVMSKGAADAIAQAKRRGVVVFGEPITASLGTDGSHYWSKNWAKAAAFVTSPPVNPDPTTADHLTCLLSSGDLQVTGSAHCTFTTAQKAVGKDNFALIPEGTNGIEERMSMVWEKCVASGKMDENEFVAVTSTNAAKIFNFYPRKGRVAVGSDADLVIWNPKATKIISAKTHNLLAEIHGVPRGLYDGPVHEVMVPAKPGSGAPARASCPGKISVPPVRNLHQSGFSLSGSQADDHIARRTAQKIMAPPGGRSNITSLS

SEQ ID NO: 11112 - protein, 335 aa, Homo sapiens
MAAGAAEAAVAAVEEVGSAGQFEELLRLKAKSLLVVHFWAPWAPQCAQMNEVMAELAKELPQVSFVKLEAEGVPEVSEKYEISSVPTFLFFKNSQKIDRLDGAHAPELTKKVQRHASSGSFLPSANEHLKEDLNLRLKKLTHAAPCMLFMKGTPQEPRCGFSKQMVEILHKHNIQFSSFDIFSDEEVRQGLKAYSSWPTYPQLYVSGELIGGLDIIKELEASEELDTICPKAPKLEERLKVLTNKASVMLFMKGNKQEAKCGFSKQILEILNSTGVEYETFDILEDEEVRQGLKAYSNWPTYPQLYVKGELVGGLDIVKELKENGELLPILRGEN

SEQ ID NO: 11113 - protein, 346 aa, Homo sapiens
MAPGLAIDGGSMAAGAAEAAVAAVEEVGSAGQFEELLRLKAKSLLVVHFWAPWAPQCAQMNEVMAELAKELPQVSFVKLEAEGVPEVSEKYEISSVPTFLFFKNSQKIDRLDGAHAPELTKKVQRHASSGSFLPSANEHLKEDLNLRLKKLTHAAPCMLFMKGTPQEPRCGFSKQMVEILHKHNIQFSSFDIFSDEEVRQGLKAYSSWPTYPQLYVSGELIGGLDIIKELEASEELDTICPKAPKLEERLKVLTNKASVMLFMKGNKQEAKCGFSKQILEILNSTGVEYETFDILEDEEVRQGLKAYSNWPTYPQLYVKGELVGGLDIVKELKENGELLPILRGEN

SEQ ID NO: 11114 - protein, 240 aa, Homo sapiens
MKLALFPLFCFSRTKKVQRHASSGSFLPSANEHLKEDLNLRLKKLTHAAPCMLFMKGTPQEPRCGFSKQMVEILHKHNIQFSSFDIFSDEEVRQGLKAYSSWPTYPQLYVSGELIGGLDIIKELEASEELDTICPKAPKLEERLKVLTNKASVMLFMKGNKQEAKCGFSKQILEILNSTGVEYETFDILEDEEVRQGLKAYSNWPTYPQLYVKGELVGGLDIVKELKENGELLPILRGEN

SEQ ID NO: 11115 - protein, 811 aa, Homo sapiens
MLEPGATPQRYLGLVLGEPRRVVAALPESMRLDSNPHGFPWEMVICAAVAAFFAVLLFLWRSFRSVRSRLYVGREKKLAIMLSGLIEEKCKLLEKFSLVQKEYEDYEVASSLEDASFEKAAAEARSLEATCEKLNRSNSELEHEILCLEKELKEEKSKHSQQNELMADISKTIQPLADESESLKSQVAEAKMIFKRFKMTEKQLKIAIKDALNENSHLQESQKQLLQEAEVWNEQVNELNKQKITFEDSKVHAEQVLNDKENHIKTLTEHLLKMKDWAARLREDVTDDDNLEVNSESEDGAYLDDPLKGALKKLIHATKLNASLKTLEGERNQIYIQLPEIDKTKEELTEHIKNLRTEQASLQSENTHFESENQKLQQKLKVMTELYQENEMKLYRKLTVEENSRLEKEEKLSKVDKKISHATKELETYRQRAKDLEEELERTIHYYQRQIISHEKKAHHNWLAAWAAERNLNDLRKENAHNRQKLAETEYKIKLLKKDPYVLDVPNTAFGREHSPYGPSSLGRPSSETRAFLSPATLLEGPLRLSPLPPGGEGRGSRGPGNPLDHQITKERGESSCERLTDPHRSPSDTGSLSLPREQDRRMMFPPPAQSYLDSALPPQRQDRFYSNSGGLSGPAELRSFNMPPLDKMDGSMPSEMESSRNDTKDDLGNLNIPDSSLPAENAATGPRFVPPPLALIRGPLFPVDTRGPFMRRAPPFPPPPPGTRFGASRDYFPPGDFPGPPHAPFAMRNVYPPRGFPPYPPPRPGFFPRPPHSEGRSEFPSGLIPPSNEPATEHPKPQQDTWQYFCSLQK

SEQ ID NO: 11116 - protein, 257 aa, Homo sapiens [sequence omitted]

SEQ ID NO: 11117 - protein, 257 aa, Homo sapiens [sequence omitted]

SEQ ID NO: 11118 - protein, 402 aa, Homo sapiens
MGKLVALVLLGVGLSLVGEMFLAFRERVNASREVEPVEPENCHLIEELESGSEDIDILPSGLAFISSLQVCWSLLEVHSRPCLPGYHQWRLQNGKYCCLIFLLEASSQRGIRLYEGLKYPGMPNFAPDEPGKIFLMDLNEQNPRAQALEISGGFDKELFNPHGISIFIDKDNTVYLYVVNHPHMKSTVEIFKFEEQQRSLVYLKTIKHELLKSVNDIVVLGPEQFYATRDHYFTNSLLSFFEMILDLRWTYVLFYSPREVKVVAKGFCSANGITVSADQKYVYVADVAAKNIHIMEKHDNWDLTQLKVIQLGTLVDNLTVDPATGDILAGCHPNPMKLLNYNPEDPPGSEVLRIQNVLSEKPRVSTVYANNGSVLQGTSVASVYHGKILIGTVFHKTLYCEL

SEQ ID NO: 11119 - protein, 355 aa, Homo sapiens [sequence omitted]

SEQ ID NO: 11120 - protein, 268 aa, Homo sapiens
MDLNEEDPTVLELGITGSKFDVSSFNPHGISTFTDEDNAMYLLVVNHPDAKSTVELFKFQEEEKSLLHLKTIRHKLLPNLNDIVAVGPEHFYGTNDHYFLDPYLQSWEMYLGLAWSYVVYYSPSEVRVVAEGFDFANGINISPDGKYVYIAELLAHKIHVYEKHANWTLTPLKSLDFNTLVDNISVDPETGDLWVGCHPNGMKIFFYDSENPPASEVLRIQNILTEEPKVTQVYAENGTVLQGSTVASVYKGKLLIGTVFHKALYCEL

SEQ ID NO: 11121 - protein, 354 aa, Homo sapiens
MGKLVALVLLGVGLSLVGEMFLAFRERVNASREVEPVEPENCHLIEELESGSEDIDILPSGLAFISSGLKYPGMPNFAPDEPGKIFLMDLNEQNPRAQALEISGGFDKELFNPHGISIFIDKDNTVYLYVVNHPHMKSTVEIFKFEEQQRSLVYLKTIKHELLKSVNDIVVLGPEQFYATRDHYFTNSLLSFFEMILDLRWTYVLFYSPREVKVVAKGFCSANGITVSADQKYVYVADVAAKNIHIMEKHDNWDLTQLKVIQLGTLVDNLTVDPATGDILAGCHPNPMKLLNYNPEDPPGSEVLRIQNVLSEKPRVSTVYANNGSVLQGTSVASVYHGKILIGTVFHKTLYCEL

SEQ ID NO: 11122 - protein, 355 aa, Homo sapiens [sequence omitted]

SEQ ID NO: 11123 - protein, 94 aa, Homo sapiens
MASVGECPAPVPVKDKKLLEVKLGELPSWILMRDFSPSGIFGAFQRGYYRYYNKYINVKKGSISGITMVLACYVLFSYSFSYKHLKHERLRKYH

SEQ ID NO: 11124 - protein, 389 aa, Homo sapiens
MALKDYALEKEKVKKFLQEFYQDDELGKKQFKYGNQLVRLAHREQVALYVDLDDVAEDDPELVDSICENARRYAKLFADAVQELLPQYKEREVVNKDVLDVYIEHRLMMEQRSRDPGMVRSPQNQYPAELMRRFELYFQGPSSNKPRVIREVRADSVGKLVTVRGIVTRVSEVKPKMVVATYTCDQCGAETYQPIQSPTFMPLIMCPSQECQTNRSGGRLYLQTRGSRFIKFQEMKMQEHSDQVPVGNIPRSITVLVEGENTRIAQPGDHVSVTGIFLPILRTGFRQVVQGLLSETYLEAHRIVKMNKSEDDESGAGELTREELRQIADVIFATVRELVSGGRSVRFSEAEQRCVSRGFTPAQFQAALDEYEELNVWQVNASRTRITFV

SEQ ID NO: 11125 - protein, 719 aa, Homo sapiens
MALKDYALEKEKVKKFLQEFYQDDELGKKQFKYGNQLVRLAHREQVALYVDLDDVAEDDPELVDSICENARRYAKLFADAVQELLPQYKEREVVNKDVLDVYIEHRLMMEQRSRDPGMVRSPQNQYPAELMRRFELYFQGPSSNKPRVIREVRADSVGKLVTVRGIVTRVSEVKPKMVVATYTCDQCGAETYQPIQSPTFMPLIMCPSQECQTNRSGGRLYLQTRGSRFIKFQEMKMQEHSDQVPVGNIPRSITVLVEGENTRIAQPGDHVSVTGIFLPILRTGFRQVVQGLLSETYLEAHRIVKMNKSEDDESGAGELTREELRQIAEEDFYEKLAASIAPEIYGHEDVKKALLLLLVGGVDQSPRGMKIRGNINICLMGDPGVAKSQLLSYIDRLAPRSQYTTGRGSSGVGLTAAVLRDSVSGELTLEGGALVLADQGVCCIDEFDKMAEADRTAIHEVMEQQTISIAKAGILTTLNARCSILAAANPAYGRYNPRRSLEQNIQLPAALLSRFDLLWLIQDRPDRDNDLRLAQHITYVHQHSRQPPSQFEPLDMKLMRRYIAMCREKQPMVPESLADYITAAYVEMRREAWASKDATYTSARTLLAILRLSTALARLRMVDVVEKEDVNEAIRLMEMSKDSLLGDKGQTARTQRPADVIFATVRELVSGGRSVRFSEAEQRCVSRGFTPAQFQAALDEYEELNVWQVNASRTRITFV

SEQ ID NO: 11126 - protein, 469 aa, Homo sapiens
MLPPWTLGLLLLATVRGKEVCYGQLGCFSDEKPWAGTLQRPVKLLPWSPEDIDTRFLLYTNENPNNFQLITGTEPDTIEASNFQLDRKTRFIIHGFLDKAEDSWPSDMCKKMFEVEKVNCICVDWRHGSRAMYTQAVQNIRVVGAETAFLIQALSTQLGYSLEDVHVIGHSLGAHTAAEAGRRLGGRVGRITGLDPAGPCFQDEPEEVRLDPSDAVFVDVIHTDSSPIVPSLGFGMSQKVGHLDFFPNGGKEMPGCKKNVLSTITDIDGIWEGIGGFVSCNHLRSFEYYSSSVLNPDGFLGYPCASYDEFQESKCFPCPAEGCPKMGHYADQFKGKTSAVEQTFFLNTGESGNFTSWRYKVSVTLSGKEKVNGYIRIALYGSNENSKQYEIFKGSLKPDASHTCAIDVDFNVGKIQKVKFLWNKRGINLSEPKLGASQITVQSGEDGTEYNFCSSDTVEENVLQSLYPC

SEQ ID NO: 11127 - protein, 340 aa, Homo sapiens
  VARIANT (1)...(340): Xaa = Any Amino Acid
MCKKMFEVEKVNCICVDWRHGSRAMYTQAVQNIRVVGAETAFLIQALSTQLGYSLEDVHVIGHSLGAHTAAEAGRRLGGRVGRITGLDPAGPCFQDEPEEVRLDPSDAVFVDVIHTDSSPIVPSLGFGMSQKVGHLDFFPNGGKEMPGCKKNVLSTITDIDGIWEGIGGFVSCNHLRSFEYYSSSVLNPDGFLGYPCASYDEFQECFPCPAEGCPKMGHYADQFKGKTSAVEQTFFLNTGESGNFTSWRYKVSVTLSGKEKVNGYIRIALYGSNENSKQYEIFKGSLKPDASHTCAIDVDFNVGKIQKVKFLWNKRGINLSEPKLGASQITVQSGEDGTX

SEQ ID NO: 11128 - protein, 126 aa, Homo sapiens
MNKHNLRLVQLASELILIEIIPKLFLSQVTTISHIKREKIPPNHRKGILCMFPWQCVVYVFSNFVWLVIHRFSNGFIQFLGEPYRLMTASGTHGRIKFMVDIPIIKNTQVLRIPVLKDPKMLSKKH

SEQ ID NO: 11129 - protein, 453 aa, Homo sapiens
MISQFFILSSKGDPLIYKDFRGDSGGRDVAELFYRKLTGLPGDESPVVMHHHGRHFIHIRHSGLYLVVTTSENVSPFSLLELLSRLATLLGDYCGSLGEGTISRNVALVYELLDEVLDYGYVQTTSTEMLRNFIQTEAVVSKPFSLFDLSSVGLFGAETQQSKVAPSSAASRPVLSSRSDQSQKNEVFLDVVERLSVLIASNGSLLKVDVQGEIRLKSFLPSGSEMRIGLTEEFCVGKSELRGYGPGIRVDEVSFHSSVNLDEFESHRILRLQPPQGELTVMRYQLSDDLPSPLPFRLFPSVQWDRGSGRLQVYLKLRCDLLSKSQALNVRLHLPLPRGVVSLSQELSSPEQKAELAEGALRWDLPRVQGGSQLSGLFQMDVPGPPGPPSHGLSTSASPLGLGPASLSFELPRHTCSGLQVRFLRLAFRPCGNANPHKWVRHLSHSDAYVIRI

SEQ ID NO: 11130 - protein, 453 aa, Homo sapiens; identical to SEQ ID NO: 11129

SEQ ID NO: 11131 - protein, 385 aa, Homo sapiens
MISQFFILSSKGDPLIYKDFRGDSGGRDVAELFYRKLTGLPGDESPVVMDYGYVQTTSTEMLRNFIQTEAVVSKPFSLFDLSSVGLFGAETQQSKVAPSSAASRPVLSSRSDQSQKNEVFLDVVERLSVLIASNGSLLKVDVQGEIRLKSFLPSGSEMRIGLTEEFCVGKSELRGYGPGIRVDEVSFHSSVNLDEFESHRILRLQPPQGELTVMRYQLSDDLPSPLPFRLFPSVQWDRGSGRLQVYLKLRCDLLSKSQALNVRLHLPLPRGVVSLSQELSSPEQKAELAEGALRWDLPRVQGGSQLSGLFQMDVPGPPGPPSHGLSTSASPLGLGPASLSFELPRHTCSGLQVRFLRLAFRPCGNANPHKWVRHLSHSDAYVIRI

SEQ ID NO: 11132 - protein, 395 aa, Homo sapiens
MKDSVKLVILHHVDHYFPTCKCIMAFGISMMWLLLTTTCLICGTLNAGGFLDLENEVNPEVWMNTSEIIIYNGYPSEEYEVTTEDGYILLVNRIPYGRTHARSTADAGYDVWMGNSRGNTWSRRHKTLSETDEKFWAFSFDEMAKYDLPGVIDFIVNKTGQEKLYFIGHSLGTTIGFVAFSTMPELAQRIKMNFALGPTISFKYPTGIFTRFFLLPNSIIKAVFGTKGFFLEDKKTKIASTKICNNKILWLICSEFMSLWAGSNKKNMNQSRMDVYMSHAPTGSSVHNILHIKQLYHSDEFRAYDWGNDADNMKHYNQSHPPIYDLTAMKVPTAIWAGGHDVLVTPQDVARILPQIKSLHYFKLLPDWNHFDFVWGLDAPQRMYSEIIALMKAYS

SEQ ID NO: 11133 - protein, 93 aa, Homo sapiens
MWQLLAAACWMLLLGSMYGYDKKGNNANPEANMNIHALFADNAYWLENYANGSLGFLLADAGYDVWMGNSRGNTWSRRHKTLSETDEKFWAFR

SEQ ID NO: 11134 - protein, 398 aa, Homo sapiens
MWLLLTMASLISVLGTTHGLFGKLHPGSPEVTMNISQMITYWGYPNEEYEVVTEDGYILEVNRIPYGKKNSGNTGQRPVVFLQHGLLASATNWISNLPNNSLAFILADAGYDVWLGNSRGNTWARRNLYYSPDSVEFWAFSFDEMAKYDLPATIDFIVKKTGQKQLHYVGHSQGTTIGFIAFSTNPSLAKRIKTFYALAPVATVKYTKSLINKLRFVPQSLFKFIFGDKIFYPHNFFDQFLATEVCSREMLNLLCSNALFIICGFDSKNFNTSRLDVYLSHNPAGTSVQNMFHWTQAVKSGKFQAYDWGSPVQNRMHYDQSQPPYYNVTAMNVPIAVWNGGKDLLADPQDVGLLLPKLPNLIYHKEIPFYNHLDFIWAMDAPQEVYNDIVSMISEDKK

SEQ ID NO: 11135 - protein, 501 aa, Homo sapiens
MGGRSKPASLGGASAQELAAGARRPESQAEETVSARPESQAEETVSARPESQAEETVSARPGRPAPAPSPFPGPPQGGNASASPELCLETFVLPSPLGPLPALYWPPPSCPSLSTLSFQLTFPLPTVAALRDAEIQKDVQTYYGQVLKRSADLQTNGCVTTARPVPKHIREALQNVHEEVALRYYGCGLVIPEHLENCWILDLGSGSGRDCYVLSQLVGEKGHVTGIDMTKGQVEVAEKYLDYHMEKYGFQASNVTFIHGYIEKLGEAGIKNESHDIVVSNCVINLVPDKQQVLQEAYRVLKHGGELYFSDVYTSLELPEEIRTHKVLWGECLGGALYWKELAVLAQKIGFCPPRLVTANLITIQNKELERVIGDCRFVSATFRLFKHSKTGPTKRCQVIYNGGITGHEKELMFDANFTFKEGEIVEVDEETAAILKNSRFAQDFLIRPIGEKLPTSGGCSALELKDIITDPFKLAEESDSMKSRCVPDAAGGCCGTKKSC

SEQ ID NO: 11136 - protein, 349 aa, Homo sapiens
MTLAALRDAEIQKDVQTYYGQVLKRSADLQTNGCVTTARPVPKHIREALQNVHEEVALRYYGCGLVIPEHLENCWILDLGSGSGRDCYVLSQLVGEKGHVTGIDMTKGQVEVAEKYLDYHMEKYGFQASNVTFIHGYIEKLGEAGIKNESHDIVVSNCVINLVPDKQQVLQEAYRVLKHGGELYFSDVYTSLELPEEIRTHKVLWGECLGGALYWKELAVLAQKIGFCPPRLVTANLITIQNKELERVIGDCRFVSATFRLFKHSKTGPTKRCQVIYNGGITGHEKELMFDANFTFKEGEIVEVDEETAAILKNSRFAQDFLIRPIGEKLPTSGGCSALELKVSLAFTT

SEQ ID NO: 11137 - protein, 377 aa, Homo sapiens
MTLAALRDAEIQKDVQTYYGQVLKRSADLQTNGCVTTARPVPKHIREALQNVHEEVALRYYGCGLVIPEHLENCWILDLGSGSGRDCYVLSQLVGEKGHVTGIDMTKGQVEVAEKYLDYHMEKYGFQASNVTFIHGYIEKLGEAGIKNESHDIVVSNCVINLVPDKQQVLQEAYRVLKHGGELYFSDVYTSLELPEEIRTHKVLWGECLGGALYWKELAVLAQKIGFCPPRLVTANLITIQNKELERVIGDCRFVSATFRLFKHSKTGPTKRCQVIYNGGITGHEKELMFDANFTFKEGEIVEVDEETAAILKNSRFAQDFLIRPIGEKLPTSGGCSALELKDIITDPFKLAEESDSMKSRCVPDAAGGCCGTKKSC

SEQ ID NO: 11138 - protein, 375 aa, Homo sapiens
MAALRDAEIQKDVQTYYGQVLKRSADLQTNGCVTTARPVPKHIREALQNVHEEVALRYYGCGLVIPEHLENCWILDLGSGSGRDCYVLSQLVGEKGHVTGIDMTKGQVEVAEKYLDYHMEKYGFQASNVTFIHGYIEKLGEAGIKNESHDIVVSNCVINLVPDKQQVLQEAYRVLKHGGELYFSDVYTSLELPEEIRTHKVLWGECLGGALYWKELAVLAQKIGFCPPRLVTANLITIQNKELERVIGDCRFVSATFRLFKHSKTGPTKRCQVIYNGGITGHEKELMFDANFTFKEGEIVEVDEETAAILKNSRFAQDFLIRPIGEKLPTSGGCSALELKDIITDPFKLAEESDSMKSRCVPDAAGGCCGTKKSC

SEQ ID NO: 11139 - protein, 581 aa, Homo sapiens
MGGRSKPASLGGASAQELAAGARRPESQAEETVSARPESQAEETVSARPESQAEETVSARPGRPAPAPSPFPGPPQGGNASASPELCLETFVLPSPLGPLPALYWPPPSCPSLSTLSFQLTFPLPTVAALRDAEIQKDVQVRAVGPGMAQVEPRLMEVWPGPHPVPRDSWSRGRAGSRLRPFQGTEVGQVEVEVVTEPSRCSHSSLLPLYPSLHCGTLGQTYYGQVLKRSADLQTNGCVTTARPVPKHIREALQNVHEEVALRYYGCGLVIPEHLENCWILDLGSGSGRDCYVLSQLVGEKGHVTGIDMTKGQVEVAEKYLDYHMEKYGFQASNVTFIHGYIEKLGEAGIKNESHDIVVSNCVINLVPDKQQVLQEAYRVLKHGGELYFSDVYTSLELPEEIRTHKVLWGECLGGALYWKELAVLAQKIGFCPPRLVTANLITIQNKELERVIGDCRFVSATFRLFKHSKTGPTKRCQVIYNGGITGHEKELMFDANFTFKEGEIVEVDEETAAILKNSRFAQDFLIRPIGEKLPTSGGCSALELKDIITDPFKLAEESDSMKSRCVPDAAGGCCGTKKSC

SEQ ID NO: 11140 - protein, 228 aa, Homo sapiens
MASGCKIGPSILNSDLANLGAKCLQMLDSGADYLHLDVMDGHFVPNITFGHPVVESLRKQLGQDPFFDMHMMVSKPEQWVKPMAVAEANQYTFHLEATENPGTLIKDIRENGMKVGLAIKPGTSVEYLAPWANQIDMALVMTVEPGFGEQKFMEDMMPKVHWLRTQFPSLDIEGDGGVGSDTVHKCAEAGANMTVSGSAIMRSEDPRSVINLLRNICSEAAQKRSLDR

SEQ ID NO: 11141 - protein, 487 aa, Homo sapiens
MLRAPGCLLRTSVAPAAALAAALLSSLARCSLLEPRDPVASSLSPYFGTKTRYEDVNPVLLSGPEAPWRDPELLEGTCTPVQLVALIRHGTRYPTVKQIRKLRQLHGLLQARGSRDGGASSTGSRDLGAALADWPLWYADWMDGQLVEKGRQDMRQLALRLASLFPALFSRENYGRLRLITSSKHRCMDSSAAFLQGLWQHYHPGLPPPDVADMEFGPPTVNDKLMRFFDHCEKFLTEVEKNATALYHVEAFKTGPEMQNILKKVAATLQVPVNDLNADLIQVAFFTCSFDLAIKGVKSPWCDVFDIDDAKVLEYLNDLKQYWKRGYGYTINSRSSCTLFQDIFQHLDKAVEQKQRSQPISSPVILQFGHAETLLPLLSLMGYFKDKEPLTAYNYKKQMHRKFRSGLIVPYASNLIFVLYHCENAKTPKEQFRVQMLLNEKVLPLAYSQETVSFYEDLKNHYKDILQSCQTSEECELARANSTSDEL

SEQ ID NO: 11142 - protein, 312 aa, Homo sapiens
MLRAPGCLLRTSVAPAAALAAALLSSLARCSLLEPRDPVASSLSPYFGTKTRYEDVNPVLLSGPEAPWRDPELLEGTCTPVQLVALIRHGTRYPTVKQIRKLRQLHGLLQARGSRDGGASSTGSRDLGAALADWPLWYADWMDGQLVEKGRQDMRQLALRLASLFPALFSRENYGRLRLITSSKHRCMDSSAAFLQGLWQHYHPGLPPPDVADMEFGPPTVNDKLMRFFDHCEKFLTEVEKNATALYHVEAFKTGPEMQNILKKVAATLQVPVNDLNAGLSQFLLQSSSSLVMQRLFFHCFLSWATSKTRNP

SEQ ID NO: 11143 - protein, 1049 aa, Homo sapiens
MLCWGNASFGQLGLGGIDEEIVLEPRKSDFFINKRVRDVGCGLRHTVFVLDDGTVYTCGCNDLGQLGHEKSRKKPEQVVALDAQNIVAVSCGEAHTLALNDKGQVYAWGLDSDGQLGLVGSEECIRVPRNIKSLSDIQIVQVACGYYHSLALSKASEVFCWGQNKYGQLGLGTDCKKQTSPQLLKSLLGIPFMQVAAGGAHSFVLTLSGAIFGWGRNKFGQLGLNDENDRYVPNLLKSLRSQKIVYICCGEDHTAALTKEGGVFTFGAGGYGQLGHNSTSHEINPRKVFELMGSIVTEIACGRQHTSAFVPSSGRIYSFGLGGNGQLGTGSTSNRKSPFTVKGNWYPYNGQCLPDIDSEEYFCVKRIFSGGDQSFSHYSSPQNCGPPDDFRCPNPTKQIWTVNEALIQKWLSYPSGRFPVEIANEIDGTFSSSGCLNGSFLAVSNDDHYRTGTRFSGVDMNAARLLFHKLIQPDHPQISQQVAASLEKNLIPKLTSSLPDVEALRFYLTLPECPLMSDSNNFTTIAIPFGTALVNLEKAPLKVLENWWSVLEPPLFLKIVELFKEVVVHLLKLYKIGIPPSERRIFNSFLHTALKVLEILHRVNEKMGQIIQYDKFYIHEVQELIDIRNDYINWVQQQAYGMLADIPVTICTYPFVFDAQAKTTLLQTDAVLQMQMAIDQAHRQNVSSLFLPVIESVNPCLILVVRRENIVGDAMEVLRKTKNIDYKKPLKVIFVGEDAVDAGGVRKEFFLLIMRELLDPKYGMFRYYEDSRLIWFSDKTFEDSDLFHLIGVICGLAIYNCTIVDLHFPLALYKKLLKKKPSLDDLKELMPDVGRSMQQLLDYPEDDIEETFCLNFTITVENFGATEVKELVLNGADTAVNKQNRQEFVDAYVDYIFNKSVASLFDAFHAGFHKVCGGKVLLLFQPNELQAMVIGNTNYDWKELEKNTEYKGEYWAEHPTIKIFWEVFHELPLEKKKQFLLFLTGSDRIPILGMKSLKLVIQSTGGGEEYLPVSHTCFNLLDLPKYTEKETLRSKLIQAIDHNEGFSLI

SEQ ID NO: 11144 - protein, 110 aa, Homo sapiens
MAIDQAHRQNVSSLFLPVIESVNPCLILVVRRENIVGDAMEVLRKTKNIDYKKPLKVIFVGEDAVDAGGVRKEFFLLIMRELLDPKYGMFRYYEDSRLIWFSDKVKCPTI

SEQ ID NO: 11145 - protein, 947 aa, Homo sapiens
MCVDSLVRICSGLSYGRIRNIKSLSDIQIVQVACGYYHSLALSKASEVFCWGQNKYGQLGLGTDCKKQTSPQLLKSLLGIPFMQVAAGGAHSFVLTLSGAIFGWGRNKFGQLGLNDENDRYVPNLLKSLRSQKIVYICCGEDHTAALTKEGGVFTFGAGGYGQLGHNSTSHEINPRKVFELMGSIVTEIACGRQHTSAFVPSSGRIYSFGLGGNGQLGTGSTSNRKSPFTVKGNWYPYNGQCLPDIDSEEYFCVKRIFSGGDQSFSHYSSPQNCGPPDDFRCPNPTKQIWTVNEALIQKWLSYPSGRFPVEIANEIDGTFSSSGCLNGSFLAVSNDDHYRTGTRFSGVDMNAARLLFHKLIQPDHPQISQQVAASLEKNLIPKLTSSLPDVEALRFYLTLPECPLMSDSNNFTTIAIPFGTALVNLEKAPLKVLENWWSVLEPPLFLKIVELFKEVVVHLLKLYKIGIPPSERRIFNSFLHTALKVLEILHRVNEKMGQIIQYDKFYIHEVQELIDIRNDYINWVQQQAYGMDVNHGLTELADIPVTICTYPFVFDAQAKTTLLQTDAVLQMQMAIDQAHRQNVSSLFLPVIESVNPCLILVVRRENIVGDAMEVLRKTKNIDYKKPLKVIFVGEDAVDAGGVRKEFFLLIMRELLDPKYGMFRYYEDSRLIWFSDKTFEDSDLFHLIGVICGLAIYNCTIVDLHFPLALYKKLLKKKPSLDDLKELMPDVGRSMQQLLDYPEDDIEETFCLNFTITVENFGATEVKELVLNGADTAVNKQNRQEFVDAYVDYIFNKSVASLFDAFHAGFHKVCGGKVLLLFQPNELQAMVIGNTNYDWKELEKNTEYKGEYWAEHPTIKIFWEVFHELPLEKKKQFLLFLTGSDRIPILGMKSLKLVIQSTGGGEEYLPVSHTCFNLLDLPKYTEKETLRSKLIQAIDHNEGFSLI

SEQ ID NO: 11146 - protein, 794 aa, Homo sapiens
MMKMEGGVFTFGAGGYGQLGHNSTSHEINPRKVFELMGSIVTEIACGRQHTSAFVPSSGRIYSFGLGGNGQLGTGSTSNRKSPFTVKGNWYPYNGQCLPDIDSEEYFCVKRIFSGGDQSFSHYSSPQNCGPPDDFRCPNPTKQIWTVNEALIQKWLSYPSGRFPVEIANEIDGTFSSSGCLNGSFLAVSNDDHYRTGTRFSGVDMNAARLLFHKLIQPDHPQISQQVAASLEKNLIPKLTSSLPDVEALRFYLTLPECPLMSDSNNFTTIAIPFGTALVNLEKAPLKVLENWWSVLEPPLFLKIVELFKEVVVHLLKLYKIGIPPSERRIFNSFLHTALKVLEILHRVNEKMGQIIQYDKFYIHEVQELIDIRNDYINWVQQQAYGMLADIPVTICTYPFVFDAQAKTTLLQTDAVLQMQMAIDQAHRQNVSSLFLPVIESVNPCLILVVRRENIVGDAMEVLRKTKNIDYKKPLKVIFVGEDAVDAGGVRKEFFLLIMRELLDPKYGMFRYYEDSRLIWFSDKTFEDSDLFHLIGVICGLAIYNCTIVDLHFPLALYKKLLKKKPSLDDLKELMPDVGRSMQQLLDYPEDDIEETFCLNFTITVENFGATEVKELVLNGADTAVNKQNRQEFVDAYVDYIFNKSVASLFDAFHAGFHKVCGGKVLLLFQPNELQAMVIGNTNYDWKELEKNTEYKGEYWAEHPTIKIFWEVFHELPLEKKKQFLLFLTGSDRIPILGMKSLKLVIQSTGGGEEYLPVSHTCFNLLDLPKYTEKETLRSKLIQAIDHNEGFSLI

SEQ ID NO: 11147 - protein, 1049 aa, Homo sapiens; identical to SEQ ID NO: 11143

SEQ ID NO: 11148 - protein, 345 aa, Homo sapiens
MTSVRENILFGMGNPLLDISAVVDKDFLDKYSLKPNDQILAEDKHKELFDELVKKFKVEYHAGGSTQNSIKVAQWMIQQPHKAATFFGCIGIDKFGEILKRKAAEAHVDAHYYEQNEQPTGTCAACITGDNRSLIANLAAANCYKKEKHLDLEKNWMLVEKARVCYIAGFFLTVSPESVLKVAHHASENNRIFTLNLSAPFISQFYKESLMKVMPYVDILFGNETEAATFAREQGFETKDIKEIAKKTQALPKMNSKRQRIVIFTQGRDDTIMATESEVTAFAVLDQDQKEIIDTNGAGDAFVGGFLSQLVSDKPLTECIRAGHYAASIIIRRTGCTFPEKPDFH

SEQ ID NO: 11149 - protein, 276 aa, Homo sapiens
MAAAEEEPKPKKLKVEAPQALRENILFGMGNPLLDISAVVDKDFLDKYSLKPNDQILAEDKHKELFDELVKKFKVEYHAGGSTQNSIKVAQWMIQQPHKAATFFGCIGIDKFGEILKRKAAEAHVDAHYYEQNEQPTGTCAACITGDNRSLIANLAAANCYKKEKHLDLEKNWMLVEKARVCYIAEAATFAREQGFETKDIKEIAKKTQALPKMNSKRQRIVIFTQGRDDTIMATGFLSQLVSDKPLTECIRAGHYAASIIIRRTGCTFPEKPDFH

SEQ ID NO: 11150 - protein, 289 aa, Homo sapiens
MSGFSTEERAAPFSLEYRVFLKNEKGQYISPFHDIPIYADKDVFHMVVEVPRWSNAKMEIATKDPLNPIKQDVKKGKLRYVANLFPYKGYIWNYGAIPQTWEDPGHNDKHTGCCGDNDPIDVCEIGSKVCARGEIIGVKVLGILAMIDEGETDWKVIAINVDDPDAANYNDINDVKRLKPGYLEATVDWFRRYKVPDGKPENEFAFNAEFKDKDFAIDIIKSTHDHWKALVTKKTNGKGISCMNTTLSESPFKCDPDAARAIVDALPPPCESACTVPTDVDKWFHHQKN

SEQ ID NO: 11151 - protein, 289 aa, Homo sapiens; identical to SEQ ID NO: 11150

SEQ ID NO: 11152 - protein, 33 aa, Homo sapiens
MCVYIKLLYMHKSVFIISKNILIILHVIKSQEA

SEQ ID NO: 11153 - protein, 244 aa, Homo sapiens
MVVEVPRWSNAKMEIATKDPLNPIKQDVKKGKLRYVANLFPYKGYIWNYGAIPQTWEDPGHNDKHTGCCGDNDPIDVCEIGSKVCARGEIIGVKVLGILAMIDEGETDWKVIAINVDDPDAANYNDINDVKRLKPGYLEATVDWFRRYKVPDGKPENEFAFNAEFKDKDFAIDIIKSTHDHWKALVTKKTNGKGISCMNTTLSESPFKCDPDAARAIVDALPPPCESACTVPTDVDKWFHHQKN

SEQ ID NO: 11154 - protein, 115 aa, Homo sapiens
MLALTKIIYSTHLPRQGVAWESSMCKALPPPDPSNFCTLEGETWREKTLPSLASTWHPPKMSIHLGDQNKKGSRVGGAPAASEEFHSSPPSWGTLLWLHLPQLRAKTKQERLRLQ

SEQ ID NO: 11155 - protein, 263 aa, Homo sapiens
MAMEMRLPVARKPLSERLGRDTKKHLVVPGDTITTDTGFMRGHGTYMGEEKLIASVAGSVERVNKLICVKALKTRYIGEVGDIVVGRITERRRSAEDELAMRGFLQEGDLISAEVQAVFSDGAVSLHTRSLKYGKLGQGVLVQVSPSLVKRQKTHFHDLPCGASVILGNNGFIWIYPTPEHKEEEAGGFIANLEPVSLADREVISRLRNCIISLVTQRMMLYDTSILYCYEASLPHQIKDILKPEIMEEIVMETRQRLLEQEG

SEQ ID NO: 11156 - protein, 293 aa, Homo sapiens
MAMEMRLPVARKPLSERLGRDTKKHLVVPGDTITTDTGFMRGHGTYMGEEKLIASVAGSVERVNKLICVKALKTRYIGEVGDIVVGRITEVQQKRWKVETNSRLDSVLLLSSMNLPGGELRRRSAEDELAMRGFLQEGDLISAEVQAVFSDGAVSLHTRSLKYGKLGQGVLVQVSPSLVKRQKTHFHDLPCGASVILGNNGFIWIYPTPEHKEEEAGGFIANLEPVSLADREVISRLRNCIISLVTQRMMLYDTSILYCYEASLPHQIKDILKPEIMEEIVMETRQRLLEQEG

SEQ ID NO: 11157 - protein, 192 aa, Homo sapiens
MAMEMRLPVARKPLSERLGRDTKKHLVVPGDTITTDTGFMRGHGTYMGEEKLIASVAGSVERVNKLICVKALKTRYIGEVGDIVVGRITEVQQKRWKVETNSRLDSVLLLSSMNLPGGELRRRSAEDELAMRGFLQEGDLISAEVQAVFSDGAVSLHTRSLKYGKMKSHYVAQAGLELLTSSNPPAQAIFPP

SEQ ID NO: 11158 - protein, 109 aa, Homo sapiens
MALGKTKPSYSGGLCHHTRLIFVFLVKTRFHCIGRAGLELLTSGDLPTQLPKVLDYRHIAPLFLRMFPQTYIRAPFLDSHQKKQCTGILTFFSENSGVFLSFNSESSTS

SEQ ID NO: 11159 - protein, 151 aa, Homo sapiens
MVWQQKTKAVVMLNRIMEKELVKCAQYWPTDDQEMLFKETGFSVKLLSEDVKSYYTVHLPQLENINMRESGSLNPDHGPVVIHRSAGTGRSSTFSLVDTCLVLMEKGDDINIKQVLLNIRKFQMGLISDPRSTEILIHGYNRRSKMCKGRF

SEQ ID NO: 11160 - protein, 184 aa, Homo sapiens
MVWQQKTKAVVMLNRIMEKELVKCAQYWPTDDQEMLFKETGFSVKLLSEDVKSYYTVHLPQLENINSGETRTISHFHYTTWPDFGVPQSPASFLNFLFKVRESGSLNPDHGPVVIHRSAGTGRSSTFSLVDTCLVLMEKGDDINIKQVLLNIRKFQMGLISDPRSTEILIHGYNRRSKMCKGRF

SEQ ID NO: 11161 - protein, 184 aa, Homo sapiens; identical to SEQ ID NO: 11160

SEQ ID NO: 11162 - protein, 440 aa, Homo sapiens
MSSCRGQKVAGGLRVVSPFPLCQPAGEPSQGKMRSSCVLLTALVALAAYYVYIPLPGSVSDPWKLMLLDATFRGAQQVSNLIHYLGLSHHLLALNFIIVSFGKKSAWSSAQVKVTDTDFDGVEVRVFEGPPKPEEPLKRSVVYIHGGGWALASAKIRYYDELCTAMAEELNAVIVSIEYRLVPKVYFPEQIHDVVRATKYFLKPEVLQKYMVDPGRICISGDSAGGNLAAALGQQFTQDASLKNKLKLQALIYPVLQALDFNTPSYQQNVNTPILPRYVMVKYWVDYFKGNYDFVQAMIVNNHTSLDVEEAAAVRARLNWTSLLPASFTKNYKPVVQTTGNARIVQELPQLLDARSAPLIADQAVLQLLPKTYILTCEHDVLRDDGIMYAKRLESAGVEVTLDHFEDGFHGCMIFTSWPTNFSVGIRTRNSYIKWLDQNL

SEQ ID NO: 11163 - protein, 335 aa, Homo sapiens
MLFQCSLPDTTATLGDEPRKVLLRLYGAILQMRSCNKEGSEQAQKENEFQGAEAMVLESVMFAILAERSLGPKLYGIFPQGRLEQFIPSRRLDTEELSLPDISAEIAEKMATFHGMKMPFNKEPKWLFGTMEKYLKEVLRIKFTEESRIKKLHKLLSYNLPLELENLRSLLESTPSPVVFCHNDCQEGNILLLEGRENSEKQKLMLIDFEYSSYNYRGFDIGNHFCEWMYDYSYEKYPFFRANIRKYPTKKQQLHFISSYLPAFQNDFENLSTEEKSIIKEEMLLEVNRFALASHFLWGLWSIVQAKISSIEFGYMDYAQARFDAYFHQKRKLGV

SEQ ID NO: 11164 - protein, 316 aa, Homo sapiens
MVLESVMFAILAERSLGPKLYGIFPQGRLEQFIPSRRLDTEELSLPDISAEIAEKMATFHGMKMPFNKEPKWLFGTMEKYLKEVLRIKFTEESRIKKLHKLLSYNLPLELENLRSLLESTPSPVVFCHNDCQEGNILLLEGRENSEKQKLMLIDFEYSSYNYRGFDIGNHFCEWMYDYSYEKYPFFRANIRKYPTKKQQLHFISSYLPAFQNDFENLSTEEKSIIKEEMLLEVNRFALASHFLWGLWSIVQAKISSIEFGYMYPNVVTWWHQDSVAQPRKPGEKPLSLMLWLPLEVALTSRPADLASPASEKCLQS

SEQ ID NO: 11165 - protein, 335 aa, Homo sapiens; identical to SEQ ID NO: 11163

SEQ ID NO: 11166 - protein, 231 aa, Homo sapiens [sequence omitted]

SEQ ID NO: 11167 - protein, 431 aa, Homo sapiens
MDPLGDTLRRLREAFHAGRTRPAEFRAAQLQGLGRFLQENKQLLHDALAQDLHKATQLDSAFIRKEPFGLVLIIAPWNYPLNLTLVPLVGALAAGNCVVLKPSEISKNVEKILAEVLPQYVDQSCFAVVLGGPQETGQLLEHRFDYIFFTGSPRVGKIVMTAAAKHLTPVTLELGGKNPCYVDDNCDPQTVANRVAWFRYFNAGQTCVAPDYVLCSPEMQERLLPALQSTITRFYGDDPQSSPNLGRIINQKQFQRLRALLGCGRVAIGGQSDESDRYIAPTVLVDVQEMEPVMQEEIFGPILPIVNVQSLDEAIEFINRREKPLALYAFSNSSQVVKRVLTQTSSGGFCGNDGFMHMTLASLPFGGVGASGMGRYHGKFSFDTFSHHRACLLRSPGMEKLNALRYPPQSPRRLRMLLVAMEAQGCSCTLL

SEQ ID NO: 11168 - protein, 468 aa, Homo sapiens
MDPLGDTLRRLREAFHAGRTRPAEFRAAQLQGLGRFLQENKQLLHDALAQDLHKSAFESEVSEVAISQGEVTLALRNLRAWMKDERVPKNLATQLDSAFIRKEPFGLVLIIAPWNYPLNLTLVPLVGALAAGNCVVLKPSEISKNVEKILAEVLPQYVDQSCFAVVLGGPQETGQLLEHRFDYIFFTGSPRVGKIVMTAAAKHLTPVTLELGGKNPCYVDDNCDPQTVANRVAWFRYFNAGQTCVAPDYVLCSPEMQERLLPALQSTITRFYGDDPQSSPNLGRIINQKQFQRLRALLGCGRVAIGGQSDESDRYIAPTVLVDVQEMEPVMQEEIFGPILPIVNVQSLDEAIEFINRREKPLALYAFSNSSQVVKRVLTQTSSGGFCGNDGFMHMTLASLPFGGVGASGMGRYHGKFSFDTFSHHRACLLRSPGMEKLNALRYPPQSPRRLRMLLVAMEAQGCSCTLL

SEQ ID NO: 11169 - protein, 468 aa, Homo sapiens; identical to SEQ ID NO: 11168

SEQ ID NO: 11170 - protein, 177 aa, Homo sapiens
MGRACTITSPASRSCAGSRGARNSRRFPTFTNTSASPLKTKRTSGQKAEAQARKWISLSVRLKKVSSKAQSRMSAYARLSARSRARQWVRAPSPTSSAPPEPAPLGTPSKNTRRTSAPCTRPSAPHVWRTAWRRSKSSATDLTAISRSGRPPGAPSPRHLCGWLMSSGNRRWSLARK

SEQ ID NO: 11171 - protein, 318 aa, Homo sapiens
MAAAAVSGALGRAGWRLLQLRCLPVARCRQALVPRAFHASAVGLRSSDEQKQQPPNSFSQQHSETQGAEKPDPESSHSPPRYTDQGGEEEEDYESEEQLQHRILTAALEFVPAHGWTAEAIAEGAQSLGLSSAAASMFGKDGSELILHFVTQCNTRLTRVLEEEQKLVQLGQAEKRKTDQFLRDAVETRLRMLIPYIEHWPRALSILMLPHNIPSSLSLLTSMVDDMWHYAGDQSTDFNWYTRRAMLAAIYNTTELVMMQDSSPDFEDTWRFLENRVNDAMNMGHTAKQVKSTGEALVQGLMGAAVTLKNLTGLNQRR

SEQ ID NO: 11172 - protein, 275 aa, Homo sapiens
MPYANQPTVRITELTDENVKFIIENTDLAVANSIRRVFIAEVPIIAIDWVQIDANSSVLHDEFIAHRLGLIPLISDDIVDKLQYSRDCTCEEFCPECSVEFTLDVRCNEDQTRHVTSRDLISNSPRVIPVTSRNRDNDPNDYVEQDDILIVKLRKGQELRLRAYAKKGFGKEHAKWNPTAGVAFEYDPDNALRHTVYPKPEEWPKSEYSELDEDESQAPYDPNGKPERFYYNVESCGSLRPETIVLSALSGLKKKLSDLQTQLSHEIQSDVLTIN

SEQ ID NO: 11173 - protein, 275 aa, Homo sapiens; identical to SEQ ID NO: 11172

SEQ ID NO: 11174 - protein, 304 aa, Homo sapiens
MAAAAVSGALGRAGWRLLQLRCLPVARCRQALVPRAFHASAVGLRSSDEQKQQPPNSFSQQHSETQGAEKPDPESSHSPPRYTDQGGEEEEDYESEEQLQHRILTAALEFVPAHGWTAEAIAEGAQSLGLSSAAASMFGKDGSELILHFVTQCNTRLTRVLEEEQKLVQLGQAEKRKTDQFLRDAVETRLRMLIPYIEHWPRALSILMLPHNIPSSLSLLTSMVDDMWHYAGDQSTDFNWYTRRAMLAAIYNTTELVMMQDSSPDFEDTWRFLENRVNDAMNMGHTAKQVVPAGQRCDSRPGVT

SEQ ID NO: 11175 - protein, 275 aa, Homo sapiens; identical to SEQ ID NO: 11172

SEQ ID NO: 11176 - protein, 318 aa, Homo sapiens; identical to SEQ ID NO: 11171

SEQ ID NO: 11177 - protein, 275 aa, Homo sapiens; identical to SEQ ID NO: 11172

SEQ ID NO: 11178 - protein, 275 aa, Homo sapiens; identical to SEQ ID NO: 11172

SEQ ID NO: 11179 - protein, 275 aa, Homo sapiens; identical to SEQ ID NO: 11172

SEQ ID NO: 11180 - protein, 172 aa, Homo sapiens
MRCLTTPMLLRALAQAARAGPPGGRSLHSSAVAATYKYVNMQDPEMDMKSVTDRAARTLLWTELFRGLGMTLSYLFREPATINYPFEKGPLSPRFRGEHALRRYPSGEERCIACKLCEAICPAQAITIEAEPRADGSRRTTRYDIDMTKCIYCGFCQEACPVDAIVEARPQL

SEQ ID NO: 11181 - protein, 172 aa, Homo sapiens; identical to SEQ ID NO: 11180

SEQ ID NO: 11182 - protein, 210 aa, Homo sapiens
MRCLTTPMLLRALAQAARAGPPGGRSLHSSAVAATYKYVNMQDPEMDMKSVTDRAARTLLWTELFRGLGMTLSYLFREPATINYPFEKGPLSPRFRGEHALRRYPSGEERCIACKLCEAICPAQAITIEAEPRADGSRRTTRYDIDMTKCIYCGFCQEACPVDAIVEGPNFEFSTETHEELLYNKEKLLNNGDKWEAEIAANIQADYLYR

SEQ ID NO: 11183 - protein, 883 aa, Homo sapiens
MLQLWKVVRPARQLELHRLILLLIAFSLGSMGFLAYYVSTSPKAKEPLPLPLGDCSSGGAAGPGPARPPVPPRPPRPPETARTEPVVLVFVESAYSQLGQEIVAILESSRFRYSTELAPGRGDMPTLTDNTHGRYVLVIYENLLKYVNLDAWSRELLDRYCVEYGVGIIGFFRAHEHSLLSAQLKGFPLFLHSNLGLRDYQVNPSAPLLHLTRPSRLEPGPLPGDDWTIFQSNHSTYEPVLLASLRPAEPAVPGPVLRRARLPTVVQDLGLHDGIQRVLFGHGLSFWLHKLIFVDAVAYLTGKRLCLDLDRYILVDIDDIFVGKEGTRMKVADVEALLTTQNKLRTLVPNFTFNLGFSGKFYHTGTEEEDAGDDMLLKHRKEFWWFPHMWSHMQPHLFHNRSVLADQMRLNKQFALEHGIPTDLGYAVAPHHSGVYPIHTQLYEAWKSVWGIQVTSTEEYPHLRPARYRRGFIHNGIMVLPRQTCGLFTHTIFYNEYPGGSRELDRSIRGGELFLTVLLNPISIFMTHLSNYGNDRLGLYTFESLVRFLQCWTRLRLQTLPPVPLAQKYFELFPQERSPLWQNPCDDKRHKDIWSKEKTCDRLPKFLIVGPQKTGTTAIHFFLSLHPAVTSSFPSPSTFEEIQFFNSPNYHKGIDWYMDFFPVPSNASTDFLFEKSATYFDSEVVPRRGAALLPRAKIITVLTNPADRAYSWYQHQRAHGDPVALNYTFYQVISASSQTPLALRSLQNRCLVPGYYSTHLQRWLTYYPSGQLLIVDGQELRTNPAASMESIQKFLGITPFLNYTRTLRFDDDKGFWCQGLEGGKTRCLGRSKGRRYPDMDTESRLFLTDFFRNHNLELSKLLSRLGQPVPSWLREELQHSSLG

SEQ ID NO: 11184 - protein, 883 aa, Homo sapiens; identical to SEQ ID NO: 11183

SEQ ID NO: 11185 - protein, 622 aa, Homo sapiens [sequence omitted]

SEQ ID NO: 11186 - protein, 655 aa, Homo sapiens
MVLYTTPFPNSCLSALHCVSWALIFPCYWLVDRLAASFIPTTYEKRQRADDPCCLQLLCTALFTPIYLALLVASLPFAFLGFLFWSPLQSARRPYIYSRLEDKGLAGGAALLSEWKGTGPGKSFCFATANVCLLPDSLARVNNLFNTQARAKEIGQRIRNGAARPQIKIYIDSPTNTSISAASFSSLVSPQGGDGVARAVPGSIKRTASVEYKGDGGRHPGDEAANGPASGDPVDSSSPEDACIVRIGGEEGGRPPEADDPVPGGQARNGAGGGPRGQTPNHNQQDGDSGSLGSPSASRESLVKGRAGPDTSASGEPGANSKLLYKASVVKKAAARRRRHPDEAFDHEVSAFFPANLDFLCLQEVFDKRAATKLKEQLHGYFEYILYDVGVYGCQGCCSFKCLNSGLLFASRYPIMDVAYHCYPNKCNDDALASKGALFLKVQVGSTPQDQRIVGYIACTHLHAPQEDSAIRCGQLDLLQDWLADFRKSTSSSSAANPEELVAFDVVCGDFNFDNCSSDDKLEQQHSLFTHYRDPCRLGPGEEKPWAIGTLLDTNGLYDEDVCTPDNLQKVLESEEGRREYLAFPTSKSSGQKGRKELLKGNGRRIDYMLHAEEGLCPDWKAEVEEFSFITQLSGLTDHLPVAMRLMVSSGEEEA

SEQ ID NO: 11187 - protein, 331 aa, Homo sapiens
MSRYLLPLSALGTVAGAAVLLKDYVTGGACPSKATIPGKTVIVTGANTGIGKQTALELARRGGNIILACRDMEKCEAAAKDIRGETLNHHVNARHLDLASLKSIREFAAKIIEEEERVDILINNAGVMRCPHWTTEDGFEMQFGVNHLGHFLLTNLLLDKLKASAPSRIINLSSLAHVAGHIDFDDLNWQTRKYNTKAAYCQSKLAIVLFTKELSRRLQGSGVTVNALHPGVARTELGRHTGIHGSTFSSTTLGPIFWLLVKSPELAAQPSTYLAVAEELADVSGKYFDGLKQKAPAPEAEDEEVARRLWAESARLVGLEAPSVREQPLPR

SEQ ID NO: 11188 - protein, 260 aa, Homo sapiens
MEKCEAAAKDIRGETLNHHVNARHLDLASLKSIREFAAKIIEEEERVDILINNAGVMRCPHWTTEDGFEMQFGVNHLGHFLLTNLLLDKLKASAPSRIINLSSLAHVAGHIDFDDLNWQTRKYNTKAAYCQSKLAIVLFTKELSRRLQGSGVTVNALHPGVARTELGRHTGIHGSTFSSTTLGPIFWLLVKSPELAAQPSTYLAVAEELADVSGKYFDGLKQKAPAPEAEDEEVARRLWAESARLVGLEAPSVREQPLPR

SEQ ID NO: 11189 - protein, 331 aa, Homo sapiens; identical to SEQ ID NO: 11187

SEQ ID NO: 11190 - protein, 260 aa, Homo sapiens; identical to SEQ ID NO: 11188

SEQ ID NO: 11191 - protein, 331 aa, Homo sapiens; identical to SEQ ID NO: 11187

SEQ ID NO: 11192 - protein, 924 aa, Homo sapiens
MEIKEEGASEEGQHFLPTAQANDPGDCQFTSIQKTPNEPQLEFILACKDLVAPVRDRKLNTLVQISVIHPVEQSLTRYSSTEIVEGTRDPLFLTGVTFPSEYPIYEETKIKLTVYDVKDKSHDTVRTSVLPEHKDPPPEVGRSFLGYASFKVGELLKSKEQLLVLSLRTSDGGKVVGTIEVSVVKMGEIEDGEADHITTDVQGQKCALVCECTAPESVSGKDNLPFLNSVLKNPVCKLYRFPTSDNKWMRIREQMSESILSFHIPKELISLHIKEDLCRNQEIKELGELSPHWDNLRKNVLTHCDQMVNMYQDILTELSKETGSSFKSSSSKGEKTLEFVPINLHLQRMQVHSPHLKDALYDVITVGAPAAHFQGFKNGGLRKLLHRFETERRNTGYQFIYYSPENTAKAKEVLSNINQLQPLIATHADLLLNSASQHSPDSLKNSLKMLSEKTELFVHAFKDQLVRSALLALYTARPGGILKKPPSPKSSTEESSPQDQPPVMRGQDSIPHHSDYDEEEWDRVWANVGKSLNCIIAMVDKLIERDGGSEGSGGNNDGEKEPSLTDAIPSHPREDWYEQLYPLILTLKDCMGEVVNRAKQSLTFVLLQELAYSLPQCLMLTLRRDIVFSQALAGLVCGFIIKLQTSLYDPGFLQQLHTVGLIVQYEGLLSTYSDEIGMLEDMAVGISDLKKVAFKIIEAKSNDVLPVITGRREHYVVEVKLPARMFESLPLQIKEGQLLHVYPVLFNVGINEQQTLAERFGDVSLQESINQENFELLQEYYKIFMEKMPPDYISHFQEQNDLKALLENLLQNIQSKKRKNVEIMWLAATICRKLNGIRFTCCKSAKDRTSMSVTLEQCSILRDEHQLHKDFFIRALDCMRREGCRIENVLKNIKCRKYAFNMLQLMAFPKYYRPPEGTYGKADT

SEQ ID NO: 11193 - protein, 924 aa, Homo sapiens; identical to SEQ ID NO: 11192

SEQ ID NO: 11194 - protein, 243 aa, Homo sapiens
MARLWGALSLWPLWAAVPWGGAAAVGVRACSSTAAPDGVEGPALRRSYWRHLRRLVLGPPEPPFSHVCQVGDPVLRGVAAPVERAQLGGPELQRLTQRLVQVMRRRRCVGLSAPQLGVPRQVLALELPEALCRECPPRQRALRQMEPFPLRVFVNPSLRVLDSRLVTFPEGCESVAGFLACVPRFQAVQISGLDPNGEQVVWQASGWAARIIQHEMDHLQGCLFIDKMDSRTFTNVYWMKVND

SEQ ID NO: 11195 - protein, 612 aa, Homo sapiens
MATAATIPSVATATAAALGEVEDEGLLASLFRDRFPEAQWRERPDVGRYLRELSGSGLERLRREPERLAEERAQLLQQTRDLAFANYKTFIRGAECTERIHRLFGDVEASLGRLLDRLPSFQQSCRNFVKEAEEISSNRRMNSLTLNRHTEILEILEIPQLMDTCVRNSYYEEALELAAYVRRLERKYSSIPVIQGIVNEVRQSMQLMLSQLIQQLRTNIQLPACLRVIGYLRRMDVFTEAELRVKFLQARDAWLRSILTAIPNDDPYFHITKTIEASRVHLFDIITQYRAIFSDEDPLLPPAMGEHTVNESAIFHGWVLQKVSQFLQVLETDLYRGIGGHLDSLLGQCMYFGLSFSRVGADFRGQLAPVFQRVAISTFQKAIQETVEKFQEEMNSYMLISAPAILGTSNMPAAVPATQPGTLQPPMVLLDFPPLACFLNNILVAFNDLRLCCPVALAQDVTGALEDALAKVTKIILAFHRAEEAAFSSGEQELFVQFCTVFLEDLVPYLNRCLQVLFPPAQIAQTLGIPPTQLSKYGNLGHVNIGAIQEPLAFILPKRETLFTLDDQALGPELTAPAPEPPAEEPRLEPAGPACPEGGRAETQAEPPSVGP

SEQ ID NO: 11196 - protein, 599 aa, Homo sapiens
MATAATIPSVATATAAALGEVEDEGLLASLFRDRFPEAQWRERPDVGRYLRELSGSGLERLRREPERLAEERAQLLQQTRDLAFANYKTFIRGAECTERIHRLFGDVEASLGRLLDRLPSFQQSCRNFVKEAEEISSNRRMNSLTLNRHTEILEILEIPQLMDTCVRNSYYEEALELAAYVRRLERKYSSIPVIQGIVNEVRQSMQLMLSQLIQQLRTNIQLPACLRVIGYLRRMDVFTEAELRVKFLQARDAWLRSILTAIPNDDPYFHITKTIEASRVHLFDIITQYRAIFSDEDPLLPPAMGEHTVNESAIFHGWVLQKVSQFLQVLETDLYRGIGGHLDSLLGQCMYFGLSFSRVGADFRGQLAPVFQRVAISTFQKAIQETVEKFQEEMNSYMLISAPAILGTSNMPAAVPATQPGTLQPPMVLLDFPPLACFLNNILVAFNDLRLCCPVALAQDVTGALEDALAKVTKIILAFHRAEEAAFSSGEQELFVQFCTVFLEDLVPYLNRCLQVLFPPAQIAQTLGHVNIGAIQEPLAFILPKRETLFTLDDQALGPELTAPAPEPPAEEPRLEPAGPACPEGGRAETQAEPPSVGP

SEQ ID NO: 11197 - protein, 612 aa, Homo sapiens; identical to SEQ ID NO: 11195

SEQ ID NO: 11198 - protein, 243 aa, Homo sapiens; identical to SEQ ID NO: 11194

SEQ ID NO: 11199 - protein, 859 aa, Homo sapiens
MPLDETIQNPPMETLYIIDFFIALAICNTVVVSAPNQPRQKIRHPSLGGLPIKSLEEIKSLFQRWSVRRSSSPSLNSGKEPSSGVPNAFVSRLPLFSRMKPASPVEEEVSQVCESPQCSSSSACCTETEKQHGDAGLLNGKAESLPGQPLACNLCYEAESPDEAALVYAARAYQCTLRSRTPEQVMVDFAALGPLTFQLLHILPFDSVRKRMSVVVRHPLSNQVVVYTKGADSVIMELLSVASPDGASLEKQQMIVREKTQKHLDDYAKQGLRTLCIAKKVMSDTEYAEWLRNHFLAETSIDNREELLLESAMRLENKLTLLGATGIEDRLQEGVPESIEALHKAGIKIWMLTGDKQETAVNIAYACKLLEPDDKLFILNTQSKDACGMLMSTILKELQKKTQALPEQVSLSEDLLQPPVPRDSGLRAGLIITGKTLEFALQESLQKQFLELTSWCQAVVCCRATPLQKSEVVKLVRSHLQVMTLAIGDGANDVSMIQVADIGIGVSGQEGMQAVMASDFAVSQFKHLSKLLLVHGHWCYTRLSNMILYFFYKNVAYVNLLFWYQFFCGFSGTSMTDYWVLIFFNLLFTSAPPVIYGVLEKDVSAETLMQLPELYRSGQKSEAYLPHTFWITLLDAFYQSLVCFFVPYFTYQGSDTDIFAFGNPLNTAALFIVLLHLVIESKSLTWIHLLVIIGSILSYFLFAIVFGAMCVTCNPPSNPYWIMQEHMLDPVFYLVCILTTSIALLPRFVYRVLQGSLFPSPILRAKHFDRLTPEERTKALKKWRGAGKMNQVTSKYANQSAGKSGRRPMPGPSAVFAMKSASSCAIEQGNLSLCETALDQGYSETKAFEMAGPSKGKES

SEQ ID NO: 11200 - protein, 859 aa, Homo sapiens; identical to SEQ ID NO: 11199

SEQ ID NO: 11201 - protein, 1170 aa, Homo sapiens
MLPLVVVLTIIAIKDGLEDYRKYKIDKQINNLITKVYSRGKQKRISHCQPRSRQSKSFCNSCISGIKRIKLQGRAWRLRQENRLNPGGGGCSEPRSHHCTPATAFHPGRQSETLSQKKKKKEENILFWKEKKYIDRCWKDVTVGDFIRLSCNEVIPADMVLLFSTDPDGICHIETSGLDGESNLKQRQVVRGYAEQRFENFLVKCLFTPSQKHSRAMRFIFISPLLLFKSEFICCLSYREHSNKERVGLSKENLLLRGCTIRNTEAVVGIVVYAGHETKAMLNNSGPRYKRSKLERRANTDVLWCVMLLVIMCLTGAVGRYEKMHFFNVPEPDGHIISPLLAGFYMFWTMIILLQVLIPISLYVSIEIVKLGQIYFIQSDVDFYNEKMDSIVQCRALNIAEDLGQIQYLFSDKTGTLTENKMVFRRCSVAGFDYCHEENGETANLSEASPVEEEVSQVCESPQCSSSSACCTETEKQHGDAGLLNGKAESLPGQPLACNLCYEAESPDEAALVYAARAYQCTLRSRTPEQVMVDFAALGPLTFQLLHILPFDSVRKRMSVVVRHPLSNQVVVYTKGADSVIMELLSVASPVREKTQKHLDDYAKQGLRTLCIAKKVMSDTEYAEWLRNHFLAETSIDNREELLLESAMRLENKLTLLGATGIEDRLQEGVPESIEALHKAGIKIWMLTGDKQETAVNIAYACKLLEPDDKLFILNTQKQVSLSEDLLQPPVPRDSGLRAGLIITGKTLEFALQESLQKQFLELTSWCQAVVCCRATPLQKSEVVKLVRSHLQVMTLAIGDGANDVSMIQVADIGIGVSGQEGMQAVMASDFAVSQFKHLSKLLLVHGHWCYTRLSNMILYFFYKNVAYVNLLFWYQFFCGFSGTSMTDYWVLIFFNLLFTSAPPVIYGVLEKDVSAETLMQLPELYRSGQKSEAYLPHTFWITLLDAFYQSLVCFFVPYFTYQGSDTDIFAFGNPLNTAALFIVLLHLVIESKSLTWIHLLVIIGSILSYFLFAIVFGAMCVTCNPPSNPYWIMQEHMLDPVFYLVCILTTSIALLPRFVYRVLQGSLFPSPILRAKHFDRLTPEERTKALKKWRGAGKMNQVTSKYANQSAGKSGRRPMPGPSAVFAMKSASSCAIEQGNLSLCETALDQGYSETKAFEMAGPSKGKES

SEQ ID NO: 11202 - protein, 147 aa, Homo sapiens
MPLDETIQNPPMETLYIIDFFIALAICNTVVVSAPNQPRQKVSKFSNANKGHFPEENFGFKCICTELDIWIKMINNSSCITLIQHLFCALHLPWSMSWVPNPLGCRPVTVCGLLGTSLTSKEGRERASEHYCLSPASCQIRGSIRFS

SEQ ID NO: 11203 - protein, 118 aa, Homo sapiens [sequence omitted]

SEQ ID NO: 11204 - protein, 169 aa, Homo sapiens [sequence omitted]

SEQ ID NO: 11205 - protein, 425 aa, Homo sapiens
MATAEVLNIGKKLYEGKTKEVYELLDSPGKVLLQSKDQITAGNAARKNHLEGKAAISNKITSCIFQLLQEAGIKTAFTRKCGETAFIAPQCEMIPIEWVCRRIATGSFLKRNPGVKEGYKFYPPKVELFFKDDANNDPQWSEEQLIAAKFCFAGLLIGQTEVDIMSHATQAIFEILEKSWLPQNCTLVDMKIEFGVDVTTKEIVLADVIDNDSWRLWPSGDRSQQKDKQSYRDLKEVTPEGLQMVKKNFEWVAERVELLLKSESQCRVVVLMGSTSDLGHCEKIKKACGNFGIPCELRVTSAHKGPDETLRIKAEYEGDGIPTVFVAVAGRSNGLGPVMSGNTAYPVISCPPLTPDWGVQDVWSSLRLPSGLGCSTVLSPEGSAQFAAQIFGLSNHLVWSKLRASILNTWISLKQADKKIRECNL

SEQ ID NO: 11206 - protein, 451 aa, Homo sapiens
MLPPGRQDLSSASLPGAVAALSPLRIMATAEVLNIGKKLYEGKTKEVYELLDSPGKVLLQSKDQITAGNAARKNHLEGKAAISNKITSCIFQLLQEAGIKTAFTRKCGETAFIAPQCEMIPIEWVCRRIATGSFLKRNPGVKEGYKFYPPKVELFFKDDANNDPQWSEEQLIAAKFCFAGLLIGQTEVDIMSHATQAIFEILEKSWLPQNCTLVDMKIEFGVDVTTKEIVLADVIDNDSWRLWPSGDRSQQKDKQSYRDLKEVTPEGLQMVKKNFEWVAERVELLLKSESQCRVVVLMGSTSDLGHCEKIKKACGNFGIPCELRVTSAHKGPDETLRIKAEYEGDGIPTVFVAVAGRSNGLGPVMSGNTAYPVISCPPLTPDWGVQDVWSSLRLPSGLGCSTVLSPEGSAQFAAQIFGLSNHLVWSKLRASILNTWISLKQADKKIRECNL

SEQ ID NO: 11207 - protein, 333 aa, Homo sapiens
MIPIEWVCRRIATGSFLKRNPGVKEGYKFYPPKVELFFKDDANNDPQWSEEQLIAAKFCFAGLLIGQTEVDIMSHATQAIFEILEKSWLPQNCTLVDMKIEFGVDVTTKEIVLADVIDNDSWRLWPSGDRSQQKDKQSYRDLKEVTPEGLQMVKKNFEWVAERVELLLKSESQCRVVVLMGSTSDLGHCEKIKKACGNFGIPCELRVTSAHKGPDETLRIKAEYEGDGIPTVFVAVAGRSNGLGPVMSGNTAYPVISCPPLTPDWGVQDVWSSLRLPSGLGCSTVLSPEGSAQFAAQIFGLSNHLVWSKLRASILNTWISLKQADKKIRECNL

SEQ ID NO: 11208 - protein, 333 aa, Homo sapiens; identical to SEQ ID NO: 11207

SEQ ID NO: 11209 - protein, 339 aa, Homo sapiens [sequence omitted]

SEQ ID NO: 11210 - protein, 513 aa, Homo sapiens
MELEELGIREECGVFGCIASGEWPTQLDVPHVITLGLVGGQESAGIVTSDGSSVPTFKSHKGMGLVNHVFTEDNLKKLYVSNLGIGHTRYATTGKCELENCQPFVVETLHGKIAVAHNGELVNAARLRKKLLRHGIGLSTSSDSEMITQLLAYTPPQEQDDTPDWVARIKNLMKEAPTAYSLLIMHRDVIYAVRDPYGNRPLCIGRLIPVSDINDKEKKTSETEGWVVSSESCSFLSIGARYYREVLPGEIVEISRHNVQTLDIISRSEGNPVAFCIFEYVYFARPDSMFEDQMVYTVRYRCGQQLAIEAPVDADLVSTVPESATPAALAYAGKCGLPYVEVLCKNRYVGRTFIQPNMRLRQLGVAKKFGVLSDNFKGKRIVLVDDSIVRGNTISPIIKLLKESGAKEVHIRVASPPIKYPCFMGINIPTKEELIANKPEFDHLAEYLGANSVVYLSVEGLVSSVQEGIKFKKQKEKKHDIMIQENGNGLECFEKSGHCTACLTGKYPVELEW

SEQ ID NO: 11211 - protein, 517 aa, Homo sapiens
MELEELGIREECGVFGCIASGEWPTQLDVPHVITLGLVGLQHRGQESAGIVTSDGSSVPTFKSHKGMGLVNHVFTEDNLKKLYVSNLGIGHTRYATTGKCELENCQPFVVETLHGKIAVAHNGELVNAARLRKKLLRHGIGLSTSSDSEMITQLLAYTPPQEQDDTPDWVARIKNLMKEAPTAYSLLIMHRDVIYAVRDPYGNRPLCIGRLIPVSDINDKEKKTSETEGWVVSSESCSFLSIGARYYREVLPGEIVEISRHNVQTLDIISRSEGNPVAFCIFEYVYFARPDSMFEDQMVYTVRYRCGQQLAIEAPVDADLVSTVPESATPAALAYAGKCGLPYVEVLCKNRYVGRTFIQPNMRLRQLGVAKKFGVLSDNFKGKRIVLVDDSIVRGNTISPIIKLLKESGAKEVHIRVASPPIKYPCFMGINIPTKEELIANKPEFDHLAEYLGANSVVYLSVEGLVSSVQEGIKFKKQKEKKHDIMIQENGNGLECFEKSGHCTACLTGKYPVELEW

SEQ ID NO: 11212 - protein, 529 aa, Homo sapiens [sequence omitted]

SEQ ID NO: 11213 - protein, 412 aa, Homo sapiens
MALKWTSVLLLIHLGCYFSSGSCGKVLVWTGEYSHWMNMKTILKELVQRGHEVTVLASSASILFDPNDAFTLKLEVYPTSLTKTEFENIIMQQVKRWSDIQKDSFWFQMCDMKKWDQFYSEVLGRPTTLFETMGKADIWLMRNSWSFQFPHPFLPNIDFVGGLHCKPAKPLPKEMEEFVQSSGENGVVVFSLGSVISNMTAERANVIATALAKIPQKVLWRFDGNKPDALGLNTRLYKWIPQNDLLGHPKTRAFITHGGANGIYEAIYHGIPMVGIPLFWDQPDNIAHMKAKGAAVRLDFHTMSSTDLLNALKTVINDPSYKENVMKLSRIQHDQPVKPLDRAVFWIEFVMCHKGAKHLRVAARDLTWFQYHSLDVIGFLLACVATVIFVVTKFCLFCFWKFARKGKKGKRD

SEQ ID NO: 11214 - protein, 437 aa, Homo sapiens [sequence omitted]

SEQ ID NO: 11215 - protein, 296 aa, Homo sapiens
MLSPKDILRKDLKLVHGYPMTCAFASNWEKIEQFHSRPDDIVIATYPKSGTTWVSEIIDMILNDGDIEKCKRGFITEKVPMLEMTLPGLRTSGIEQLEKNPSPRIVKTHLPTDLLPKSFWENNCKMIYLARNAKDVSVSYYHFDLMNNLQPFPGTWEEYLEKFLTGKVAYGSWFTHVKNWWKKKEEHPILFLYYEDMKENPKEEIKKIIRFLEKNLNDEILDRIIHHTSFEVMKDNPLVNYTHLPTTVMDHSKSPFMRKGTAGDWKNYFTVAQNEKFDAIYETEMSKTALQFRTEI

SEQ ID NO: 11216 - protein, 296 aa, Homo sapiens; identical to SEQ ID NO: 11215

SEQ ID NO: 11217 - protein, 105 aa, Homo sapiens
MYFAATWTELGAVILREVTQEWKTKYCMFSLISGSLAVGTQEHTQWYKGCWRLRREEGGRRVMDEKLPIGYNVHHSGDKYIKSRVFTTTQFTPVSKKCVPLKLLK

SEQ ID NO: 11218 - protein, 1144 aa, Homo sapiens
MDECGSRIRRRVSLPKRNRPSLGCIFGAPTAAELEPGDEGKEEEEMVAENRRRKTAGVLPVEVQPLLLSDSPECLVLGGGDTNPDLLRHMPTDRGVGDQPNDSEVDMFGDYDSFTENSFIAQVDDLEQKYMQLPEHKKHATDFATENLCSESIKNKLSITTIGNLTELQTDKHTENQSGYEGVTIEPGADLLYDVPSSQAIYFENLQNSSNDLGDHSMKERDWKSSSHNTVNEELPHNCIEQPQQNDESSSKVRTSSDMNRRKSIKDHLKNAMTGNAKAQTPIFSRSKQLKDTLLSEEINVAKKTVESSSNDLGPFYSLPSKICVILDQEGTVAAILEGQPHQPSTSEDNQVGEAELQETKSNKRLYKNPNCEVHGLRANEWQHTCLTLNSVQERKNLIYSLPTSGGKTLVAEILMLQELLCCRKDVLMILPYVAIVQEKISGLSSFGIELGFFVEEYAGSKGRFPPTKRREKKSLYIATIEKGHSLVNSLIETGRIDSLGLVVVDELHMIGEGSRGATLEMTLAKILYTSKTTQIIGMSATLNNVEDLQKFLQAEYYTSQFRPVELKEYLKINDTIYEVDSKAENGMTFSRLLNYKYSDTLKKMDPDHLVALVTEVIPNYSCLVFCPSKKNCENVAEMICKFLSKEYLKHKEKEKCEVIKNLKNIGNGNLCPVLKRTIPFGVAYHHSGLTSDERKLLEEAYSTGVLCLFTCTSTLAAGVNLPARRVILRAPYVAKEFLKRNQYKQMIGRAGRAGIDTIGESILILQEKDKQQVLELITKPLENCYSHLVQEFTKGIQTLFLSLIGLKIATNLDDIYHFMNGTFFGVQQKVLLKEKSLWEITVESLRYLTEKGLLQKDTIYKSEEEVQYNFHITKLGRASFKGTIDLAYCDILYRDLKKGLEGLVLESLLHLIYLTTPYDLVSQCNPDWMIYFRQFSQLSPAEQNVAAILGVSESFIGKKASGQAIGKKVDKNVVNRLYLSFVLYTLLKETNIWTVSEKFNMPRGYIQNLLTGTASFSSCVLHFCEELEEFWVYRALLVELTKKLTYCVKAELIPLMEVTGVLEGRAKQLYSAGYKSLMHLANANPEVLVRTIDHLSRRQAKQIVSSAKMLLHEKAEALQEEVEELLRLPSDFPGAVASSTDKA

SEQ ID NO: 11219 - protein, 507 aa, Homo sapiens
MDECGSRIRRRVSLPKRNRPSLGCIFGAPTAAELEPGDEGKEEEEMVAENRRRKTAGVLPVEVQPLLLSDSPECLVLGGGDTNPDLLRHMPTDRGVGDQPNDSEVDMFGDYDSFTENSFIAQVDDLEQKYMQLPEHKKHATDFATENLCSESIKNKLSITTIGNLTELQTDKHTENQSGYEGVTIEPGADLLYDVPSSQAIYFENLQNSSNDLGDHSMKERDWKSSSHNTVNEELPHNCIEQPQQNDESSSKVRTSSDMNRRKSIKDHLKNAMTGNAKAQTPIFSRSKQLKDTLLSEEINVAKKTVESSSNDLGPFYSLPSKICVILDQEGTVAAILEGQPHQPSTSEDNQVGEAELQETKSNKRLYKNPNCEVHGLRANEWQHTCLTLNSVQERKNLIYSLPTSGGKTLVAEILMLQELLCCRKDVLMILPYVAIVQEKISGLSSFGIELGFFVEEYAGSKGRFPPTKRREKKSLYIATIEKGHSLVNSLIETGRIDSLGLVVVDE

SEQ ID NO: 11220 - protein, 541 aa, Homo sapiens [sequence omitted]

SEQ ID NO: 11221 - protein, 1101 aa, Homo sapiens
MDECGSRIRRRVSLPKRNRPSLGCIFGAPTAAELEPGDEGKEEEEMVAENRRRKTAGVLPVEVQPLLLSDSPECLVLGGGDTNPDLLRHMPTDRGVGDQPNDSEVDMFGDYDSFTENSFIAQVDDLEQKYMQLPEHKKHATDFATENLCSESIKNKLSITTIGNLTELQTDKHTENQSGYEGVTIEPGADLLYDVPSSQAIYFENLQNSSNDLGDHSMKERDWKSSSHNTVNEELPHNCIEQPQQNDESSSKVRTSSDMNRRKSIKDHLKNAMTGNAKAQTPIFSRSKQLKDTLLSEEINVAKKTVESSSNDLGPFYSLPSKVRDLYAQFKGIEKLYEWQHTCLTLNSVQERKNLIYSLPTSGGKTLVAEILMLQELLCCRKDVLMILPYVAIVQEKISGLSSFGIELGFFVEEYAGSKGRFPPTKRREKKSLYIATIEKGHSLVNSLIETGRIDSLGLVVVDELHMIGEGSRGATLEMTLAKILYTSKTTQIIGMSATLNNVEDLQKFLQAEYYTSQFRPVELKEYLKINDTIYEVDSKAENGMTFSRLLNYKYSDTLKKMDPDHLVALVTEVIPNYSCLVFCPSKKNCENVAEMICKFLSKEYLKHKEKEKCEVIKNLKNIGNGNLCPVLKRTIPFGVAYHHSGLTSDERKLLEEAYSTGVLCLFTCTSTLAAGVNLPARRVILRAPYVAKEFLKRNQYKQMIGRAGRAGIDTIGESILILQEKDKQQVLELITKPLENCYSHLVQEFTKGIQTLFLSLIGLKIATNLDDIYHFMNGTFFGVQQKVLLKEKSLWEITVESLRYLTEKGLLQKDTIYKSEEEVQYNFHITKLGRASFKGTIDLAYCDILYRDLKKGLEGLVLESLLHLIYLTTPYDLVSQCNPDWMIYFRQFSQLSPAEQNVAAILGVSESFIGKKASGQAIGKKVDKNVVNRLYLSFVLYTLLKETNIWTVSEKFNMPRGYIQNLLTGTASFSSCVLHFCEELEEFWVYRALLVELTKKLTYCVKAELIPLMEVTGVLEGRAKQLYSAGYKSLMHLANANPEVLVRTIDHLSRRQAKQIVSSAKMLLHEKAEALQEEVEELLRLPSDFPGAVASSTDKA

SEQ ID NO: 11222 - protein, 543 aa, Homo sapiens
MLLRSKPALPPPLMLLLLGPLGPLSPGALPRPAQAQDVVDLDFFTQEPLHLVSPSFLSVTIDANLATDPRFLILLGSPKLRTLARGLSPAYLRFGGTKTDFLIFDPKKESTFEERSYWQSQVNQDICKYGSIPPDVEEKLRLEWPYQEQLLLREHYQKKFKNSTYSRSSVDVLYTFANCSGLDLIFGLNALLRTADLQWNSSNAQLLLDYCSSKGYNISWELGNEPNSFLKKADIFINGSQLGEDFIQLHKLLRKSTFKNAKLYGPDVGQPRRKTAKMLKSFLKAGGEVIDSVTWHHYYLNGRTATREDFLNPDVLDIFISSVQKVFQVVESTRPGKKVWLGETSSAYGGGAPLLSDTFAAGFMWLDKLGLSARMGIEVVMRQVFFGAGNYHLVDENFDPLPDYWLSLLFKKLVGTKVLMASVQGSKRRKLRVYLHCTNTDNPRYKEGDLTLYAINLHNVTKYLRLPYPFSNKQVDKYLLRPLGPHGLLSKSVQLNGLTLKMVDDQTLPPLMEKPLRPGSSLGLPAFSYSFFVIRNAKVAACI

SEQ ID NO: 11223 - protein, 543 aa, Homo sapiens; identical to SEQ ID NO: 11222

SEQ ID NO: 11224 - protein, 543 aa, Homo sapiens; identical to SEQ ID NO: 11222

SEQ ID NO: 11225 - protein, 384 aa, Homo sapiens
MTSIRARPGLTSAMLGSRAAGFARGLRALALAWLPGWRGRSFALARAAGAPHGGDLQPPACPEPRGRQLSLSAAAVVDSAPRPLQPYLRLMRLDKPIGTWLLYLPCTWSIGLAAEPGCFPDWYMLSLFGTGAILMRGAGCTINDMWDQDYDKKVTRTANRPIAAGDISTFQSFVFLGGQLTLALGVLLCLNYYSIALGAGSLLLVITYPLMKRISYWPQLALGLTFNWGALLGWSAIKGSCDPSVCLPLYFSGVMWTLIYDTIYAHQDKRDDVLIGLKSTALRFGENTKPWLSGFSVAMLGALSLVGVNSGQTAPYYAALGAVGAHLTHQIYTLDIHRPEDCWNKFISNRTLGLIVFLGIVLGNLWKEKKTDKTKKGIENKIEN

SEQ ID NO: 11226 - protein, 331 aa, Homo sapiens [sequence omitted]

SEQ ID NO: 11227 - protein, 341 aa, Homo sapiens
MTSIRARPGLTSAMLGSRAAGFARGLRALALAWLPGWRGRSFALARAAGAPHGGDLQPPACPEPRGRQLSLSAAAVVDSAPRPLQPYLRLMRLDKPIGTWLLYLPCTWSIGLAAEPGCFPDWYMLSLFGTGAILMRGAGCTINDMWDQDYDKKVTRTANRPIAAGDISTFQSFVFLGGQLTLALGVLLCLNYYSIALGAGSLLLVITYPLMKRISYWPQLALGLTFNWGALLGWSAIKGSCDPSVCLPLYFSGVMWTLIYDTIYAHQDKRDDVLIGLKSTALRFGENTKPWLSGFSVAMLGALSLVGVNSGQTAPYYAALGAVGAHLTHQKWGLEILPRLV

SEQ ID NO: 11228 - protein, 224 aa, Homo sapiens
MTSIRARPGLTSAMLGSRAAGFARGLRALALAWLPGWRGRSFALARAAGAPHGGDLQPPACPEPRGRQLSLSAAAVVDSAPRPLQPYLRLMRLDKPIGTWLLYLPCTWSIGLAAEPGCFPDWYMLSLFGTGAILMRGAGCTINDMWDQDYDKKVTRTANRPIAAGDISTFQSFVFLGGQLTLALGVLLCLNYYSSGSRILTSCHHLPTNEKNFILASTSLGLDI

SEQ ID NO: 11229 - protein, 131 aa, Homo sapiens
MKRISYWPQLALGLTFNWGALLGWSAIKGSCDPSVCLPLYFSGVMWTLIYDTIYAHQDKRDDVLIGLKSTALRFGENTKPWLSGFSVAMLGALSLVGVNSGQTAPYYAALGAVGAHLTHQKWGLEILPRLV

SEQ ID NO: 11230 - protein, 1026 aa, Homo sapiens
MNLFNLDRFRFEKRNKIEEAPEATPQPSQPGPSSPISLSAEEENAEGEVSRANTPDSDITEKTEDSSVPETPDNERKASISYFKNQRGIQYIDLSSDSEDVVSPNCSNTVQEKTFNKDTVIIVSEPSEDEESQGLPTMARRNDDISELEDLSELEDLKDAKLQTLKELFPQRSDNDLLKLIESTSTMDGAIAAALLMFGDAGGGPRKRKLSSSSEPYEEDEFNDDQSIKKTRLDHGEESNESAESSSNWEKQESIVLKLQKEFPNFDKQELREVLKEHEWMYTEALESLKVFAEDQDMQYVSQSEVPNGKEVSSRSQNYPKNATKTKLKQKFSMKAQNGFNKKRKKNVFNPKRVVEDSEYDSGSDVGSSLDEDYSSGEEVMEDGYKGKILHFLQDASIGELTLIPQCSQKKAQKITELRPFNSWEALFTKMSKTNGLSEDLIWHCKTLIQERDVVIRLMNKCEDISNKLTKQVTMLTGNGGGWNIEQPSILNQSLSLKPYQKVGLNWLALVHKHGLNGILADEMGLGKTIQAIAFLAYLYQEGNNGPHLIVVPASTIDNWLREVNLWCPTLKVLCYYGSQEERKQIRFNIHSRYEDYNVIVTTYNCAISSSDDRSLFRRLKLNYAIFDEGHMLKNMGSIRYQHLMTINANNRLLLTGTPVQNNLLELMSLLNFVMPHMFSSSTSEIRRMFSSKTKSADEQSIYEKERIAHAKQIIKPFILRRVKEEVLKQLPPKKDRIELCAMSEKQEQLYLGLFNRLKKSINNLEKNTEMCNVMMQLRKMANHPLLHRQYYTAEKLKEMSQLMLKEPTHCEANPDLIFEDMEVMTDFELHVLCKQYRHINNFQLDMDLILDSGKFRVLGCILSELKQKGDRVVLFSQFTMMLDILEVLLKHHQHRYLRLDGKTQISERIHLIDEFNTDMDIFVFLLSTKAGGLGINLTSANVVILHDIDCNPYNDKQAEDRCHRVGQTKEVLVIKLISQGTIEESMLKINQQKLKLEQDMTTVDEGDEGSMPADIATLLKTSMGL

SEQ ID NO: 11231 - protein, 911 aa, Homo sapiens [sequence omitted]

SEQ ID NO: 11232 - protein, 1028 aa, Homo sapiens
MNLFNLDRFRFEKRNKIEEAPEATPQPSQPGPSSPISLSAEEENAEGEVSRANTPDSDITEKTEDSSVPETPDNERKASISYFKNQRGIQYIDLSSDSEDVVSPNCSNTVQEKTFNKDTVIIVSEPSEDEESQGLPTMARRNDDISELEDLSELEDLKDAKLQTLKELFPQRSDNDLLKLIESTSTMDGAIAAALLMFGDAGGGPRKRKLSSSSEPYEEDEFNDDQSIKKTRLDHGEESNESAESSSNWEKQESIVLKLQKEFPNFDKQELREVLKEHEWMYTEALESLKVFAEDQDMQYVSQSEVPNGKEVSSRSQNYPKNATKTKLKQKFSMKAQNGFNKKRKKNVFNPKRVVEDSEYDSGSDVGSSLDEDYSSGEEVMEDGYKGKILHFLQDASIGELTLIPQCSQKKAQKITELRPFNSWEALFTKMSKTNGLSEDLIWHCKTLIQERDVVIRLMNKCEDISNKLTKQVTMLTGNGGGWNIEQPSILNQSLSLKPYQKVGLNWLALVHKHGLNGILADEMGLGKTIQAIAFLAYLYQEGNNGPHLIVVPASTIDNWLREVNLWCPTLKVLCYYGSQEERKQIRFNIHSRYEDYNVIVTTYNCAISSSDDRSLFRRLKLNYAIFDEGHMLKNMGSIRYQHLMTINANNRLLLTGTPVQNNLLELMSLLNFVMPHMFSSSTSEIRRMFSSKTKSADEQSIYEKERIAHAKQIIKPFILRRVKEEVLKQLPPKKDRIELCAMSEKQEQLYLGLFNRLKKSINNLVTEKNTEMCNVMMQLRKMANHPLLHRQYYTAEKLKEMSQLMLKEPTHCEANPDLIFEDMEVMTDFELHVLCKQYRHINNFQLDMDLILDSGKFRVLGCILSELKQKGDRVVLFSQFTMMLDILEVLLKHHQHRYLRLDGKTQISERIHLIDEFNTDMDIFVFLLSTKAGGLGINLTSANVVILHDIDCNPYNDKQAEDRCHRVGQTKEVLVIKLISQGTIEESMLKINQQKLKLEQDMTTVDEGDEGSMPADIATLLKTSMGL

SEQ ID NO: 11233 - protein, 1026 aa, Homo sapiens; identical to SEQ ID NO: 11230

SEQ ID NO: 11234 - protein, 572 aa, Homo sapiens
MSSPGPSQPPAEDPPWPARLLRAPLGLLRLDPSGGALLLCGLVALLGWSWLRRRRARGIPPGPTPWPLVGNFGHVLLPPFLRRRSWLSSRTRAAGIDPSVIGPQVLLAHLARVYGSIFSFFIGHYLVVVLSDFHSVREALVQQAEVFSDRPRVPLISIVTKEKGILFLIFLSWCPFAGVVFAHYGPVWRQQRKFSHSTLRHFGLGKLSLEPKIIEEFKYVKAEMQKHGEDPFCPFSIISNAVSNIICSLCFGQRFDYTNSEFKKMLGFMSRGLEICLNSQVLLVNICPWLYYLPFGPFKELRQIEKDITSFLKKIIKDHQESLDRENPQDFIDMYLLHMEEERKNNSNSSFDEEYLFYIIGDLFIAGTDTTTNSLLWCLLYMSLNPDVQEKVHEEIERVIGANRAPSLTDKAQMPYTEATIMEVQRLTVVVPLAIPHMTSENTGNILNNTHMFPFVLVLQGYTIPKGTLILPNLWSVHRDPAIWEKPEDFYPNRFLDDQGQLIKKETFIPFGIGKRVCMGEQLAKMELFLMFVSLMQSFAFALPEDSKKPLLTGRFGLTLAPHPFNITISRR

SEQ ID NO: 11235 - protein, 544 aa, Homo sapiens
MSSPGPSQPPAEDPPWPARLLRAPLGLLRLDPSGGALLLCGLVALLGWSWLRRRRARGIPPGPTPWPLVGNFGHVLLPPFLRRRSWLSSRTRAAGIDPSVIGPQVLLAHLARVYGSIFSFFIGHYLVVVLSDFHSVREALVQQAEVFSDRPRVPLISIVTKEKGVVFAHYGPVWRQQRKFSHSTLRHFGLGKLSLEPKIIEEFKYVKAEMQKHGEDPFCPFSIISNAVSNIICSLCFGQRFDYTNSEFKKMLGFMSRGLEICLNSQVLLVNICPWLYYLPFGPFKELRQIEKDITSFLKKIIKDHQESLDRENPQDFIDMYLLHMEEERKNNSNSSFDEEYLFYIIGDLFIAGTDTTTNSLLWCLLYMSLNPDVQEKVHEEIERVIGANRAPSLTDKAQMPYTEATIMEVQRLTVVVPLAIPHMTSENTVLQGYTIPKGTLILPNLWSVHRDPAIWEKPEDFYPNRFLDDQGQLIKKETFIPFGIGKRVCMGEQLAKMELFLMFVSLMQSFAFALPEDSKKPLLTGRFGLTLAPHPFNITISRR

SEQ ID NO: 11236 - protein, 96 aa, Homo sapiens
MYKAQFLAASPGRCLGLLAASNHHAKSIHGFRRLVKTMRNRPSPRVRQHLQLLYRPLPGGGPQRLPQRARGAGAAGRGLQRPPAGAAHLHRDQGEG

SEQ ID NO: 11237 - protein, 365 aa, Homo sapiens
MDIIETAKLEEHLENQPSDPTNTYARPAEPVEEENKNGNGKPKSLSSGLRKGTKKYPDYIQIAMPTESRNKFPLEWWKTGIAFIYAVFNLVLTTVMITVVHERVPPKELSPPLPDKFFDYIDRVKWAFSVSEINGIILVGLWITQWLFLRYKSIVGRRFCFIIGTLYLYRCITMYVTTLPVPGMHFQCAPKLNGDSQAKVQRILRLISGGGLSITGSHILCGDFLFSGHTVTLTLTYLFIKEYSPRHFWWYHLICWLLSAAGIICILVAHEHYTIDVIIAYYITTRLFWWYHSMANEKNLKVSSQTNFLSRAWWFPIFYFFEKNVQGSIPCCFSWPLSWPPGCFKSSCKKYSRVQKIGEDNEKST

SEQ ID NO: 11238 - protein, 23 aa, Homo sapiens [sequence omitted]

SEQ ID NO: 11239 - protein, 549 aa, Homo sapiens
  VARIANT (1)...(549): Xaa = Any Amino Acid
MGSPGRGAGLYFSSSQGLGLIPSPGLSMWRLPRALCVHAAKTSKLSGPWSRPAAFMSTLLINQPQYAWLKELGLREENEGVYNGSWGGRGEVITTYCPANNEPIARVRQASVADYEETVKKAREAWKIWADIPAPKRGEIVRQIGDALREKIQVLGSLVSLEMGKILVEGVGEVQEYVDICDYAVGLSRMIGGPILPSERSGHALIEQWNPVGLVGIITAFNFPVAVYGWNNAIAMICGNVCLWKGAPTTSLISVAVTKIIAKVLEDNKLPGAICSLTCGGADIGTAMAKDERVNLLSFTGSTQVGKQVGLMVQERFGRSLLELGGNNAIIAFEDADLSLVVPSALFAAVGTAGQRCTTARRLFIHESIHDEVVNRLKKAYAQIRVGNPWDPNVLYGPLHTKQAVSMFLGAVEEAKKEGGTVVYGGKVMDRPGNYVEPTIVTGLGHDASIAHTETFAPILYVFKFKNEEEVFAWNNEVKQGLSSSIFTKDLGRIFRWLGPKGSDCGIVNVNIPTSGAEIGGAFGGEKHTGGGRESGSDAWKQYMRRSTX

SEQ ID NO: 11240 - protein, 898 aa, Homo sapiens
MAGDSTLSTVTHVIVDEVHERDRFSDFLLTKLRDLLQKHPTLKLILSSAALDVNLFIRYFGSCPVIYIQGRPFEVKEMFLEDILRTTGYTNKEMLKYGAVLIFLPGYDEIVGLRDRILFDDKRYQVFMLHSNMQTSDQKKVLKNPPAGVRKIILSTNIAETSITVNDVVFVIDSGKVKEKSFDALNFVTMLKMVWISKASAIQRKGRAGRCRPGICFRLFSRLRFQNMLEFQTPELLRMPLQELCLHTKLLAPVNCPIADFLMKAPEPPPALIVRNAVQMLKTIDAMDTWEDLTELGYHLADLPVEPHLGKMVLCAVVLKCLDPILTIACTLAYRDPFVLPTQASQKRAAMLCRKRFTAGAFSDHMALLRAFQAWQKARSDGWERAFCEKNFLSQATMEIIIGMRTQLLGQLRASGFVRARGGGDIRDVNTNSENWAVVKAALVAGMYPNLVHVDRENLVLTGPKEKKVRFHPASVLSQPQYKKIPPANGQAAAIKALPTDWLIYDEMTRAHRIANIRCCSAVTPVTILVFCGPARLASNALQEPSSFRVDGIPNDSSDSEMEDKTTANLAALKLDEWLHFTLEPEAASLLLQLRQKWHSLFLRRMRAPSKPWSQVDEATIRAIIAVLSTEEQSAGLQQPSGIGQRPRPMSSEELPLASSWRSNNSRKSSADTEFSDECTTAERVLMKSPSPALHPPQKYKDRGILHPKRGTEDRSDQSSLKSTDSSSYPSPCASPSPPSSGKGSKSPSPRPNMPVRYFIMKSSNLRNLEISQQKGIWSTTPSNERKLNRAFWESSIVYLVFSVQGSGHFQGFSRMSSEIGREKSQDWGSAGLGGVFKVEWIRKESLPFQFAHHLLNPWNDNKKVQISRDGQELEPQVGEQLLQLWERLPLGEKNTTD

SEQ ID NO: 11241 - protein, 709 aa, Homo sapiens
MLKMVWISKASAIQRKGRAGRCRPGICFRLFSRLRFQNMLEFQTPELLRMPLQELCLHTKLLAPVNCPIADFLMKAPEPPPALIVRNAVQMLKTIDAMDTWEDLTELGYHLADLPVEPHLGKMVLCAVVLKCLDPILTIACTLAYRDPFVLPTQASQKRAAMLCRKRFTAGAFSDHMALLRAFQAWQKARSDGWERAFCEKNFLSQATMEIIIGMRTQLLGQLRASGFVRARGGGDIRDVNTNSENWAVVKAALVAGMYPNLVHVDRENLVLTGPKEKKVRFHPASVLSQPQYKKIPPANGQAAAIKALPTDWLIYDEMTRAHRIANIRCCSAVTPVTILVFCGPARLASNALQEPSSFRVDGIPNDSSDSEMEDKTTANLAALKLDEWLHFTLEPEAASLLLQLRQKWHSLFLRRMRAPSKPWSQVDEATIRAIIAVLSTEEQSAGLQQPSGIGQRPRPMSSEELPLASSWRSNNSRKSSADTEFSDECTTAERVLMKSPSPALHPPQKYKDRGILHPKRGTEDRSDQSSLKSTDSSSYPSPCASPSPPSSGKGSKSPSPRPNMPVRYFIMKSSNLRNLEISQQKGIWSTTPSNERKLNRAFWESSIVYLVFSVQGSGHFQGFSRMSSEIGREKSQDWGSAGLGGVFKVEWIRKESLPFQFAHHLLNPWNDNKKVQISRDGQELEPQVGEQLLQLWERLPLGEKNTTD

SEQ ID NO: 11242 - protein, 709 aa, Homo sapiens; identical to SEQ ID NO: 11241

SEQ ID NO: 11243 - protein, 405 aa, Homo sapiens
MSRPSSVSPRQPAPGGGGGGGPSPCGPGGGGRAKGLKDIRIDEEVKIAVNIALERFRYGDQREMEFPSSLTSTERAFIHRLSQSLGLVSKSKGKGANRYLTVKKKDGSETAHAMMTCNLTHNTKHAVRSLIQRFPVTNKERTELLPKTERGNVFAVEAENREMSKTSGRLNNGIPQIPVKRGESEFDSFRQSLPVFEKQEEIVKIIKENKVVLIVGETGSGKTTQIPQFLLDDCFKNGIPCRIFCTQPRRLAAIAVAERVAAERRERIGQTIGYQIRLESRVSPKTLLTFCTNGVLLRTLMAGDSTLSTVTHVIVDEVHERDRFSDFLLTKLRDLLQKHPTLKLILSSAALDVNLFIRYFGSCPVIYIQGRPFEVKEMFLEDILRTTGYTNKEMLKYKKEKQQGK

SEQ ID NO: 11244 - protein, 251 aa, Homo sapiens [sequence omitted]

SEQ ID NO: 11245 - protein, 377 aa, Homo sapiens
MAATEDERLAGSGEGERLDFLRDRHVRFFQRCLQVLPERYSSLETSRLTIAFFALSGLDMLDSLDVVNKDDIIEWIYSLQVLPTEDRSNLNRCGFRGSSYLGIPFNPSKAPGTAHPYDSGHIAMTYTGLSCLVILGDDLSRVNKEACLAGLRALQLEDGSFCAVPEGSENDMRFVYCASCICYMLNNWSGMDMKKAITYIRRSMSYDNGLAQGAGLESHGGSTFCGIASLCLMGKLEEVFSEKELNRIKRWCIMRQQNGYHGRPNKPVDTCYSFWVGATLKLLKIFQYTNFEKNRNYILSTQDRLVGGFAKWPDSHPDALHAYFGICGLSLMEESGICKVHPALNVSTRTSERLLDLHQSWKTKDSKQCSENVHIST

SEQ ID NO: 11246 - protein, 173 aa, Homo sapiens
MGRLDGKVIILTAAAQGIGQAAALAFAREGAKVIATDINESKLQELEKYPGIQTRVLDVTKKKQIDQFANEVERLDVLFNVAGFVHHGTVLDCEEKDWDFSMNLNVRSMYLMIKAFLPKMLAQKSGNIINMSSVASSVKGGSVSFRGLRCSYTHIIKSSAFGNRHSRDYNFKY

SEQ ID NO: 11247 - protein, 79 aa, Homo sapiens [sequence omitted]

SEQ ID NO: 11248 - protein, 79 aa, Homo sapiens [sequence omitted]

SEQ ID NO: 11249 - protein, 79 aa, Homo sapiens [sequence omitted]

SEQ ID NO: 11250 - protein, 147 aa, Homo sapiens
MALKRINKELSDLARDPPAQCSAGPVGDDMFHWQATIMGPNDSPYQGGVFFLTIHFPTDYPFKPPKVAFTTRIYHPNINSNGSICLDILRSQWSPALTISKVLLSICSLLCDPNPDDPLVPEIARIYKTDRDKYNRISREWTQKYAM

SEQ ID NO: 11251 - protein, 147 aa, Homo sapiens; identical to SEQ ID NO: 11250

SEQ ID NO: 11252 - protein, 147 aa, Homo sapiens; identical to SEQ ID NO: 11250

SEQ ID NO: 11253 - protein, 147 aa, Homo sapiens; identical to SEQ ID NO: 11250

SEQ ID NO: 11254 - protein, 147 aa, Homo sapiens; identical to SEQ ID NO: 11250

SEQ ID NO: 11255 - protein, 147 aa, Homo sapiens; identical to SEQ ID NO: 11250

SEQ ID NO: 11256 - protein, 364 aa, Homo sapiens
MSELPFTMASKRIKYLGIQFTRDVKDLFKENYKPLLNEIKEDTNKWKNILCSWIGRINIMKMAILPKVIYRFNAIPIKLPLTFFTELEKTTLKFIWNQKRACIAKTIISQKNKAGGITLPDFRLYYEATVTKTAWYWYQNRDIAQWNRTESSEIIPHIYNHLIFDKPEKNKQWGKDSLFNKWCWENWLAICRKLKLDPFLTPYTKINSRWIKDLHVRPKTIKTLEENLGNTIQDIGMGKDFMSKTPKAMVTKAKIDKWDLIKLKSFCTAKETTIRMNRQPTEWKKMFAIYPSDKGLISRIYKELKQIYKKKIKQPHQKVGEGYEQTLLKRRHLCSQKTHEKMLIITGHQTNANQNHNEIPSHTS

SEQ ID NO: 11257 - protein, 517 aa, Homo sapiens
MAAPEQPLAISRGCTSSSSLSPPRGDRTLLVRHLPAELTAEEKEDLLKYFGAQSVRVLSDKGRLKHTAFATFPNEKAAIKALTRLHQLKLLGHTLVVEFAKEQDRVHSPCPTSGSEKKKRSDDPVEDDKEKKELGYLTVENGIAPNHGLTFPLNSCLKYMYPPPSSTILANIVNALASVPKFYVQVLHLMNKMNLPTPFGPITARPPMYEDYMPLHAPLPPTSPQPPEEPPLPDEDEELSSEESEYESTDDEDRQRMNKLMELANLQPKRPKTIKQRHVRKKRKIKDMLNTPLCPSHSSLHPVLLPSDVFDQPQPVGNKRIEFHISTDMPAAFKKDLEKEQNCEEKNHDLPATEVDASNIGFGKIFPKPNLDITEEIKEDSDEMPSECISRRELEKGRISREEMETLSVFRSYEPGEPNCRIYVKNLAKHVQEKDLKYIFGRYVDFSSETQRIMFDIRLMKEGRMKGQAFIGLPNEKAAAKALKEANGYVLFGKPMVVQFARSARPKQDPKEGKRKC

SEQ ID NO: 11258 - protein, 511 aa, Homo sapiens
MKFFLLLFTIGFCWAQYSPNTQQGRTSIVHLFEWRWVDIALECERYLAPKGFGGVQVSPPNENVAIHNPFRPWWERYQPVSYKLCTRSGNEDEFRNMVTRCNNVGVRIYVDAVINHMSGNAVSAGTSSTCGSYFNPGSRDFPAVPYSGWDFNDGKCKTGSGDIENYNDATQVRDCRLVGLLDLALEKDYVRSKIAEYMNHLIDIGVAGFRLDASKHMWPGDIKAILDKLHNLNSNWFPAGSKPFIYQEVIDLGGEPIKSSDYFGNGRVTEFKYGAKLGTVIRKWNGEKMSYLKNWGEGWGFMPSDRALVFVDNHDNQRGHGAGGASILTFWDARLYKMAVGFMLAHPYGFTRVMSSYRWPRQFQNGNDVNDWVGPPNNNGVIKEVTINPDTTCGNDWVCEHRWRQIRNMVNFRNVVDGQPFTNWYDNGSNQVAFGRGNRGFIVFNNDDWTFSLTLQTGLPAGTYCDVISGDKINGNCTGIKIYVSDDGKAHFSISNSAEDPFIAIHAESKL

SEQ ID NO: 11259 - protein, 511 aa, Homo sapiens; identical to SEQ ID NO: 11258

SEQ ID NO: 11260 - protein, 511 aa, Homo sapiens; identical to SEQ ID NO: 11258

SEQ ID NO: 11261 - protein, 511 aa, Homo sapiens; identical to SEQ ID NO: 11258

SEQ ID NO: 11262 - protein, 511 aa, Homo sapiens; identical to SEQ ID NO: 11258

SEQ ID NO: 11263 - protein, 517 aa, Homo sapiens; identical to SEQ ID NO: 11257

SEQ ID NO: 11264 - protein, 214 aa, Homo sapiens
MNCKEGTDSSCGCRGNDEKKMLKCVVVGDGAVGKTCLLMSYANDAFPEEYVPTVFDHYAVTVTVGGKQHLLGLYDTAGQEDYNQLRPLSYPNTDVFLICFSVVNPASYHNVQEEWVPELKDCMPHVPYVLIGTQIDLRDDPKTLARLLYMKEKPLTYEHGVKLAKAIGAQCYLECSALTQKGLKAVFDEAILTIFHPKKKKKRCSEGHSCCSII

SEQ ID NO: 11265 - protein, 124 aa, Homo sapiens
MNCKEGTDSSCGCRGNDEKKMLKCVVVGDGAVGKTCLLMSYANDAFPEEYVPTVFDHYAVTVTVGGKQHLLGLYDTAGQNLGPFAVYERETSHLRAWCEARKSDRSTVLLGMFSSDSERSQSGF

SEQ ID NO: 11266 - protein, 214 aa, Homo sapiens; identical to SEQ ID NO: 11264

SEQ ID NO: 11267 - protein, 405 aa, Homo sapiens [sequence omitted]

SEQ ID NO: 11268 - protein, 186 aa, Homo sapiens
MNCKEGTDSSCGCRGNDEKKMLKCVVVGDGAVGKTCLLMSYANDAFPEEYVPTVFDHYAVTVTVGGKQHLLGLYDTAGQEDYNQLRPLSYPNTDVFLICFSVVNPASYHNVQEEWVPELKDCMPHVPYVLIGTQIDLRDDPKTLARLLYMKEKPLTYEHGVKLAKAKCLNWKRQAWAPPAPSKGKA

SEQ ID NO: 11269 - protein, 214 aa, Homo sapiens; identical to SEQ ID NO: 11264

SEQ ID NO: 11270 - protein, 62 aa, Homo sapiens
  VARIANT (1)...(62): Xaa = Any Amino Acid
MEGRIKTREMKVNCLIQAQLGCIPIQDFALTQDTAKIFRHGSRITRYFKQTSPLWNPDKRNX

SEQ ID NO: 11271 - protein, 125 aa, Homo sapiens
MEEELRYAPLSFRNPMMSKLRNYRKDLAKLHREVRSTPLTATPGGRGDMKYGIYAVENEHMNRLQSQRAMLLQGTESLNRATQSIERSHRIATETDQIGSEIIEELGEQRDQLERTKSRVTGKHK

SEQ ID NO: 11272 - protein, 171 aa, Homo sapiens
MEEELRYAPLSFRNPMMSKLRNYRKDLAKLHREVRSTPLTATPGGRGDMKYGIYAVENEHMNRLQSQRAMLLQGTESLNRATQSIERSHRIATETDQIGSEIIEELGEQRDQLERTKSRLVNTSENLSKSRKILRSMSRKVTTNKLLLSIIILLELAILGGLVYYKFFRSH

SEQ ID NO: 11273 - protein, 232 aa, Homo sapiens
MASSAASSEHFEKLHEIFRGLHEDLQGVPERLLGTAGTEEKKKLIRDFDEKQQEANETLAEMEEELRYAPLSFRNPMMSKLRNYRKDLAKLHREVRSTPLTATPGGRGDMKYGIYAVENEHMNRLQSQRAMLLQGTESLNRATQSIERSHRIATETDQIGSEIIEELGEQRDQLERTKSRLVNTSENLSKSRKILRSMSRKVTTNKLLLSIIILLELAILGGLVYYKFFRSH

SEQ ID NO: 11274 - protein, 23 aa, Homo sapiens
MCKCLWFHLYGKGALVTLAKTFQ

SEQ ID NO: 11275 - protein, 23 aa, Homo sapiens
MCKCLWFHLYGKGALVTLAKTFQ

SEQ ID NO: 11276 - protein, 23 aa, Homo sapiens
MCKCLWFHLYGKGALVTLAKTFQ

SEQ ID NO: 11277 - protein, 16 aa, Homo sapiens [sequence omitted]

SEQ ID NO: 11278 - protein, 509 aa, Homo sapiens
MEFSWLETRWARPFYLAFVFCLALGLLQAIKLYLRRQRLLRDLRPFPAPPTHWFLGHQKFIQDDNMEKLEEIIEKYPRAFPFWIGPFQAFFCIYDPDYAKTLLSRTDPKSQYLQKFSPPLLGKGLAALDGPKWFQHRRLLTPGFHFNILKAYIEVMAHSVKMMLDKWEKICSTQDTSVEVYEHINSMSLDIIMKCAFSKETNCQTNSTHDPYAKAIFELSKIIFHRLYSLLYHSDIIFKLSPQGYRFQKLSRVLNQYTDTIIQERKKSLQAGVKQDNTPKRKYQDFLDIVLSAKDESGSSFSDIDVHSEVSTFLLAGHDTLAASISWILYCLALNPEHQERCREEVRGILGDGSSITWDQLGEMSYTTMCIKETCRLIPAVPSISRDLSKPLTFPDGCTLPAGITVVLSIWGLHHNPAVWKNPKVFDPLRFSQENSDQRHPYAYLPFSAGSRNCIGQEFAMIELKVTIALILLHFRVTPDPTRPLTFPNHFILKPKNGMYLHLKKLSEC

SEQ ID NO: 11279 - protein, 278 aa, Homo sapiens
MWAGNAWRAALSGVPCGRSAQSVLAQLRGILEGELEGIRGAGTWKSERVITSRQGPHIHVDGVSGGILNLTSVRFIRGTQSIHKNLEAKIARFHQREDAILYPSCCDANAGLFEVLLRPEDAVLSDELNCASIIHGICLCKAHKYHYCHLDVAYLETKLQEAQKHRLFLVATDGAFSMDGDIVPLQKICRLASRYGALVFVDECHATGFLGLTGQGTDELLGVMGQVTIINSTLGKALGGASGGYTTGPGPLVSLLLPSPISSPTVCHLLLLAAPLRP

SEQ ID NO: 11280 - protein, 101 aa, Homo sapiens
MDGDIVPLQKICRLASRYGALVFVDECHATGFLGLTGQGTDELLGVMGQVTIINSTLGKALGGASGGYTTGPGPLVSLLLPSPISSPTVCHLLLLAAPLRP

SEQ ID NO: 11281 - protein, 99 aa, Homo sapiens
MAEGNTLISVDYEIFGKVQGVFFRKHTQAEGKKLGLVGWVQNTDRGTVQGQLQGPISKVRHMQEWLETRGSPKSHIDKANFNNEKVILKLDYSDFQIVK

SEQ ID NO: 11282 - protein, 99 aa, Homo sapiens; identical to SEQ ID NO: 11281

SEQ ID NO: 11283 - protein, 120 aa, Homo sapiens
MHPPPPAAAMDFSQNSLFGYMEDLQELTIIERPVRRSLKTPEEIERLTVDEDLSDIERAVYLLSAGQDVQGTSVIANLPFLMRQNPTETLRRVLPKVRVHEDAHLFIQRVWISHMFVQRV

SEQ ID NO: 11284 - protein, 761 aa, Homo sapiens
MEMQLTAAMSFLTILQDESVSIHAYTHSFLQVILLHLEHRDTGVSNAWLETLLSVIEVLPKETLRHEILNPLVSKAQLSQTVQSRLVSCKILGKLTNKFDAHTIKREILPLVKSLCQDVEYEVRSCMCRQLENIAQGIGTELTKSVVLPELIELSRDEGSSVRLAAFETLVNLLDIFDTDDRSQTILPLVKSFCEKSFKADESILISLSFHLGKLCHGLYGIFTPDQHLRFLEFYKKLCTLGLQQENGHNENQIPPQILEQEKKYISVRKNCAYNFPAMIVFVDPKNFHMELYSTFFCLCHDPEVPVRYTIAICFYEVSKLLNSGVYLIHKELITLLQDESLEVLDALIDHLPEILELMSTGGESSVQENKLSSLPDLIPALTAAEQRAAASLKWRTHEKLLQKYACLPHVISSDQIYYRFLQRMFTIMMTNNVLPVQKAASRTLCIFLRYNRKQEQRHEVIQKLIEQLGQGKSYWNRLRFLDTCEFIIEIFSKSFFCKYFFLPAIELTHDPVANVRMKLCYLLPKVKSTLKIPADKHLLQQLEMCVRKLLCQEKDKDVLAIVKRTVLELDRMEMSMDAFQKKFYEKDLLDQEKEREELLLLEMEQLEKEKQQNDGRPMSDKMFEKKRRDTKTPTQSLPKNIPISVPGPSSVTPSTSKEIKKSKLIRSQSFNNQAFHAKYGNLEKCASKSSTTGYTTSVSGLGKTSVLSLADDSFRTRNASSVPSSFSPNTPLPSTSRGTGNSVDPKSSGSKDTQPRKATL

SEQ ID NO: 11285 - protein, 873 aa, Homo sapiens
MHPPPPAAAMDFSQNSLFGYMEDLQELTIIERPVRRSLKTPEEIERLTVDEDLSDIERAVYLLSAGQDVQGTSVIANLPFLMRQNPTETLRRVLPKVREALHVAGVEMQLTAAMSFLTILQDESVSIHAYTHSFLQVILLHLEHRDTGVSNAWLETLLSVIEVLPKETLRHEILNPLVSKAQLSQTVQSRLVSCKILGKLTNKFDAHTIKREILPLVKSLCQDVEYEVRSCMCRQLENIAQGIGTELTKSVVLPELIELSRDEGSSVRLAAFETLVNLLDIFDTDDRSQTILPLVKSFCEKSFKADESILISLSFHLGKLCHGLYGIFTPDQHLRFLEFYKKLCTLGLQQENGHNENQIPPQILEQEKKYISVRKNCAYNFPAMIVFVDPKNFHMELYSTFFCLCHDPEVPVRYTIAICFYEVSKLLNSGVYLIHKELITLLQDESLEVLDALIDHLPEILELMSTGGESSVQENKLSSLPDLIPALTAAEQRAAASLKWRTHEKLLQKYACLPHVISSDQIYYRFLQRMFTIMMTNNVLPVQKAASRTLCIFLRYNRKQEQRHEVIQKLIEQLGQGKSYWNRLRFLDTCEFIIEIFSKSFFCKYFFLPAIELTHDPVANVRMKLCYLLPKVKSTLKIPADKHLLQQLEMCVRKLLCQEKDKDVLAIVKRTVLELDRMEMSMDAFQKKFYEKDLLDQEKEREELLLLEMEQLEKEKQQNDGRPMSDKMFEKKRRDTKTPTQSLPKNIPISVPGPSSVTPSTSKEIKKSKLIRSQSFNNQAFHAKYGNLEKCASKSSTTGYTTSVSGLGKTSVLSLADDSFRTRNASSVPSSFSPNTPLPSTSRGTGNSVDPKSSGSKDTQPRKATLKSRKSNP

SEQ ID NO: 11286 - protein, 254 aa, Homo sapiens [sequence omitted]

SEQ ID NO: 11287 - protein, 389 aa, Homo sapiens
MIHTELKAVRQFQKRKIQVERELDDLKENLRNTERIHQETLRRLESRFFEEKHRLEQEAEKKIIMLAERAHHEAIVQLNDAGRNVFKENVYLQKALAYHLKETDALQKNSQKLQESHTLLLHQKEINDLLVKEKIMQLVQQRSQIQTLQKKVVNLETALSYMTKEFESEVLKLQQHAMIENQAGQVEIDKLQHLLQMKDREMNRVKKLAKNILDERTEVERFFLDALHQVKQQILISRKHYKQIAQAAFNLKMRAACTGRTEYPKIRTFDGREHSTNSVNQDLLEAEKWTHIEGNVDIGDLTWEQKEKVLRLLFAKMNGCPSRKYNQSSRPPVPDYVVSDSGETKEFGDESKLQDKIFITQQIAISDSSGEVVLPTIPKEPQESDTGTF

SEQ ID NO: 11288 - protein, 143 aa, Homo sapiens
MLRSLLLHSLRLCAQTASCLVLFPRFLGTAFMLWLLDFLCIRKHFLGRRRRGQPEPEVELNSEGEEVPPDDPPICVSDDNRLCTLASLKAVWHGQKLDFFKQAHEGGPAPNSEVVLPDGFQSQHILDYAQGNRPLVLNFGSCT

SEQ ID NO: 11289 - protein, 437 aa, Homo sapiens
MIVFVRFNSSHGFPVEVDSDTSIFQLKEVVAKRQGVPADQLRVIFAGKELRNDWTVQNCDLDQQSIVHIVQRPWRKGQEMNATGGDDPRNAAGGCEREPQSLTRVDLSSSVLPGDSVGLAVILHTDSRKDSPPAGSPAGRSIYNSFYVYCKGPCQRVQPGKLRVQCSTCRQATLTLTQEFFFKCGAHPTSDKETSVALHLIATNSRNITCITCTDVRSPVLVFQCNSRHVICLDCFHLYCVTRLNDRQFVHDPQLGYSLPCVAGCPNSLIKELHHFRILGEEQYNRYQQYGAEECVLQMGGVLCPRPGCGAGLLPEPDQRKVTCEGGNGLGCGFAFCRECKEAYHEGECSAVFEASGTTTQAYRVDERAAEQARWEAASKETIKKTTKPCPRCHVPVEKNGGCMHMKCPQPQCRLEWCWNCGCEWNRVCMGDHWFDV

SEQ ID NO: 11290 - protein, 465 aa, Homo sapiens
MIVFVRFNSSHGFPVEVDSDTSIFQLKEVVAKRQGVPADQLRVIFAGKELRNDWTVQNCDLDQQSIVHIVQRPWRKGQEMNATGGDDPRNAAGGCEREPQSLTRVDLSSSVLPGDSVGLAVILHTDSRKDSPPAGSPAGRSIYNSFYVYCKGPCQRVQPGKLRVQCSTCRQATLTLTQGPSCWDDVLIPNRMSGECQSPHCPGTSAEFFFKCGAHPTSDKETSVALHLIATNSRNITCITCTDVRSPVLVFQCNSRHVICLDCFHLYCVTRLNDRQFVHDPQLGYSLPCVAGCPNSLIKELHHFRILGEEQYNRYQQYGAEECVLQMGGVLCPRPGCGAGLLPEPDQRKVTCEGGNGLGCGFAFCRECKEAYHEGECSAVFEASGTTTQAYRVDERAAEQARWEAASKETIKKTTKPCPRCHVPVEKNGGCMHMKCPQPQCRLEWCWNCGCEWNRVCMGDHWFDV

SEQ ID NO: 11291 - protein, 324 aa, Homo sapiens
MEGPLSVFGDRSTGETIRSQNGMPKRIVNAKIACLDFSLQKTKMKLGVQVVITDPEKLDQIRQRESDITKERIQKILATGANVILTTGGIDDMCLKYFVEAGAMAVRRVLKRDLKRIAKASGATILSTLANLEGEETFEAAMLGQAEEVVQERICDDELILIKNCVVKRVLESKSVVPGGGAVEAALSIYLENYATSMGSREQLAIAEFARSLLVIPNTLAVNAAQDSTDLVAKLRAFHNEAQVNPERKNLKWIGLDLSNGKPRDNKQAGVFEPTIVKVKSLKFATEAAITILRIDDLIKLHPESKDDKHGSYEDAVHSGALND

SEQ ID NO: 11292 - protein, 556 aa, Homo sapiens
MEGPLSVFGDRSTGETIRSQNVMAAASIANIVKSSLGPVGLDKMLVDDIGDVTITNDGATILKLLEVEHPAAKVLCELADLQDKEVGDGTTSVVIIAAELLKNADELVKQKIHPTSVISGYRLACKEAVRYINENLIVNTDELGRDCLINAAKTSMSSKIIGINGDFFANMVVDAVLAIKYTDIRGQPRYPVNSVNILKAHGRSQMESMLISGYALNCVVGSQGMPKRIVNAKIACLDFSLQKTKMKLGVQVVITDPEKLDQIRQRESDITKERIQKILATGANVILTTGGIDDMCLKYFVEAGAMAVRRVLKRDLKRIAKASGATILSTLANLEGEETFEAAMLGQAEEVVQERICDDELILIKNTKARTSASIILRGANDFMCDEMERSLHDALCVVKRVLESKSVVPGGGAVEAALSIYLENYATSMGSREQLAIAEFARSLLVIPNTLAVNAAQDSTDLVAKLRAFHNEAQVNPERKNLKWIGLDLSNGKPRDNKQAGVFEPTIVKVKSLKFATEAAITILRIDDLIKLHPESKDDKHGSYEDAVHSGALND

SEQ ID NO: 11293 - protein, 556 aa, Homo sapiens; identical to SEQ ID NO: 11292

SEQ ID NO: 11294 - protein, 97 aa, Homo sapiens
MMVRAAETMTTGSEPAFILLLLPPSALRCLQARQSSSSQPTGLPRAGPELRTGIPRARISSASPARGGSQHSSDGSFCSRRLREVLCVSPGASHSLA

SEQ ID NO: 11295 - protein, 491 aa, Homo sapiens
MSLLMISENVKLAREYALLGNYDSAMVYYQGVLDQMNKYLYSVKDTYLQQKWQQVWQEINVEAKHVKDIMKTLESFKLDSTPLKAAQHDLPASEGEVWSMPVPVERRPSPGPRKRQSSQYSDPKSHGNRPSTTVRVHRSSAQNVHNDRGKAVRCREKKEQNKGREEKNKSPAAVTEPETNKFDSTGYDKDLVEALERDIISQNPNVRWDDIADLVEAKKLLKEAVVLPMWMPEFFKGIRRPWKGVLMVGPPGTGKTLLAKAVATECKTTFFNVSSSTLTSKYRGESEKLVRLLFEMARFYSPATIFIDEIDSICSRRGTSEEHEASRRVKAELLVQMDGVGGTSENDDPSKMVMVLAATNFPWDIDEALRRRLEKRIYIPLPSAKGREELLRISLRELELADDVDLASIAENMEGYSGADITNVCRDASLMAMRRRIEGLTPEEIRNLSKEEMHMPTTMEDFEMALKKVSKSVSAADIERYEKWIFEFGSC

SEQ ID NO: 11296 - protein, 491 aa, Homo sapiens; identical to SEQ ID NO: 11295

SEQ ID NO: 11297 - protein, 363 aa, Homo sapiens
MTFQLLREKSGPCLYLLNEDPHQDLENANLLSTVTLNHMVIVQVQLSEFTVHLHRMFTMTEGKLFVVVKRKNRIKEERKRDDIADLVEAKKLLKEAVVLPMWMPEFFKGIRRPWKGVLMVGPPGTGKTLLAKAVATECKTTFFNVSSSTLTSKYRGESEKLVRLLFEMARFYSPATIFIDEIDSICSRRGTSEEHEASRRVKAELLVQMDGVGGTSENDDPSKMVMVLAATNFPWDIDEALRRRLEKRIYIPLPSAKGREELLRISLRELELADDVDLASIAENMEGYSGADITNVCRDASLMAMRRRIEGLTPEEIRNLSKEEMHMPTTMEDFEMALKKVSKSVSAADIERYEKWIFEFGSC

SEQ ID NO: 11298 - protein, 491 aa, Homo sapiens; identical to SEQ ID NO: 11295

SEQ ID NO: 11299 - protein, 1387 aa, Homo sapiens
MPQGSYMIVDSSDHDPGEKARLQLPTMKENDTHCIDFSYLLYSQKGLNPGTLNILVRVNKGPLANPIWNVTGFTGRDWLRAELAVSTFWPNEYQVIFEAEVSGGRSGYIAIDDIQVLSYPCDKSPHFLRLGDVEVNAGQNATFQCIATGRDAVHNKLWLQRRNGEDIPVAQTKNINHRRFAASFRLQEVTKTDQDLYRCVTQSERGSGVSNFAQLIVREPPRPIAPPQLLGVGPTYLLIQLNANSIIGDGPIILKEVEYRMTSGSWTETHAVNAPTYKLWHLDPDTEYEIRVLLTRPGEGGTGLPGPPLITRTKCAEPMRTPKTLKIAEIQARRIAVDWESLGYNITRCHTFNVTICYHYFRGHNESKADCLDMDPKAPQHVVNHLPPYTNVSLKMILTNPEGRKESEETIIQTDEDVPGPVPVKSLQGTSFENKIFLNWKEPLDPNGIITQYEISYSSIRSFDPAVPVAGPPQTVSNLWNSTHHVFMHLHPGTTYQFFIRASTVKGFGPATAINVTTNISAPTLPDYEGVDASLNETATTITVLLRPAQAKGAPISAYQIVVEELHPHRTKREAGAMECYQVPVTYQNAMSGGAPYYFAAELPPGNLPEPAPFTVGDNRTYQGFWNPPLAPRKGYNIYFQAMSSVEKETKTQCVRIATKAAATEEPEVIPDPAKQTDRVVKIAGISAGILVFILLLLVVILIVKKSKLAKKRKDAMGNTRQEMTHMVNAMDRSYADQSTLHAEDPLSITFMDQHNFSPRLPNDPLVPTAVLDENHSATAESSRLLDVPRYLCEGTESPYQTGQLHPAIRVADLLQHINLMKTSDSYGFKEEYESFFEGQSASWDVAKKDQNRAKNRYGNIIAYDHSRVILQPVEDDPSSDYINANYIDIWLYRDGYQRPSHYIATQGPVHETVYDFWRMIWQEQSACIVMVTNLVEVGRVKCYKYWPDDTEVYGDFKVTCVEMEPLAEYVVRTFTLERRGYNEIREVKQFHFTGWPDHGVPYHATGLLSFIRRVKLSNPPSAGPIVVHCSAGAGRTGCYIVIDIMLDMAEREGVVDIYNCVKALRSRRINMVQTEEQYIFIHDAILEACLCGETAIPVCEFKAAYFDMIRIDSQTNSSHLKDEFQTLNSVTPRLQAEDCSIACLPRNHDKNRFMDMLPPDRCLPFLITIDGESSNYINAALMDSYRQPAAFIVTQYPLPNTVKDFWRLVYDYGCTSIVMLNEVDLSQGCPQYWPEEGMLRYGPIQVECMSCSMDCDVINRIFRICNLTRPQEGYLMVQQFQYLGWASHREVPGSKRSFLKLILQVEKWQEECEEGEGRTIIHCLNGGGRSGMFCAIGIVVEMVKRQNVVDVFHAVKTLRNSKPNMVEAPEQYRFCYDVALEYLESS

SEQ ID NO: 11300 - protein, 1400 aa, Homo sapiens
MPQGSYMIVDSSDHDPGEKARLQLPTMKENDTHCIDFSYLLYSQKGLNPGTLNILVRVNKGPLANPIWNVTGFTGRDWLRAELAVSTFWPNEYQVIICTFLVYVLMSSVLTICVIHRCKYASHGNERLPSCLPHPHYWGSVIHRYTYASHGGRSGYIAIDDIQVLSYPCDKSPHFLRLGDVEVNAGQNATFQCIATGRDAVHNKLWLQRRNGEDIPVAQTKNINHRRFAASFRLQEVTKTDQDLYRCVTQSERGSGVSNFAQLIVREPPRPIAPPQLLGVGPTYLLIQLNANSIIGDGPIILKEVEYRMTSGSWTETHAVNAPTYKLWHLDPDTEYEIRVLLTRPGEGGTGLPGPPLITRTKCAEPMRTPKTLKIAEIQARRIAVDWESLGYNITRCHTFNVTICYHYFRGHNESKADCLDMDPKAPQHVVNHLPPYTNVSLKMILTNPEGRKESEETIIQTDEDVPGPVPVKSLQGTSFENKIFLNWKEPLDPNGIITQYEISYSSIRSFDPAVPVAGPPQTVSNLWNSTHHVFMHLHPGTTYQFFIRASTVKGFGPATAINVTTNISAPTLPDYEGVDASLNETATTITVLLRPAQAKGAPISAYQIVVEELHPHRTKREAGAMECYQVPVTYQNAMSGGAPYYFAAELPPGNLPEPAPFTVGDNRTYQGFWNPPLAPRKGYNIYFQAMSSVEKETKTQCVRIATKAAATEEPEVIPDPAKQTDRVVKIAGISAGILVFILLLLVVILIVKKSKLAKKRKDAMGNTRQEMTHMVNAMDRSYADQSTLHAEDPLSITFMDQHNFSPRYENHSATAESSRLLDVPRYLCEGTESPYQTGQLHPAIRVADLLQHINLMKTSDSYGFKEEYESFFEGQSASWDVAKKDQNRAKNRYGNIIAYYINANYIDGYQRPSHYIATQGPVHETVYDFWRMIWQEQSACIVMVTNLVEVGRVKCYKYWPDDTEVYGDFKVTCVEMEPLAEYVVRTFTLERRGYNEIREVKQFHFTGWPDHGVPYHATGLLSFIRRVKLSNPPSAGPIVVHCSAGAGRTGCYIVIDIMLDMAEREGVVDIYNCVKALRSRRINMVQTEEQYIFIHDAILEACLCGETAIPVCEFKAAYFDMIRIDSQTNSSHLKDEFQTLNSVTPRLQAEDCSIACLPRNHDKNRFMDMLPPDRCLPFLITIDGESSNYINAALMDSYRQPAAFIVTQYPLPNTVKDFWRLVYDYGCTSIVMLNEVDLSQGCPQYWPEEGMLRYGPIQVECMSCSMDCDVINRIFRICNLTRPQEGYLMVQQFQYLGWASHREVPGSKRSFLKLILQVEKWQEECEEGEGRTIIHCLNGGGRSGMFCAIGIVVEMVKRQNVVDVFHAVKTLRNSKPNMVEAPEQYRFCYDVALEYLESS

SEQ ID NO: 11301 - protein, 1426 aa, Homo sapiens
MPQGSYMIVDSSDHDPGEKARLQLPTMKENDTHCIDFSYLLYSQKGLNPGTLNILVRVNKGPLANPIWNVTGFTGRDWLRAELAVSTFWPNEYQVIICTFLVYVLMSSVLTICVIHRCKYASHGNERLPSCLPHPHYWGSVIHRYTYASHGGRSGYIAIDDIQVLSYPCDKSPHFLRLGDVEVNAGQNATFQCIATGRDAVHNKLWLQRRNGEDIPVAQTKNINHRRFAASFRLQEVTKTDQDLYRCVTQSERGSGVSNFAQLIVREPPRPIAPPQLLGVGPTYLLIQLNANSIIGDGPIILKEVEYRMTSGSWTETHAVNAPTYKLWHLDPDTEYEIRVLLTRPGEGGTGLPGPPLITRTKCAEPMRTPKTLKIAEIQARRIAVDWESLGYNITRCHTFNVTICYHYFRGHNESKADCLDMDPKAPQHVVNHLPPYTNVSLKMILTNPEGRKESEETIIQTDEDVPGPVPVKSLQGTSFENKIFLNWKEPLDPNGIITQYEISYSSIRSFDPAVPVAGPPQTVSNLWNSTHHVFMHLHPGTTYQFFIRASTVKGFGPATAINVTTNISAPTLPDYEGVDASLNETATTITVLLRPAQAKGAPISAYQIVVEELHPHRTKREAGAMECYQVPVTYQNAMSGGAPYYFAAELPPGNLPEPAPFTVGDNRTYQGFWNPPLAPRKGYNIYFQAMSSVEKETKTQCVRIATKAAATEEPEVIPDPAKQTDRVVKIAGISAGILVFILLLLVVILIVKKSKLAKKRKDAMGNTRQEMTHMVNAMDRSYADQSTLHAEDPLSITFMDQHNFSPRYENHSATAESSRLLDVPRYLCEGTESPYQTGQLHPAIRVADLLQHINLMKTSDSYGFKEEYESFFEGQSASWDVAKKDQNRAKNRYGNIIAYDHSRVILQPVEDDPSSDYINANYIDGYQRPSHYIATQGPVHETVYDFWRMIWQEQSACIVMVTNLVEVGRVKCYKYWPDDTEVYGDFKVTCVEMEPLAEYVVRTFTLERVSTLKFYFKKGYNEIREVKQFHFTGWPDHGVPYHATGLLSFIRRVKLSNPPSAGPIVVHCSAGAGRTGCYIVIDIMLDMAEREGVVDIYNCVKALRSRRINMVQTEEQYIFIHDAILEACLCGETAIPVCEFKAAYFDMIRIDSQTNSSHLKDEFQTLNSVTPRLQAEDCSIACLPRNHDKNRFMDMLPPDRCLPFLITIDGESSNYINAALMDSYRQPAAFIVTQYPLPNTVKDFWRLVYDYGCTSIVMLNEVDLSQGCPQYWPEEGMLRYGPIQVECMSCSMDCDVINRIFRICNLTRPQEGYLMVQQFQYLGWASHREVPGSKRSFLKLILQVEKWQEECEEGEGRTIIHCLNGGGRSGMFCAIGIVVEMVKRQNVVDVFHAVKTLRNSKPNMVEAPEQYRFCYDVALEYLESS

SEQ ID NO: 11302 - protein, 1369 aa, Homo sapiens
MPQGSYMIVDSSDHDPGEKARLQLPTMKENDTHCIDFSYLLYSQKGLNPGTLNILVRVNKGPLANPIWNVTGFTGRDWLRAELAVSTFWPNEYQVIFEAEVSGGRSGYIAIDDIQVLSYPCDKSPHFLRLGDVEVNAGQNATFQCIATGRDAVHNKLWLQRRNGEDIPVAQTKNINHRRFAASFRLQEVTKTDQDLYRCVTQSERGSGVSNFAQLIVREPPRPIAPPQLLGVGPTYLLIQLNANSIIGDGPIILKEVEYRMTSGSWTETHAVNAPTYKLWHLDPDTEYEIRVLLTRPGEGGTGLPGPPLITRTKCAEPMRTPKTLKIAEIQARRIAVDWESLGYNITRCHTFNVTICYHYFRGHNESKADCLDMDPKAPQHVVNHLPPYTNVSLKMILTNPEGRKESEETIIQTDEDVPGPVPVKSLQGTSFENKIFLNWKEPLDPNGIITQYEISYSSIRSFDPAVPVAGPPQTVSNLWNSTHHVFMHLHPGTTYQFFIRASTVKGFGPATAINVTTNISAPTLPDYEGVDASLNETATTITVLLRPAQAKGAPISAYQIVVEELHPHRTKREAGAMECYQVPVTYQNAMSGGAPYYFAAELPPGNLPEPAPFTVGDNRTYQGFWNPPLAPRKGYNIYFQAMSSVEKETKTQCVRIATKAAATEEPEVIPDPAKQTDRVVKIAGISAGILVFILLLLVVILIVKKSKLAKKRKDAMGNTRQEMTHMVNAMDRSYADQSTLHAEDPLSITFMDQHNFSPRYENHSATAESSRLLDVPRYLCEGTESPYQTGQLHPAIRVADLLQHINLMKTSDSYGFKEEYESFFEGQSASWDVAKKDQNRAKNRYGNIIAYDHSRVILQPVEDDPSSDYINANYIDGYQRPSHYIATQGPVHETVYDFWRMIWQEQSACIVMVTNLVEVGRVKCYKYWPDDTEVYGDFKVTCVEMEPLAEYVVRTFTLERRGYNEIREVKQFHFTGWPDHGVPYHATGLLSFIRRVKLSNPPSAGPIVVHCSAGAGRTGCYIVIDIMLDMAEREGVVDIYNCVKALRSRRINMVQTEEQYIFIHDAILEACLCGETAIPVCEFKAAYFDMIRIDSQTNSSHLKDEFQTLNSVTPRLQAEDCSIACLPRNHDKNRFMDMLPPDRCLPFLITIDGESSNYINAALMDSYRQPAAFIVTQYPLPNTVKDFWRLVYDYGCTSIVMLNEVDLSQGCPQYWPEEGMLRYGPIQVECMSCSMDCDVINRIFRICNLTRPQEGYLMVQQFQYLGWASHREVPGSKRSFLKLILQVEKWQEECEEGEGRTIIHCLNGGGRSGMFCAIGIVVEMVKRQNVVDVFHAVKTLRNSKPNMVEAPEQYRFCYDVALEYLESS

SEQ ID NO: 11303 - protein, 1440 aa, Homo sapiens
MDTTAAAALPAFVALLLLSPWPLLGSAQGQFSAGGCTFDDGPGACDYHQDLYDDFEWVHVSAQEPHYLPPEMPQGSYMIVDSSDHDPGEKARLQLPTMKENDTHCIDFSYLLYSQKGLNPGTLNILVRVNKGPLANPIWNVTGFTGRDWLRAELAVSTFWPNEYQVIFEAEVSGGRSGYIAIDDIQVLSYPCDKSPHFLRLGDVEVNAGQNATFQCIATGRDAVHNKLWLQRRNGEDIPVAQTKNINHRRFAASFRLQEVTKTDQDLYRCVTQSERGSGVSNFAQLIVREPPRPIAPPQLLGVGPTYLLIQLNANSIIGDGPIILKEVEYRMTSGSWTETHAVNAPTYKLWHLDPDTEYEIRVLLTRPGEGGTGLPGPPLITRTKCAEPMRTPKTLKIAEIQARRIAVDWESLGYNITRCHTFNVTICYHYFRGHNESKADCLDMDPKAPQHVVNHLPPYTNVSLKMILTNPEGRKESEETIIQTDEDVPGPVPVKSLQGTSFENKIFLNWKEPLDPNGIITQYEISYSSIRSFDPAVPVAGPPQTVSNLWNSTHHVFMHLHPGTTYQFFIRASTVKGFGPATAINVTTNISAPTLPDYEGVDASLNETATTITVLLRPAQAKGAPISAYQIVVEELHPHRTKREAGAMECYQVPVTYQNAMSGGAPYYFAAELPPGNLPEPAPFTVGDNRTYQGFWNPPLAPRKGYNIYFQAMSSVEKETKTQCVRIATKAAATEEPEVIPDPAKQTDRVVKIAGISAGILVFILLLLVVILIVKKSKLAKKRKDAMGNTRQEMTHMVNAMDRSYADQSTLHAEDPLSITFMDQHNFSPRYENHSATAESSRLLDVPRYLCEGTESPYQTGQLHPAIRVADLLQHINLMKTSDSYGFKEEYESFFEGQSASWDVAKKDQNRAKNRYGNIIAYDHSRVILQPVEDDPSSDYINANYIDGYQRPSHYIATQGPVHETVYDFWRMIWQEQSACIVMVTNLVEVGRVKCYKYWPDDTEVYGDFKVTCVEMEPLAEYVVRTFTLERRGYNEIREVKQFHFTGWPDHGVPYHATGLLSFIRRVKLSNPPSAGPIVVHCSAGAGRTGCYIVIDIMLDMAEREGVVDIYNCVKALRSRRINMVQTEEQYIFIHDAILEACLCGETAIPVCEFKAAYFDMIRIDSQTNSSHLKDEFQTLNSVTPRLQAEDCSIACLPRNHDKNRFMDMLPPDRCLPFLITIDGESSNYINAALMDSYRQPAAFIVTQYPLPNTVKDFWRLVYDYGCTSIVMLNEVDLSQGCPQYWPEEGMLRYGPIQVECMSCSMDCDVINRIFRICNLTRPQEGYLMVQQFQYLGWASHREVPGSKRSFLKLILQVEKWQEECEEGEGRTIIHCLNGGGRSGMFCAIGIVVEMVKRQNVVDVFHAVKTLRNSKPNMVEAPEQYRFCYDVALEYLESS

SEQ ID NO: 11304 - protein, 233 aa, Homo sapiens
MPQGSYMIVDSSDHDPGEKARLQLPTMKENDTHCIDFSYLLYSQKGLNPGTLNILVRVNKGPLANPIWNVTGFTGRDWLRAELAVSTFWPNEYQVIFEAEVSGGRSGYIAIDDIQVLSYPCDKSPHFLRLGDVEVNAGQNATFQCIATGRDAVHNKLWLQRRNGEDIPVAQTKNINHRRFAASFRLQEVTKTDQDLYRCVTQSERGSGVSNFAQLIVRGKVKLFSLHEIAWLY

SEQ ID NO: 11305 - protein, 375 aa, Homo sapiens [sequence omitted]

SEQ ID NO: 11306 - protein, 875 aa, Homo sapiens [sequence omitted]

SEQ ID NO: 11307 - protein, 841 aa, Homo sapiens
MSLGLGLGLGLRKLEKQGSCRKKCFDASFRGLENCRCDVACKDRGDCCWDFEDTCVESTRIWMCNKFRCGETRLEASLCSCSDDCLQRKDCCADYKSVCQGETSWLEENCDTAQQSQCPEGFDLPPVILFSMDGFRAEYLYTWDTLMPNINKLKTCGIHSKYMRAMYPTKTFPNHYTIVTGLYPESHGIIDNNMYDVNLNKNFSLSSKEQNNPAWWHGQPMWLTAMYQGLKAATYFWPGSEVAINGSFPSIYMPYNGSVPFEERISTLLKWLDLPKAERPRFYTMYFEEPDSSGHAGGPVSARVIKALQVVDHAFGMLMEGLKQRNLHNCVNIILLADHGMDQTYCNKMEYMTDYFPRINFFYMYEGPAPRIRAHNIPHDFFSFNSEEIVRNLSCRKPDQHFKPYLTPDLPKRLHYAKNVRIDKVHLFVDQQWLAVRSKSNTNCGGGNHGYNNEFRSMEAIFLAHGPSFKEKTEVEPFENIEVYNLMCDLLRIQPAPNNGTHGSLNHLLKVPFYEPSHAEEVSKFSVCGFANPLPTESLDCFCPHLQNSTQLEQVNQMLNLTQEEITATVKVNLPFGRPRVLQKNVDHCLLYHREYVSGFGKAMRMPMWSSYTVPQLGDTSPLPPTVPDCLRADVRVPPSESQKCSFYLADKNITHGFLYPPASNRTSDSQYDALITSNLVPMYEEFRKMWDYFHSVLLIKHATERNGVNVVSGPIFDYNYDGHFDAPDEITKHLANTDVPIPTHYFVVLTSCKNKSHTPENCPGWLDVLPFIIPHRPTNVESCPEGKPEALWVEERFTAHIARVRDVELLTGLDFYQDKVQPVSEILQLKTYLPTFETTI

SEQ ID NO: 11308 - protein, 734 aa, Homo sapiens [sequence omitted]

SEQ ID NO: 11309 - protein, 49 aa, Homo sapiens
MQFEVWSKILKVIIIWQLIGNLTIKGNCSLICPTSSNITDCVATSSKHQ

SEQ ID NO: 11310 - protein, 62 aa, Homo sapiens [sequence omitted]

SEQ ID NO: 11311 - protein, 403 aa, Homo sapiens
MQFGLLGTGFQLFGYEEKLQSNPLQHLFEVYVQVNKEAADDKSVAKAAQEFFQRLELGDVQALSLWQKFRDLSIEEYIRVYKRLGVYFDEYSGESFYREKSQEVLKLLESKGLLLKTIKGTAVVDLSGNGDPSSICTVMRSDGTSLYATRDLAAAIDRMDKYNFDTMIYVTDKGQKKHFQQVFQMLKIMGYDWAERCQHVPFGVVQGMKTRRGDVTFLEDVLNEIQLRMLQNMASIKTTKELKNPQETAERVGLAALIIQDFKGLLLSDYKFSWDRVFQSRGDTGVFLQYTHARLHSLEETFGCGYLNDFNTACLQEPQSVSILQHLLRFDEVLYKSSQDFQPRHIVSYLLTLSHLAAVAHKTLQIKDSPPEVAGARLHLFKAVRSVLANGMKLLGITPVCRM

SEQ ID NO: 11312 - protein, 441 aa, Homo sapiens
MQFGLLGTGFQLFGYEEKLQSNPLQHLFEVYVQVNKEAADDKSVAKAAQEFFQRLELGDVQALSLWQKFRDLSIEEYIRVYKRLGVYFDEYSGESFYREKSQEVLKLLESKGLLLKTIKGTAVVDLSGNGDPSSICTVMRSDGTSLYATRDLAAAIDRMDKYNFDTMIYVTDKGQKKHFQQVFQMLKIMGYDWAERCQHVPFGVVQGMKTRRGDVTFLEDVLNEIQLRMLQNMASIKTTKELKNPQETAERVGLAALIIQDFKGLLLSDYKFSWDRVFQSRGDTGVFLQYTHARLHSLEETFGCGYLNDFNTACLQEPQSVSILQHLLRFDEVLYKSSQDFQPRHIVSYLLTLRWCLALLSRLERDLGSLQPPPAGFKRFSCLSLPSSWDYSHLAAVAHKTLQIKDSPPEVAGARLHLFKAVRSVLANGMKLLGITPVCRM

SEQ ID NO: 11313 - protein, 30 aa, Homo sapiens
MQFGLLGTGFQLFGYEEKLQSNPLQHLFEV

SEQ ID NO: 11314 - protein, 578 aa, Homo sapiens
MACGFRRAIACQLSRVLNLPPENLITSISAVPISQKEEVADFQLSVDSLLEKDNDHSRPDIQVQAKRLAEKLRCDTVVSEISTGQRTVNFKINRELLTKTVLQQVIEDGSKYGLKSELFSGLPQKKIVVEFSSPNVAKKFHVGHLRSTIIGNFIANLKEALGHQVIRINYLGDWGMQFGLLGTGFQLFGYEEKLQSNPLQHLFEVYVQVNKEAADDKSVAKAAQEFFQRLELGDVQALSLWQKFRDLSIEEYIRVYKRLGVYFDEYSGESFYREKSQEVLKLLESKGLLLKTIKGTAVVDLSGNGDPSSICTVMRSDGTSLYATRDLAAAIDRMDKYNFDTMIYVTDKGQKKHFQQVFQMLKIMGYDWAERCQHVPFGVVQGMKTRRGDVTFLEDVLNEIQLRMLQNMASIKTTKELKNPQETAERVGLAALIIQDFKGLLLSDYKFSWDRVFQSRGDTGVFLQYTHARLHSLEETFGCGYLNDFNTACLQEPQSVSILQHLLRFDEVLYKSSQDFQPRHIVSYLLTLSHLAAVAHKTLQIKDSPPEVAGARLHLFKAVRSVLANGMKLLGITPVCRM

SEQ ID NO: 11315 - protein, 403 aa, Homo sapiens; identical to SEQ ID NO: 11311

SEQ ID NO: 11316 - protein, 90 aa, Homo sapiens
FCFLFIYFILFTFLRQSFALVTQAGVQWHNLDSLQSPPPGFKRFPCLSLPSSWDCRYTPPCLANFCVCVCIFSRDGVLPCGQAGLELNLR

SEQ ID NO: 11317 - protein, 144 aa, Homo sapiens [sequence omitted]

SEQ ID NO: 11318 - protein, 509 aa, Homo sapiens
MGGTSREELRKAELESPKAGKSGKSSKEGQDTVESEQISVRKNSLVAVPSTVSAKIKVPVSQPIVKKDKRQNSSRFSASNNRELQKLPSLKDVPPADQEKLFIQKLRQCCVLFDFVSDPLSDLKWKEVKRAALSEMVEYITHNRNVITEPIYPEVVHMFAVNMFRTLPPSSNPTGAEFDPEEDEPTLEAAWPHLQLVYEFFLRFLESPDFQPNIAKKYIDQKFVLQLLELFDSEDPRERDFLKTTLHRIYGKFLGLRAYIRKQINNIFYRFIYETEHHNGIAELLEILGSIINGFALPLKEEHKIFLLKVLLPLHKVKSLSVYHPQLAYCVVQFLEKDSTLTEPVVMALLKYWPKTHSPKEVMFLNELEEILDVIEPSEFVKIMEPLFRQLAKCVSSPHFQVAERALYYWNNEYIMSLISDNAAKILPIMFPSLYRNSKTHWNKTIHGLIYNALKLFMEMNQKLFDDCTQQFKAEKLKEKLKMKEREEAWVKIENLAKANPQVLKKRIT

SEQ ID NO: 11319 - protein, 524 aa, Homo sapiens
MLTCNKAGSRMVVDAANSNGPFQPVVLLHIRDVPPADQEKLFIQKLRQCCVLFDFVSDPLSDLKWKEVKRAALSEMVEYITHNRNVITEPIYPEVVHMFAVNMFRTLPPSSNPTGAEFDPEEDEPTLEAAWPHLQLVYEFFLRFLESPDFQPNIAKKYIDQKFVLQLLELFDSEDPRERDFLKTTLHRIYGKFLGLRAYIRKQINNIFYRFIYETEHHNGIAELLEILGSIINGFALPLKEEHKIFLLKVLLPLHKVKSLSVYHPQLAYCVVQFLEKDSTLTEPVVMALLKYWPKTHSPKEVMFLNELEEILDVIEPSEFVKIMEPLFRQLAKCVSSPHFQVAERALYYWNNEYIMSLISDNAAKILPIMFPSLYRNSKTHWNKTIHGLIYNALKLFMEMNQKLFDDCTQQFKAEKLKEKLKMKEREEAWVKIENLAKANPQYTVYSQASTMSIPVAMETDGPLFEDVQMLRKTVKDEAHQAQKDPKKDRPLARRKSELPQDPHTKKALEAHCRADELASQDGR

SEQ ID NO: 11320 - protein, 485 aa, Homo sapiens
MLTCNKAGSRMVVDAANSNGPFQPVVLLHIRDVPPADQEKLFIQKLRQCCVLFDFVSDPLSDLKWKEVKRAALSEMVEYITHNRNVITEPIYPEVVHMFAVNMFRTLPPSSNPTGAEFDPEEDEPTLEAAWPHLQLVYEFFLRFLESPDFQPNIAKKYIDQKFVLQLLELFDSEDPRERDFLKTTLHRIYGKFLGLRAYIRKQINNIFYRFIYETEHHNGIAELLEILGSIINGFALPLKEEHKIFLLKVLLPLHKVKSLSVYHPQLAYCVVQFLEKDSTLTEPVVMALLKYWPKTHSPKEVMFLNELEEILDVIEPSEFVKIMEPLFRQLAKCVSSPHFQVAERALYYWNNEYIMSLISDNAAKILPIMFPSLYRNSKTHWNKTIHGLIYNALKLFMEMNQKLFDDCTQQFKAEKLKEKLKMKEREEAWVKIENLAKANPQAQKDPKKDRPLARRKSELPQDPHTKKALEAHCRADELASQDGR

SEQ ID NO: 11321 - protein, 449 aa, Homo sapiens
MLTCNKAGSRMVVDAANSNGPFQPVVLLHIRDVPPADQEKLFIQKLRQCCVLFDFVSDPLSDLKWKEVKRAALSEMVEYITHNRNVITEPIYPEVVHMFAVNMFRTLPPSSNPTGAEFDPEEDEPTLEAAWPHLQLVYEFFLRFLESPDFQPNIAKKYIDQKFVLQLLELFDSEDPRERDFLKTTLHRIYGKFLGLRAYIRKQINNIFYRFIYETEHHNGIAELLEILGSIINGFALPLKEEHKIFLLKVLLPLHKVKSLSVYHPQLAYCVVQFLEKDSTLTEPVVMALLKYWPKTHSPKEVMFLNELEEILDVIEPSEFVKIMEPLFRQLAKCVSSPHFQVAERALYYWNNEYIMSLISDNAAKILPIMFPSLYRNSKTHWNKTIHGLIYNALKLFMEMNQKLFDDCTQQFKAEKLKEKLKMKEREEAWVKIENLAKANPQVLKKRIT

SEQ ID NO: 11322 - protein, 341 aa, Homo sapiens
MLTCNKAGSRMVVDAANSNGPFQPVVLLHIRDVPPADQEKLFIQKLRQCCVLFDFVSDPLSDLKWKEVKRAALSEMVEYITHNRNVITEPIYPEVVHMFAVNMFRTLPPSSNPTGAEFDPEEDEPTLEAAWPHLQLVYEFFLRFLESPDFQPNIAKKYIDQKFVLQLLELFDSEDPRERDFLKTTLHRIYGKFLGLRAYIRKQINNIFYRFIYETEHHNGIAELLEILGSIINGFALPLKEEHKIFLLKVLLPLHKVKSLSVYHPQLAYCVVQFLEKDSTLTEPVVMALLKYWPKTHSPKEVMFLNELEEILDVIEPSEFVKIMEPLFRQLAKCVSSPHFQ

SEQ ID NO: 11323 - protein, 422 aa, Homo sapiens
MFRTLPPSSNPTGAEFDPEEDEPTLEAAWPHLQLVYEFFLRFLESPDFQPNIAKKYIDQKFVLQLLELFDSEDPRERDFLKTTLHRIYGKFLGLRAYIRKQINNIFYRFIYETEHHNGIAELLEILGSIINGFALPLKEEHKIFLLKVLLPLHKVKSLSVYHPQLAYCVVQFLEKDSTLTEPVVMALLKYWPKTHSPKEVMFLNELEEILDVIEPSEFVKIMEPLFRQLAKCVSSPHFQVAERALYYWNNEYIMSLISDNAAKILPIMFPSLYRNSKTHWNKTIHGLIYNALKLFMEMNQKLFDDCTQQFKAEKLKEKLKMKEREEAWVKIENLAKANPQYTVYSQASTMSIPVAMETDGPLFEDVQMLRKTVKDEAHQAQKDPKKDRPLARRKSELPQDPHTKKALEAHCRADELASQDGR

SEQ ID NO: 11324 - protein, 169 aa, Homo sapiens
LVYEFFLRFLESPDFQPNIAKKYIDQKFVLQLLELFDSEDPRERDFLKTTLHRIYGKFLGLRAYIRKQINNIFYRFIYETEHHNGIAELLEILGSIINGFALPLKEEHKIFLLKVLLPLHKVKSLSVYHPQLAYCVVQFLEKDSTLTEPWLNNSPNATLRLPQTEAAPT

SEQ ID NO: 11325 - protein, 579 aa, Homo sapiens [sequence omitted]

SEQ ID NO: 11326 - protein, 335 aa, Homo sapiens
MTYSVQFGDLWPSIRVSLLSEQKYGALVNNFAAWDHVSAKLEQLSAKDFVNEAISHWELQSEGGQSAAPSPASWACSPNLRCFTFDRGDISRFPPARPGSLGVMEYYLMDAASLLPVLALGLQPGDIVLDLCAAPGGKTLALLQTGCCRNLAANDLSPSRIARLQKILHSYVPEEIRDGNQVRVTSWDGRKWGELEGDTYDRVLVDVPCTTDRHSLHEEENNIFKRSRKKERQILPVLQVQLLAAGLLATKPGGHVVYSTCSLSHLQNEYVVQGAIELLANQYSIQVQVEDLTHFRRVFMDTFCFFSSCQVGELVIPNLMANFGPMYFCKMRRLT

SEQ ID NO: 11327 - protein, 579 aa, Homo sapiens [sequence omitted]

SEQ ID NO: 11328 - protein, 243 aa, Homo sapiens
MPSPAMRRAVLETKQSLEAAGHTLVPFLPSNIPHALETLSTGGLFSDGGHTFLQNFKGDFVDPCLGDLVSILKLPQWLKGLLAFLVKPLLPRLSAFLSNMKSRSAGKLWELQHEIEVYRKTVIAQWRALDLDVVLTPMLAPALDLNAPGRATGAVSYTMLYNCLDFPAGVVPVTTVTAEDEAQMEHYRGYFGDIWDKMLQKGMKKSVGLPVAVQCVALPWQEELCLRFMREVERLMTPEKQSS

SEQ ID NO: 11329 - protein, 384 aa, Homo sapiens
MAALTLRGVRELLKRVDLATVPRRHRYKKKWAATEPKFPAVRLALQNFDMTYSVQFGDLWPSIRVSLLSEQKYGALVNNFAAWDHVSAKLEQLSAKDFVNEAISHWELQSEGGQSAAPSPASWACSPNLRCFTFDRGDISRFPPARPGSLGVMEYYLMDAASLLPVLALGLQPGDIVLDLCAAPGGKTLALLQTGCCRNLAANDLSPSRIARLQKILHSYVPEEIRDGNQVRVTSWDGRKWGELEGDTYDRVLVDVPCTTDRHSLHEEENNIFKRSRKKERQILPVLQVQLLAAGLLATKPGGHVVYSTCSLSHLQNEYVVQGAIELLANQYSIQVQVEDLTHFRRVFMDTFCFFSSCQVGELVIPNLMANFGPMYFCKMRRLT

SEQ ID NO: 11330 - protein, 274 aa, Homo sapiens [sequence omitted]

SEQ ID NO: 11331 - protein, 119 aa, Homo sapiens
MAALTLRGVRELLKRVDLATVPRRHRYKKKWPGRPHPSENTIATLPALLGLRRLAGKDSAPSSTSSCLWRPGKVTATTLSILPAQTLAKGATNPLILWTLLASPETLFLASLEALEFLL

SEQ ID NO: 11332 - protein, 446 aa, Homo sapiens [sequence omitted]

SEQ ID NO: 11333 - protein, 591 aa, Homo sapiens [sequence omitted]

SEQ ID NO: 11334 - protein, 223 aa, Homo sapiens
MASKLLRAVILGPPGSGKGTVCQRIAQNFGLQHLSSGHFLRENIKASTEVGEMAKQYIEKSLLVPDHVITRLMMSELENRRGQHWLLDGFPRTLGQAEALDKICEVDLVISLNIPFETLKDRLSRRWIHPPSGRVYNLDFNPPHVHGIDDVTGEPLVQQEDDKPEAVAARLRQYKDVAKPVIELYKSRGVLHQFSGTETNKIWPYVYTLFSNKITPIQSKEAY

SEQ ID NO: 11335 - protein, 154 aa, Homo sapiens [sequence omitted]

SEQ ID NO: 11336 - protein, 223 aa, Homo sapiens; identical to SEQ ID NO: 11334

SEQ ID NO: 11337 - protein, 171 aa, Homo sapiens
MAKQYIEKSLLVPDHVITRLMMSELENRRGQHWLLDGFPRTLGQAEALDKICEVDLVISLNIPFETLKDRLSRRWIHPPSGRVYNLDFNPPHVHGIDDVTGEPLVQQEDDKPEAVAARLRQYKDVAKPVIELYKSRGVLHQFSGTETNKIWPYVYTLFSNKITPIQSKEAY

SEQ ID NO: 11338 - protein, 223 aa, Homo sapiens; identical to SEQ ID NO: 11334

SEQ ID NO: 11339 - protein, 171 aa, Homo sapiens; identical to SEQ ID NO: 11337

SEQ ID NO: 11340 - protein, 223 aa, Homo sapiens; identical to SEQ ID NO: 11334

SEQ ID NO: 11341 - protein, 118 aa, Homo sapiens
MASKLLRAVILGPPGSGKGTVCQRIAQNFGLQHLSSGHFLRENIKASTGSYVPGRMQLAAARLNRAWGGGRGSRGGRQGSRSCRVCSNRHCLIQKCGLNTCCQCFRQYANDISFIKLD

SEQ ID NO: 11342 - protein, 223 aa, Homo sapiens; identical to SEQ ID NO: 11334

SEQ ID NO: 11343 - protein, 194 aa, Homo sapiens [sequence omitted]

SEQ ID NO: 11344 - protein, 167 aa, Homo sapiens
MAPSVPAAEPEYPKGIRAVLLGPPGAGKGTQAPRLAENFCVCHLATGDMLRAMVASGSELGKKLKATMDAGKLVSDEMVVELIEKNLETPLCKNGFLLDGFPRTVRQAEMLDDLMEKRKEKLDSVIEFSIPDSLLIRRITGRLIHPKSGRSYHEEFNPPKEPMKDDV

SEQ ID NO: 11345 - protein, 239 aa, Homo sapiens
MAPSVPAAEPEYPKGIRAVLLGPPGAGKGTQAPRLAENFCVCHLATGDMLRAMVASGSELGKKLKATMDAGKLVSDEMVVELIEKNLETPLCKNGFLLDGFPRTVRQAEMLDDLMEKRKEKLDSVIEFSIPDSLLIRRITGRLIHPKSGRSYHEEFNPPKEPMKDDITGEPLIRRSDDNEKALKIRLQAYHTQTTPLIEYYRKRGIHSAIDASQTPDVVFASILAAFSKATCKDLVMFI

SEQ ID NO: 11346 - protein, 232 aa, Homo sapiens
MAPSVPAAEPEYPKGIRAVLLGPPGAGKGTQAPRLAENFCVCHLATGDMLRAMVASGSELGKKLKATMDAGKLVSDEMVVELIEKNLETPLCKNGFLLDGFPRTVRQAEMLDDLMEKRKEKLDSVIEFSIPDSLLIRRITGRLIHPKSGRSYHEEFNPPKEPMKDDITGEPLIRRSDDNEKALKIRLQAYHTQTTPLIEYYRKRGIHSAIDASQTPDVVFASILAAFSKATS

SEQ ID NO: 11347 - protein, 239 aa, Homo sapiens; identical to SEQ ID NO: 11345

SEQ ID NO: 11348 - protein, 133 aa, Homo sapiens
MAPSVPAAEPEYPKGIRAVLLGPPGAGKGTQAPRLAENFCVCHLATGDMLRAMVASGSELGKKLKATMDAGKLVSDEMVVELIEKNLETPLCKNGFLLDGFPRTVRQAEMADSPQEWPFLPRGVQPSKRAHER

SEQ ID NO: 11349 - protein, 373 aa, Homo sapiens
MRLLAWLIFLANWGGARAEPGKFWHIADLHLDPDYKVSKDPFQVCPSAGSQPVPDAGPWGDYLCDSPWALINSSIYAMKEIEPEPDFILWTGDDTPHVPDEKLGEAAVLEIVERLTKLIREVFPDTKVYAALGNHDFHPKNQFPAGSNNIYNQIAELWKPWLSNESIALFKKGAFYCEKLPGPSGAGRIVVLNTNLYYTSNALTADMADPGQQFQWLEDVLTDASKAGDMVYIVGHVPPGFFEKTQNKAWFREGFNEKYLKVVRKHHRVIAGQFFGHHHTDSFRMLYDDAGVPISAMFITPGVTPWKTTLPGVVNGANNPAIRVFEYDRATLSLKVRSPAEARGGGWEGLKCITTFPHSQLIHLPLTTEPQEG

SEQ ID NO: 11350 - protein, 455 aa, Homo sapiens
MRLLAWLIFLANWGGARAEPGKFWHIADLHLDPDYKVSKDPFQVCPSAGSQPVPDAGPWGDYLCDSPWALINSSIYAMKEIEPEPDFILWTGDDTPHVPDEKLGEAAVLEIVERLTKLIREVFPDTKVYAALGNHDFHPKNQFPAGSNNIYNQIAELWKPWLSNESIALFKKGAFYCEKLPGPSGAGRIVVLNTNLYYTSNALTADMADPGQQFQWLEDVLTDASKAGDMVYIVGHVPPGFFEKTQNKAWFREGFNEKYLKVVRKHHRVIAGQFFGHHHTDSFRMLYDDAGVPISAMFITPGVTPWKTTLPGVVNGANNPAIRVFEYDRATLSLKDMVTYFMNLSQANAQGTPRWELEYQLTEAYGVPDASAHSMHTVLDRIAGDQSTLQRYYVYNSVSYSAGVCDEACSMQHVCAMRQVDIDAYTTCLYASGTTPVPQLPLLLMALLGLCTLVL

SEQ ID NO: 11351 - protein, 64 aa, Homo sapiens
MMRQSRRCTVEDQKADNLASPGSLPGERGFTARTSWPSSVCSWAGPQPSVQPGTPGTKARPRRR

SEQ ID NO: 11352 - protein, 125 aa, Homo sapiens
MHFYSSNSDIECVLKCVCLPLILSPPTIRNTFLQLLLARLPRKIVELESQHRARWLTPVILALWEAKAGGSPEVRSSRPAGPTWRNPDSTKNTKISQAWWWAPVIPTTQEAEAGELLEPGSWRSR

SEQ ID NO: 11353 - protein, 708 aa, Homo sapiens
MSTADALDDENTFKILVATDIHLGFMEKDAVRGNDTFVTLDEILRLAQENEVDFILLGGDLFHENKPSRKTLHTCLELLRKYCMGDRPVQFEILSDQSVNFGFSKFPWVNYQDGNLNISIPVFSIHGNHDDPTGADALCALDILSCAGFVNHFGRSMSVEKIDISPVLLQKGSTKIALYGLGSIPDERLYRMFVNKKVTMLRPKEDENSWFNLFVIHQNRSKHGSTNFIPEQFLDDFIDLVIWGHEHECKIAPTKNEQQLFYISQPGSSVVTSLSPGEAVKKHVGLLRIKGRKMNMHKIPLHTVRQFFMEDIVLANHPDIFNPDNPKVTQAIQSFCLEKIEEMLENAERERLGNSHQPEKPLVRLRVDYSGGFEPFSVLRFSQKFVDRVANPKDIIHFFRHREQKEKTGEEINFGKLITKPSEGTTLRVEDLVKQYFQTAEKNVQLSLLTERGMGEAVQEFVDKEEKDAIEELVKYQLEKTQRFLKERHIDALEDKIDEEVRRFRETRQKNTNEEDDEVREAMTRARALRSQSEESASAFSADDLMSIDLAEQMANDSDDSISAATNKGRGRGRGRRGGRGQNSASRGGSQRGRADTGLETSTRSRNSKTAVSASRNMSIIDAFKSTRQQPSRNVTTKNYSEVIEVDESDVEEDIFPTTSKTDQRWSSTSSSKIMSQSQVSKGVDFESSEDDDDDPFMNTSSLRRNRR

SEQ ID NO: 11354 - protein, 708 aa, Homo sapiens; identical to SEQ ID NO: 11353

SEQ ID NO: 11355 - protein, 708 aa, Homo sapiens; identical to SEQ ID NO: 11353

SEQ ID NO: 11356 - protein, 680 aa, Homo sapiens
MSTADALDDENTFKILVATDIHLGFMEKDAVRGNDTFVTLDEILRLAQENEVDFILLGGDLFHENKPSRKTLHTCLELLRKYCMGDRPVQFEILSDQSVNFGFSKFPWVNYQDGNLNISIPVFSIHGNHDDPTGADALCALDILSCAGFVNHFGRSMSVEKIDISPVLLQKGSTKIALYGLGSIPDERLYRMFVNKKVTMLRPKEDENSWFNLFVIHQNRSKHGSTNFIPEQFLDDFIDLVIWGHEHECKIAPTKNEQQLFYISQPGSSVVTSLSPGEAVKKHVGLLRIKGRKMNMHKIPLHTVRQFFMEDIVLANHPDIFNPDNPKVTQAIQSFCLEKIEEMLENAERERLGNSHQPEKPLVRLRVDYSGGFEPFSVLRFSQKFVDRVANPKDIIHFFRHREQKEKTGEEINFGKLITKPSEGTTLRVEDLVKQYFQTAEKNVQLSLLTERGMGEAVQEFVDKEEKDAIEELVKYQLEKTQRFLKERHIDALEDKIDEEVRRFRETRQKNTNEEDDEVREAMTRARALRSQSEESASAFSADDLMSIDLAEQMANDSDDSISAATNKGRGRGRGRRGGRGQNSASRGGSQRGRAFKSTRQQPSRNVTTKNYSEVIEVDESDVEEDIFPTTSKTDQRWSSTSSSKIMSQSQVSKGVDFESSEDDDDDPFMNTSSLRRNRR

SEQ ID NO: 11357 - protein, 680 aa, Homo sapiens; identical to SEQ ID NO: 11356

SEQ ID NO: 11358 - protein, 708 aa, Homo sapiens; identical to SEQ ID NO: 11353

SEQ ID NO: 11359 - protein, 476 aa, Homo sapiens
MAVPFVEDWDLVQTLGEGAYGEVQLAVNRVTEEAVAVKIVDMKRAVDCPENIKKEICINKMLNHENVVKFYGHRREGNIQYLFLEYCSGGELFDRIEPDIGMPEPDAQRFFHQLMAGVVYLHGIGITHRDIKPENLLLDERDNLKISDFGLATVFRYNNRERLLNKMCGTLPYVAPELLKRREFHAEPVDVWSCGIVLTAMLAGELPWDQPSDSCQEYSDWKEKKTYLNPWKKIDSAPLALLHKILVENPSARITIPDIKKDRWYNKPLKKGAKRPRVTSGGVSESPSGFSKHIQSNLDFSPVNSASSEENVKYSSSQPEPRTGLSLWDTSPSYIDKLVQGISFSQPTCPDHMLLNSQLLGTPGSSQNPWQRLVKRMTRFFTKLDADKSYQCLKETCEKLGYQWKKSCMNQVTISTTDRRNNKLIFKVNLLEMDDKILVDFRLSKGDGLEFKRHFLKIKGKLIDIVSSQKVWLPAT

SEQ ID NO: 11360 - protein, 382 aa, Homo sapiens
MEKPDIGMPEPDAQRFFHQLMAGVVYLHGIGITHRDIKPENLLLDERDNLKISDFGLATVFRYNNRERLLNKMCGTLPYVAPELLKRREFHAEPVDVWSCGIVLTAMLAGELPWDQPSDSCQEYSDWKEKKTYLNPWKKIDSAPLALLHKILVENPSARITIPDIKKDRWYNKPLKKGAKRPRVTSGGVSESPSGFSKHIQSNLDFSPVNSASSEENVKYSSSQPEPRTGLSLWDTSPSYIDKLVQGISFSQPTCPDHMLLNSQLLGTPGSSQNPWQRLVKRMTRFFTKLDADKSYQCLKETCEKLGYQWKKSCMNQVTISTTDRRNNKLIFKVNLLEMDDKILVDFRLSKGDGLEFKRHFLKIKGKLIDIVSSQKVWLPAT

SEQ ID NO: 11361 - protein, 705 aa, Homo sapiens
MTKFGFLRLSYEKQDTLLKLLILSMAAVLSFSTRLFAVLRFESVIHEFDPYFNYRTTRFLAEEGFYKFHNWFDDRAWYPLGRIIGGTIYPGLMITSAAIYHVLHFFHITIDIRNVCVFLAPLFSSFTTIVTYHLTKELKDAGAGLLAAAMIAVVPGYISRSVAGSYDNEGIAIFCMLLTYYMWIKAVKTGSICWAAKCALAYFYMVSSWGGYVFLINLIPLHVLVLMLTGRFSHRIYVAYCTVYCLGTILSMQISFVGFQPVLSSEHMAAFGVFGLCQIHAFVDYLRSKLNPQQFEVLFRSVISLVGFVLLTVGALLMLTGKISPWTGRFYSLLDPSYAKNNIPIIASVSEHQPTTWSSYYFDLQLLVFMFPVGLYYCFSNLSDARIFIIMYGVTSMYFSAVMVRLMLVLAPVMCILSGIGVSQVLSTYMKNLDISRPDKKSKKQQDSTYPIKNEVASGMILVMAFFLITYTFHSTWVTSEAYSSPSIVLSARGGDGSRIIFDDFREAYYWLRHNTPEDAKVMSWWDYGYQITAMANRTILVDNNTWNNTHISRVGQAMASTEEKAYEIMRELDVSYVLVIFGGLTGYSSDDINKFLWMVRIGGSTDTGKHIKENDYYTPTGEFRVDREGSPVLLNCLMYKMCYYRFGQVYTEAKRPPGFDRVRNAEIGNKDFELDVLEEAYTTEHWLVRIYKVKDLDNRGLSRT

SEQ ID NO: 11362 - protein, 703 aa, Homo sapiens
MTKFGFLRLSYEKQDTLLKLLILSMAAVLSFSTRLFAVLRFESVIHEFDPYFNYRTTRFLAEEGFYKFHNWFDDRAWYPLGRIIGGTIYPGLMITSAAIYHVLHFFHITIDIRNVCVFLAPLFSSFTTIVTYHLTKELKDAGAGLLAAAMIAVVPGYISRSVAGSYDNEGIAIFCMLLTYYMWIKAVKTGSICWAAKCALAYFYMVSSWGGYVFLINLIPLHVLVLMLTGRFSHRIYVAYCTVYCLGTILSMQISFVGFQPVLSSEHMAAFGVFGLCQIHAFVDYLRSKLNPQQFEVLFRSVISLVGFVLLTVGALLMLTGKISPWTGRFYSLLDPSYAKNNIPIIASVSEHQPTTWSSYYFDLQLLVFMFPVGLYYCFSNLSDARIFIIMYGVTSMYFSAVMVRLMLVLAPVMCILSGIGVSQVLSTYMKNLDISRPDKKSKKQQDSTYPIKNEVASGMILVMAFFLITYTFHSTWVTSEAYSSPSIVLSARGGDGSRIIFDDFREAYYWLRHNTPEDAKVMSWWDYGYQITAMANRTILVDNNTWNNTHISRVGQAMASTEEKAYEIMRELDVSYVLVIFGGLTGYSSDDINKFLWMVRIGGSTDTGKHIKENDYYTPTGEFRVDREGSPVLLNCLMYKMCYYRFGQVYTEAKRPPGFDRVRNAEIGNKDFELDVLEEAYTTEHWLVRIYKTLFDFINQQF

SEQ ID NO: 11363 - protein, 703 aa, Homo sapiens; identical to SEQ ID NO: 11362

SEQ ID NO: 11364 - protein, 926 aa, Homo sapiens
MVMADGPRHLQRGPVRVGFYDIEGTLGKGNFAVVKLGRHRITKTEVAIKIIDKSQLDAVNLEKIYREVQIMKMLDHPHIIKLYQVMETKSMLYLVTEYAKNGEIFDYLANHGRLNESEARRKFWQILSAVDYCHGRKIVHRDLKAENLLLDNNMNIKIADFGFGNFFKSGELLATWCGSPPYAAPEVFEGQQYEGPQLDIWSMGVVLYVLVCGALPFDGPTLPILRQRVLEGRFRIPYFMSEDCEHLIRRMLVLDPSKRLTIAQIKEHKWMLIEVPVQRPVLYPQEQENEPSIGEFNEQVLRLMHSLGIDQQKTIESLQNKSYNHFAAIYFLLVERLKSHRSSFPVEQRLDGRQRRPSTIAEQTVAKAQTVGLPVTMHSPNMRLLRSALLPQASNVEAFSFPASGCQAEAAFMEEECVDTPKVNGCLLDPVPPVLVRKGCQSLPSNMMETSIDEGLETEGEAEEDPAHAFEAFQSTRSGQRRHTLSEVTNQLVVMPGAGKIFSMNDSPSLDSVDSEYDMGSVQRDLNFLEDNPSLKDIMLANQPSPRMTSPFISLRPTNPAMQALSSQKREVHNRSPVSFREGRRASDTSLTQGIVAFRQHLQNLARTKGILELNKVQLLYEQIGPEADPNLAPAAPQLQDLASSCPQEEVSQQQESVSTLPASVHPQLSPRQSLETQYLQHRLQKPSLLSKAQNTCQLYCKEPPRSLEQQLQEHRLQQKRLFLQKQSQLQAYFNQMQIAESSYPQPSQQLPLPRQETPPPSQQAPPFSLTQPLSPVLEPSSEQMQYSPFLSQYQEMQLQPLPSTSGPRAAPPLPTQLQQQQPPPPPPPPPPRQPGAAPAPLQFSYQTCELPSAASPAPDYPTPCQYPVDGAQQSDLTGPDCPRSPGLQEAPSSYDPLALSELPGLFDCEMLDAVDPQHNGYVLVN

SEQ ID NO: 11365 - protein, 773 aa, Homo sapiens
MNIKIADFGFGNFFKSGELLATWCGSPPYAAPEVFEGQQYEGPQLDIWSMGVVLYVLVCGALPFDGPTLPILRQRVLEGRFRIPYFMSEDCEHLIRRMLVLDPSKRLTIAQIKEHKWMLIEVPVQRPVLYPQEQENEPSIGEFNEQVLRLMHSLGIDQQKTIESLQNKSYNHFAAIYFLLVERLKSHRSSFPVEQRLDGRQRRPSTIAEQTVAKAQTVGLPVTMHSPNMRLLRSALLPQASNVEAFSFPASGCQAEAAFMEEECVDTPKVNGCLLDPVPPVLVRKGCQSLPSNMMETSIDEGLETEGEAEEDPAHAFEAFQSTRSGQRRHTLSEVTNQLVVMPGAGKIFSMNDSPSLDSVDSEYDMGSVQRDLNFLEDNPSLKDIMLANQPSPRMTSPFISLRPTNPAMQALSSQKREVHNRSPVSFREGRRASDTSLTQGIVAFRQHLQNLARTKGILELNKVQLLYEQIGPEADPNLAPAAPQLQDLASSCPQEEVSQQQESVSTLPASVHPQLSPRQSLETQYLQHRLQKPSLLSKAQNTCQLYCKEPPRSLEQQLQEHRLQQKRLFLQKQSQLQAYFNQMQIAESSYPQPSQQLPLPRQETPPPSQQAPPFSLTQPLSPVLEPSSEQMQYSPFLSQYQEMQLQPLPSTSGPRAAPPLPTQLQQQQPPPPPPPPPPRQPGAAPAPLQFSYQTCELPSAASPAPDYPTPCQYPVDGAQQSDLTGPDCPRSPGLQEAPSSYDPLALSELPGLFDCEMLDAVDPQHNGYVLVN

SEQ ID NO: 11366 - protein, 707 aa, Homo sapiens
MLTMGRLQLVVLGLTCCWAVASAAKLGAVYTEGGFVEGVNKKLGLLGDSVDIFKGIPFAAPTKALENPQPHPGWQGTLKAKNFKKRCLQATITQDSTYGDEDCLYLNIWVPQGRKQGTCCTGTGDRLETGPGGASGVTSRSPISVSRDLPVMIWIYGGAFLMGSGHGANFLNNYLYDGEEIATRGNVIVVTFNYRVGPLGFLSTGDANLPGNYGLRDQHMAIAWVKRNIAAFGGDPNNITLFGESAGGASVSLQTLSPYNKGLIRRAISQSGVALSPWVIQKNPLFWAKKVAEKVGCPVGDAARMAQCLKVTDPRALTLAYKVPLAGLEYPMLHYVGFVPVIDGDFIPADPINLYANAADIDYIAGTNNMDGHIFASIDMPAINKGNKKVTEEDFYKLVSEFTITKGLRGAKTTFDVYTESWAQDPSQENKKKTVVDFETDVLFLVPTEIALAQHRANAKSAKTYAYLFSHPSRMPVYPKWVGADHADDIQYVFGKPFATPTGYRPQDRTVSKAMIAYWTNFAKTGDPNMGDSAVPTHWEPYTTENSGYLEITKKMGSSSMKRSLRTNFLRYWTLTYLALPTVTDQEATPVPPTGDSEATPVPPTGDSETAPVPPTGDSGAPPVPPTGDSGAPPVPPTGDSGAPPVPPTGDSGAPPVPPTGDSGAPPVPPTGDSGAPPVPPTGDSGAPPVPPTDDSKEAQMPAVIRF

SEQ ID NO: 11367 - protein, 745 aa, Homo sapiens
MLTMGRLQLVVLGLTCCWAVASAAKLGAVYTEGGFVEGVNKKLGLLGDSVDIFKGIPFAAPTKALENPQPHPGWQGTLKAKNFKKRCLQATITQDSTYGDEDCLYLNIWVPQGRKQVSRDLPVMIWIYGGAFLMGSGHGANFLNNYLYDGEEIATRGNVIVVTFNYRVGPLGFLSTGDANLPGNYGLRDQHMAIAWVKRNIAAFGGDPNNITLFGESAGGASVSLQTLSPYNKGLIRRAISQSGVALSPWVIQKNPLFWAKKVAEKVGCPVGDAARMAQCLKVTDPRALTLAYKVPLAGLEYPMLHYVGFVPVIDGDFIPADPINLYANAADIDYIAGTNNMDGHIFASIDMPAINKGNKKVTEEDFYKLVSEFTITKGLRGAKTTFDVYTESWAQDPSQENKKKTVVDFETDVLFLVPTEIALAQHRANAKSAKTYAYLFSHPSRMPVYPKWVGADHADDIQYVFGKPFATPTGYRPQDRTVSKAMIAYWTNFAKTGDPNMGDSAVPTHWEPYTTENSGYLEITKKMGSSSMKRSLRTNFLRYWTLTYLALPTVTDQEATPVPPTGDSEATPVPPTGDSETAPVPPTGDSGAPPVPPTGDSGAPPVPPTGDSGAPPVPPTGDSGAPPVPPTGDSGAPPVPPTGDSGAPPVPPTGDSGAPPVPPTGDAGPPPVPPTGDSGAPPVPPTGDSGAPPVTPTGDSETAPVPPTGDSGAPPVPPTGDSEAAPVPPTDDSKEAQMPAVIRF

SEQ ID NO: 11368 - protein, 184 aa, Homo sapiens [sequence omitted]

SEQ ID NO: 11369 - protein, 184 aa, Homo sapiens [sequence omitted]

SEQ ID NO: 11370 - protein, 184 aa, Homo sapiens [sequence omitted]

SEQ ID NO: 11371 - protein, 314 aa, Homo sapiens
FRGTIARFRLYPLPSSSRRGLGGPPAPPGARRAPLGVARRHRGGLEPHLPKGKKAKGKKVAPAPAVVKKQEAKKVVNPLFEKRPKNFGIGQDIQPKRDLTRFVKWPRYIRLQRQRAILYKRLKVPPAINQFTQALDRQTATQLLKLAHKYRPETKQEKKQRLLARAEKKAAGKGDVPTKRPPVLRAGVNTVTTLVENKKAQLVVIAHDVDPIELVVFLPALCRKMGVPYCIIKGKARLGRLVHRKTCTTVAFTQVNSEDKGALAKLVEAIRTNYNDRYDEIRRHWGGNVLGPKSVARIAKLEKAKAKELATKLG

SEQ ID NO: 11372 - protein, 310 aa, Homo sapiens
SPGRPRAECVVPGVAGLGVAGLEHRSAGLGALASLGLAGGRSRGLPKGKKAKGKKVAPAPAVVKKQEAKKVVNPLFEKRPKNFGIGQDIQPKRDLTRFVKWPRYIRLQRQRAILYKRLKVPPAINQFTQALDRQTATQLLKLAHKYRPETKQEKKQRLLARAEKKAAGKGDVPTKRPPVLRAGVNTVTTLVENKKAQLVVIAHDVDPIELVVFLPALCRKMGVPYCIIKGKARLGRLVHRKTCTTVAFTQVNSEDKGALAKLVEAIRTNYNDRYDEIRRHWGGNVLGPKSVARIAKLEKAKAKELATKLG

SEQ ID NO: 11373 - protein, 265 aa, Homo sapiens
MPKGKKAKGKKVAPAPAVVKKQEAKKVVNPLFEKRPKNFGIGQDIQPKRDLTRFVKWPRYIRLQRQRAILYKRLKVPPAINQFTQALDRQTGELLKLAHKYRPETKQEKKQRLLARAEKKAAGKGDVPTKRPPVLRAGVNTVTTLVENKKAQLVVIAHDVDPIELVVFLPALCRKMGVPYCIIKGKARLGRLVHRKTCTTVAFTQVNSEDKGALAKLVEAIRTNYNDRYDEIRRHWGGNVLGPKSVARIAKLEKAKAKELATKLG

SEQ ID NO: 11374 - protein, 266 aa, Homo sapiens [sequence omitted]

SEQ ID NO: 11375 - protein, 226 aa, Homo sapiens
MPKGKKAKGKKVAPAPAVVKKQEAKKVVNPLFEKRPKNFGIGQDIQPKRDLTRFVKWPRYIRLQRQRAILYKRLKVPPAINQFTQALDRQTATQLLKLAHKYRPETKQEKKQRLLARAEKKAAGKGDVPTKRPPVLRAGVNTVTTLVENKKAQLVVIAHDVDPIELVVFLPALCRKMGVNSEDKGALAKLVEAIRTNYNDRYDEVRGSFTPKYCHSQIFLPNNWLA

SEQ ID NO: 11376 - protein, 309 aa, Homo sapiens
MATELQCPDSMPCHNQQVNSASTPSPEQLRPGDLILDHAGGNRASRAKVILLTGYAHSSLPAELDSGACGGSSLNSEGNSGSGDSSSYDAPAGNSFLEDCELSRQIGAQLKLLPMNDQIRELQTIIRDKTASRGDFMFSADRLIRLVVEEGLNQLPYKECMVTTPTGYKYEGVKFEKGNCGVSIMRSGEAMEQGLRDCCRSIRIGKILIQSDEETQRAKVYYAKFPPDIYRRKVLLMYPILSTGNTVIEAVKVLIEHGVQPSVIILLSLFSTPHGAKSIIQEFPEITILTTEVHPVAPTHFGQKYFGTD

SEQ ID NO: 11377 - protein, 281 aa, Homo sapiens
MATELQCPDSMPCHNQQVNSASTPSPEQLRPGDLILDHAGGNRASRAKVILLTGYAHSSLPAELDSGACGGSSLNSEGNSGSGDSSSYDAPAGNSFLEDCELSRQIGAQLKLLPMNDQIRELQTIIRDKTASRGDFMFSADRLIRLVVEEGLNQLPYKECMVTTPTGYKYEGVKFEKGNCGVSIMRSGEAMEQGLRDCCRSIRIGKILIQSDEETQRAKVYYAKFPPDIYRRKVLLMYPILSTGNTVIEAVKVLIEHGVQPSVIILLSLFSTPHGEFSMRQ

SEQ ID NO: 11378 - protein, 618 aa, Homo sapiens
MASRGARQRLKGSGASSGDTAPAADKLRELLGSREAGGAEHRTELSGNKAGQVWAPEGSTAFKCLLSARLCAALLSNISDCDETFNYWEPTHYLIYGEGFQTWEYSPAYAIRSYAYLLLHAWPAAFHARILQTNKILVFYFLRCLLAFVSCICELYFYKAVCKKFGLHVSRMMLAFLVLSTGMFCSSSAFLPSSFCMYTTLIAMTGWYMDKTSIAVLGVAAGAILGWPFSAALGLPIAFDLLVMKHRWKSFFHWSLMALILFLVPVVVIDSYYYGKLVIAPLNIVLYNVFTPHGPDLYGTEPWYFYLINGFLNFNVAFALALLVLPLTSLMEYLLQRFHVQNLGHPYWLTLAPMYIWFIIFFIQPHKEERFLFPVYPLICLCGAVALSALQHSFLYFQKCYHFVFQRYRLEHYTVTSNWLALGTVFLFGLLSFSRSVALFRGYHGPLDLYPEFYRIATDPTIHTVPEGRPVNVCVGKEWYRFPSSFLLPDNWQLQFIPSEFRGQLPKPFAEGPLATRIVPTDMNDQNLEEPSRYIDISKCHYLVDLDTMRETPREPKYSSNKEEWISLAYRPFLDASRSSKLLRAFYVPFLSDQYTVYVNYTILKPRKAKQIRKKSGG

SEQ ID NO: 11379 - protein, 622 aa, Homo sapiens
MASRGARQRLKGSGASSGDTAPAADKLRELLGSREAGGAEHRTELSGNKAGQVWAPEGSTAFKCLLSARLCAALLSNISDCDETFNYWEPTHYLIYGEGFQTWEYSPAYAIRSYAYLLLHAWPAAFHARILQTNKILVFYFLRCLLAFVSCICELYFYKAVCKKFGLHVSRMMLAFLVLSTGMFCSSSAFLPSSFCMYTTLIAMTGWYMDKTSIAVLGVAAGAILGWPFSAALGLPIAFDLLVMKHRWKSFFHWSLMALILFLVPVVVIDSYYYGKLVIAPLNIVLYNVFTPHGPDLYGTEPWYFYLINGFLNFNVAFALALLVLPLTSLMEYLLQRFHVQNLGHPYWLTLAPMYIWFIIFFIQPHKEERFLFPVYPLICLCGAVALSALQKCYHFVFQRYRLEHYTVTSNWLALGTVFLFGLLSFSRSVALFRGYHGPLDLYPEFYRIATDPTIHTVPEGRPVNVCVGKEWYRFPSSFLLPDNWQLQFIPSEFRGQLPKPFAEGPLATRIVPTDMNDQNLEEPSRYIDISKCHYLVDLDTMRETPREPKYSSNKEEWISLAYRPFLDASRSSKLLRAFYVPFLSDQYTVYVNYTILKPRKAKQIRKKSGDRRRAEPTYRKN

SEQ ID NO: 11380 - protein, 629 aa, Homo sapiens
MASRGARQRLKGSGASSGDTAPAADKLRELLGSREAGGAEHRTELSGNKAGQVWAPEGSTAFKCLLSARLCAALLSNISDCDETFNYWEPTHYLIYGEGFQTWEYSPAYAIRSYAYLLLHAWPAAFHARILQTNKILVFYFLRCLLAFVSCICELYFYKAVCKKFGLHVSRMMLAFLVLSTGMFCSSSAFLPSSFCMYTTLIAMTGWYMDKTSIAVLGVAAGAILGWPFSAALGLPIAFDLLVMKHRWKSFFHWSLMALILFLVPVVVIDSYYYGKLVIAPLNIVLYNVFTPHGPDLYGTEPWYFYLINGFLNFNVAFALALLVLPLTSLMEYLLQRFHVQNLGHPYWLTLAPMYIWFIIFFIQPHKEERFLFPVYPLICLCGAVALSALQHSFLYFQKCYHFVFQRYRLEHYTVTSNWLALGTVFLFGLLSFSRSVALFRGYHGPLDLYPEFYRIATDPTIHTVPEGRPVNVCVGKEWYRFPSSFLLPDNWQLQFIPSEFRGQLPKPFAEGPLATRIVPTDMNDQNLEEPSRYIDISKCHYLVDLDTMRETPREPKYSSNKEEWISLAYRPFLDASRSSKLLRAFYVPFLSDQYTVYVNYTILKPRKAKQIRKKSGDRRRAEPTYRKN

SEQ ID NO: 11381 - protein, 303 aa, Homo sapiens [sequence omitted]

SEQ ID NO: 11382 - protein, 624 aa, Homo sapiens [sequence omitted]

SEQ ID NO: 11383 - protein, 1073 aa, Homo sapiens
MTDQENNNNISSNPFAALFGSLADAKQFAAIQKEQLKQQSDELPASPDDSDNSVSESLDEFDYSVAEISRSFRSQQEICEQLNINHMIQRIFLITLDNSDPSLKSGNGIPSRCVYLEEMAVELEDQDWLDMSNVEQALFARLLLQDPGNHLINMTSSTTLNLSADRDAGERHIFCYLYSCFQRAKEEITKVPENLLPFAVQCRNLTVSNTRTVLLTPEIYVDQNIHEQLVDLMLEAIQGAREYMNKIYFEDVTEFLEEVIEALILDEEVRTFPEVMIPVFDILLGRIKDLELCQILLYAYLDILLYFTRQKDMAKVFVEYIQPKDPTNGQMYQKTLLGVILSISCLLKTPGVVENHGYFLNPSRSSPQEIKVQEANIHQFMAQFHEKIYQMLKNLLQLSPETKHCILSWLGNCLHANAGRTKIWANQMPEIFFQMYASDAFFLNLGAALLKLCQPFCKPRSSRLLTFNPTYCALKELNDEERKIKNVHMRGLDKETCLIPAVQEPKFPQNYNLVTENLALTEYTLYLGFHRLHDQMVKINQNLHRLQVAWRDAQQSSSPAADNLREQFERLMTIYLSTKTAMTEPQMLQNCLNLQVSMAVLLVQLAIGNEGSQPIELTFPLPDGYSSLAYVPEFFADNLGDFLIFLRRFADDILETSADSLEHVLHFITIFTGSIERMKNPHLRAKLAEVLEAVMPHLDQTPNPLVSSVFHRKRVFCNFQYAPQLAEALIKVFVDIEFTGDPHQFEQKFNYRRPMYPILRYMWGTDTYRESIKDLADYASKNLEAMNPPLFLRFLNLLMNDAIFLLDEAIQYLSKIKIQQIEKDRGEWDSLTPEARREKEAGLQMFGQLARFHNIMSNETIGTLAFLTSEIKSLFVHPFLAERIISMLNYFLQHLVGPKMGALKVKDFSEFDFKPQQLVSDICTIYLNLGDEENFCATVPKDGRSYSPTLFAQTVRVLKKINKPGNMIMAFSNLAERIKSLADLQQQEEETYADACDEFLDPIMSTLMCDPVVLPSSRVTVDRSTIARHLLSDQTDPFNRSPLTMDQIRPNTELKEKIQRWLAERKQQKEQLE

SEQ ID NO: 11384 - protein, 103 aa, Homo sapiens
MAQFVRNLVEKTPALVNAAVTYSKPRLATFWYYAKVELVPPTPAEIPRAIQSLKKIVNSAQTGSFKQLTVKEAVLNGLVATEVLMWFYVGEIIGKRGIIGYDV

SEQ ID NO: 11385 - protein, 1066 aa, Homo sapiens
MTDQENNNNISSNPFAALFGSLADAKQFAAIQKEQLKQQSDELPASPDDSDNSVSESLDEFDYSVAEISRSFRSQQEICEQLNINHMIQRIFLITLDNSDPSLKSGNGIPSRCVYLEEMAVELEDQDWLDMSNVEQALFARLLLQDPGNHLINMTSSTTLNLSADRDAGERHIFCYLYSCFQRAKEEITKVPENLLPFAVQCRNLTVSNTRTVLLTPEIYVDQNIHEQLVDLMLEAIQGAHFEDVTEFLEEVIEALILDEEVRTFPEVMIPVFDILLGRIKDLELCQILLYAYLDILLYFTRQKDMAKVFVEYIQPKDPTNGQMYQKTLLGVILSISCLLKTPGVVENHGYFLNPSRSSPQEIKVQEANIHQFMAQFHEKIYQMLKNLLQLSPETKHCILSWLGNCLHANAGRTKIWANQMPEIFFQMYASDAFFLNLGAALLKLCQPFCKPRSSRLLTFNPTYCALKELNDEERKIKNVHMRGLDKETCLIPAVQEPKFPQNYNLVTENLALTEYTLYLGFHRLHDQMVKINQNLHRLQVAWRDAQQSSSPAADNLREQFERLMTIYLSTKTAMTEPQMLQNCLNLQVSMAVLLVQLAIGNEGSQPIELTFPLPDGYSSLAYVPEFFADNLGDFLIFLRRFADDILETSADSLEHVLHFITIFTGSIERMKNPHLRAKLAEVLEAVMPHLDQTPNPLVSSVFHRKRVFCNFQYAPQLAEALIKVFVDIEFTGDPHQFEQKFNYRRPMYPILRYMWGTDTYRESIKDLADYASKNLEAMNPPLFLRFLNLLMNDAIFLLDEAIQYLSKIKIQQIEKDRGEWDSLTPEARREKEAGLQMFGQLARFHNIMSNETIGTLAFLTSEIKSLFVHPFLAERIISMLNYFLQHLVGPKMGALKVKDFSEFDFKPQQLVSDICTIYLNLGDEENFCATVPKDGRSYSPTLFAQTVRVLKKINKPGNMIMAFSNLAERIKSLADLQQQEEETYADACDEFLDPIMSTLMCDPVVLPSSRVTVDRSTIARHLLSDQTDPFNRSPLTMDQIRPNTELKEKIQRWLAERKQQKEQLE

SEQ ID NO: 11386 - protein, 103 aa, Homo sapiens; identical to SEQ ID NO: 11384

SEQ ID NO: 11387 - protein, 1066 aa, Homo sapiens; identical to SEQ ID NO: 11385

SEQ ID NO: 11388 - protein, 244 aa, Homo sapiens
MTDQENNNNISSNPFAALFGSLADAKQFAAIQKEQLKQQSDELPASPDDSDNSVSESLDEFDYSVAEISRSFRSQQEICEQLNINHMIQRIFLITLDNSDPSLKSGNGIPSRCVYLEEMAVELEDQDWLDMSNVEQALFARLLLQDPGNHLINMTSSTTLNLSADRDAGERHIFCYLYSCFQRAKEEITKVPENLLPFAVQCRNLTVSNTRTVLLTPEIYVDQNIHDTTLSTAILNIHLALCSW

SEQ ID NO: 11389 - protein, 395 aa, Homo sapiens
MTDQENNNNISSNPFAALFGSLADAKQFAAIQKEQLKQQSDELPASPDDSDNSVSESLDEFDYSVAEISRSFRSQQEICEQLNINHMIQRIFLITLDNSDPSLKSGNGIPSRCVYLEEMAVELEDQDWLDMSNVEQALFARLLLQDPGNHLINMTSSTTLNLSADRDAGERHIFCYLYSCFQRAKEEITKVPENLLPFAVQCRNLTVSNTRTVLLTPEIYVDQNIHEQLVDLMLEAIQGAHFEDVTEFLEEVIEALILDEEVRTFPEVMIPVFDILLGRIKDLELCQILLYAYLDILLYFTRQKDMAKVFVEYIQPKDPTNGQMYQKTLLGVILSISCLLKTPGVVENHGYFLNPSRSSPQEIKVQEANIHQVELFTRVSQPPDLKRVFSESRYR

SEQ ID NO: 11390 - protein, 48 aa, Homo sapiens
MSVVRITFQLFSLLKSQKDPIDNIYVCKNVRVLVILNIASPRENRVVF

SEQ ID NO: 11391 - protein, 114 aa, Homo sapiens [sequence omitted]

SEQ ID NO: 11392 - protein, 101 aa, Homo sapiens
MGTRLLPALFLVLLVLGFEVQGTQQPQQDEMPSPTFLTQVKESLSSYWESAKTAAQNLYEKTYLPAVDEKLRDLYSKSTAAMSTYTGIFTDQVLSVLKGEE

SEQ ID NO: 11393 - protein, 101 aa, Homo sapiens; identical to SEQ ID NO: 11392

SEQ ID NO: 11394 - protein, 101 aa, Homo sapiens; identical to SEQ ID NO: 11392

SEQ ID NO: 11395 - protein, 309 aa, Homo sapiens
MDDKAFTKELDQWVEQLNECKQLNENQVRTLCEKAKEILTKESNVQEVRCPVTVCGDVHGQFHDLMELFRIGGKSPDTNYLFMGDYVDRGYYSVETVTLLVALKVRYPERITILRGNHESRQITQVYGFYDECLRKYGNANVWKYFTDLFDYLPLTALVDGQIFCLHGGLSPSIDTLDHIRALDRLQEVPHEGPMCDLLWSDPDDRGGWGISPRGAGYTFGQDISETFNHANGLTLVSRAHQLVMEGYNWCHDRNVVTIFSAPNYCYRCGNQAAIMELDDTLKYSFLQFDPAPRRGEPHVTRRTPDYFL

SEQ ID NO: 11396 - protein, 309 aa, Homo sapiens; identical to SEQ ID NO: 11395

SEQ ID NO: 11397 - protein, 309 aa, Homo sapiens; identical to SEQ ID NO: 11395

SEQ ID NO: 11398 - protein, 128 aa, Homo sapiens
MDDKAFTKELDQWVEQLNECKQLNENQVRTLCEKAKEILTKESNVQEVRCPVTVCGDVHGQFHDLMELFRIGGKSPDTNYLFMGDYVDRGYYSVETVTLLVALKLSRTHYNIERKSRKPTNYPSIWLL

SEQ ID NO: 11399 - protein, 309 aa, Homo sapiens; identical to SEQ ID NO: 11395

SEQ ID NO: 11400 - protein, 69 aa, Homo sapiens
MDVFPELFQEPPVHKVIRKGLLLIQDPLPLYLLGVCYRLGTHNPFIQTQASLIIPLTEVHVVLVDDILK

SEQ ID NO: 11401 - protein, 1149 aa, Homo sapiens [sequence omitted]

SEQ ID NO: 11402 - protein, 388 aa, Homo sapiens
MVHMPEIALVRFLVWDHDPIGRDFIGQRTLAFSSMMPGYRHVYLEGMEEASIFVHVAVSDISGKVKQALGLKGLFLRGPKPGSLDSHAAGRPPARPSVSQRILRRTASAPTKSQKPGRRGFPELVLGTRDTGSKGVADDVVPPGPGPAPEAPAQEGPGSGSPRGKAPAAVAEKSPVRVRPPRVLDGPGPAGMAATCMKCVVGSCAGVNTGGLQRERPPSPGPASRQAAIRQQPRARADSLGAPCCGLDPHAIPGRSREAPKGPGAWRQGPGGSGSMSSDSSSPDSPGIPERSPRWPEGACRQPGALQGEMSALFAQKLEEIRSKSPMFSAGKPLLPCVVLPHAPGMAGPGSPAAASAWTVSPRVLVLVALYPWHCLRGTLLPWLACGP

SEQ ID NO: 11403 - protein, 999 aa, Homo sapiens
MFREADTDDHQGTLGFEEFCAFYKMMSTRRDLYLLMLTYSNHKDHLDAASLQRFLQVEQKMAGVTLESCQDIIEQFEPCPENKSKGLLGIDGFTNYTRSPAGDIFNPEHHHVHQDMTQPLSHYFITSSHNTYLVGDQLMSQSRVDMYAWVLQAGCRCVEVDCWDGPDGEPIVHHGYTLTSKILFKDVIETINKYAFIKNEYPVILSIENHCSVIQQKKMAQYLTDILGDKLDLSSVSSEDATTLPSPQMLKGKILVKGKKLPANISEDAEEGEVSDEDSADEIDDDCKLLNGDASTNRKRVENTAKRKLDSLIKESKIRDCEDPNNFSVSTLSPSGKLGRKSKAEEDVESGEDAGASRRNGRLVVGSFSRRKKKGSKLKKAASVEEGDEGQDSPGGQSRGATRQKKTMKLSRALSDLVKYTKSVATHDIEMEAASSWQVSSFSETKAHQILQQKPAQYLRFNQQQLSRIYPSSYRVDSSNYNPQPFWNAGCQMVALNYQSEGRMLQLNRAKFSANGGCGYVLKPGCMCQGVFNPNSEDPLPGQLKKQLVLRIISGQQLPKPRDSMLGDRGEIIDPFVEVEIIGLPVDCSREQTRVVDDNGFNPTWEETLVFMVHMPEIALVRFLVWDHDPIGRDFIGQRTLAFSSMMPGYRHVYLEGMEEASIFVHVAVSDISGKVKQALGLKGLFLRGPKPGSLDSHAAGRPPARPSVSQRILRRTASAPTKSQKPGRRGFPELVLGTRDTGSKGVADDVVPPGPGPAPEAPAQEGPGSGSPRGKAPAAVAEKSPVRVRPPRVLDGPGPAGMAATCMKCVVGSCAGVNTGGLQRERPPSPGPASRQAAIRQQPRARADSLGAPCCGLDPHAIPGRSREAPKGPGAWRQGPGGSGSMSSDSSSPDSPGIPERSPRWPEGACRQPGALQGEMSALFAQKLEEIRSKSPMFSAGKPLLPCVVLPHAPGMAGPGSPAAASAWTVSPRVLVLVALYPWHCLRGTLLPWLACGP

SEQ ID NO: 11404 - protein, 238 aa, Homo sapiens
MAQQQMTSSQKALMLELKSLQEEPVEGFRITLVDESDLYNWEVAIFGPPNTLYEGGYFKAHIKFPIDYPYSPPTFRFLTKMWHPNIYENGDVCISILHPPVDDPQSGELPSERWNPTQNVRTILLSVISLLNEPNTFSPANVDASVMFRKWRDSKGKDKEYAEIIRKQVSATKAEAEKDGVKVPTTLAEYCIKTKVPSNDNSSDLLYDDLYDDDIDDEDEEEEDADCYDDDDSGNEES

SEQ ID NO: 11405 - protein, 238 aa, Homo sapiens; identical to SEQ ID NO: 11404

SEQ ID NO: 11406 - protein, 238 aa, Homo sapiens; identical to SEQ ID NO: 11404

SEQ ID NO: 11407 - protein, 403 aa, Homo sapiens
MAGAATQASLESAPRIMRLVAECSRSRARAGELWLPHGTVATPVFMPVGTQATMKGITTEQLDALGCRICLGNTYHLGLRPGPELIQKANGLHGFMNWPHNLLTDSGGFQMVSLVSLSEVTEEGVRFRSPYDGNETLLSPEKSVQIQNALGSDIIMQLDDVVSSTVTGPRVEEAMYRSIRWLDRCIAAHQRPDKQNLFAIIQGGLDADLRATCLEEMTKRDVPGFAIGGLSGGESKSQFWRMVALSTSRLPKDKPRYLMGVGYATDLVVCVALGCDMFDCVFPTRTARFGSALVPTGNLQLRKKVFEKDFGPIDPECTCPTCQKHSRAFLHALLHSDNTAALHHLTVHNIAYQLQLMSAVRTSIVEKRFPDFVRDFMGAMYGDPTLCPTWATDALASVGITLG

SEQ ID NO: 11408 - protein, 453 aa, Homo sapiens
MFRRKAEGLDLASCVRSLDVLVLDEADRLLDMGFEASINTILEFLPKQRRTGLFSATQTQEVENLVRAGLRNPVRVSVKEKGVAASSAQKTPSRLENYYMVCKADEKFNQLVHFLRNHKQEKHLVFFSTCACVEYYGKALEVLVKGVKIMCIHGKMKYKRNKIFMEFRKLQSGILVCTDVMARGIDIPEVNWVLQYDPPSNASAFVHRCGRTARIGHGGSALVFLLPMEESYINFLAINQKCPLQEMKPQRNTADLLPKLKSMALADRAVFEKGMKAFVSYVQAYAKHECNLIFRLKDLDFASLARGFALLRMPKMPELRGKQFPDFVPVDVNTDTIPFKDKIREKQRQKLLEQQRREKTENEGRRKFIKNKAWSKQKAKKEKKKKMNEKRKREEGSDIEDEDMEELLNDTRLLKKLKKGKITEEEFEKGLLTTGKRTIKTVDLGISDLEDDC

SEQ ID NO: 11409 - protein, 600 aa, Homo sapiens
MEHVTEGSWESLPVPLHPQVLGALRELGFPYMTPVQSATIPLFMRNKDVAAEAVTGSGKTLAFVIPILEILLRREEKLKKSQVGAIIITPTRELAIQIDEVLSHFTKHFPEFSQILWIGGRNPGEDVERFKQQGGNIIVATPGRLEDMFRRKAEGLDLASCVRSLDVLVLDEADRLLDMGFEASINTILEFLPKQRRTGLFSATQTQEVENLVRAGLRNPVRVSVKEKGVAASSAQKTPSRLENYYMVCKADEKFNQLVHFLRNHKQEKHLVFFSTCACVEYYGKALEVLVKGVKIMCIHGKMKYKRNKIFMEFRKLQSGILVCTDVMARGIDIPEVNWVLQYDPPSNASAFVHRCGRTARIGHGGSALVFLLPMEESYINFLAINQKCPLQEMKPQRNTADLLPKLKSMALADRAVFEKGMKAFVSYVQAYAKHECNLIFRLKDLDFASLARGFALLRMPKMPELRGKQFPDFVPVDVNTDTIPFKDKIREKQRQKLLEQQRREKTENEGRRKFIKNKAWSKQKAKKEKKKKMNEKRKREEGSDIEDEDMEELLNDTRLLKKLKKGKITEEEFEKGLLTTGKRTIKTVDLGISDLEDDC

SEQ ID NO: 11410 - protein, 600 aa, Homo sapiens; identical to SEQ ID NO: 11409

SEQ ID NO: 11411 - protein, 316 aa, Homo sapiens
MASRLLLNNGAKMPILGLGTWKSPPGQVTEAVKVAIDVGYRHIDCAHVYQNENEVGVAIQEKLREQVVKREELFIVSKLWCTYHEKGLVKGACQKTLSDLKLDYLDLYLIHWPTGFKPGKEFFPLDESGNVVPSDTNILDTWAAMEELVDEGLVKAIGISNFNHLQVEMILNKPGLKYKPAVNQIECHPYLTQEKLIQYCQSKGIVVTAYSPLGSPDRPWAKPEDPSLLEDPRIKAIAAKHNKTTAQVLIRFPMQRNLVVIPKSVTPERIAENFKVFDFELSSQDMTTLLSYNRNWRVCALLSCTSHKDYPFHEEF

SEQ ID NO: 11412 - protein, 316 aa, Homo sapiens; identical to SEQ ID NO: 11411

SEQ ID NO: 11413 - protein, 316 aa, Homo sapiens
MATFVELSTKAKMPIVGLGTWKSPLGKVKEAVKVAIDAGYRHIDCAYVYQNEHEVGEAIQEKIQEKAVKREDLFIVSKLWPTFFERPLVRKAFEKTLKDLKLSYLDVYLIHWPQGFKSGDDLFPKDDKGNAIGGKATFLDAWEAMEELVDEGLVKALGVSNFSHFQIEKLLNKPGLKYKPVTNQVECHPYLTQEKLIQYCHSKGITVTAYSPLGSPDRPWAKPEDPSLLEDPKIKEIAAKHKKTAAQVLIRFHIQRNVIVIPKSVTPARIVENIQVFDFKLSDEEMATILSFNRNWRACNVLQSSHLEDYPFNAEY

SEQ ID NO: 11414 - protein, 259 aa, Homo sapiens
MSKYKLIMLRHGEGAWNKENRFCSWVDQKLNSEGMEEARNCGKQLKALNFEFDLVFTSVLNRSIHTAWLILEELGQEWVPVESSWRLNERHYGALIGLNREQMALNHGEEQVRLWRRSYNVTPPPIEESHPYYQEIYNDRRYKVCDVPLDQLPRSESLKDVLERLLPYWNERIAPEVLRGKTILISAHGNSSRALLKHLEGISDEDIINITLPTGVPILLELDENLRAVGPHQFLGDQEAIQAAIKKVEDQGKVKQAKK

SEQ ID NO: 11415 - protein, 259 aa, Homo sapiens; identical to SEQ ID NO: 11414

SEQ ID NO: 11416 - protein, 259 aa, Homo sapiens; identical to SEQ ID NO: 11414

SEQ ID NO: 11417 - protein, 259 aa, Homo sapiens; identical to SEQ ID NO: 11414

SEQ ID NO: 11418 - protein, 237 aa, Homo sapiens
MDKVCAVFGGSRGIGRAVAQLMARKGYRLAVIARNLEGAKAAAGDLGGDHLAFSCDVAKEHDVQNTFEELEKHLGRVNFLVNAAGINRDGLLVRTKTEDMVSQLHTNLLGSMLTCKAAMRTMIQQQGGSIVNVGSIVGLKGNSGQSVYSASKGGLVGFSRALAKEVARKKIRVNVVAPGFVHTDMTKDLKEEHLKKNIPLGRFGETIEVAHAVVFLLESPYITGHVLVVDGGLQLIL

SEQ ID NO: 11419 - protein, 179 aa, Homo sapiens
MDKVCAVFGGSRGIGRAVAQLMARKGYRLAVIARNLEGAKAAAGDLGGDHLAFSCDVAKEHDVQNTFEELEKHLGRVNFLVNAAGINRDGLLVRTKTEDMVSQLHTNLLGSMLTCKAAMRTMIQQQGGSIVNVGSIVGLKGNSGQSVYSASKGGLVGFSRALAKEVARKKIRVNVVAPG

SEQ ID NO: 11420 - protein, 369 aa, Homo sapiens
MPVVTTDAESETGIPKSLSNEPPSETMEEIEHTCPQPRLTLTAPAPFADETNCQCQAPHEKLTIAQARLGTPADRPVRVYADGIFDLFHSGHARALMQAKTLFPNSYLLVGVCSDDLTHKFKGFTVMNEAERYEALRHCRYVDEVIRDAPWTLTPEFLEKHKIDFVAHDDIPYSSAGSDDVYKHIKEAGMFVPTQRTEGISTSDIITRIVRDYDVYARRNLQRGYTAKELNVSFINEKRYRFQNQVDKMKEKVKNVEERSKEFVNRVEEKSHDLIQKWEEKSREFIGNFLELFGPDGAWKQMFQERSSRMLQALSPKQSPVSSPTRSRSPSRSPSPTFSWLPLKTSPPSSPKAASASISSMSEGDEDEK

SEQ ID NO: 11421 - protein, 337 aa, Homo sapiens
MPVVTTDAESETGIPKSLSNEPPSETMEEIEHTCPQPRLTLTAPAPFADETNCQCQAPHEKLTIAQARLGTPADRPVRVYADGIFDLFHSGHARALMQAKTLFPNSYLLVGVCSDDLTHKFKGFTVMNEAERYEALRHCRYVDEVIRDAPWTLTPEFLEKHKIDFVAHDDIPYSSAGSDDVYKHIKEAGMFVPTQRTEGISTSDIITRIVRDYDVYARRNLQRGYTAKELNVSFINEKRYRFQNQVDKMKEKVKNVEERSKEFVNRVEEKSHDLIQKWEEKSREFIGNFLELFGPDGAWRLFPQPATSASIRVLHVASHHPSSARIKLFPIEVAKCF

SEQ ID NO: 11422 - protein, 330 aa, Homo sapiens
MPVVTTDAESETGIPKSLSNEPPSETMEEIEHTCPQPRLTLTAPAPFADETNCQCQAPHEKLTIAQARLGTPADRPVRVYADGIFDLFHSGHARALMQAKTLFPNSYLLVGVCSDDLTHKFKGFTVMNEAERYEALRHCRYVDEVIRDAPWTLTPEFLEKHKIDFVAHDDIPYSSAGSDDVYKHIKEAGMFVPTQRTEGISTSDIITRIVRDYDVYARRNLQRGYTAKELNVSFINEKRYRFQNQVDKMKEKVKNVEERSKEFVNRVEEKSHDLIQKWEEKSREFIGNFLELFGPDGAWKQMFQERSSRMLQALSPKQSPLKSWARCRDF

SEQ ID NO: 11423 - protein, 740 aa, Homo sapiens [sequence omitted]

SEQ ID NO: 11424 - protein, 74 aa, Homo sapiens
MLVLAAMEILAFEPLHTFRGKKREVCELQSNYVKLISIKLHCQLFLSGVNNLFCLFSIGVKHIRKFRYQTRWGL

SEQ ID NO: 11425 - protein, 74 aa, Homo sapiens; identical to SEQ ID NO: 11424

SEQ ID NO: 11426 - protein, 152 aa, Homo sapiens
APDYDRSQWLNEKFKLGLDFPNLPYLIDGAHKITQSNAILCYIARKHNLCGETEEEKIRVDILENQTMDNHMQLGMICYNPEFEKLKPKYLEELPEKLKLYSEFLGKRPWFAGNKITFVDFLVYDVLDLHRIFEPKCLDAFPNLKDFISRFE

SEQ ID NO: 11427 - protein, 439 aa, Homo sapiens
MTNMSWSFLTRLLEEIHNHSTFVGKVWLTVLVVFRIVLTAVGGEAIYSDEQAKFTCNTRQPGCDNVCYDAFAPLSHVRFWVFQIVVISTPSVMYLGYAVHRLARASEQERRRALRRRPGPRRAPRAHLPPPHAGWPEPADLGEEEPMLGLGEEEEEEETGAAEGAGEEAEEAGAEEACTKAVGADGKAAGTPGPTGQHDGRRRIQREGLMRVYVAQLVARAAFEVAFLVGQYLLYGFEVRPFFPCSRQPCPHVVDCFVSRPTEKTVFLLVMYVVSCLCLLLNLCEMAHLGLGSAQDAVRGRRGPPASAPAPAPRPPPCAFPAAAAGLACPPDYSLVVRAAERARAHDQNLANLALQALRDGAAAGDRDRDSSPCVGLPAASRGPPRAGAPASRTGSATSAGTVGEQGRPGTHERPGAKPRAGSEKGSASSRDGKTTVWI

SEQ ID NO: 11428 - protein, 450 aa, Homo sapiens [sequence omitted]

SEQ ID NO: 11429 - protein, 2001 aa, Homo sapiens
MATDDKTSPTLDSANDLPRSPTSPSHLTHFKPLTPDQDEPPFKSAYSSFVNLFRFNKERAEGGQGEQQPLSGSWTSPQLPSRTQSVRSPTPYKKQLNEELQRRSSALGDLRACTYCRKIALSYAHSTDSNSIGEDLNALSDSACSVSVLDPSEPRTPVGSRKASRNIFLEDDLAWQSLIHPDSSNTPLSTRLVSVQEDAGKSPARNRSASITNLSLDRSGSPMVPSYETSVSPQANRTYVRTETTEDERKILLDSVQLKDLWKKICHHSSGMEFQDHRYWLRTHPNCIVGKELVNWLIRNGHIATRAQAIAIGQAMVDGRWLDCVSHHDQLFRDEYALYRPLQSTEFSETPSPDSDSVNSVEGHSEPSWFKDIKFDDSDTEQIAEEGDDNLANSASPSKRTSVSSFQSTVDSDSAASISLNVELDNVNFHIKKPSKYPHVPPHPADQKEYLISDTGGQQLSISDAFIKESLFNRRVEEKSKELPFTPLGWHHNNLELLREENGEKQAMERLLSANHNHMMALLQQLLHSDSLSSSWRDIIVSLVCQVVQTVRPDVKNQDDDMDIRQFVHIKKIPGGKKFDSVVVNGFVCTKNIAHKKMNSCIKNPKILLLKCSIEYLYREETKFTCIDPIVLQEREFLKNYVQRIVDVRPTLVLVEKTVSRIAQDMLLEHGITLVINVKSQVLERISRMTQGDLVMSMDQLLTKPHLGTCHKFYMQIFQLPNEQTKTLMFFEGCPQHLGCTIKLRGGSDYELARVKEILIFMICVAYHSQLEISFLMDEFAMPPTLMQNPSFHSLIEGRGHEGAVQEQYGGGSIPWDPDIPPESLPCDDSSLLESRIVFEKGEQENKNLPQAVASVKHQEHSTTACPAGLPCAFFAPVPESLLPLPVDDQQDALGSELPESLQQTVVLQDPKSQIRAFRDPLQDDTGLYVTEEVTSSEDKRKTYSLAFKQELKDVILCISPVITFREPFLLTEKGMRCSTRDYFAEQVYWSPLLNKEFKEMENRRKKQLLRDLSGLQGMNGSIQAKSIQVLPSHELVSTRIAEHLGDSQSLGRMLADYRARGGRIQPKNSDPFAHSKDASSTSSGKSGSKNEGDEERGLILSDAVWSTKVDCLNPINHQRLCVLFSSSSAQSSNAPSACVSPWIVTMEFYGKNDLTLGIFLERYCFRPSYQCPSMFCDTPMVHHIRRFVHGQGCVQIILKELDSPVPGYQHTILTYSWCRICKQVTPVVALSNESWSMSFAKYLELRFYGHQYTRRANAEPCGHSIHHDYHQYFSYNQMVASFSYSPIRLLEVCVPLPKIFIKRQAPLKVSLLQDLKDFFQKVSQVYVAIDERLASLKTDTFSKTREEKMEDIFAQKEMEEGEFKNWIEKMQARLMSSSVDTPQQLQSVFESLIAKKQSLCEVLQAWNNRLQDLFQQEKGRKRPSVPPSPGRLRQGEESKISAMDASPRNISPGLQNGEKEDRFLTTLSSQSSTSSTHLQLPTPPEVMSEQSVGGPPELDTASSSEDVFDGHLLGSTDSQVKEKSTMKAIFANLLPGNSYNPIPFPFDPDKHYLMYEHERVPIAVCEKEPSSIIAFALSCKEYRNALEELSKATQWNSAEEGLPTNSTSDSRPKSSSPIRLPEMSGGQTNRTTETEPQPTKKASGMLSFFRGTAGKSPDLSSQKRETLRGADSAYYQVGQTGKEGTENQGVEPQDEVDGGDTQKKQLINPHVELQFSDANAKFYCRLYYAGEFHKMREVILDSSEEDFIRSLSHSSPWQARGGKSGAAFYATEDDRFILKQMPRLEVQSFLDFAPHYFNYITNAVQQKRPTALAKILGVYRIGYKNSQNNTEKKLDLLVMENLFYGRKMAQVFDLKGSLRNRNVKTDTGKESCDVVLLDENLLKMVRDNPLYIRSHSKAVLRTSIHSDSHFLSSHLIIDYSLLVGRDDTSNELVVGIIDYIRTFTWDKKLEMVVKSTGILGGQGKMPTVVSPELYRTRFCEAMDKYFLMVPDHWTGLGLNC

SEQ ID NO: 11430 - protein, 1779 aa, Homo sapiens
MVPSYETSVSPQANRTYVRTETTEDERKILLDSVQLKDLWKKICHHSSGMEFQDHRYWLRTHPNCIVGKELVNWLIRNGHIATRAQAIAIGQAMVDGRWLDCVSHHDQLFRDEYALYRPLQSTEFSETPSPDSDSVNSVEGHSEPSWFKDIKFDDSDTEQIAEEGDDNLANSASPSKRTSVSSFQSTVDSDSAASISLNVELDNVNFHIKKPSKYPHVPPHPADQKEYLISDTGGQQLSISDAFIKESLFNRRVEEKSKELPFTPLGWHHNNLELLREENGEKQAMERLLSANHNHMMALLQQLLHSDSLSSSWRDIIVSLVCQVVQTVRPDVKNQDDDMDIRQFVHIKKIPGGKKFDSVVVNGFVCTKNIAHKKMNSCIKNPKILLLKCSIEYLYREETKFTCIDPIVLQEREFLKNYVQRIVDVRPTLVLVEKTVSRIAQDMLLEHGITLVINVKSQVLERISRMTQGDLVMSMDQLLTKPHLGTCHKFYMQIFQLPNEQTKTLMFFEGCPQHLGCTIKLRGGSDYELARVKEILIFMICVAYHSQLEISFLMDEFAMPPTLMQNPSFHSLIEGRGHEGAVQEQYGGGSIPWDPDIPPESLPCDDSSLLESRIVFEKGEQENKNLPQAVASVKHQEHSTTACPAGLPCAFFAPVPESLLPLPVDDQQDALGSELPESLQQTVVLQDPKSQIRAFRDPLQDDTGLYVTEEVTSSEDKRKTYSLAFKQELKDVILCISPVITFREPFLLTEKGMRCSTRDYFAEQVYWSPLLNKEFKEMENRRKKQLLRDLSGLQGMNGSIQAKSIQVLPSHELVSTRIAEHLGDSQSLGRMLADYRARGGRIQPKNSDPFAHSKDASSTSSGKSGSKNEGDEERGLILSDAVWSTKVDCLNPINHQRLCVLFSSSSAQSSNAPSACVSPWIVTMEFYGKNDLTLGIFLERYCFRPSYQCPSMFCDTPMVHHIRRFVHGQGCVQIILKELDSPVPGYQHTILTYSWCRICKQVTPVVALSNESWSMSFAKYLELRFYGHQYTRRANAEPCGHSIHHDYHQYFSYNQMVASFSYSPIRLLEVCVPLPKIFIKRQAPLKVSLLQDLKDFFQKVSQVYVAIDERLASLKTDTFSKTREEKMEDIFAQKEMEEGEFKNWIEKMQARLMSSSVDTPQQLQSVFESLIAKKQSLCEVLQAWNNRLQDLFQQEKGRKRPSVPPSPGRLRQGEESKISAMDASPRNISPGLQNGEKEDRFLTTLSSQSSTSSTHLQLPTPPEVMSEQSVGGPPELDTASSSEDVFDGHLLGSTDSQVKEKSTMKAIFANLLPGNSYNPIPFPFDPDKHYLMYEHERVPIAVCEKEPSSIIAFALSCKEYRNALEELSKATQWNSAEEGLPTNSTSDSRPKSSSPIRLPEMSGGQTNRTTETEPQPTKKASGMLSFFRGTAGKSPDLSSQKRETLRGADSAYYQVGQTGKEGTENQGVEPQDEVDGGDTQKKQLINPHVELQFSDANAKFYCRLYYAGEFHKMREVILDSSEEDFIRSLSHSSPWQARGGKSGAAFYATEDDRFILKQMPRLEVQSFLDFAPHYFNYITNAVQQKRPTALAKILGVYRIGYKNSQNNTEKKLDLLVMENLFYGRKMAQVFDLKGSLRNRNVKTDTGKESCDVVLLDENLLKMVRDNPLYIRSHSKAVLRTSIHSDSHFLSSHLIIDYSLLVGRDDTSNELVVGIIDYIRTFTWDKKLEMVVKSTGILGGQGKMPTVVSPELYRTRFCEAMDKYFLMVPDHWTGLGLNC

SEQ ID NO: 11431 - protein, 215 aa, Homo sapiens
MATDDKTSPTLDSANDLPRSPTSPSHLTHFKPLTPDQDEPPFKSAYSSFVNLFRFNKERAEGGQGEQQPLSGSWTSPQLPSRTQSVRSPTPYKKQLNEELQRRSSALDTRRKAEPTFGGHDPRTAVQLRSLSTVLKRLKEIMEGKSQDSDLKQYWMPDSQCKECYDCSEKFTTFRRRHHCRLCGQIFCSRCCNQEIPGKFMGYTGKCILLPVYNF

SEQ ID NO: 11432 - protein, 451 aa, Homo sapiens
MATDDKTSPTLDSANDLPRSPTSPSHLTHFKPLTPDQDEPPFKSAYSSFVNLFRFNKERAEGGQGEQQPLSGSWTSPQLPSRTQSVRSPTPYKKQLNEELQRRSSALGDLRACTYCRKIALSYAHSTDSNSIGEDLNALSDSACSVSVLDPSEPRTPVGSRKASRNIFLEDDLAWQSLIHPDSSNTPLSTRLVSVQEDAGKSPARNRSASITNLSLDRSGSPMVPSYETSVSPQANRTYVRTETTEDERKILLDSVQLKDLWKKICHHSSGMEFQDHRYWLRTHPNCIVGKELVNWLIRNGHIATRAQAIAIGQAMVDGRWLDCVSHHDQLFRDEYALYRPLQSTEFSETPSPDSDSVNSVEGHSEPSWFKDIKFDDSDTEQIAEEGDDNLANSASPSKRTSVSSFQSTVDSDSAASISLNVELDNVNFHIKKPSKYPHVPPHPADQKGRR

SEQ ID NO: 11433 - protein, 145 aa, Homo sapiens [sequence omitted]

SEQ ID NO: 11434 - protein, 762 aa, Homo sapiens
MKFKTKTLTDTSHPVWNEAFRFLIQSQVKNVLELSIYDEDSVTEDDICFKVLYDISEVLPGKLLRKTFSQSPQGEEELDVEFLMEETSDRPENLITNKVIVARELSCLDVHLDSTGSTAVVADQDKLELELVLKGSYEDTQTSFLGTASAFRFHYMAALETELSGRLRSSRSNGWNGDNSAGYLTVPLRPLTIGKEVTMDVPAPNAPGVRLQLKAEGCPEELAVHLGFNLCAEEQAFLSRRKQVVAKALKQALQLDRDLQEDEVPVVGIMATGGGARAMTSLYGHLLALQKLGLLDCVTYFSGISGSTWTMAHLYGDPEWSQRDLEGPIRYAREHLAKSKLEVFSPERLASYRRELELRAEQGHPTTFVDLWALVLESMLHGQVMDQKLSGQRAALERGQNPLPLYLSLNVKENNLETLDFKEWVEFSPYEVGFLKYGAFVPPELFGSEFFMGRLMRRIPEPRICFLEAIWSNIFSLNLLDAWYDLTSSGESWKQHIKDKTRSLEKEPLTTSGTSSRLEASWLQPGTALAQAFKGFLTGRPLHQRSPNFLQGLQLHQDYCSHKDFSTWADYQLDSMPSQLTPKEPRLCLVDAAYFINTSSPSMFRPGRRLDLILSFDYSLSAPFEALQQTELYCRARGLPFPRVEPSPQDQHQPRECHLFSDPACPEAPILLHFPLVNASFKDHSAPGVQRSPAELQGGQVDLTGATCPYTLSNMTYKEEDFERLLRLSDYNVQTSQGAILQALRTALKHRTLEARPPRAQT

SEQ ID NO: 11435 - protein, 1257 aa, Homo sapiens [sequence omitted]

SEQ ID NO: 11436 - protein, 371 aa, Homo sapiens [sequence omitted]

SEQ ID NO: 11437 - protein, 401 aa, Homo sapiens [sequence omitted]

SEQ ID NO: 11438 - protein, 130 aa, Homo sapiens
MEPSWLQELMAHPFLLLILLCMSLLLFQVIRLYQRRRWTIRAMHLFPAPPAHWFYGHKESYPVKEFEVYPELMEKYPCAVPLWVGPFTMFFNIHDPDYVKILLKRQEKVIQDRKESLKDKLKQDTTQKRR

SEQ ID NO: 11439 - protein, 356 aa, Homo sapiens
MPARALLPRRMGHRTLASTPALWASIPCPRSELRLDLVLPSGQSFRWREQSPAHWSGVLADQVWTLTQTEEQLHCTVYRGDKSQASRPTPDELEAVRKYFQLDVTLAQLYHHWGSVDSHFQEVAQKFQGVRLLRQDPIECLFSFICSSNNNIARITGMVERLCQAFGPRLIQLDDVTYHGFPSLQALAGPEVEAHLRKLGLGYRARYVSASARAILEEQGGLAWLQQLRESSYEEAHKALCILPGVGTKVADCICLMALDKPQAVPVDVHMWHIAQRDYSWHPTTSQAKGPSPQTNKELGNFFRSLWGPYAGWAQALCQVITTFMTFLGPHRLDQMPPEELQTSSSRLGGPPWQCI

SEQ ID NO: 11440 - protein, 354 aa, Homo sapiens
MPARALLPRRMGHRTLASTPALWASIPCPRSELRLDLVLPSGQSFRWREQSPAHWSGVLADQVWTLTQTEEQLHCTVYRGDKSQASRPTPDELEAVRKYFQLDVTLAQLYHHWGSVDSHFQEVAQKFQGVRLLRQDPIECLFSFICSSNNNIARITGMVERLCQAFGPRLIQLDDVTYHGFPSLQALAGPEVEAHLRKLGLGYRARYVSASARAILEEQGGLAWLQQLRESSYEEAHKALCILPGVGTKETFSGACGDLMLAGPKRCCSVPTCANPAMLRSHQQSAERVPKGRKARWGTLDKEIPQAPSPPFPTSLSPSPPSLMLGRGLPVTTSKARHPQIKQSVCTTRWGGGY

SEQ ID NO: 11441 - protein, 410 aa, Homo sapiens
MPARALLPRRMGHRTLASTPALWASIPCPRSELRLDLVLPSGQSFRWREQSPAHWSGVLADQVWTLTQTEEQLHCTVYRGDKSQASRPTPDELEAVRKYFQLDVTLAQLYHHWGSVDSHFQEVAQKFQGVRLLRQDPIECLFSFICSSNNNIARITGMVERLCQAFGPRLIQLDDVTYHGFPSLQALAGPEVEAHLRKLGLGYRARYVSASARAILEEQGGLAWLQQLRESSYEEAHKALCILPGVGTKVADCICLMALDKPQAVPVDVHMWHIAQRDYSWHPTTSQAKGPSPQTNKELGNFFRSLWGPYAGWAQATPPSYRCCSVPTCANPAMLRSHQQSAERVPKGRKARWGTLDKEIPQAPSPPFPTSLSPSPPSLMLGRGLPVTTSKARHPQIKQSVCTTRWGGGY

SEQ ID NO: 11442 - protein, 195 aa, Homo sapiens
MPARALLPRRMGHRTLASTPALWASIPCPRSELRLDLVLPSGQSFRWREQSPAHWSGVLADQVWTLTQTEEQLHCTVYRGDKSQASRPTPDELEAVRKYFQLDVTLAQLYHHWGSVDSHFQEVAQKFQGVRLLRQDPIECLFSFICSSNNNIARITGMVERLCQAFGPRLIQLDDVTYHGFPSLQALAGPPWQCI

SEQ ID NO: 11443 - protein, 357 aa, Homo sapiens
MPARALLPRRMGHRTLASTPALWASIPCPRSELRLDLVLPSGQSFRWREQSPAHWSGVLADQVWTLTQTEEQLHCTVYRGDKSQASRPTPDELEAVRKYFQLDVTLAQLYHHWGSVDSHFQEVAQKFQGVRLLRQDPIECLFSFICSSNNNIARITGMVERLCQAFGPRLIQLDDVTYHGFPSLQALAGPEVEAHLRKLGLGYRARYVSASARAILEEQGGLAWLQQLRESSYEEAHKALCILPGVGTKGLLGNAFDGHQLLRPLIFCQDHLREGPPIGRGDSQGEELEPQLPSSLSSIPYGFCDHCWTKDVDDPPLVTHPSPGSRDGHMTQAWPVKVVSPLATVIGHVMQASLLAL

SEQ ID NO: 11444 - protein, 322 aa, Homo sapiens
MPARALLPRRMGHRTLASTPALWASIPCPRSELRLDLVLPSGQSFRWREQSPAHWSGVLADQVWTLTQTEEQLHCTVYRGDKSQASRPTPDELEAVRKYFQLDVTLAQLYHHWGSVDSHFQEVAQKFQGVRLLRQDPIECLFSFICSSNNNIARITGMVERLCQAFGPRLIQLDDVTYHGFPSLQALAGPEVEAHLRKLGLGYRARYVSASARAILEEQGGLAWLQQLRESSYEEAHKALCILPGVGTKVADCICLMALDKPQAVPVDVHMWHIAQRDYSWHPTTSQAKGPSPQTNKELGNFFRSLWGPYAGWAQAAGSDAS

SEQ ID NO: 11445 - protein, 61 aa, Homo sapiens
DDVTYHGFPSLQALAGNFFRSLWGPYAGWAQAVLFSADLRQSRHAQEPPAKRRKGSKGPEG

SEQ ID NO: 11446 - protein, 345 aa, Homo sapiens
MPARALLPRRMGHRTLASTPALWASIPCPRSELRLDLVLPSGQSFRWREQSPAHWSGVLADQVWTLTQTEEQLHCTVYRGDKSQASRPTPDELEAVRKYFQLDVTLAQLYHHWGSVDSHFQEVAQKFQGVRLLRQDPIECLFSFICSSNNNIARITGMVERLCQAFGPRLIQLDDVTYHGFPSLQALAGPEVEAHLRKLGLGYRARYVSASARAILEEQGGLAWLQQLRESSYEEAHKALCILPGVGTKVADCICLMALDKPQAVPVDVHMWHIAQRDYSWHPTTSQAKGPSPQTNKELGNFFRSLWGPYAGWAQAVLFSADLRQSRHAQEPPAKRRKGSKGPEG

SEQ ID NO: 11447 - protein, 324 aa, Homo sapiens
MPARALLPRRMGHRTLASTPALWASIPCPRSELRLDLVLPSGQSFRWREQSPAHWSGVLADQVWTLTQTEEQLHCTVYRGDKSQASRPTPDELEAVRKYFQLDVTLAQLYHHWGSVDSHFQEVAQKFQGVRLLRQDPIECLFSFICSSNNNIARITGMVERLCQAFGPRLIQLDDVTYHGFPSLQALAGPEVEAHLRKLGLGYRARYVSASARAILEEQGGLAWLQQLRESSYEEAHKALCILPGVGTKVADCICLMALDKPQAVPVDVHMWHIAQRDYSWHPTTSQAKGPSPQTNKELGNFFRSLWGPYAGWAQAVSVPRCPP

SEQ ID NO: 11448 - protein, 424 aa, Homo sapiens
MPARALLPRRMGHRTLASTPALWASIPCPRSELRLDLVLPSGQSFRWREQSPAHWSGVLADQVWTLTQTEEQLHCTVYRGDKSQASRPTPDELEAVRKYFQLDVTLAQLYHHWGSVDSHFQEVAQKFQGVRLLRQDPIECLFSFICSSNNNIARITGMVERLCQAFGPRLIQLDDVTYHGFPSLQALAGPEVEAHLRKLGLGYRARYVSASARAILEEQGGLAWLQQLRESSYEEAHKALCILPGVGTKVADCICLMALDKPQAVPVDVHMWHIAQRDYSWHPTTSQAKGPSPQTNKELGNFFRSLWGPYAGWAQAGLLGNAFDGHQLLRPLIFCQDHLREGPPIGRGDSQGEELEPQLPSSLSSIPYGFCDHCWTKDVDDPPLVTHPSPGSRDGHMTQAWPVKVVSPLATVIGHVMQASLLAL

SEQ ID NO: 11449 - protein, 314 aa, Homo sapiens
MFHGGTNFGFMNGATYFGKHSGIVTSYDYDAVLTEAGDYTEKYLKLQKLFQSVSATPLPRVPKLPPKAVYPPVRPSLYLPLWDALSYLNEPVRSRQPVNMENLPINNGSGQSYGLVLYEKSICSGGRLRAHAHDMAQVFLDETMIGILNENNKDLHIPELRDCRYLRILVENQGRVNFSWQIQNEQKGITGSVSINNSSLEGFTIYSLEMKMSFFERLRSATWKPVPDSHQGPAFYCGTLKAGPSPKDTFLSLLNWNYGFVFINGRNLGRYWNIGPQKTLYLPGVWLHPEDNEVILFEKMMSGSDIKSTDKPTL

SEQ ID NO: 11450 - protein, 324 aa, Homo sapiens
MFPFAEVEHAVSEFIKYEISFNVYMFHGGTNFGFMNGATYFGKHSGIVTSYGKCRWCSSLSSMGATPLPRVPKLPPKAVYPPVRPSLYLPLWDALSYLNEPVRSRQPVNMENLPINNGSGQSYGLVLYEKSICSGGRLRAHAHDMAQVFLDETMIGILNENNKDLHIPELRDCRYLRILVENQGRVNFSWQIQNEQKGITGSVSINNSSLEGFTIYSLEMKMSFFERLRSATWKPVPDSHQGPAFYCGTLKAGPSPKDTFLSLLNWNYGFVFINGRNLGRYWNIGPQKTLYLPGVWLHPEDNEVILFEKMMSGSDIKSTDKPTL

SEQ ID NO: 11451 - protein, 159 aa, Homo sapiens
MDIVPSANMDPYKGARPAPVHLQAPQELLGLLPHVVVQGELLEDLLAEVVVEGPGAGVAGEADVLPRDVAVFLLHPVVQVVVLPGDPAGRGAVQHRQGDSEDGGQGAVHLGRDEGGPPVHLGQGVQCGVLAHLVPQAALGVDSEQVLPGQVSGGQDHTG

SEQ ID NO: 11452 - protein, 68 aa, Homo sapiens
STGGVKKPHRMLQMPLASAPSTGGVKKPHRKPYTVVLHEIRYYEKPIELLIQKLLSSIWCEKFLKTSK

SEQ ID NO: 11453 - protein, 346 aa, Homo sapiens
MVEKEEAGGGISEEEAAQYDRQIRLWGLEAQKRLRASRVLLVGLKGLGAEIAKNLILAGVKGLTMLDHEQVTPEDPGAQFLIRTGSVGRNRAEASLERAQNLNPMVDVKVDTEDIEKKPESFFTQFDAVCLTCCSRDVIVKVDQICHKNSIKFFTGDVFGYHGYTFANLGEHEFVEEKTKVAKVSQGVEDGPDTKRAKLDSSETTMVKKKVVFCPVKEALEVDWSSEKAKAALKRTTSDYFLLQVLLKFRTDKGRDPSSDTYEEDSELLLQIRNDVLDSLGISPDLLPEDFVRYCFSEMAPVCAVVGGILAQEIVKALSQRDPPHNNFFFFDGMKGNGIVECLGPK

SEQ ID NO: 11454 - protein, 346 aa, Homo sapiens; identical to SEQ ID NO: 11453

SEQ ID NO: 11455 - protein, 1170 aa, Homo sapiens
MNMFLYFQTIIKEGMLTKQNNSFQRSKRRYFKLRGRTLYYAKTAKSIIFDEVDLTDASVAESSTKNVNNSFTVITPCRKLILCADNRKEMEDWIAALKTVQNREHFEPTQYSMDHFSGMHNWYACSHARPTYCNVCREALSGVTSHGLSCEVCKFKAHKRCAVRATNNCKWTTLASIGKDIIEDADGIAMPHQWLEGNLPVSAKCTVCDKTCGSVLRLQDWRCLWCKAMVHTSCKESLLTKCPLGLCKVSVIPPTALNSIDSDGFWKASCPPSCTSPLLVFVNSKSGDNQGVKFLRRFKQLLNPAQVFDLMNGGPHLGLRLFQKFDTFRILVCGGDGSVGWVLSEIDSLNLHKQCQLGVLPLGTGNDLARVLGWGSACDDDTQLPQILEKLERASTKMLDRWSVMAYEAKLPRQASSSTVTEDFSEDSEVQQILFYEDSVAAHLSKILTSDQHSVVISSAKVLCETVKDFVARVGKAYEKTTESSEESEVMAKKCSVLKEKLDSLLKTLDDESQASSSLPNPPPTIAEEAEDGDGSGSICGSTGDRLVASACPARPQIFRPREQLMLRANSLKKAIRQIIEHTEKAVDEQNAQTQEQEGFVLGLSESEEKMDHRVCPPLSHSESFGVPKGRSQRKVSKSPCEKLISKGSLSLGSSASLPPQPGSRDGLPALNTKILYPNVRAGMSGSLPGGSVISRLLINADPFNSEPETLEYYTEKCVMNNYFGIGLDAKISLDFNNKRDEHPEKCRSRTKNMMWYGVLGTKELLHRTYKNLEQKVLLECDGRPIPLPSLQGIAVLNIPSYAGGTNFWGGTKEDDTFAAPSFDDKILEVVAVFGSMQMAVSRVIRLQHHRIAQCRTVKISILGDEGVPVQVDGEAWVQPPGYIRIVHKNRAQTLTRDRAFESTLKSWEDKQKCELPRPPSCSLHPEMLSEEEATQMDQFGQAAGVLIHSIREIAQSHRDMEQELAHAVNASSKSMDRVYGKPRTTEGLNCSFVLEMVNNFRALRSETELLLSGKMALQLDPPQKEQLGSALAEMDRQLRRLADTPWLCQSAEPGDEESVMLDLAKRSRSGKFRLVTKFKKEKNNKNKEAHSSLGAPVHLWGTEEVAAWLEHLSLCEYKDIFTRHDIRGSELLHLERRDLKDLGVTKVGHMKRILCGIKELSRSAPAVEA

SEQ ID NO: 11456 - protein, 1170 aa, Homo sapiens; identical to SEQ ID NO: 11455

SEQ ID NO: 11457 - protein, 779 aa, Homo sapiens
MAAAAGAPPPGPPQPPPPPPPEESSDSEPEAEPGSPQKLIRKVSTSGQIRQKTIIKEGMLTKQNNSFQRSKRRYFKLRGRTLYYAKTAKSIIFDEVDLTDASVAESSTKNVNNSFTVITPCRKLILCADNRKEMEDWIAALKTVQNREHFEPTQYSMDHFSGMHNWYACSHARPTYCNVCREALSGVTSHGLSCEVCKFKAHKRCAVRATNNCKWTTLASIGKDIIEDADGIAMPHQWLEGNLPVSAKCTVCDKTCGSVLRLQDWRCLWCKAMVHTSCKESLLTKCPLGLCKVSVIPPTALNSIDSDGFWKASCPPSCTSPLLVFVNSKSGDNQGVKFLRRFKQLLNPAQVFDLMNGGPHLGLRLFQKFDTFRILVCGGDGSVGWVLSEIDSLNLHKQCQLGVLPLGTGNDLARVLGWGSACDDDTQLPQILEKLERASTKMLDRWSVMAYEAKLPRQASSSTVTEDFSEDSEVQQILFYEDSVAAHLSKILTSDQHSVVISSAKVLCETVKDFVARVGKAYEKTTESSEESEVMAKKCSVLKEKLDSLLKTLDDESQASSSLPNPPPTIAEEAEDGDGSGSICGSTGDRLVASACPARPQIFRPREQLMLRANSLKKAIRQIIEHTEKAVDEQNAQTQEQEGFVLGLSESEEKMDHRVCPPLSHSESFGVPKGRSQRKVSKSPCEKLISKGSLSLGSSASLPPQPGSRDGLPALNTKILYPNVRAGMSGSLPGGSVISRLLINADPFNSEPETLVLHGEMCHEQLFWHWPGCEDIPGL

SEQ ID NO: 11458 - protein, 966 aa, Homo sapiens [sequence omitted]

SEQ ID NO: 11459 - protein, 944 aa, Homo sapiens
MAAVAAVAARRRRSWASLVLAFLGVCLGITLAVDRSNFKTCEESSFCKRQRSIRPGLSPYRALLDSLQLGPDSLTVHLIHEVTKVLLVLELQGLQKNMTRFRIDELEPRRPRYRVPDVLVADPPIARLSVSGRDENSVELTMAEGPYKIILTARPFRLDLLEDRSLLLSVNARGLLEFEHQRAPRVSQGSKDPAEGDGAQPEETPRDGDKAKETQGKAEKDEPGAWEETFKTHSDSKPYGPMSVGLDFSLPGMEHVYGIPEHADNLRLKVTEGGEPYRLYNLDVFQYELYNPMALYGSVPVLLAHNPHRDLGIFWLNAAETWVDISSNTAGKTLFGKMMDYLQGSGETPQTDVRWMSETGIIDVFLLLGPSISDVFRQYASLTGTQALPPLFSLGYHQSRWNYRDEADVLEVDQGFDDHNLPCDVIWLDIEHADGKRYFTWDPSRFPQPRTMLERLASKRRKLVAIVDPHIKVDSGYRVHEELRNLGLYVKTRDGSDYEGWCWPGSAGYPDFTNPTMRAWWANMFSYDNYEGSAPNLFVWNDMNEPSVFNGPEVTMLKDAQHYGGWEHRDVHNIYGLYVHMATADGLRQRSGGMERPFVLARAFFAGSQRFGAVWTGDNTAEWDHLKISIPMCLSLGLVGLSFCGADVGGFFKNPEPELLVRWYQMGAYQPFFRAHAHLDTGRREPWLLPSQHNDIIRDALGQRYSLLPFWYTLLYQAHREGIPVMRPLWVQYPQDVTTFNIDDQYLLGDALLVHPVSDSGAHGVQVYLPGQGEVWYDIQSYQKHHGPQTLYLPVTLSSIPVFQRGGTIVPRWMRVRRSSECMKDDPITLFVALSPQGTAQGELFLDDGHTFNYQTRQEFLLRRFSFSGNTLVSSSADPEGHFETPIWIERVVIIGAGKPAAVVLQTKGSPESRLSFQHDPETSVLVLRKPGINVASDWSIHLR

SEQ ID NO: 11460 - protein, 677 aa, Homo sapiens
MTRFRIDELEPRRPRYRVPDVLVADPPIARLSVSGRDENSVELTMAEGPYKIILTARPFRLDLLEDRSLLLSVNARGLLEFEHQRAPRVSQGSKDPAEGDGAQPEETPRDGDKAKETQGKAEKDEPGAWEETFKTHSDSKPYGPMSVGLDFSLPGMEHVYGIPEHADNLRLKVTEGGEPYRLYNLDVFQYELYNPMALYGSVPVLLAHNPHRDLGIFWLNAAETWVDISSNTAGKTLFGKMMDYLQGSGETPQTDVRWMSETGIIDVFLLLGPSISDVFRQYASLTGTQALPPLFSLGYHQSRWNYRDEADVLEVDQGFDDHNLPCDVIWLDIEHADGKRYFTWDPSRFPQPRTMLERLASKRRKLVAIVDPHIKVDSGYRVHEELRNLGLYVKTRDGSDYEGWCWPGSAGYPDFTNPTMRAWWANMFSYDNYEGSAPNLFVWNDMNEPSVFNGPEVTMLKDAQHYGGWEHRDVHNIYGLYVHMATADGLRQRSGGMERPFVLARAFFAGSQRFGAVWTGDNTAEWDHLKISIPMCLSLGLVGLSFCGADVGGFFKNPEPELLVRWYQMGAYQPFFRAHAHLDTGRREPWLLPSQHNDIIRDALGQRYSLLPFWYTLLYQAHREGIPVMRPLWVQYPQDVTTFNIDDQYLLDPCVPAWRDNRASMDASAAVFRMYEG

SEQ ID NO: 11461 - protein, 944 aa, Homo sapiens; identical to SEQ ID NO: 11459

SEQ ID NO: 11462 - protein, 156 aa, Homo sapiens
MRNTGAGGTRTTRQPSGPVTPGGSRRTRYRCGRPSWRRRTPCCGRKLWPCARSCPTTAPCCPDTRPSTGPCEAAPHPHLAELSSALLRLTPCSLPALWPTGRPAGCPRDVIMQINTFIFLRKSEPPPSLAGAGRVLCVCPRHVRDPILPPPPLTRS

SEQ ID NO: 11463 - protein, 325 aa, Homo sapiens
MARPVSDRTPAPLLLGGPAGTPPGGGALLGLRSLLQGTSKPKEPASCLLKEKERKAALPAATTPGPGLETAGPADAPAGAVVGGGSPRGRPGPVPAPGLLAPLLWERTLPFGDVEYVDLDAFLLEHGLPPSPPPPGGPSPEPSPARTPAPSPGPGSCGSASPRSSPGHAPARAALGTASGHRAGLTSRDTPSPVDPDTVEVLMTFEPDPADLALSSIPGHETFDPRRHRFSEEELKPQPIMKKARKIQVPEEQKDEKYWSRRYKNNEAAKRSRDARRLKENQISVRAAFLEKENALLRQEVVAVRQELSHYRAVLSRYQAQHGAL

SEQ ID NO: 11464 - protein, 182 aa, Homo sapiens
MPRLGQWWAEGPRGGARGRCPPRVCWRHCCGSARCRSAMWSLTSRDTPSPVDPDTVEVLMTFEPDPADLALSSIPGHETFDPRRHRFSEEELKPQPIMKKARKIQVPEEQKDEKYWSRRYKNNEAAKRSRDARRLKENQISVRAAFLEKENALLRQEVVAVRQELSHYRAVLSRYQAQHGAL

SEQ ID NO: 11465 - protein, 156 aa, Homo sapiens; identical to SEQ ID NO: 11462

SEQ ID NO: 11466 - protein, 133 aa, Homo sapiens
MTACPRPAGAMHKTGRPHLCRELVSEGVDSCFLPQEKLKPEYLQALPEMLKLYSQFLGKQPWFLGDKITFVDFIAYDVLERNQVFEPSCLDAFPNLKDFISRFEGLEKISAYMKSSRFLPRPVFTKMAVWGNK

SEQ ID NO: 11467 - protein, 218 aa, Homo sapiens
MPMTLGYWNIRGLAHSIRLLLEYTDSSYEEKKYTMGDAPDYDRSQWLNEKFKLGLDFPNLPYLIDGTHKITQSNAILRYIARKHNLCGESEKEQIREDILENQFMDSRMQLAKLCYDPDFEKLKPEYLQALPEMLKLYSQFLGKQPWFLGDKITFVDFIAYDVLERNQVFEPSCLDAFPNLKDFISRFEGLEKISAYMKSSRFLPRPVFTKMAVWGNK

SEQ ID NO: 11468 - protein, 220 aa, Homo sapiens
MPMTLGYWNIRGLAHSIRLLLEYTDSSYEEKKYTMGDAPDYDRSQWLNEKFKLGLDFPNLPYLIDGTHKITQSNAILRYIARKHNLCGESEKEQIREDILENQFMDSRMQLAKLCYDPDFEKLKPEYLQALPEMLKLYSQFLGKQPWFLGDKITFVDFIAYDVLERNQVFEPSCLDAFPNLKDFISRFEEKCNVGWSSRRNLDTVCRTSQRILCQNRENE

SEQ ID NO: 11469 - protein, 516 aa, Homo sapiens
MTDGCLLKHILGDPSLTKFRVIILDEAHERTLTTDILFGLLKKLFQEKSPNRKEHLKVVVMSATMELAKLSAFFGNCPIFDIPGRLYPVREKFCNLIGPRDRENTAYIQAIVKVTMDIHLNEMAGDILVFLTGQFEIEKSCELLFQMAESVDYDYDVQDTILDGLLILPCYGSMTTDQQRRIFLPPPPGIRKCVISTNISATSLTIDGIRYVVDGGFVKQLNHNPRLGLDILEVVPISKSEALQRSGRAGRTSSGKCFRIYSKDFWNQCMPDHVIPEIKRTSLTSVVLTLKCLAIHDVIRFPYLDPPNERLILEALKQLYQCDAIDRSGHVTRLGLSMVEFPLPPHLTCAVIKAASLDCEDLLLPIAAMLSVENVFIRPVDPEYQKEAEQRHRELAAKAGGFNDFATLAVIFEQCKSSGAPASWCQKHWIHWRCLFSAFRVEAQLRELIRKLKQWLPEVPGPQRQGAGSAADVQQILLCRDHSPCFLQEPQSHRGKSCPTGHQSHQPQCQAAQQRK

SEQ ID NO: 11470 - protein, 367 aa, Homo sapiens
TRLTFKMVHAEAFSRPLSRNEVVGLIFRLTIFGAVTYFTIKWMVDAIDPTRKQKVEAQKQAEKLMKQIGVKNVKLSEYEMSIAAHLVDPLNMHVTWSDIAGLDDVITDLKDTVILPIKKKHLFENSRLLQPPKGVLLYGPPGCGKTLIAKATAKEAGCRFINLQPSTLTDKWYGESQKLAAAVFSLAIKLQPSIIFIDEIDSFLRNRSSSDHEATAMMKAQFMSLWDGLDTDHSCQVIVMGATNRPQDLDSAIMRRMPTRFHINQPALKQREAILKLILKNENVDRHVDLLEVAQETDGFSGSDLKEMCRDAALLCVREYVNSTSEESHDEDEIRPVQQQDLHRAIEKMKKSKDAAFQNVLTHVCLD

SEQ ID NO: 11471 - protein, 740 aa, Homo sapiens
EEAARLSCAVHTSPGGGRRPGQAAGMSAKERPKGKVIKDSVTLLPCFYFVELPILASSVVSLYFLELTDVFKPVHSGFSCYDRSLSMPYIEPTQEAIPFLMLLSLAFAGPAITIMVGEGILYCCLSKRRNGVGLEPNINAGGCNFNSFLRRAVRFVGVHVFGLCSTALITDIIQLSTGYQAPYFLTVCKPNYTSLNVSCKENSYIVEDICSGSDLTVINSGRKSFPSQHATLAAFAAVYVSMYFNSTLTDSSKLLKPLLVFTFIICGIICGLTRITQYKNHPVDVYCGFLIGGGIALYLGLYAVGNFLPSDESMFQHRDALRSLTDLNQDPNRLLSAKNGSSSDGIAHTEGILNRNHRDASSLTNLKRANADVEIITPRSPMGKENMVTFSNTLPRANTPSVEDPVRRNASIHASMDSARSKQLLTQWKNKNESRKLSLQVIEPEPGQSPPRSIEMRSSSEPSRVGVNGDHHGPGNQYLKIQPGAVPGCNNSMPGGPRVSIQSRPGSSQLVHIPEETQENISTSPKSSSARAKWLKAAEKTVACNRSNSQPRIMQVIAMSKQQGVLQSSPKNTEGSTVSCTGSIRYKTLTDHEPSGIVRVEAHPENNRPIIQIPSTEGEGSGSWKWKAPEKGSLRQTYELNDLNRDSESCESLKDSFGSGDRKRSNIDSNEHHHHGITTIRVTPVEGSEIGSETLSISSSRDSTLRRKGNIILIPERSNSPENTRNIFYKGTSPTRAYKD

SEQ ID NO: 11472 - protein, 620 aa, Homo sapiens
AVEVSLDLERRVTLEPIMSHPDYRMNLRPLGTPRGVSAVAGPHDIGASPGDKKSKNRSTRGKKKSIFETYMSKEDVSEGLKRGTLIQGVLRINPKKFHEAFIPSPDGDRDIFIDGVVARNRALNGDLVVVKLLPEEHWKVVKPESNDKETEAAYESDIPEELCGHHLPQQSLKSYNDSPDVIVEAQFDGSDSEDGHGITQNVLVDGVKKLSVCVSEKGREDGDAPVTKDETTCISQDTRALSEKSLQRSAKVVYILEKKHSRAATGFLKLLADKNSELFRKYALFSPSDHRVPRIYVPLKDCPQDFVARPKDYANTLFICRIVDWKEDCNFALGQLAKSLGQAGEIEPETEGILTEYGVDFSDFSSEVLECLPQGLPWTIPPEEFSKRRDLRKDCIFTIDPSTARDLDDALSCKPLADGNFKVGVHIADVSYFVPEGSDLDKVAAERATSVYLVQKVVPMLPRLLCEELCSLNPMSDKLTFSVIWTLTPEGKILDEWFGRTIIRSCTKLSYEHAQSMIESPTEKIPAKELPPISPEHSSEEVHQQNADKDGAAHLQASHSPSAEDAEAQPSTEERLPETRGICDRDPDTRLFFLQQQSRVLEAKPQNTIRVEEQTTQLQI

SEQ ID NO: 11473 - protein, 496 aa, Homo sapiens
MSVKEMAKGITYDDPIKTSWTPPRYVLSMSEERHERVRKKYHILVEGDGIPPPIKSFKEMKFPAAILRGLKKKGIHHPTPIQIQGIPTILSGRDMIGIAFTGSGKTLVFTLPVIMFCLEQEKRLPFSKREGPYGLIICPSRELARQTHGILEYYCRLLQEDSSPLLRCALCIGGMSVKEQMETIRHGVHMMVATPGRLMDLLQKKMVSLDICRYLALDEADRMIDMGFEGDIRTIFSYFKGQRQTLLFSATMPKKIQNFAKSALVKPVTINVGRAGAASLDVIQEVEYVKEEAKMVYLLECLQKTPPPVLIFAEKKADVDAIHEYLLLKGVEAVAIHGGKDQEERTKAIEAFREGKKDVLVATDVASKGLDFPAIQHVINYDMPEEIENYVHRIGRTGRSGNTGIATTFINKACDESVLMDLKALLLEAKQKVPPVLQVLHCGDESMLDIGGERGCAFCGGLGHRITDCPKLEAMQTKQVSNIGRKDYLAHSSMDF

SEQ ID NO: 11474 - protein, 274 aa, Homo sapiens
MPLSPALCALGRSPPLPQGQRQTLLFSATMPKKIQNFAKSALVKPVTINVGRAGAASLDVIQEVEYVKEEAKMVYLLECLQKTPPPVLIFAEKKADVDAIHEYLLLKGVEAVAIHGGKDQEERTKAIEAFREGKKDVLVATDVASKGLDFPAIQHVINYDMPEEIENYVHRIGRTGRSGNTGIATTFINKACDESVLMDLKALLLEAKQKVPPVLQVLHCGDESMLDIGGERGCAFCGGLGHRITDCPKLEAMQTKQVSNIGRKDYLAHSSMDF

SEQ ID NO: 11475 - protein, 496 aa, Homo sapiens; identical to SEQ ID NO: 11473

SEQ ID NO: 11476 - protein, 622 aa, Homo sapiens
MEESEPERKRARTDEVPAGGSRSEAEDEDDEDYVPYVPLRQRRQLLLQKLLQRRRKGAAEEEQQDSGSEPRGDEDDIPLGPQSNVSLLDQHQHLKEKAEARKESAKEKQLKEEEKILESVAEGRALMSVKEMAKGITYDDPIKTSWTPPRYVLSMSEERHERVRKKYHILVEGDGIPPPIKSFKEMKFPAAILRGLKKKGIHHPTPIQIQGIPTILSGRDMIGIAFTGSGKTLVFTLPVIMFCLEQEKRLPFSKREGPYGLIICPSRELARQTHGILEYYCRLLQEDSSPLLRCALCIGGMSVKEQMETIRHGVHMMVATPGRLMDLLQKKMVSLDICRYLALDEADRMIDMGFEGDIRTIFSYFKGQRQTLLFSATMPKKIQNFAKSALVKPVTINVGRAGAASLDVIQEVEYVKEEAKMVYLLECLQKTPPPVLIFAEKKADVDAIHEYLLLKGVEAVAIHGGKDQEERTKAIEAFREGKKDVLVATDVASKGLDFPAIQHVINYDMPEEIENYVHRIGRTGRSGNTGIATTFINKACDESVLMDLKALLLEAKQKVPPVLQVLHCGDESMLDIGGERGCAFCGGLGHRITDCPKLEAMQTKQVSNIGRKDYLAHSSMDF

SEQ ID NO: 11477 - protein, 347 aa, Homo sapiens
MEESEPERKRARTDEVPAGGSRSEAEDEDDEDYVPYVPLRQRRQLLLQKLLQRRRKGAAEEEQQDSGSEPRGDEDDIPLGPQSNVSLLDQHQHLKEKAEARKESAKEKQLKEEEKILESVAEGRALMSVKEMAKGITYDDPIKTSWTPPRYVLSMSEERHERVRKKYHILVEGDGIPPPIKSFKEMKFPAAILRGLKKKGIHHPTPIQIQGIPTILSGRDMIGIAFTGSGKTLVFTLPVIMFCLEQEKRLPFSKREGPYGLIICPSRELARQTHGILEYYCRLLQEDSSPLLRCALCIGGMSVKEQMETIRHAVQSSADHQRPWTRPSVHRWARPHPGGLPPRTSEY

SEQ ID NO: 11478 - protein, 127 aa, Homo sapiens [sequence omitted]

SEQ ID NO: 11479 - protein, 500 aa, Homo sapiens [sequence omitted]

SEQ ID NO: 11480 - protein, 158 aa, Homo sapiens
MAQPPPDVEGDDCLPAYRHLFCPDLLRDKVAFITGGGSGIGFRIAEIFMRHGCHTVIASRSLPRVLTAVLPQSGVQQQTQGPRGTRKHRPLQIPKAFSPGRGCRAAVCLFTWLLGRQEAGWGHRPALPPSLYGRPSAPSCHGRRGPGSEGVWQNRHSH

SEQ ID NO: 11481 - protein, 81 aa, Homo sapiens
MAQPPPDVEGDDCLPAYRHLFCPDLLRDKVAFITGGGSGIGFRIAEIFMRHGCHTVIASRSLPRVLTRWVFTTLTRLVSNS

SEQ ID NO: 11482 - protein, 292 aa, Homo sapiens
MAQPPPDVEGDDCLPAYRHLFCPDLLRDKVAFITGGGSGIGFRIAEIFMRHGCHTVIASRSLPRVLTAARKLAGATGRRCLPLSMDVRAPPAVMAAVDQALKEFGRIDILINCAAGNFLCPAGALSFNAFKTVMDIDTSGTFNVSRVLYEKFFRDHGGVIVNITATLGNRGQALQVHAGSAKAAVDAMTRHLAVEWGPQNIRVNSLAPGPISGTEGLRRLGGPQASLSTKVTASPLQRLGNKTEIAHSVLYLASPLASYVTGAVLVADGGAWLTFPNGVKGLPDFASFSAKL

SEQ ID NO: 11483 - protein, 299 aa, Homo sapiens
MGGPRALLAALWALEAAGTAALRIGAFNIQSFGDSKVSDPACGSIIAKILAGYDLALVQEVRDPDLSAVSALMEQINSVSEHEYSFVSSQPLGRDQYKEMYLFVYRKDAVSVVDTYLYPDPEDVFSREPFVVKFSAPGTGERAPPLPSRRALTPPPLPAAAQNLVLIPLHAAPHQAVAEIDALYDVYLDVIDKWGTDDMLFLGDFNADCSYVRAQDWAAIRLRSSEVFKWLIPDSADTTVGNSDCAYDRIVACGARLRRSLKPQSATVHDFQEEFGLDQTQALAISDHFPVEVTLKFHR

SEQ ID NO: 11484 - protein, 299 aa, Homo sapiens; identical to SEQ ID NO: 11483

SEQ ID NO: 11485 - protein, 299 aa, Homo sapiens; identical to SEQ ID NO: 11483

SEQ ID NO: 11486 - protein, 871 aa, Homo sapiens
MIKKFDKKDEESGSGSNPFQHLEKSAVLQEARIFNETPINPRRCLHILTKILYLLNQGEHFGTTEATEAFFAMTRLFQSNDQTLRRMCYLTIKEMATISEDVIIVTSSLTKDMTGKEDVYRGPAIRALCRITDGTMLQAIERYMKQAIVDKVSSVSSSALVSSLHMMKISYDVVKRWINEAQEAASSDNIMVQYHALGVLYHLRKNDRLAVSKMLNKFTKSGLKSQFAYCMLIRIASRLLKETEDGHESPLFDFIESCLRNKHEMVIYEAASAIIHLPNCTARELAPAVSVLQLFCSSPKPALRYAAVRTLNKVAMKHPSAVTACNLDLENLITDSNRSIATLAITTLLKTGSESSVDRLMKQISSFVSEISDEFKVVVVQAISALCQKYPRKHSVMMTFLSNMLRDDGGFEYKRAIVDCIISIVEENPESKEAGLAHLCEFIEDCEHTVLATKILHLLGKEGPRTPVPSKYIRFIFNRVVLENEAVRAAAVSALAKFGAQNESLLPSILVLLQRCMMDTDDEVRDRATFYLNVLQQRQMALNATYIFNGLTVSVPGMEKALHQYTLEPSEKPFDMKSIPLAMAPVFEQKAEITLVATKPEKLAPSRQDIFQEQLAAIPEFLNIGPLFKSSEPVQLTEAETEYFVRCIKHMFTNHIVFQFDCTNTLNDQLLEKVTVQMEPSDSYEVLSCIPAPSLPYNQPGICYTLVRLPDDDPTAVAGSFSCTMKFTVRDCDPNTGVPDEDGYDDEYVLEDLEVTVSDHIQKVLKPNFAAAWEEVGDTFEKEETFALSSTKTLEEAVNNIITFLGMQPCERSDKVPENKNSHSLYLAGIFRGGYDLLVRSRLALADGVTMQVTVRSKERTPVDVILASVG

SEQ ID NO: 11487 - protein, 392 aa, Homo sapiens
SPGMGMDAGPPAAPLDPFPLGSRAPRFRSSRPGSVAGSAGPLAADYPVSDEETEAQRGHMACSRPPSQCEPTSLPPGPPAGRRHLPLSRRRREMSSNKEQRSAVFVILFALITILILYSSNSANEVFHYGSLRGRSRRPVNLKKWSITDGYVPILGNKTLPSRCHQCVIVSSSSHLLGTKLGPEIERAECTIRMNDAPTTGYSADVGNKTTYRVVAHSSVFRVLRRPQEFVNRTPETVFIFWGPPSKMQKPQGSLVRVIQRAGLVFPNMEAYAVSPGRMRQFDDLFRGETGKDREKSHSWLSTGWFTMVIAVELCDHVHVYGMVPPNYCSQRPRLQRMPYHYYEPKGPDECVTYIQNEHSRKGNHHRFITEKRVFSSWAQLYGITFSHPSWT

SEQ ID NO: 11488 - protein, 333 aa, Homo sapiens
MACSRPPSQCEPTSLPPGPPAGRRHLPLSRRRREMSSNKEQRSAVFVILFALITILILYSSNSANEVFHYGSLRGRSRRPVNLKKWSITDGYVPILGNKTLPSRCHQCVIVSSSSHLLGTKLGPEIERAECTIRMNDAPTTGYSADVGNKTTYRVVAHSSVFRVLRRPQEFVNRTPETVFIFWGPPSKMQKPQGSLVRVIQRAGLVFPNMEAYAVSPGRMRQFDDLFRGETGKDREKSHSWLSTGWFTMVIAVELCDHVHVYGMVPPNYCSQRPRLQRMPYHYYEPKGPDECVTYIQNEHSRKGNHHRFITEKRVFSSWAQLYGITFSHPSWT

SEQ ID NO: 11489 - protein, 299 aa, Homo sapiens
MSSNKEQRSAVFVILFALITILILYSSNSANEVFHYGSLRGRSRRPVNLKKWSITDGYVPILGNKTLPSRCHQCVIVSSSSHLLGTKLGPEIERAECTIRMNDAPTTGYSADVGNKTTYRVVAHSSVFRVLRRPQEFVNRTPETVFIFWGPPSKMQKPQGSLVRVIQRAGLVFPNMEAYAVSPGRMRQFDDLFRGETGKDREKSHSWLSTGWFTMVIAVELCDHVHVYGMVPPNYCSQRPRLQRMPYHYYEPKGPDECVTYIQNEHSRKGNHHRFITEKRVFSSWAQLYGITFSHPSWT

SEQ ID NO: 11490 - protein, 299 aa, Homo sapiens; identical to SEQ ID NO: 11489

SEQ ID NO: 11491 - protein, 194 aa, Homo sapiens
MEEKLKKTKIIFVVGGPGSGKGTQCEKIVQKYGYTHLSTGDLLRSEVSSGSARGKKLSEIMEKGQLVPLETVLDMLRDAMVAKVNTSKGFLIDGYPREVQQGEEFERRIGQPTLLLYVDAGPETMTQRLLKRGETSGRVDDNEETIKKRLETYYKATEPVIAFYEKRGIVRKVNAEGSVDSVFSQVCTHLDALK

SEQ ID NO: 11492 - protein, 194 aa, Homo sapiens; identical to SEQ ID NO: 11491

SEQ ID NO: 11493 - protein, 249 aa, Homo sapiens
MATYVVVAKPPLPGEAGDGPAQGLRGEGQGAQETRQDGTMGCCSSSDPRREDDLRAREKLKKTKIIFVVGGPGSGKGTQCEKIVQKYGYTHLSTGDLLRSEVSSGSARGKKLSEIMEKGQLVPLETVLDMLRDAMVAKVNTSKGFLIDGYPREVQQGEEFERRIGQPTLLLYVDAGPETMTQRLLKRGETSGRVDDNEETIKKRLETYYKATEPVIAFYEKRGIVRKVNAEGSVDSVFSQVCTHLDALK

SEQ ID NO: 11494 - protein, 455 aa, Homo sapiens
MWLEILLTSVLGFAIYWFISRDKEETLPLEDGWWGPGTRSAAREDDSIRPFKVETSDEEIHDLHQRIDKFRFTPPLEDSCFHYGFNSNYLKKVISYWRNEFDWKKQVEILNRYPHFKTKIEGLDIHFIHVKPPQLPAGHTPKPLLMVHGWPGSFYEFYKIIPLLTDPKNHGLSDEHVFEVICPSIPGYGFSEASSKKGFNSVATARIFYKLMLRLGFQEFYIQGGDWGSLICTNMAQLVPSHVKGLHLNMALVLSNFSTLTLLLGQRFGRFLGLTERDVELLYPVKEKVFYSLMRESGYMHIQCTKPDTVGSALNDSPVGLAAYILEKFSTWTNTEFRYLEDGGLERKFSLDDLLTNVMLYWTTGTIISSQRFYKENLGQGWMTQKHERMKVYVPTGFSAFPFELLHTPEKWVRFKYPKLISYSYMVRGGHFAAFEEPELLAQDIRKFLSVLERQ

SEQ ID NO: 11495 - protein, 455 aa, Homo sapiens; identical to SEQ ID NO: 11494

SEQ ID NO: 11496 - protein, 455 aa, Homo sapiens; identical to SEQ ID NO: 11494

SEQ ID NO: 11497 - protein, 455 aa, Homo sapiens; identical to SEQ ID NO: 11494

SEQ ID NO: 11498 - protein, 656 aa, Homo sapiens
MADNLPTEFDVVIIGTGLPESILAAACSRSGQRVLHIDSRSYYGGNWASFSFSGLLSWLKEYQQNNDIGEESTVVWQDLIHETEEAITLRKKDETIQHTEAFCYASQDMEDNVEEIGALQKNPSLGVSNTFTEVLDSALPEESQLSYFNSDEMPAKHTQKSDTEISLEVTDVEESVEKEKYCGDKTCMHTVSDKDGDKDESKSTVEDKADEPIRNRITYSQIVKEGRRFNIDLVSKLLYSQGLLIDLLIKSDVSRYVEFKNVTRILAFREGKVEQVPCSRADVFNSKELTMVEKRMLMKFLTFCLEYEQHPDEYQAFRQCSFSEYLKTKKLTPNLQHFVLHSIAMTSESSCTTIDGLNATKNFLQCLGRFGNTPFLFPLYGQGEIPQGFCRMCAVFGGIYCLRHKVQCFVVDKESGRCKAIIDHFGQRINAKYFIVEDSYLSEETCSNVQYKQISRAVLITDQSILKTDLDQQTSILIVPPAEPGACAVRVTELCSSTMTCMKDTYLVHLTCSSSKTAREDLESVVKKLFTPYTETEINEEELTKPRLLWALYFNMRDSSGISRSSYNGLPSNVYVCSGPDCGLGNEHAVKQAETLFQEIFPTEEFCPPPPNPEDIIFDGDDKQPEAPGTNNVVMAKLESSEESKNLESPEKHLQN

SEQ ID NO: 11499 - protein, 773 aa, Homo sapiens
MAEAHQAVAFQFTVTPDGIDLRLSHEALRQIYLSGLHSWKKKFIRFKNGIITGVYPASPSSWLIVVVGVMTTMYAKIDPSLGIIAKINRTLETANCMSSQTKNVVSGVLFGTGLWVALIVTMRYSLKVLLSYHGWMFTEHGKMSRATKIWMGMVKIFSGRKPMLYSFQTSLPRLPVPAVKDTVNRYLQSVRPLMKEEDFKRMTALAQDFAVGLGPRLQWYLKLKSWWATNYVSDWWEEYIYLRGRGPLMVNSNYYAMDLLYILPTHIQAARAGNAIHAILLYRRKLDREEIKPIRLLGSTIPLCSAQWERMFNTSRIPGEETDTIQHMRDSKHIVVYHRGRYFKVWLYHDGRLLKPREMEQQMQRILDNTSEPQPGEARLAALTAGDRVPWARCRQAYFGRGKNKQSLDAVEKAAFFVTLDETEEGYRSEDPDTSMDSYAKSLLHGRCYDRWFDKSFTFVVFKNGKMGLNAEHSWADAPIVAHLWEYVMSIDSLQLGYAEDGHCKGDINPNIPYPTRLQWDIPGECQEVIETSLNTANLLANDVDFHSFPFVAFGKGIIKKCRTSPDAFVQLALQLAHYKDMGKFCLTYEASMTRLFREGRTETVRSCTTESCDFVRAMVDPAQTVEQRLKLFKLASEKHQHMYRLAMTGSGIDRHLFCLYVVSKYLAVESPFLKEVLSEPWRLSTSQTPQQQVELFDLENNPEYVSSGGGFGPVADDGYGVSYILVGENLINFHISSKFSCPETDSHRFGRHLKEAMTDIITLFGLSSNSKK

SEQ ID NO: 11500 - protein, 773 aa, Homo sapiens; identical to SEQ ID NO: 11499

SEQ ID NO: 11501 - protein, 422 aa, Homo sapiens
MHGREAGPFVCVCVLLASIPTPQTPLLQASLPPFHPASAGHPITGQQDAFRAFHPDLEFVGKFLKPLLIGELAPEEPSQDHGKNSKITEDFRALRKTAEDMNLFKTNHVFFLLLLAHIIALESIAWFTVFYFGNGWIPTLITAFVLATSQAQAGWLQHDYGHLSVYRKPKWNHLVHKFVIGHLKGASANWWNHRHFQHHAKPNIFHKDPDVNMLHVFVLGEWQPIEYGKKKLKYLPYNHQHEYFFLIGPPLLIPMYFQYQIIMTMIVHKNWVDLAWAVSYYIRFFITYIPFYGILGALLFLNFIRFLESHWFVWVTQMNHIVMEIDQEAYRDWFSSQLTATCNVEQSFFNDWFSGHLNFQIEHHLFPTMPRHNLHKIAPLVKSLCAKHGIEYQEKPLLRALLDIIRSLKKSGKLWLDAYLHK

SEQ ID NO: 11502 - protein, 444 aa, Homo sapiens
MGKGGNQGEGAAEREVSVPTFSWEEIQKHNLRTDRWLVIDRKVYNITKWSIQHPGGQRVIGHYAGEDATDAFRAFHPDLEFVGKFLKPLLIGELAPEEPSQDHGKNSKITEDFRALRKTAEDMNLFKTNHVFFLLLLAHIIALESIAWFTVFYFGNGWIPTLITAFVLATSQAQAGWLQHDYGHLSVYRKPKWNHLVHKFVIGHLKGASANWWNHRHFQHHAKPNIFHKDPDVNMLHVFVLGEWQPIEYGKKKLKYLPYNHQHEYFFLIGPPLLIPMYFQYQIIMTMIVHKNWVDLAWAVSYYIRFFITYIPFYGILGALLFLNFIRFLESHWFVWVTQMNHIVMEIDQEAYRDWFSSQLTATCNVEQSFFNDWFSGHLNFQIEHHLFPTMPRHNLHKIAPLVKSLCAKHGIEYQEKPLLRALLDIIRSLKKSGKLWLDAYLHK

SEQ ID NO: 11503 - protein, 539 aa, Homo sapiens [sequence omitted]

SEQ ID NO: 11504 - protein, 579 aa, Homo sapiens [sequence omitted]

SEQ ID NO: 11505 - protein, 545 aa, Homo sapiens [sequence omitted]

SEQ ID NO: 11506 - protein, 603 aa, Homo sapiens
EELSSVPWAEVQSRLLALQRSGGLCVQPRPLTELDIHHRILRYTNYQVALANKGLLPARCPLPWGGSAAFLSRGLALNVDLLLFRGPFSLFRGGWELPHAYKRSDQRGALAARWGRTVLLLAALNLALSPLVLAWQVLHVFYSHVELLRREPGALGARGWSRLARLQLRHFNELPHELRARLARAYRPAAAFLRTAAPPAPLRTLLARQLVFFAGALFAALLVLTVYDEDVLAVEHVLTAMTALGVTATVARSFIPEEQCQGRAPQLLLQTALAHMHYLPEEPGPGGRDRAYRQMAQLLQYRAVSLLEELLSPLLTPLFLLFWFRPRALEIIDFFHHFTVDVAGVGDICSFALMDVKRHGHPQWLSAGQTEASLSQRAEDGKTELSLMRFSLAHPLWRPPGHSSKFLGHLWGRVQQDAAAWGATSARGPSTPGVLSNCTSPLPEAFLANLFVHPLLPPRDLSPTAPCPAAATASLLASISRIAQDPSSVSPGGTGGQKLAQLPELASAEMSLHVIYLHQLHQQQQQQEPWGEAAASILSRPCSSPSQPPSPDEEKPSWSSDGSSPASSPRQQWGTQKARNLFPGGFQVTTDTQKEPDRASCTD

SEQ ID NO: 11507 - protein, 172 aa, Homo sapiens
MEEHLSVMYERLRQELPKLFLQSHDYSLYSLDVEFINEILNIRTKGRTWYILSLTLCRFLAWNYFAHLRLEVLQLTRHPENWTLQARWRLVGLPVHLLFLRFYKRDKDEHYRTYDAYSTFYLNSSGLICRHRLDKLMPSHSPPTPVKKLLVGALVALGLSEPEPDLNLCSKP

SEQ ID NO: 11508 - protein, 201 aa, Homo sapiens [sequence omitted]

SEQ ID NO: 11509 - protein, 419 aa, Homo sapiens
MDASHRGRLLNRLADLIERDRTYLAALETLDNGKPYVISYLVDLDMVLKCLRYYAGWADKYHGKTIPIDGDFFSYTRHEPVGVCGQIIPWNFPLLMQAWKLGPALATGNVVVMKVAEQTPLTALYVANLIKEAGFPPGVVNIVPGFGPTAGAAIASHEDVDKVAFTGSTEIGRVIQVAAGSSNLKRVTLELGGKSPNIIMSDADMDWAVEQAHFALFFNQGQCCCAGSRTFVQEDIYDEFVERSVARAKSRVVGNPFDSKTEQGPQVDETQFKKILGYINTGKQEGAKLLCGGGIAADRGYFIQPTVFGDVQDGMTIAKEEIFGPVMQILKFKTIEEVVGRANNSTYGLAAAVFTKDLDKANYLSQALQAGTVWVNCYDVFGAQSPFGGYKMSGSGRELGEYGLQAYTEVTVKVPQKNS

SEQ ID NO: 11510 - protein, 108 aa, Homo sapiens
MTIAKEEIFGPVMQILKFKTIEEVVGRANNSTYGLAAAVFTKDLDKANYLSQALQAGTVWVNCYDVFGAQSPFGGYKMSGSGRELGEYGLQAYTEVKTVTVKVPQKNS

SEQ ID NO: 11511 - protein, 517 aa, Homo sapiens
MLRAAARFGPRLGRRLLSAAATQAVPAPNQQPEVFCNQIFINNEWHDAVSRKTFPTVNPSTGEVICQVAEGDKEDVDKAVKAARAAFQLGSPWRRMDASHRGRLLNRLADLIERDRTYLAALETLDNGKPYVISYLVDLDMVLKCLRYYAGWADKYHGKTIPIDGDFFSYTRHEPVGVCGQIIPWNFPLLMQAWKLGPALATGNVVVMKVAEQTPLTALYVANLIKEAGFPPGVVNIVPGFGPTAGAAIASHEDVDKVAFTGSTEIGRVIQVAAGSSNLKRVTLELGGKSPNIIMSDADMDWAVEQAHFALFFNQGQCCCAGSRTFVQEDIYDEFVERSVARAKSRVVGNPFDSKTEQGPQVDETQFKKILGYINTGKQEGAKLLCGGGIAADRGYFIQPTVFGDVQDGMTIAKEEIFGPVMQILKFKTIEEVVGRANNSTYGLAAAVFTKDLDKANYLSQALQAGTVWVNCYDVFGAQSPFGGYKMSGSGRELGEYGLQAYTEVKTVTVKVPQKNS

SEQ ID NO: 11512 - protein, 478 aa, Homo sapiens
MATDSWALAVDEQEAAVKSMTNLQIKEEKVKADTNGIIKTSTTAEKTDEEEKEDRAAQSLLNKLIRSNLVDNTNQVEVLQRDPNSPLYSVKSFEELRLKPQLLQGVYAMGFNRPSKIQENALPMMLAEPPQNLIAQSQSGTGKTAAFVLAMLSRVEPSDRYPQCLCLSPTYELALQTGKVIEQMGKFYPELKLAYAVRGNKLERGQKISEQIVIGTPGTVLDWCSKLKFIDPKKIKVFVLDEADVMIATQGHQDQSIRIQRMLPRNCQMLLFSATFEDSVWKFAQKVVPDPNVIKLKREEETLDTIKQYYVLCSSRDEKFQALCNLYGAITIAQAMIFCHTRKTASWLAAELSKEGHQVALLSGEMMVEQRAAVIERFREGKEKVLVTTNVCARGIDVEQVSVVINFDLPVDKDGNPDNETYLHRIGRTGRFGKRGLAVNMVDSKHSMNILNRIQEHFNKKIERLDTDDLDEIEKIAN

SEQ ID NO: 11513 - protein, 147 aa, Homo sapiens
MALQRTHSLLLLLLLTLLGLGLVQPSYGQDGMYQRFLRQHVHPEETGGSDRYCNLMMQRRKMTLYHCKRFNTFIHEDIWNIRSICSTTNIQCKNGKMNCHEGVVKVTDCRDTGSSRAPNCRYRAIASTRRVVIACEGNPQVPVHFDG

SEQ ID NO: 11514 - protein, 147 aa, Homo sapiens; identical to SEQ ID NO: 11513

SEQ ID NO: 11515 - protein, 101 aa, Homo sapiens
MKPHFRNTVERMYRDTFSYNFYNRPILSRRNTVWLCYEVKTKGPSRPRLDAKIFRGQVPRSFIRAPFQVLSSPFGQCAPPHGTAQVQWPPQLTAGREQGRP

SEQ ID NO: 11516 - protein, 373 aa, Homo sapiens
MKPHFRNTVERMYRDTFSYNFYNRPILSRRNTVWLCYEVKTKGPSRPRLDAKIFRGQVYSQPEHHAEMCFLSWFCGNQLPAYKCFQITWFVSWTPCPDCVAKLAEFLAEHPNVTLTISAARLYYYWERDYRRALCRLSQAGARVKIMDDEEFAYCWENFVYSEGQPFMPWYKFDDNYAFLHRTLKEILRNPMEAMYPHIFYFHFKNLRKAYGRNESWLCFTMEVVKHHSPVSWKRGVFRNQVDPETHCHAERCFLSWFCDDILSPNTNYEVTWYTSWSPCPECAGEVAEFLARHSNVNLTIFTARLYYFWDTDYQEGLRSLSQEGASVEIMGYKDFKYCWENFVYNDDEPFKPWKGLKYNFLFLDSKLQEILE

SEQ ID NO: 11517 - protein, 247 aa, Homo sapiens
MLVLRSALTRALASRTLAPQMCSSFATGPRQYDGIFYEFRSYYLKPSKMNEFLENFEKNAHLRTAHSELVGYWSVEFGGRMNTVFHIWKYDNFAHRTEVRKALAKDKEWQEQFLIPNLALIDKQESEITYLVPWCKLEKPPKEGVYELATFQMKPGGPALWGDAFKRAVHAHVNLGYTKLVGVFHTEYGALNRVHVLWWNESADSRAAGRHKSHEDPRVVAAVRESVNYLVSQQNMLLIPTSFSPLK

SEQ ID NO: 11518 - protein, 166 aa, Homo sapiens
MAQRLLLRRFLASVISRKPSQGQWPPLTSRALQTPQCSPGGLTVTPNPARTIYTTRISLTTFNIQDGPDFQDRVVNSETPVVVDFHAQWCGPCKILGPRLEKMVAKQHGKVVMAKVDIDDHTDLAIEYEVSAVPTVLAMKNGDVVDKFVGIKDEDQLEAFLKKLIG

SEQ ID NO: 11519 - protein, 97 aa, Homo sapiens
MAQRLLLRRFLASVISRKPSQGQWPPLTSRALQTPQCSPGGLTVTPNPARTIYTTRISLTTFNIQDGPDFQDRVVNSETPVVVDFHAQCQRCPLCWP

SEQ ID NO: 11520 - protein, 353 aa, Homo sapiens
MAATKRKRRGGFAVQAKKPKRNEIDAEPPAKRHATAEEVEEEERDRIPGPVCKGKWKNKERILIFSSRGINFRTRHLMQDLRMLMPHSKADTKMDRKDKLFVINEVCEMKNCNKCIYFEAKKKQDLYMWLSNSPHGPSAKFLVQNIHTLAELKMTGNCLKGSRPLLSFDPAFDELPHYALLKELLIQIFSTPRYHPKSQPFVDHVFTFTILDNRIWFRNFQIIEEDAALVEIGPRFVLNLIKIFQGSFGGPTLYENPHYQSPNMHRRVIRSITAAKYREKQQVKDVQKLRKKEPKTLLPHDPTADVFVTPAEEKPIEIQWVKPEPKVDLKARKKRIYKRQRKMKQRMDSGKTK

SEQ ID NO: 11521 - protein, 129 aa, Homo sapiens
MAATKRKRRGGFAVQAKKPKRNEIDAEPPAKRHATAEEVEEEERDRIPGPVCKGKWKNKERILIFSSRGINFRTRHLMQDLRMLMPHSKADTKMDRKDKLFVINEVCEMKNCNKCIYFEAKKKQDLYMW

SEQ ID NO: 11522 - protein, 440 aa, Homo sapiens
MGPPGSPWQWVTLLLGLLLPPAAPFWLLNVLFPPHTTPKAELSNHTRPVILVPGCLGNQLEAKLDKPDVVNWMCYRKTEDFFTIWLDLNMFLPLGVDCWIDNTRVVYNRSSGLVSNAPGVQIRVPGFGKTYSVEYLDSSKLAGYLHTLVQNLVNNGYVRDETVRAAPYDWRLEPGQQEEYYRKLAGLVEEMHAAYGKPVFLIGHSLGCLHLLYFLLRQPQAWKDRFIDGFISLGAPWGGSIKPMLVLASGDNQGIPIMSSIKLKEEQRITTTSPWMFPSRMAWPEDHVFISTPSFNYTGRDFQRFFADLHFEEGWYMWLQSRDLLAGLPAPGVEVYCLYGVGLPTPRTYIYDHGFPYTDPVGVLYEDGDDTVATRSTELCGLWQGRQPQPVHLLPLHGIQHLNMVFSNLTLEHINAILLGAYRQGPPASPTASPEPPPPE

SEQ ID NO: 11523 - protein, 532 aa, Homo sapiens
MACLLRSFQRISAGVFFLALWGMVVGDKLLVVPQDGSHWLSMKDIVEVLSDRGHEIVVVVPEVNLLLKESKYYTRKIYPVPYDQEELKNRYQSFGNNHFAERSFLTAPQTEYRNNMIVIGLYFINCQSLLQDRDTLNFFKESKFDALFTDPALPCGVILAEYLGLPSVYLFRGFPCSLEHTFSRSPDPVSYIPRCYTKFSDHMTFSQRVANFLVNLLEPYLFYCLFSKYEELASAVLKRDVDIITLYQKVSVWLLRYDFVLEYPRPVMPNMVFIGGINCKKRKDLSQEFEAYINASGEHGIVVFSLGSMVSEIPEKKAMAIADALGKIPQTVLWRYTGTRPSNLANNTILVKWLPQNDLLGHPMTRAFITHAGSHGVYESICNGVPMVMMPLFGDQMDNAKRMETKGAGVTLNVLEMTSEDLENALKAVINDKSYKENIMRLSSLHKDRPVEPLDLAVFWVEFVMRHKGAPHLRPAAHDLTWYQYHSLDVIGFLLAVVLTVAFITFKCCAYGYRKCLGKKGRVKKAHKSKTH

SEQ ID NO: 11524 - protein, 530 aa, Homo sapiens
MACTGWTSPLPLCVCLLLTCGFAEAGKLLVVPMDGSHWFTMRSVVEKLILRGHEVVVVMPEVSWQLGRSLNCTVKTYSTSYTLEDLDREFKAFAHAQWKAQVRSIYSLLMGSYNDIFDLFFSNCRSLFKDKKLVEYLKESSFDAVFLDPFDNCGLIVAKYFSLPSVVFARGILCHYLEEGAQCPAPLSYVPRILLGFSDAMTFKERVRNHIMHLEEHLLCHRFFKNALEIASEILQTPVTEYDLYSHTSIWLLRTDFVLDYPKPVMPNMIFIGGINCHQGKPLPMEFEAYINASGEHGIVVFSLGSMVSEIPEKKAMAIADALGKIPQTVLWRYTGTRPSNLANNTILVKWLPQNDLLGHPMTRAFITHAGSHGVYESICNGVPMVMMPLFGDQMDNAKRMETKGAGVTLNVLEMTSEDLENALKAVINDKSYKENIMRLSSLHKDRPVEPLDLAVFWVEFVMRHKGAPHLRPAAHDLTWYQYHSLDVIGFLLAVVLTVAFITFKCCAYGYRKCLGKKGRVKKAHKSKTH

SEQ ID NO: 11525 - protein, 534 aa, Homo sapiens
MATGLQVPLPWLATGLLLLLSVQPWAESGKVLVVPIDGSHWLSMREVLRELHARGHQAVVLTPEVNMHIKEENFFTLTTYAISWTQDEFDRHVLGHTQLYFETEHFLKKFFRSMAMLNNMSLVYHRSCVELLHNEALIRHLNATSFDVVLTDPVNLCAAVLAKYLSIPTVFFLRNIPCDLDFKGTQCPNPSSYIPRLLTTNSDHMTFMQRVKNMLYPLALSYICHAFSAPYASLASELFQREVSVVDILSHASVWLFRGDFVMDYPRPIMPNMVFIGGINCANRKPLSQEFEAYINASGEHGIVVFSLGSMVSEIPEKKAMAIADALGKIPQTVLWRYTGTRPSNLANNTILVKWLPQNDLLGHPMTRAFITHAGSHGVYESICNGVPMVMMPLFGDQMDNAKRMETKGAGVTLNVLEMTSEDLENALKAVINDKSYKENIMRLSSLHKDRPVEPLDLAVFWVEFVMRHKGAPHLRPAAHDLTWYQYHSLDVIGFLLAVVLTVAFITFKCCAYGYRKCLGKKGRVKKAHKSKTH

SEQ ID NO: 11526 - protein, 534 aa, Homo sapiens
MARGLQVPLPRLATGLLLLLSVQPWAESGKVLVVPTDGSPWLSMREALRELHARGHQAVVLTPEVNMHIKEEKFFTLTAYAVPWTQKEFDRVTLGYTQGFFETEHLLKRYSRSMAIMNNVSLALHRCCVELLHNEALIRHLNATSFDVVLTDPVNLCGAVLAKYLSIPAVFFWRYIPCDLDFKGTQCPNPSSYIPKLLTTNSDHMTFLQRVKNMLYPLALSYICHTFSAPYASLASELFQREVSVVDLVSYASVWLFRGDFVMDYPRPIMPNMVFIGGINCANGKPLSQEFEAYINASGEHGIVVFSLGSMVSEIPEKKAMAIADALGKIPQTVLWRYTGTRPSNLANNTILVKWLPQNDLLGHPMTRAFITHAGSHGVYESICNGVPMVMMPLFGDQMDNAKRMETKGAGVTLNVLEMTSEDLENALKAVINDKSYKENIMRLSSLHKDRPVEPLDLAVFWVEFVMRHKGAPHLRPAAHDLTWYQYHSLDVIGFLLAVVLTVAFITFKCCAYGYRKCLGKKGRVKKAHKSKTH

SEQ ID NO: 11527 - protein, 491 aa, Homo sapiens
MREAVRELHARGHQAVVLTPEVNMHIKQEKFFTLTTYAISWTQDEFDRLVLGHTQLYFETEHFLKTFSKSMAILKNSSLVFHRSCVELLHNEALIRHLNATSFDVVLIDPIYLCGAVLAKYLSIPAVFFLRNIPCDLDFKGTQCPNPSSYIPKLLTTNSDHMTFLQRVKNMLYPLALSYLCHALSAPYASLASELFQREVSVVDLLSHASVWLFRGDFVMDYPRPIMPNMVFIGGINCANRKPLSQEFEAYINASGEHGIVVFSLGSMVSEIPEKKAMAIADALGKIPQTVLWRYTGTRPSNLANNTILVKWLPQNDLLGHPMTRAFITHAGSHGVYESICNGVPMVMMPLFGDQMDNAKRMETKGAGVTLNVLEMTSEDLENALKAVINDKSYKENIMRLSSLHKDRPVEPLDLAVFWVEFVMRHKGAPHLRPAAHDLTWYQYHSLDVIGFLLAVVLTVAFITFKCCAYGYRKCLGKKGRVKKAHKSKTH

SEQ ID NO: 11528 - protein, 530 aa, Homo sapiens [sequence omitted]

SEQ ID NO: 11529 - protein, 530 aa, Homo sapiens
MARAGWTSPVPLCVCLLLTCGFAEAGKLLVVPMDGSHWFTMQSVVEKLILRGHEVVVVMPEVSWQLERSLNCTVKTYSTSYTLEDQNREFMVFAHAQWKAQAQSIFSLLMSSSSGFLDLFFSHCRSLFNDRKLVEYLKESSFDAVFLDPFDTCGLIVAKYFSLPSVVFTRGIFCHHLEEGAQCPAPLSYVPNDLLGFSDAMTFKERVWNHIVHLEDHLFCQYLFRNALEIASEILQTPVTAYDLYSHTSIWLLRTDFVLDYPKPVMPNMIFIGGINCHQGKPLPMEFEAYINASGEHGIVVFSLGSMVSEIPEKKAMAIADALGKIPQTVLWRYTGTRPSNLANNTILVKWLPQNDLLGHPMTRAFITHAGSHGVYESICNGVPMVMMPLFGDQMDNAKRMETKGAGVTLNVLEMTSEDLENALKAVINDKSYKENIMRLSSLHKDRPVEPLDLAVFWVEFVMRHKGAPHLRPAAHDLTWYQYHSLDVIGFLLAVVLTVAFITFKCCAYGYRKCLGKKGRVKKAHKSKTH

SEQ ID NO: 11530 - protein, 530 aa, Homo sapiens
MARTGWTSPIPLCVSLLLTCGFAEAGKLLVVPMDGSHWFTMQSVVEKLILRGHEVVVVMPEVSWQLGKSLNCTVKTYSTSYTLEDLDREFMDFADAQWKAQVRSLFSLFLSSSNGFFNLFFSHCRSLFNDRKLVEYLKESSFDAVFLDPFDACGLIVAKYFSLPSVVFARGIACHYLEEGAQCPAPLSYVPRILLGFSDAMTFKERVRNHIMHLEEHLFCQYFSKNALEIASEILQTPVTAYDLYSHTSIWLLRTDFVLDYPKPVMPNMIFIGGINCHQGKPLPMEFEAYINASGEHGIVVFSLGSMVSEIPEKKAMAIADALGKIPQTVLWRYTGTRPSNLANNTILVKWLPQNDLLGHPMTRAFITHAGSHGVYESICNGVPMVMMPLFGDQMDNAKRMETKGAGVTLNVLEMTSEDLENALKAVINDKSYKENIMRLSSLHKDRPVEPLDLAVFWVEFVMRHKGAPHLRPAAHDLTWYQYHSLDVIGFLLAVVLTVAFITFKCCAYGYRKCLGKKGRVKKAHKSKTH

SEQ ID NO: 11531 - protein, 533 aa, Homo sapiens
MAVESQGGRPLVLGLLLCVLGPVVSHAGKILLIPVDGSHWLSMLGAIQQLQQRGHEIVVLAPDASLYIRDGAFYTLKTYPVPFQREDVKESFVSLGHNVFENDSFLQRVIKTYKKIKKDSAMLLSGCSHLLHNKELMASLAESSFDVMLTDPFLPCSPIVAQYLSLPTVFFLHALPCSLEFEATQCPNPFSYVPRPLSSHSDHMTFLQRVKNMLIAFSQNFLCDVVYSPYATLASEFLQREVTVQDLLSSASVWLFRSDFVKDYPRPIMPNMVFVGGINCLHQNPLSQEFEAYINASGEHGIVVFSLGSMVSEIPEKKAMAIADALGKIPQTVLWRYTGTRPSNLANNTILVKWLPQNDLLGHPMTRAFITHAGSHGVYESICNGVPMVMMPLFGDQMDNAKRMETKGAGVTLNVLEMTSEDLENALKAVINDKSYKENIMRLSSLHKDRPVEPLDLAVFWVEFVMRHKGAPHLRPAAHDLTWYQYHSLDVIGFLLAVVLTVAFITFKCCAYGYRKCLGKKGRVKKAHKSKTH

SEQ ID NO: 11532 - protein, 252 aa, Homo sapiens
WQPLARMREAVRELHARGHQAVVLTPEVNMHIKQEKFFTLTTYAISWTQDEFDRLVLGHTQLYFETEHFLKTFSKSMAILKNSSLVFHRSCVELLHNEALIRHLNATSFDVVLIDPIYLCGAVLAKYLSIPAVFFLRNIPCDLDFKGTQCPNPSSYIPKLLTTNSDHMTFLQRVKNMLYPLALSYLCHALSAPYASLASELFQREVSVVDLLSHASVWLFRGDFVMDYPRPIMPNMVFIGGINCANRKPLSQ

SEQ ID NO: 11533 - protein, 494 aa, Homo sapiens
MLASGLLLVTLLACLTVMVLMSVWRQRKSRGKLPPGPTPLPFIGNYLQLNTEQMYNSLMKISERYGPVFTIHLGPRRVVVLCGHDAVKEALVDQAEEFSGRGEQATFDWLFKGYGVAFSNGERAKQLRRFSIATLRGFGVGKRGIEERIQEEAGFLIDALRGTHGANIDPTFFLSRTVSNVISSIVFGDRFDYEDKEFLSLLRMMLGSFQFTATSTGQLYEMFSSVMKHLPGPQQQAFKELQGLEDFIAKKVEHNQRTLDPNSPRDFIDSFLIRMQEEEKNPNTEFYLKNLVMTTLNLFFAGTETVSTTLRYGFLLLMKHPEVEAKVHEEIDRVIGKNRQPKFEDRAKMPYTEAVIHEIQRFGDMLPMGLAHRVNKDTKFRDFFLPKGTEVFPMLGSVLRDPRFFSNPRDFNPQHFLDKKGQFKKSDAFVPFSIGKRYCFGEGLARMELFLFFTTIMQNFRFKSPQSPKDIDVSPKHVGFATIPRNYTMSFLPR

SEQ ID NO: 11534 - protein, 502 aa, Homo sapiens
MWTADEIAQLCYEHYGIRLPKKGKPEPNHEWTLLAAVVKIQSPADKACDTPDKPVQVTKEVVSMGTGTKCIGQSKMRKNGDILNDSHAEVIARRSFQRYLLHQLQLAATLKEDSIFVPGTQKGVWKLRRDLIFVFFSSHTPCGDASIIPMLEFEDQPCCPVFRNWAHNSSVEASSNLEAPGNERKCEDPDSPVTKKMRLEPGTAAREVTNGAAHHQSFGKQKSGPISPGIHSCDLTVEGLATVTRIAPGSAKVIDVYRTGAKCVPGEAGDSGKPGAAFHQVGLLRVKPGRGDRTRSMSCSDKMARWNVLGCQGALLMHLLEEPIYLSAVVIGKCPYSQEAMQRALIGRCQNVSALPKGFGVQELKILQSDLLFEQSRSAVQAKRADSPGRLVPCGAAISWSAVPEQPLDVTANGFPQGTTKKTIGSLQARSQISKVELFRSFQKLLSRIARDKWPHSLRVQKLDTYQEYKEAASSYQEAWSTLRKQVFGSWIRNPPDYHQFK

SEQ ID NO: 11535 - protein, 502 aa, Homo sapiens; identical to SEQ ID NO: 11534

SEQ ID NO: 11536 - protein, 284 aa, Homo sapiens
MPPVGGKKAKKGILERLNAGEIVIGDGGFVFALEKRGYVKAGPWTPEAAVEHPEAVRQLHREFLRAGSNVMQTFTFYASEDKLENRGASIIGVNCHFDPTISLKTVKLMKEGLEAARLKAHLMSQPLAYHTPDCNKQGFIDLPEFPFGLEPRVATRWDIQKYAREAYNLGVRYIGGCCGFEPYHIRAIAEELAPERGFLPPASEKHGSWGSGLDMHTKPWVRARARKEYWENLRIASGRPYNPSMSKPDGWGVTKGTAELMQQKEATTEQQLKELFEKQKFKSQ

SEQ ID NO: 11537 - protein, 406 aa, Homo sapiens
MPPVGGKKAKKGILERLNAGEIVIGDGGFVFALEKRGYVKAGPWTPEAAVEHPEAVRQLHREFLRAGSNVMQTFTFYASEDKLENRGNYVLEKISGQEVNEAACDIARQVADEGDALVAGGVSQTPSYLSCKSETEVKKVFLQQLEVFMKKNVDFLIAEYFEHVEEAVWAVETLIASGKPVAATMCIGPEGDLHGVPPGECAVRLVKAGASIIGVNCHFDPTISLKTVKLMKEGLEAARLKAHLMSQPLAYHTPDCNKQGFIDLPEFPFGLEPRVATRWDIQKYAREAYNLGVRYIGGCCGFEPYHIRAIAEELAPERGFLPPASEKHGSWGSGLDMHTKPWVRARARKEYWENLRIASGRPYNPSMSKPDGWGVTKGTAELMQQKEATTEQQLKELFEKQKFKSQ

SEQ ID NO: 11538 - protein, 97 aa, Homo sapiens
MDSSSSSSAAGLGAVDPQLQHFIEVETQKQRFQQLVHQMTELCWEKCMDKPGPKLDSRAEACFVNCVERFIDTSQFILNRLEQTQKSKPVFSESLSD

SEQ ID NO: 11539 - protein, 120 aa, Homo sapiens
MLGHKASLKTFLNIEIASSIFSDHSGIKLEINNERDFRNYTNTWKLNSMLLNDKWVNEEIKKKIEKCLETNDNGNTTYQNLWDTAKAVVRGKFIAISTYIKKEEKLQINNLTMNLIELEN

SEQ ID NO: 11540 - protein, 409 aa, Homo sapiens
KSRLSVTLMPVQLSEHPEWNESMHSLRISVGGLPVLASMTKAADPRFRPRWKVILTFFVGAAILWLLCSHRPAPGRPPTHNAHNWRLGQAPANWYNDTYPLSPPQRTPAGIRYRIAVIADLDTESRAQEENTWFSYLKKGYLTLSDSGDKVAVEWDKDHGVLESHLAEKGRGMELSDLIVFNGKLYSVDDRTGVVYQIEGSKAVPWVILSDGDGTVEKGFKAEWLAVKDERLYVGGLGKEWTTTTGDVVNENPEWVKVVGYKGSVDHENWVSNYNALRAAAGIQPPGYLIHESACWSDTLQRWFFLPRRASQERYSEKDDERKGANLLLSASPDFGDIAVSHVGAVVPTHGFSSFKFIPNTDDQIIVALKSEEDSGRVASYIMAFTLDGRFLLPETKIGSVKYEGIEFI

SEQ ID NO: 11541 - protein, 494 aa, Homo sapiens [sequence omitted]

SEQ ID NO: 11542 - protein, 202 aa, Homo sapiens
MNPQIRNPMERMYRDTFYDNFENEPILYGRSYTWLCYEVKIKRGRSNLLWDTGVFRGPVLPKRQSNHRQEVDPETHCHAERCFLSWFCDDILSPNTNYEVTWYTSWSPCPECAGEVAEFLARHSNVNLTIFTARLYYFWDTDYQEGLRSLSQEGASVEIMGYKDFKYCWENFVYNDDEPFKPWKGLKYNFLFLDSKLQEILE

SEQ ID NO: 11543 - protein, 331 aa, Homo sapiens
MKRPWQGQVEPQLLKTVPRHDPLNPLCPGAIRANGEVNPQYDSTFLFDNDFPALQPDAPSPGPSDHPLFQAKSARGVCKVMCFHPWSDVTLPLMSVPEIRAVVDAWASVTEELGAQYPWVQIFENKGAMMGCSNPHPHCQVWASSFLPDIAQREERSQQAYKSQHGEPLLMEYSRQELLRKERLVLTSEHWLVLVPFWATWPYQTLLLPRRHVRRLPELTPAERDDLASIMKKLLTKYDNLFETSFPYSMGWHGAPTGSEAGANWNHWQLHAHYYPPLLRSATVRKFMVGYEMLAQAQRDLTPEQAAERLRALPEVHYHLGQKDRETATIA

SEQ ID NO: 11544 - protein, 379 aa, Homo sapiens
MSRSGTDPQQRQQASEADAAAATFRANDHQHIRYNPLQDEWVLVSAHRMKRPWQGQVEPQLLKTVPRHDPLNPLCPGAIRANGEVNPQYDSTFLFDNDFPALQPDAPSPGPSDHPLFQAKSARGVCKVMCFHPWSDVTLPLMSVPEIRAVVDAWASVTEELGAQYPWVQIFENKGAMMGCSNPHPHCQVWASSFLPDIAQREERSQQAYKSQHGEPLLMEYSRQELLRKERLVLTSEHWLVLVPFWATWPYQTLLLPRRHVRRLPELTPAERDDLASIMKKLLTKYDNLFETSFPYSMGWHGAPTGSEAGANWNHWQLHAHYYPPLLRSATVRKFMVGYEMLAQAQRDLTPEQAAERLRALPEVHYHLGQKDRETATIA

SEQ ID NO: 11545 - protein, 423 aa, Homo sapiens
MPAHRDQPLEQRPPRRDSLGSSGAYNSFSVLRHKIFSSGSPGGLMSRSGTDPQQRQQASEADAAAATFRANDHQHIRYNPLQDEWVLVSAHRMKRPWQGQVEPQLLKTVPRHDPLNPLCPGAIRANGEVNPQYDSTFLFDNDFPALQPDAPSPGPSDHPLFQAKSARGVCKVMCFHPWSDVTLPLMSVPEIRAVVDAWASVTEELGAQYPWVQIFENKGAMMGCSNPHPHCQVWASSFLPDIAQREERSQQAYKSQHGEPLLMEYSRQELLRKERLVLTSEHWLVLVPFWATWPYQTLLLPRRHVRRLPELTPAERDDLASIMKKLLTKYDNLFETSFPYSMGWHGAPTGSEAGANWNHWQLHAHYYPPLLRSATVRKFMVGYEMLAQAQRDLTPEQAAERLRALPEVHYHLGQKDRETATIA

SEQ ID NO: 11546 - protein, 331 aa, Homo sapiens; identical to SEQ ID NO: 11543

SEQ ID NO: 11547 - protein, 775 aa, Homo sapiens
MSRSGTDPQQRQQASEADAAAATFRANDHQHIRYNPLQDEWVLVSAHRMKRPWQGQVEPQLLKTVPRHDPLNPLCPGAIRANGEVNPQYDSTFLFDNDFPALQPDAPSPGPSDHPLFQAKSARGVCKVMCFHPWSDVTLPLMSVPEIRAVVDAWASVTEELGAQYPWVQIFENKGAMMGCSNPHPHCQVWASSFLPDIAQREERSQQAYKSQHGEPLLMEYSRQELLRKERLVLTSEHWLVLVPFWATWPYQTLLLPRRHVRRLPELTPAERDDLASIMKKLLTKYDNLFETSFPYSMGWHGAPTGSEAGANWNHWQLHAHYYPPLLRSATVRKFMVGYEMLAQAQRDLTPEQMSSSCSGLSRVLVAVATALVSASSPCPQAWGPPGVQYGQPGRSVKLCCPGVTAGDPVSWFRDGEPKLLQGPDSGLGHELVLAQADSTDEGTYICQTLDGALGGTVTLQLGYPPARPVVSCQAADYENFSCTWSPSQISGLPTRYLTSYRKKTVLGADSQRRSPSTGPWPCPQDPLGAARCVVHGAEFWSQYRINVTEVNPLGASTRLLDVSLQSILRPDPPQGLRVESVPGYPRRLRASWTYPASWPCQPHFLLKFRLQYRPAQHPAWSTVEPAGLEEVITDAVAGLPHAVRVSARDFLDAGTWSTWSPEAWGTPSTGTIPKEIPAWGQLHTQPEVEPQVDSPAPPRPSLQPHPRLLDHRDSVEQVAVLASLGILSFLGLVAGALALGLWLRLRRGGKDGSPKPGFLASVIPVDRRPGAPNL

SEQ ID NO: 11548 - protein, 190 aa, Homo sapiens
MCKCLWVDMMKEALEKLQLNIVEMKDENATLDGGDVLFTGREFFVGLSKRTNQRGAEILADTFKDYAVSTVPVADGLHLKSFCSMAGPNLIAIGSSESAQKALKIMQQMSDHRYDKLTVPDDIAANCIYLNIPNKGHVLLHRTPEEYPESAKVYEKLKDHMLIPVSMSELEKVDGLLTCCSVLINKKVDS

SEQ ID NO: 11549 - protein, 182 aa, Homo sapiens
MMKEALEKLQLNIVEMKDENATLDGGDVLFTGREFFVGLSKRTNQRGAEILADTFKDYAVSTVPVADGLHLKSFCSMAGPNLIAIGSSESAQKALKIMQQMSDHRYDKLTVPDDIAANCIYLNIPNKGHVLLHRTPEEYPESAKVYEKLKDHMLIPVSMSELEKVDGLLTCCSVLINKKVDS

SEQ ID NO: 11550 - protein, 285 aa, Homo sapiens
MAGLGHPAAFGRATHAVVRALPESLGQHALRSAKGEEVDVARAERQHQLYVGVLGSKLGLQVVELPADESLPDCVFVEDVAVVCEETALITRPGAPSRRKEVDMMKEALEKLQLNIVEMKDENATLDGGDVLFTGREFFVGLSKRTNQRGAEILADTFKDYAVSTVPVADGLHLKSFCSMAGPNLIAIGSSESAQKALKIMQQMSDHRYDKLTVPDDIAANCIYLNIPNKGHVLLHRTPEEYPESAKVYEKLKDHMLIPVSMSELEKVDGLLTCCSVLINKKVDS

SEQ ID NO: 11551 - protein, 429 aa, Homo sapiens
MQLRNPELHLGCALALRFLALVSWDIPGARALDNGLARTPTMGWLHWERFMCNLDCQEEPDSCISEKLFMEMAELMVSEGWKDAGYEYLCIDDCWMAPQRDSEGRLQADPQRFPHGIRQLANYVHSKGLKLGIYADVGNKTCAGFPGSFGYYDIDAQTFADWGVDLLKFDGCYCDSLENLADGYKHMSLALNRTGRSIVYSCEWPLYMWPFQKPNYTEIRQYCNHWRNFADIDDSWKSIKSILDWTSFNQERIVDVAGPGGWNDPDMLVIGNFGLSWNQQVTQMALWAIMAAPLFMSNDLRHISPQAKALLQDKDVIAINQDPLGKQGYQLRQGDNFEVWERPLSGLAWAVAMINRQEIGGPRSYTIAVASLGKGVACNPACFITQLLPVKRKLGFYEWTSRLRSHINPTGTVLLQLENTMQMSLKDLL

SEQ ID NO: 11552 - protein, 177 aa, Homo sapiens
MFPPLLFELFHSFSQLVIGNFGLSWNQQVTQMALWAIMAAPLFMSNDLRHISPQAKALLQDKDVIAINQDPLGKQGYQLRQGDNFEVWERPLSGLAWAVAMINRQEIGGPRSYTIAVASLGKGVACNPACFITQLLPVKRKLGFYEWTSRLRSHINPTGTVLLQLENTMQMSLKDLL

SEQ ID NO: 11553 - protein, 67 aa, Homo sapiens
LLHSMNKSLLFILKFKTIFLQMLIQNVPIPIYHAYANTICHKKVCFSLSHSYGDWWPSKITVQLLQV

SEQ ID NO: 11554 - protein, 160 aa, Homo sapiens [sequence omitted]

SEQ ID NO: 11555 - protein, 155 aa, Homo sapiens
  VARIANT (1)...(155): Xaa = Any Amino Acid
LLSFQTRELCAMRGAQEHALNSKKISWLAGWQLEAFLSWLRALAPWWPLGSSISSGRFFVLAGGRLGPRGRALRAVQRRLHPQGRGSDVAGGRFRALRGGFHVPGGRLEDAREPLPRGGEGGPLAAALGGLHPPGRRLHAVGRGLHADRGRLCVX

SEQ ID NO: 11556 - protein, 52 aa, Homo sapiens
SPRPVKSPLISHRLLHPLCSILSKLLLALIWPPPLLESSCCHGSSHYCTTDP

SEQ ID NO: 11557 - protein, 94 aa, Homo sapiens
NLIYPNSSMYSDTFSEKARIIGAVLSIKGKSSDHLHYNFLCLFSAGEEIHIYSTPHWTLQNACIFCPSAICSLPFCLLKELSNIVFPKMFSTGH

SEQ ID NO: 11558 - protein, 86 aa, Homo sapiens
EASACFQAARASETPAGALTRRWRPLPGPPYLRAGPGGSSRSWPSAPNSKPGHRGLAAPPCAWIRPASATSDKPFGLLTPIRCLLC

SEQ ID NO: 11559 - protein, 82 aa, Homo sapiens
TRLIDSQSHRLGRPHETYNHGGRGSKHILLHMAAGRSAKQRGKIPLQNHQILGQEQWLTPVIPALWEAQAGGSPEVGSLRPA

SEQ ID NO: 11560 - protein, 177 aa, Homo sapiens
LGSCGSDLWFLRLLTLQTQPRGSPAAAHPGKPFLTRSSHPNIILSLLLQLLRAQVRHGLAPAWITAAAPLAGSADPSGFAASCDVSAKISSLVCKQLHSQGGSSGLSAGAAYSDVRPGFTSFPDLDMSPSPLGPLTLRCPLRSPSSPLAPGSPTLSHTHTITDAHACTRAGLEICFT

SEQ ID NO: 11561 - protein, 108 aa, Homo sapiens
RGMEWNRTKCYSSGRKCLLDRVCSYETPHRGTLTSIEAARGRCPAHDRRDGPNHSSDPCVGNADPFQWCVAAGIQENVEEPQGSCEWIHPQGQNGNSWNSTTSGKGHS

SEQ ID NO: 11562 - protein, 82 aa, Homo sapiens
CSSLVHHSSVLLALGFCGLGIQRALGMSEVLHSIKHKDSRQHQPQGIHEDKVKPEVERVAQLSVLRPVWVQGARVGSHVFVG

SEQ ID NO: 11563 - protein, 470 aa, Homo sapiens
MSSAPASGSVRARYLVYFQYVGTDFNGVAAVRGTQRAVGVQNYLEEAAERLNSVEPVRFTISSRTDAGVHALSNAAHLDVQRRSGRPPFPPEVLAEALNTHLRHPAIRVLRAFRVPSDFHARHAATSRTYLYRLATGCHRRDELPVFERNLCWTLPADCLDMVAMQEAAQHLLGTHDFSAFQSAGSPVPSPVRTLRRVSVSPGQASPLVTPEESRKLRFWNLEFESQSFLYRQVGSVLGPSPGGGAEGGQAPVQSWLWVVGGSGSQVRRMTAVLVGHGRLWVTGTEDDGCAGGSRAALGHRWLWVTGTEDDGCAGGRGAGGFGTCPGEDDSGEPRSPGQAPDTCSPSPRLIPQVSAVREPRCCLLHPAGATVREPRMTLDTQAKVRPHQAQPCAGQARAVTAAWGPQHCCLVSTVASLPGSQHPGCPSLSQAGWGTVQDTAMYTKKRVPSSLLFSFYWKLLSRTTCPNQE

SEQ ID NO: 11564 - protein, 271 aa, Homo sapiens [sequence omitted]

SEQ ID NO: 11565 - protein, 74 aa, Homo sapiens
  VARIANT (1)...(74): Xaa = Any Amino Acid
AFWVPTLAFLPSAGTCSWGKGRFSSLVLLRPQRSKGSPKDNSSARREALGPGPSGGVKPPVPPGQHQTQCPRRX

SEQ ID NO: 11566 - protein, 132 aa, Homo sapiens
MQRDLLPTATKDCDSPDYQAGRVHFQLTSELREPFSTCLDAAIVGYKDLPSIQATIPGKTFINVKPAEVDVLVGKDWSSFFVNEVTLGGQKCSVIWDLLLQDGELTYLYTKSTDGAPTFNVTVTMTARMLVL

SEQ ID NO: 11567 - protein, 600 aa, Homo sapiens
MPEIRVTPLGAGQDVGRSCILVSIAGKNVMLDCGMHMGFNDDRRFPDFSYITQNGRLTDFLDCVIISHFHLDHCGALPYFSEMVGYDGPIYMTHPTQAICPILLEDYRKIAVDKKGEANFFTSQMIKDCMKKVVAVHLHQTVQVDDELEIKAYYAGHVLGAAMFQIKVGSESVVYTGDYNMTPDRHLGAAWIDKCRPNLLITESTYATTIRDSKRCRERDFLKKVHETVERGGKVLIPVFALGRAQELCILLETFWERMNLKVPIYFSTGLTEKANHYYKLFIPWTNQKIRKTFVQRNMFEFKHIKAFDRAFADNPGPMVVFATPGMLHAGQSLQIFRKWAGNEKNMVIMPGYCVQGTVGHKILSGQRKLEMEGRQVLEVKMQVEYMSFSAHADAKGIMQLVGQAEPESVLLVHGEAKKMEFLKQKIEQELRVNCYMPANGETVTLPTSPSIPVGISLGLLKREMAQGLLPEAKKPRLLHGTLIMKDSNFRLVSSEQALKELGLAEHQLRFTCRVHLHDTRKEQETALRVYSHLKSVLKDHCVQHLPDGSVTVESVLLQAAAPSEDPGTKVLLVSWTYQDEELGSFLTSLLKKGLPQAPS

SEQ ID NO: 11568 - protein, 342 aa, Homo sapiens
MNLKVPIYFSTGLTEKANHYYKLFIPWTNQKIRKTFVQRNMFEFKHIKAFDRAFADNPGPMVVFATPGMLHAGQSLQIFRKWAGNEKNMVIMPGYCVQGTVGHKILSGQRKLEMEGRQVLEVKMQVEYMSFSAHADAKGIMQLVGQAEPESVLLVHGEAKKMEFLKQKIEQELRVNCYMPANGETVTLPTSPSIPVGISLGLLKREMAQGLLPEAKKPRLLHGTLIMKDSNFRLVSSEQALKELGLAEHQLRFTCRVHLHDTRKEQETALRVYSHLKSVLKDHCVQHLPDGSVTVESVLLQAAAPSEDPGTKVLLVSWTYQDEELGSFLTSLLKKGLPQAPS

SEQ ID NO: 11569 - protein, 329 aa, Homo sapiens [sequence omitted]

SEQ ID NO: 11570 - protein, 600 aa, Homo sapiens; identical to SEQ ID NO: 11567

SEQ ID NO: 11571 - protein, 578 aa, Homo sapiens
MPEIRVTPLGAGQDVGRSCILVSIAGKNVMLDCGMHMGFNDDRRFPDFSYITQNGRLTDFLDCVIISHFHLDHCGALPYFSEMVGYDGPIYMTHPTQAICPILLEDYRKIAVDKKGEANFFTSQMIKDCMKKVVAVHLHQTVQIKVGSESVVYTGDYNMTPDRHLGAAWIDKCRPNLLITESTYATTIRDSKRCRERDFLKKVHETVERGGKVLIPVFALGRAQELCILLETFWERMNLKVPIYFSTGLTEKANHYYKLFIPWTNQKIRKTFVQRNMFEFKHIKAFDRAFADNPGPMVVFATPGMLHAGQSLQIFRKWAGNEKNMVIMPGYCVQGTVGHKILSGQRKLEMEGRQVLEVKMQVEYMSFSAHADAKGIMQLVGQAEPESVLLVHGEAKKMEFLKQKIEQELRVNCYMPANGETVTLPTSPSIPVGISLGLLKREMAQGLLPEAKKPRLLHGTLIMKDSNFRLVSSEQALKELGLAEHQLRFTCRVHLHDTRKEQETALRVYSHLKSVLKDHCVQHLPDGSVTVESVLLQAAAPSEDPGTKVLLVSWTYQDEELGSFLTSLLKKGLPQAPS

SEQ ID NO: 11572 - protein, 499 aa, Homo sapiens
MPEIRVTPLGAGQDVGRSCILVSIAGKNVMLDCGMHMGFNDDVDDELEIKAYYAGHVLGAAMFQIKVGSESVVYTGDYNMTPDRHLGAAWIDKCRPNLLITESTYATTIRDSKRCRERDFLKKVHETVERGGKVLIPVFALGRAQELCILLETFWERMNLKVPIYFSTGLTEKANHYYKLFIPWTNQKIRKTFVQRNMFEFKHIKAFDRAFADNPGPMVVFATPGMLHAGQSLQIFRKWAGNEKNMVIMPGYCVQGTVGHKILSGQRKLEMEGRQVLEVKMQVEYMSFSAHADAKGIMQLVGQAEPESVLLVHGEAKKMEFLKQKIEQELRVNCYMPANGETVTLPTSPSIPVGISLGLLKREMAQGLLPEAKKPRLLHGTLIMKDSNFRLVSSEQALKELGLAEHQLRFTCRVHLHDTRKEQETALRVYSHLKSVLKDHCVQHLPDGSVTVESVLLQAAAPSEDPGTKVLLVSWTYQDEELGSFLTSLLKKGLPQAPS

SEQ ID NO: 11573 - protein, 395 aa, Homo sapiens
LNGMRAGWTRQQQVSHNAPHGAKTCVHYSLHFFAYSLLCGINILLKMSKRPKDTPVNISDKKKRKHLCLSIAQKVKLLEKLDSGVSVKHLTEEYGVGMTTIYDLKKQKDKLLKFYAESDEQILMKNRKTLHKAKNEDLDRVLKEWIRQRRSEHMPLNGMLIMKQAKIYHNELKIEGNCEYSTGWLQKFKKRHGIKFLKTCGNKASAGHEATEKFTGKFSNDDEQDGNFEGFSMSSEKKIMSDLLTYTKNIHPETVSKLEEEDIKDVFNSNNEAPVVHSLSNGEVTKMVLNQDDHDDNDNEDDVNTAEKVPIDDMVKMCDGLIKGLEQHAFITEQEIMSVYKIKERLLRQKASLMRQMTLKETFKKAIQRNASSSLQDPLLGPSTASDASSHLKIK

SEQ ID NO: 11574 - protein, 164 aa, Homo sapiens
  VARIANT (1)...(164): Xaa = Any Amino Acid
LRQCQECFCRDVFVKDSKDKRRQGGKEEIEEYHLPVINHGGAGETTEELIPEEQVDVAHVLVEVVHHHPGQARVTPVAMHEQQLLEMLKAGDGKVAGHDSLHAFLSRYSNSNISSLNHAYIICSITYGKGHDAQLVSHQLDYHTLLEWRGAAAQDGPTILGQFX

SEQ ID NO: 11575 - protein, 140 aa, Homo sapiens
MAENREPRGAVEAELDPVEYTLRKRLPSRLPRRPNDIYVNMKTDFKAQLARCQKLLDGGARGQNACSEIYIHGLGLAINRAINIALQLQAGSFGSLQVAANTSTVELVDELEPETDTREPLTRIRNNSAIHIRVFRVTPK

SEQ ID NO: 11576 - protein, 318 aa, Homo sapiens
MGEKAVPLLRRRRVKRSCPSCGSELGVEEKRGKGNPISIQLFPPELVEHIISFLPVRDLVALGQTCRYFHEVCDGEGVWRRICRRLSPRLQDQDTKGLYFQAFGGRRRCLSKSVAPLLAHGYRRFLPTKDHVFILDYVGTLFFLKNALVSTLGQMQWKRACRYVVLCRGAKDFASDPRCDTVYRKYLYVLATREPQEVVGTTSSRACDCVEVYLQSSGQRVFKMTFHHSMTFKQIVLVGQETQRALLLLTEEGKIYSLVVNETQLDQPRSYTVQLALRKVSHYLPHLRVACMTSNQSSTLYVTDPILCSWLQPPWPGG

SEQ ID NO: 11577 - protein, 580 aa, Homo sapiens
MGEKAVPLLRRRRVKRSCPSCGSELGVEEKRGKGNPISIQLFPPELVEHIISFLPVRDLVALGQTCRYFHEVCDGEGVWRRICRRLSPRLQDQGSGVRPWKRAAILNYTKGLYFQAFGGRRRCLSKSVAPLLAHGYRRFLPTKDHVFILDYVGTLFFLKNALVSTLGQMQWKRACRYVVLCRGAKDFASDPRCDTVYRKYLYVLATREPQEVVGTTSSRACDCVEVYLQSSGQRVFKMTFHHSMTFKQIVLVGQETQRALLLLTEEGKIYSLVVNETQLDQPRSYTVQLALRKVSHYLPHLRVACMTSNQSSTLYVTDQGGVYFEVHTPGVYRDLFGTLQAFDPLDQQMPLALSLPAKILFCALGYNHLGLVDEFGRIFMQGNNRYGQLGTGDKMDRGEPTQVCYLQRPITLWCGLNHSLVLSQSSEFSKELLGCGCGAGGRLPGWPKGSASFVKLQVKVPLCACALCATRECLYILSSHDIEQHAPYRHLPASRVVGTPEPSLGARAPQDPGGMAQACEEYLSQIHSCQTLQDRTEKMKEIVGWMPLMAAQKDFFWEALDMLQRAEGGGGGVGPPAPET

SEQ ID NO: 11578 - protein, 806 aa, Homo sapiens
MASGADSKGDDLSTAILKQKNRPNRLIVDEAINEDNSVVSLSQPKMDELQLFRGDTVLLKGKKRREAVCIVLSDDTCSDEKIRMNRVVRNNLRVRLGDVISIQPCPDVKYGKRIHVLPIDDTVEGITGNLFEVYLKPYFLEAYRPIRKGDIFLVRGGMRAVEFKVVETDPSPYCIVAPDTVIHCEGEPIKREDEEESLNEVGYDDIGGCRKQLAQIKEMVELPLRHPALFKAIGVKPPRGILLYGPPGTGKTLIARAVANETGAFFFLINGPEIMSKLAGESESNLRKAFEEAEKNAPAIIFIDELDAIAPKREKTHGEVERRIVSQLLTLMDGLKQRAHVIVMAATNRPNSIDPALRRFGRFDREVDIGIPDATGRLEILQIHTKNMKLADDVDLEQVANETHGHVGADLAALCSEAALQAIRKKMDLIDLEDETIDAEVMNSLAVTMDDFRWALSQSNPSALRETVVEVPQVTWEDIGGLEDVKRELQELVQYPVEHPDKFLKFGMTPSKGVLFYGPPGCGKTLLAKAIANECQANFISIKGPELLTMWFGESEANVREIFDKARQAAPCVLFFDELDSIAKARGGNIGDGGGAADRVINQILTEMDGMSTKKNVFIIGATNRPDIIDPAILRPGRLDQLIYIPLPDEKSRVAILKANLRKSPVAKDVDLEFLAKMTNGFSGADLTEICQRACKLAIRESIESEIRRERERQTNPSAMEVEEDDPVPEIRRDHFEEAMRFARRSVSDNDIRKYEMFAQTLQQSRGFGSFRFPSGNQGGAGPSQGSGGGTGGSVYTEDNDDDLYG

SEQ ID NO: 11579 - protein, 632 aa, Homo sapiens [sequence omitted]

SEQ ID NO: 11580 - protein, 157 aa, Homo sapiens
MYIWIDGTGKGLHCKTWTLDSEPNDMYLVPAAMFKDPFRKDPNKLVLCEVFKYNRKPAETNLRHTCKRIIDVMSNQHPWFGMEQEYTLMGTNGHPFGWPSSGFPGPQTPYYCSVGADRTYGRDIVEAHYSACLYAGVRIVGTNANHASPVRISNWTL

SEQ ID NO: 11581 - protein, 328 aa, Homo sapiens [sequence omitted]

SEQ ID NO: 11582 - protein, 518 aa, Homo sapiens
MAASMARRLWPLLTRRGFRPRGGCISNDSPRRSFTTEKRNRNLLYEYAREGYSALPQLDIERFCACPEEAAHALELRKGELRSADLPAIISTWQELRQLQEQIRSLEEEKAAVTEAVRALLANQDSGEVQQDPKYQGLRARGREIRKELVHLYPREAQLEEQFYLQALKLPNQTHPDVPVGDESQARVLHMVGDKPVFSFQPRGHLEIGEKLDIIRQKRLSHVSGHRSYYLRGAGALLQHGLVNFTFNKLLRRGFTPMTVPDLLRGAVFEGCGMTPNANPSQIYNIDPARFKDLNLAGTAEVGLAGYFMDHTVAFRDLPVRMVCSSTCYRAETNTGQEPRGLYRVHHFTKAGMFGVTGPGLEQSSQLLEEFLSLQMEILTELGLHFRVLDMPTQELGLPAYRKFDIEAWMPGRGRFGEVTSASNCTDFQSRRLHIMFQTEAGELQFAHTVNATACAVPRLLIALLESNQQKDGSVLVPPALQSYLGTDRITAPTHVPLQYIGPNQPRKPGLPGQPAVS

SEQ ID NO: 11583 - protein, 328 aa, Homo sapiens
MVGDKPVFSFQPRGHLEIGEKLDIIRQKRLSHVSGHRSYYLRGAGALLQHGLVNFTFNKLLRRGFTPMTVPDLLRGAVFEGCGMTPNANPSQIYNIDPARFKDLNLAGTAEVGLAGYFMDHTVAFRDLPVRMVCSSTCYRAETNTGQEPRGLYRVHHFTKAGMFGVTGPGLEQSSQLLEEFLSLQMEILTELGLHFRVLDMPTQELGLPAYRKFDIEAWMPGRGRFGEVTSASNCTDFQSRRLHIMFQTEAGELQFAHTVNATACAVPRLLIALLESNQQKDGSVLVPPALQSYLGTDRITAPTHVPLQYIGPNQPRKPGLPGQPAVS

SEQ ID NO: 11584 - protein, 539 aa, Homo sapiens [sequence omitted]

SEQ ID NO: 11585 - protein, 355 aa, Homo sapiens
MALRLLKLAATSASARVVAAGAQRVRGIHSSVQCKLRYGMWHFLLGDKASKRLTERSRVITVDGNICTGKGKLAKEIAEKLGFKHFPEAGIHYPDSTTGDGKPLATDYNGNCSLEKFYDDPRSNDGNSYRLQSWLYSSRLLQYSDALEHLLTTGQGVVLERSIFSDFVFLEAMYNQGFIRKQCVDHYNEVKSVTICDYLPPHLVIYIDVPVPEVQRRIQKKGDPHEMKITSAYLQDIENAYKKTFLPEMSEKCEVLQYSAREAQDSKKVVEDIEYLKFDKGPWLKQDNRTLYHLRLLVQDKFEVLNYTSIPIFLPEVTIGAHQTDRVLHQFRELPGRKYSPGYNTEVGDKWIWLK

SEQ ID NO: 11586 - protein, 201 aa, Homo sapiens
MALRLLKLAATSASARVVAAGAQRVRGIHSSVQCKLRYGMWHFLLGDKASKRLTERSRVITVDGNICTGKGKLAKEIAEKLGFKHFPEAGIHYPDSTTGDGKPLATDYNGNCSLEKFYDDPRSNDGNSYRLQSWLYSSRLLQYSDALEHLLTTGQGVVLERSIFSDFVFLEAMYNQGFIRKQCESALQTHFWVCGATLQGL

SEQ ID NO: 11587 - protein, 429 aa, Homo sapiens [sequence omitted]

SEQ ID NO: 11588 - protein, 355 aa, Homo sapiens; identical to SEQ ID NO: 11585

SEQ ID NO: 11589 - protein, 653 aa, Homo sapiens
MADTLPSEFDVIVIGTGLPESIIAAACSRSGRRVLHVDSRSYYGGNWASFSFSGLLSWLKEYQENSDIVSDSPVWQDQILENEEAIALSRKDKTIQHVEVFCYASQDLHEDVEEAGALQKNHALVTSANSTEAADSAFLPTEDESLSTMSCEMLTEQTPSSDPENALEVNGAEVTGEKENHCDDKTCVPSTSAEDMSENVPIAEDTTEQPKKNRITYSQIIKEGRRFNIDLVSKLLYSRGLLIDLLIKSNVSRYAEFKNITRILAFREGRVEQVPCSRADVFNSKQLTMVEKRMLMKFLTFCMEYEKYPDEYKGYEEITFYEYLKTQKLTPNLQYIVMHSIAMTSETASSTIDGLKATKNFLHCLGRYGNTPFLFPLYGQGELPQCFCRMCAVFGGIYCLRHSVQCLVVDKESRKCKAIIDQFGQRIISEHFLVEDSYFPENMCSRVQYRQISRAVLITDRSVLKTDSDQQISILTVPAEEPGTFAVRVIELCSSTMTCMKGTYLVHLTCTSSKTAREDLESVVQKLFVPYTEMEIENEQVEKPRILWALYFNMRDSSDISRSCYNDLPSNVYVCSGPDCGLGNDNAVKQAETLFQEICPNEDFCPPPPNPEDIILDGDSLQPEASESSAIPEANSETFKESTNLGNLEESSE

SEQ ID NO: 11590 - protein, 218 aa, Homo sapiens
MEATEPQDMVVYDQSTRDASVLAADRFLSILLSKLDSCFDSVAILTGGFATFSSCFPSLCQGKPAALLPMSLSQPCLPVPSVSLTLILPHLYLGSQKDVLNKDLTTQNGISYVLNASNSCPKPDFICESRFMRVPINDNYCEKLLPWLDKSMEFICKGKLSSCQVIVHCLVGISHSATIAIAYIMKTMGISSDDTYRFMKDRRQSISPNFNFLGQLLE

SEQ ID NO: 11591 - protein, 146 aa, Homo sapiens
MSKTLGHFLMPYVYSTRSKVSDLTDPALFQGESEPIESKHVQISKQDCSCKSGLATRLRQQQQSSRELIQYLLRLRRPSRCLMKSLFWLKPSTSPPPLKKPTGKHINERNPQKGMGNKENSLKTSPGPCHWSAWFLCVLGLGDVKK

SEQ ID NO: 11592 - protein, 146 aa, Homo sapiens; identical to SEQ ID NO: 11591

SEQ ID NO: 11593 - protein, 146 aa, Homo sapiens; identical to SEQ ID NO: 11591

SEQ ID NO: 11594 - protein, 89 aa, Homo sapiens
MGILSVDLLITLQILPVFFSNCLFLALYDSVILLKHVVLLLSRSKSTRGEWRRMLTSEGLRCVWKSFLLDAYKQLNCPPSGFSKDGHIL

SEQ ID NO: 11595 - protein, 89 aa, Homo sapiens; identical to SEQ ID NO: 11594

SEQ ID NO: 11596 - protein, 146 aa, Homo sapiens; identical to SEQ ID NO: 11591

SEQ ID NO: 11597 - protein, 389 aa, Homo sapiens
MGKMAAAVGSVATLATEPGEDAFRKLFRFYRQSRPGTADLEGVIDFSAAHAARGKGPGAQKVIKSQLNVSSVSEQNAYRAGLQPVSKWQAYGLKGYPGFIFIPNPFLPGYQWHWVKQCLKLYSQKPNVCNLDKHMSKEETQDLWEQSKEFLRYKEATKRRPRSLLEKLRWVTVGYHYNWDSKKYSADHYTPFPSDLGFLSEQVAAACGFEDFRAEAGILNYYRLDSTLGIHVDRSELDHSKPLLSFSFGQSAIFLLGGLQRDEAPTAMFMHSGDIMIMSGFSRLLNHAVPRVLPNPEGEGLPHCLEAPLPAVLPRDSMVEPCSMEDWQVCASYLKTARVNMTVRQVLATDQNFPLEPIEDEKRDISTEGFCHLDDQNSEVKRARINPDS

SEQ ID NO: 11598 - protein, 557 aa, Homo sapiens
MDGIVPDIAVGTKRGSDELFSTCVTNGPFIMSSNSASAANGNDSKKFKGDSRSAGVPSRVIHIRKLPIDVTEGEVISLGLPFGKVTNLLMLKGKNQAFIEMNTEEAANTMVNYYTSVTPVLRGQPIYIQFSNHKELKTDSSPNQARAQAALQAVNSVQSGNLALAASAAAVDAGMAMAGQSPVLRIIVENLFYPVTLDVLHQIFSKFGTVLKIITFTKNNQFQALLQYADPVSAQHAKLSLDGQNIYNACCTLRIDFSKLTSLNVKYNNDKSRDYTRPDLPSGDSQPSLDQTMAAAFGAPGIISASPYAGAGFPPTFAIPQAAGLSVPNVHGALAPLAIPSAAAAAAAAGRIAIPGLAGAGNSVLLVSNLNPERVTPQSLFILFGVYGDVQRVKILFNKKENALVQMADGNQAQLAMSHLNGHKLHGKPIRITLSKHQNVQLPREGQEDQGLTKDYGNSPLHRFKKPGSKNFQNIFPPSATLHLSNIPPSVSEEDLKVLFSSNGGVVKGFKFFQKDRKMALIQMGSVEEAVQALIDLHNHDLGENHHLRVSFSKSTI

SEQ ID NO: 11599 - protein, 550 aa, Homo sapiens
MDGIVPDIAVGTKRGSDELFSTCVTNGPFIMSSNSASAANGNDSKKFKGDSRSAGVPSRVIHIRKLPIDVTEGEVISLGLPFGKVTNLLMLKGKNQAFIEMNTEEAANTMVNYYTSVTPVLRGQPIYIQFSNHKELKTDSSPNQARAQAALQAVNSVQSGNLALAASAAAVDAGMAMAGQSPVLRIIVENLFYPVTLDVLHQIFSKFGTVLKIITFTKNNQFQALLQYADPVSAQHAKLSLDGQNIYNACCTLRIDFSKLTSLNVKYNNDKSRDYTRPDLPSGDSQPSLDQTMAAAFASPYAGAGFPPTFAIPQAAGLSVPNVHGALAPLAIPSAAAAAAAAGRIAIPGLAGAGNSVLLVSNLNPERVTPQSLFILFGVYGDVQRVKILFNKKENALVQMADGNQAQLAMSHLNGHKLHGKPIRITLSKHQNVQLPREGQEDQGLTKDYGNSPLHRFKKPGSKNFQNIFPPSATLHLSNIPPSVSEEDLKVLFSSNGGVVKGFKFFQKDRKMALIQMGSVEEAVQALIDLHNHDLGENHHLRVSFSKSTI

SEQ ID NO: 11600 - protein, 531 aa, Homo sapiens
MDGIVPDIAVGTKRGSDELFSTCVTNGPFIMSSNSASAANGNDSKKFKGDSRSAGVPSRVIHIRKLPIDVTEGEVISLGLPFGKVTNLLMLKGKNQAFIEMNTEEAANTMVNYYTSVTPVLRGQPIYIQFSNHKELKTDSSPNQARAQAALQAVNSVQSGNLALAASAAAVDAGMAMAGQSPVLRIIVENLFYPVTLDVLHQIFSKFGTVLKIITFTKNNQFQALLQYADPVSAQHAKLSLDGQNIYNACCTLRIDFSKLTSLNVKYNNDKSRDYTRPDLPSGDSQPSLDQTMAAAFGLSVPNVHGALAPLAIPSAAAAAAAAGRIAIPGLAGAGNSVLLVSNLNPERVTPQSLFILFGVYGDVQRVKILFNKKENALVQMADGNQAQLAMSHLNGHKLHGKPIRITLSKHQNVQLPREGQEDQGLTKDYGNSPLHRFKKPGSKNFQNIFPPSATLHLSNIPPSVSEEDLKVLFSSNGGVVKGFKFFQKDRKMALIQMGSVEEAVQALIDLHNHDLGENHHLRVSFSKSTI

SEQ ID NO: 11601 - protein, 1245 aa, Homo sapiens
MRRRGPVGWPGAACVMSALCWGRGAAGLKRALRPCGRPGLPGKEGTAGGVCGPRRSSSASPQEQDQDRRKDWGHVELLEVLQARVRQLQAESVSEVVVNRVDVARLPECGSGDGSLQPPRKVQMGAKDATPVPCGRWAKILEKDKRTQQMRMQRLKAKLQMPFQSGEFKALTRRLQVEPRLLSKQMAGCLEDCTRQAPESPWEEQLARLLQEAPGKLSLDVEQAPSGQHSQAQLSGQQQRLLAFFKCCLLTDQLPLAHHLLVVHHGQRQKRKLLTLDMYNAVMLGWARQGAFKELVYVLFMVKDAGLTPDLLSYAAALQCMGRQDQDAGTIERCLEQMSQEGLKLQALFTAVLLSEEDRATVLKAVHKVKPTFSLPPQLPPPVNTSKLLRDVYAKDGRVSYPKLHLPLKTLQCLFEKQLHMELASRVCVVSVEKPTLPSKEVKHARKTLKTLRDQWEKALCRALRETKNRLEREVYEGRFSLYPFLCLLDEREVVRMLLQVLQALPAQGESFTTLARELSARTFSRHVVQRQRVSGQVQALQNHYRKYLCLLASDAEVPEPCLPRQYWEELGAPEALREQPWPLPVQMELGKLLAEMLVQATQMPCSLDKPHRSSRLVPVLYHVYSFRNVQQIGILKPHPAYVQLLEKAAEPTLTFEAVDVPMLCPPLPWTSPHSGAFLLSPTKLMRTVEGATQHQELLETCPPTALHGALDALTQLGNCAWRVNGRVLDLVLQLFQAKGCPQLGVPAPPSEAPQPPEAHLPHSAAPARKAELRRELAHCQKVAREMHSLRAEALYRLSLAQHLRDRVFWLPHNMDFRGRTYPCPPHFNHLGSDVARALLEFAQGRPLGPHGLDWLKIHLVNLTGLKKREPLRKRLAFAEEVMDDILDSADQPLTGRKWWMGAEEPWQTLACCMEVANAVRASDPAAYVSHLPVHQDGSCNGLQHYAALGRDSVGAASVNLEPSDVPQDVYSGVAAQVEVFRRQDAQRGMRVAQVLEGFITRKVVKQTVMTVVYGVTRYGGRLQIEKRLRELSDFPQEFVWEASHYLVRQVFKSLQEMFSGTRAIQHWLTESARLISHMGSVVEWVTPLGVPVIQPYRLDSKVKQIGGGIQSITYTHNGDISRKPNTRKQKNGFPPNFIHSLDSSHMMLTALHCYRKGLTFVSVHDCYWTHAADVSVMNQVCREQFVRLHSEPILQDLSRFLVKRFCSEPQKILEASQLKETLQAVPKPGAFDLEQVKRSTYFFS

SEQ ID NO: 11602 - protein, 1021 aa, Homo sapiens
MGAKDATPVPCGRWAKILEKDKRTQQMRMQRLKAKLQMPFQSGEFKALTRRLQVEPRLLSKQMAGCLEDCTRQAPESPWEEQLARLLQEAPGKLSLDVEQAPSGQHSQAQLSGQQQRLLAFFKCCLLTDQLPLAHHLLVVHHGQRQKRKLLTLDMYNAVMLGWARQGAFKELVYVLFMVKDAGLTPDLLSYAAALQCMGRQDQDAGTIERCLEQMSQEGLKLQALFTAVLLSEEDRATVLKAVHKVKPTFSLPPQLPPPVNTSKLLRDVYAKDGRVSYPKLHLPLKTLQCLFEKQLHMELASRVCVVSVEKPTLPSKEVKHARKTLKTLRDQWEKALCRALRETKNRLEREVYEGRFSLYPFLCLLDEREVVRMLLQVLQALPAQGESFTTLARELSARTFSRHVVQRQRVSGQVQALQNHYRKYLCLLASDAEVPEPCLPRQYWEELGAPEALREQPWPLPVQMELGKLLAEMLVQATQMPCSLDKPHRSSRLVPVLYHVYSFRNVQQIGILKPHPAYVQLLEKAAEPTLTFEAVDVPMLCPPLPWTSPHSGAFLLSPTKLMRTVEGATQHQELLETCPPTALHGALDALTQLGNCAWRVNGRVLDLVLQLFQAKGCPQLGVPAPPSEAPQPPEAHLPHSAAPARKAELRRELAHCQKVAREMHSLRAEALYRLSLAQHLRDRVFWLPHNMDFRGRTYPCPPHFNHLGSDVARALLEFAQGRPLGPHGLDWLKIHLVNLTGLKKREPLRKRLAFAEEVMDDILDSADQPLTGRKWWMGAEEPWQTLACCMEVANAVRASDPAAYVSHLPVHQDGSCNGLQHYAALGRDSVGAASVNLEPSDVPQDVYSGVAAQVEVFRRQDAQRGMRVAQVLEGFITRKVVKQTVMTVVYGVTRYGGRLQIEKRLRELSDFPQEFVWEASHYLVRQVFKSLQEMFSGTRAIQHWLTESARLISHMGSVVEWVTPLGVPVIQPYRLDSKVKEVEFRASPTPTTETSAESPTHVSRRTASRPTSSTRWTPPT

SEQ ID NO: 11603 - protein, 658 aa, Homo sapiens
MPYVETNEELIPLLMLLSLAFAAPAASIMVAEGMLYCLQSRLWGRAGGPAGAEGSINAGGCNFNSFLRRTVRFVGVHVFGLCATALVTDVIQLATGYHTPFFLTVCKPNYTLLGTSCEVNPYITQDICSGHDIHAILSARKTFPSQHATLSAFAAVYVSMYFNSVISDTTKLLKPILVFAFAIAAGVCGLTQITQYRSHPVDVYAGFLIGAGIAAYLACHAVGNFQAPPAEKPAAPAPAKDALRALTQRGHDSVYQQNKSVSTDELGPPGRLEGAPRPVAREKTSLGSLKRASVDVDLLAPRSPMAKENMVTFSHTLPRASAPSLDDPARRHMTIHVPLDASRSKQLISEWKQKSLEGRGLGLPDDASPGHLRAPAEPMAEEEEEEEDEEEEEEEEEEEDEGPAPPSLYPTVQARPGLGPRVILPPRAGPPPLVHIPEEGAQTGAGLSPKSGAGVRAKWLMMAEKSGAAVANPPRLLQVIAMSKAPGAPGPKAAETASSSSASSDSSQYRSPSDRDSASIVTIDAHAPHHPVVHLSAGGAPWEWKAAGGGAKAEADGGYELGDLARGFRGGAKPPGVSPGSSVSDVDQEEPRFGAVATVNLATGEGLPPLGAADGALGPGSRESTLRRHAGGLGLAEREAEAEAEGYFRKMQARRFPD

SEQ ID NO: 11604 - protein, 519 aa, Homo sapiens [sequence omitted]

SEQ ID NO: 11605 - protein, 686 aa, Homo sapiens
MPYVETNEELIPLLMLLSLAFAAPAASIMVAEGMLYCLQSRLWGRAGGPAGAEGSINAGGCNFNSFLRRTVRFVGVHVFGLCATALVTDVIQLATGYHTPFFLTVCKPNYTLLGTSCEVNPYITQDICSGHDIHAILSARKTFPSQHATLSAFAAVYVSVSPAPHCPSQALLLTRGEPSLTPTPMPQMYFNSVISDTTKLLKPILVFAFAIAAGVCGLTQITQYRSHPVDVYAGFLIGAGIAAYLACHAVGNFQAPPAEKPAAPAPAKDALRALTQRGHDSVYQQNKSVSTDELGPPGRLEGAPRPVAREKTSLGSLKRASVDVDLLAPRSPMAKENMVTFSHTLPRASAPSLDDPARRHMTIHVPLDASRSKQLISEWKQKSLEGRGLGLPDDASPGHLRAPAEPMAEEEEEEEDEEEEEEEEEEEDEGPAPPSLYPTVQARPGLGPRVILPPRAGPPPLVHIPEEGAQTGAGLSPKSGAGVRAKWLMMAEKSGAAVANPPRLLQVIAMSKAPGAPGPKAAETASSSSASSDSSQYRSPSDRDSASIVTIDAHAPHHPVVHLSAGGAPWEWKAAGGGAKAEADGGYELGDLARGFRGGAKPPGVSPGSSVSDVDQEEPRFGAVATVNLATGEGLPPLGAADGALGPGSRESTLRRHAGGLGLAEREAEAEAEGYFRKMQARRFPD

SEQ ID NO: 11606 - protein, 686 aa, Homo sapiens; identical to SEQ ID NO: 11605

SEQ ID NO: 11607 - protein, 236 aa, Homo sapiens
MARPLVPSSQKALLLELKGLQEEPVEGFRVTLVDEGDLYNWEVAIFGPPNTYYEGGYFKARLKFPIDYPYSPPAFRFLTKMWHPNIYETGDVCISILHPPVDDPQSGELPSERWNPTQNVRTILLSVISLLNEPNTFSPANVDASVMYRKWKESKGKDREYTDIIRKQVLGTKVDAERDGVKVPTTLAEYCVKTKAPAPDEGSDLFYDDYYEDGEVEEEADSCFGDDEDDSGTEES

SEQ ID NO: 11608 - protein, 236 aa, Homo sapiens; identical to SEQ ID NO: 11607

SEQ ID NO: 11609 - protein, 670 aa, Homo sapiens
MAKRIKAKPTSDKPGSPYRSVTHFDSLAVIDIPGADTLDKLFDHAVSKFGKKDSLGTREILSEENEMQPNGKVFKKLILGNYKWMNYLEVNRRVNNFGSGLTALGLKPKNTIAIFCETRAEWMIAAQTCFKYNFPLVTLYATLGKEAVVHGLNESEASYLITSVELLESKLKTALLDISCVKHIIYVDNKAINKAEYPEGFEIHSMQSVEELGSNPENLGIPPSRPTPSDMAIVMYTSGSTGRPKGVMMHHSNLIAGMTGQCERIPGLGPKDTYIGYLPLAHVLELTAEISCFTYGCRIGYSSPLTLSDQSSKIKKGSKGDCTVLKPTLMAAVPEIMDRIYKNVMSKVQEMNYIQKTLFKIGYDYKLEQIKKGYDAPLCNLLLFKKVKALLGGNVRMMLSGGAPLSPQTHRFMNVCFCCPIGQGYGLTESCGAGTVTEVTDYTTGRVGAPLICCEIKLKDWQEGGYTINDKPNPRGEIVIGGQNISMGYFKNEEKTAEDYSVDENGQRWFCTGDIGEFHPDGCLQIIDRKKDLVKLQAGEYVSLGKVEAALKNCPLIDNICAFAKSDQSYVISFVVPNQKRLTLLAQQKGVEGTWVDICNNPAMEAEILKEIREAANAMKLERFEIPIKVRLSPEPWTPETGLVTDAFKLKRKELRNHYLKDIERMYGGK

SEQ ID NO: 11610 - protein, 711 aa, Homo sapiens
MKLKLNVLTIILLPVHLLITIYSALIFIPWYFLTNAKKKNAMAKRIKAKPTSDKPGSPYRSVTHFDSLAVIDIPGADTLDKLFDHAVSKFGKKDSLGTREILSEENEMQPNGKVFKKLILGNYKWMNYLEVNRRVNNFGSGLTALGLKPKNTIAIFCETRAEWMIAAQTCFKYNFPLVTLYATLGKEAVVHGLNESEASYLITSVELLESKLKTALLDISCVKHIIYVDNKAINKAEYPEGFEIHSMQSVEELGSNPENLGIPPSRPTPSDMAIVMYTSGSTGRPKGVMMHHSNLIAGMTGQCERIPGLGPKDTYIGYLPLAHVLELTAEISCFTYGCRIGYSSPLTLSDQSSKIKKGSKGDCTVLKPTLMAAVPEIMDRIYKNVMSKVQEMNYIQKTLFKIGYDYKLEQIKKGYDAPLCNLLLFKKVKALLGGNVRMMLSGGAPLSPQTHRFMNVCFCCPIGQGYGLTESCGAGTVTEVTDYTTGRVGAPLICCEIKLKDWQEGGYTINDKPNPRGEIVIGGQNISMGYFKNEEKTAEDYSVDENGQRWFCTGDIGEFHPDGCLQIIDRKKDLVKLQAGEYVSLGKVEAALKNCPLIDNICAFAKSDQSYVISFVVPNQKRLTLLAQQKGVEGTWVDICNNPAMEAEILKEIREAANAMKLERFEIPIKVRLSPEPWTPETGLVTDAFKLKRKELRNHYLKDIERMYGGK

SEQ ID NO: 11611 - protein, 711 aa, Homo sapiens; identical to SEQ ID NO: 11610

SEQ ID NO: 11612 - protein, 1108 aa, Homo sapiens
MFLGLGRFSRLVLWFAAFRKLLGHHGLASAKFLWCLCLLSVMSLPQQVWTLPYKIGVVGPWACDSLFSKALPEVAARLAIERINRDPSFDLSYSFEYVILNEDCQTSRALSSFISHHQMASGFIGPTNPGYCEAASLLGNSWDKGIFSWACVNYELDNKISYPTFSRTLPSPIRVLVTVMKYFQWAHAGVISSDEDIWVHTANRVASALRSHGLPVGVVLTTGQDSQSMRKALQRIHQADRIRIIIMCMHSALIGGETQMHLLECAHDLKMTDGTYVFVPYDALLYSLPYKHTPYQVLRNNPKLREAYDAVLTITVESQEKTFYQAFTEAAARGEIPEKLEFDQVSPLFGTIYNSIYFIAQAMNNAMKENGQAGAASLVQHSRNMQFHGFNQLMRTDSNGNGISEYVILDTNLKEWELHSTYTVDMEMELLRFGGTPIHFPGGRPPRADAKCWFAEGKICHGGIDPAFAMMVCLTLLIALLSINGFAYFIRRRINKIQLIKGPNRILLTLEDVTFINPHFGSKRGSRASVSFQITSEVQSGRSPRLSFSSGSLTPATYENSNIAIYEGDWVWLKKFSLGDFGDLKSIKSRASDVFEMMKDLRHENINPLLGFFYDSGMFAIVTEFCSRGSLEDILTNQDVKLDWMFKSSLLLDLIKGMKYLHHREFVHGRLKSRNCVVDGRFVLKVTDYGFNDILEMLRLSEEESSMEELLWTAPELLRAPRGSRLGSFAGDVYSFAIIMQEVMVRGTPFCMMDLPAQEIINRLKKPPPVYRPVVPPEHAPPECLQLMKQCWAEAAEQRPTFDEIFNQFKTFNKGKKTNIIDSMLRMLEQYSSNLEDLIRERTEELEIEKQKTEKLLTQMLPPSVAESLKKGCTVEPEGFDLVTLYFSDIVGFTTISAMSEPIEVVDLLNDLYTLFDAIIGSHDVYKVETIGDAYMVASGLPKRNGSRHAAEIANMSLDILSSVGTFKMRHMPEVPVRIRIGLHSGPVVAGVVGLTMPRYCLFGDTVNTASRMESTGLPYRIHVSLSTVTILQNLSEGYEVELRGRTELKGKGTEETFWLIGKKGFMKPLPVPPPVDKDGQVGHGLQPVEIAAFQRRKAERQLVRNKP

SEQ ID NO: 11613 - protein, 225 aa, Homo sapiens
MVLVHTTLPSQEVQALLEGTGRQAVLKGMGSGQLQNLGAAVAILGGPGTVQGVVRFLQLTPERCLIEGTIDGLEPGLHGLHVHQYGDLTNNCNSCGNHFNPDGASHGGPQDSDRHRGDLGNVRADADGRAIFRMEDEQLKVWDVIGRSLIIDEGEDDLGRGGHPLSKITGNSGERLACGIIARSAGLFQNPKQICSCDGLTIWEERGRPIAGKGRKESAQPPAHL

SEQ ID NO: 11614 - protein, 165 aa, Homo sapiens
MREKMTWAGEAIPYPRSQGTPGRGWPVASLHAPLAFSRTPSRSALAMASPSGRSEAGPSLARAERSQRSPLPTFEQDLTLALLLSSRASTFHFQRGPEGLCLPSLWRAQYRAGAAVVFPWQMKVLFSFGTWCFVLVSMPLMGLVNIALLLSFVSGPPLSIGAKQT

SEQ ID NO: 11615 - protein, 165 aa, Homo sapiens; identical to SEQ ID NO: 11614

SEQ ID NO: 11616 - protein, 226 aa, Homo sapiens
MGPLPRTVELFYDVLSPYSWLGFEILCRYQNIWNINLQLRPSLITGIMKDSGNKPPGLLPRKGLYMANDLKLLRHHLQIPIHFPKDFLSVMLEKGSLSAMRFLTAVNLEHPEMLEKASRELWMRVWSRNEDITEPQSILAAAEKAGMSAEQAQGLLEKIATPKVKNQLKETTEAACRYGAFGLPITVAHVDGQTHMLFGSDRMELLAHLLGEKWMGPIPPAVNARL

SEQ ID NO: 11617 - protein, 282 aa, Homo sapiens
MGPLPRTVELFYDVLSPYSWLGFEILCRYQNIWNINLQLRPSLITGIMKDSGNKPPGLLPRKGLYMANDLKLLRHHLQIPIHFPKDFLSVMLEKGSLSAMRFLTAVNLEHPEMLEKASRELWMRVWSRVSVGLWESSGRTLDDFLTFPRHVFRVMILPPPGGSTVLPVTPLSPHRLPAVFSSSQNEDITEPQSILAAAEKAGMSAEQAQGLLEKIATPKVKNQLKETTEAACRYGAFGLPITVAHVDGQTHMLFGSDRMELLAHLLGEKWMGPIPPAVNARL

SEQ ID NO: 11618 - protein, 235 aa, Homo sapiens
MKDSGNKPPGLLPRKGLYMANDLKLLRHHLQIPIHFPKDFLSVMLEKGSLSAMRFLTAVNLEHPEMLEKASRELWMRVWSRVSVGLWESSGRTLDDFLTFPRHVFRVMILPPPGGSTVLPVTPLSPHRLPAVFSSSQNEDITEPQSILAAAEKAGMSAEQAQGLLEKIATPKVKNQLKETTEAACRYGAFGLPITVAHVDGQTHMLFGSDRMELLAHLLGEKWMGPIPPAVNARL

SEQ ID NO: 11619 - protein, 896 aa, Homo sapiens [sequence omitted]

SEQ ID NO: 11620 - protein, 893 aa, Homo sapiens
MEPPLPVGAQPLATVEGMEMKGPLREPCALTLAQRNGQYELIIQLHEKEQHVQDIIPINSHFRCVQEAEETLLIDIASNSGCKIRVQGDWIRERRFEIPDEEHCLKFLSAVLAAQKAQSQLLVPEQKDSSSWYQKLDTKDKPSVFSGLLGFEDNFSSMNLDKKINSQNQPTGIHREPPPPPFSVNKMLPREKEASNKEQPKVTNTMRKLFVPNTQSGQREGLIKHILAKREKEYVNIQTFRFFVGTWNVNGQSPDSGLEPWLNCDPNPPDIYCIGFQELDLSTEAFFYFESVKEQEWSMAVERGLHSKAKYKKVQLVRLVGMMLLIFARKDQCRYIRDIATETVGTGIMGKMGNKGGVAVRFVFHNTTFCIVNSHLAAHVEDFERRNQDYKDICARMSFVVPNQTLPQLNIMKHEVVIWLGDLNYRLCMPDANEVKSLINKKDLQRLLKFDQLNIQRTQKKAFVDFNEGEIKFIPTYKYDSKTDRWDSSGKCRVPAWCDRILWRGTNVNQLNYRSHMELKTSDHKPVSALFHIGVKVVDERRYRKVFEDSVRIMDRMENDFLPSLELSRREFVFENVKFRQLQKEKFQISNNGQVPCHFSFIPKLNDSQYCKPWLRAEPFEGYLEPNETVDISLDVYVSKDSVTILNSGEDKIEDILVLHLDRGKDYFLTISGNYLPSCFGTSLEALCRMKRPIREVPVTKLIDLEKSLLQMVPLDEGASERPLQVPKEIWLLVDHLFKYACHQEDLFQTPGMQEELQQIIDCLDTSIPETIPGSNHSVAEALLIFLEALPEPVICYELYQRCLDSAYDPRICRQVISQLPRCHRNVFRYLMAFLRELLKFSEYNSVNANMIATLFTSLLLRPPPNLMARQTPSDRQRAIQFLLGFLLGSEED

SEQ ID NO: 11621 - protein, 901 aa, Homo sapiens
MEPPLPVGAQPLATVEGMEMKGPLREPCALTLAQRNGQYELIIQLHEKEQHVQDIIPINSHFRCVQEAEETLLIDIASNSGCKIRVQGDWIRERRFEIPDEEHCLKFLSAVLAAQKAQSQLLVPEQKDSSSWYQKLDTKDKPSVFSGLLGFEDNFSSMNLDKKINSQNQPTGIHREPPPPPFSVNKMLPREKEASNKEQPKVTNTMRKLFVPNTQSGQREGLIKHILAKREKEYVNIQTFRFFVGTWNVNGQSPDSGLEPWLNCDPNPPDIYCIGFQELDLSTEAFFYFESVKEQEWSMAVERGLHSKAKYKKVQLVRLVGMMLLIFARKDQCRYIRDIATETVGTGIMGKMGNKGGVAVRFVFHNTTFCIVNSHLAAHVEDFERRNQDYKDICARMSFVVPNQTLPQLNIMKHEVVIWLGDLNYRLCMPDANEVKSLINKKDLQRLLKFDQLNIQRTQKKAFVDFNEGEIKFIPTYKYDSKTDRWDSSGKCRVPAWCDRILWRGTNVNQLNYRSHMELKTSDHKPVSALFHIGVKVVDERRYRKVFEDSVRIMDRMENDFLPSLELSRREFVFENVKFRQLQKEKFQISNNGQVPCHFSFIPKLNDSQYCKPWLRAEPFEGYLEPNETVDISLDVYVSKDSVTILNSGEDKIEDILVLHLDRGKDYFLTISGNYLPSCFGTSLEALCRMKRPIREVPVTKLIDLEEDSFLEKEKSLLQMVPLDEGASERPLQVPKEIWLLVDHLFKYACHQEDLFQTPGMQEELQQIIDCLDTSIPETIPGSNHSVAEALLIFLEALPEPVICYELYQRCLDSAYDPRICRQVISQLPRCHRNVFRYLMAFLRELLKFSEYNSVNANMIATLFTSLLLRPPPNLMARQTPSDRQRAIQFLLGFLLGSEED

SEQ ID NO: 11622 - protein, 354 aa, Homo sapiens
MVGKWHLGFYRKECMPTRRGFDTFFGSLLGSGDYYTHYKCDSPGMRRYAAMLSCLDEAINNVTLALKTYGFYNNSIIIYSSDNGGQPTAGGSNWPLRGSKGTYWEGGIRAVGFVHSPLLKNKGTVCKELVHITDWYPTLISLAEGQIDEDIQLDGYDIWETISEGLRSPRVDILHNIDPIYTKAKNGSWAAGYGIWNTAIQSAIRVQHWKLLTGNPGYSDWVPPQSFSNLGPNRWHNERITLSTGKSVWLFNITADPYERVDLSNRYPGIVKKLLRRLSQFNKTAVPVRYPPKDPRSNPRLNGGVWGPWYKEETKKKKPSKNQAEKKQKKSKKKKKKQQKAVSGSTCHSGVTCG

SEQ ID NO: 11623 - protein, 427 aa, Homo sapiens
MVGKWHLGFYRKECMPTRRGFDTFFGSLLGSGDYYTHYKCDSPGMCGYDLYENDNAAWDYDNGIYSTQMYTQRVQQILASHNPTKPIFLYIAYQAVHSPLQAPGRYFEHYRSIININRRRYAAMLSCLDEAINNVTLALKTYGFYNNSIIIYSSDNGGQPTAGGSNWPLRGSKGTYWEGGIRAVGFVHSPLLKNKGTVCKELVHITDWYPTLISLAEGQIDEDIQLDGYDIWETISEGLRSPRVDILHNIDPIYTKAKNGSWAAGYGIWNTAIQSAIRVQHWKLLTGNPGYSDWVPPQSFSNLGPNRWHNERITLSTGKSVWLFNITADPYERVDLSNRYPGIVKKLLRRLSQFNKTAVPVRYPPKDPRSNPRLNGGVWGPWYKEETKKKKPSKNQAEKKQKKSKKKKKKQQKAVSGSTCHSGVTCG

SEQ ID NO: 11624 - protein, 510 aa, Homo sapiens
MEEPQAGDAARFSCPPNFTAKPPASESPRFSLEALTGPDTELWLIQAPADFAPECFNGRHVPLSGSQIVKGKLAGKRHRYRVLSSCPQAGEATLLAPSTEAGGGLTCASAPQGTLRILEGPQQSLSGSPLQPIPASPPPQIPPGLRPRFCAFGGNPPVTGPRSALAPNLLTSGKKKKEMQVTEAPVTQEAVNGHGALEVDMALGSPEMDVRKKKKKKNQQLKEPEAAGPVGTEPTVETLEPLGVLFPSTTKKRKKPKGKETFEPEDKTVKQEQINTEPLEDTVLSPTKKRKRQKGTEGMEPEEGVTVESQPQVKVEPLEEAIPLPPTKKRKKEKGQMAMMEPGTEAMEPVEPEMKPLESPGGTMAPQQPEGAKPQAQAALAAPKKKTKKEKQQDATVEPETEVVGPELPDDLEPQAAPTSTKKKKKKKERGHTVTEPIQPLEPELPGEGQPEARATPGSTKKRKKQSQESRMPETVPQEEMPGPPLNSESGEEAPTGRDKKRKQQQQQPV

SEQ ID NO: 11625 - protein, 512 aa, Homo sapiens
MEEPQAGGEDAARFSCPPNFTAKPPASESPRFSLEALTGPDTELWLIQAPADFAPECFNGRHVPLSGSQIVKGKLAGKRHRYRVLSSCPQAGEATLLAPSTEAGGGLTCASAPQGTLRILEGPQQSLSGSPLQPIPASPPPQIPPGLRPRFCAFGGNPPVTGPRSALAPNLLTSGKKKKEMQVTEAPVTQEAVNGHGALEVDMALGSPEMDVRKKKKKKNQQLKEPEAAGPVGTEPTVETLEPLGVLFPSTTKKRKKPKGKETFEPEDKTVKQEQINTEPLEDTVLSPTKKRKRQKGTEGMEPEEGVTVESQPQVKVEPLEEAIPLPPTKKRKKEKGQMAMMEPGTEAMEPVEPEMKPLESPGGTMAPQQPEGAKPQAQAALAAPKKKTKKEKQQDATVEPETEVVGPELPDDLEPQAAPTSTKKKKKKKERGHTVTEPIQPLEPELPGEGQPEARATPGSTKKRKKQSQESRMPETVPQEEMPGPPLNSESGEEAPTGRDKKRKQQQQQPV

SEQ ID NO: 11626 - protein, 273 aa, Homo sapiens
MDPGKDKEGVPQPSGPPARKKFVIPLDEDEVPPGVAKPLFRSTQSLPTVDTSAQAAPQTYAEYAISQPLEGAGATCPTGSEPLAGETPNQALKPGAKSNSIIVSPRQRGNPVLKFVRNVPWEFGDVIPDYVLGQSTCALFLSLRYHNLHPDYIHGRLQSLGKNFALRVLLVQVDVKDPQQALKELAKMCILADCTLILAWSPEEAGRYLETYKAYEQKPADLLMEKLEQDFVSRSLEQLIAASREDLALCPGLGPQKARRLFDVLHEPFLKVP

SEQ ID NO: 11627 - protein, 297 aa, Homo sapiens
MDPGKDKEGVPQPSGPPARKKFVIPLDEDEVPPGVAKPLFRSTQSLPTVDTSAQAAPQTYAEYAISQPLEGAGATCPTGSEPLAGETPNQALKPGAKSNSIIVSPRQRGNPVLKFVRNVPWEFGDVIPDYVLGQSTCALFLSLRYHNLHPDYIHGRLQSLGKNFALRVLLVQVDVKDPQQALKELAKMCILADCTLILAWSPEEAGRYLETYKAYEQKPADLLMEKLEQDFVSRVTECLTTVKSVNKTDSQTLLTTFGSLEQLIAASREDLALCPGLGPQKARRLFDVLHEPFLKVP

SEQ ID NO: 11628 - protein, 297 aa, Homo sapiens; identical to SEQ ID NO: 11627

SEQ ID NO: 11629 - protein, 340 aa, Homo sapiens
MEDAHCTWLSLPGLPPGWALFAVLDGHGGARAARFGARHLPGHVLQELGPEPSEPEGVREALRRAFLSADERLRSLWPRVETGGCTAVVLLVSPRFLYLAHCGDSRAVLSRAGAVAFSTEDHRPLRPRERERIHAAGGTIRRRRVEGSLAVSRALGDFTYKEAPGRPPELQLVSAEPEVAALARQAEDEFMLLASDGVWDTVSGAALAGLVASRLRLGLAPELLCAQLLDTCLCKVLGAWRGTFGAWCSRGREPRGFGEEGFDREARVKLAKEGIGLKRRAWPEVGRAKIQGRSLRDALRHGRVSGRDLRERAWSFGKGRFWVVGAGPEVLISAGRWKSR

SEQ ID NO: 11630 - protein, 429 aa, Homo sapiens
MKLNVDGLLVYFPYDYIYPEQFSYMRELKRTLDAKGHGVLEMPSGTGKTVSLLALIMAYQRAYPLEVTKLIYCSRTVPEIEKVIEELRKLLNFYEKQEGEKLPFLGLALSSRKNLCIHPEVTPLRFGKDVDGKCHSLTASYVRAQYQHDTSLPHCRFYEEFDAHGREVPLPAGIYNLDDLKALGRRQGWCPYFLARYSILHANVVVYSYHYLLDPKIADLVSKELARKAVVVFDEAHNIDNVCIDSMSVNLTRRTLDRCQGNLETLQKTVLRIKETDEQRLRDEYRRLVEGLREASAARETDAHLANPVLPDEVLQEAVPGSIRTAEHFLGFLRRLLEYVKWRLRVQHVVQESPPAFLSGLAQRVCIQRKPLRFCAERLRSLLHTLEITDLADFSPLTLLANFATLVSTYAKGQAQHCGSSRNQKRSHP

SEQ ID NO: 11631 - protein, 760 aa, Homo sapiens [sequence omitted]

SEQ ID NO: 11632 - protein, 736 aa, Homo sapiens
MRELKRTLDAKGHGVLEMPSGTGKTVSLLALIMAYQRAYPLEVTKLIYCSRTVPEIEKVIEELRKLLNFYEKQEGEKLPFLGLALSSRKNLCIHPEVTPLRFGKDVDGKCHSLTASYVRAQYQHDTSLPHCRFYEEFDAHGREVPLPAGIYNLDDLKALGRRQGWCPYFLARYSILHANVVVYSYHYLLDPKIADLVSKELARKAVVVFDEAHNIDNVCIDSMSVNLTRRTLDRCQGNLETLQKTVLRIKETDEQRLRDEYRRLVEGLREASAARETDAHLANPVLPDEVLQEAVPGSIRTAEHFLGFLRRLLEYVKWRLRVQHVVQESPPAFLSGLAQRVCIQRKPLRFCAERLRSLLHTLEITDLADFSPLTLLANFATLVSTYAKGFTIIIEPFDDRTPTIANPILHFSCMDASLAIKPVFERFQSVIITSGTLSPLDIYPKILDFHPVTMATFTMTLARVCLCPMIIGRGNDQVAISSKFETREDIAVIRNYGNLLLEMSAVVPDGIVAFFTSYQYMESTVASWYEQGILENIQRNKLLFIETQDGAETSVALEKYQEACENGRGAILLSVARGKVSEGIDFVHHYGRAVIMFGVPYVYTQSRILKARLEYLRDQFQIRENDFLTFDAMRHAAQCVGRAIRGKTDYGLMVFADKRFARGDKRGKLPRWIQEHLTDANLNLTVDEGVQVAKYFLRQMAQPFHREDQLGLSLLSLEQLESEETLQRIEQIAQQL

SEQ ID NO: 11633 - protein, 288 aa, Homo sapiens
MRSGGRGRPRLRLGERGLMEPLLPPKRRLLPRVRLLPLLLALAVGSAFYTIWSGWHRRTEELPLGRELRVPLIGSLPEARLRRVVGQLDPQRLWSTYLRPLLVVRTPGSPGNLQVRKAAPVTLQLLFLDGEEALKEWGPKDSLYGSRHLAQLMESIPHSPGPTRIQAIELFMLLDLLGAPNPTFYSHFPRTVRWFHRLRSIEKRLHRLNLLQSHPQEVMYFQPGEPFGSVEDDHIPFLRRGVPVLHLISTPFPAVWHTPADTEVNLHPPTVHNLCRILAVFLAEYLGL

SEQ ID NO: 11634 - protein, 382 aa, Homo sapiens
MRSGGRGRPRLRLGERGLMEPLLPPKRRLLPRVRLLPLLLALAVGSAFYTIWSGWHRRTEELPLGRELRVPLIGSLPEARLRRVVGQLDPQRLWSTYLRPLLVVRTPGSPGNLQVRKFLEATLRSLTAGWHVELDPFTASTPLGPVDFGNVVATLDPRAARHLTLACHYDSKLFPPGSTPFVGATDSAVPCALLLELAQALDLELSRAKKQAAPVTLQLLFLDGEEALKEWGPKDSLYGSRHLAQLMESIPHSPGPTRIQAIELFMLLDLLGAPNPTFYSHFPRTVRWFHRLRSIEKRLHRLNLLQSHPQEVMYFQPGEPFGSVEDDHIPFLRRGVPVLHLISTPFPAVWHTPADTEVNLHPPTVHNLCRILAVFLAEYLGL

SEQ ID NO: 11635 - protein, 318 aa, Homo sapiens
MWLPLLLGALLWAVLWLLRDRQSLPASNAFVFITGCDSGFGRLLALQLDQRGFRVLASCLTPSGAEDLQRVASSRLHTTLLDITDPQSVQQAAKWVEMHVKEAGLFGLVNNAGVAGIIGPTPWLTRDDFQRVLNVNTMGPIGVTLALLPLLQQARGRVINITSVLGRLAANGGGYCVSKFGLEAFSDSLRRDVAHFGIRVSIVEPGFFRTPVTNLESLEKTLQACWARLPPATQAHYGGAFLTKYLKMQQRIMNLICDPDLTKVSRCLEHALTARHPRTRYSPGWDAKLLWLPASYLPASLVDAVLTWVLPKPAQAVY

SEQ ID NO: 11636 - protein, 318 aa, Homo sapiens; identical to SEQ ID NO: 11635

SEQ ID NO: 11637 - protein, 354 aa, Homo sapiens
MSLRGSLSRLLQTRVHSILKKSVHSVAVIGAPFSQGQKRKGVEHGPAAIREAGLMKRLSSLGCHLKDFGDLSFTPVPKDDLYNNLIVNPRSVGLANQELAEVVSRAVSDGYSCVTLGGDHSLAIGTISGHARHCPDLCVVWVDAHADINTPLTTSSGNLHGQPVSFLLRELQDKVPQLPGFSWIKPCISSASIVYIGLRDVDPPEHFILKNYDIQYFSMRDIDRLGIQKVMERTFDLLIGKRQRPIHLSFDIDAFDPTLAPATGTPVVGGLTYREGMYIAEEIHNTGLLSALDLVEVNPQLATSEEEAKTTANLAVDVIASSFGQTREGGHIVYDQLPTPSSPDESENQARVRI

SEQ ID NO: 11638 - protein, 354 aa, Homo sapiens; identical to SEQ ID NO: 11637

SEQ ID NO: 11639 - protein, 357 aa, Homo sapiens
MEKYVAAMVLSAAGDALGYYNGKWEFLQDGEKIHRQLAQLGGLDALDVGRWRVSDDTVMHLATAEALVEAGKAPKLTQLYYLLAKHYQDCMEDMDGRAPGGASVHNAMQLKPGKPNGWRIPFNSHEGGCGAAMRAMCIGLRFPHHSQLDTLIQVSIESGRMTHHHPTGYLGALASALFTAYAVNSRPPLQWGKGLMELLPEAKKYIVQSGYFVEENLQHWSYFQTKWENYLKLRGILDGESAPTFPESFGVKERDQFYTSLSYSGWGGSSGHDAPMIAYDAVLAAGDSWKELAHRAFFHGGDSDSTAAIAGCWWGVMYGFKGVSPSNYEKLEYRNRLEETARALYSLGSKEDTVISL

SEQ ID NO: 11640 - protein, 357 aa, Homo sapiens; identical to SEQ ID NO: 11639

SEQ ID NO: 11641 - protein, 168 aa, Homo sapiens [sequence omitted]

SEQ ID NO: 11642 - protein, 173 aa, Homo sapiens
MALRVVRSVRALLCTLRAVPSPAAPCPPRPWQLGVGAVRTLRTGPALLSVRKFTEKHEWVTTENGIGTVGISNFAQEALGDVVYCSLPEVGTKLNKQDEFGALESVKAASELYSPLSGEVTEINEALAENPGLVNKSCCEDGWLIKMTLSNPSELDELMSEEAYEKYIKSIEE

SEQ ID NO: 11643 - protein, 87 aa, Homo sapiens
MALRVVRSVRALLCTLRAVPSPAAPCPPRPWQLGVGAVRTLRTGPALLSVRKFTEKHEWVTTENGIGTVGISNFAQEAWLADQDDTE

SEQ ID NO: 11644 - protein, 612 aa, Homo sapiens
MENQLAKSTEERTFQYQDSLPSLPVPSLEESLKKYLESVKPFANQEEYKKTEEIVQKFQSGIGEKLHQKLLERAKGKRNWLEEWWLNVAYLDVRIPSQLNVNFAGPAAHFEHYWPPKEGTQLERGSITLWHNLNYWQLLRKEKVPVHKVGNTPLDMNQFRMLFSTCKVPGITRDSIMNYFRTESEGRSPNHIVVLCRGRAFVFDVIHEGCLVTPPELLRQLTYIHKKCHSEPDGPGIAALTSEERTRWAKAREYLIGLDPENLALLEKIQSSLLVYSMEDSSPHVTPEDYSEIIAAILIGDPTVRWGDKSYNLISFSNGVFGCNCDHAPFDAMIMVNISYYVDEKIFQNEGRWKGSEKVRDIPLPEELIFIVDEKVLNDINQAKAQYLREASDLQIAAYAFTSFGKKLTKNKMLHPDTFIQLALQLAYYRLHGHPGCCYETAMTRHFYHGRTETMRSCTVEAVRWCQSMQDPSVNLRERQQKMLQAFAKHNKMMKDCSAGKGFDRHLLGLLLIAKEEGLPVPELFTDPLFSKSGGGGNFVLSTSLVGYLRVQGVVVPMVHNGYGFFYHIRDDRFVVACSAWKSCPETDAEKLVQLTFCAFHDMIQLMNSTHL

SEQ ID NO: 11645 - protein, 612 aa, Homo sapiens; identical to SEQ ID NO: 11644

SEQ ID NO: 11646 - protein, 933 aa, Homo sapiens
MRALAVLSVTLVMACTEAFFPFISRGKELLWGKPEESRVSSVLEESKRLVDTAMYATMQRNLKKRGILSPAQLLSFSKLPEPTSGVIARAAEIMETSIQAMKRKVNLKTQQSQHPTDALSEDLLSIIANMSGCLPYMLPPKCPNTCLANKYRPITGACNNRDHPRWGASNTALARWLPPVYEDGFSQPRGWNPGFLYNGFPLPPVREVTRHVIQVSNEVVTDDDRYSDLLMAWGQYIDHDIAFTPQSTSKAAFGGGADCQMTCENQNPCFPIQLPEEARPAAGTACLPFYRSSAACGTGDQGALFGNLSTANPRQQMNGLTSFLDASTVYGSSPALERQLRNWTSAEGLLRVHARLRDSGRAYLPFVPPRAPAACAPEPGIPGETRGPCFLAGDGRASEVPSLTALHTLWLREHNRLAAALKALNAHWSADAVYQEARKVVGALHQIITLRDYIPRILGPEAFQQYVGPYEGYDSTANPTVSNVFSTAAFRFGHATIHPLVRRLDASFQEHPDLPGLWLHQAFFSPWTLLRGGGLDPLIRGLLARPAKLQVQDQLMNEELTERLFVLSNSSTLDLASINLQRGRDHGLPGYNEWREFCGLPRLETPADLSTAIASRSVADKILDLYKHPDNIDVWLGGLAENFLPRARTGPLFACLIGKQMKALRDGDWFWWENSHVFTDAQRRELEKHSLSRVICDNTGLTRVPMDAFQVGKFPEDFESCDSITGMNLEAWRETFPQDDKCGFPESVENGDFVHCEESGRRVLVYSCRHGYELQGREQLTCTQEGWDFQPPLCKDVNECADGAHPPCHASARCRNTKGGFQCLCADPYELGDDGRTCVDSGRLPRVTWISMSLAALLIGGFAGLTSTVICRWTRTGTKSTLPISETGGGTPELRCGKHQAVGTSPQRAAAQDSEQESAGMEGRDTHRLPRAL

SEQ ID NO: 11647 - protein, 872 aa, Homo sapiens
MRALAVLSVTLVMACTEAFFPFISRGKELLWGKPEESRVSSVLEESKRLVDTAMYATMQRNLKKRGILSPAQLLSFSKLPEPTSGVIARAAEIMETSIQAMKRKVNLKTQQSQHPTDALSEDLLSIIANMSGCLPYMLPPKCPNTCLANKYRPITGACNNRDHPRWGASNTALARWLPPVYEDGFSQPRGWNPGFLYNGFPLPPVREVTRHVIQVSNEVVTDDDRYSDLLMAWGQYIDHDIAFTPQSTSKAAFGGGADCQMTCENQNPCFPIQLPEEARPAAGTACLPFYRSSAACGTGDQGALFGNLSTANPRQQMNGLTSFLDASTVYGSSPALERQLRNWTSAEGLLRVHARLRDSGRAYLPFVPPRAPAACAPEPGIPGETRGPCFLAGDGRASEVPSLTALHTLWLREHNRLAAALKALNAHWSADAVYQEARKVVGALHQIITLRDYIPRILGPEAFQQYVGPYEGYDSTANPTVSNVFSTAAFRFGHATIHPLVRRLDASFQEHPDLPGLWLHQAFFSPWTLLRGGYNEWREFCGLPRLETPADLSTAIASRSVADKILDLYKHPDNIDVWLGGLAENFLPRARTGPLFACLIGKQMKALRDGDWFWWENSHVFTDAQRRELEKHSLSRVICDNTGLTRVPMDAFQVGKFPEDFESCDSITGMNLEAWRETFPQDDKCGFPESVENGDFVHCEESGRRVLVYSCRHGYELQGREQLTCTQEGWDFQPPLCKDVNECADGAHPPCHASARCRNTKGGFQCLCADPYELGDDGRTCVDSGRLPRVTWISMSLAALLIGGFAGLTSTVICRWRVLGWKAGILTGCREPSEGKVAGHCRTASCSQNHRTTLFQTQANRKSAGRLFSQHG

SEQ ID NO: 11648 - protein, 876 aa, Homo sapiens
MRALAVLSVTLVMACTEAFFPFISRGKELLWGKPEESRVSSVLEESKRLVDTAMYATMQRNLKKRGILSPAQLLSFSKLPEPTSGVIARAAEIMETSIQAMKRKVNLKTQQSQHPTDALSEDLLSIIANMSGCLPYMLPPKCPNTCLANKYRPITGACNNRDHPRWGASNTALARWLPPVYEDGFSQPRGWNPGFLYNGFPLPPVREVTRHVIQVSNEVVTDDDRYSDLLMAWGQYIDHDIAFTPQSTSKAAFGGGADCQMTCENQNPCFPIQLPEEARPAAGTACLPFYRSSAACGTGDQGALFGNLSTANPRQQMNGLTSFLDASTVYGSSPALERQLRNWTSAEGLLRVHARLRDSGRAYLPFVPPRAPAACAPEPGIPGETRGPCFLAGDGRASEVPSLTALHTLWLREHNRLAAALKALNAHWSADAVYQEARKVVGALHQIITLRDYIPRILGPEAFQQYVGPYEGYDSTANPTVSNVFSTAAFRFGHATIHPLVRRLDASFQEHPDLPGLWLHQAFFSPWTLLRGGYNEWREFCGLPRLETPADLSTAIASRSVADKILDLYKHPDNIDVWLGGLAENFLPRARTGPLFACLIGKQMKALRDGDWFWWENSHVFTDAQRRELEKHSLSRVICDNTGLTRVPMDAFQVGKFPEDFESCDSITGMNLEAWRETFPQDDKCGFPESVENGDFVHCEESGRRVLVYSCRHGYELQGREQLTCTQEGWDFQPPLCKDVNECADGAHPPCHASARCRNTKGGFQCLCADPYELGDDGRTCVDSGRLPRVTWISMSLAALLIGGFAGLTSTVICRWTRTGTKSTLPISETGGGTPELRCGKHQAVGTSPQRAAAQDSEQESAGMEGRDTHRLPRAL

SEQ ID NO: 11649 - protein, 118 aa, Homo sapiens
RAAPRPRAPPGLRPRLPALRAATRACGLCARARHPRRDPRALLPGRRRPRQRGPLPDGTAHAVAARAQPPGRGAQGPQCALERGRRVPGGAQGRGRSAPAAFRFGHATIHPLVRRLDA

SEQ ID NO: 11650 - protein, 760 aa, Homo sapiens
MRALAVLSVTLVMACTEAFFPFISRGKELLWGKPEESRVSSVLEESKRLVDTAMYATMQRNLKKRGILSPAQLLSFSKLPEPTSGVIARAAEIMETSIQAMKRKVNLKTQQSQHPTDALSEDLLSIIANMSGCLPYMLPPKCPNTCLANKYRPITGACNNRDHPRWGASNTALARWLPPVYEDGFSQPRGWNPGFLYNGFPLPPVREVTRHVIQVSNEVVTDDDRYSDLLMAWGQYIDHDIAFTPQSTSKAAFGGGADCQMTCENQNPCFPIQIITLRDYIPRILGPEAFQQYVGPYEGYDSTANPTVSNVFSTAAFRFGHATIHPLVRRLDASFQEHPDLPGLWLHQAFFSPWTLLRGGGLDPLIRGLLARPAKLQVQDQLMNEELTERLFVLSNSSTLDLASINLQRGRDHGLPGYNEWREFCGLPRLETPADLSTAIASRSVADKILDLYKHPDNIDVWLGGLAENFLPRARTGPLFACLIGKQMKALRDGDWFWWENSHVFTDAQRRELEKHSLSRVICDNTGLTRVPMDAFQVGKFPEDFESCDSITGMNLEAWRETFPQDDKCGFPESVENGDFVHCEESGRRVLVYSCRHGYELQGREQLTCTQEGWDFQPPLCKDVNECADGAHPPCHASARCRNTKGGFQCLCADPYELGDDGRTCVDSGRLPRVTWISMSLAALLIGGFAGLTSTVICRWTRTGTKSTLPISETGGGTPELRCGKHQAVGTSPQRAAAQDSEQESAGMEGRDTHRLPRAL

SEQ ID NO: 11651 - protein, 933 aa, Homo sapiens; identical to SEQ ID NO: 11646

SEQ ID NO: 11652 - protein, 318 aa, Homo sapiens
MAGLKRRASQVWPEEHGEQEHGLYSLHRMFDIVGTHLTHRDVRVLSFLFVDVIDDHERGLIRNGRDFLLALERQGRCDESNFRQVLQLLRIITRHDLLPYVTLKRRRAVCPDLVDKYLEETSIRYVTPRALSDPEPRPPQPSKTVPPHYPVVCCPTSGPQMCSKRPARGRATLGSQRKRRKSVTPDPKEKQTCDIRLRVRAEYCQHETALQGNVFSNKQDPLERQFERFNQANTILKSRDLGSIICDIKFSELTYLDAFWRDYINGSLLEALKGVFITDSLKQAVGHEAIKLLVNVDEEDYELGRQKLLRNLMLQALP

SEQ ID NO: 11653 - protein, 318 aa, Homo sapiens; identical to SEQ ID NO: 11652

SEQ ID NO: 11654 - protein, 318 aa, Homo sapiens; identical to SEQ ID NO: 11652

SEQ ID NO: 11655 - protein, 348 aa, Homo sapiens
MAGLKRRASQVWPEEHGEQEHGLYSLHRMFDIVGTHLTHRDVRVLSFLFVDVIDDHERGLIRNGRDFLLALERQGRCDESNFRQVLQLLRIITRHDLLPYVTLKRRRAVCPDLVDKYLEETSIRYVTPRALSDPEPRPPQPSKTVPPHYPVVCCPTSGPQMCSKRPARGRATLGSQRKRRKSVTPDPKEKQTCGEEVQGFQRWSRLEGEYKELLGHWAVYAIQYIRLRVRAEYCQHETALQGNVFSNKQDPLERQFERFNQANTILKSRDLGSIICDIKFSELTYLDAFWRDYINGSLLEALKGVFITDSLKQAVGHEAIKLLVNVDEEDYELGRQKLLRNLMLQALP

SEQ ID NO: 11656 - protein, 261 aa, Homo sapiens
MASPDWGYDDKNGPEQWSKLYPIANGNNQSPVDIKTSETKHDTSLKPISVSYNPATAKEIINVGHSFHVNFEDNDNRSVLKGGPFSDSYRLFQFHFHWGSTNEHGSEHTVDGVKYSAELHVAHWNSAKYSSLAEAASKADGLAVIGVLMKVGEANPKLQKVLDALQAIKTKGKRAPFTNFDPSTLLPSSLDFWTYPGSLTHPPLYESVTWIICKESISVSSEQLAQFRSLLSNVEGDNAVPMQHNNRPTQPLKGRTVRASF

SEQ ID NO: 11657 - protein, 261 aa, Homo sapiens; identical to SEQ ID NO: 11656

SEQ ID NO: 11658 - protein, 261 aa, Homo sapiens; identical to SEQ ID NO: 11656

SEQ ID NO: 11659 - protein, 303 aa, Homo sapiens
  VARIANT (1)...(303): Xaa = Any Amino Acid
MQQNKQDPPPFSLGQIPGNIWRNIHDSRPEIQDSAASSDSSPRVTSPPRIQGRCPENPSCGVRRAAEFWDQISTTGFGFLTHQATSLQSEKSHIFLFLPPRGTMSRLSWGYREHNGPIHWKEFFPIADGDQQSPIEIKTKEVKYDSSLRPLSIKYDPSSAKIISNSGHSFNVDFDDTENKSVLRGGPLTGSYRLRQVHLHWGSADDHGSEHIVDGVSYAAELHVVHWNSDKYPSFVEAAHEPDGLAVLGVFLQIGEPNSQLQKITDTLDSIKEKGKQTRFTNFDLLSLLPPSWDYWTYPGSLX

SEQ ID NO: 11660 - protein, 732 aa, Homo sapiens [sequence omitted]

SEQ ID NO: 11661 - protein, 619 aa, Homo sapiens [sequence omitted]

SEQ ID NO: 11662 - protein, 624 aa, Homo sapiens
MEIPGSLCKKVKLSNNAQNWGMQRATNVTYQAHHVSRNKRGQVVGTRGGFRGCTVWLTGLSGAGKTTVSMALEEYLVCHGIPCYTLDGDNIRQGLNKNLGFSPEDREENVRRIAEVAKLFADAGLVCITSFISPYTQDRNNARQIHEGASLPFFEVFVDAPLHVCEQRDVKGLYKKARAGEIKGFTGIDSEYEKPEAPELVLKTDSCDVNDCVQQVVELLQERDIVPVDASYEVKELYVPENKLHLAKTDAETLPALKINKVDMQWVQVLAEGWATPLNGFMREREYLQCLHFDCLLDGGVINLSVPIVLTATHEDKERLDGCTAFALMYEGRRVAILRNPEFFEHRKEERCARQWGTTCKNHPYIKMVMEQGDWLIGGDLQVLDRVYWNDGLDQYRLTPTELKQKFKDMNADAVFAFQLRNPVHNGHALLMQDTHKQLLERGYRRPVLLLHPLGGWTKDDDVPLMWRMKQHAAVLEEGVLNPETTVVAIFPSPMMYAGPTEVQWHCRARMVAGANFYIVGRDPAGMPHPETGKDLYEPSHGAKVLTMAPGLITLEIVPFRVAAYNKKKKRMDYYDSEHHEDFEFISGTRMRKLAREGQKPPEGFMAPKAWTVLTEYYKSLEKA

SEQ ID NO: 11663 - protein, 108 aa, Homo sapiens
MGVEIETISPGDGRTFPKKGQTCVVHYTGMLQNGKKFDSSRDRNKPFKFRIGKQEVIKGFEEGAAQMSLGQRAKLTCTPDVAYGATGHPGVIPPNATLIFDVELLNLE

SEQ ID NO: 11664 - protein, 80 aa, Homo sapiens
MGVEIETISPGDGRTFPKKGQTCVVHYTGMLQNGKKFDSSRDRNKPFKFRIGKQEVIKGFEEGAAQLGPLSPLPICPHPC

SEQ ID NO: 11665 - protein, 135 aa, Homo sapiens
MRRMLVVEVANGRSLVWGAEAARPLDWRVQSKDWPHAGRPAHELRYSIYRDLWERGFFLSAAGKFGGDFLVYPGDPLRFHAHYIAQCWAPEDTIPLQDLVAAGRLGTSVRKTLLLCSPQPDGKVVYTSLQWASLQ

SEQ ID NO: 11666 - protein, 310 aa, Homo sapiens
MLVVEVANGRSLVWGAEAVQALRERLGVGGRTVGALPRGPRQNSRLGLPLLLMPEEARLLAEIGAVTLVSAPRPDSRHHSLALTSFKRQQEESFQEQSALAAEARETRRQELLEKITEGQAAKKQKLEQASGASSSQEAGSSQAAKEDETSDGQASGEQEEAGPSSSQAGPSNGVAPLPRSALLVQLATARPRPVKARPLDWRVQSKDWPHAGRPAHELRYSIYRDLWERGFFLSAAGKFGGDFLVYPGDPLRFHAHYIAQCWAPEDTIPLQDLVAAGRLGTSVRKTLLLCSPQPDGKVVYTSLQWASLQ

SEQ ID NO: 11667 - protein, 310 aa, Homo sapiens; identical to SEQ ID NO: 11666

SEQ ID NO: 11668 - protein, 310 aa, Homo sapiens; identical to SEQ ID NO: 11666

SEQ ID NO: 11669 - protein, 313 aa, Homo sapiens
MRRMLVVEVANGRSLVWGAEAVQALRERLGVGGRTVGALPRGPRQNSRLGLPLLLMPEEARLLAEIGAVTLVSAPRPDSRHHSLALTSFKRQQEESFQEQSALAAEARETRRQELLEKITEGQAAKKQKLEQASGASSSQEAGSSQAAKEDETSDGQASGEQEEAGPSSSQAGPSNGVAPLPRSALLVQLATARPRPVKARPLDWRVQSKDWPHAGRPAHELRYSIYRDLWERGFFLSAAGKFGGDFLVYPGDPLRFHAHYIAQCWAPEDTIPLQDLVAAGRLGTSVRKTLLLCSPQPDGKVVYTSLQWASLQ

SEQ ID NO: 11670 - protein, 310 aa, Homo sapiens; identical to SEQ ID NO: 11666

SEQ ID NO: 11671 - protein, 311 aa, Homo sapiens
MAVDIQPACLGLYCGKTLLFKNGSTEIYGECGVCPRGQRTNAQKYCQPCTESPELYDWLYLGFMAMLPLVLHWFFIEWYSGKKSSSALFQHITALFECSMAAIITLLVSDPVGVLYIRSCRVLMLSDWYTMLYNPSPDYVTTVHCTHEAVYPLYTIVFIYYAFCLVLMMLLRPLLVKKIACGLGKSDRFKSIYAALYFFPILTVLQAVGGGLLYYAFPYIILVLSLVTLAVYMSASEIENCYDLLVRKKRLIVLFSHWLLHAYGIISISRVDKLEQDLPLLALVPTPALFYLFTAKFTEPSRILSEGANGH

SEQ ID NO: 11672 - protein, 339 aa, Homo sapiens
MNWELLLWLLVLCALLLLLVQLLRFLRADGDLTLLWAEWQGRRPEWELTDMVVWVTGASSGIGEELAYQLSKLGVSLVLSARRVHELERVKRRCLENGNLKEKDILVLPLDLTDTGSHEAATKAVLQEFGRIDILVNNGGMSQRSLCMDTSLDVYRKLIELNYLGTVSLTKCVLPHMIERKQGKIVTVNSILGIISVPLSIGYCASKHALRGFFNGLRTELATYPGIIVSNICPGPVQSNIVENSLAGEVTKTIGNNGDQSHKMTTSRCVRLMLISMANDLKEVWISEQPFLLVTYLWQYMPTWAWWITNKMGKKRIENFKSGVDADSSYFKIFKTKHD

SEQ ID NO: 11673 - protein, 259 aa, Homo sapiens
MNWELLLWLLVLCALLLLLVQLLRFLRADGDLTLLWAEWQGRRPEWELTDMVVWVTGASSGIGEELAYQLSKLGVSLVLSARRVHELERVKRRCLENGNLKEKDILVLPLDLTDTGSHEAATKAVLQEFGRGFFNGLRTELATYPGIIVSNICPGPVQSNIVENSLAGEVTKTIGNNGDQSHKMTTSRCVRLMLISMANDLKEVWISEQPFLLVTYLWQYMPTWAWWITNKMGKKRIENFKSGVDADSSYFKIFKTKHD

SEQ ID NO: 11674 - protein, 339 aa, Homo sapiens; identical to SEQ ID NO: 11672

SEQ ID NO: 11675 - protein, 326 aa, Homo sapiens
MFRCGGLAAGALKQKLVPLVRTVCVRSPRQRNRLPARALGTEVIQLFPEKGNMGKILPEYLSNWTMEKVRREGVKVMPNAIVQSVGVSSGKLLIKLKDGRKVETDHIVAAVGLEPNVELAKTGGLEIDSDFGGFRVNAELQARSNIWVAGDAACFYDIKLGRRRVEHHDHAVVSGRLAGENMTGAAKPYWHQSMFWSDLGPDVGYEAIGLVDSSLPTVGVFAKATAQDNPKSATEQSGTGIRSESETESEASEITIPPSTPAVPQAPVQGEDYGKGVIFYLRDKVVVGIVLWNIFNRMPIARKIIKDGEQHEDLNEVAKLFNIHED

SEQ ID NO: 11676 - protein, 613 aa, Homo sapiens
MFRCGGLAAGALKQKLVPLVRTVCVRSPRQRNRLPGNLFQRWHVPLELQMTRQMASSGASGGKIDNSVLVLIVGLSTVGAGAYAYKTMKEDEKRYNERISGLGLTPEQKQKKAALSASEGEEVPQDKAPSHVPFLLIGGGTAAFAAARSIRARDPGARVLIVSEDPELPYMRPPLSKELWFSDDPNVTKTLRFKQWNGKERSIYFQPPSFYVSAQDLPHIENGGVAVLTGKKVVQLDVRDNMVKLNDGSQITYEKCLIATGGTPRSLSAIDRAGAEVKSRTTLFRKIGDFRSLEKISREVKSITIIGGGFLGSELACALGRKARALGTEVIQLFPEKGNMGKILPEYLSNWTMEKVRREGVKVMPNAIVQSVGVSSGKLLIKLKDGRKVETDHIVAAVGLEPNVELAKTGGLEIDSDFGGFRVNAELQARSNIWVAGDAACFYDIKLGRRRVEHHDHAVVSGRLAGENMTGAAKPYWHQSMFWSDLGPDVGYEAIGLVDSSLPTVGVFAKATAQDNPKSATEQSGTGIRSESETESEASEITIPPSTPAVPQAPVQGEDYGKGVIFYLRDKVVVGIVLWNIFNRMPIARKIIKDGEQHEDLNEVAKLFNIHED

SEQ ID NO: 11677 - protein, 609 aa, Homo sapiens
MFRCGGLAAGALKQKLVPLVRTVCVRSPRQRNRLPVVQSHHLGSPSRSLASTGASGKDGSNLVYFLIVGATVTGAGVYYAYKTMKEDEKRYNERISGLGLTPEQKQKKAALSASEGEEVPQDKAPSHVPFLLIGGGTAAFAAARSIRARDPGARVLIVSEDPELPYMRPPLSKELWFSDDPNVTKTLRFKQWNGKERSIYFQPPSFYVSAQDLPHIENGGVAVLTGKKVVQLDVRDNMVKLNDGSQITYEKCLIATGGTPRSLSAIDRAGAEVKSRTTLFRKIGDFRSLEKISREVKSITIIGGGFLGSELACALGRKARALGTEVIQLFPEKGNMGKILPEYLSNWTMEKVRREGVKVMPNAIVQSVGVSSGKLLIKLKDGRKVETDHIVAAVGLEPNVELAKTGGLEIDSDFGGFRVNAELQARSNIWVAGDAACFYDIKLGRRRVEHHDHAVVSGRLAGENMTGAAKPYWHQSMFWSDLGPDVGYEAIGLVDSSLPTVGVFAKATAQDNPKSATEQSGTGIRSESETESEASEITIPPSTPAVPQAPVQGEDYGKGVIFYLRDKVVVGIVLWNIFNRMPIARKIIKDGEQHEDLNEVAKLFNIHED

SEQ ID NO: 11678 - protein, 406 aa, Homo sapiens
MKKKQQHPGGGADPWPHGAPMGGAPPGLGSWKRRVPLLPFLRFSLRDYGFCMATLLVFCLGSLLYQLSGGPPRFLLDLRQYLGNSTYLDDHGPPPSKVLPFPSQVVYNRVGKCGSRTVVLLLRILSEKHGFNLVTSDIHNKTRLTKNEQMELIKNISTAEQPYLFTRHVHFLNFSRFGGDQPVYINIIRDPVNRFLSNYFFRRFGDWRGEQNHMIRTPSMRQEERYLDINECILENYPECSNPRLFYIIPYFCGQHPRCREPGEWALERAKLNVNENFLLVGILEELEDVLLLLERFLPHYFKGVLSIYKDPEHRKLGNMTVTVKKTVPSPEAVQILYQRMRYEYEFYHYVKEQFHLLKRKFGLKSHVSKPPLRPHFFIPTPLETEEPIDDEEQDDEKWLEDIYKR

SEQ ID NO: 11679 - protein, 285 aa, Homo sapiens
MPGARSGGSGGDGSNSGSYSGDASGAVTVWEVVSLLGKLLGTVVALKVVLYLLRVCLAMAWKSGGASHSELIHNLRKNGIIKTDKVFEVMLATDRSHYAKCNPYMDSPQSIGFQATISAPHMHAYALELLFDQLHEGAKALDVGSGSGILTACFARMVGCTGKVIGIDHIKELVDDSVNNVRKDDPTLLSSGRVQLVVGDGRMGYAEEAPYDAIHVGAAAPVVPQALIDQLKPGGRLILPVGPAGGNQMLEQYDKLQDGSIKMKPLMGVIYVPLTDKEKQWSRWK

SEQ ID NO: 11680 - protein, 71 aa, Homo sapiens
GADPPLETADPATTAEPLAASAQIDPAIPPSRSVTGDTAGNATDQATEPGRRAKAVRSEASERDTQQRKWR

SEQ ID NO: 11681 - protein, 165 aa, Homo sapiens
MHAYALELLFDQLHEGAKALDVGSGSGILTACFARMVGCTGKVIGIDHIKELVDDSVNNVRKDDPTLLSSGRVQLVVGDGRMGYAEEAPYDAIHVGAAAPVVPQALIDQLKPGGRLILPVGPAGGNQMLEQYDKLQDGSIKMKPLMGVIYVPLTDKEKQWSRDEL

SEQ ID NO: 11682 - protein, 285 aa, Homo sapiens; identical to SEQ ID NO: 11679

SEQ ID NO: 11683 - protein, 140 aa, Homo sapiens
MLSIWDVRQGTMPVSLLKAHEAEMWEVHFHPSNPEHLFTCSEDGSLWHWDASTDVPEKSSLFHQGGRSSTFLSHSISNQANVHQSVISSWLSTDPAKDRIEITSLLPSRSLSVNTLDVLGPCLVCGTDAEAIYVTRHLFS

SEQ ID NO: 11684 - protein, 303 aa, Homo sapiens
MDLQFFDQERIVAASSTGCVTVFLHHPNNQTLSVNQQWTTAHYHTGPGSPSYSSAPCTGVVCNNPEIVTVGEDGRINLFRADHKEAVRTIDNADSSTLHAVTFLRTPEILTVNSIGQLKIWDFRQQGNEPSQILSLTGDRVPLHCVDRHPNQQHVVATGGQDGMLSIWDVRQGTMPVSLLKAHEAEMWEVHFHPSNPEHLFTCSEDGSLWHWDASTDVPEKSSLFHQGGRSSTFLSHSISNQANVHQSVISSWLSTDPAKDRIEITSLLPSRSLSVNTLDVLGPCLVCGTDAEAIYVTRHLFS

SEQ ID NO: 11685 - protein, 720 aa, Homo sapiens
MNNHVSSKPSTMKLKHTINPILLYFIHFLISLYTILTYIPFYFFSESRQEKSNRIKAKPVNSKPDSAYRSVNSLDGLASVLYPGCDTLDKVFTYAKNKFKNKRLLGTREVLNEEDEVQPNGKIFKKVILGQYNWLSYEDVFVRAFNFGNGLQMLGQKPKTNIAIFCETRAEWMIAAQACFMYNFQLVTLYATLGGPAIVHALNETEVTNIITSKELLQTKLKDIVSLVPRLRHIITVDGKPPTWSEFPKGIIVHTMAAVEALGAKASMENQPHSKPLPSDIAVIMYTSGSTGLPKGVMISHSNIIAGITGMAERIPELGEEDVYIGYLPLAHVLELSAELVCLSHGCRIGYSSPQTLADQSSKIKKGSKGDTSMLKPTLMAAVPEIMDRIYKNVMNKVSEMSSFQRNLFILAYNYKMEQISKGRNTPLCDSFVFRKVRSLLGGNIRLLLCGGAPLSATTQRFMNICFCCPVGQGYGLTESAGAGTISEVWDYNTGRVGAPLVCCEIKLKNWEEGGYFNTDKPHPRGEILIGGQSVTMGYYKNEAKTKADFFEDENGQRWLCTGDIGEFEPDGCLKIIDRKKDLVKLQAGEYVSLGKVEAALKNLPLVDNICAYANSYHSYVIGFVVPNQKELTELARKKGLKGTWEELCNSCEMENEVLKVLSEAAISASLEKFEIPVKIRLSPEPWTPETGLVTDAFKLKRKELKTHYQADIERMYGRK

SEQ ID NO: 11686 - protein, 720 aa, Homo sapiens; identical to SEQ ID NO: 11685

SEQ ID NO: 11687 - protein, 720 aa, Homo sapiens; identical to SEQ ID NO: 11685

SEQ ID NO: 11688 - protein, 720 aa, Homo sapiens; identical to SEQ ID NO: 11685

SEQ ID NO: 11689 - protein, 330 aa, Homo sapiens
MSAKSRTIGIIGAPFSKGQPRGGVEEGPTVLRKAGLLEKLKEQVTQNFLILECDVKDYGDLPFADIPNDSPFQIVKNPRSVGKASEQLAGKVAEVKKNGRISLVLGGDHSLAIGSISGHARVHPDLGVIWVDAHTDINTPLTTTSGNLHGQPVSFLLKELKGKIPDVPGFSWVTPCISAKDIVYIGLRDVDPGEHYILKTLGIKYFSMTEVDRLGIGKVMEETLSYLLGRKKRPIHLSFDVDGLDPSFTPATGTPVVGGLTYREGLYITEEIYKTGLLSGLDIMEVNPSLGKTPEEVTRTVNTAVAITLACFGLAREGNHKPIDYLNPPK

SEQ ID NO: 11690 - protein, 322 aa, Homo sapiens
MSAKSRTIGIIGAPFSKGQPRGGVEEGPTVLRKAGLLEKLKEQECDVKDYGDLPFADIPNDSPFQIVKNPRSVGKASEQLAGKVAEVKKNGRISLVLGGDHSLAIGSISGHARVHPDLGVIWVDAHTDINTPLTTTSGNLHGQPVSFLLKELKGKIPDVPGFSWVTPCISAKDIVYIGLRDVDPGEHYILKTLGIKYFSMTEVDRLGIGKVMEETLSYLLGRKKRPIHLSFDVDGLDPSFTPATGTPVVGGLTYREGLYITEEIYKTGLLSGLDIMEVNPSLGKTPEEVTRTVNTAVAITLACFGLAREGNHKPIDYLNPPK

SEQ ID NO: 11691 - protein, 237 aa, Homo sapiens
MSAKSRTIGIIGAPFSKGQPRGGVEEGPTVLRKAGLLEKLKEQECDVKDYGDLPFADIPNDSPFQIVKNPRSVGKASEQLAGKVAEVKKNGRISLVLGGDHSLAIGSISGHARVHPDLGVIWVDAHTDINTPLTTTSGNLHGQPVSFLLKELKGKIPDVPGFSWVTPCISAKDIVYIGLRDVDPGEHYILKTLGIKYFSMTEEVTRTVNTAVAITLACFGLAREGNHKPIDYLNPPK

SEQ ID NO: 11692 - protein, 314 aa, Homo sapiens
GLTDWRAQVQQREVSEHERQVQNHRDYWSSFLKGTECDVKDYGDLPFADIPNDSPFQIVKNPRSVGKASEQLAGKVAEVKKNGRISLVLGGDHSLAIGSISGHARVHPDLGVIWVDAHTDINTPLTTTSGNLHGQPVSFLLKELKGKIPDVPGFSWVTPCISAKDIVYIGLRDVDPGEHYILKTLGIKYFSMTEVDRLGIGKVMEETLSYLLGRKKRPIHLSFDVDGLDPSFTPATGTPVVGGLTYREGLYITEEIYKTGLLSGLDIMEVNPSLGKTPEEVTRTVNTAVAITLACFGLAREGNHKPIDYLNPPK

SEQ ID NO: 11693 - protein, 70 aa, Homo sapiens
MALLSRPALTLLLLLMAAVVRCQEQAQTTDWRATLKTIRNGVHKIDTYLNAALDLLGGEDGLCQYKCSDA

SEQ ID NO: 11694 - protein, 189 aa, Homo sapiens
MALLSRPALTLLLLLMAAVVRCQEQAQTTDWRATLKTIRNGVHKIDTYLNAALDLLGGEDGLCQYKCSDGSKPFPRYGYKPSPPNGCGSPLFGVHLNIGIPSLTKCCNQHDRCYETCGKSKNDCDEEFQYCLSKICRDVQKTLGLTQHVQACETTVELLFDSVIHLGCKPYLDSQRAACRCHYEEKTDL

SEQ ID NO: 11695 - protein, 187 aa, Homo sapiens
MALLSRPALTLLLLLMAAVVRCQEQAQTTDWRATLKTIRNGVHKIDTYLNAALDLLGGEDGLCQYKCSDGSKPFPRYGYKPSPPNGCGSPLFGLNIGIPSLTKCCNQHDRCYETCGKSKNDCDEEFQYCLSKICRDVQKTLGLTQHVQACETTVELLFDSVIHLGCKPYLDSQRAACRCHYEEKTDL

SEQ ID NO: 11696 - protein, 97 aa, Homo sapiens [sequence omitted]

SEQ ID NO: 11697 - protein, 262 aa, Homo sapiens
MLHLPEWPEQPPGGPAALQVRVLGEAVLPFSPALAEVTLGIGRGRRVILRSYHEEEADSTAKAMVTEMCLGEEDFQQLQAQEGVAITFCLKEFRGLLSFAESANLNLSIHFDAPGRPAIFTIKDSLLDGHFVLATLSDTDSHSQDLGSPERHQPVPQLQAHSTPHPDDFANDDIDSYMIAMETTIGNEGSRVLPSISLSPGPQPPKSPGPHSEEEDEAEPSTVPGTPPPKKFRSLFFGSILAPVRSPQGPSPVLAEDSEGEG

SEQ ID NO: 11698 - protein, 391 aa, Homo sapiens
MKCLVTGGNVKVLGKAVHSLSRIGDELYLEPLEDGLSLRTVNSSRSAYACFLFAPLFFQQYQAATPGQDLLRCKILMKSFLSVFRSLAMLEKTVEKCCISLNGRSSRLVVQLHCKFGVRKTHNLSFQDCESLQAVFDPASCPHMLRAPARVLGEAVLPFSPALAEVTLGIGRGRRVILRSYHEEEADSTAKAMVTEMCLGEEDFQQLQAQEGVAITFCLKEFRGLLSFAESANLNLSIHFDAPGRPAIFTIKDSLLDGHFVLATLSDTDSHSQDLGSPERHQPVPQLQAHSTPHPDDFANDDIDSYMIAMETTIGNEGSRVLPSISLSPGPQPPKSPGPHSEEEDEAEPSTVPGTPPPKKFRSLFFGSILAPVRSPQGPSPVLAEDSEGEG

SEQ ID NO: 11699 - protein, 279 aa, Homo sapiens
MAGAAAWWSSCIASSDCESLQAVFDPASCPHMLRAPARVLGEAVLPFSPALAEVTLGIGRGRRVILRSYHEEEADSTAKAMVTEMCLGEEDFQQLQAQEGVAITFCLKEFRGLLSFAESANLNLSIHFDAPGRPAIFTIKDSLLDGHFVLATLSDTDSHSQDLGSPERHQPVPQLQAHSTPHPDDFANDDIDSYMIAMETTIGNEGSRVLPSISLSPGPQPPKSPGPHSEEEDEAEPSTVPGTPPPKKFRSLFFGSILAPVRSPQGPSPVLAEDSEGEG

SEQ ID NO: 11700 - protein, 191 aa, Homo sapiens
MLLADQGQSWKEEVVTVETWQEGSLKASCLYGQLPKFQDGDLTLYQSNTILRHLGRTLGLYGKDQQEAALVDMVNDGVEDLRCKYISLIYTNYEAGKDDYVKALPGQLKPFETLLSQNQGGKTFIVGDQISFADYNLLDLLLIHEVLAPGCLDAFPLLSAYVGRLSARPKLKAFLASPEYVNLPINGNGKQ

SEQ ID NO: 11701 - protein, 210 aa, Homo sapiens
MPPYTVVYFPVRGRCAALRMLLADQGQSWKEEVVTVETWQEGSLKASCLYGQLPKFQDGDLTLYQSNTILRHLGRTLGLYGKDQQEAALVDMVNDGVEDLRCKYISLIYTNYEAGKDDYVKALPGQLKPFETLLSQNQGGKTFIVGDQISFADYNLLDLLLIHEVLAPGCLDAFPLLSAYVGRLSARPKLKAFLASPEYVNLPINGNGKQ

SEQ ID NO: 11702 - protein, 340 aa, Homo sapiens [sequence omitted]

SEQ ID NO: 11703 - protein, 338 aa, Homo sapiens [sequence omitted]

SEQ ID NO: 11704 - protein, 349 aa, Homo sapiens [sequence omitted]

SEQ ID NO: 11705 - protein, 455 aa, Homo sapiens
MLATRRLLGWSLPARTAPKKTSFGSLKDEDRIFTNLYGRHDWRLKGSLSRGDWYKTKEILLKGPDWILGEIKTSGLRGRGGAGFPTGLKWSFMNKPSDGRPKYLVVNADEGEPGTCKDREILRHDPHKLLEGCLVGGRAMGARAAYIYIRGEFYNEASNLQVAIREAYEAGLIGKNACGSGYDFDVFVVRGAGAYICGEETALIESIEGKQGKPRLKPPFPADVGVFGCPTTVANVETVAVSPTICRRGGTWFAGFGRERNSGTKLFNISGHVNHPCTVEEEMSVPLKELIEKHAGGVTGGWDNLLAVIPGGSSTPLIPKSVCETVLMDFDALVQAQTGLGTAAVIVMDRSTDIVKAIARLIEFYKHESCGQCTPCREGVDWMNKVMARFVRGDARPAEIDSLWEISKQIEGHTICALGDGAAWPVQGLIRHFRPELEERMQRFAQQHQARQAAS

SEQ ID NO: 11706 - protein, 464 aa, Homo sapiens
MLATRRLLGWSLPARVSVRFSGDTTAPKKTSFGSLKDEDRIFTNLYGRHDWRLKGSLSRGDWYKTKEILLKGPDWILGEIKTSGLRGRGGAGFPTGLKWSFMNKPSDGRPKYLVVNADEGEPGTCKDREILRHDPHKLLEGCLVGGRAMGARAAYIYIRGEFYNEASNLQVAIREAYEAGLIGKNACGSGYDFDVFVVRGAGAYICGEETALIESIEGKQGKPRLKPPFPADVGVFGCPTTVANVETVAVSPTICRRGGTWFAGFGRERNSGTKLFNISGHVNHPCTVEEEMSVPLKELIEKHAGGVTGGWDNLLAVIPGGSSTPLIPKSVCETVLMDFDALVQAQTGLGTAAVIVMDRSTDIVKAIARLIEFYKHESCGQCTPCREGVDWMNKVMARFVRGDARPAEIDSLWEISKQIEGHTICALGDGAAWPVQGLIRHFRPELEERMQRFAQQHQARQAAS

SEQ ID NO: 11707 - protein, 464 aa, Homo sapiens; identical to SEQ ID NO: 11706

SEQ ID NO: 11708 - protein, 230 aa, Homo sapiens
MNKPSDGRPKYLVVNADEGEPGTCKDREILRHDPHKLLEGCLVGGRAMGARAAYIYIRGEFYNEASNLQVAIREAYEAGLIGKNACGSGYDFDVFVVRGAGAYICGEETALIESIEGKQGKPRLKPPFPADVGVFGCPTTVANVETVAVSPTICRRGGTWFAGFGRERNSGTKLFNISGHVNHPCTVEEEMSVPLKELIEKHAGTDRPGHSCGDRHGPLDGHRESHRPPH

SEQ ID NO: 11709 - protein, 457 aa, Homo sapiens
MLATRRLLGWSLPARVSTAPKKTSFGSLKDEDRIFTNLYGRHDWRLKGSLSRGDWYKTKEILLKGPDWILGEIKTSGLRGRGGAGFPTGLKWSFMNKPSDGRPKYLVVNADEGEPGTCKDREILRHDPHKLLEGCLVGGRAMGARAAYIYIRGEFYNEASNLQVAIREAYEAGLIGKNACGSGYDFDVFVVRGAGAYICGEETALIESIEGKQGKPRLKPPFPADVGVFGCPTTVANVETVAVSPTICRRGGTWFAGFGRERNSGTKLFNISGHVNHPCTVEEEMSVPLKELIEKHAGGVTGGWDNLLAVIPGGSSTPLIPKSVCETVLMDFDALVQAQTGLGTAAVIVMDRSTDIVKAIARLIEFYKHESCGQCTPCREGVDWMNKVMARFVRGDARPAEIDSLWEISKQIEGHTICALGDGAAWPVQGLIRHFRPELEERMQRFAQQHQARQAAS

SEQ ID NO: 11710 - protein, 385 aa, Homo sapiens [sequence omitted]

SEQ ID NO: 11711 - protein, 499 aa, Homo sapiens
MCELYSKRDTLGLRKKHIGPSCKVFFASDPIKIVRAQRQYMFDENGEQYLDCINNVAHVGHCHPGVVKAALKQMELLNTNSRFLHDNIVEYAKRLSATLPEKLSVCYFTNSGSEANDLALRLARQFRGHQDVITLDHAYHGHLSSLIEISPYKFQKGKDVKKEFVHVAPTPDTYRGKYREDHADSASAYADEVKKIIEDAHNSGRKIAAFIAESMQSCGGQIIPPAGYFQKVAEYVHGAGGVFIADEVQVGFGRVGKHFWSFQMYGEDFVPDIVTMGKPMGNGHPVACVVTTKEIAEAFSSSGMEYFNTYGGNPVSCAVGLAVLDIIENEDLQGNAKRVGNYLTELLKKQKAKHTLIGDIRGIGLFIGIDLVKDHLKRTPATAEAQHIIYKMKEKRVLLSADGPHRNVLKIKPPMCFTEEDAKFMVDQLDRILTVLEEAMGTKTESVTSENTPCKTKMLKEAHIELLRDSTTDSKENPSRKRNGMCTDTHSLLSKRLKT

SEQ ID NO: 11712 - protein, 426 aa, Homo sapiens
MELLNTNSRFLHDNIVEYAKRLSATLPEKLSVCYFTNSGSEANDLALRLARQFRGHQDVITLDHAYHGHLSSLIEISPYKFQKGKDVKKEFVHVAPTPDTYRGKYREDHADSASAYADEVKKIIEDAHNSGRKIAAFIAESMQSCGGQIIPPAGYFQKVAEYVHGAGGVFIADEVQVGFGRVGKHFWSFQMYGEDFVPDIVTMGKPMGNGHPVACVVTTKEIAEAFSSSGMEYFNTYGGNPVSCAVGLAVLDIIENEDLQGNAKRVGNYLTELLKKQKAKHTLIGDIRGIGLFIGIDLVKDHLKRTPATAEAQHIIYKMKEKRVLLSADGPHRNVLKIKPPMCFTEEDAKFMVDQLDRILTVLEEAMGTKTESVTSENTPCKTKMLKEAHIELLRDSTTDSKENPSRKRNGMCTDTHSLLSKRLKT

SEQ ID NO: 11713 - protein, 493 aa, Homo sapiens
MCELYSKRDTLGLRKKHIGPSCKVFFASDPIKIVRAQRQYMFDENGEQYLDCINNVAHGVVKAALKQMELLNTNSRFLHDNIVEYAKRLSATLPEKLSVCYFTNSGSEANDLALRLARQFRGHQDVITLDHAYHGHLSSLIEISPYKFQKGKDVKKEFVHVAPTPDTYRGKYREDHADSASAYADEVKKIIEDAHNSGRKIAAFIAESMQSCGGQIIPPAGYFQKVAEYVHGAGGVFIADEVQVGFGRVGKHFWSFQMYGEDFVPDIVTMGKPMGNGHPVACVVTTKEIAEAFSSSGMEYFNTYGGNPVSCAVGLAVLDIIENEDLQGNAKRVGNYLTELLKKQKAKHTLIGDIRGIGLFIGIDLVKDHLKRTPATAEAQHIIYKMKEKRVLLSADGPHRNVLKIKPPMCFTEEDAKFMVDQLDRILTVLEEAMGTKTESVTSENTPCKTKMLKEAHIELLRDSTTDSKENPSRKRNGMCTDTHSLLSKRLKT

SEQ ID NO: 11714 - protein, 445 aa, Homo sapiens [sequence omitted]

SEQ ID NO: 11715 - protein, 685 aa, Homo sapiens [sequence omitted]

SEQ ID NO: 11716 - protein, 685 aa, Homo sapiens [sequence omitted]

SEQ ID NO: 11717 - protein, 407 aa, Homo sapiens
MAEWLLSASWQRRAKAMTAAAGSAGRAAVPLLLCALLAPGGAYVLDDSDGLGREFDGIGAVSGGGATSRLLVNYPEPYRSQILDYLFKPNFGASLHILKVEIGGDGQTTDGTEPSHMHYALDENYFRGYEWWLMKEAKKRNPNITLIGLPWSFPGWLGKGFDWPYVNLQLTAYYVVTWIVGAKRYHDLDIDYIGIWNERSYNANYIKILRKMLNYQGLQRVKIIASDNLWESISASMLLDAELFKVVDVIGAHYPGTHSAKDAKLTGKKLWSSEDFSTLNSDMGAGCWGRILNQNYINGYMTSTIAWNLVASYYEQLPYGRCGLMTAQEPWSGHYVVESPVWVSAHTTQFTQPGWYYLKTVGHLEKGGSYVALTDGLGNLTIIIETMVNFCCCYWINSLLYYWKNKI

SEQ ID NO: 11718 - protein, 450 aa, Homo sapiens
MDGSRRVRATSVLPRYGPPCLFKGHLSTKSNAAVDCSVPVSVSTSIKYADQQRREKLKKELAQCEKEFKLTKTAMRANYKNNSKSLFNTLQKPSGEPQIEDDMLKEEMNGFSSFARSLVPSSERLHLSLHKSSKVITNGPEKNSSSSPSSVDYAASGPRKLSSGALYGRRPRSTFPNSHRFQLVISKAPSGDLLDKHSELFSNKQLPFTPRTLKTEAKSFLSQYRYYTPAKRKKDFTDQRIEAETQTELSFKSELGTAETKNMTDSEMNIKQASNCVTYDAKEKIAPLPLEGHDSTWDEIKDDALQHSSPRAMCQYSLKPPSTRKIYSDEEELLYLSFIEDVTDEILKLGLFSNRFLERLFERHIKQNKHLEEEKMRHLLHVLKVDLGCTSEENSAGDHDLRQNHHASPSYPSTAVDQQRRVGALGITCAICMASNRLDLFKICCGKSMK

SEQ ID NO: 11719 - protein, 499 aa, Homo sapiens
MAMAEGERTECAEPPRDEPPADGALKRAEELKTQANDYFKAKDYENAIKFYSQAIELNPSNAIYYGNRSLAYLRTECYGYALGDATRAIELDKKYIKGYYRRAASNMALGKFRAALRDYETVVKVKPHDKDAKMKYQECNKIVKQKAFERAIAGDEHKRSVVDSLDIESMTIEDEYSGPKLEDGKVTISFMKELMQWYKDQKKLHRKCAYQILVQVKEVLSKLSTLVETTLKETEKITVCGDTHGQFYDLLNIFELNGLPSETNPYIFNGDFVDRGSFSVEVILTLFGFKLLYPDHFHLLRGNHETDNMNQIYGFEGEVKAKYTAQMYELFSEVFEWLPLAQCINGKVLIMHGGLFSEDGVTLDDIRKIERNRQPPDSGPMCDLLWSDPQPQNGRSISKRGVSCQFGPDVTKAFLEENNLDYIIRSHEVKAEGYEVAHGGRCVTVFSAPNYCDQMGNKASYIHLQGSDLRPQFHQFTAVPHPNVKPMAYANTLLQLGMM

SEQ ID NO: 11720 - protein, 499 aa, Homo sapiens; identical to SEQ ID NO: 11719

SEQ ID NO: 11721 - protein, 485 aa, Homo sapiens
MAMAEGERTECAEPPRDEPPADGALKRAEELKTQANDYFKAKDYENAIKFYSQAIELNPSNAIYYGNRSLAYLRTECYGYALGDATRAIELDKKYIKGYYRRAASNMALGKFRAALRDYETVVKVKPHDKDAKMKYQECNKIVKQKAFERAIAGDEHKRSVVDSLDIESMTIEDEYSGPKLEDGKVTISFMKELMQWYKDQKKLHRKCAYQILVQVKEVLSKLSTLVETTLKETEKITVCGDTHGQFYDLLNIFELNGLPSETNPYIFNGDFVDRGSFSVEVILTLFGFKLLYPDHFHLLRGNHETDNMNQIYGFEGEVKAKYTAQMYELFSEVFEWLPLAQCINGKVLIMHGGLFSEDGVTLDDIRKIERNRQPPDSGPMCDLLWSDPQPQNGRSISKRGVSCQFGPDVTKAFLEENNLDYIIRSHEVKAEGYEVAHGGRCVTVFSAPNYCDQMGNKASYIHLQGSDLRPQFHQFTAVVSHPSG

SEQ ID NO: 11722 - protein, 896 aa, Homo sapiens
MNGIIHPCTHPEDKPAPKNEDEMMVAIFEYIDRLFSIVRPRRLLYMAIDGVAPRAKMNQQRSRRFRASKEGMEAAVEKQRVREEILAKGGFLPPEEIKERFDSNCITPGTEFMDNLAKCLRYYIADRLNNDPGWKNLTVILSDASAPGEGEHKIMDYIRRQRAQPNHDPNTHHCLCGADADLIMLGLATHEPNFTIIREEFKPNKPKPCGLCNQFGHEVKDCEGLPREKKGKHDELADSLPCAEGEFIFLRLNVLREYLERELTMASLPFTFDVERSIDDWVFMCFFVGNDFLPHLPSLEIRENAIDRLVNIYKNVVHKTGGYLTESGYVNLQRVQMIMLAVGEVEDSIFKKRKDDEDSFRRRQKEKRKRMKRDQPAFTPSGILTPHALGSRNSPGSQVASNPRQAAYEMRMQNNSSPSISPNTSFTSDGSPSPLGGIKRKAEDSDSEPEPEDNVRLWEAGWKQRYYKNKFDVDAADEKFRRKVVQSYVEGLCWVLRYYYQGCASWKWYYPFHYAPFASDFEGIADMPSDFEKGTKPFKPLEQLMGVFPAASGNFLPPSWRKLMSDPDSSIIDFYPEDFAIDLNGKKYAWQGVALLPFVDERRLRAALEEVYPDLTPEETRRNSLGGDVLFVGKHHPLHDFILELYQTGSTEPVEVPPELCHGIQGKFSLDEEAILPDQIVCSPVPMLRDLTQNTVVSINFKDPQFAEDYIFKAVMLPGARKPAAVLKPSDWEKSSNGRQWKPQLGFNRDRRPVHLDQAAFRTLGHVMPRGSGTGIYSNAAPPPVTYQGNLYRPLLRGQAQIPKLMSNMRPQDSWRGPPPLFQQQRFDRGVGAEPLLPWNRMLQTQNAAFQPNQYQMLAGPGGYPPRRDDRGGRQGYPREGRKYPLPPPSGRYNWN

SEQ ID NO: 11723 - protein, 950 aa, Homo sapiens
MGVPAFFRWLSRKYPSIIVNCVEEKPKECNGVKIPVDASKPNPNDVEFDNLYLDMNGIIHPCTHPEDKPAPKNEDEMMVAIFEYIDRLFSIVRPRRLLYMAIDGVAPRAKMNQQRSRRFRASKEGMEAAVEKQRVREEILAKGGFLPPEEIKERFDSNCITPGTEFMDNLAKCLRYYIADRLNNDPGWKNLTVILSDASAPGEGEHKIMDYIRRQRAQPNHDPNTHHCLCGADADLIMLGLATHEPNFTIIREEFKPNKPKPCGLCNQFGHEVKDCEGLPREKKGKHDELADSLPCAEGEFIFLRLNVLREYLERELTMASLPFTFDVERSIDDWVFMCFFVGNDFLPHLPSLEIRENAIDRLVNIYKNVVHKTGGYLTESGYVNLQRVQMIMLAVGEVEDSIFKKRKDDEDSFRRRQKEKRKRMKRDQPAFTPSGILTPHALGSRNSPGSQVASNPRQAAYEMRMQNNSSPSISPNTSFTSDGSPSPLGGIKRKAEDSDSEPEPEDNVRLWEAGWKQRYYKNKFDVDAADEKFRRKVVQSYVEGLCWVLRYYYQGCASWKWYYPFHYAPFASDFEGIADMPSDFEKGTKPFKPLEQLMGVFPAASGNFLPPSWRKLMSDPDSSIIDFYPEDFAIDLNGKKYAWQGVALLPFVDERRLRAALEEVYPDLTPEETRRNSLGGDVLFVGKHHPLHDFILELYQTGSTEPVEVPPELCHGIQGKFSLDEEAILPDQIVCSPVPMLRDLTQNTVVSINFKDPQFAEDYIFKAVMLPGARKPAAVLKPSDWEKSSNGRQWKPQLGFNRDRRPVHLDQAAFRTLGHVMPRGSGTGIYSNAAPPPVTYQGNLYRPLLRGQAQIPKLMSNMRPQDSWRGPPPLFQQQRFDRGVGAEPLLPWNRMLQTQNAAFQPNQYQMLAGPGGYPPRRDDRGGRQGYPREGRKYPLPPPSGRYNWN

SEQ ID NO: 11724 - protein, 979 aa, Homo sapiens
MGVPAFFRWLSRKYPSIIVNCVEEKPKECNGVKIPVDASKPNPNDVEFDNLYLDMNGIIHPCTHPEDKPAPKNEDEMMVAIFEYIDRLFSIVRPRRLLYMAIDGVYCEILGMLATALAFELLAYCQREGGIDKWAPRAKMNQQRSRRFRASKEGMEAAVEKQRVREEILAKGGFLPPEEIKERFDSNCITPGTEFMDNLAKCLRYYIADRLNNDPGWKNLTVILSDASAPGEGEHKIMDYIRRQRAQPNHDPNTHHCLCGADADLIMLGLATHEPNFTIIREEFKPNKPKPCGLCNQFGHEVKDCEGLPREKKGKHDELADSLPCAEGEFIFLRLNVLREYLERELTMASLPFTFDVERSIDDWVFMCFFVGNDFLPHLPSLEIRENAIDRLVNIYKNVVHKTGGYLTESGYVNLQRVQMIMLAVGEVEDSIFKKRKDDEDSFRRRQKEKRKRMKRDQPAFTPSGILTPHALGSRNSPGSQVASNPRQAAYEMRMQNNSSPSISPNTSFTSDGSPSPLGGIKRKAEDSDSEPEPEDNVRLWEAGWKQRYYKNKFDVDAADEKFRRKVVQSYVEGLCWVLRYYYQGCASWKWYYPFHYAPFASDFEGIADMPSDFEKGTKPFKPLEQLMGVFPAASGNFLPPSWRKLMSDPDSSIIDFYPEDFAIDLNGKKYAWQGVALLPFVDERRLRAALEEVYPDLTPEETRRNSLGGDVLFVGKHHPLHDFILELYQTGSTEPVEVPPELCHGIQGKFSLDEEAILPDQIVCSPVPMLRDLTQNTVVSINFKDPQFAEDYIFKAVMLPGARKPAAVLKPSDWEKSSNGRQWKPQLGFNRDRRPVHLDQAAFRTLGHVMPRGSGTGIYSNAAPPPVTYQGNLYRPLLRGQAQIPKLMSNMRPQDSWRGPPPLFQQQRFDRGVGAEPLLPWNRMLQTQNAAFQPNQYQMLAGPGGYPPRRDDRGGRQGYPREGRKYPLPPPSGRYNWN

SEQ ID NO: 11725 - protein, 178 aa, Homo sapiens
MTTLRAFTCDDLFRFNNINLDPLTETYGIPFYLQYLAHWPEYFIVAEAPGGELMGYIMGKAEGSVAREEWHGHVTALSVAPEFRRLGLAAKLMELLEEISERKGGFFVDLFVRVSNQVAVNMYKQLGYSVYRTVIEYYSASNGEPDEDAYDMRKALSRDTEKKSIIPLPHPVRPEDIE

SEQ ID NO: 11726 - protein, 178 aa, Homo sapiens; identical to SEQ ID NO: 11725

SEQ ID NO: 11727 - protein, 521 aa, Homo sapiens
MGEVEAPGRLWLESPPGGAPPIFLPSDGQALVLGRGPLTQVTDRKCSRTQVELVADPETRTVAVKQLGVNPSTTGTQELKPGLEGSLGVGDTLYLVNGLHPLTLRWEETRTPESQPDTPPGTPLVSQDEKRDAELPKKRMRKSNPGWENLEKLLVFTAAGVKPQGKVAGFDLDGTLITTRSGKVFPTGPSDWRILYPEIPRKLRELEAEGYKLVIFTNQMSIGRGKLPAEEFKAKVEAVVEKLGVPFQVLVATHAGLYRKPVTGMWDHLQEQANDGTPISIGDSIFVGDAAGRPANWAPGRKKKDFSCADRLFALNLGLPFATPEEFFLKWPAAGFELPAFDPRTVSRSGPLCLPESRALLSASPEVVVAVGFPGAGKSTFLKKHLVSAGYVHVNRDTLGSWQRCVTTCETALKQGKRVAIDNTNPDAASRARYVQCARAAGVPCRCFLFTATLEQARHNNRFREMTDSSHIPVSDMVMYGYRKQFEAPTLAEGFSAILEIPFRLWVEPRLGRLYCQFSEG

SEQ ID NO: 11728 - protein, 302 aa, Homo sapiens
MSIGRGKLPAEEFKAKVEAVVEKLGVPFQVLVATHAGLYRKPVTGMWDHLQEQANDGTPISIGDSIFVGDAAGRPANWAPGRKKKDFSCADRLFALNLGLPFATPEEFFLKWPAAGFELPAFDPRTVSRSGPLCLPESRALLSASPEVVVAVGFPGAGKSTFLKKHLVSAGYVHVNRDTLGSWQRCVTTCETALKQGKRVAIDNTNPDAASRARYVQCARAAGVPCRCFLFTATLEQARHNNRFREMTDSSHIPVSDMVMYGYRKQFEAPTLAEGFSAILEIPFRLWVEPRLGRLYCQFSEG

SEQ ID NO: 11729 - protein, 596 aa, Homo sapiens [sequence omitted]

SEQ ID NO: 11730 - protein, 521 aa, Homo sapiens; identical to SEQ ID NO: 11727

SEQ ID NO: 11731 - protein, 220 aa, Homo sapiens
MSIGRGKLPAEEFKAKVEAVVEKLGVPFQVLVATHAGLYRKPVTGMWDHLQEQANDGTPISIGDSIFVGDAAGRPANWAPGRKKKDFSCADRLFALNLGLPFATPEEFFLKWPAAGFELPAFDPRTVSRSGPLCLPESRALLSASPEVVVAVGFPGAGKSTFLKKHLVSAGYVHVNRVRPVCPSRGRPLPLLPLHRHSGAGAPQQPGEPAQPGHPPGCTP

SEQ ID NO: 11732 - protein, 350 aa, Homo sapiens
MSLQPPLEEVSCGQAESSEKPNAEDMTSKDYYFDSYAHFGIHEEMLKDEVRTLTYRNSMFHNRHLFKDKVVLDVGSGTGILCMFAAKAGARKVIGIECSSISDYAVKIVKANKLDHVVTIIKGKVEEVELPVEKVDIIISEWMGYCLFYESMLNTVLYARDKWLAPDGLIFPDRATLYVTAIEDRQYKDYKIHWWENVYGFDMSCIKDVAIKEPLVDVVDPKQLVTNACLIKEVDIYTVKVEDLTFTSPFCLQVKRNDYVHALVAYFNIEFTRCHKRTGFSTSPESPYTHWKQTVFYMEDYLTVKTGEEIFGTIGMRPNAKNNRDLDFTIDLDFKGQLCELSCSTDYRMR

SEQ ID NO: 11733 - protein, 371 aa, Homo sapiens
MAAAEAANCIMENFVATLANGMSLQPPLEEVSCGQAESSEKPNAEDMTSKDYYFDSYAHFGIHEEMLKDEVRTLTYRNSMFHNRHLFKDKVVLDVGSGTGILCMFAAKAGARKVIGIECSSISDYAVKIVKANKLDHVVTIIKGKVEEVELPVEKVDIIISEWMGYCLFYESMLNTVLYARDKWLAPDGLIFPDRATLYVTAIEDRQYKDYKIHWWENVYGFDMSCIKDVAIKEPLVDVVDPKQLVTNACLIKEVDIYTVKVEDLTFTSPFCLQVKRNDYVHALVAYFNIEFTRCHKRTGFSTSPESPYTHWKQTVFYMEDYLTVKTGEEIFGTIGMRPNAKNNRDLDFTIDLDFKGQLCELSCSTDYRMR

SEQ ID NO: 11734 - protein, 353 aa, Homo sapiens
MAAAEAANCIMEVSCGQAESSEKPNAEDMTSKDYYFDSYAHFGIHEEMLKDEVRTLTYRNSMFHNRHLFKDKVVLDVGSGTGILCMFAAKAGARKVIGIECSSISDYAVKIVKANKLDHVVTIIKGKVEEVELPVEKVDIIISEWMGYCLFYESMLNTVLYARDKWLAPDGLIFPDRATLYVTAIEDRQYKDYKIHWWENVYGFDMSCIKDVAIKEPLVDVVDPKQLVTNACLIKEVDIYTVKVEDLTFTSPFCLQVKRNDYVHALVAYFNIEFTRCHKRTGFSTSPESPYTHWKQTVFYMEDYLTVKTGEEIFGTIGMRPNAKNNRDLDFTIDLDFKGQLCELSCSTDYRMR

SEQ ID NO: 11735 - protein, 255 aa, Homo sapiens
MAAAEAANCIMEVSCGQAESSEKPNAEDMTSKDYYFDSYAHFGIHEEMLKDEVRTLTYRNSMFHNRHLFKDKVVLDVGSGTGILCMFAAKAGARKVIGIECSSISDYAVKIVKANKLDHVVTIIKGKVEEVELPVEKEVDIYTVKVEDLTFTSPFCLQVKRNDYVHALVAYFNIEFTRCHKRTGFSTSPESPYTHWKQTVFYMEDYLTVKTGEEIFGTIGMRPNAKNNRDLDFTIDLDFKGQLCELSCSTDYRMR

SEQ ID NO: 11736 - protein, 348 aa, Homo sapiens [sequence omitted]

SEQ ID NO: 11737 - protein, 567 aa, Homo sapiens
MAPLALHLLVLVPILLSLVASQDWKAERSQDPFEKCMQDPDYEQLLKVVTWGLNRTLKPQRVIVVGAGVAGLVAAKVLSDAGHKVTILEADNRIGGRIFTYRDQNTGWIGELGAMRMPSSHRILHKLCQGLGLNLTKFTQYDKNTWTEVHEVKLRNYVVEKVPEKLGYALRPQEKGHSPEDIYQMALNQALKDLKALGCRKAMKKFERHTLLEYLLGEGNLSRPAVQLLGDVMSEDGFFYLSFAEALRAHSCLSDRLQYSRIVGGWDLLPRALLSSLSGLVLLNAPVVAMTQGPHDVHVQIETSPPARNLKVLKADVVLLTASGPAVKRITFSPPLPRHMQEALRRLHYVPATKVFLSFRRPFWREEHIEGGHSNTDRPSRMIFYPPPREGALLLASYTWSDAAAAFAGLSREEALRLALDDVAALHGPVVRQLWDGTGVVKRWAEDQHSQGGFVVQPPALWQTEKDDWTVPYGRIYFAGEHTAYPHGWVETAVKSALRAAIKINSRKGPASDTASPEGHASDMEGQGHVHGVASSPSHDLAKEEGSHPPVQGQLSLQNTTHTRTSH

SEQ ID NO: 11738 - protein, 316 aa, Homo sapiens
MAEVKVKVQPPDADPVEIENRIIELCHQFPHGITDQVIQNEMPHIEAQQRAVAINRLLSMGQLDLLRSNTGLLYRIKDSQNAGKMKGSDNQEKLVYQIIEDAGNKGIWSRDIRYKSNLPLTEINKILKNLESKKLIKAVKSVAASKKKVYMLYNLQPDRSVTGGAWYSDQDFESEFVEVLNQQCFKFLQSKAETARESKQNPMIQRNSSFASSHEVWKYICELGISKVELSMEDIETILNTLIYDGKVEMTIIAAKEGTVGSVDGHMKLYRAVNPIIPPTGLVRAPCGLCPVFDDCHEGGEISPSNCIYMTEWLEF

SEQ ID NO: 11739 - protein, 791 aa, Homo sapiens
MWNMLIVAMCLALLGCLQAQELQGHVSIILLGATGDLAKKYLWQGLFQLYLDEAGRGHSFSFHGAALTAPKQGQELMAKALESLSCPKDMAPSHCAEHKDQFLQLSQYRQLKTAEDYQALNKDIEAQLQHAGLREAGRIFYFSVPPFAYEDIARNINSSCRPGPGAWLRVVLEKPFGHDHFSAQQLATELGTFFQEEEMYRVDHYLGKQAVAQILPFRDQNRKALDGLWNRHHVERVEIIMKETVDAEGRTSFYEEYGVIRDVLQNHLTEVLTLVAMELPHNVSSAEAVLRHKLQVFQALRGLQRGSAVVGQYQSYSEQVRRELQKPDSFHSLTPTFAAVLVHIDNLRWEGVPFILMSGKALDERVGYARILFKNQACCVQSEKHWAAAQSQCLPRQLVFHIGHGDLGSPAVLVSRNLFRPSLPSSWKEMEGPPGLRLFGSPLSDYYAYSPVRERDAHSVLLSHIFHGRKNFFITTENLLASWNFWTPLLESLAHKAPRLYPGGAENGRLLDFEFSSGRLFFSQQQPEQLVPGPGPAPMPSDFQVLRAKYRESPLVSAWSEELISKLANDIEATAVRAVRRFGQFHLALSGGSSPVALFQQLATAHYGFPWAHTHLWLVDERCVPLSDPESNFQGLQAHLLQHVRIPYYNIHPMPVHLQQRLCAEEDQGAQIYAREISALVANSSFDLVLLGMGADGHTASLFPQSPTGLDGEQLVVLTTSPSQPHRRMSLSLPLINRAKKVAVLVMGRMKREITTLVSRVGHEPKKWPISGVLPHSGQLVWYMDYDAFLG

SEQ ID NO: 11740 - protein, 791 aa, Homo sapiens; identical to SEQ ID NO: 11739

SEQ ID NO: 11741 - protein, 458 aa, Homo sapiens
MAAQGAAAAVAAGTSGVAGEGEPGPGENAAAEGTAPSPGRVSPPTPARGEPEVTVEIGETYLCRRPDSTWHSAEVIQSRVNDQEGREEFYVHYVGFNRRLDEWVDKNRLALTKTVKDAVQKNSEKYLSELAEQPERKITRNQKRKHDEINHVQKTYAEMDPTTAALEKEHEAITKVKYVDKIHIGNYEIDAWYFSPFPEDYGKQPKLWLCEYCLKYMKYEKSYRFHLGQCQWRQPPGKEIYRKSNISVYEVDGKDHKIYCQNLCLLAKLFLDHKTLYFDVEPFVFYILTEVDRQGAHIVGYFSKEKESPDGNNVACILTLPPYQRRGYGKFLIAFSYELSKLESTVGSPEKPLSDLGKLSYRSYWSWVLLEILRDFRGTLSIKDLSQMTSITQNDIISTLQSLNMVKYWKGQHVICVTPKLVEEHLKSAQYKKPPITVDSVCLKWAPPKHKQVKLSKK

SEQ ID NO: 11742 - protein, 1572 aa, Homo sapiens
MASSAREHLLFVRRRNPQMRYTLSPENLQSLAAQSSMPENMTLQRANSDTDLVTSESRSSLTASMYEYTLGQAQNLIIFWDIKEEVDPSDWIGLYHIDENSPANFWDSKNRGVTGTQKGQIVWRIEPGPYFMEPEIKICFKYYHGISGALRATTPCITVKNPAVMMGAEGMEGGASGNLHSRKLVSFTLSDLRAVGLKKGMFFNPDPYLKMSIQPGKKSSFPTCAHHGQERRSTIISNTTNPIWHREKYSFFALLTDVLEIEIKDKFAKSRPIIKRFLGKLTIPVQRLLERQAIGDQMLSYNLGRRLPADHVSGYLQFKVEVTSSVHEDASPEAVGTILGVNSVNGDLGSPSDDEDMPGSHHDSQVCSNGPVSEDSAADGTPKHSFRTSSTLEIDTEELTSTSSRTSPPRGRQDSLNDYLDAIEHNGHSRPGTATCSERSMGASPKLRSSFPTDTRLNAMLHIDSDEEDHEFQQDLGYPSSLEEEGGLIMFSRASRADDGSLTSQTKLEDNPVENEEASTHEAASFEDKPENLPELAESSLPAGPAPEEGEGGPEPQPSADQGSAELCGSQEVDQPTSGADTGTSDASGGSRRAVSETESLDQGSEPSQVSSETEPSDPARTESVSEASTRPEGESDLECADSSCNESVTTQLSSVDTRCSSLESARFPETPAFSSQEEEDGACAAEPTSSGPAEGSQESVCTAGSLPVVQVPSGEDEGPGAESATVPDQEELGEVWQRRGSLEGAAAAAESPPQEEGSAGEAQGTCEGATAQEEGATGGSQANGHQPLRSLPSVRQDVSRYQRVDEALPPNWEARIDSHGRIFYVDHVNRTTTWQRPTAPPAPQVLQRSNSIQQMEQLNRRYQSIRRTMTNERPEENTNAIDGAGEEADFHQASADFRRENILPHSTSRSRITLLLQSPPVKFLISPEFFTVLHSNPSAYRMFTNNTCLKHMITKVRRDTHHFERYQHNRDLVGFLNMFANKQLELPRGWEMKHDHQGKAFFVDHNSRTTTFIDPRLPLQSSRPTSALVHRQHLTRQRSHSAGEVGEDSRHAGPPVLPRPSSTFNTVSRPQYQDMVPVAYNDKIVAFLRQPNIFEILQERQPDLTRNHSLREKIQFIRTEGTPGLVRLSSDADLVMLLSLFEEEIMSYVPPHALLHPSYCQSPRGSPVSSPQNSPGTQRANARAPAPYKRDFEAKLRNFYRKLETKGYGQGPGKLKLIIRRDHLLEDAFNQIMGYSRKDLQRNKLYVTFVGEEGLDYSGPSREFFFLVSRELFNPYYGLFEYSANDTYTVQISPMSAFVDNHHEWFRFSGRILGLALIHQYLLDAFFTRPFYKALLRILCDLSDLEYLDEEFHQSLQWMKDNDIHDILDLTFTVNEEVFGQITERELKPGGANIPVTEKNKKEYIERMVKWRIERGVVQQTESLVRGFYEVVDARLVSVFDARELELVIAGTAEIDLSDWRNNTEYRGGYHDNHIVIRWFWAAVERFNNEQRLRLLQFVTGTSSIPYEGFASLRGSNGPRRFCVEKWGKITALPRAHTCFNRLDLPPYPSFSMLYEKLLTAVEETSTFGLE

SEQ ID NO: 11743 - protein, 793 aa, Homo sapiens [sequence omitted]

SEQ ID NO: 11744 - protein, 1009 aa, Homo sapiens
MSWMFKRDPVWKYLQTVQYGVHGNFPRLSYPTFFPRFEFQDVIPPDDFLTSDEEVDSVLFGSLRGHVVGLRYYTGVVNNNEMVALQRDPNNPYDKNAIKVNNVNGNQVGHLKKELAGALAYIMDNKLAQIEGVVPFGANNAFTMPLHMTFWGKEENRKAVSDQLKKHGFKLGPAPKTLGFNLESGWGSGRAGPSYSMPVHAAVQMTTEQLKTEFDKLFEDLKEDDKTHEMEPAEAIETPLLPHQKQALAWMVSRENSKELPPFWEQRNDLYYNTITNFSEKDRPENVHGGILADDMGLGKTLTAIAVILTNFHDGRPLPIERVKKNLLKKEYNVNDDSMKLGGNNTSEKADGLSKDASRCSEQPSISDIKEKSKFRMSELSSSRPKRRKTAVQYIESSDSEEIETSELPQKMKGKLKNVQSETKGRAKAGSSKVIEDVAFACALTSSVPTTKKKMLKKGACAVEGSKKTDVEERPRTTLIICPLSVLSNWIDQFGQHIKSDVHLNFYVYYGPDRIREPALLSKQDIVLTTYNILTHDYGTKGDSPLHSIRWLRVILDEGHAIRNPNAQQTKAVLDLESERRWVLTGTPIQNSLKDLWSLLSFLKLKPFIDREWWHRTIQRPVTMGDEGGLRRLQSLIKNITLRRTKTSKIKGKPVLELPERKVFIQHITLSDEERKIYQSVKNEGRATIGRYFNEGTVLAHYADVLGLLLRLRQICCHTYLLTNAVSSNGPSGNDTPEELRKKLIRKMKLILSSGSDEECAICLDSLTVPVITHCAHVFCKPCICQVIQNEQPHAKCPLCRNDIHEDNLLECPPEELARDSEKKSDMEWTSSSKINALMHALTDLRKKNPNIKSLVVSQFTTFLSLIEIPLKASGFVFTRLDGSMAQKKRVESIQCFQNTEAGSPTIMLLSLKAGGVGLNLSAASRVFLMDPAWNPAAEDQCFDRCHRLGQKQEVIITKFIVKDSVEENMLKIQNKKRELAAGAFGTKKPNADEMKQAKINEIRTLIDL

SEQ ID NO: 11745 - protein, 1009 aa, Homo sapiens; identical to SEQ ID NO: 11744

SEQ ID NO: 11746 - protein, 1009 aa, Homo sapiens; identical to SEQ ID NO: 11744

SEQ ID NO: 11747 - protein, 546 aa, Homo sapiens
MGAYLSQPNTVKCSGDGVGAPRLPLPYGFSAMQGWRVSMEDAHNCIPELDSETAMFSVYDGHGGEEVALYCAKYLPDIIKDQKAYKEGKLQKALEDAFLAIDAKLTTEEVIKELAQIAGRPTEDEDEKEKVADEDDVDNEEAALLHEEATMTIEELLTRYGQNCHKGPPHSKSGGGTGEEPGSQGLNGEAGPEDSTRETPSQENGPTAKAYTGFSSNSERGTEAGQVGEPGIPTGEAGPSCSSASDKLPRVAKSKFFEDSEDESDEAEEEEEDSEECSEEEDGYSSEEAENEEDEDDTEEAEEDDEEEEEEMMVPGMEGKEEPGSDSGTTAVVALIRGKQLIVANAGDSRCVVSEAGKALDMSYDHKPEDEVELARIKNAGGKVTMDGRVNGGLNLSRAIGDHFYKRNKNLPPEEQMISALPDIKVLTLTDDHEFMVIACDGIWNVMSSQEVVDFIQSKISQRDENGELRLLSSIVEELLDQCLAPDTSGDGTGCDNMTCIIICFKPRNTAELQPESGKRKLEEVLSTEGAEENGNSDKKKKAKRD

SEQ ID NO: 11748 - protein, 58 aa, Homo sapiens
MVNLLQIVRDHWVHVLVPMGFVIGCYLDRKSDERLTAFRNKSMLFKRELQPSEEVTWK

SEQ ID NO: 11749 - protein, 58 aa, Homo sapiens; identical to SEQ ID NO: 11748

SEQ ID NO: 11750 - protein, 58 aa, Homo sapiens; identical to SEQ ID NO: 11748

SEQ ID NO: 11751 - protein, 105 aa, Homo sapiens
MICWRHPSAPCGRGEWQVPRSQLPLARVEFPVALGLGVAVGAEAAAIMVNLLQIVRDHWVHVLVPMGFVIGCYLDRKSDERLTAFRNKSMLFKRELQPSEEVTWK

SEQ ID NO: 11752 - protein, 58 aa, Homo sapiens; identical to SEQ ID NO: 11748

SEQ ID NO: 11753 - protein, 690 aa, Homo sapiens [sequence omitted]

SEQ ID NO: 11754 - protein, 782 aa, Homo sapiens
MTSIIKLTTLSGVQEESALCYLLQVDEFRFLLDCGWDEHFSMDIIDSLRKHVHQIDAVLLSHPDPLHLGALPYAVGKLGLNCAIYATIPVYKMGQMFMYDLYQSRHNTEDFTLFTLDDVDAAFDKIQQLKFSQIVNLKGKGHGLSITPLPAGHMIGGTIWKIVKDGEEEIVYAVDFNHKREIHLNGCSLEMLSRPSLLITDSFNATYVQPRRKQRDEQLLTNVLETLRGDGNVLIAVDTAGRVLELAQLLDQIWRTKDAGLGVYSLALLNNVSYNVVEFSKSQVEWMSDKLMRCFEDKRNNPFQFRHLSLCHGLSDLARVPSPKVVLASQPDLECGFSRDLFIQWCQDPKNSIILTYRTTPGTLARFLIDNPSEKITEIELRKRVKLEGKELEEYLEKEKLKKEAAKKLEQSKEADIDSSDESDIEEDIDQPSAHKTKHDLMMKGEGSRKGSFFKQAKKSYPMFPAPEERIKWDEYGEIIKPEDFLVPELQATEEEKSKLESGLTNGDEPMDQDLSDVPTKCISTTESIEIKARVTYIDYEGRSDGDSIKKIINQMKPRQLIIVHGPPEASQDLAECCRAFGGKDIKVYMPKLHETVDATSETHIYQVRLKDSLVSSLQFCKAKDAELAWIDGVLDMRVSKVDTGVILEEGELKDDGEDSEMQVEAPSDSSVIAQQKAMKSLFGDDEKETGEESEIIPTLEPLPPHEVPGHQSVFMNEPRLSDFKQVLLREGIQAEFVGGVLVCNNQVAVRRTETGRIGLEGCLCQDFYRIRDLLYEQYAIV

SEQ ID NO: 11755 - protein, 207 aa, Homo sapiens
MSSDRQRSDDESPSTSSGSSDADQRDPAAPEPEEQEERKPSATQQKKNTKLSSKTTAKLSTSAKRIQKELAEITLDPPPNCSAGPKGDNIYEWRSTILGPPGSVYEGGVFFLDITFSSDYPFKPPKVTFRTRIYHCNINSQGVICLDILKDNWSPALTISKVLLSICSLLTDCNPADPLVGSIATQYLTNRAEHDRIARQWTKRYAT

SEQ ID NO: 11756 - protein, 207 aa, Homo sapiens; identical to SEQ ID NO: 11755

SEQ ID NO: 11757 - protein, 207 aa, Homo sapiens; identical to SEQ ID NO: 11755

SEQ ID NO: 11758 - protein, 172 aa, Homo sapiens
MEELVDEWLMKAIGISNFNHLQVERLLNKPGLKYKPVVNQIECHPYLTQEKLIQYCQSKGIVVTAYSPVGTPSRPWVNPEDPSLLRDPRIKAIAAKHNKTTAQVLIRFPMQRNLGVIPKSVTPELIADNFKVFDFELNSQDMTALLSYNRNWRVCALVSCASHKDYPFHEEF

SEQ ID NO: 11759 - protein, 172 aa, Homo sapiens; identical to SEQ ID NO: 11758

SEQ ID NO: 11760 - protein, 239 aa, Homo sapiens
MGHKPILLRTQYRCHPAISAIANDLFYKGALMNGVTEIERSPLLEWLPTLCFYNVKGLEQIERDNSFHNVAEATFTLKLIQSLIASGIAGSMIGVITLYKSQMYKLCHLLSAVDFHHPDIKTVQVSTVDAFQGAEKEIIILSCVRTRQVGFIDSEKRMNVALTRGKRHLLIVGNLACLRKNQLWGRVIQHCEGREDGLQHANQYEPQLNHLLKDYFEKQVEEKQKKKSEKEKSKDKSHS

SEQ ID NO: 11761 - protein, 277 aa, Homo sapiens
MADPWQECMDYAVTLARQAGEVVCEAIKNEMNVMLKSSPVDLVTATDQKVEKMLISSIKEKYPSHSFIGEESVAAGEKSILTDNPTWIIDPIDGTTNFVHRFPFVAVSIGFAVNKKIEFGVVYSCVEGKMYTARKGKGAFCNGQKLQVSQQEDITKSLLVTELGSSRTPETVRMVLSNMEKLFCIPVHGIRSVGTAAVNMCLVATGGADAYYEMGIHCWDVAGAGIIVTEAGGVLMDVTGGPFDLMSRRVIAANNRILAERIAKEIQVIPLQRDDED

SEQ ID NO: 11762 - protein, 148 aa, Homo sapiens
MYTARKGKGAFCNGQKLQVSQQEDITKSLLVTELGSSRTPETVRMVLSNMEKLFCIPVHGIRSVGTAAVNMCLVATGGADAYYEMGIHCWDVAGAGIIVTEAGGVLMDVTGGPFDLMSRRVIAANNRILAERIAKEIQVIPLQRDDED

SEQ ID NO: 11763 - protein, 277 aa, Homo sapiens; identical to SEQ ID NO: 11761

SEQ ID NO: 11764 - protein, 104 aa, Homo sapiens
MVLSNMEKLFCIPVHGIRSVGTAAVNMCLVATGGADAYYEMGIHCWDVAGAGIIVTEAGGVLMDVTGGPFDLMSRRVIAANNRILAERIAKEIQVIPLQRDDED

SEQ ID NO: 11765 - protein, 242 aa, Homo sapiens
MADPWQECMDYAVTLARQAGEVVCEAIKNEMNVMLKSSPVDLVTATDQKVEKMLISSIKEKYPSHRFPFVAVSIGFAVNKKIEFGVVYSCVEGKMYTARKGKGAFCNGQKLQVSQQEDITKSLLVTELGSSRTPETVRMVLSNMEKLFCIPVHGIRSVGTAAVNMCLVATGGADAYYEMGIHCWDVAGAGIIVTEAGGVLMDVTGGPFDLMSRRVIAANNRILAERIAKEIQVIPLQRDDED

SEQ ID NO: 11766 - protein, 66 aa, Homo sapiens
LNFFYFTLPCHFTLPYHQIAWLIVGISAVNTFSKTVKLSVWICFKVLCKREETISIIKSTLIRYLT

SEQ ID NO: 11767 - protein, 182 aa, Homo sapiens
MAEEQVNRSAGLAPDCEASATAETTVSSVGTCEAAAKSPEPKDYDSTCVFCRIAGRQDPGTELLHCENEDLICFKDIKPAATHHYLVVPKKHIGNCRTLRKDQVELVENMVTVGKTILERNNFTDFTNVRMGFHMPPFCSISHLHLHVLAPVDQLGFLSKLVYRVNSYWFITADHLIEKLRT

SEQ ID NO: 11768 - protein, 190 aa, Homo sapiens [sequence omitted]

SEQ ID NO: 11769 - protein, 255 aa, Homo sapiens [sequence omitted]

SEQ ID NO: 11770 - protein, 334 aa, Homo sapiens [sequence omitted]

SEQ ID NO: 11771 - protein, 256 aa, Homo sapiens [sequence omitted]

SEQ ID NO: 11772 - protein, 137 aa, Homo sapiens [sequence omitted]

SEQ ID NO: 11773 - protein, 305 aa, Homo sapiens [sequence omitted]

SEQ ID NO: 11774 - protein, 202 aa, Homo sapiens
MMDACNRYSKLNCLVAPTLFLEFHGSQQALEEQLQRTEEIVQQNGASDFSWAKEAEERSRLWTARHNAWYAALATRPGCKGYSTDVCVPISRLPEIVVQTKEDLNASGLTGSIVGHVGDGNFHCILLVNPDDAEELGRVKAFAEQLGRRALALHGTCTGEHGIGMGKRQLLQEEVGAVGVETMRQLKAVLDPQGLMNPGKVL

SEQ ID NO: 11775 - protein, 495 aa, Homo sapiens
MARLLRSATWELFPWRGYCSQKAKGELCRDFVEALKAVVGGSHVSTAAVVREQHGRDESVHRCEPPDAVVWPQNVEQVSRLAALCYRQGVPIIPFGTGTGLEGGVCAVQGGVCVNLTHMDRILELNQEDFSVVVEPGVTRKALNAHLRDSGLWFPVDPGADASLCGMAATGASGTNAVRYGTMRDNVLNLEVVLPDGRLLHTAGRGRHFRKSAAGYNLTGLFVGSEGTLGLITATTLRLHPAPEATVAATCAFPSVQAAVDSTVHILQAAVPVARIEFLDEVMMDACNRYSKLNCLVAPTLFLEFHGSQQALEEQLQRTEEIVQQNGASDFSWAKEAEERSRLWTARHNAWYAALATRPGCKAGVTHRLPSDQGYSTDVCVPISRLPEIVVQTKEDLNASGLTGSIVGHVGDGNFHCILLVNPDDAEELGRVKAFAEQLGRRALALHGTCTGEHGIGMGKRQLLQEEVGAVGVETMRQLKAVLDPQGLMNPGKVL

SEQ ID NO: 11776 - protein, 507 aa, Homo sapiens
MARLLRSATWELFPWRGYCSQKAKGELCRDFVEALKAVVGGSHVSTAAVVREQHGRDESVHRCEPPDAVVWPQNVEQVSRLAALCYRQGVPIIPFGTGTGLEGGVCAVQGGVCVNLTHMDRILELNQEDFSVVVEPGVTRKALNAHLRDSGLWFPVDPGADASLCGMAATGASGTNAVRYGTMRDNVLNLEVVLPDGRLLHTAGRGRHFRFGFWPEIPHHTAWYSPCVSLGRRKSAAGYNLTGLFVGSEGTLGLITATTLRLHPAPEATVAATCAFPSVQAAVDSTVHILQAAVPVARIEFLDEVMMDACNRYSKLNCLVAPTLFLEFHGSQQALEEQLQRTEEIVQQNGASDFSWAKEAEERSRLWTARHNAWYAALATRPGCKGYSTDVCVPISRLPEIVVQTKEDLNASGLTGSIVGHVGDGNFHCILLVNPDDAEELGRVKAFAEQLGRRALALHGTCTGEHGIGMGKRQLLQEEVGAVGVETMRQLKAVLDPQGLMNPGKVL

SEQ ID NO: 11777 - protein, 389 aa, Homo sapiens
MAPAPPPAASFSPSEVQRRLAAGACWVRRGARLYDLSSFVRHHPGGEQLLRARAGQDISADLDGPPHRHSANARRWLEQYYVGELRGEQQGSMENEPVALEETQKTDPAMEPRFKVVDWDKDLVDWRKPLLWQVGHLGEKYDEWVHQPVTRPIRLFHSDLIEGLSKTVWYSVPIIWVPLVLYLSWSYYRTFAQGNVRLFTSFTTEYTVAVPKSMFPGLFMLGTFLWSLIEYLIHRFLFHMKPPSDSYYLIMLHFVMHGQHHKAPFDGSRLVFPPVPASLVIGVFYLCMQLILPEAVGGTVFAGGLLGYVLYDMTHYYLHFGSPHKGSYLYSLKAHHVKHHFAHQKSGGSHPLGGQVALGDPLLPGASLPRAQPTGLLQAVATGSSRKGK

SEQ ID NO: 11778 - protein, 372 aa, Homo sapiens
MAPAPPPAASFSPSEVQRRLAAGACWVRRGARLYDLSSFVRHHPGGEQLLRARAGQDISADLDGPPHRHSANARRWLEQYYVGELRGEQQGSMENEPVALEETQKTDPAMEPRFKVVDWDKDLVDWRKPLLWQVGHLGEKYDEWVHQPVTRPIRLFHSDLIEGLSKTVWYSVPIIWVPLVLYLSWSYYRTFAQGNVRLFTSFTTEYTVAVPKSMFPGLFMLGTFLWSLIEYLIHRFLFHMKPPSDSYYLIMLHFVMHGQHHKAPFDGSRLVFPPVPASLVIGVFYLCMQLILPEAVGGTVFAGGLLGYVLYDMTHYYLHFGSPHKGSYLYSLKAHHVKHHFAHQKSGFGISTKLWDYCFHTLTPEKPHLKTQ

SEQ ID NO: 11779 - protein, 142 aa, Homo sapiens
MRLSWFRVLTVLSICLSAVATATGAEGKRKLQIGVKKRVDHCPIKSRKGDVLHMHYTGKLEDGTEFDSSLPQNQPFVFSLGTGQVIKGWDQGLLGMCEGEKRKLVIPSELGYGERGAPPKIPGGATLVFEVELLKIERRTEL

SEQ ID NO: 11780 - protein, 142 aa, Homo sapiens; identical to SEQ ID NO: 11779

SEQ ID NO: 11781 - protein, 1234 aa, Homo sapiens
MAGAQPGVHALQLEPPTVVETLRRGSKFIKWDEETSSRNLVTLRVDPNGFFLYWTGPNMEVDTLDISSIRDTRTGRYARLPKDPKIREVLGFGGPDARLEEKLMTVVSGPDPVNTVFLNFMAVQDDTAKVWSEELFKLAMNILAQNASRNTFLRKAYTKLKLQVNQDGRIPVKNILKMFSADKKRVETALESCGLKFNRSESIRPDEFSLEIFERFLNKLCLRPDIDKILLEIGAKGKPYLTLEQLMDFINQKQRDPRLNEVLYPPLRPSQARLLIEKYEPNQQFLERDQMSMEGFSRYLGGEENGILPLEALDLSTDMTQPLSAYFINSSHNTYLTAGQLAGTSSVEMYRQALLWGCRCVELDVWKGRPPEEEPFITHGFTMTTEVPLRDVLEAIAETAFKTSPYPVILSFENHVDSAKQQAKMAEYCRSIFGDALLIEPLDKYPLAPGVPLPSPQDLMGRILVKNKKRHRPSAGGPDSAGRKRPLEQSNSALSESSAATEPSSPQLGSPSSDSCPGLSNGEEVGLEKPSLEPQKSLGDEGLNRGPYVLGPADREDEEEDEEEEEQTDPKKPTTDEGTASSEVNATEEMSTLVNYIEPVKFKSFEAARKRNKCFEMSSFVETKAMEQLTKSPMEFVEYNKQQLSRIYPKGTRVDSSNYMPQLFWNVGCQLVALNFQTLDVAMQLNAGVFEYNGRSGYLLKPEFMRRPDKSFDPFTEVIVDGIVANALRVKVISGQFLSDRKVGIYVEVDMFGLPVDTRRKYRTRTSQGNSFNPVWDEEPFDFPKVVLPTLASLRIAAFEEGGKFVGHRILPVSAIRSGYHYVCLRNEANQPLCLPALLIYTEASDYIPDDHQDYAEALINPIKHVSLMDQRARQLAALIGESEAQAGQETCQDTQSQQLGSQPSSNPTPSPLDASPRRPPGPTTSPASTSLSSPGQRDDLIASILSEVAPTPLDELRGHKALVKLRSRQERDLRELRKKHQRKAVTLTRRLLDGLAQAQAEGRCRLRPGALGGAADVEDTKEGEDEAKRYQEFQNRQVQSLLELREAQVDAEAQRRLEHLRQALQRLREVVLDANTTQFKRLKEMNEREKKELQKILDRKRHNSISEAKMRDKHKKEAELTEINRRHITESVNSIRRLEEAQKQRHDRLVAGQQQVLQQLAEEEPKLLAQLAQECQEQRARLPQEIRRSLLGEMPEGLGDGPLVACASNGHAPGSSGHLSGADSESQEENTQL

SEQ ID NO: 11782 - protein, 488 aa, Homo sapiens
MAYSQGGGKKKVCYYYDGDIGNYYYGQGHPMKPHRIRMTHNLLLNYGLYRKMEIYRPHKATAEEMTKYHSDEYIKFLRSIRPDNMSEYSKQMQRFNVGEDCPVFDGLFEFCQLSTGGSVAGAVKLNRQQTDMAVNWAGGLHHAKKSEASGFCYVNDIVLAILELLKYHQRVLYIDIDIHHGDGVEEAFYTTDRVMTVSFHKYGEYFPGTGDLRDIGAGKGKYYAVNFPMRDGIDDESYGQIFKPIISKVMEMYQPSAVVLQCGADSLSGDRLGCFNLTVKGHAKCVEVVKTFNLPLLMLGGGGYTIRNVARCWTYETAVALDCEIPNELPYNDYFEYFGPDFKLHISPSNMTNQNTPEYMEKIKQRLFENLRMLPHAPGVQMQAIPEDAVHEDSGDEDGEDPDKRISIRASDKRIACDEEFSDSEDEGEGGRRNVADHKKGAKKARIEEDKKETEDKKTDVKEEDKSKDNSGEKTDTKGTKSEQLSNP

SEQ ID NO: 11783 - protein, 488 aa, Homo sapiens; identical to SEQ ID NO: 11782

SEQ ID NO: 11784 - protein, 298 aa, Homo sapiens
MEEKQILCVGLVVLDVISLVDKYPKEDSEIRCLSQRWQRGGNASNSCTVLSLLGAPCAFMGSMAPGHVADFLVADFRRRGVDVSQVAWQSKGDTPSSCCIINNSNGNRTIVLHDTSLPDVSATDFEKVDLTQFKWIHIEGRNASEQVKMLQRIDAHNTRQPPEQKIRVSVEVEKPREELFQLFGYGDVVFVSKDVAKHLGFQSAEEALRGLYGRVRKGAVLVCAWAEEGADALGPDGKLLHSDAFPPPRVVDTLGAGDTFNASVIFSLSQGRSVQEALRFGCQVAGKKCGLQGFDGIV

SEQ ID NO: 11785 - protein, 298 aa, Homo sapiens
MEEKQILCVGLVVLDVISLVDKYPKEDSEIRCLSQRWQRGGNASNSCTVLSLLGAPCAFMGSMAPGHVADFVLDDLRRYSVDLRYTVFQTTGSVPIATVIINEASGSRTILYYDRSLPDVSATDFEKVDLTQFKWIHIEGRNASEQVKMLQRIDAHNTRQPPEQKIRVSVEVEKPREELFQLFGYGDVVFVSKDVAKHLGFQSAEEALRGLYGRVRKGAVLVCAWAEEGADALGPDGKLLHSDAFPPPRVVDTLGAGDTFNASVIFSLSQGRSVQEALRFGCQVAGKKCGLQGFDGIV

SEQ ID NO: 11786 - protein, 184 aa, Homo sapiens [sequence omitted]

SEQ ID NO: 11787 - protein, 189 aa, Homo sapiens
MHVHAKHLNKIYEVKKQRGKILLGLSRLPLISVALVQGWALGGGAEFTTACDFRLMTPESKIRFVHKEMGIIPSWGGTTRLVEIIGSRQALKVLSGALKLDSKNALNIGMVEEVLQSSDETKSLEEAQEWLKQFIQGPPEVIRALKKSVCSGRELYLEEALQNERDLLGTVWGGPANLEAIAKKGKFNK

SEQ ID NO: 11788 - protein, 149 aa, Homo sapiens
MHVHAKHLNKIYEVKKQRGKILLGLSRLPLISVALVQGWALGGGAEFTTACDFRLMTPESKIRFVHKEMGIIPSWGGTTRLVEIIGSRQALKVLSGALKLDSKNALNIGMVEEVLQSSDETKSLEEAQEWLKQFIQGPPEVIRALKKSV

SEQ ID NO: 11789 - protein, 134 aa, Homo sapiens
MTPESKIRFVHKEMGIIPSWGGTTRLVEIIGSRQALKVLSGALKLDSKNALNIGMVEEVLQSSDETKSLEEAQEWLKQFIQGPPEVIRALKKSVCSGRELYLEEALQNERDLLGTVWGGPANLEAIAKKGKFNK

SEQ ID NO: 11790 - protein, 282 aa, Homo sapiens
MAKSLLKTASLSGRTKLLHQTGLSLYSTSHGFYEEEVKKTLQQFPGGSIDLQKEDNGIGILTLNNPSRMNAFSGVMMLQLLEKVIELENWTEGKGLIVRGAKNTFSSGSDLNAVKSLGTPEASTSFNKCCAGSRLGIGWRSRIYYSMLMTPESKIRFVHKEMGIIPSWGGTTRLVEIIGSRQALKVLSGALKLDSKNALNIGMVEEVLQSSDETKSLEEAQEWLKQFIQGPPEVIRALKKSVCSGRELYLEEALQNERDLLGTVWGGPANLEAIAKKGKFNK

SEQ ID NO: 11791 - protein, 997 aa, Homo sapiens
MPSEKKISSANDCISFMQAGCELKKVRPNSRIYNRFFTLDTDLQALRWEPSKKDLEKAKLDISAIKEIRLGKNTETFRNNGLADQICEDCAFSILHGENYESLDLVANSADVANIWVSGLRYLVSRSKQPLDFMEGNQNTPRFMWLKTVFEAADVDGNGIMLEDTSVELIKQLNPTLKEAKIRLKFKEIQKSKEKLTTRVTEEEFCEAFCELCTRPEVYFLLVQISKNKEYLDANDLMLFLEAEQGVTHITEDICLDIIRRYELSEEGRQKGFLAIDGFTQYLLSSECDIFDPEQKKVAQDMTQPLSHYYINASHNTYLIEDQFRGPADINGYIRALKMGCRSVELDVSDGSDNEPILCNRNNMTTHVSFRSVIEVINKFAFVASEYPLILCLGNHCSLPQQKVMAQQMKKVFGNKLYTEAPLPSESYLPSPEKLKRMIIVKGKKLPSDPDVLEGEVTDEDEEAEMSRRMSVDYNGEQKQIRLCRELSDLVSICKSVQYRDFELSMKSQNYWEMCSFSETEASRIANEYPEDFVNYNKKFLSRIYPSAMRIDSSNLNPQDFWNCGCQIVAMNFQTPGPMMDLHTGWFLQNGGCGYVLRPSIMRDEVSYFSANTKGILPGVSPLALHIKIISGQNFPKPKGACAKGDVIDPYVCIEIHGIPADCSEQRTKTVQQNSDNPIFDETFEFQVNLPELAMIRFVVLDDDYIGDEFIGQYTIPFECLQPGYRHVPLRSFVGDIMEHVTLFVHIAITNRSGGGKAQKRSLSVRMGKKVREYTMLRNIGLKTIDDIFKIAVHPLREAIDMRENMQNAIVSIKELCGLPPIASLKQCLLTLSSRLITSDNTPSVSLVMKDSFPYLEPLGAIPDVQKKMLTAYDLMIQESRFLIEMADTVQEKIVQCQKAGMEFHEELHNLGAKEGLKGRKLNKATESFAWNITVLKGQGDLLKNAKNEAIENMKQIQLACLSCGLSKAPSSSAEAKSKRSLEAIEEKESSEENGKL

SEQ ID NO: 11792 - protein, 124 aa, Homo sapiens
MAAAMTFCRLLNRCGEAARSLPLGARCFGVRVSPTGEKVTHTGQVYDDKDYRRIRFVGRQKEVNENFAIDLIAEQPVSEVETRVIACDGGGGALGHPKVYINLDKETKTGTCGYCGLQFRQHHH

SEQ ID NO: 11793 - protein, 124 aa, Homo sapiens; identical to SEQ ID NO: 11792

SEQ ID NO: 11794 - protein, 643 aa, Homo sapiens
METSSSCESLGSQPAAARPPSVDSLSSASTSHSENSVHTKSASVVSSDSISTSADNFSPDLRVLRESNKLAEMEEPPLLPGENIKDMAKDVTYICPFTGAVRGTLTVTNYRLYFKSMERDPPFVLDASLGVINRVEKIGGASSRGENSYGLETVCKDIRNLRFAHKPEGRTRRSIFENLMKYAFPVSNNLPLFAFEYKEVFPENGWKLYDPLLEYRRQGIPNESWRITKINERYELCDTYPALLVVPANIPDEELKRVASFRSRGRIPVLSWIHPESQATITRCSQPMVGVSGKRSKEDEKYLQAIMDSNAQSHKIFIFDARPSVNAVANKAKGGGYESEDAYQNAELVFLDIHNIHVMRESLRKLKEIVYPNIEETHWLSNLESTHWLEHIKLILAGALRIADKVESGKTSVVVHCSDGWDRTAQLTSLAMLMLDGYYRTIRGFEVLVEKEWLSFGHRFQLRVGHGDKNHADADRSPVFLQFIDCVWQMTRQFPTAFEFNEYFLITILDHLYSCLFGTFLCNSEQQRGKENLPKRTVSLWSYINSQLEDFTNPLYGSYSNHVLYPVASMRHLELWVGYYIRWNPRMKPQEPIHNRYKELLAKRAELQKKVEELQREISNRSTSSSERASSPAQCVTPVQTVV

SEQ ID NO: 11795 - protein, 467 aa, Homo sapiens
MNENIDILETAIKQAAEQGARIIVTPEDALYGWKFTRETVFPYLEDIPDPQVNWIPCQDPHRFGHTPVQARLSCLAKDNSIYVLANLGDKKPCNSRDSTCPPNGYFQYNTNVVYNTEGKLVARYHKYHLYSEPQFNVPEKPELVTFNTAFGRFGIFTCFDIFFYDPGVTLVKDFHVDTILFPTAWMNVLPLLTAIEFHSAWAMGMGVNLLVANTHHVSLNMTGSGIYAPNGPKVYHYDMKTELGKLLLSEVDSHPLSSLAYPTAVNWNAYATTIKPFPVQKNTFRGFISRDGFNFTELFENAGNLTVCQKELCCHLSYRMLQKEENEVYVLGAFTGLHGRRRREYWQVCTMLKCKTTNLTTCGRPVETASTRFEMFSLSGTFGTEYVFPEVLLTEIHLSPGKFEVLKDGRLVNKNGSSGPILTVSLFGRWYTKDSLYSSCGTSNSAITYLLIFILLMIIALQNIVML

SEQ ID NO: 11796 - protein, 520 aa, Homo sapiens
MVTSSFPISVAVFALITLQVGTQDSFIAAVYEHAVILPNKTETPVSQEDALNLMNENIDILETAIKQAAEQGARIIVTPEDALYGWKFTRETVFPYLEDIPDPQVNWIPCQDPHRFGHTPVQARLSCLAKDNSIYVLANLGDKKPCNSRDSTCPPNGYFQYNTNVVYNTEGKLVARYHKYHLYSEPQFNVPEKPELVTFNTAFGRFGIFTCFDIFFYDPGVTLVKDFHVDTILFPTAWMNVLPLLTAIEFHSAWAMGMGVNLLVANTHHVSLNMTGSGIYAPNGPKVYHYDMKTELGKLLLSEVDSHPLSSLAYPTAVNWNAYATTIKPFPVQKNTFRGFISRDGFNFTELFENAGNLTVCQKELCCHLSYRMLQKEENEVYVLGAFTGLHGRRRREYWQVCTMLKCKTTNLTTCGRPVETASTRFEMFSLSGTFGTEYVFPEVLLTEIHLSPGKFEVLKDGRLVNKNGSSGPILTVSLFGRWYTKDSLYSSCGTSNSAITYLLIFILLMIIALQNIVML

SEQ ID NO: 11797 - protein, 639 aa, Homo sapiens [sequence omitted]

SEQ ID NO: 11798 - protein, 238 aa, Homo sapiens
MSRLGLPEEPVRNSLLDDAKARLRKYDIGGKYSHLPYNKYSVLLPLVAKEGKLHLLFTVRSEKLRRAPGEVCFPGGKRDPTDMDDAATALREAQEEVGLRPHQVEVVCCLVPCLIDTDTLITPFVGLIDHNFQAQPNPAEVKDVFLVPLAYFLHPQVHDQHYVTRLGHRFINHIFEYTNPEDGVTYQIKGMTANLAVLVAFIILEKKPTFEVQFNLNDVLASSEELFLKVHKKATSRL

SEQ ID NO: 11799 - protein, 185 aa, Homo sapiens
MSRLGLPEEPVRNSLLDDAKARLRKYDIGGKYSHLPYNKYSVLLPLVAKEGKLHLLFTVRSEKTDTLITPFVGLIDHNFQAQPNPAEVKDVFLVPLAYFLHPQVHDQHYVTRLGHRFINHIFEYTNPEDGVTYQIKGMTANLAVLVAFIILEKKPTFEVQFNLNDVLASSEELFLKVHKKATSRL

SEQ ID NO: 11800 - protein, 254 aa, Homo sapiens [sequence omitted]

SEQ ID NO: 11801 - protein, 286 aa, Homo sapiens [sequence omitted]

SEQ ID NO: 11802 - protein, 483 aa, Homo sapiens [sequence omitted]

SEQ ID NO: 11803 - protein, 113 aa, Homo sapiens [sequence omitted]

SEQ ID NO: 11804 - protein, 236 aa, Homo sapiens
MSAPSATPIFAPGENCSPAWGAAPAAYDAADTHLRILGKPVMERWETPYMHALAAAASSKGGRVLEVGFGMAIAASKVQEAPIDEHWIIECNDGVFQRLRDWAPRQTHKVIPLKGLWEDVAPTLPDGHFDGILYDTYPLSEETWHTHQFNFIKNHAFRLLKPGGVLTYCNLTSWGELMKSKYSDITIMFEETQVPALLEAGFRRENIRTEVMALVPPADCRYYAFPQMITPLVTKG

SEQ ID NO: 11805 - protein, 168 aa, Homo sapiens
MLPAALLRRPGLGRLVRHARAYAEAAAAPAAASGPNQMSFTFASPTQVFFNGANVRQVDVPTLTGAFGILAAHVPTLQVLRPGLVVVHAEDGTTSKYFVSSGSIAVNADSSVQLLAEEAVTLDMLDLGAAKANLEKAQAELVGTADEATRAEIQIRIEANEALVKALE

SEQ ID NO: 11806 - protein, 168 aa, Homo sapiens; identical to SEQ ID NO: 11805

SEQ ID NO: 11807 - protein, 168 aa, Homo sapiens; identical to SEQ ID NO: 11805

SEQ ID NO: 11808 - protein, 117 aa, Homo sapiens
MQEENITRALIVVQQGMTPSAKQSLVDMAPKYILEQFLQQELLINITEHELVPEHVVMTKEEVTELLARYKLRENQLPRIQAGDPVARYFGIKRGQVVKIIRPSETAGRYITYRLVQ

SEQ ID NO: 11809 - protein, 211 aa, Homo sapiens
MDDEEETYRLWKIRKTIMQLCHDRGYLVTQDELDQTLEEFKAQFGDKPSEGRPRRTDLTVLVAHNDDPTDQMFVFFPEEPKVGIKTIKVYCQRMQEENITRALIVVQQGMTPSAKQSLVDMAPKYILEQFLQQELLINITEHELVPEHVVMTKEEVTELLARYSKLRENQLPRIQAGDPVARYFGIKRGQVVKIIRPSETAGRYITYRLVQ

SEQ ID NO: 11810 - protein, 210 aa, Homo sapiens
MDDEEETYRLWKIRKTIMQLCHDRGYLVTQDELDQTLEEFKAQFGDKPSEGRPRRTDLTVLVAHNDDPTDQMFVFFPEEPKVGIKTIKVYCQRMQEENITRALIVVQQGMTPSAKQSLVDMAPKYILEQFLQQELLINITEHELVPEHVVMTKEEVTELLARYKLRENQLPRIQAGDPVARYFGIKRGQVVKIIRPSETAGRYITYRLVQ

SEQ ID NO: 11811 - protein, 210 aa, Homo sapiens; identical to SEQ ID NO: 11810

SEQ ID NO: 11812 - protein, 112 aa, Homo sapiens
MFSKICVNGDDAHPLWKWMKIQPKGKGILGKTAWGLWGAAGDAHVHVLLFQCHQVELHQVPHRQERLRGEALRTHGGAPGDREGPAPLFLAPQVCGPARAPAHALGAFHRHS

SEQ ID NO: 11813 - protein, 90 aa, Homo sapiens
MSALEGVAVGKEARKADARPLVGWTRGGAAGSQPRRDEPRPPLPPTEAGAALWGSGRAWPGRDHVRVPGRLALCALHARVFRQGHRRAHG

SEQ ID NO: 11814 - protein, 90 aa, Homo sapiens; identical to SEQ ID NO: 11813

SEQ ID NO: 11815 - protein, 243 aa, Homo sapiens
ARGLGSGKGKGLFHARGSWSGKGPSRPLQARVPGPGSGVQACRGRGPGRLGRSWTVEGHGGASPGRAGLLRPSGWGRGGLEIPDHAPPGAAPPPHLGLARWRHSRAVLTTASGPFVPASGARGGGARRGGRRAGMGRAGAGSPGRRRQRCQSRGRRRPRAPRRRKAPACRRRRARRRRKKPCPRSLRPEIHECPKSQDPCASRDDWRCARSMHEFSAKDIDGHMVNLDKYRGFVCIVTNVASQ

SEQ ID NO: 11816 - protein, 1136 aa, Homo sapiens
MFSRKKRELMKTPSISKKNRAGSPSPQPSGELPRKDGADAVFPGPSLEPPAGSSGVKATGTLKRPTSLSRHASAAGFPLSGAASWTLGRSHRSPLTAASPGELPTEGAGPDVVEDISHLLADVARFAEGLEKLKECVLRDDLLEARRPRAHECLGEALRVMHQIISKYPLLNTVETLTAAGTLIAKVKAFHYESNNDLEKQEFEKALETIAVAFSSTVSEFLMGEVDSSTLLAVPPGDSSQSMESLYGPGSEGTPPSLEDCDAGCLPAEEVDVLLQRCEGGVDAALLYAKNMAKYMKDLISYLEKRTTLEMEFAKGLQKIAHNCRQSVMQEPHMPLLSIYSLALEQDLEFGHSMVQAVGTLQTQTFMQPLTLRRLEHEKRRKEIKEAWHRAQRKLQEAESNLRKAKQGYVQRCEDHDKARFLVAKAEEEQAGSAPGAGSTATKTLDKRRRLEEEAKNKAEEAMATYRTCVADAKTQKQELEDTKVTALRQIQEVIRQSDQTIKSATISYYQMMHMQTAPLPVHFQMLCESSKLYDPGQQYASHVRQLQRDQEPDVHYDFEPHVSANAWSPVMRARKSSFNVSDVARPEAAGSPPEEGGCTEGTPAKDHRAGRGHQVHKSWPLSISDSDSGLDPGPGAGDFKKFERTSSSGTMSSTEELVDPDGGAGASAFEQADLNGMTPELPVAVPSGPFRHEGLSKAARTHRLRKLRTPAKCRECNSYVYFQGAECEECCLACHKKCLETLAIQCGHKKLQGRLQLFGQDFSHAARSAPDGVPFIVKKCVCEIERRALRTKGIYRVNGVKTRVEKLCQAFENGKELVELSQASPHDISNVLKLYLRQLPEPLISFRLYHELVGLAKDSLKAEAEAKAASRGRQDGSESEAVAVALAGRLRELLRDLPPENRASLQYLLRHLRRIVEVEQDNKMTPGNLGIVFGPTLLRPRPTEATVSLSSLVDYPHQARVIETLIVHYGLVFEEEPEETPGGQDESSNQRAEVVVQVPYLEAGEAVVYPLQEAAADGCRESRVVSNDSDSDLEEASELLSSSEASALGHLSFLEQQQSEASLEVASGSHSGSEEQLEATAREDGDGDEDGPAQQLSGFNTNQSNNVLQAPLPPMRLRGGRMTLGSCRERQPEFV

SEQ ID NO: 11817 - protein, 212 aa, Homo sapiens
MTPGNLGIVFGPTLLRPRPTEATVSLSSLVDYPHQARVIETLIVHYGLVFEEEPEETPGGQDESSNQRAEVVVQVPYLEAGEAVVYPLQEAAADGCRESRVVSNDSDSDLEEASELLSSSEASALGHLSFLEQQQSEASLEVASGSHSGSEEQLEATAREDGDGDEDGPAQQLSGFNTNQSNNVLQAPLPPMRLRGGRMTLGSCRERQPEFV

SEQ ID NO: 11818 - protein, 1121 aa, Homo sapiens
MFSRKKRELMKTPSISKKNRAGSPSPQPSGELPRKDGADAVFPGPSLEPPAGSSGVKATGTLKRPTSLSRHASAAGFPLSGAASWTLGRSHRSPLTAASPGELPTEGAGPDVVEDISHLLADVARFAEGLEKLKECVLRDDLLEARRPRAHECLGEALRVMHQIISKYPLLNTVETLTAAGTLIAKVKAFHYESNNDLEKQEFEKALETIAVAFSSTVSEFLMGEVDSSTLLAVPPGDSSQSMESLYGPGSEGTPPSLEDCDAGCLPAEEVDVLLQRCEGGVDAALLYAKNMAKYMKDLISYLEKRTTLEMEFAKGLQKIAHNCRQSVMQEDLEFGHSMVQAVGTLQTQTFMQPLTLRRLEHEKRRKEIKEAWHRAQRKLQEAESNLRKAKQGYVQRCEDHDKARFLVAKAEEEQAGSAPGAGSTATKTLDKRRRLEEEAKNKAEEAMATYRTCVADAKTQKQELEDTKVTALRQIQEVIRQSDQTIKSATISYYQMMHMQTAPLPVHFQMLCESSKLYDPGQQYASHVRQLQRDQEPDVHYDFEPHVSANAWSPVMRARKSSFNVSDVARPEAAGSPPEEGGCTEGTPAKDHRAGRGHQVHKSWPLSISDSDSGLDPGPGAGDFKKFERTSSSGTMSSTEELVDPDGGAGASAFEQADLNGMTPELPVAVPSGPFRHEGLSKAARTHRLRKLRTPAKCRECNSYVYFQGAECEECCLACHKKCLETLAIQCGHKKLQGRLQLFGQDFSHAARSAPDGVPFIVKKCVCEIERRALRTKGIYRVNGVKTRVEKLCQAFENGKELVELSQASPHDISNVLKLYLRQLPEPLISFRLYHELVGLAKDSLKAEAEAKAASRGRQDGSESEAVAVALAGRLRELLRDLPPENRASLQYLLRHLRRIVEVEQDNKMTPGNLGIVFGPTLLRPRPTEATVSLSSLVDYPHQARVIETLIVHYGLVFEEEPEETPGGQDESSNQRAEVVVQVPYLEAGEAVVYPLQEAAADGCRESRVVSNDSDSDLEEASELLSSSEASALGHLSFLEQQQSEASLEVASGSHSGSEEQLEATAREDGDGDEDGPAQQLSGFNTNQSNNVLQAPLPPMRLRGGRMTLGSCRERQPEFV

SEQ ID NO: 11819 - protein, 266 aa, Homo sapiens [sequence omitted]

SEQ ID NO: 11820 - protein, 298 aa, Homo sapiens
MSVASVFVGPPQTRGPHVRTPMTFPPRVIWGCTAQHDHGGRKRSGTSRLQVPVSACAPSRFGRRPREPGALRRTDLRGCLKAEAKMAVLSAPGLRGFRILGLRSSVGLAVQARGVHQSVATDGPSSTQPALPKARAVAPKPSSRGEYVVAKLDDLVNWARRSSLWPMTFGLACCAVEMMHMAAPRYDMDRFGVVFRASPRQSDVMIVAGTLTNKMAPALRKVYDQMPEPRYVVSMGSCANGGGYYHYSYSVVRGCDRIVPVDIYIPGCPPTAEALLYGILQLQRKIKRERRLQIWYRR

SEQ ID NO: 11821 - protein, 132 aa, Homo sapiens
MTFGLACCAVEMMHMAAPRYDMDRFGVVFRASPRQSDVMIVAGTLTNKMAPALRKVYDQMPEPRYVVSMGSCANGGGYYHYSYSVVRGCDRIVPVDIYIPGCPPTAEALLYGILQLQRKIKRERRLQIWYRR

SEQ ID NO: 11822 - protein, 381 aa, Homo sapiens
MSEFWLISAPGDKENLQALERMNTVTSKSNLSYNTKFAIPDFKVGTLDSLVGLSDELGKLDTFAESLIRRMAQSVVEVMEDSKGKVQEHLLANGVDLTSFVTHFEWDMAKYPVKQPLVSVVDTIAKQLAQIEMDLKSRTAAYNTLKTNLENLEKKSMGNLFTRTLSDIVSKEDFVLDSEYLVTLLVIVPKPNYSQWQKTYESLSDMVVPRSTKLITEDKEGGLFTVTLFRKVIEDFKTKAKENKFTVREFYYDEKEIEREREEMARLLSDKKQQYGPLLRWLKVNFSEAFIAWIHIKALRVFVESVLRYGLPVNFQAVLLQPHKKSSTKRLREVLNSVFRHLDEVAATSILDASVEIPGLQLNNQDYFPYVYFHIDLSLLD

SEQ ID NO: 11823 - protein, 318 aa, Homo sapiens
MPNIKIFSGSSHQDLSQKIADRLGLELGKVVTKKFSNQETCVEIGESVRGEDVYIVQSGCGEINDNLMELLIMINACKIASASRVTAVIPCFPYARQDKKDKSRAPISAKLVANMLSVAGADHIITMDLHASQIQGFFDIPVDNLYAEPAVLKWIRENISEWRNCTIVSPDAGGAKRVTSIADRLNVDFALIHKERKKANEVDRMVLVGDVKDRVAILVDDMADTCGTICHAADKLLSAGATRVYAILTHGIFSGPAISRINNACFEAVVVTNTIPQEDKMKHCSKIQVIDISMILAEAIRRTHNGESVSYLFSHVPL

SEQ ID NO: 11824 - protein, 318 aa, Homo sapiens; identical to SEQ ID NO: 11823

SEQ ID NO: 11825 - protein, 318 aa, Homo sapiens; identical to SEQ ID NO: 11823

SEQ ID NO: 11826 - protein, 213 aa, Homo sapiens
MPDENIFLFVPNLIGYARIVFAIISFYFMPCCPLTASSFYLLSGLLDAFDGHAARALNQGTRFGAMLDMLTDRCSTMCLLVNLALLYPGATLFFQISMSLDVASHWLHLHSSVVRGSESHKMIDLSGNPVLRIYYTSRPALFTLCAGNELFYCLLYLFHFSEGPLVGSVGLFRMGLWVTAPIALLKSLISVIHLITAARNMAALDAADRAKKK

SEQ ID NO: 11827 - protein, 213 aa, Homo sapiens; identical to SEQ ID NO: 11826

SEQ ID NO: 11828 - protein, 236 aa, Homo sapiens
MTSEKGPSTGDPTLRRRIEPWEFDVFYDPRELRKEACLLYEIKWGMSRKIWRSSGKNTTNHVEVNFIKKFTSERDFHPSISCSITWFLSWSPCWECSQAIREFLSRHPGVTLVIYVARLFWHMDQQNRQGLRDLVNSGVTIQIMRASEYYHCWRNFVNYPPGDEAHWPQYPPLWMMLYALELHCIILSLPPCLKISRRWQNHLTFFRLHLQNCHYQTIPPHILLATGLIHPSVAWR

SEQ ID NO: 11829 - protein, 191 aa, Homo sapiens
MSRKIWRSSGKNTTNHVEVNFIKKFTSERDFHPSISCSITWFLSWSPCWECSQAIREFLSRHPGVTLVIYVARLFWHMDQQNRQGLRDLVNSGVTIQIMRASEYYHCWRNFVNYPPGDEAHWPQYPPLWMMLYALELHCIILSLPPCLKISRRWQNHLTFFRLHLQNCHYQTIPPHILLATGLIHPSVAWR

SEQ ID NO: 11830 - protein, 340 aa, Homo sapiens [sequence omitted]

SEQ ID NO: 11831 - protein, 297 aa, Homo sapiens
MDAEGLALLLPPVTLAALVDSWLREDCPGLNYAALVSGAGPSQAALWAKSPGVLAGQPFFDAIFTQLNCQVSWFLPEGSKLVPVARVAEVRGPAHCLLLGERVALNTLARCSGIASAAAAAVEAARGAGWTGHVAGTRKTTPGFRLVEKYGLLVGGAASHRYDLGGLVMVKDNHVVAAGGVEKAVRAARQAADFALKVEVECSSLQEAVQAAEAGADLVLLDNFKPEELHPTATVLKAQFPSVAVEASGGITLDNLPQFCGPHIDVISMGMLTQAAPALDFSLKLFAKEVAPVPKIH

SEQ ID NO: 11832 - protein, 249 aa, Homo sapiens [sequence omitted]

SEQ ID NO: 11833 - protein, 206 aa, Homo sapiens
MLTIFNEIDVSNIQKMRARHKEAFLKKHNLKLGFMSASVKASAFALQEQPVVNAVIDDITKEVVYRDYIDISVAVATPQGLVVPVIRNVEAMNYADIEQTITELGEKARKNEFAIEDMDGGTFTISNGGVFGSLFEHPLSTPLSAILGMHGIFDKPVAIGGKVEVQPMMYVALTYDHRLIDGREAVTFLRKIKAAVEDPRVLLFDL

SEQ ID NO: 11834 - protein, 329 aa, Homo sapiens
MATGQKLMRAVRVFEFGGPEVLKLRSDIAVPIPKDHQVLIKVHACGVNPVETYIRSGTYSRKPLLPYTPGSDVAGVIEAVGDNASAFKKGDRVFTSSTISGGYAEYALAADHTVYKLPEKLDFKQGAAIGIPYFTAYRALIHSACVKAGESVLVHGASGGVGLAACQIARAYGLKILGTAGTEEGQKIVLQNGAHEVFNHREVNYIDKIKKYVGEKGIDIIIEMLANVNLSKDLSLLSHGGRVIVVGSRGTIEINPRDTMAKESSIIGVTLFSSTKEEFQQYAAALQAGMEIGWLKPVIGSQYPLEKVAEAHENIIHGSGATGKMILLL

SEQ ID NO: 11835 - protein, 329 aa, Homo sapiens; identical to SEQ ID NO: 11834

SEQ ID NO: 11836 - protein, 329 aa, Homo sapiens; identical to SEQ ID NO: 11834

SEQ ID NO: 11837 - protein, 361 aa, Homo sapiens
MQEKDASSQGFLPHFQHFATQAIHVGQDPEQWTSRAVVPPISLSTTFKQGAPGQHSGFEYSRSGNPTRNCLEKAVAALDGAKYCLAFASGLAATVTITHLLKAGDQIICMDDVYGGTNRYFRQVASEFGLKISFVDCSKIKLLEAAITPETKRPLALGADISMYSATKYMNGHSDVVMGLVSVNCESLHNRLRFLQNSLGAVPSPIDCYLCNRGLKTLHVRMEKHFKNGMAVAQFLESNPWVEKVIYPGLPSHPQHELVKRQCTGCTGMVTFYIKGTLQHAEIFLKNLKLFTLAESLGGFESLAELPAIMTHASVLKNDRDVLGISDTLIRLSVGLEDEEDLLEDLDQALKAAHPPSGSHS

SEQ ID NO: 11838 - protein, 405 aa, Homo sapiens
MQEKDASSQGFLPHFQHFATQAIHVGQDPEQWTSRAVVPPISLSTTFKQGAPGQHSGFEYSRSGNPTRNCLEKAVAALDGAKYCLAFASGLAATVTITHLLKAGDQIICMDDVYGGTNRYFRQVASEFGLKISFVDCSKIKLLEAAITPETKLVWIETPTNPTQKVIDIEGCAHIVHKHGDIILVVDNTFMSPYFQRPLALGADISMYSATKYMNGHSDVVMGLVSVNCESLHNRLRFLQNSLGAVPSPIDCYLCNRGLKTLHVRMEKHFKNGMAVAQFLESNPWVEKVIYPGLPSHPQHELVKRQCTGCTGMVTFYIKGTLQHAEIFLKNLKLFTLAESLGGFESLAELPAIMTHASVLKNDRDVLGISDTLIRLSVGLEDEEDLLEDLDQALKAAHPPSGSHS

SEQ ID NO: 11839 - protein, 533 aa, Homo sapiens
MSIQVEHPAGGYKKLFETVEELSSPLTAHVTGRIPLWLTGSLLRCGPGLFEVGSEPFYHLFDGQALLHKFDFKEGHVTYHRRFIRTDAYVRAMTEKRIVITEFGTCAFPDPCKNIFSRFFSYFRGVEVTDNALVNVYPVGEDYYACTETNFITKINPETLETIKQVDLCNYVSVNGATAHPHIENDGTVYNIGNCFGKNFSIAYNIVKIPPLQADKEDPISKSEIVVQFPCSDRFKPSYVHSFGLTPNYIVFVETPVKINLFKFLSSWSLWGANYMDCFESNETMGVWLHIADKKRKKYLNNKYRTSPFNLFHHINTYEDNGFLIVDLCCWKGFEFVYNYLYLANLRENWEEVKKNARKAPQPEVRRYVLPLNIDKADTGKNLVTLPNTTATAILCSDETIWLEPEVLFSGPRQAFEFPQINYQKYCGKPYTYAYGLGLNHFVPDRLCKLNVKTKETWVWQEPDSYPSEPIFVSHPDALEEDDGVVLSVVVSPGAGQKPAYLLILNAKDLSEVARAEVEINIPVTFHGLFKKS

SEQ ID NO: 11840 - protein, 750 aa, Homo sapiens
MLRAKNQLFLLSPHYLRQVKESSGSRLIQQRLLHQQQPLHPEWAALAKKQLKGKNPEDLIWHTPEGISIKPLYSKRDTMDLPEELPGVKPFTRGPYPTMYTFRPWTIRQYAGFSTVEESNKFYKDNIKAGQQGLSVAFDLATHRGYDSDNPRVRGDVGMAGVAIDTVEDTKILFDGIPLEKMSVSMTMNGAVIPVLANFIVTGEEQGVPKEKLTGTIQNDILKEFMVRNTYIFPPEPSMKIIADIFEYTAKHMPKFNSISISGYHMQEAGADAILELAYTLADGLEYSRTGLQAGLTIDEFAPRLSFFWGIGMNFYMEIAKMRAGRRLWAHLIEKMFQPKNSKSLLLRAHCQTSGWSLTEQDPYNNIVRTAIEAMAAVFGGTQSLHTNSFDEALGLPTVKSARIARNTQIIIQEESGIPKVADPWGGSYMMECLTNDVYDAALKLINEIEEMGGMAKAVAEGIPKLRIEECAARRQARIDSGSEVIVGVNKYQLEKEDAVEVLAIDNTSVRNRQIEKLKKIKSSRDQALAERCLAALTECAASGDGNILALAVDASRARCTVGEITDALKKVFGEHKANDRMVSGAYRQEFGESKEITSAIKRVHKFMEREGRRPRLLVAKMGQDGHDRGAKVIATGFADLGFDVDIGPLFQTPREVAQQAVDADVHAVGISTLAAGHKTLVPELIKELNSLGRPDILVMCGGVIPPQDYEFLFEVGVSNVFGPGTRIPKAAVQVLDDIEKCLEKKQQSV

SEQ ID NO: 11841 - protein, 750 aa, Homo sapiens; identical to SEQ ID NO: 11840

SEQ ID NO: 11842 - protein, 407 aa, Homo sapiens
MATSWGTVFFMLVVSCVCSAVSHRNQQTWFEGIFLSSMCPINVSASTLYGIMFDAGSTGTRIHVYTFVQKMPGQLPILEGEVFDSVKPGLSAFVDQPKQGAETVQGLLEVAKDSIPRSHWKKTPVVLKATAGLRLLPEHKAKALLFEVKEIFRKSPFLVPKGSVSIMDGSDEGILAWVTVNFLTGQLHGHRQETVGTLDLGGASTQITFLPQFEKTLEQTPRGYLTSFEMFNSTYKLYTHSYLGFGLKAARLATLGALETEGTDGHTFRSACLPRWLEAEWIFGGVKYQYGGNQEGEVGFEPCYAEVLRVVRGKLHQPEEVQRGSFYAFSYYYDRAVDTDMIDYEKGGILKVEDFERKAREVCDNLENFTSGSPFLCMDLSYITALLKDGFGFADSTVLQHIISWVN

SEQ ID NO: 11843 - protein, 428 aa, Homo sapiens
MATSWGTVFFMLVVSCVCSAVSHRNQQTWFEGIFLSSMCPINVSASTLYGIMFDAGSTGTRIHVYTFVQKMPGQLPILEGEVFDSVKPGLSAFVDQPKQGAETVQGLLEVAKDSIPRSHWKKTPVVLKATAGLRLLPEHKAKALLFEVKEIFRKSPFLVPKGSVSIMDGSDEGILAWVTVNFLTGQLHGHRQETVGTLDLGGASTQITFLPQFEKTLEQTPRGYLTSFEMFNSTYKLYTHSYLGFGLKAARLATLGALETEGTDGHTFRSACLPRWLEAEWIFGGVKYQYGGNQEGEVGFEPCYAEVLRVVRGKLHQPEEVQRGSFYAFSYYYDRAVDTDMIDYEKGGILKVEDFERKAREVCDNLENFTSGSPFLCMDLSYITALLKDGFGFADSTVLQLTKKVNNIETGWALGATFHLLQSLGISH

SEQ ID NO: 11844 - protein, 405 aa, Homo sapiens
MATSWGTVFFMLVVSCVCSAVSHRNQQTWFEGIFLSSMCPINVSASTLYGIMFDAGSTGTRIHVYTFVQKMPGQLPILEGEVFDSVKPGLSAFVDQPKQGAETVQGLLEVAKDSIPRSHWKKTPVVLKATAGLRLLPEHKAKALLFEVKEIFRKSPFLVPKGSVSIMDGSDEGILAWVTVNFLTGQLHGHRQETVGTLDLGGASTQITFLPQFEKTLEQTPRGYLTSFEMFNSTYKLYTHSYLGFGLKAARLATLGALETEGTDGHTFRSACLPRWLEAEWIFGGVKYQYGGNQEGEVGFEPCYAEVLRVVRGKLHQPEEVQRGSFYAFSYYYDRAVDTDMIDYEKGGILKVEDFERKAREVCDNLENFTSGSPFLCMDLSYITALLKDGFGFADSTVLQAAVLR

SEQ ID NO: 11845 - protein, 428 aa, Homo sapiens; identical to SEQ ID NO: 11843

SEQ ID NO: 11846 - protein, 428 aa, Homo sapiens; identical to SEQ ID NO: 11843

SEQ ID NO: 11847 - protein, 236 aa, Homo sapiens
MATSWGTVFFMLVVSCVCSAVSHRNQQTWFEGIFLSSMCPINVSASTLYGIMFDAGSTGTRIHVYTFVQKMPGQLPILEGEVFDSVKPGLSAFVDQPKQGAETVQGLLEVAKDSIPRSHWKKTPVVLKATAGLRLLPEHKAKALLFEVKEIFRKSPFLVPKGSVSIMDGSDEGILAWVTVNFLTGQLHGHRQETVGTLDLGGASTQITFLPQFELPGIWIESCKTSNPGSPGDRRD

SEQ ID NO: 11848 - protein, 428 aa, Homo sapiens; identical to SEQ ID NO: 11843

SEQ ID NO: 11849 - protein, 468 aa, Homo sapiens
MAARLVSRCGAVRAAPHSGPLVSWRRWSGASTDTVYDVVVSGGGLVGAAMACALGYDIHFHDKKILLLEAGPKKVLEKLSETYSNRVSSISPGSATLLSSFGAWDHICNMRYRAFRRMQVWDACSEALIMFDKDNLDDMGYIVENDVIMHALTKQLEAVSDRVTVLYRSKAIRYTWPCPFPMADSSPWVHITLGDGSTFQTKLLIGADGHNSGVRQAVGIQNVSWNYDQSAVVATLHLSEATENNVAWQRFLPSGPIALLPLSDTLSSLVWSTSHEHAAELVSMDEEKFVDAVNSAFWSDADHTDFIDTAGAMLQYAVSLLKPTKVSARQLPPSVARVDAKSRVLFPLGLGHAAEYVRPRVALIGDAAHRVHPLAGQGVNMGFGDISSLAHHLSTAAFNGKDLGSVSHLTGYETERQRHNTALLAATDLLKRLYSTSASPLVLLRTWGLQATNAVSPLKEQIMAFASK

SEQ ID NO: 11850 - protein, 351 aa, Homo sapiens
MIVQRVVLNSRPGKNGNPVAENFRMEEVYLPDNINEGQVQVRTLYLSVDPYMRCRMNEDTGTDYITPWQLSQVVDGGGIGIIEESKHTNLTKGDFVTSFYWPWQTKVILDGNSLEKVDPQLVDGHLSYFLGAIGMPGLTSLIGIQEKGHITAGSNKTMVVSGAAGACGSVAGQIGHFLGCSRVVGICGTHEKCILLTSELGFDAAINYKKDNVAEQLRESCPAGVDVYFDNVGGNISDTVISQMNENSHIILCGQISQYNKDVPYPPPLSPAIEAIQKERNITRERFLVLNYKDKFEPGILQLSQWFKEGKLKIKETVINGLENMGAAFQSMMTGGNIGKQIVCISEEISL

SEQ ID NO: 11851 - protein, 367 aa, Homo sapiens [sequence omitted]

SEQ ID NO: 11852 - protein, 535 aa, Homo sapiens
MAALLAAAAVRARILQVSSKVKSSPTWYSASSFSSSVPTVKLFIGGKFVESKSDKWIDIHNPATNEVIGRVPQATKAEMDAAIASCKRAFPAWADTSVLSRQQVLLRYQQLIKENLKEIAKLITLEQGKTLADAEGDVFRGLQVVEHACSVTSLMMGETMPSITKDMDLYSYRLPLGVCAGIAPFNFPAMIPLWMFPMAMVCGNTFLMKPSERVPGATMLLAKLLQDSGAPDGTLNIIHGQHEAVNFICDHPDIKAISFVGSNKAGEYIFERGSRHGKRVQANMGAKNHGVVMPDANKENTLNQLVGAAFGAAGQRCMALSTAVLVGEAKKWLPELVEHAKNLRVNAGDQPGADLGPLITPQAKERVCNLIDSGTKEGASILLDGRKIKVKGYENGNFVGPTIISNVKPNMTCYKEEIFGPVLVVLETETLDEAIQIVNNNPYGNGTAIFTTNGATARKYAHLVDVGQVGVNVPIPVPLPMFSFTGSRSSFRGDTNFYGKQGIQFYTQLKTITSQWKEEDATLSSPAVVMPTMGR

SEQ ID NO: 11853 - protein, 457 aa, Homo sapiens
MDAAIASCKRAFPAWADTSVLSRQQVLLRYQQLIKENLKEIAKLITLEQGKTLADAEGDVFRGLQVVEHACSVTSLMMGETMPSITKDMDLYSYRLPLGVCAGIAPFNFPAMIPLWMFPMAMVCGNTFLMKPSERVPGATMLLAKLLQDSGAPDGTLNIIHGQHEAVNFICDHPDIKAISFVGSNKAGEYIFERGSRHGKRVQANMGAKNHGVVMPDANKENTLNQLVGAAFGAAGQRCMALSTAVLVGEAKKWLPELVEHAKNLRVNAGDQPGADLGPLITPQAKERVCNLIDSGTKEGASILLDGRKIKVKGYENGNFVGPTIISNVKPNMTCYKEEIFGPVLVVLETETLDEAIQIVNNNPYGNGTAIFTTNGATARKYAHLVDVGQVGVNVPIPVPLPMFSFTGSRSSFRGDTNFYGKQGIQFYTQLKTITSQWKEEDATLSSPAVVMPTMGR

SEQ ID NO: 11854 - protein, 535 aa, Homo sapiens; identical to SEQ ID NO: 11852

SEQ ID NO: 11855 - protein, 518 aa, Homo sapiens
MFLRAGLAALSPLLRSLRPSPVAAMSTGTFVVSQPLNYRGGARVEPADASGTEKAFEPATGRVIATFTCSGEKEVNLAVQNAKAAFKIWSQKSGMERCRILLEAARIIREREDEIATMECINNGKSIFEARLDIDISWQCLEYYAGLAASMAGEHIQLPGGSFGYTRREPLGVCVGIGAWNYPFQIASWKSAPALACGNAMVFKPSPFTPVSALLLAEIYSEAGVPPGLFNVVQGGAATGQFLCQHPDVAKVSFTGSVPTGMKIMEMSAKGIKPVTLELGGKSPLIIFSDCDMNNAVKGALMANFLTQGQVCCNGTRVFVQKEILDKFTEEVVKQTQRIKIGDPLLEDTRMGPLINRPHLERVLGFVKVAKEQGAKVLCGGDIYVPEDPKLKDGYYMRPCVLTNCRDDMTCVKEEIFGPVMSILSFDTEAEVLERANDTTFGLAAGVFTRDIQRAHRVVAELQAGTCFINNYNVSPVELPFGGYKKSGFGRENGRVTIEYYSQLKTVCVEMGDVESAF

SEQ ID NO: 11856 - protein, 158 aa, Homo sapiens
MAVANSSPVNPVVFFDVSIGGQEVGRMKIELFADVVPKTAENFSLFLFGYRKDGVPIGYKGSTFHRVIKDFMIQGGDFVNGDGTGVASIYRGPFADENFKLRHSAPGLLSMANSGPSTNGCQFFITCSKCDWLDGKHVVFGPNNKPKLPVVISQCGEM

SEQ ID NO: 11857 - protein, 134 aa, Homo sapiens
MIAGDSDRRKDGVPIGYKGSTFHRVIKDFMIQGGDFVNGDGTGVASIYRGPFADENFKLRHSAPGLLSMANSGPSTNGCQFFITCSKCDWLDGKHVVFGKIIDGLLVMRKIENVPTGPNNKPKLPVVISQCGEM

SEQ ID NO: 11858 - protein, 151 aa, Homo sapiens
MKIELFADVVPKTAENFRQFCTGEFRKDGVPIGYKGSTFHRVIKDFMIQGGDFVNGDGTGVASIYRGPFADENFKLRHSAPGLLSMANSGPSTNGCQFFITCSKCDWLDGKHVVFGKIIDGLLVMRKIENVPTGPNNKPKLPVVISQCGEM

SEQ ID NO: 11859 - protein, 177 aa, Homo sapiens
MAVANSSPVNPVVFFDVSIGGQEVGRMKIELFADVVPKTAENFRQFCTGEFRKDGVPIGYKGSTFHRVIKDFMIQGGDFVNGDGTGVASIYRGPFADENFKLRHSAPGLLSMANSGPSTNGCQFFITCSKCDWLDGKHVVFGKIIDGLLVMRKIENVPTGPNNKPKLPVVISQCGEM

SEQ ID NO: 11860 - protein, 177 aa, Homo sapiens; identical to SEQ ID NO: 11859

SEQ ID NO: 11861 - protein, 177 aa, Homo sapiens; identical to SEQ ID NO: 11859

SEQ ID NO: 11862 - protein, 159 aa, Homo sapiens
MAVANSSPVNPVVFFDVSIGGQEVGRMKIELFADVVPKTAENFRQFCTGEFRKDGVPIGYKGSTFHRVIKDFMIQGGDFVNGDGTGVASIYRGPFADENFKLRHSAPGLLSMANSGPSTNGCQFFITCSKCDWLDGKHVVFGPNNKPKLPVVISQCGEM

SEQ ID NO: 11863 - protein, 634 aa, Homo sapiens
MPRWTPGSQEKDPNPTRADIREAPRSASSPPLSAASGSSSAFRLSFWEEGLTGASPSSELKRRLKAEKKVAEKEAKQKELSEKQLSQATAAATNHTTDNGVGPEEESVDPNQYYKIRSQAIHQLKVNGEDPYPHKFHVDISLTDFIQKYSHLQPGDHLTDITLKVAGRIHAKRASGGKLIFYDLRGEGVKLQVMANSRNYKSEEEFIHINNKLRRGDIIGVQGNPGKTKKGELSIIPYEITLLSPCLHMLPHLHFGLKDKETRYRQRYLDLILNDFVRQKFIIRSKIITYIRSFLDELGFLEIETPMMNIIPGGAVAKPFITYHNELDMNLYMRIAPELYHKMLVVGGIDRVYEIGRQFRNEGIDLTHNPEFTTCEFYMAYADYHDLMEITEKMVSGMVKHITGSYKVTYHPDGPEGQAYDVDFTPPFRRINMVEELEKALGMKLPETNLFETEETRKILDDICVAKAVECPPPRTTARLLDKLVGEFLEVTCINPTFICDHPQIMSPLAKWHRSKEGLTERFELFVMKKEICNAYTELNDPMRQRQLFEEQAKAKAAGDDEAMFIDENFCTALEYGLPPTAGWGMGIDRVAMFLTDSNNIKEVLLFPAMKPEDKKENVATTDTLESTTVGTSV

SEQ ID NO: 11864 - protein, 597 aa, Homo sapiens
MAAVQAAEVKVDGSEPKLSKNELKRRLKAEKKVAEKEAKQKELSEKQLSQATAAATNHTTDNGVGPEEESVDPNQYYKIRSQAIHQLKVNGEDPYPHKFHVDISLTDFIQKYSHLQPGDHLTDITLKVAGRIHAKRASGGKLIFYDLRGEGVKLQVMANSRNYKSEEEFIHINNKLRRGDIIGVQGNPGKTKKGELSIIPYEITLLSPCLHMLPHLHFGLKDKETRYRQRYLDLILNDFVRQKFIIRSKIITYIRSFLDELGFLEIETPMMNIIPGGAVAKPFITYHNELDMNLYMRIAPELYHKMLVVGGIDRVYEIGRQFRNEGIDLTHNPEFTTCEFYMAYADYHDLMEITEKMVSGMVKHITGSYKVTYHPDGPEGQAYDVDFTPPFRRINMVEELEKALGMKLPETNLFETEETRKILDDICVAKAVECPPPRTTARLLDKLVGEFLEVTCINPTFICDHPQIMSPLAKWHRSKEGLTERFELFVMKKEICNAYTELNDPMRQRQLFEEQAKAKAAGDDEAMFIDENFCTALEYGLPPTAGWGMGIDRVAMFLTDSNNIKEVLLFPAMKPEDKKENVATTDTLESTTVGTSV

SEQ ID NO: 11865 - protein, 625 aa, Homo sapiens
MLTQAAVRLVRGSLRKTSWAEWGHRELRLGQLAPFTAPHKDKSFSDQRSELKRRLKAEKKVAEKEAKQKELSEKQLSQATAAATNHTTDNGVGPEEESVDPNQYYKIRSQAIHQLKVNGEDPYPHKFHVDISLTDFIQKYSHLQPGDHLTDITLKVAGRIHAKRASGGKLIFYDLRGEGVKLQVMANSRNYKSEEEFIHINNKLRRGDIIGVQGNPGKTKKGELSIIPYEITLLSPCLHMLPHLHFGLKDKETRYRQRYLDLILNDFVRQKFIIRSKIITYIRSFLDELGFLEIETPMMNIIPGGAVAKPFITYHNELDMNLYMRIAPELYHKMLVVGGIDRVYEIGRQFRNEGIDLTHNPEFTTCEFYMAYADYHDLMEITEKMVSGMVKHITGSYKVTYHPDGPEGQAYDVDFTPPFRRINMVEELEKALGMKLPETNLFETEETRKILDDICVAKAVECPPPRTTARLLDKLVGEFLEVTCINPTFICDHPQIMSPLAKWHRSKEGLTERFELFVMKKEICNAYTELNDPMRQRQLFEEQAKAKAAGDDEAMFIDENFCTALEYGLPPTAGWGMGIDRVAMFLTDSNNIKEVLLFPAMKPEDKKENVATTDTLESTTVGTSV

SEQ ID NO: 11866 - protein, 441 aa, Homo sapiens
MANSRNYKSEEEFIHINNKLRRGDIIGVQGNPGKTKKGELSIIPYEITLLSPCLHMLPHLHFGLKDKETRYRQRYLDLILNDFVRQKFIIRSKIITYIRSFLDELGFLEIETPMMNIIPGGAVAKPFITYHNELDMNLYMRIAPELYHKMLVVGGIDRVYEIGRQFRNEGIDLTHNPEFTTCEFYMAYADYHDLMEITEKMVSGMVKHITGSYKVTYHPDGPEGQAYDVDFTPPFRRINMVEELEKALGMKLPETNLFETEETRKILDDICVAKAVECPPPRTTARLLDKLVGEFLEVTCINPTFICDHPQIMSPLAKWHRSKEGLTERFELFVMKKEICNAYTELNDPMRQRQLFEEQAKAKAAGDDEAMFIDENFCTALEYGLPPTAGWGMGIDRVAMFLTDSNNIKEVLLFPAMKPEDKKENVATTDTLESTTVGTSV

SEQ ID NO: 11867 - protein, 583 aa, Homo sapiens
MLTQAAVRLVRGSLRKTSWAEWGHRELRLGQLAPFTAPHKDKSFSDQRSELKRRLKAEKKVAEKEAKQKELSEKQLSQATAAATNHTTDNGVGPEEESVDPNQYYKIRSQAIHQLKVNGEDPYPHKFHVDISLTDFIQKYSHLQPGDHLTDITLKVAGRIHAKRASGGKLIFYDLRGEGVKLQVMANSRNYKSEEEFIHINNKLRRGDIIGVQGNPGKTKKGELSIIPYEITLLSPCLHMLPHLHFGLKDKIETPMMNIIPGGAVAKPFITYHNELDMNLYMRIAPELYHKMLVVGGIDRVYEIGRQFRNEGIDLTHNPEFTTCEFYMAYADYHDLMEITEKMVSGMVKHITGSYKVTYHPDGPEGQAYDVDFTPPFRRINMVEELEKALGMKLPETNLFETEETRKILDDICVAKAVECPPPRTTARLLDKLVGEFLEVTCINPTFICDHPQIMSPLAKWHRSKEGLTERFELFVMKKEICNAYTELNDPMRQRQLFEEQAKAKAAGDDEAMFIDENFCTALEYGLPPTAGWGMGIDRVAMFLTDSNNIKEVLLFPAMKPEDKKENVATTDTLESTTVGTSV

SEQ ID NO: 11868 - protein, 445 aa, Homo sapiens
MAELKYISGFGNECSSEDPRCPGSLPEGQNNPQVCPYNLYAEQLSGSAFTCPRSTNKRSWLYRILPSVSHKPFESIDEGHVTHNWDEVDPDPNQLRWKPFEIPKASQKKVDFVSGLHTLCGAGDIKSNNGLAIHIFLCNTSMENRCFYNSDGDFLIVPQKGNLLIYTEFGKMLVQPNEICVIQRGMRFSIDVFEETRGYILEVYGVHFELPDLGPIGANGLANPRDFLIPIAWYEDRQVPGGYTVINKYQGKLFAAKQDVSPFNVVAWHGNYTPYKYNLKNFMVINSVAFDHADPSIFTVLTAKSVRPGVAIADFVIFPPRWGVADKTFRPPYYHRNCMSEFMGLIRGHYEAKQGGFLPGGGSLHSTMTPHGPDADCFEKASKVKLAPERIADGTMAFMFESSLSLAVTKWGLKASRCLDENYHKCWEPLKSHFTPNSRNPAEPN

SEQ ID NO: 11869 - protein, 260 aa, Homo sapiens
  VARIANT (1)...(260): Xaa = Any Amino Acid
MENRCFYNSDGDFLIVPQKGNLLIYTEFGKMLVQPNEICVIQRGMRFSIDVFEETRGYILEVYGVHFELPDLGPIGANGLANPRDFLIPIAWYEDRQVPGGYTVINKYQGKLFAAKQDVSPFNVVAWHGNYTPYKYNLKNFMVINSVAFDHADPSIFTVLTAKSVRPGVAIADFVIFPPRWGVADKTFRPPYYHRNCMSEFMGLIRGHYEAKQGGFLPGGGSLHSTMTPHGPDADCFEKASKVKLAPERIADGTMVSMLX

SEQ ID NO: 11870 - protein, 180 aa, Homo sapiens
MENRCFYNSDGDFLIVPQKGNLLIYTEFGKMLVQPNEICVIQRGMRFSIDVFEETRGYILEVYGVHFELPDLGPIGANGLANPRDFLIPIAWYEDRQVPGGYTVINKYQGKLFAAKQDVSPFNVVAWHGNYTPYKYNLKNFMVINSVAFDHADPSIFTVLTAKRPARSSWHLRGLPMAPW

SEQ ID NO: 11871 - protein, 129 aa, Homo sapiens
MSFPKYKPSSLRTLPETLDPAEYNISPETRRAQAERLAIRAQLKREYLLQYNDPNRRGLIENPALLRWAYARTINVYPNFRPTPKNSLMGALCGFGPLIFIYYIIKTERDRKEKLIQEGKLDRTFHLSY

SEQ ID NO: 11872 - protein, 1323 aa, Homo sapiens [sequence omitted]

SEQ ID NO: 11873 - protein, 1327 aa, Homo sapiens
MEAPLQTGMVLGVMIGAGVAVVVTAVLILLVVRRLRVPKTPAPDGPRYRFRKRDKVLFYGRKIMRKVSQSTSSLVDTSVSATSRPRMRKKLKMLNIAKKILRIQKETPTLQRKEPPPAVLEADLTEGDLANSHLPSEVLYMLKNVRVLGHFEKPLFLELCRHMVFQRLGQGDYVFRPGQPDASIYVVQDGLLELCLPGPDGKECVVKEVVPGDSVNSLLSILDVITGHQHPQRTVSARAARDSTVLRLPVEAFSAVFTKYPESLVRVVQIIMVRLQRVTFLALHNYLGLTNELFSHEIQPLRLFPSPGLPTRTSPVRGSKRMVSTSATDEPRETPGRPPDPTGAPLPGPTGDPVKPTSLETPSAPLLSRCVSMPGDISGLQGGPRSDFDMAYERGRISVSLQEEASGGSLAAPARTPTQEPREQPAGACEYSYCEDESATGGCPFGPYQGRQTSSIFEAAKQELAKLMRIEDPSLLNSRVLLHHAKAGTIIARQGDQDVSLHFVLWGCLHVYQRMIDKAEDVCLFVAQPGELVGQLAVLTGEPLIFTLRAQRDCTFLRISKSDFYEIMRAQPSVVLSAAHTVAARMSPFVRQMDFAIDWTAVEAGRALYRQGDRSDCTYIVLNGRLRSVIQRGSGKKELVGEYGRGDLIGVVEALTRQPRATTVHAVRDTELAKLPEGTLGHIKRRYPQVVTRLIHLLSQKILGNLQQLQGPFPAGSGLGVPPHSELTNPASNLATVAILPVCAEVPMVAFTLELQHALQAIGPTLLLNSDIIRARLGASALDSIQEFRLSGWLAQQEDAHRIVLYQTDASLTPWTVRCLRQADCILIVGLGDQEPTLGQLEQMLENTAVRALKQLVLLHREEGAGPTRTVEWLNMRSWCSGHLHLRCPRRLFSRRSPAKLHELYEKVFSRRADRHSDFSRLARVLTGNTIALVLGGGGARGCSHIGVLKALEEAGVPVDLVGGTSIGSFIGALYAEERSASRTKQRAREWAKSMTSVLEPVLDLTYPVTSMFTGSAFNRSIHRVFQDKQIEDLWLPYFNVTTDITASAMRVHKDGSLWRYVRASMTLSGYLPPLCDPKDGHLLMDGGYINNLPADIARSMGAKTVIAIDVGSQDETDLSTYGDSLSGWWLLWKRLNPWADKVKVPDMAEIQSRLAYVSCVRQLEVVKSSSYCEYLRPPIDCFKTMDFGKFDQIYDVGYQYGKAVFGGWSRGNVIEKMLTDRRSTDLNESRRADVLAFPSSGFTDLAEIVSRIEPPTSYVSDGCADGEESDCLTEYEEDAGPDCSRDEGGSPEGASPSTASEMEEEKSILRQRRCLPQEPPGSATDA

SEQ ID NO: 11874 - protein, 1327 aa, Homo sapiens; identical to SEQ ID NO: 11873

SEQ ID NO: 11875 - protein, 406 aa, Homo sapiens
MAAGAGAGSAPRWLRALSEPLSAAQLRRLEEHRYSAAGVSLLEPPLQLYWTWLLQWIPLWMAPNSITLLGLAVNVVTTLVLISYCPTATEEAPYWTYLLCALGLFIYQSLDAIDGKQARRTNSCSPLGELFDHGCDSLSTVFMAVGASIAARLGTYPDWFFFCSFIGMFVFYCAHWQTYVSGMLRFGKVDVTEIQIALVIVFVLSAFGGATMWDYTIPILEIKLKILPVLGFLGGVIFSCSNYFHVILHGGVGKNGSTIAGTSVLSPGLHIGLIIILAIMIYKKSATDVFEKHPCLYILMFGCVFAKVSQKLVVAHMTKSELYLQDTVFLGPGLLFLDQYFNNFIDEYVVLWMAMVISSFDMVIYFSALCLQISRHLHLNIFKTACHQAPEQVQVLSSKSHQNNMD

SEQ ID NO: 11876 - protein, 401 aa, Homo sapiens [sequence omitted]

SEQ ID NO: 11877 - protein, 170 aa, Homo sapiens [sequence omitted]

SEQ ID NO: 11878 - protein, 213 aa, Homo sapiens
MRFCPFAERTRLVLKAKGIRHEVININLKNKPEWFFKKNPFGLVPVLENSQGQLIYESAITCEYLDEAYPGKKLLPDDPYEKACQKMILELFSKVPSLVGSFIRSQNKEDYAGLKEEFRKEFTKLEEVLTNKKTTFFGGNSISMIDYLIWPWFERLEAMKLNECVDHTPKLKLWMAAMKEDPTVSALLTSEKDWQGFLELYLQNSPEACDYGL

SEQ ID NO: 11879 - protein, 213 aa, Homo sapiens; identical to SEQ ID NO: 11878

SEQ ID NO: 11880 - protein, 241 aa, Homo sapiens
MSGESARSLGKGSAPPGPVPEGSIRIYSMRFCPFAERTRLVLKAKGIRHEVININLKNKPEWFFKKNPFGLVPVLENSQGQLIYESAITCEYLDEAYPGKKLLPDDPYEKACQKMILELFSKVPSLVGSFIRSQNKEDYAGLKEEFRKEFTKLEEVLTNKKTTFFGGNSISMIDYLIWPWFERLEAMKLNECVDHTPKLKLWMAAMKEDPTVSALLTSEKDWQGFLELYLQNSPEACDYGL

SEQ ID NO: 11881 - protein, 213 aa, Homo sapiens; identical to SEQ ID NO: 11878

SEQ ID NO: 11882 - protein, 561 aa, Homo sapiens [sequence omitted]

SEQ ID NO: 11883 - protein, 561 aa, Homo sapiens [sequence omitted]

SEQ ID NO: 11884 - protein, 561 aa, Homo sapiens [sequence omitted]

SEQ ID NO: 11885 - protein, 349 aa, Homo sapiens
MALLRKINQVLLFLLIVTLCVILYKKVHKGTVPKNDADDESETPEELEEEIPVVICAAAGRMGATMAAINSIYSNTDANILFYVVGLRNTLTRIRKWIEHSKLREINFKIVEFNPMVLKGKIRPDSSRPELLQPLNFVRFYLPLLIHQHEKVIYLDDDVIVQGDIQELYDTTLALGHAAAFSDDCDLPSAQDINRLVGLQNTYMGYLDYRKKAIKDLGISPSTCSFNPGVIVANMTEWKHQRITKQLEKWMQKNVEENLYSSSLGGGVATSPMLIVFHGKYSTINPLWHIRHLGWNPDARYSEHFLQEAKLLHWNGRHKPWDFPSVHNDLWESWFVPDPAGIFKLNHHS

SEQ ID NO: 11886 - protein, 288 aa, Homo sapiens
MGATMAAINSIYSNTDANILFYVVGLRNTLTRIRKWIEHSKLREINFKIVEFNPMVLKGKIRPDSSRPELLQPLNFVRFYLPLLIHQHEKVIYLDDDVIVQGDIQELYDTTLALGHAAAFSDDCDLPSAQDINRLVGLQNTYMGYLDYRKKAIKDLGISPSTCSFNPGVIVANMTEWKHQRITKQLEKWMQKNVEENLYSSSLGGGVATSPMLIVFHGKYSTINPLWHIRHLGWNPDARYSEHFLQEAKLLHWNGRHKPWDFPSVHNDLWESWFVPDPAGIFKLNHHS

SEQ ID NO: 11887 - protein, 349 aa, Homo sapiens; identical to SEQ ID NO: 11885

SEQ ID NO: 11888 - protein, 452 aa, Homo sapiens
MSTAVLENPGLGRKLSDFGQETSYIEDNCNQNGAISLIFSLKEEVGALAKVLRLFEENDVNLTHIESRPSRLKKDEYEFFTHLDKRSLPALTNIIKILRHDIGATVHELSRDKKKDTVPWFPRTIQELDRFANQILSYGAELDADHPGFKDPVYRARRKQFADIAYNYRHGQPIPRVEYMEEEKKTWGTVFKTLKSLYKTHACYEYNHIFPLLEKYCGFHEDNIPQLEDVSQFLQTCTGFRLRPVAGLLSSRDFLGGLAFRVFHCTQYIRHGSKPMYTPEPDICHELLGHVPLFSDRSFAQFSQEIGLASLGAPDEYIEKLATIYWFTVEFGLCKQGDSIKAYGAGLLSSFGELQYCLSEKPKLLPLELEKTAIQNYTVTEFQPLYYVAESFNDAKEKVRNFAATIPRPFSVRYDPYTQRIEVLDNTQQLKILADSINSEIGILCSALQKIK

SEQ ID NO: 11889 - protein, 452 aa, Homo sapiens; identical to SEQ ID NO: 11888

SEQ ID NO: 11890 - protein, 452 aa, Homo sapiens; identical to SEQ ID NO: 11888

SEQ ID NO: 11891 - protein, 1076 aa, Homo sapiens [sequence omitted]

SEQ ID NO: 11892 - protein, 1013 aa, Homo sapiens
MGDKKDDKDSPKKNKGKERRDLDDLKKEVAMTEHKMSVEEVCRKYNTDCVQGLTHSKAQEILARDGPNALTPPPTTPEWVKFCRQLFGGFSILLWIGAILCFLAYGIQAGTEDDPSGDNLYLGIVLAAVVIITGCFSYYQEAKSSKIMESFKNMVPQQALVIREGEKMQVNAEEVVVGDLVEIKGGDRVPADLRIISAHGCKVDNSSLTGESEPQTRSPDCTHDNPLETRNITFFSTNCVEGTARGVVVATGDRTVMGRIATLASGLEVGKTPIAIEIEHFIQLITGVAVFLGVSFFILSLILGYTWLEAVIFLIGIIVANVPEGLLATVTVCLTLTAKRMARKNCLVKNLEAVETLGSTSTICSDKTGTLTQNRMTVAHMWFDNQIHEADTTEDQSGTSFDKSSHTWVALSHIAGLCNRAVFKGGQDNIPVLKRDVAGDASESALLKCIELSSGSVKLMRERNKKVAEIPFNSTNKYQLSIHETEDPNDNRYLLVMKGAPERILDRCSTILLQGKEQPLDEEMKEAFQNAYLELGGLGERVLGFCHYYLPEEQFPKGFAFDCDDVNFTTDNLCFVGLMSMIDPPRAAVPDAVGKCRSAGIKVIMVTGDHPITAKAIAKGVGIISEGNETVEDIAARLNIPVSQVNPRDAKACVIHGTDLKDFTSEQIDEILQNHTEIVFARTSPQQKLIIVEGCQRQGAIVAVTGDGVNDSPALKKADIGVAMGIAGSDVSKQAADMILLDDNFASIVTGVEEGRLIFDNLKKSIAYTLTSNIPEITPFLLFIMANIPLPLGTITILCIDLGTDMVPAISLAYEAAESDIMKRQPRNPRTDKLVNERLISMAYGQIGMIQALGGFFSYFVILAENGFLPGNLVGIRLNWDDRTVNDLEDSYGQQWTYEQRKVVEFTCHTAFFVSIVVVQWADLIICKTRRNSVFQQGMKNKILIFGLFEETALAAFLSYCPGMDVALRMYPLKPSWWFCAFPYSFLIFVYDEIRKLILRRNPGGWVEKETYY

SEQ ID NO: 11893 - protein, 983 aa, Homo sapiens
MTEHKMSVEEVCRKYNTDCVQGLTHSKAQEILARDGPNALTPPPTTPEWVKFCRQLFGGFSILLWIGAILCFLAYGIQAGTEDDPSGDNLYLGIVLAAVVIITGCFSYYQEAKSSKIMESFKNMVPQQALVIREGEKMQVNAEEVVVGDLVEIKGGDRVPADLRIISAHGCKVDNSSLTGESEPQTRSPDCTHDNPLETRNITFFSTNCVEGTARGVVVATGDRTVMGRIATLASGLEVGKTPIAIEIEHFIQLITGVAVFLGVSFFILSLILGYTWLEAVIFLIGIIVANVPEGLLATVTVCLTLTAKRMARKNCLVKNLEAVETLGSTSTICSDKTGTLTQNRMTVAHMWFDNQIHEADTTEDQSGTSFDKSSHTWVALSHIAGLCNRAVFKGGQDNIPVLKRDVAGDASESALLKCIELSSGSVKLMRERNKKVAEIPFNSTNKYQLSIHETEDPNDNRYLLVMKGAPERILDRCSTILLQGKEQPLDEEMKEAFQNAYLELGGLGERVLGFCHYYLPEEQFPKGFAFDCDDVNFTTDNLCFVGLMSMIDPPRAAVPDAVGKCRSAGIKVIMVTGDHPITAKAIAKGVGIISEGNETVEDIAARLNIPVSQVNPRDAKACVIHGTDLKDFTSEQIDEILQNHTEIVFARTSPQQKLIIVEGCQRQGAIVAVTGDGVNDSPALKKADIGVAMGIAGSDVSKQAADMILLDDNFASIVTGVEEGRLIFDNLKKSIAYTLTSNIPEITPFLLFIMANIPLPLGTITILCIDLGTDMVPAISLAYEAAESDIMKRQPRNPRTDKLVNERLISMAYGQIGMIQALGGFFSYFVILAENGFLPGNLVGIRLNWDDRTVNDLEDSYGQQWTYEQRKVVEFTCHTAFFVSIVVVQWADLIICKTRRNSVFQQGMKNKILIFGLFEETALAAFLSYCPGMDVALRMYPLKPSWWFCAFPYSFLIFVYDEIRKLILRRNPGGWVEKETYY

SEQ ID NO: 11894 - protein, 983 aa, Homo sapiens; identical to SEQ ID NO: 11893

SEQ ID NO: 11895 - protein, 231 aa, Homo sapiens
MSGEENPASKPTPVQDVQGDGRWMSLHHRFVADSKDKEPEVVFIGDSLVQLMHQCEIWRELFSPLHALNFGIGGDGTQHVLWRLENGELEHIRPKIVVVWVGTNNHGHTAEQVTGGIKAIVQLVNERQPQARVVVLGLLPRGQHPNPLREKNRQVNELVRAALAGHPRAHFLDADPGFVHSDGTISHHDMYDYLHLSRLGYTPVCRALHSLLLRLLAQDQGQGAPLLEPAP

SEQ ID NO: 11896 - protein, 231 aa, Homo sapiens; identical to SEQ ID NO: 11895

SEQ ID NO: 11897 - protein, 231 aa, Homo sapiens; identical to SEQ ID NO: 11895

SEQ ID NO: 11898 - protein, 231 aa, Homo sapiens; identical to SEQ ID NO: 11895

SEQ ID NO: 11899 - protein, 188 aa, Homo sapiens
MEDERSFSDICGGRLALQRRYYSPSCREFCLSCPRLSLRSLTAVTCTVWLAAYGLFTLCENSMILSAAIFITLLGLLGYLHFVKIDQETLLIIDSLGIQMTSSYASGKESTTFIEMGKVKDIVINEAIYMQKVIYYLCILLKDPVEPHGISQVVPVFQSAKPRLDCLIEVYRSCQEILAHQKATSTSP

SEQ ID NO: 11900 - protein, 188 aa, Homo sapiens; identical to SEQ ID NO: 11899

SEQ ID NO: 11901 - protein, 188 aa, Homo sapiens
MMCPYSKTADGFEMHIGVNHLGHFLLTHLLLEKLKESAPSRIVNVSSLAHHLGRIHFHNLQGEKFYNAGLAYCHSKLANILFTQELARRLKGSGVTTYSVHPGTVQSELVRHSSFMRWMWWLFSFFIKTPQQGAQTSLHCALTEGLEILSGNHFSDCHVAWVSAQARNETIARRLWDVSCDLLGLPID

SEQ ID NO: 11902 - protein, 317 aa, Homo sapiens
MVELMFPLLLLLLPFLLYMAAPQIRKMLSSGVCTSTVQLPGKVVVVTGANTGIGKETAKELAQRARVYLACRDVEKGELVAKEIQTTTGNQQVLVRKLDLSDTKSIRAFAKGFLAEEKHLHVLINNAGVMMCPYSKTADGFEMHIGVNHLGHFLLTHLLLEKLKESAPSRIVNVSSLAHHLGRIHFHNLQGEKFYNAGLAYCHSKLANILFTQELARRLKGSGVTTYSVHPGTVQSELVRHSSFMRWMWWLFSFFIKTPQQGAQTSLHCALTEGLEILSGNHFSDCHVAWVSAQARNETIARRLWDVSCDLLGLPID

SEQ ID NO: 11903 - protein, 247 aa, Homo sapiens
MSGKDRIEIFPSRMAQTIMKARLKGAQTGRNLLKKKSDALTLRFRQILKKIIETKMLMGEVMREAAFSLAEAKFTAGDFSTTVIQNVNKAQVKIRAKKDNVAGVTLPVFEHYHEGTDSYELTGLARGGEQLAKLKRNYAKAVELLVELASLQTSFVTLDEAIKITNRRVNAIEHVIIPRIERTLAYIITELDEREREEFYRLKKIQEKKKILKEKSEKDLEQRRAAGEVLEPANLLAEEKDEDLLFE

SEQ ID NO: 11904 - protein, 247 aa, Homo sapiens; identical to SEQ ID NO: 11903

SEQ ID NO: 11905 - protein, 675 aa, Homo sapiens
MTTSHMNGHVTEESDSEVKNVDLASPEEHQKHREMAVDCPGDLGTRMMPIRRSAQLERIRQQQEDMRRRREEEGKKQELDLNSSMRLKKLAQIPPKTGIDNPMFDTEEGIVLESPHYAVKILEIEDLFSSLKHIQHTLVDSQSQEDISLLLQLVQNKDFQNAFKIHNAITVHMNKASPPFPLISNAQDLAQEVQTVLKPVHHKEGQELTALLNTPHIQALLLAHDKVAEQEMQLEPITDERVYESIGQYGGETVKIVRIEKARDIPLGATVRNEMDSVIISRIVKGGAAEKSGLLHEGDEVLEINGIEIRGKDVNEVFDLLSDMHGTLTFVLIPSQQIKPPPAKETVIHVKAHFDYDPSDDPYVPCRELGLSFQKGDILHVISQEDPNWWQAYREGDEDNQPLAGLVPGKSFQQQREAMKQTIEEDKEPEKSGKLWCAKKNKKKRKKVLYNANKNDDYDNEEILTYEEMSLYHQPANRKRPIILIGPQNCGQNELRQRLMNKEKDRFASAVPHTTRSRRDQEVAGRDYHFVSRQAFEADIAAGKFIEHGEFEKNLYGTSIDSVRQVINSGKICLLSLRTQSLKTLRNSDLKPYIIFIAPPSQERLRALLAKEGKNPKPEELREIIEKTREMEQNNGHYFDTAIVNSDLDKAYQELLRLINKLDTEPQWVPSTWLR

SEQ ID NO: 11906 - protein, 503 aa, Homo sapiens
MNKASPPFPLISNAQDLAQEVQTVLKPVHHKEGQELTALLNTPHIQALLLAHDKVAEQEMQLEPITDERVYESIGQYGGETVKIVRIEKARDIPLGATVRNEMDSVIISRIVKGGAAEKSGLLHEGDEVLEINGIEIRGKDVNEVFDLLSDMHGTLTFVLIPSQQIKPPPAKETVIHVKAHFDYDPSDDPYVPCRELGLSFQKGDILHVISQEDPNWWQAYREGDEDNQPLAGLVPGKSFQQQREAMKQTIEEDKEPEKSGKLWCAKKNKKKRKKVLYNANKNDDYDNEEILTYEEMSLYHQPANRKRPIILIGPQNCGQNELRQRLMNKEKDRFASAVPHTTRSRRDQEVAGRDYHFVSRQAFEADIAAGKFIEHGEFEKNLYGTSIDSVRQVINSGKICLLSLRTQSLKTLRNSDLKPYIIFIAPPSQERLRALLAKEGKNPKPEELREIIEKTREMEQNNGHYFDTAIVNSDLDKAYQELLRLINKLDTEPQWVPSTWLR

SEQ ID NO: 11907 - protein, 1364 aa, Homo sapiens
MAELKVEAPASVDWQKRCLTLETQLFRFRLQASKIRELLADKMQELEQRLLEAEQRAENAETQVGVMEEKVKLSNLKNVDSEGSLHRKYQELLKAIKGKDELISQLEAQLEKLKQMRAEEAKTVQEKAAKIKEWVTLKLAKLEMENQHLKSHNQRLVEQVGSLQDALEAIQIAPSRKLLVPPYGAAEQDSVPSEPGIQPMGQDSGSQAQGLKAAVLAPSPGALQSKDSVSEAASPLEDSSSSTVHSGETVEAKPLQPHLGRESPPHQPCMKLLTFRCSSASWGEGLVTAQRGMLPGTKTSAREGGPGSSLTLPKVRAPGTPRDSIQLAKRHHSQPQVGHGHFGRVVNIETEAFSALHPSGLPELESRARSREEPEKMEMEEPPPAGKNEERESPKALGAELEEVELGNKPPTPPLHQFSSWESRIYAVATSGMRLSDMSPRSNTACCASSPPALVSPGSFSGLVYKNVTVPVYTALKGRATQISNMPFMDESSGSDDDCSSQASFRISVPSSESRKTSGLGSPRAIKRGVSMSSLSSEGDYAIPPDACSLDSDYSEPEHKLQRTSSYSTDGLGLGGESLEKSGYLLKMGSQVKTWKRRWFVLRQGQIMYYKSPSDVIRKPQGQVDLNSRCQIVRGEGSQTFQLISEKKTYYLTADSPSLLEEWIRVLQSLLKVQATGPPALLRGGTKPTVKGWLTKVKHGHSKVVWCALVGKIFYYYRSHEDKRPLGCLPVRDARIEEVDRSCDSDEDYEAGGTRRLLSSHCTLVIHPTEHSPTYLLIGTKHEKDTWLYHLTVAAGGSSAKVGTAYEQLIGKLMDGEGDPDSPLWRHPMLCYSKDGLYASLTTLPSEALQTEALKLFKSCQLFINVPVEAASVDYHVSLAQTALQVCLVHPELQSEIYCQLMKQTSCRPPQKYSLMQCWQLLALCAPLFLPQHHFLWYVKQQLQRHADPRSETGQYATYCQRAVERTLRTGEREARPSRMEVVSILLRNPFHHSLPFSIPVHFTNGTYHVVGFDGSSTVDEFLQRLNQEIGMRKPSHSGFALFTDDPSGRDLEHCLQGSVKICDAISKWEQAMKELHPGKSEGGTRVVKLMYKNRLYFRSQVKGETDRERLLLASQTSREIVAGRFPINKELALEMAALMAQVEYGDLEKPALPGPGGTSPAKAQHLLQQVLDRFHPRRYRHGAPAEQLRHLADMLTTKWATLQGCSPPECIRIYLTVARKWPFFGAKLFAAQPAQLSSKENALVWIAVNEDGVSILDHNTMQVHITYPYSSVTTFGGCRDDFMLVIRSIPDKSSGKSHIEKLIFRMAAPKIAEATFIMASYMNHCTTTVNPPTNPPGACQLWELDGRQFFSSVSCATKGPTLL

SEQ ID NO: 11908 - protein, 382 aa, Homo sapiens
MGAFLDKPKMEKHNAQGQGNGLRYGLSSMQGWRVEMEDAHTAVIGLPSGLESWSFFAVYDGHAGSQVAKYCCEHLLDHITNNQDFKGSAGAPSVENVKNGIRTGFLEIDEHMRVMSEKKHGADRSGSTAVGVLISPQHTYFINCGDSRGLLCRNRKVHFFTQDHKPSNPLEKERIQNAGGSVMIQRVNGSLAVSRALGDFDYKCVHGKGPTEQLVSPEPEVHDIERSEEDDQFIILACDGIWDVMGNEELCDFVRSRLEVTDDLEKVCNEVVDTCLYKGSRDNMSVILICFPNAPKVSPEAVKKEAELDKYLECRVEEIIKKQGEGVPDLVHVMRTLASENIPSLPPGGELASKRNVIEAVYNRLNPYKNDDTDSTSTDDMW

SEQ ID NO: 11909 - protein, 382 aa, Homo sapiens; identical to SEQ ID NO: 11908

SEQ ID NO: 11910 - protein, 323 aa, Homo sapiens
MGAFLDKPKMEKHNAQGQGNGLRYGLSSMQGWRVEMEDAHTAVIGLPSGLESWSFFAVYDGHAGSQVAKYCCEHLLDHITNNQDFKGSAGAPSVENVKNGIRTGFLEIDEHMRVMSEKKHGADRSGSTAVGVLISPQHTYFINCGDSRGLLCRNRKVHFFTQDHKPSNPLEKERIQNAGGSVMIQRVNGSLAVSRALGDFDYKCVHGKGPTEQLVSPEPEVHDIERSEEDDQFIILACDGIWDVMGNEELCDFVRSRLEVTDDLEKVCNEVVDTCLYKGSRDNMSVILICFPNAPKVSPEAVKKEAELDKYLECRVEGGSFNK

SEQ ID NO: 11911 - protein, 324 aa, Homo sapiens
MGAFLDKPKMEKHNAQGQGNGLRYGLSSMQGWRVEMEDAHTAVIGLPSGLESWSFFAVYDGHAGSQVAKYCCEHLLDHITNNQDFKGSAGAPSVENVKNGIRTGFLEIDEHMRVMSEKKHGADRSGSTAVGVLISPQHTYFINCGDSRGLLCRNRKVHFFTQDHKPSNPLEKERIQNAGGSVMIQRVNGSLAVSRALGDFDYKCVHGKGPTEQLVSPEPEVHDIERSEEDDQFIILACDGIWDVMGNEELCDFVRSRLEVTDDLEKVCNEVVDTCLYKGSRDNMSVILICFPNAPKVSPEAVKKEAELDKYLECRVEGGSFNKK

SEQ ID NO: 11912 - protein, 382 aa, Homo sapiens; identical to SEQ ID NO: 11908

SEQ ID NO: 11913 - protein, 516 aa, Homo sapiens
MANPVPVQRSHLQGPILRLRYMVKQLENGEINIEELKKNLEYTASLLEAVYIDETRQILDTEDELQELRSDAVPSEVRDWLASTFTQQARAKGRRAEEKPKFRSIVHAVQAGIFVERMFRRTYTSVGPTYSTAVLNCLKNLDLWCFDVFSLNQAADDHALRTIVFELLTRHNLISRFKIPTVFLMSFLDALETGYGKYKNPYHNQIHAADVTQTVHCFLLRTGMVHCLSEIELLAIIFAAAIHDYEHTGTTNSFHIQTKSECAIVYNDRSVLENHHISSVFRLMQDDEMNIFINLTKDEFVELRALVIEMVLATDMSCHFQQVKTMKTALQQLERIDKPKALSLLLHAADISHPTKQWLVHSRWTKALMEEFFRQGDKEAELGLPFSPLCDRTSTLVAQSQIGFIDFIVEPTFSVLTDVAEKSVQPLADEDSKSKNQPSFQWRQPSLDVEVGDPNPDVVSFRSTWVKRIQENKQKWKERAASGITNQMSIDELSPCEEEAPPSPAEDEHNQNGNLD

SEQ ID NO: 11914 - protein, 536 aa, Homo sapiens
MELSPRSPPEMLEESDCPSPLELKSAPSKKMWIKLRSLLRYMVKQLENGEINIEELKKNLEYTASLLEAVYIDETRQILDTEDELQELRSDAVPSEVRDWLASTFTQQARAKGRRAEEKPKFRSIVHAVQAGIFVERMFRRTYTSVGPTYSTAVLNCLKNLDLWCFDVFSLNQAADDHALRTIVFELLTRHNLISRFKIPTVFLMSFLDALETGYGKYKNPYHNQIHAADVTQTVHCFLLRTGMVHCLSEIELLAIIFAAAIHDYEHTGTTNSFHIQTKSECAIVYNDRSVLENHHISSVFRLMQDDEMNIFINLTKDEFVELRALVIEMVLATDMSCHFQQVKTMKTALQQLERIDKPKALSLLLHAADISHPTKQWLVHSRWTKALMEEFFRQGDKEAELGLPFSPLCDRTSTLVAQSQIGFIDFIVEPTFSVLTDVAEKSVQPLADEDSKSKNQPSFQWRQPSLDVEVGDPNPDVVSFRSTWVKRIQENKQKWKERAASGITNQMSIDELSPCEEEAPPSPAEDEHNQNGNLD

SEQ ID NO: 11915 - protein, 536 aa, Homo sapiens; identical to SEQ ID NO: 11914

SEQ ID NO: 11916 - protein, 536 aa, Homo sapiens; identical to SEQ ID NO: 11914

SEQ ID NO: 11917 - protein, 536 aa, Homo sapiens; identical to SEQ ID NO: 11914

SEQ ID NO: 11918 - protein, 222 aa, Homo sapiens
MAARPKLHYPNGRGRMESVRWVLAAAGVEFDEEFLETKEQLYKLQDGNHLLFQQVPMVEIDGMKLVQTRSILHYIADKHNLFGKNLKERTLIDMYVEGTLDLLELLIMHPFLKPDDQQKEVVNMAQKAIIRYFPVFEKILRGHGQSFLVGNQLSLADVILLQTILALEEKIPNILSAFPFLQEYTVKLSNIPTIKRFLEPGSKKKPPPDEIYVRTVYNIFRP

SEQ ID NO: 11919 - protein, 129 aa, Homo sapiens
MYVEGTLDLLELLIMHPFLKPDDQQKEVVNMAQKAIIRYFPVFEKILRGHGQSFLVGNQLSLADVILLQTILALEEKIPNILSAFPFLQEYTVKLSNIPTIKRFLEPGSKKKPPPDEIYVRTVYNIFRP

SEQ ID NO: 11920 - protein, 222 aa, Homo sapiens; identical to SEQ ID NO: 11918

SEQ ID NO: 11921 - protein, 129 aa, Homo sapiens; identical to SEQ ID NO: 11919

SEQ ID NO: 11922 - protein, 129 aa, Homo sapiens; identical to SEQ ID NO: 11919

SEQ ID NO: 11923 - protein, 637 aa, Homo sapiens
MGLLSQGSPLSWEETKRHADHVRRHGILQFLHIYHAVKDRHKDVLKWGDEVEYMLVSFDHENKKVRLVLSGEKVLETLQEKGERTNPNHPTLWRPEYGSYMIEGTPGQPYGGTMSEFNTVEANMRKRRKEATSILEENQALCTITSFPRLGCPGFTLPEVKPNPVEGGASKSLFFPDEAINKHPRFSTLTRNIRHRRGEKVVINVPIFKDKNTPSPFIETFTEDDEASRASKPDHIYMDAMGFGMGNCCLQVTFQACSISEARYLYDQLATICPIVMALSAASPFYRGYVSDIDCRWGVISASVDDRTREERGLEPLKNNNYRISKSRYDSIDSYLSKCGEKYNDIDLTIDKEIYEQLLQEGIDHLLAQHVAHLFIRDPLTLFEEKIHLDDANESDHFENIQSTNWQTMRFKPPPPNSDIGWRVEFRPMEVQLTDFENSAYVVFVVLLTRVILSYKLDFLIPLSKVDENMKVAQKRDAVLQGMFYFRKDICKGGNAVVDGCGKAQNSTELAAEEYTLMSIDTIINGKEGVFPGLIPILNSYLENMEVDVDTRCSILNYLKLIKKRASGELMTVARWMREFIANHPDYKQDSVITDEMNYSLILKCNQIANELCECPELLGSAFRKVKYSGSKTDSSN

SEQ ID NO: 11924 - protein, 637 aa, Homo sapiens; identical to SEQ ID NO: 11923

SEQ ID NO: 11925 - protein, 222 aa, Homo sapiens
MAGKPKLHYFNGRGRMEPIRWLLAAAGVEFEEKFIGSAEDLGKLRNDGSLMFQQVPMVEIDGMKLVQTRAILNYIASKYNLYGKDIKERALIDMYTEGMADLNEMILLLPLCRPEEKDAKIALIKEKTKSRYFPAFEKVLQSHGQDYLVGNKLSRADISLVELLYYVEELDSSLISNFPLLKALKTRISNLPTVKKFLQPGSPRKPPADAKALEEARKIFRF

SEQ ID NO: 11926 - protein, 172 aa, Homo sapiens
MFQQVPMVEIDGMKLVQTRAILNYIASKYNLYGKDIKERALIDMYTEGMADLNEMILLLPLCRPEEKDAKIALIKEKTKSRYFPAFEKVLQSHGQDYLVGNKLSRADISLVELLYYVEELDSSLISNFPLLKALKTRISNLPTVKKFLQPGSPRKPPADAKALEEARKIFRF

SEQ ID NO: 11927 - protein, 461 aa, Homo sapiens
MNNFGNEEFDCHFLDEGFTAKDILDQKINEVSSSDDKDAFYVADLGDILKKHLRWLKALPRVTPFYAVKCNDSKAIVKTLAATGTGFDCASKTEIQLVQSLGVPPERIIYANPCKQVSQIKYAANNGVQMMTFDSEVELMKVARAHPKAKLVLRIATDDSKAVCRLSVKFGATLRTSRLLLERAKELNIDVVGVSFHVGSGCTDPETFVQAISDARCVFDMGAEVGFSMYLLDIGGGFPGSEDVKLKFEEITGVINPALDKYFPSDSGVRIIAEPGRYYVASAFTLAVNIIAKKIVLKEQTGSDDEDESSEQTFMYYVNDGVYGSFNCILYDHAHVKPLLQKRPKPDEKYYSSSIWGPTCDGLDRIVERCDLPEMHVGDWMLFENMGAYTVAAASTFNGFQRPTIYYVMSGPAWQLMQQFQNPDFPPEVEEQDASTLPVSCAWESGMKRHRAACASASINV

SEQ ID NO: 11928 - protein, 461 aa, Homo sapiens; identical to SEQ ID NO: 11927

SEQ ID NO: 11929 - protein, 394 aa, Homo sapiens [sequence omitted]

SEQ ID NO: 11930 - protein, 312 aa, Homo sapiens
MGKWNSSEYSSLQAGRHKKLRTESFSWRRQGERGNDDEDLPELLHEAASISTAGYILEVTGLGTEKELSKQELVRRPGPEARVSTAVPVLVGRVSIPVPGVTNSDKPRDLVNMEKEVKISAFRGVCVEDFAGDMHDGSPLNPSTLLAEVCVEQCTLMDSKMKPLWIMYSNEEAGSGVVEVLLHPDTIANIQLNNRNMDGGNEEFTLSCAGYCVATYVLGIGDRHSDNIMIRARPNTILRRHGLLFLHLFALMQAAGLPELSCSKDIRYLKDSLAPGKTEEALKHFRVKFNEALPTGNRVNWLAHNVSEDNRQ

SEQ ID NO: 11931 - protein, 367 aa, Homo sapiens
MAYRVLGRAGPPQPRRARRLLFAFTLSLSCTYLCYSFLCCCDDLGRSRLLGAPRCLRGPSAGGQKLLQKSRPCDPSGPTPSEPSAPSAPAAAVPAPRLSGSNHSGSPKLGTKRLPQALIVGVKKGGTRAVLEFIRVHPDVRALGTEPHFFDRNYGRGLDWYRSLMPRTLESQITLEKTPSYFVTQEAPRRIFNMSRDTKLIVVVRNPVTRAISDYTQTLSKKPDIPTFEGLSFRNRTLGLVDVSWNAIRIGMYVLHLESWLQYFPLAQIHFVSGERLITDPAGEMGRVQDFLGIKRFITDKHFYFNKTKGFPCLKKTESSLLPRCLGKSKGRTHVQIDPEVIDQLREFYRPYNIKFYETVGQDFRWE

SEQ ID NO: 11932 - protein, 542 aa, Homo sapiens
MRKIRANAIAILTVAWILGTFYYLWQDNRAHAASSGGRGAQRAGRRSEQLREDRTIPLIVTGTPSKGFDEKAYLSAKQLKAGEDPYRQHAFNQLESDKLSPDRPIRDTRHYSCPSVSYSSDLPATSVIITFHNEARSTLLRTVKSVLNRTPANLIQEIILVDDFSSDPEDCLLLTRIPKVKCLRNDRREGLIRSRVRGADVAAATVLTFLDSHCEVNTEWLPPMLQRVKEDHTRVVSPIIDVISLDNFAYLAASADLRGGFDWSLHFKWEQIPLEQKMTRTDPTRPIRTPVIAGGIFVIDKSWFNHLGKYDAQMDIWGGENFELSFRVWMCGGSLEIVPCSRVGHVFRKRHPYNFPEGNALTYIRNTKRTAEVWMDEYKQYYYEARPSAIGKAFGSVATRIEQRKKMNCKSFRWYLENVYPELTVPVKEALPGIIKQGVNCLESQGQNTAGDFLLGMGICRGSAKNPQPAQAWLFSDHLIQQQGKCLAATSTLMSSPGSPVILQMCNPREGKQVSLLASGPEAQQPEGPCLRVADLGRRAPD

SEQ ID NO: 11933 - protein, 558 aa, Homo sapiens
MRKIRANAIAILTVAWILGTFYYLWQDNRAHAASSGGRGAQRAGRRSEQLREDRTIPLIVTGTPSKGFDEKAYLSAKQLKAGEDPYRQHAFNQLESDKLSPDRPIRDTRHYSCPSVSYSSDLPATSVIITFHNEARSTLLRTVKSVLNRTPANLIQEIILVDDFSSDPEDCLLLTRIPKVKCLRNDRREGLIRSRVRGADVAAATVLTFLDSHCEVNTEWLPPMLQRVKEDHTRVVSPIIDVISLDNFAYLAASADLRGGFDWSLHFKWEQIPLEQKMTRTDPTRPIRTPVIAGGIFVIDKSWFNHLGKYDAQMDIWGGENFELSFRVWMCGGSLEIVPCSRVGHVFRKRHPYNFPEGNALTYIRNTKRTAEVWMDEYKQYYYEARPSAIGKAFGSVATRIEQRKKMNCKSFRWYLENVYPELTVPVKEALPGIIKQGVNCLESQGQNTAGDFLLGMGICRGSAKNPQPAQAWLFSDHLIQQQGKCLAATSTLMSSPGSPVILQMCNPREGKQKWRRKGSFIQHSVSGLCLETKPAQLVTSKCQADAQAQQWQLLPHT

SEQ ID NO: 11934 - protein, 354 aa, Homo sapiens
MESALAVPRLPPHDPGTPVLSVVDMHTGGEPLRIVLAGCPEVSGPTLLAKRRYMRQHLDHVRRRLMFEPRGHRDMYGAVLVPSELPDAHLGVLFLHNEGYSSMCGHAVLALGRFALDFGLVPAPPAGTREARVNIHCPCGLVTAFVACEDGRSHGPVRFHSVPAFVLATDLMVDVPGHGKVMVDIAYGGAFYAFVTAEKLGLDICSAKTRDLVDAASAVTEAVKAQFKINHPDSEDLAFLYGTILTDGKDAYTKEPTTNICVFADEQVDRSPTGSGVTARIALQYHKGLLELNQMRAFKSSATGSVFTGKAVREAKCGDFKAVIVEVSGQAHYTGTASFIIEDDDPLRDGFLLK

SEQ ID NO: 11935 - protein, 521 aa, Homo sapiens
MPSRIRQVAIQLNDTHPALAIPELMRIFVDIEKLPWSKAWELTQKTFAYTNHTVLPEALERWPVDLVEKLLPRHLEIIYEINQKHLDRIVALFPKDVDRLRRMSLIEEEGSKRINMAHLCIVGSHAVNGVAKIHSDIVKTKVFKDFSELEPDKFQNKTNGITPRRWLLLCNPGLAELIAEKIGEDYVKDLSQLTKLHSFLGDDVFLRELAKVKQENKLKFSQFLETEYKVKINPSSMFDVQVKRIHEYKRQLLNCLHVITMYNRIKKDPKKLFVPRTVIIGGKAAPGYHMAKMIIKLITSVADVVNNDPMVGSKLKVIFLENYRVSLAEKVIPATDLSEQISTAGTEASGTGNMKFMLNGALTIGTMDGANVEMAEEAGEENLFIFGMRIDDVAALDKKGYEAKEYYEALPELKLVIDQIDNGFFSPKQPDLFKDIINMLFYHDRFKVFADYEAYVKCQDKVSQLYMNPKAWNTMVLKNIAASGKFSSDRTIKEYAQNIWNVEPSDLKISLSNESNKVNGN

SEQ ID NO: 11936 - protein, 850 aa, Homo sapiens [sequence omitted]

SEQ ID NO: 11937 - protein, 847 aa, Homo sapiens
MAKPLTDQEKRRQISIRGIVGVENVAELKKSFNRHLHFTLVKDRNVATTRDYYFALAHTVRDHLVGRWIRTQQHYYDKCPKRVYYLSLEFYMGRTLQNTMINLGLQNACDEAIYQLGLDIEELEEIEEDAGLGNGGLGRLAACFLDSMATLGLAAYGYGIRYEYGIFNQKIRDGWQVEEADDWLRYGNPWEKSRPEFMLPVHFYGKVEHTNTGTKWIDTQVVLALPYDTPVPGYMNNTVNTMRLWSARAPNDFNLRDFNVGDYIQAVLDRNLAENISRVLYPNDNFFEGKELRLKQEYFVVAATLQDIIRRFKASKFGSTRGAGTVFDAFPDQVAIQLNDTHPALAIPELMRIFVDIEKLPWSKAWELTQKTFAYTNHTVLPEALERWPVDLVEKLLPRHLEIIYEINQKHLDRIVALFPKDVDRLRRMSLIEEEGSKRINMAHLCIVGSHAVNGVAKIHSDIVKTKVFKDFSELEPDKFQNKTNGITPRRWLLLCNPGLAELIAEKIGEDYVKDLSQLTKLHSFLGDDVFLRELAKVKQENKLKFSQFLETEYKVKINPSSMFDVQVKRIHEYKRQLLNCLHVITMYNRIKKDPKKLFVPRTVIIGGKAAPGYHMAKMIIKLITSVADVVNNDPMVGSKLKVIFLENYRVSLAEKVIPATDLSEQISTAGTEASGTGNMKFMLNGALTIGTMDGANVEMAEEAGEENLFIFGMRIDDVAALDKKGYEAKEYYEALPELKLVIDQIDNGFFSPKQPDLFKDIINMLFYHDRFKVFADYEAYVKCQDKVSQLYMNPKAWNTMVLKNIAASGKFSSDRTIKEYAQNIWNVEPSDLKISLSNESNKVNGN

SEQ ID NO: 11938 - protein, 280 aa, Homo sapiens
MAPSGSLAVPLAVLVLLLWGAPWTHGRRSNVRVITDENWRELLEGDWMIEFYAPWCPACQNLQPEWESFAEWGEDLEVNIAKVDVTEQPGLSGRFIITALPTIYHCKDGEFRRYQGPRTKKDFINFISDKEWKSIEPVSSWFGPGSVLMSSMSALFQLSMWIRTCHNYFIEDLGLPVWGSYTVFALATLFSGLLLGLCMIFVADCLCPSKRRRPQPYPYPSKKLLSESAQPLKKVEEEQEADEEDVSEEEAESKEGTNKDFPQNAIRQRSLGPSLATDKS

SEQ ID NO: 11939 - protein, 280 aa, Homo sapiens; identical to SEQ ID NO: 11938

SEQ ID NO: 11940 - protein, 198 aa, Homo sapiens
MNSRRREPITLQDPEAKYPLPLIEKEKISHNTRRFRFGLPSPDHVLGLPVGNYVQLLAKIDNELVVRAYTPVSSDDDRGFVDLIIKIYFKNVHPQYPEGGKMTQYLENMKIGETIFFRGPRGRLFYHGPGNLGIRPDQTSEPKKTLADHLGMIAGGTGITPMLQLIRHITKDPSDRTRMSLIFANQAGSTAQASLLPT

SEQ ID NO: 11941 - protein, 336 aa, Homo sapiens
MNERRSARSTRLQLGDAPASAPPRKHPPRTRPRVGAHEDPSLLLTITVTGVTVLVLVLKSMNSRRREPITLQDPEAKYPLPLIEKEKISHNTRRFRFGLPSPDHVLGLPVGNYVQLLAKIDNELVVRAYTPVSSDDDRGFVDLIIKIYFKNVHPQYPEGGKMTQYLENMKIGETIFFRGPRGRLFYHGPGNLGIRPDQTSEPKKTLADHLGMIAGGTGITPMLQLIRHITKDPSDRTRMSLIFANQTEEDILVRKELEEIARTHPDQFDLWYTLDRPPIGWKYSSGFVTADMIKEHLPPPAKSTLILVCGPPPLIQTAAHPNLEKLGYTQDMIFTY

SEQ ID NO: 11942 - protein, 297 aa, Homo sapiens
MNERRSARSTRLQLGDAPASAPPRKHPPRTRPRVGAHEDPSLLLTITVTGVTVLVLVLKSMNSRRREPITLQDPEAKYPLPLIEKEKISHNTRRFRFGLPSPDHVLGLPVGNYVQLLAKIDNELVVRAYTPVSSDDDRGFVDLIIKIYFKNVHPQYPEGGKMTQYLENMKIGETIFFRGPRGRLFYHGPGNLGIRPDQTSEPKKTLADHLGMIAGGTGITPMLQLIRHITKDPSDRTRMSLIFANQTEEDILVRKELEEIARTHPDQFDLWYTLDRPPIGPWSAEGATLLSNSAQFH

SEQ ID NO: 11943 - protein, 276 aa, Homo sapiens
MNSRRREPITLQDPEAKYPLPLIEKEKISHNTRRFRFGLPSPDHVLGLPVGNYVQLLAKIDNELVVRAYTPVSSDDDRGFVDLIIKIYFKNVHPQYPEGGKMTQYLENMKIGETIFFRGPRGRLFYHGPGNLGIRPDQTSEPKKTLADHLGMIAGGTGITPMLQLIRHITKDPSDRTRMSLIFANQTEEDILVRKELEEIARTHPDQFDLWYTLDRPPIGWKYSSGFVTADMIKEHLPPPAKSTLILVCGPPPLIQTAAHPNLEKLGYTQDMIFTY

SEQ ID NO: 11944 - protein, 440 aa, Homo sapiens
MALLVLGLVSCTFFLAVNGLYSSSDDVIELTPSNFNREVIQSDSLWLVEFYAPWCGHCQRLTPEWKKAATALKDVVKVGAVDADKHHSLGGQYGVQGFPTIKIFGSNKNRPEDYQGGRTGEAIVDAALSALRQLVKDRLGGRSGGYSSGKQGRSDSSSKKDVIELTDDSFDKNVLDSEDVWMVEFYAPWCGHCKNLEPEWAAAASEVKEQTKGKVKLAAVDATVNQVLASRYGIRGFPTIKIFQKGESPVDYDGGRTRSDIVSRALDLFSDNAPPPELLEIINEDIAKRTCEEHQLCVVAVLPHILDTGAAGRNSYLEVLLKLADKYKKKMWGWLWTEAGAQSELETALGIGGFGYPAMAAINARKMKFALLKGSFSEQGINEFLRELSFGRGSTAPVGGGAFPTIVEREPWDGRDGELPVEDDIDLSDVELDDLGKDEL

SEQ ID NO: 11945 - protein, 259 aa, Homo sapiens
MVEFYAPWCGHCKNLEPEWAAAASEVKEQTKGKVKLAAVDATVNQVLASRYGIRGFPTIKIFQKGESPVDYDGGRTRSDIVSRALDLFSDNAPPPELLEIINEDIAKRTCEEHQLCVVAVLPHILDTGAAGRNSYLEVLLKLADKYKKKMWGWLWTEAGAQSELETALGIGGFGYPAMAAINARKMKFALLKGSFSEQGINEFLRELSFGRGSTAPVGGGAFPTIVEREPWDGRDGELPVEDDIDLSDVELDDLGKDEL

SEQ ID NO: 11946 - protein, 380 aa, Homo sapiens [sequence omitted]

SEQ ID NO: 11947 - protein, 382 aa, Homo sapiens
MAHDLLFRLFPLLALGVPLQSNRLGPTSRLRYSRFLDPSNVIFLRWDFDLEAEIISFELQVRTAGWVGFGVTNRYTNVGSDLVVGGVLPNGNVYFSDQHLVDEDTLKEDGSQDAELLRLTEDAVYTTMHFSRPFRSCDPHDLDITSNTVRVLATYGLDDTLKLYRERTFVKSIFLLQVVHPDDLDVPEDTIIHDLEITNFLIPEDDTTYACTFLPLPIVSEKHHIYKFEPKLVYHNETTVHHILVYACGNASVLPTGISDCYGADPAFSLCSQVIVGWAVGGTSYQFPDDVGVSIGTPLDLQWIRLEIHYSNFNNLPGVYDSSGICVYYTSQLRKYDTDVLQLGFFTFPIHFIPPGAESFMSYGLCRTEKFEEMNGAPMPDI

SEQ ID NO: 11948 - protein, 343 aa, Homo sapiens
MLATRLSRPLSRLPGKTLSACDRENGARRPLLLGSTSFIPIGRRTYASAAEPVGSKAVLVTGCDSGFGFSLAKHLHSKGFLVFAGCLMKDKGHDGVKELDSLNSDRLRTVQLNVCSSEEVEKVVEIVRSSLKDPEKGMWGLVNNAGISTFGEVEFTSLETYKQVAEVNLWGTVRMTKSFLPLIRRAKGRVVNISSMLGRMANPARSPYCITKFGVEAFSDCLRYEMYPLGVKVSVVEPGNFIAATSLYSPESIQAIAKKMWEELPEVVRKDYGKKYFDEKIAKMETYCSSGSTDTSPVIDAVTHALTATTPYTRYHPMDYYWWLRMQIMTHLPGAISDMIYIR

SEQ ID NO: 11949 - protein, 343 aa, Homo sapiens; identical to SEQ ID NO: 11948

SEQ ID NO: 11950 - protein, 343 aa, Homo sapiens; identical to SEQ ID NO: 11948

SEQ ID NO: 11951 - protein, 343 aa, Homo sapiens; identical to SEQ ID NO: 11948

SEQ ID NO: 11952 - protein, 978 aa, Homo sapiens
MGTRLPLVLRQLRRPPQPPGPPRRLRVPCRASSGGGGGGGGGREGLLGQRRPQDGQARSSCSPGGRTPAARDSIVREVIQNSKEVLSLLQEKNPAFKPVLAIIQAGDDNLMQEINQNLAEEAGLNITHICLPPDSSEAEIIDEILKINEDTRVHGLALQISENLFSNKVLNALKPEKDVDGVTDINLGKLVRGDAHECFVSPVAKAVIELLEKSGVNLDGKKILVVGAHGSLEAALQCLFQRKGSMTMSIQWKTRQLQSKLHEADIVVLGSPKPEEIPLTWIQPGTTVLNCSHDFLSGKVGCGSPRIHFGGLIEEDDVILLAAALRIQNMVSSGRRWLREQQHRRWRLHCLKLQPLSPVPSDIEISRGQTPKAVDVLAKEIGLLADEIEIYGKSKAKVRLSVLERLKDQADGKYVLVAGITPTPLGEGKSTVTIGLVQALTAHLNVNSFACLRQPSQGPTFGVKGGAAGGGYAQVIPMEEFNLHLTGDIHAITAANNLLAAAIDTRILHENTQTDKALYNRLVPLVNGVREFSEIQLARLKKLGINKTDPSTLTEEEVSKFARLDIDPSTITWQRVLDTNDRFLRKITIGQGNTEKGHYRQAQFDIAVASEIMAVLALTDSLADMKARLGRMVVASDKSGQPVTADDLGVTGALTVLMKDAIKPNLMQTLEGTPVFVHAGPFANIAHGNSSVLADKIALKLVGEEGFVVTEAGFGADIGMEKFFNIKCRASGLVPNVVVLVATVRALKMHGGGPSVTAGVPLKKEYTEENIQLVADGCCNLQKQIQITQLFGVPVVVALNVFKTDTRAEIDLVCELAKRAGAFDAVPCYHWSVGGKGSVDLARAVREAASKRSRFQFLYDVQVPIVDKIRTIAQAVYGAKDIELSPEAQAKIDRYTQQGFGNLPICMAKTHLSLSHQPDKKGVPRDFILPISDVRASIGAGFIYPLVGTMSTMPGLPTRPCFYDIDLDTETEQVKGLF

SEQ ID NO: 11953 - protein, 868 aa, Homo sapiens
MQEINQNLAEEAGLNITHICLPPDSSEAEIIDEILKINEDTRVHGLALQISENLFSNKVLNALKPEKDVDGVTDINLGKLVRGDAHECFVSPVAKAVIELLEKSGVNLDGKKILVVGAHGSLEAALQCLFQRKGSMTMSIQWKTRQLQSKLHEADIVVLGSPKPEEIPLTWIQPGTTVLNCSHDFLSGKVGCGSPRIHFGGLIEEDDVILLAAALRIQNMVSSGRRWLREQQHRRWRLHCLKLQPLSPVPSDIEISRGQTPKAVDVLAKEIGLLADEIEIYGKSKAKVRLSVLERLKDQADGKYVLVAGITPTPLGEGKSTVTIGLVQALTAHLNVNSFACLRQPSQGPTFGVKGGAAGGGYAQVIPMEEFNLHLTGDIHAITAANNLLAAAIDTRILHENTQTDKALYNRLVPLVNGVREFSEIQLARLKKLGINKTDPSTLTEEEVSKFARLDIDPSTITWQRVLDTNDRFLRKITIGQGNTEKGHYRQAQFDIAVASEIMAVLALTDSLADMKARLGRMVVASDKSGQPVTADDLGVTGALTVLMKDAIKPNLMQTLEGTPVFVHAGPFANIAHGNSSVLADKIALKLVGEEGFVVTEAGFGADIGMEKFFNIKCRASGLVPNVVVLVATVRALKMHGGGPSVTAGVPLKKEYTEENIQLVADGCCNLQKQIQITQLFGVPVVVALNVFKTDTRAEIDLVCELAKRAGAFDAVPCYHWSVGGKGSVDLARAVREAASKRSRFQFLYDVQVPIVDKIRTIAQAVYGAKDIELSPEAQAKIDRYTQQGFGNLPICMAKTHLSLSHQPDKKGVPRDFILPISDVRASIGAGFIYPLVGTMSTMPGLPTRPCFYDIDLDTETEQVKGLF

SEQ ID NO: 11954 - protein, 684 aa, Homo sapiens [sequence omitted]

SEQ ID NO: 11955 - protein, 757 aa, Homo sapiens
MAAPEAWRARSCWFCEVAAATTMEATSREAAPAKSSASGPNAPPALFELCGRAVSAHMGVLESGVWALPGPILQSILPLLNIYYLERIEETALKKGLSTQAIWRRLWDELMKTRPSSLESVTCWRAKFMEAFFSHVLRGTIDVSSDRRLCDQRFSPLLHSSRHVRQLTICNMLQGATELVAEPNRRVLETLASSLHTLKFRHLLFSDVAAQQSLRQLLHQLIHHGAVSQVSLYSWPVPESALFILILTMSAGFWQPGPGGPPCRLCGEASRGRAPSRDEGSLLLGSRRPRRDAAERCAAALMASRRKSEAKQMPRAAPATRVTRRSTQESLTAGGTDLKRELHPPATSHEAPGTKRSPSAPAATSSASSSTSSYKRAPASSAPQPKPLKRFKRAAGKKGARTRQGPGAESEDLYDFVFIVAGEKEDGEEMEIGEVACGALDGSDPSCLGLPALEASQRFRSISTLELFTVPLSTEAALTLCHLLSSWVSLESLTLSYNGLGSNIFRLLDSLRALSGQAGCRLRALHLSDLFSPLPILELTRAIVRALPLLRVLSIRVDHPSQRDNPGVPGNAGPPSHIIGDEEIPEYNLALKRLSFHDMNLADCQSEVLFLLQNLTLQEITFSFCRLFEKRPAQFLPEMVAAMKGNSTLKGLRLPGNRLGNAGLLALADVFSEDSSSSLCQLDISSNCIKPDGLLEFAKRLERWGRGAFGHLRLFQNWLDQDAVTAREAIRRLRATCHVVSDSWDSSQAFADYVSTM

SEQ ID NO: 11956 - protein, 812 aa, Homo sapiens
MAAPEAWRARSCWFCEVAAATTMEATSREAAPAKSSASGPNAPPALFELCGRAVSAHMGVLESGVWALPGPILQSILPLLNIYYLERIEETALKKGLSTQAIWRRLWDELMKTRPSSLESVTCWRAKFMEAFFSHVLRGTIDVSSDRRLCDQRFSPLLHSSRHVRQLTICNMLQGATELVAEPNRRVLETLASSLHTLKFRHLLFSDVAAQQSLRQLLHQLIHHGAVSQVSLYSWPVPESALFILILTMSAGFWQPGPGGPPCRLCGEASRGRAPSRDEGSLLLGSRRPRRDAAERCAAALMASRRKSEAKQMPRAAPATRVTRRSTQESLTAGGTDLKRELHPPATSHEAPGTKRSPSAPAATSSASSSTSSYKRAPASSAPQPKPLKRFKRAAGKKGARTRQGPGAESEDLYDFVFIVAGEKEDGEEMEIGEVACGALDGSDPSCLGLPALEASQRFRSISTLELFTVPLSTEAALTLCHLLSSWVSLESLTLSYNGLGSNIFRLLDSLRALSGQAGCRLRALHLSDLFSPLPILELTRAIVRALPLLRVLSIRVDHPSQRDNPGVPGNAGPPSHIIGDEEIPENCLEQLEMGFPRGAQPAPLLCSVLKASGSLQQLSLDSATFASPQDFGLVLQTLKEYNLALKRLSFHDMNLADCQSEVLFLLQNLTLQEITFSFCRLFEKRPAQFLPEMVAAMKGNSTLKGLRLPGNRLGNAGLLALADVFSEDSSSSLCQLDISSNCIKPDGLLEFAKRLERWGRGAFGHLRLFQNWLDQDAVTAREAIRRLRATCHVVSDSWDSSQAFADYVSTM

SEQ ID NO: 11957 - protein, 747 aa, Homo sapiens
MRRSLAPSQLAKRKPEGRSCDDEDWQPGLVTPRKRKSSSETQIQECFLSPFRKPLSQLTNQPPCLDSSQHEAFIRSILSKPFKVPIPNYQGPLGSRALGLKRAGVRRALHDPLEKDALVLYEPPPLSAHDQLKLDKEKLPVHVVVDPILSKVLRPHQREGVKFLWECVTSRRIPGSHGCIMADEMGLGKTLQCITLMWTLLRQSPECKPEIDKAVVVSPSSLVKNWYNEVGKWLGGRIQPLAIDGGSKDEIDQKLEGFMNQRGARVSSPILIISYETFRLHVGVLQKGSVGLVICDEGHRLKNSENQTYQALDSLNTSRRVLISGTPIQNDLLEYFSLVHFVNSGILGTAHEFKKHFELPILKGRDAAASEADRQLGEERLRELTSIVNRCLIRRTSDILSKYLPVKIEQVVCCRLTPLQTELYKRFLRQAKPAEELLEGKMSVSSLSSITSLKKLCNHPALIYDKCVEEEDGFVGALDLFPPGYSSKALEPQLSGKMLVLDYILAVTRSRSSDKVVLVSNYTQTLDLFEKLCRARRYLYVRLDGTMSIKKRAKVVERFNSPSSPDFVFMLSSKAGGCGLNLIGANRLVMFDPDWNPANDEQAMARVWRDGQKKTCYIYRLLSAGTIEEKIFQRQSHKKALSSCVVDEEQDVERHFSLGELKELFILDEASLSDTHDRLHCRRCVNSRQIRPPPDGSDCTSDLAGWNHCTDKWGLRDEVLQAAWDAASTAITFVFHQRSHEEQRGLR

SEQ ID NO: 11958 - protein, 567 aa, Homo sapiens
MADEMGLGKTLQCITLMWTLLRQSPECKPEIDKAVVVSPSSLVKNWYNEVGKWLGGRIQPLAIDGGSKDEIDQKLEGFMNQRGARVSSPILIISYETFRLHVGVLQKGSVGLVICDEGHRLKNSENQTYQALDSLNTSRRVLISGTPIQNDLLEYFSLVHFVNSGILGTAHEFKKHFELPILKGRDAAASEADRQLGEERLRELTSIVNRCLIRRTSDILSKYLPVKIEQVVCCRLTPLQTELYKRFLRQAKPAEELLEGKMSVSSLSSITSLKKLCNHPALIYDKCVEEEDGFVGALDLFPPGYSSKALEPQLSGKMLVLDYILAVTRSRSSDKVVLVSNYTQTLDLFEKLCRARRYLYVRLDGTMSIKKRAKVVERFNSPSSPDFVFMLSSKAGGCGLNLIGANRLVMFDPDWNPANDEQAMARVWRDGQKKTCYIYRLLSAGTIEEKIFQRQSHKKALSSCVVDEEQDVERHFSLGELKELFILDEASLSDTHDRLHCRRCVNSRQIRPPPDGSDCTSDLAGWNHCTDKWGLRDEVLQAAWDAASTAITFVFHQRSHEEQRGLR

SEQ ID NO: 11959 - protein, 85 aa, Homo sapiens
MGDRILPFLAAVWLCQLAFCTDPLTTVREQCEQLEKCVKARERLELCDERVSSRSHTEEDCTEELFDFLHARDHCVAHKLFNNLK

SEQ ID NO: 11960 - protein, 91 aa, Homo sapiens
MGLEDEQKMLTESGDPEEEEEEEEELVDPLTTVREQCEQLEKCVKARERLELCDERVSSRSHTEEDCTEELFDFLHARDHCVAHKLFNNLK

SEQ ID NO: 11961 - protein, 172 aa, Homo sapiens
QVRPPIDLLQVWPGFLYHLVFQIGLRLSVHTGNLGRQECETFPYYLASELNGRPHSAISGGSVALPAGLLHGNSEAAPWFGGCVNQSICVWWVSAKNAHFVFFLFLHQDPLTTVREQCEQLEKCVKARERLELCDERVSSRSHTEEDCTEELFDFLHARDHCVAHKLFNNLK

SEQ ID NO: 11962 - protein, 82 aa, Homo sapiens
MGLEDEQKMLTESGDPEEDPLTTVREQCEQLEKCVKARERLELCDERVSSRSHTEEDCTEELFDFLHARDHCVAHKLFNNLK

SEQ ID NO: 11963 - protein, 91 aa, Homo sapiens; identical to SEQ ID NO: 11960

SEQ ID NO: 11964 - protein, 510 aa, Homo sapiens [sequence omitted]

SEQ ID NO: 11965 - protein, 660 aa, Homo sapiens
MDDWKPSPLIKPFGARKKRSWYLTWKYKLTNQRALRRFCQTGAVLFLLVTVIVNIKLILDTRRAISEANEDPEPEQDYDEALGRLEPPRRRGSGPRRVLDVEVYSSRSKVYVAVDGTTVLEDEAREQGRGIHVIVLNQATGHVMAKRVFDTYSPHEDEAMVLFLNMVAPGRVLICTVKDEGSFHLKDTAKALLRSLGSQAGPALGWRDTWAFVGRKGGPVFGEKHSKSPALSSWGDPVLLKTDVPLSSAEEAECHWADTELNRRRRRFCSKVEGYGSVCSCKDPTPIEFSPDPLPDNKVLNVPVAVIAGNRPNYLYRMLRSLLSAQGVSPQMITVFIDGYYEEPMDVVALFGLRGIQHTPISIKNARVSQHYKASLTATFNLFPEAKFAVVLEEDLDIAVDFFSFLSQSIHLLEEDDSLYCISAWNDQGYEHTAEDPALLYRVETMPGLGWVLRRSLYKEELEPKWPTPEKLWDWDMWMRMPEQRRGRECIIPDVSRSYHFGIVGLNMNGYFHEAYFKKHKFNTVPGVQLRNVDSLKKEAYEVEVHRLLSEAEVLDHSKNPCEDSFLPDTEGHTYVAFIRMEKDDDFTTWTQLAKCLHIWDLDVRGNHRGLWRLFRKKNHFLVVGVPASPYSVKKPPSVTPIFLEPPPKEEGAPGAPEQT

SEQ ID NO: 11966 - protein, 660 aa, Homo sapiens; identical to SEQ ID NO: 11965

SEQ ID NO: 11967 - protein, 627 aa, Homo sapiens [sequence omitted]

SEQ ID NO: 11968 - protein, 660 aa, Homo sapiens; identical to SEQ ID NO: 11965

SEQ ID NO: 11969 - protein, 585 aa, Homo sapiens
MCCWPLLLLWGLLPGTAAGGSGRTYPHRTLLDSEGKYWLGWSQRGSQIAFRLQVRTAGYVGFGFSPTGAMASADIVVGGVAHGRPYLQDYFTNANRELKKDAQQDYHLEYAMENSTHTIIEFTRELHTCDINDKSITDSTVRVIWAYHHEDAGEAGPKYHDSNRGTKSLRLLNPEKTSVLSTALPYFDLVNQDVEPVIQRGHESLVHHILLYQCSNNFNDSVLESGHECYHPNMPDAFLTCETVIFAWAIGGEGFSYPPHVGLSLGTPLDPHYVLLEVHYDNPTYEEGLIDNSGLRLFYTMDIRKYDAGVIEAGLWVSLFHTIPPGMPEFQSEGHCTLECLEEALEAEKPSGIHVFAVLLHAHLAGRGIRLRHFRKGKEMKLLAYDDDFDFNFQEFQYLKEEQTILPGDNLITECRYNTKDRAEMTWGGLSTRSEMCLSYLLYYPRINLTRCASIPDIMEQLQFIGVKEIYRPVTTWPFIIKSPKQYKNLSFMDAMNKFKWTKKEGLSFNKLVLSLPVNVRCSKTDNAEWSIQGMTALPPDIERPYKAEPLVCGTSSSSSLHRDFSINLLVCLLLLSCTLSTKSL

SEQ ID NO: 11970 - protein, 613 aa, Homo sapiens
MCCWPLLLLWGLLPGTAAGGSGRTYPHRTLLDSEGKYWLGWSQRGSQIAFRLQVRTAGYVGFGFSPTGAMASADIVVGGVAHGRPYLQDYFTNANRELKKDAQQDYHLEYAMENSTHTIIEFTRELHTCDINDKSITDSTVRVIWAYHHEDAGEAGPKYHDSNRGTKSLRLLNPEKTSVLSTALPYFDLVNQDVPIPNKDTTYWCQMFKIPVFQEKHHVIKVEPVIQRGHESLVHHILLYQCSNNFNDSVLESGHECYHPNMPDAFLTCETVIFAWAIGGEGFSYPPHVGLSLGTPLDPHYVLLEVHYDNPTYEEGLIDNSGLRLFYTMDIRKYDAGVIEAGLWVSLFHTIPPGMPEFQSEGHCTLECLEEALEAEKPSGIHVFAVLLHAHLAGRGIRLRHFRKGKEMKLLAYDDDFDFNFQEFQYLKEEQTILPGDNLITECRYNTKDRAEMTWGGLSTRSEMCLSYLLYYPRINLTRCASIPDIMEQLQFIGVKEIYRPVTTWPFIIKSPKQYKNLSFMDAMNKFKWTKKEGLSFNKLVLSLPVNVRCSKTDNAEWSIQGMTALPPDIERPYKAEPLVCGTSSSSSLHRDFSINLLVCLLLLSCTLSTKSL

SEQ ID NO: 11971 - protein, 545 aa, Homo sapiens
MNSFLSVFRYPDFSFPYFPQDYFTNANRELKKDAQQDYHLEYAMENSTHTIIEFTRELHTCDINDKSITDSTVRVIWAYHHEDAGEAGPKYHDSNRGTKSLRLLNPEKTSVLSTALPYFDLVNQDVPIPNKDTTYWCQMFKIPVFQEKHHVIKVEPVIQRGHESLVHHILLYQCSNNFNDSVLESGHECYHPNMPDAFLTCETVIFAWAIGGEGFSYPPHVGLSLGTPLDPHYVLLEVHYDNPTYEEGLIDNSGLRLFYTMDIRKYDAGVIEAGLWVSLFHTIPPGMPEFQSEGHCTLECLEEALEAEKPSGIHVFAVLLHAHLAGRGIRLRHFRKGKEMKLLAYDDDFDFNFQEFQYLKEEQTILPGDNLITECRYNTKDRAEMTWGGLSTRSEMCLSYLLYYPRINLTRCASIPDIMEQLQFIGVKEIYRPVTTWPFIIKSPKQYKNLSFMDAMNKFKWTKKEGLSFNKLVLSLPVNVRCSKTDNAEWSIQGMTALPPDIERPYKAEPLVCGTSSSSSLHRDFSINLLVCLLLLSCTLSTKSL

SEQ ID NO: 11972 - protein, 224 aa, Homo sapiens
MPGGLLLGDVAPNFEANTTVGRIRFHDFLGDSWGILFSHPRDFTPVCTTELGRAAKLAPEFAKRNVKLIALSIDSVEDHLAWSKDINAYNCEEPTEKLPFPIIDDRNRELAILLGMLDPAEKDEKGMPVTARVVFVFGPDKKLKLSILYPATTGRNFDEILRVVISLQLTAEKRVATPVDWKDGDSVMVLPTIPEEEAKKLFPKGVFTKELPSGKKYLRYTPQP

SEQ ID NO: 11973 - protein, 224 aa, Homo sapiens; identical to SEQ ID NO: 11972

SEQ ID NO: 11974 - protein, 223 aa, Homo sapiens
MLEKDIQDLKFGGEQDVDMMFSSFICKTSDVHEVRKVLGEKGKNSKITSKIENHDGGWRFDEILEASDGIMMLEDVIKKLHPTWAEGSGVANAVLVEADCIMLSGETAKGNYPLEAVHMQHLIACEAEATIYHLQLFEEFCHLAPITSDPAEATAVGTVEASFKCCSGAIIVLTKSAGVPTRWPDTAHAEDVDLRVNLAMNVAVLQQTLHPPPSIFPHYCSRL

SEQ ID NO: 11975 - protein, 178 aa, Homo sapiens [sequence omitted]

SEQ ID NO: 11976 - protein, 445 aa, Homo sapiens [sequence omitted]

SEQ ID NO: 11977 - protein, 575 aa, Homo sapiens
MRPWTGSWRWIMLILFAWGTLLFYIGGHLVRDNDHPDHSSRELSKILAKLERLKQQNEDLRRMAESLRIPEGPIDQGPAIGRVRVLEEQLVKAKEQIENYKKQTRNGLGKDHEILRRRIENGAKELWFFLQSELKKLKNLEGNELQRHADEFLLDLGHHERSIMTDLYYLSQTDGAGDWREKEAKDLTELVQRRITYLQNPKDCSKAKKLVCNINKGCGYGCQLHHVVYCFMIAYGTQRTLILESQNWRYATGGWETVFRPVSETCTDRSGISTGHWSGEVKDKNVQVVELPIVDSLHPRPPYLPLAVPEDLADRLVRVHGDPAVWWVSQFVKYLIRPQPWLEKEIEEATKKLGFKHPVIGVHVRRTDKVGTEAAFHPIEEYMVHVEEHFQLLARRMQVDKKRVYLATDDPSLLKEAKTKYPNYEFISDNSISWSAGLHNRYTENSLRGVILDIHFLSQADFLVCTFSSQVCRVAYEIMQTLHPDASANFHSLDDIYYFGGQNAHNQIAIYAHQPRTADEIPMEPGDIIGVAGNHWDGYSKGVNRKLGRTGLYPSYKVREKIETVKYPTYPEAEK

SEQ ID NO: 11978 - protein, 97 aa, Homo sapiens
MQTLHPDASANFHSLDDIYYFGGQNAHNQIAIYAHQPRTADEIPMEPGDIIGVAGNHWDGYSKGVNRKLGRTGLYPSYKVREKIETVKYPTYPEAEK

SEQ ID NO: 11979 - protein, 575 aa, Homo sapiens; identical to SEQ ID NO: 11977

SEQ ID NO: 11980 - protein, 575 aa, Homo sapiens; identical to SEQ ID NO: 11977

SEQ ID NO: 11981 - protein, 474 aa, Homo sapiens
MALAVAPWGRQWEEARALGRAVRMLQRLEEQCVDPRLSVSPPSLRDLLPRTAQLLREVAHSRRAAGGGGPGGPGGSGDFLLIYLANLEAKSRQVAALLPPRGRRSANDELFRAGSRLRRQLAKLAIIFSHMHAELHALFPGGKYCGHMYQLTKAPAHTFWRESCGARCVLPWAEFESLLGTCHPVEPGCTALALRTTIDLTCSGHVSIFEFDVFTRLFQPWPTLLKNWQLLAVNHPGYMAFLTYDEVQERLQACRDKPGSYIFRPSCTRLGQWAIGYVSSDGSILQTIPANKPLSQVLLEGQKDGFYLYPDGKTHNPDLTELGQAEPQQRIHVSEEQLQLYWAMDSTFELCKICAESNKDVKIEPCGHLLCSCCLAAWQHSDSQTCPFCRCEIKGWEAVSIYQFHGQATAEDSGNSSDQEGRELELGQVPLSAPPLPPRPDLPPRKPRNAQPKVRLLKGNSPPAALGPQDPAPA

SEQ ID NO: 11982 - protein, 428 aa, Homo sapiens
MALAVAPWGRQWEEARALGRAVRMLQRLEEQCVDPRLSVSPPSLRDLLPRTAQLLREVAHSRRAAGGGGPGGPGGSGDFLLIYLANLEAKSRQVAALLPPRGRRSANDELFRAGSRLRRQLAKLAIIFSHMHAELHALFPGGKYCGHMYQLTKAPAHTFWRESCGARCVLPWAEFESLLGTCHPVEPGCTALALRTTIDLTCSGHVSIFEFDVFTRLFQPWPTLLKNWQLLAVNHPGYMAFLTYDEVQERLQACRDKPGSYLYPDGKTHNPDLTELGQAEPQQRIHVSEEQLQLYWAMDSTFELCKICAESNKDVKIEPCGHLLCSCCLAAWQHSDSQTCPFCRCEIKGWEAVSIYQFHGQATAEDSGNSSDQEGRELELGQVPLSAPPLPPRPDLPPRKPRNAQPKVRLLKGNSPPAALGPQDPAPA

SEQ ID NO: 11983 - protein, 428 aa, Homo sapiens; identical to SEQ ID NO: 11982

SEQ ID NO: 11984 - protein, 474 aa, Homo sapiens; identical to SEQ ID NO: 11981

SEQ ID NO: 11985 - protein, 406 aa, Homo sapiens [sequence omitted]

SEQ ID NO: 11986 - protein, 504 aa, Homo sapiens
MSVQVAAPGSAGLGPERLSPEELVRQTRQVVQGLEALRAEHHGLAGHLAEALAGQGPAAGLEMLEEKQQVVSHSLEAIELGLGEAQVLLALSAHVGALEAEKQRLRSQARRLAQENVWLREELEETQRRLRASEESVAQLEEEKRHLEFLGQLRQYDPPAESQQSESPPRRDSLASLFPSEEEERKGPEAAGAAAAQQGGYEIPARLRTLHNLVIQYAGQGRYEVAVPLCRQALEDLERSSGHCHPDVATMLNILALVYRDQNKYKEATDLLHDALQIREQTLGPEHPAVAATLNNLAVLYGKRGRYREAEPLCQRALEIREKVLGADHPDVAKQLNNLALLCQNQGKFEDVERHYARALSIYEALGGPHDPNVAKTKNNLASAYLKQNKYQQAEELYKEILHKEDLPAPLGAPNTGTAGDAEQALRRSSSLSKIRESIRRGSEKLVSRLRGEAAAGAAGMKRAMSLNTLNVDAPRAPGTQFPSWHLDKAPRTLSASTQDLSPH

SEQ ID NO: 11987 - protein, 504 aa, Homo sapiens; identical to SEQ ID NO: 11986

SEQ ID NO: 11988 - protein, 312 aa, Homo sapiens
MIFSCPSSDTHSHIICWIFILWNQNTVMLTFFFPGLIMSSGQAWKEQRRFTLTALRNFGLGKKSLEERIQEEAQHLTEAIKEENGQPFDPHFKINNAVSNIICSITFGERFEYQDSWFQQLLKLLDEVTYLEASKTCQLYNVFPWIMKFLPGPHQTLFSNWKKLKLFVSHMIDKHRKDWNPAETRDFIDAYLKEMSKHTGNPTSSFHEENLICSTLDLFFAGTETTSTTLRWALLYMALYPEIQEKVQAEIDRVIGQGQQPSTAARESMPYTNAVIHEVQRMGNIIPLNVPREVTVDTTLAGYHLPKNISPD

SEQ ID NO: 11989 - protein, 502 aa, Homo sapiens
MLAAMGSLAAALWAVVHPRTLLLGTVAFLLAADFLKRRRPKNYPPGPWRLPFLGNFFLVDFEQSHLEVQLFVKKYGNLFSLELGDISAVLITGLPLIKEALIHMDQNFGNRPVTPMREHIFKKNGLIMSSGQAWKEQRRFTLTALRNFGLGKKSLEERIQEEAQHLTEAIKEENGQPFDPHFKINNAVSNIICSITFGERFEYQDSWFQQLLKLLDEVTYLEASKTCQLYNVFPWIMKFLPGPHQTLFSNWKKLKLFVSHMIDKHRKDWNPAETRDFIDAYLKEMSKHTGNPTSSFHEENLICSTLDLFFAGTETTSTTLRWALLYMALYPEIQEKVQAEIDRVIGQGQQPSTAARESMPYTNAVIHEVQRMGNIIPLNVPREVTVDTTLAGYHLPKGTMILTNLTALHRDPTEWATPDTFNPDHFLENGQFKKREAFMPFSIGKRACLGEQLARTELFIFFTSLMQKFTFRPPNNEKLSLKFRMGITISPVSHRLCAVPQV

SEQ ID NO: 11990 - protein, 453 aa, Homo sapiens
MLAAMGSLAAALWAVVHPRTLLLGTVAFLLAADFLKRRRPKNYPPGPWRLPFLGNFFLVDFEQSHLEVQLVGVGEGLIMSSGQAWKEQRRFTLTALRNFGLGKKSLEERIQEEAQHLTEAIKEENGQPFDPHFKINNAVSNIICSITFGERFEYQDSWFQQLLKLLDEVTYLEASKTCQLYNVFPWIMKFLPGPHQTLFSNWKKLKLFVSHMIDKHRKDWNPAETRDFIDAYLKEMSKHTGNPTSSFHEENLICSTLDLFFAGTETTSTTLRWALLYMALYPEIQEKVQAEIDRVIGQGQQPSTAARESMPYTNAVIHEVQRMGNIIPLNVPREVTVDTTLAGYHLPKGTMILTNLTALHRDPTEWATPDTFNPDHFLENGQFKKREAFMPFSIGKRACLGEQLARTELFIFFTSLMQKFTFRPPNNEKLSLKFRMGITISPVSHRLCAVPQV

SEQ ID NO: 11991 - protein, 541 aa, Homo sapiens
  VARIANT (1)...(541): Xaa = Any Amino Acid
MPGVIPSESNGLSRGSPSKKNRLSLKFFQKKETKRALDFTDSQENEEKASEYRASEIDQVVPAAQSSPINCEKRENLLPFVGLNNLGNTCYLNSILQVLYFCPGFKSGVKHLFNIISRKKEALKDEANQKDKGNCKEDSLASYELICSLQSLIISVEQLQASFLLNPEKYTDELATQPRRLLNTLRELNPMYEGYLQHDAQEVLQCILGNIQETCQLLKKEEVKNVAELPTKVEEIPHPKEEMNGINSIEMDSMRHSEDFKEKLPKGNGKRKSDTEFGNMKKKVKLSKEHQSLEENQRQTRSKRKATSDTLESPPKIIPKYISENESPRPSQKKSRVKINWLKSATKQPSILSKFCSLGKITTNQGVKGQSKENECDPEEDLGKCESDNTTNGCGLESPGNTVTPVNVNEVKPINKGEEQIGFELVEKLFQGQLVLRTRCLECESLTERREDFQDISVPVQEDELSKVEESSEISPEPKTEMKTLRWAISQFASVERIVGEDKYFCENCHHYTEAERSLLFDKMPEVITIHLKCFAASGLX

SEQ ID NO: 11992 - protein, 785 aa, Homo sapiens
MPGVIPSESNGLSRGSPSKKNRLSLKFFQKKETKRALDFTDSQENEEKASEYRASEIDQVVPAAQSSPINCEKRENLLPFVGLNNLGNTCYLNSILQVLYFCPGFKSGVKHLFNIISRKKEALKDEANQKDKGNCKEDSLASYELICSLQSLIISVEQLQASFLLNPEKYTDELATQPRRLLNTLRELNPMYEGYLQHDAQEVLQCILGNIQETCQLLKKEEVKNVAELPTKVEEIPHPKEEMNGINSIEMDSMRHSEDFKEKLPKGNGKRKSDTEFGNMKKKVKLSKEHQSLEENQRQTRSKRKATSDTLESPPKIIPKYISENESPRPSQKKSRVKINWLKSATKQPSILSKFCSLGKITTNQGVKGQSKENECDPEEDLGKCESDNTTNGCGLESPGNTVTPVNVNEVKPINKGEEQIGFELVEKLFQGQLVLRTRCLECESLTERREDFQDISVPVQEDELSKVEESSEISPEPKTEMKTLRWAISQFASVERIVGEDKYFCENCHHYTEAERSLLFDKMPEVITIHLKCFAASGLEFDCYGGGLSKINTPLLTPLKLSLEEWSTKPTNDSYGLFAVVMHSGITISSGHYTASVKVTDLNSLELDKGNFVVDQMCEIGKPEPLNEEEARGVVENYNDEEVSIRVGGNTQPSKVLNKKNVEAIGLLGGQKSKADYELYNKASNPDKVASTAFAENRNSETSDTTGTHESDRNKESSDQTGINISGFENKISYVVQSLKEYEGKWLLFDDSEVKVTEEKDFLNSLSPSTSPTSTPYLLFYKKL

SEQ ID NO: 11993 - protein, 785 aa, Homo sapiens; identical to SEQ ID NO: 11992

SEQ ID NO: 11994 - protein, 785 aa, Homo sapiens; identical to SEQ ID NO: 11992

SEQ ID NO: 11995 - protein, 785 aa, Homo sapiens; identical to SEQ ID NO: 11992

SEQ ID NO: 11996 - protein, 1084 aa, Homo sapiens
MSSQSHPDGLSGRDQPVELLNPARVNHMPSTVDVATALPLQVAPSAVPMDLRLDHQFSLPVAEPALREQQLQQELLALKQKQQIQRQILIAEFQRQHEQLSRQHEAQLHEHIKQQQEMLAMKHQQELLEHQRKLERHRQEQELEKQHREQKLQQLKNKEKGKESAVASTEVKMKLQEFVLNKKKALAHRNLNHCISSDPRYWYGKTQHSSLDQSSPPQSGVSTSYNHPVLGMYDAKDDFPLRKTASEPNLKLRSRLKQKVAERRSSPLLRRKDGPVVTALKKRPLDVTDSACSSAPGSGPSSPNNSSGSVSAENGIAPAVPSIPAETSLAHRLVAREGSAAPLPLYTSPSLPNITLGLPATGPSAGTAGQQDAERLTLPALQQRLSLFPGTHLTPYLSTSPLERDGGAAHSPLLQHMVLLEQPPAQAPLVTGLGALPLHAQSLVGADRVSPSIHKLRQHRPLGRTQSAPLPQNAQALQHLVIQQQHQQFLEKHKQQFQQQQLQMNKIIPKPSEPARQPESHPEETEEELREHQALLDEPYLDRLPGQKEAHAQAGVQVKQEPIESDEEEAEPPREVEPGQRQPSEQELLFRQQALLLEQQRIHQLRNYQASMEAAGIPVSFGGHRPLSRAQSSPASATFPVSVQEPPTKPRFTTGLVYDTLMLKHQCTCGSSSSHPEHAGRIQSIWSRLQETGLRGKCECIRGRKATLEELQTVHSEAHTLLYGTNPLNRQKLDSKKLLGSLASVFVRLPCGGVGVDSDTIWNEVHSAGAARLAVGCVVELVFKVATGELKNGFAVVRPPGHHAEESTPMGFCYFNSVAVAAKLLQQRLSVSKILIVDWDVHHGNGTQQAFYSDPSVLYMSLHRYDDGNFFPGSGAPDEVGTGPGVGFNVNMAFTGGLDPPMGDAEYLAAFRTVVMPIASEFAPDVVLVSSGFDAVEGHPTPLGGYNLSARCFGYLTKQLMGLAGGRIVLALEGGHDLTAICDASEACVSALLGNELDPLPEKVLQQRPNANAVRSMEKVMEIHSKYWRCLQRTTSTAGRSLIEAQTCENEEAETVTAMASLSVGVKPAEKRPDEEPMEEEPPL

SEQ ID NO: 11997 - protein, 793 aa, Homo sapiens
MGVWLNKDDYIRDLKRIILCFLIVYMAILVGTDQDFYSLLGVSKTASSREIRQAFKKLALKLHPDKNPNNPNAHGDFLKINRAYEVLKDEDLRKKYDKYGEKGLEDNQGGQYESWNYYRYDFGIYDDDPEIITLERREFDAAVNSGELWFVNFYSPGCSHCHDLAPTWRDFAKEVDGLLRIGAVNCGDDRMLCRMKGVNSYPSLFIFRSGMAPVKYHGDRSKESLVSFAMQHVRSTVTELWTGNFVNSIQTAFAAGIGWLITFCSKGGDCLTSQTRLRLSGMLDGLVNVGWMDCATQDNLCKSLDITTSTTAYFPPGATLNNKEKNSILFLNSLDAKEIYLEVIHNLPDFELLSANTLEDRLAHHRWLLFFHFGKNENSNDPELKKLKTLLKNDHIQVGRFDCSSAPDICSNLYVFQPSLAVFKGQGTKEYEIHHGKKILYDILAFAKESVNSHVTTLGPQNFPANDKEPWLVDFFAPWCPPCRALLPELRRASNLLYGQLKFGTLDCTVHEGLCNMYNIQAYPTTVVFNQSNIHEYEGHHSAEQILEFIEDLMNPSVVSLTPTTFNELVTQRKHNEVWMVDFYSPWCHPCQVLMPEWKRMARTLTGLINVGSIDCQQYHSFCAQENVQRYPEIRFFPPKSNKAYHYHSYNGWNRDAYSLRIWGLGFLPQVSTDLTPQTFSEKVLQGKNHWVIDFYAPWCGPCQNFAPEFELLARMIKGKVKAGKVDCQAYAQTCQKAGIRAYPTVKFYFYERAKRNFQEEQINTRDAKAIAALISEKLETLRNQGKRNKDEL

SEQ ID NO: 11998 - protein, 822 aa, Homo sapiens
MGVWLNKDDYIRDLKRIILCFLIVYMAILVGTDQDFYSLLGVSKTASSREIRQAFKKLALKLHPDKNPNNPNAHGDFLKINRAYEVLKDEDLRKKYDKYGEKGLEDNQGGQYESWNYYRYDFGIYDDDPEIITLERREFDAAVNSGELWFVNFYSPGCSHCHDLAPTWRDFAKEVDGLLRIGAVNCGDDRMLCRMKGVNSYPSLFIFRSGMAPVKYHGDRSKESLVSFAMQHVRSTVTELWTGNFVNSIQTAFAAGIGWLITFCSKGGDCLTSQTRLRLSGMLDGLVNVGWMDCATQDNLCKSLDITTSTTAYFPPGATLNNKEKNSILFLNSLDAKEIYLEVIHNLPDFELLSANTLEDRLAHHRWLLFFHFGKNENSNDPELKKLKTLLKNDHIQVGRFDCSSAPDICSNLYVFQPSLAVFKGQGTKEYEIHHGKKILYDILAFAKESVNSHVTTLGPQNFPANDKEPWLVDFFAPWCPPCRALLPELRRASNLLYGQLKFGTLDCTVHEGLCNMYNIQAYPTTVVFNQSNIHEYEGHHSAEQILEFIEDLMNPSVVSLTPTTFNELVTQRKHNEVWMVDFYSPWCHPCQVLMPEWKRMARTLTGLINVGSIDCQQYHSFCAQENVQRYPEIRFFPPKSNKAYHYHSYNGWNRDAYSLRIWGLGFLPQVSTDLTPQTFSEKVLQGKNHWVIDFYAPWCGPCQNFAPEFELLARMIKGKVKAGKVDCQAYAQTCQKAGIRAYPTVKFYFYERAKRNFQEEQINTRDAKAIAALISEKLETLRNQGKRNKVWTKPRVDFGKSWQKLAKSIFPIHYMHPETTK

SEQ ID NO: 11999 - protein, 747 aa, Homo sapiens
MGVWLNKDDYIRDLKRIILCFLIVYMAILVGTDQDFYSLLGVSKTASSREIRQAFKKLALKLHPDKNPNNPNAHGDFLKINRAYEVLKDEDLRKKYDKYGEKGLEDNQGGQYESWNYYRYDFGIYDDDPEIITLERREFDAAVNSGELWFVNFYSPGCSHCHDLAPTWRDFAKEVDGLLRIGAVNCGDDRMLCRMKGVNSYPSLFIFRSGMAPVKYHGDRSKESLVSFAMQHVRSTVTELWTGNFVNSIQTAFAAGIGWLITFCSKGGDCLTSQTRLRLSGMLFLNSLDAKEIYLEVIHNLPDFELLSANTLEDRLAHHRWLLFFHFGKNENSNDPELKKLKTLLKNDHIQVGRFDCSSAPDICSNLYVFQPSLAVFKGQGTKEYEIHHGKKILYDILAFAKESVNSHVTTLGPQNFPANDKEPWLVDFFAPWCPPCRALLPELRRASNLLYGQLKFGTLDCTVHEGLCNMYNIQAYPTTVVFNQSNIHEYEGHHSAEQILEFIEDLMNPSVVSLTPTTFNELVTQRKHNEVWMVDFYSPWCHPCQVLMPEWKRMARTLTGLINVGSIDCQQYHSFCAQENVQRYPEIRFFPPKSNKAYHYHSYNGWNRDAYSLRIWGLGFLPQVSTDLTPQTFSEKVLQGKNHWVIDFYAPWCGPCQNFAPEFELLARMIKGKVKAGKVDCQAYAQTCQKAGIRAYPTVKFYFYERAKRNFQEEQINTRDAKAIAALISEKLETLRNQGKRNKDEL

SEQ ID NO: 12000 - protein, 475 aa, Homo sapiens
MESKALLVLTLAVWLQSLTASRGGVAAADQRRDFIDIESKFALRTPEDTAEDTCHLIPGVAESVATCHFNHSSKTFMVIHGWTVTGMYESWVPKLVAALYKREPDSNVIVVDWLSRAQEHYPVSAGYTKLVGQDVARFINWMEEEFNYPLDNVHLLGYSLGAHAAGIAGSLTNKKVNRITGLDPAGPNFEYAEAPSRLSPDDADFVDVLHTFTRGSPGRSIGIQKPVGHVDIYPNGGTFQPGCNIGEAIRVIAERGLGDVDQLVKCSHERSIHLFIDSLLNEENPSKAYRCSSKEAFEKGLCLSCRKNRCNNLGYEINKVRAKRSSKMYLKTRSQMPYKVFHYQVKIHFSGTESETHTNQAFEISLYGTVAESENIPFTLPEVSTNKTYSFLIYTEVDIGELLMLKLKWKSDSYFSWSDWWSSPGFAIQKIRVKAGETQKKVIFCSREKVSHLQKGKAPAVFVKCHDKSLNKKSG

SEQ ID NO: 12001 - protein, 562 aa, Homo sapiens
MRPEPGGCCCRRTVRANGCVANGEVRNGYVRSSAAAAAAAAAGQIHHVTQNGGLYKRPFNEAFEETPMLVAVLTYVGYGVLTLFGYLRDFLRYWRIEKCHHATEREEQKDFVSLYQDFENFYTRNLYMRIRDNWNRPICSVPGARVDIMERQSHDYNWSFKYTGNIIKGVINMGSYNYLGFARNTGSCQEAAAKVLEEYGAGVCSTRQEIGNLDKHEELEELVARFLGVEAAMAYGMGFATNSMNIPALVGKGCLILSDELNHASLVLGARLSGATIRIFKHNNMQSLEKLLKDAIVYGQPRTRRPWKKILILVEGIYSMEGSIVRLPEVIALKKKYKAYLYLDEAHSIGALGPTGRGVVEYFGLDPEDVDVMMGTFTKSFGASGGYIGGKKELIDYLRTHSHSAVYATSLSPPVVEQIITSMKCIMGQDGTSLGKECVQQLAENTRYFRRRLKEMGFIIYGNEDSPVVPLMLYMPAKIGAFGREMLKRNIGVVVVGFPATPIIESRARFCLSAAHTKEILDTALKEIDEVGDLLQLKYSRHRLVPLLDRPFDETTYEETED

SEQ ID NO: 12002 - protein, 470 aa, Homo sapiens
MRPEPGGCCCRRTVRANGCVANGEVRNGYVRSSAAAAAAAAAGQIHHVTQNGGLYKRPFNEAFEETPMLVAVLTYVGYGVLTLFGYLRDFLRYWRIEKCHHATEREEQKDFVSLYQDFENFYTRNLYMRIRDNWNRPICSVPGARVDIMERQSHDYNWSFKYTGNIIKGVINMGSYNYLGFARNTGSCQEAAAKVLEEYGAGVCSTRQEIGNLDKHEELEELVARFLGVEAAMAYGMGFATNSMNIPALVGKGCLILSDELNHASLVLGARLSGATIRIFKHNNMQSLEKLLKDAIVYGQPRTRRPWKKILILVEGIYSMEGSIVRLPEVIALKKKYKAYLYLDEAHSIGALGPTGRGVVEYFGLDPEDVDVMMGTFTKSFGASGGYIGGKKELIDYLRTHSHSAVYATSLSPPVVEQIITSMKCIMGQDGTSLGNGITIHEVVQTRNTYHRFSPLSPVFSHQCLWIMLP

SEQ ID NO: 12003 - protein, 562 aa, Homo sapiens; identical to SEQ ID NO: 12001

SEQ ID NO: 12004 - protein, 216 aa, Homo sapiens
MQAGKPILYSYFRSSCSWRVRIALALKGIDYETVPINLIKDGGQQFSKDFQALNPMKQVPTLKIDGITIHQSLAIIEYLEEMRPTPRLLPQDPKKRASVRMISDLIAGGIQPLQNLSVLKQVGEEMQLTWAQNAITCGFNALEQILQSTAGIYCVGDEVTMADLCLVPQVANAERFKVDLTPYPTISSINKRLLVLEAFQVSHPCRQPDTPTELRA

SEQ ID NO: 12005 - protein, 421 aa, Homo sapiens [sequence omitted]

SEQ ID NO: 12006 - protein, 348 aa, Homo sapiens [sequence omitted]

SEQ ID NO: 12007 - protein, 250 aa, Homo sapiens
MDMLQDLESLQFEYGVPEEDRIWLYLQGRSRGLMIEACAHATFFCKLLYNLRASLNKNQSSRHLSIGSLNSATPEEFKVGIIGGGHLGKQLAGTLLQLGPIPAESLRISTRRPETLGELQKLGIKCFYHNADLVSWADVIFLCCLPSQLPNICVEIYTSLEKASIVYSFVAAIPLPRLKLLLNHTNILRPQYQYDEDSVSVWGANKGVIAALQDPTILQATCPYSPAGHGSTYFWHSFENYFPVGPLLSY

SEQ ID NO: 12008 - protein, 355 aa, Homo sapiens [sequence omitted]

SEQ ID NO: 12009 - protein, 504 aa, Homo sapiens
MEATGTWALLLALALLLLLTLALSGTRARGHLPPGPTPLPLLGNLLQLRPGALYSGLMRLSKKYGPVFTIYLGPWRPVVVLVGQEAVREALGGQAEEFSGRGTVAMLEGTFDGHGVFFSNGERWRQLRKFTMLALRDLGMGKREGEELIQAEARCLVETFQGTEGRPFDPSLLLAQATSNVVCSLLFGLRFSYEDKEFQAVVRAAGGTLLGVSSQGGQTYEMFSWFLRPLPGPHKQLLHHVSTLAAFTVRQVQQHQGNLDASGPARDLVDAFLLKMAQEEQNPGTEFTNKNMLMTVIYLLFAGTMTVSTTVGYTLLLLMKYPHVQKWVREELNRELGAGQAPSLGDRTRLPYTDAVLHEAQRLLALVPMGIPRTLMRTTRFRGYTLPQGTEVFPLLGSILHDPNIFKHPEEFNPDRFLDADGRFRKHEAFLPFSLGKRVCLGEGLAKAELFLFFTTILQAFSLESPCPPDTLSLKPTVSGLFNIPPAFQLQVRPTDLHSTTQTR

SEQ ID NO: 12010 - protein, 208 aa, Homo sapiens
MEATGTWALLLALALLLLLTLALSGTRARGHLPPGPTPLPLLGNLLQLRPGALYSGLMRLSKKYGPVFTIYLGPWRPVVVLVGQEAVREALGGQAEEFSGRGTVAMLEGTFDGHGGTKPRHRIHQQEHADDSHLFAVCWDDDGQHHGRLYPPAPDEIPSCPKARRSSPSLAPSCMTPTSSSTQKSSTQTVSWMQMDGSGSMRRSCPSP

SEQ ID NO: 12011 - protein, 445 aa, Homo sapiens
MAVAIAAARVWRLNRGLSQAALLLLRQPGARGLARSHPPRQQQQFSSLDDKPQFPGASAEFIDKLEFIQPNVISGIPIYRVMDRQGQIINPSEDPHLPKEKVLKLYKSMTLLNTMDRILYESQRQGRISFYMTNYGEEGTHVGSAAALDNTDLVFGQYREAGVLMYRDYPLELFMAQCYGNISDLGKGRQMPVHYGCKERHFVTISSPLATQIPQAVGAAYAAKRANANRVVICYFGEGAASEGDAHAGFNFAATLECPIIFFCRNNGYAISTPTSEQYRGDGIAARGPGYGIMSIRVDGNDVFAVYNATKEARRRAVAENQPFLIEAMTYRIGHHSTSDDSSAYRSVDEVNYWDKQDHPISRLRHYLLSQGWWDEEQEKAWRKQSRRKVMEAFEQAERKPKPNPNLLFSDVYQEMPAQLRKQQESLARHLQTYGEHYPLDHFDK

SEQ ID NO: 12012 - protein, 445 aa, Homo sapiens; identical to SEQ ID NO: 12011

SEQ ID NO: 12013 - protein, 840 aa, Homo sapiens [sequence omitted]

SEQ ID NO: 12014 - protein, 859 aa, Homo sapiens
MKLKDTKSRPKQSSCGKFQTKGIKVVGKWKEVKIDPNMFADGQMDDLVCFEELTDYQLVSPAKNPSSLFSKEAPKRKAQAVSEEEEEEEGKSSSPKKKIKLKKSKNVATEGTSTQKEFEVKDPELEAQGDDMVCDDPEAGEMTSENLVQTAPKKKKNKGKKGLEPSQSTAAKVPKKAKTWIPEVHDQKADVSAWKDLFVPRPVLRALSFLGFSAPTPIQALTLAPAIRDKLDILGAAETGSGKTLAFAIPMIHAVLQWQKRNAAPPPSNTEAPPGETRTEAGAETRSPGKAEAESDALPDDTVIESEALPSDIAAEARAKTGGTVSDQALLFGDDDAGEGPSSLIREKPVPKQNENEEENLDKEQTGNLKQELDDKSATCKAYPKRPLLGLVLTPTRELAVQVKQHIDAVARFTGIKTAILVGGMSTQKQQRMLNRRPEIVVATPGRLWELIKEKHYHLRNLRQLRCLVVDEADRMVEKGHFAELSQLLEMLNDSQYNPKRQTLVFSATLTLVHQAPARILHKKHTKKMDKTAKLDLLMQKIGMRGKPKVIDLTRNEATVETLTETKIHCETDEKDFYLYYFLMQYPGRSLVFANSISCIKRLSGLLKVLDIMPLTLHACMHQKQRLRNLEQFARLEDCVLLATDVAARGLDIPKVQHVIHYQVPRTSEIYVHRSGRTARATNEGLSLMLIGPEDVINFKKIYKTLKKDEDIPLFPVQTKYMDVVKERIRLARQIEKSEYRNFQACLHNSWIEQAAAALEIELEEDMYKGGKADQQEERRRQKQMKVLKKELRHLLSQPLFTESQKTKYPTQSGKPPLLVSAPSKSESALSCLSKQKKKKTKKPKEPQPEQPQPSTSAN

SEQ ID NO: 12015 - protein, 218 aa, Homo sapiens
RTSETAAVPQLQQQLQFRGGTSTHVLVRAGEEVPPLWQTQLPDWLPRGPQQCRRESWLGALAPPLTALLLPAWEKAGEGEILCAPSGERLCQLPHSNVEVQESEWRLTEAKGPTMGKESGWDSGRAAVAAVVGGVVAVGTVLVALSAMGFTSVGIAASSIAAKMMSTAAIANGGGVAAGSLVAILQSVGAAGLSVTSKVIGGFAGTALGAWLGSPPSS

SEQ ID NO: 12016 - protein, 217 aa, Homo sapiens [sequence omitted]

SEQ ID NO: 12017 - protein, 748 aa, Homo sapiens
MAFRVHLFYKNGQPFPAHRPVGLRVHISHVELAVEIPVTQEVLQEPNSNVVKVAFTVRKAGRYEITVKLGGLNVAYSPYYKIFQPGMVVPSKTKIVCHFSTLVLTCGQPHTLQIVPRDEYDNPTNNSMSLRDEHNYTLSIHELGPQEEESTGVSFEKSVTSNRQTFQVFLRLTLHSRGCFHACISYQNQPINNGEFDIIVLSEDEKNIVERNVSTSGVSIYFEAYLYNATNCSSTPWHLPPMHMTSSQRRPSTAVDEEDEDSPSECHTPEKVKKPKKVYCYVSPKQFSVKEFYLKIIPWRLYTFRVCPGTKFSYLGPDPVHKLLTLVVDDGIQPPVELSCKERNILAATFIRSLHKNIGGSETFQDKVNFFQRELRQVHMKRPHSKVTLKVSRHALLESSLKATRNFSISDWSKNFEVVFQDEEALDWGGPRREWFELICKALFDTTNQLFTRFSDNNQALVHPNPNRPAHLRLKMYEFAGRLVGKCLYESSLGGAYKQLVRARFTRSFLAQIIGLRMHYKYFETDDPEFYKSKVCFILNNDMSEMELVFAEEKYNKSGQLDKVVELMTGGAQTPVTNANKIFYLNLLAQYRLASQVKEEVEHFLKGLNELVPENLLAIFDENELELLMCGTGDISVSDFKAHAVVVGGSWHFREKVMRWFWTVVSSLTQEELARLLQFTTGSSQLPPGGFAALCPSFQIIAAPTHSTLPTAHTCFNQLCLPTYDSYEEVHRMLQLAISEGCEGFGML

SEQ ID NO: 12018 - protein, 388 aa, Homo sapiens
MFYVIGGITVSVVAFFFTIKFLFELAARVVSFLQNEDRERRGDRTIYDYVRGNYLDPRSCKVSWDWKDPYEVGHSMAFRVHLFYKNGQPFPAHRPVGLRVHISHVELAVEIPVTQEVLQEPNSNVVKVAFTVRKAGRYEITVKLGGLNVAYSPYYKIFQPGMVVPSKTKIVCHFSTLVLTCGQPHTLQIVPRDEYDNPTNNSMSLRDEHNYTLSIHELGPQEEESTGVSFEKSVTSNRQTFQVFLRLTLHSRGCFHACISYQNQPINNGEFDIIVLSEDEKNIVERNVSTSGVSIYFEAYLYNATNCSSTPWHLPPMHMTSSQRRPSTAVDEEDEDSPSECHTPEKVKKPKKVYCYVSPKQFSVKEFYLKIIPWRLYTFRVCPGTKVS

SEQ ID NO: 12019 - protein, 823 aa, Homo sapiens
MFYVIGGITVSVVAFFFTIKFLFELAARVVSFLQNEDRERRGDRTIYDYVRGNYLDPRSCKVSWDWKDPYEVGHSMAFRVHLFYKNGQPFPAHRPVGLRVHISHVELAVEIPVTQEVLQEPNSNVVKVAFTVRKAGRYEITVKLGGLNVAYSPYYKIFQPGMVVPSKTKIVCHFSTLVLTCGQPHTLQIVPRDEYDNPTNNSMSLRDEHNYTLSIHELGPQEEESTGVSFEKSVTSNRQTFQVFLRLTLHSRGCFHACISYQNQPINNGEFDIIVLSEDEKNIVERNVSTSGVSIYFEAYLYNATNCSSTPWHLPPMHMTSSQRRPSTAVDEEDEDSPSECHTPEKVKKPKKVYCYVSPKQFSVKEFYLKIIPWRLYTFRVCPGTKFSYLGPDPVHKLLTLVVDDGIQPPVELSCKERNILAATFIRSLHKNIGGSETFQDKVNFFQRELRQVHMKRPHSKVTLKVSRHALLESSLKATRNFSISDWSKNFEVVFQDEEALDWGGPRREWFELICKALFDTTNQLFTRFSDNNQALVHPNPNRPAHLRLKMYEFAGRLVGKCLYESSLGGAYKQLVRARFTRSFLAQIIGLRMHYKYFETDDPEFYKSKVCFILNNDMSEMELVFAEEKYNKSGQLDKVVELMTGGAQTPVTNANKIFYLNLLAQYRLASQVKEEVEHFLKGLNELVPENLLAIFDENELELLMCGTGDISVSDFKAHAVVVGGSWHFREKVMRWFWTVVSSLTQEELARLLQFTTGSSQLPPGGFAALCPSFQIIAAPTHSTLPTAHTCFNQLCLPTYDSYEEVHRMLQLAISEGCEGFGML

SEQ ID NO: 12020 - protein, 453 aa, Homo sapiens
MLSRSRCVSRAFSRSLSAFQKGNCPLGRRSLPGVSLCQGPGYPNSRKVVINNSVFSVRFFRTTAVCKDDLVTVKTPAFAESVTEGDVRWEKAVGDTVAEDEVVCEIETDKTSVQVPSPANGVIEALLVPDGGKVEGGTPLFTLRKTGAAPAKAKPAEAPAAAAPKAEPTAAAVPPPAAPIPTQMPPVPSPSQPPSGKPVSAVKPTVAPPLAEPGAGKGLRSEHREKMNRMRQRIAQRLKEAQNTCAMLTTFNEIDMSNIQEMRARHKEAFLKKHNLKLGFMSAFVKASAFALQEQPVVNAVIDDTTKEVVYRDYIDISVAVATPRGLVVPVIRNVEAMNFADIERTITELGEKARKNELAIEDMDGGTFTISNGGVFGSLFGTPIINPPQSAILGMHGIFDRPVAIGGKVEVRPMMYVALTYDHRLIDGREAVTFLRKIKAAVEDPRVLLLDL

SEQ ID NO: 12021 - protein, 453 aa, Homo sapiens; identical to SEQ ID NO: 12020

SEQ ID NO: 12022 - protein, 261 aa, Homo sapiens
MSEPIRVLVTGAAGQIAYSLLYSIGNGSVFGKDQPIILVLLDITPMMGVLDGVLMELQDCALPLLKDVIATDKEDVAFKDLDVAILVGSMPRREGMERKDLLKANVKIFKSQGAALDKYAKKSVKVIVVGNPANTNCLTASKSAPSIPKENFSCLTRLDHNRAKAQIALKLGVTANDVKNVIIWGNHSSTQYPDVNHAKVKLQGKEVGVYEALKDDSWLKGEFTVQQRGAAVIKARKLSSAMSAAKAICDHVRDIWFGTPE

SEQ ID NO: 12023 - protein, 73 aa, Homo sapiens [sequence omitted]

SEQ ID NO: 12024 - protein, 289 aa, Homo sapiens
MMGVLDGVLMELQDCALPLLKDVIATDKEDVAFKDLDVAILVGSMPRREGMERKDLLKANVKIFKSQGAALDKYAKKSVKVIVVGNPANTNCLTASKSAPSIPKENFSCLTRLDHNRAKAQIALKLGVTANDVKNVIIWGNHSSTQYPDVNHAKVKLQGKEVGVYEALKDDSWLKGEFVTTVQQRGAAVIKARKLSSAMSAAKAICDHVRDIWFGTPEGEFVSMGVISDGNSYGVPDDLLYSFPVVIKNKTWKFVEGLPINDFSREKMDLTAKELTEEKESAFEFLSSA

SEQ ID NO: 12025 - protein, 86 aa, Homo sapiens
  VARIANT (1)...(86): Xaa = Any Amino Acid
MRRCSYFPKDVTVFDKDDKSEPIRVLVTGAAGQIAYSLLYSIGNGSVFGKDQPIILVLLDITPMMGVLDGVLMELQDCALPLLKGX

SEQ ID NO: 12026 - protein, 334 aa, Homo sapiens
MSEPIRVLVTGAAGQIAYSLLYSIGNGSVFGKDQPIILVLLDITPMMGVLDGVLMELQDCALPLLKDVIATDKEDVAFKDLDVAILVGSMPRREGMERKDLLKANVKIFKSQGAALDKYAKKSVKVIVVGNPANTNCLTASKSAPSIPKENFSCLTRLDHNRAKAQIALKLGVTANDVKNVIIWGNHSSTQYPDVNHAKVKLQGKEVGVYEALKDDSWLKGEFVTTVQQRGAAVIKARKLSSAMSAAKAICDHVRDIWFGTPEGEFVSMGVISDGNSYGVPDDLLYSFPVVIKNKTWKFVEGLPINDFSREKMDLTAKELTEEKESAFEFLSSA

SEQ ID NO: 12027 - protein, 347 aa, Homo sapiens
MNSFNTDEDTKKILQKYNHCRVKIYTFNQSRYPRINKESLLPVAKDVSYSGENTEAWYPPGHGDIYASFYNSGLLDTFIGEGKEYIFVSNIDNLGATVDLYILNHLMNPPNGKRCEFVMEVTNKTRADVKGGTLTQYEGKLRLVEIAQVPKAHVDEFKSVSKFKIFNTNNLWISLAAVKRLQEQNAIDMEIIVNAKTLDGGLNVIQLETAVGAAIKSFENSLGINVPRSRFLPVKTTSDLLLVMSNLYSLNAGSLTMSEKREFPTVPLVKLGSSFTKVQDYLRRFESIPDMLELDHLTVSGDVTFGKNVSLKGTVIIIANHGDRIDIPPGAVLENKIVSGNLRILDH

SEQ ID NO: 12028 - protein, 490 aa, Homo sapiens [sequence omitted]

SEQ ID NO: 12029 - protein, 347 aa, Homo sapiens; identical to SEQ ID NO: 12027

SEQ ID NO: 12030 - protein, 347 aa, Homo sapiens; identical to SEQ ID NO: 12027

SEQ ID NO: 12031 - protein, 151 aa, Homo sapiens [sequence omitted]

SEQ ID NO: 12032 - protein, 332 aa, Homo sapiens
MLAVHFDKPGGPENLYVKEVAKPSPGEGEVLLKVAASALNRADLMQRQGQYDPPPGASNILGLEASGHVAELGPGCQGHWKIGDTAMALLPGGGQAQYVTVPEGLLMPIPEGLTLTQAAAIPEAWLTAFQLLHLVGNVQAGDYVLIHAGLSGVGTAAIQLTRMAGAIPLVTAGSQKKLQMAEKLGAAAGFNYKKEDFSEATLKFTKGAGVNLILDCIGGSYWEKNVNCLALDGRWVLYGLMGGGDINGPLFSKLLFKRGSLITSLLRSRDNKYKQMLVNAFTEQILPHFSTEGPQRLLPVLDRIYPVTEIQEAHKYMEANKNIGKIVLELPQ

SEQ ID NO: 12033 - protein, 243 aa, Homo sapiens
MTHLQEPATFWDLRHLDMWQSWGLAARDTGRSGTQPWLCSPVGARLRNVQAGDYVLIHAGLSGVGTAAIQLTRMAGAIPLVTAGSQKKLQMAEKLGAAAGFNYKKEDFSEATLKFTKGAGVNLILDCIGGSYWEKNVNCLALDGRWVLYGLMGGGDINGPLFSKLLFKRGSLITSLLRSRDNKYKQMLVNAFTEQILPHFSTEGPQRLLPVLDRIYPVTEIQEAHKYMEANKNIGKIVLELPQ

SEQ ID NO: 12034 - protein, 332 aa, Homo sapiens; identical to SEQ ID NO: 12032

SEQ ID NO: 12035 - protein, 332 aa, Homo sapiens; identical to SEQ ID NO: 12032

SEQ ID NO: 12036 - protein, 308 aa, Homo sapiens [sequence omitted]

SEQ ID NO: 12037 - protein, 434 aa, Homo sapiens
MSILKIHAREIFDSRGNPTVEVDLFTSKGLFRAAVPSGASTGIYEALELRDNDKTRYMGKGVSKAVEHINKTIAPALVSKKLNVTEQEKIDKLMIEMDGTENKSKFGANAILGVSLAVCKAGAVEKGVPLYRHIADLAGNSEVILPVPAFNVINGGSHAGNKLAMQEFMILPVGAANFREAMRIGAEVYHNLKNVIKEKYGKDATNVGDEGGFAPNILENKEGLELLKTAIGKAGYTDKVVIGMDVAASEFFRSGKYDLDFKSPDDPSRYISPDQLADLYKSFIKDYPVVSIEDPFDQDDWGAWQKFTASAGIQVVGDDLTVTNPKRIAKAVNEKSCNCLLLKVNQIGSVTESLQACKLAQANGWGVMVSHRSGETEDTFIADLVVGLCTGQIKTGAPCRSERLAKYNQLLRIEEELGSKAKFAGRNFRNPLAK

SEQ ID NO: 12038 - protein, 434 aa, Homo sapiens; identical to SEQ ID NO: 12037

SEQ ID NO: 12039 - protein, 434 aa, Homo sapiens; identical to SEQ ID NO: 12037

SEQ ID NO: 12040 - protein, 298 aa, Homo sapiens
MVTPALQMKKPKQFCRRMGQKKQRPARAGQPHSSSDAAQAPAEQPHSSSDAAQAPCPRERCLGPPTTPGPYRSIYFSSPKGHLTRLGLEFFDQPAVPLARAFLGQVLVRRLPNGTELRGRIVETEAYLGPEDEAAHSRGGRQTPRNRGMFMKPGTLYVYIIYGMYFCMNISSQGDGACVLLRALEPLEGLETMRQLRSTLRKGTASRVLKDRELCSGPSKLCQALAINKSFDQRDLAQDEAVWLERGPLEPSEPAVVAAARVGVGHAGEWARKPLRFYVRGSPWVSVVDRVAEQDTQA

SEQ ID NO: 12041 - protein, 298 aa, Homo sapiens; identical to SEQ ID NO: 12040

SEQ ID NO: 12042 - protein, 299 aa, Homo sapiens
MVTPALQMKKPKQVFCRRMGQKKQRPARAGQPHSSSDAAQAPAEQPHSSSDAAQAPCPRERCLGPPTTPGPYRSIYFSSPKGHLTRLGLEFFDQPAVPLARAFLGQVLVRRLPNGTELRGRIVETEAYLGPEDEAAHSRGGRQTPRNRGMFMKPGTLYVYIIYGMYFCMNISSQGDGACVLLRALEPLEGLETMRQLRSTLRKGTASRVLKDRELCSGPSKLCQALAINKSFDQRDLAQDEAVWLERGPLEPSEPAVVAAARVGVGHAGEWARKPLRFYVRGSPWVSVVDRVAEQDTQA

SEQ ID NO: 12043 - protein, 281 aa, Homo sapiens
MGQKKQRPARAGQPHSSSDAAQAPAEQPHSSSDAAQAPCPRERCLGPPTTPGPYRSIYFSSPKGHLTRLGLEFFDQPAVPLARAFLGQVLVRRLPNGTELRGRIVETEAYLGPEDEAAHSRGGRQTPRNRGMFMKPGTLYVYIIYGMYFCMNISSQGDGACVLLRALEPLEGLETMRQLRSTLRKGTASRVLKDRELCSGPSKLCQALAINKSFDQRDLAQDEAVWLERGPLEPSEPAVVAAARVGVGHAGEWARKPLRFYVRGSPWVSVVDRVAEQDTQA

SEQ ID NO: 12044 - protein, 760 aa, Homo sapiens [sequence omitted]

SEQ ID NO: 12045 - protein, 581 aa, Homo sapiens
MVLKAFFPTCCVSTDSGLLVGRWVPEQSSAVVLAVLHFPFIPIQVKQLLAQVRQASQVGVAVLGTWCHCRQEPEESLGRFLESLGAVFPHEPWLRLCRERGGTFWSCEATHRQAPTAPGAPGEDQVMLIFYDQRQVLLSQLHLPTVLPDRQAGATTASTGGLAAVFDTVARSEVLFRSDRFDEGPVRLSHWQSEGVEASILAELARRASGPICLLLASLLSLVSAVSACRVFKLWPLSFLGSKLSTCEQLRHRLEHLTLIFSTRKAENPAQLMRKANTVASVLLDVALGLMLLSWLHGRSRIGHLADALVPVADHVAEELQHLLQWLMGAPAGLKMNRALDQVLGRFFLYHIHLWISYIHLMSPFVEHILWHVGLSACLGLTVALSLLSDIIALLTFHIYCFYVYGARLYCLKIHGLSSLWRLFRGKKWNVLRQRVDSCSYDLDQLFIGTLLFTILLFLLPTTALYYLVFTLLRLLVVAVQGLIHLLVDLINSLPLYSLGLRLCRPYRLAAGVKFRVLRHEAGRPLRLLMQINPLPYSRVVHTYRLPSCGCHPKHSWGALCRKLFLGELIYPWRQRGDKQD

SEQ ID NO: 12046 - protein, 299 aa, Homo sapiens
MVLKAFFPTCCVSTDSGLLVGRWVPEQSSAVVLAVLHFPFIPIQVKQLLAQVRQASQVGVAVLGTWCHCRQEPEESLGRFLESLGAVFPHEPWLRLCRERGGTFWSCEATHRQAPTAPGAPGEDQVMLIFYDQRQVLLSQLHLPTVLPDRQAGATTASTGGLAAVFDTVARSEVLFRSDRFDEGPVRLSHWQSEGVEASILAELARRASGPICLLLASLLSLVSAVSACRVFKLWPLSFLGSKLSTCEQLRHRLEHLTLIFSTRKAENPAQLMRCGPALVSAGLGACPLAPSPSPSAPR

SEQ ID NO: 12047 - protein, 760 aa, Homo sapiens [sequence omitted]

SEQ ID NO: 12048 - protein, 581 aa, Homo sapiens; identical to SEQ ID NO: 12045

SEQ ID NO: 12049 - protein, 581 aa, Homo sapiens; identical to SEQ ID NO: 12045

SEQ ID NO: 12050 - protein, 168 aa, Homo sapiens
MSYFLWEDDCPDPPALFSGDALSVAGCGSCLEGSAQQMYQSLAELGTLPPETKVFCGHEHTLSNLEFAQKVEPCNDHVRAKLSWAKKRDEDDVPTVPSTLGEERLYNPFLRVAEEPVRKFTGKAVPADVLEALCKERARFEQAGEPRQPQARALLALQWGLLSAAPHD

SEQ ID NO: 12051 - protein, 282 aa, Homo sapiens
MKVKVIPVLEDNYMYLVIEELTREAVAVDVAVPKRLLEIVGREGVSLTAVLTTHHHWDHARGNPELARLRPGLAVLGADERIFSLTRRLAHGEELRFGAIHVRCLLTPGHTAGHMSYFLWEDDCPDPPALFSGDALSVAGCGSCLEGSAQQMYQSLAELGTLPPETKVFCGHEHTLSNLEFAQKVEPCNDHVRAKLSWAKKRDEDDVPTVPSTLGEERLYNPFLRVAEEPVRKFTGKAVPADVLEALCKERARFEQAGEPRQPQARALLALQWGLLSAAPHD

SEQ ID NO: 12052 - protein, 131 aa, Homo sapiens
MYQSLAELGTLPPETKVFCGHEHTLSNLEFAQKVEPCNDHVRAKLSWAKKRDEDDVPTVPSTLGEERLYNPFLRVAEEPVRKFTGKAVPADVLEALCKERARFEQAGEPRQPQARALLALQWGLLSAAPHD

SEQ ID NO: 12053 - protein, 282 aa, Homo sapiens; identical to SEQ ID NO: 12051

SEQ ID NO: 12054 - protein, 273 aa, Homo sapiens
MKVKVIPVLEDNYMYLVIEELTREAVAVDVAVPKRLLEIVGREGVSLTAVLTTHHHWDHARGNPELARLRPGLAVLGADERIFSLTRRLAHGEELRFGAIHVRCLLTPGHTAGHMSYFLWEDDCPDPPALFSGDALSVAGCGSCLEGSAQQMYQSLAELGTLPPETKVFCGHEHTLSNLEFAQKVEPCNDHKRDEDDVPTVPSTLGEERLYNPFLRVAEEPVRKFTGKAVPADVLEALCKERARFEQAGEPRQPQARALLALQWGLLSAAPHD

SEQ ID NO: 12055 - protein, 227 aa, Homo sapiens
MKVKVIPVLEDNYMYLVIEELTREAVAVDVAVPKRLLEIVGREGVSLTAVLTTHHHWDHARGNPELARLRPGLAVLGADERIFSLTRRLAHGEELRFGAIHVRCLLTPGHTAGHMSYFLWEDDCPDPPALFSGDALSVAGCGSCLEGSAQQMYQSLAELGTLPPETKVFCGHEHTLSNLEFAQKVEPCNDHVRAKLSWAKKRDEDDVPTVPSTLGEERLYNPFLRVA

SEQ ID NO: 12056 - protein, 221 aa, Homo sapiens
MTTQLRVVHLLPLLLACFVQTSPKQEKMKMDCHKDEKGTIYDYEAIALNKNEYVSFKQYVGKHILFVNVATYCGLTAQYPELNALQEELKPYGLVVLGFPCNQFGKQEPGDNKEILPGLKYVRPGGGFVPSFQLFEKGDVNGEKEQKVFSFLKHSCPHPSEILGTFKSISWDPVKVHDIRWNFEKFLVGPDGIPVMRWSHRATVSSVKTDILAYLKQFKTK

SEQ ID NO: 12057 - protein, 100 aa, Homo sapiens
MTTQLRVVHLLPLLLACFVQTSPKQEKMKMDCHKDEKGTIYDYEAIALNKNEYVSFKQYVGKHILFVNVATYCGLTAQYPGMSVQGEDLYLVSSFLRKGM

SEQ ID NO: 12058 - protein, 776 aa, Homo sapiens
MALSSEPAEMPRQFPKLNISEVDEQVRLLAEKVFAKVLREEDSKDALSLFTVPEDCPIGQKEAKERELQKELAEQKSVETAKRKKSFKMIRSQSLSLQMPPQQDWKGPPAASPAMSPTTPVVTGATSLPTPAPYAMPEFQRVTISGDYCAGITLEDYEQAAKSLAKALMIREKYARLAYHRFPRITSQYLGHPRADTAPPEEGLPDFHPPPLPQEDPYCLDDAPPNLDYLVHMQGGILFVYDNKKMLEHQEPHSLPYPDLETYTVDMSHILALITDGPTKTYCHRRLNFLESKFSLHEMLNEMSEFKELKSNPHRDFYNVRKVDTHIHAAACMNQKHLLRFIKHTYQTEPDRTVAEKRGRKITLRQVFDGLHMDPYDLTVDSLDVHAGRQTFHRFDKFNSKYNPVGASELRDLYLKTENYLGGEYFARMVKEVARELEESKYQYSEPRLSIYGRSPEEWPNLAYWFIQHKVYSPNMRWIIQVPRIYDIFRSKKLLPNFGKMLENIFLPLFKATINPQDHRELHLFLKYVTGFDSVDDESKHSDHMFSDKSPNPDVWTSEQNPPYSYYLYYMYANIMVLNNLRRERGLSTFLFRPHCGEAGSITHLVSAFLTADNISHGLLLKKSPVLQYLYYLAQIPIAMSPLSNNSLFLEYSKNPLREFLHKGLHVSLSTDDPMQFHYTKEALMEEYAIAAQVWKLSTCDLCEIARNSVLQSGLSHQEKQKFLGQNYYKEGPEGNDIRKTNVAQIRMAFRYETLCNELSFLSDAMKSEEITALTN

SEQ ID NO: 12059 - protein, 767 aa, Homo sapiens
MPRQFPKLNISEVDEQVRLLAEKVFAKVLREEDSKDALSLFTVPEDCPIGQKEAKERELQKELAEQKSVETAKRKKSFKMIRSQSLSLQMPPQQDWKGPPAASPAMSPTTPVVTGATSLPTPAPYAMPEFQRVTISGDYCAGITLEDYEQAAKSLAKALMIREKYARLAYHRFPRITSQYLGHPRADTAPPEEGLPDFHPPPLPQEDPYCLDDAPPNLDYLVHMQGGILFVYDNKKMLEHQEPHSLPYPDLETYTVDMSHILALITDGPTKTYCHRRLNFLESKFSLHEMLNEMSEFKELKSNPHRDFYNVRKVDTHIHAAACMNQKHLLRFIKHTYQTEPDRTVAEKRGRKITLRQVFDGLHMDPYDLTVDSLDVHAGRQTFHRFDKFNSKYNPVGASELRDLYLKTENYLGGEYFARMVKEVARELEESKYQYSEPRLSIYGRSPEEWPNLAYWFIQHKVYSPNMRWIIQVPRIYDIFRSKKLLPNFGKMLENIFLPLFKATINPQDHRELHLFLKYVTGFDSVDDESKHSDHMFSDKSPNPDVWTSEQNPPYSYYLYYMYANIMVLNNLRRERGLSTFLFRPHCGEAGSITHLVSAFLTADNISHGLLLKKSPVLQYLYYLAQIPIAMSPLSNNSLFLEYSKNPLREFLHKGLHVSLSTDDPMQFHYTKEALMEEYAIAAQVWKLSTCDLCEIARNSVLQSGLSHQEKQKFLGQNYYKEGPEGNDIRKTNVAQIRMAFRYETLCNELSFLSDAMKSEEITALTN

SEQ ID NO: 12060 - protein, 774 aa, Homo sapiens
MEPGSAEMPRQFPKLNISEVDEQVRLLAEKVFAKVLREEDSKDALSLFTVPEDCPIGQKEAKERELQKELAEQKSVETAKRKKSFKMIRSQSLSLQMPPQQDWKGPPAASPAMSPTTPVVTGATSLPTPAPYAMPEFQRVTISGDYCAGITLEDYEQAAKSLAKALMIREKYARLAYHRFPRITSQYLGHPRADTAPPEEGLPDFHPPPLPQEDPYCLDDAPPNLDYLVHMQGGILFVYDNKKMLEHQEPHSLPYPDLETYTVDMSHILALITDGPTKTYCHRRLNFLESKFSLHEMLNEMSEFKELKSNPHRDFYNVRKVDTHIHAAACMNQKHLLRFIKHTYQTEPDRTVAEKRGRKITLRQVFDGLHMDPYDLTVDSLDVHAGRQTFHRFDKFNSKYNPVGASELRDLYLKTENYLGGEYFARMVKEVARELEESKYQYSEPRLSIYGRSPEEWPNLAYWFIQHKVYSPNMRWIIQVPRIYDIFRSKKLLPNFGKMLENIFLPLFKATINPQDHRELHLFLKYVTGFDSVDDESKHSDHMFSDKSPNPDVWTSEQNPPYSYYLYYMYANIMVLNNLRRERGLSTFLFRPHCGEAGSITHLVSAFLTADNISHGLLLKKSPVLQYLYYLAQIPIAMSPLSNNSLFLEYSKNPLREFLHKGLHVSLSTDDPMQFHYTKEALMEEYAIAAQVWKLSTCDLCEIARNSVLQSGLSHQEKQKFLGQNYYKEGPEGNDIRKTNVAQIRMAFRYETLCNELSFLSDAMKSEEITALTN

SEQ ID NO: 12061 - protein, 292 aa, Homo sapiens
MAFMKKYLLPILGLFMAYYYYSANEEFRPEMLQGKKVIVTGASKGIGREMAYHLAKMGAHVVVTARSKETLQKVVSHCLELGAASAHYIAGTMEDMTFAEQFVAQAGKLMGGLDMLILNHITNTSLNLFHDDIHHVRKSMEVNFLSYVVLTVAALPMLKQSNGSIVVVSSLAGKVAYPMVAAYSASKFALDGFFSSIRKEYSVSRVNVSITLCVLGLIDTETAMKAVSGIVHMQAAPKEECALEIIKGGALRQEEVYYDSSLWTTLLIRNPCRKILEFLYSTSYNMDRFINK

SEQ ID NO: 12062 - protein, 292 aa, Homo sapiens; identical to SEQ ID NO: 12061

SEQ ID NO: 12063 - protein, 343 aa, Homo sapiens
MAEQLSPGKAVDQVCTFLFKKPGRKGAAGRRKRPACDPEPGESGSSSDEGCTVVRPEKKRVTHNPMIQKTRDSGKQKAAYGDLSSEEEEENEPESLGVVYKSTRSAKPVGPEDMGATAVYELDTEKERDAQAIFERSQKIQEELRGKEDDKIYRGINNYQKYMKPKDTSMGNASSGMVRKGPIRAPEHLRATVRWDYQPDICKDYKETGFCGFGDSCKFLHDRSDYKHGWQIERELDEGRYGVYEDENYEVGSDDEEIPFKCFICRQSFQNPVVTKCRHYFCESCALQHFRTTPRCYVCDQQTNGVFNPAKELIAKLEKHRATGEGGASDLPEDPDEDAIPIT

SEQ ID NO: 12064 - protein, 853 aa, Homo sapiens
MLPRSPPLPRGNLWWREEFGSFRAGVESSWEPPRDFGGGSSLAAGMAGTVVLDDVELREAQRDYLDFLDDEEDQGIYQSKVRELISDNQYRLIVNVNDLRRKNEKRANRLLNNAFEELVAFQRALKDFVASIDATYAKQYEEFYVGLEGSFGSKHVSPRTLTSCFLSCVVCVEGIVTKCSLVRPKVVRSVHYCPATKKTIERRYSDLTTLVAFPSSSVYPTKDEENNPLETEYGLSVYKDHQTITIQEMPEKAPAGQLPRSVDVILDDDLVDKAKPGDRVQVVGTYRCLPGKKGGYTSGTFRTVLIACNVKQMSKDAQPSFSAEDIAKIKKFSKTRSKDIFDQLAKSLAPSIHGHDYVKKAILCLLLGGVERDLENGSHIRGDINILLIGDPSVAKSQLLRYVLCTAPRAIPTTGRGSSGVGLTAAVTTDQETGERRLEAGAMVLADRGVVCIDEFDKMSDMDRTAIHEVMEQGRVTIAKAGIHARLNARCSVLAAANPVYGRYDQYKTPMENIGLQDSLLSRFDLLFIMLDQMDPEQDREISDHVLRMHRYRAPGEQDGDAMPLGSAVDILATDDPNFSQEDQQDTQIYEKHDNLLHGTKKKKEKMVSAAFMKKYIHVAKIIKPVLTQESATYIAEEYSRLRSQDSMSSDTARTSPVTARTLETLIRLATAHAKARMSKTVDLQDAEEAVELVQYAYFKKVLEKEKKRKKRSEDESETEDEEEKSQEDQEQKRKRRKTRQPDAKDGDSYDPYDFSDTEEEMPQVHTPKTADSQETKESQKVELSESRLKAFKVALLDVFREAHAQSIGMNRLTESINRDSEEPFSSVEIQAALSKMQDDNQVMVSEGIIFLI

SEQ ID NO: 12065 - protein, 198 aa, Homo sapiens
MDSLQKQDLRRPKIHGAVQASPYQPPTLASLQRLLWVRQAATLNHIDEVWPSLFLGDAYAARDKSKLIQLGITHVVNAAAGKFQVDTGAKFYRGMSLEYYGIEADDNPFFDLSVYFLPVARYIRAALSVPQGRVLVHCAMGVSRSATLVLAFLMICENMTLVEAIQTVQAHRNICPNSGFLRQLQVLDNRLGRETGRF

SEQ ID NO: 12066 - protein, 188 aa, Homo sapiens
MAETSLPELGGEDKATPCPSILELEELLRAGKSSCSRVDEVWPNLFIGDAATANNRFELWKLGITHVLNAAHKGLYCQGGPDFYGSSVSYLGVPAHDLPDFDISAYFSSAADFIHRALNTPGAKVLVHCVVGVSRSATLVLAYLMLHQRLSLRQAVITVRQHRWVFPNRGFLHQLCRLDQQLRGAGQS

SEQ ID NO: 12067 - protein, 188 aa, Homo sapiens; identical to SEQ ID NO: 12066

SEQ ID NO: 12068 - protein, 198 aa, Homo sapiens; identical to SEQ ID NO: 12065

SEQ ID NO: 12069 - protein, 291 aa, Homo sapiens
MGLCHFATLALILLVLLEALAQADTQKMVEAQRGVGPRACYSIWLLLAPTPPLSHCLQSPQKQHQVCGDRRLKASSTNCPSEKCTAWARYSHRMDSLQKQDLRRPKIHGAVQASPYQPPTLASLQRLLWVRQAATLNHIDEVWPSLFLGDAYAARDKSKLIQLGITHVVNAAAGKFQVDTGAKFYRGMSLEYYGIEADDNPFFDLSVYFLPVARYIRAALSVPQGRVLVHCAMGVSRSATLVLAFLMICENMTLVEAIQTVQAHRNICPNSGFLRQLQVLDNRLGRETGRF

SEQ ID NO: 12070 - protein, 617 aa, Homo sapiens
MRCLAARVNYKTLIIICALFTLVTVLLWNKCSSDKAIQFPRRSSSGFRVDGFEKRAAASESNNYMNHVAKQQSEEAFPQEQQKAPPVVGGFNSNVGSKVLGLKYEEIDCLINDEHTIKGRREGNEVFLPFTWVEKYFDVYGKVVQYDGYDRFEFSHSYSKVYAQRAPYHPDGVFMSFEGYNVEVRDRVKCISGVEGVPLSTQWGPQGYFYPIQIAQYGLSHYSKNLTEKPPHIEVYETAEDRDKNKPNDWTVPKGCFMANVADKSRFTNVKQFIAPETSEGVSLQLGNTKDFIISFDLKFLTNGSVSVVLETTEKNQLFTIHYVSNAQLIAFKERDIYYGIGPRTSWSTVTRDLVTDLRKGVGLSNTKAVKPTKIMPKKVVRLIAKGKGFLDNITISTTAHMAAFFAASDWLVRNQDEKGGWPIMVTRKLGEGFKSLEPGWYSAMAQGQAISTLVRAYLLTKDHIFLNSALRATAPYKFLSEQHGVKAVFMNKHDWYEEYPTTPSSFVLNGFMYSLIGLYDLKETAGEKLGKEARSLYERGMESLKAMLPLYDTGSGTIYDLRHFMLGIAPNLARWDYHTTHINQLQLLSTIDESPVFKEFVKRWKSYLKGSRAKHN

SEQ ID NO: 12071 - protein, 492 aa, Homo sapiens
MAVLLETTLGDVVIDLYTEERPRACLNFLKLCKIKYYNYCLIHNVQRDFIIQTGDPTGTGRGGESIFGQLYGDQASFFEAEKVPRIKHKKKGTVSMVNNGSDQHGSQFLITTGENLDYLDGVHTVFGEVTEGMDIIKKINETFVDKDFVPYQDIRINHTVILDDPFDDPPDLLIPDRSPEPTREQLDSGRIGADEEIDDFKGRSAEEVEEIKAEKEAKTQAILLEMVGDLPDADIKPPENVLFVCKLNPVTTDEDLEIIFSRFGPIRSCEVIRDWKTGESLCYAFIEFEKEEDCEKAFFKMDNVLIDDRRIHVDFSQSVAKVKWKGKGGKYTKSDFKEYEKEQDKPPNLVLKDKVKPKQDTKYDLILDEQAEDSKSSHSHTSKKHKKKTHHCSEEKEDEDYMPIKNTNQDIYREMGFGHYEEEESCWEKQKSEKRDRTQNRSRSRSRERDGHYSNSHKSKYQTDLYERERSKKRDRSRSPKKSKDKEKSKYR

SEQ ID NO: 12072 - protein, 465 aa, Homo sapiens
  VARIANT (1)...(465): Xaa = Any Amino Acid
MAVLLETTLGDVVIDLYTEERPRACLNFLKLCKIKYYNYCLIHNVQRDFIIQTGDPTGTGRGGESIFGQLYGDQASFFEAEKVPRIKHKKKGTVSMVNNGSDQHGSQFLITTGENLDYLDGVHTVFGEVTEGMDIIKKINETFVDKDFVPYQDIRINHTVILDDPFDDPPDLLIPDRSPEPTREQLDSGRIGADEEIDDFKGRSAEEVEEIKAEKEAKTQAILLEMVGDLPDADIKPPENVLFVCKLNPVTTDEDLEIIFSRFGPIRSCEVIRDWKTGESLCYAFIEFEKEEDCEKAFFKMDNVLIDDRRIHVDFSQSVAKVKWKGKGGKYTKSDFKEYEKEQDKPPNLVLKDKVKPKQDTKYDLILDEQAEDSKSSHSHTSKKHKKKTHHCSEEKEDEDYMPIKNTNQDIYREMGFGHYEEEESCWEKQKRMAIIVIVINQNTKQIFMKEKGVKRETEAEVQRX

SEQ ID NO: 12073 - protein, 962 aa, Homo sapiens
MVIPLNGTIMPCDAVLINGTCIVNESMLTGESVPVTKTNLPNPSVDVKGIGDELYNPETHKRHTLFCGTTVIQTRFYTGELVKAIVVRTGFSTSKGQLVRSILYPKPTDFKLYRDAYLFLLCLVAVAGIGFIYTIINSILNEVQVGVIIIESLDIITITVPPALPAAMTAGIVYAQRRLKKIGIFCISPQRINICGQLNLVCFDKTGTLTEDGLDLWGIQRVENARFLSPEENVCNEMLVKSQFVACMATCHSLTKIEGVLSGDPLDLKMFEAIGWILEEATEEETALHNRIMPTVVRPPKQLLPESTPAGNQEMELFELPATYEIGIVRQFPFSSALQRMSVVARVLGDRKMDAYMKGAPEAIAGLCKPETVPVDFQNVLEDFTKQGFRVIALAHRKLESKLTWHKVQNISRDAIENNMDFMGLIIMQNKLKQETPAVLEDLHKANIRTVMVTGDSMLTAVSVARDCGMILPQDKVIIAEALPPKDGKVAKINWHYADSLTQCSHPSAIDPEAIPVKLVHDSLEDLQMTRYHFAMNGKSFSVILEHFQDLVPKLMLHGTVFARMAPDQKTQLIEALQNVDYFVGMCGDGANDCGALKRAHGGISLSELEASVASPFTSKTPSISCVPNLIREGRAALITSFCVFKFMALYSIIQYFSVTLLYSILSNLGDFQFLFIDLAIILVVVFTMSLNPAWKELVAQRPPSGLISGALLFSVLSQIIICIGFQSLGFFWVKQQPWYEVWHPKSDACNTTGSGFWNSSHVDNETELDEHNIQNYENTTVFFISSFQYLIVAIAFSKGKPFRQPCYKNYFFVFSVIFLYIFILFIMLYPVASVDQVLQIVCVPYQWRVTMLIIVLVNAFVSITVENFFLDMVLWKVVFNRDKQGEYRFSTTQPPQESVDRWGKCCLPWALGCRKKTPKAKYMYLAQELLVDPEWPPKPQTTTEAKALVKENGSCQIITIT

SEQ ID NO: 12074 - protein, 645 aa, Homo sapiens [sequence omitted]

SEQ ID NO: 12075 - protein, 1207 aa, Homo sapiens
MPEWRVKATCVRAAIKDCEVVLLRTTDEFKMWFCAKIRVLSLETYPVSSPKSMSNKLSNGHAVCLIENPTEENRHRISKYSQTESQQIRYFTHHSVKYFWNDTIHNFDFLKGLDEGVSCTSIYEKHSAGLTKGMHAYRKLLYGVNEIAVKVPSVFKLLIKEVLNPFYIFQLFSVILWSTDEYYYYALAIVVMSIVSIVSSLYSIRKQYVMLHDMVATHSTVRVSVCRVNEEIEEIFSTDLVPGDVMVIPLNGTIMPCDAVLINGTCIVNESMLTGESVPVTKTNLPNPSVDVKGIGDELYNPETHKRHTLFCGTTVIQTRFYTGELVKAIVVRTGFSTSKGQLVRSILYPKPTDFKLYRDAYLFLLCLVAVAGIGFIYTIINSILNEVQVGVIIIESLDIITITVPPALPAAMTAGIVYAQRRLKKIGIFCISPQRINICGQLNLVCFDKTGTLTEDGLDLWGIQRVENARFLSPEENVCNEMLVKSQFVACMATCHSLTKIEGVLSGDPLDLKMFEAIGWILEEATEEETALHNRIMPTVVRPPKQLLPESTPAGNQEMELFELPATYEIGIVRQFPFSSALQRMSVVARVLGDRKMDAYMKGAPEAIAGLCKPETVPVDFQNVLEDFTKQGFRVIALAHRKLESKLTWHKVQNISRDAIENNMDFMGLIIMQNKLKQETPAVLEDLHKANIRTVMVTGDSMLTAVSVARDCGMILPQDKVIIAEALPPKDGKVAKINWHYADSLTQCSHPSAIDPEAIPVKLVHDSLEDLQMTRYHFAMNGKSFSVILEHFQDLVPKLMLHGTVFARMAPDQKTQLIEALQNVDYFVGMCGDGANDCGALKRAHGGISLSELEASVASPFTSKTPSISCVPNLIREGRAALITSFCVFKFMALYSIIQYFSVTLLYSILSNLGDFQFLFIDLAIILVVVFTMSLNPAWKELVAQRPPSGLISGALLFSVLSQIIICIGFQSLGFFWVKQQPWYEVWHPKSDACNTTGSGFWNSSHVDNETELDEHNIQNYENTTVFFISSFQYLIVAIAFSKGKPFRQPCYKNYFFVFSVIFLYIFILFIMLYPVASVDQVLQIVCVPYQWRVTMLIIVLVNAFVSITVENFFLDMVLWKVVFNRDKQGEYRFSTTQPPQESVDRWGKCCLPWALGCRKKTPKAKYMYLAQELLVDPEWPPKPQTTTEAKALVKENGSCQIITIT

SEQ ID NO: 12076 - protein, 688 aa, Homo sapiens [sequence omitted]

SEQ ID NO: 12077 - protein, 1177 aa, Homo sapiens
MPEWRVKATCVRAAIKDCEVVLLRTTDEFKMWFCAKIRVLSLETYPVSSPKSMSNKLSNGHAVCLIENPTEENRHRISKYSQTESQQIRYFTHHSVKYFWNDTIHNFDFLKGLDEGVSCTSIYEKHSAGLTKGMHAYRKLLYGVNEIAVKVPSVFKLLIKEVLNPFYIFQLFSVILWSTDEYYYYALAIVVMSIVSIVSSLYSIRKQYVMLHDMVATHSTVRVSVCRVNEEIEEIFSTDLVPGDVMVIPLNGTIMPCDAVLINGTCIVNESMLTGESVPVTKTNLPNPSVDVKGIGDELYNPETHKRHTLFCGTTVIQTRFYTGELVKAIVVRTGFSTSKGQLVRSILYPKPTDFKLYRDAYLFLLCLVAVAGIGFIYTIINSILNEVQVGVIIIESLDIITITVPPALPAAMTAGIVYAQRRLKKIGIFCISPQRINICGQLNLVCFDKTGTLTEDGLDLWGIQRVENARFLSPEENVCNEMLVKSQFVACMATCHSLTKIEGVLSGDPLDLKMFEAIGWILEEATEEETALHNRIMPTVVRPPKQLLPESTPAGNQEMELFELPATYEIGIVRQFPFSSALQRMSVVARVLGDRKMDAYMKGAPEAIAGLCKPETVPVDFQNVLEDFTKQGFRVIALAHRKLESKLTWHKVQNISRDAIENNMDFMGLIIMQNKLKQETPAVLEDLHKANIRTVMVTGDSMLTAVSVARDCGMILPQDKVIIAEALPPKDGKVAKINWHYADSLTQCSHPSAIDPEAIPVKLVHDSLEDLQMTRYHFAMNGKSFSVILEHFQDLVPKLMLHGTVFARMAPDQKTQLIEALQNVDYFVGMCGDGANDCGALKRAHGGISLSELEASVASPFTSKTPSISCVPNLIREGRAALITSFCVFKFMALYSIIQYFSVTLLYSILSNLGDFQFLFIDLAIILVVVFTMSLNPAWKELVAQRPPSGLISGALLFSVLSQIIICIGFQSLGFFWVKQQPWYEVWHPKSDACNTTGSGFWNSSHVDNETELDEHNIQNYENTTVFFISSFQYLIVAIAFSKGKPFRQPCYKNYFFVFSVIFLYIFILFIMLYPVASVDQVLQIVCVPYQWRVTMLIIVLVNAFVSITVEESVDRWGKCCLPWALGCRKKTPKAKYMYLAQELLVDPEWPPKPQTTTEAKALVKENGSCQIITIT

SEQ ID NO: 12078 - protein, 119 aa, Homo sapiens
MASSDEDGTNGGASEAGEDREAPGERRRLGVLATAWLTFYDIAMTAGRRLILSPRLECIGAISAHCQPQPPEFKRFSCLGLRSSWDYKRGPPRPINFCIFGRDRVSPCWPGWSRTPDLK

SEQ ID NO: 12079 - protein, 249 aa, Homo sapiens
MASSDEDGTNGGASEAGEDREAPGERRRLGVLATAWLTFYDIAMTAGWLVLAIAMVRFYMEKGTHRGLYKSIQKTLKFFQTFALLEIVHCLIGIVPTSVIVTGVQVSSRIFMVWLITHSIKPIQNEESVVLFLVAWTVTEITRYSFYTFSLLDHLPYFIKWARYNFFIILYPVGVAGELLTIYAALPHVKKTGMFSIRLPNKYNVSFDYYYFLLITMASYIPLFPQLYFHMLRQRRKVLHGEVIVEKDD

SEQ ID NO: 12080 - protein, 887 aa, Homo sapiens
MGEAEKFHYIYSCDLDINVQLKIGSLEGKREQKSYKAVLEDPMLKFSGLYQETCSDLYVTCQVFAEGKPLALPVRTSYKAFSTRWNWNEWLKLPVKYPDLPRNAQVALTIWDVYGPGKAVPVGGTTVSLFGKYGMFRQGMHDLKVWPNVEADGSEPTKTPGRTSSTLSEDQMSRLAKLTKAHRQGHMVKVDWLDRLTFREIEMINESEKRSSNFMYLMVEFRCVKCDDKEYGIVYYEKDGDESSPILTSFELVKVPDPQMSMENLVESKHHKLARSLRSGPSDHDLKPNAATRDQLNIIVSYPPTKQLTYEEQDLVWKFRYYLTNQEKALTKFLKCVNWDLPQEAKQALELLGKWKPMDVEDSLELLSSHYTNPTVRRYAVARLRQADDEDLLMYLLQLVQALKYENFDDIKNGLEPTKKDSQSSVSENVSNSGINSAEIDSSQIITSPLPSVSSPPPASKTKEVPDGENLEQDLCTFLISRACKNSTLANYLYWYVIVECEDQDTQQRDPKTHEMYLNVMRRFSQALLKGDKSVRVMRSLLAAQQTFVDRLVHLMKAVQRESGNRKKKNERLQALLGDNEKMNLSDVELIPLPLEPQVKIRGIIPETATLFKSALMPAQLFFKTEDGGKYPVIFKHGDDLRQDQLILQIISLMDKLLRKENLDLKLTPYKVLATSTKHGFMQFIQSVPVAEVLDTEGSIQNFFRKYAPSENGPNGISAEVMDTYVKSCAGYCVITYILGVGDRHLDNLLLTKTGKLFHIDFGYILGRDPKPLPPPMKLNKEMVEGMGGTQSEQYQEFRKQCYTAFLHLRRYSNLILNLFSLMVDANIPDIALEPDKTVKKVQDKFRLDLSDEEAVHYMQSLIDESVHALFAAVVEQIHKFAQYWRK

SEQ ID NO: 12081 - protein, 344 aa, Homo sapiens
MGFNLTFHLSYKFRLLLLLTLCLTVVGWATSNYFVGAIQEIPKAKEFMANFHKTLILGKGKTLTNEASTKKVELDNCPSVSPYLRGQSKLIFKPDLTLEEVQAENPKVSRGRYRPQECKALQRVAILVPHRNREKHLMYLLEHLHPFLQRQQLDYGIYVIHQAEGKKFNRAKLLNVGYLEALKEENWDCFIFHDVDLVPENDFNLYKCEEHPKHLVVGRNSTGYRLRYSGYFGGVTALSREQFFKVNGFSNNYWGWGGEDDDLRLRVELQRMKISRPLPEVGKYTMVFHTRDKGNEVNAERMKLLHQVSRVWRTDGLSSCSYKLVSVEHNPLYINITVDFWFGA

SEQ ID NO: 12082 - protein, 344 aa, Homo sapiens; identical to SEQ ID NO: 12081

SEQ ID NO: 12083 - protein, 344 aa, Homo sapiens; identical to SEQ ID NO: 12081

SEQ ID NO: 12084 - protein, 456 aa, Homo sapiens
MPPGPWESCFWVGGLILWLSVGSSGDAPPTPQPKCADFQSANLFEGTDLKVQFLLFVPSNPSCGQLVEGSSDLQNSGFNATLGTKLIIHGFRVLGTKPSWIDTFIRTLLRATNANVIAVDWIYGSTGVYFSAVKNVIKLSLEISLFLNKLLVLGVSESSIHIIGVSLGAHVGGMVGQLFGGQLGQITGLDPAGPEYTRASVEERLDAGDALFVEAIHTDTDNLGIRIPVGHVDYFVNGGQDQPGCPTFFYAGYSYLICDHMRAVHLYISALENSCPLMAFPCASYKAFLAGRCLDCFNPFLLSCPRIGLVEQGGVKIEPLPKEVKVYLLTTSSAPYCMHHSLVEFHLKELRNKDTNIEVTFLSSNITSSSKITIPKQQRYGKGIIAHATPQCQINQVKFKFQSSNRVWKKDRTTIIGKFCTALLPVNDREKMVCLPEPVNLQASVTVSCDLKIACV

SEQ ID NO: 12085 - protein, 508 aa, Homo sapiens
MWELVALLLLTLAYLFWPKRRCPGAKYPKSLLSLPLVGSLPFLPRHGHMHNNFFKLQKKYGPIYSVRMGTKTTVIVGHHQLAKEVLIKKGKDFSGRPQMATLDIASNNRKGIAFADSGAHWQLHRRLAMATFALFKDGDQKLEKIICQEISTLCDMLATHNGQSIDISFPVFVAVTNVISLICFNTSYKNGDPELNVIQNYNEGIIDNLSKDSLVDLVPWLKIFPNKTLEKLKSHVKIRNDLLNKILENYKEKFRSDSITNMLDTLMQAKMNSDNGNAGPDQDSELLSDNHILTTIGDIFGAGVETTTSVVKWTLAFLLHNPQVKKKLYEEIDQNVGFSRTPTISDRNRLLLLEATIREVLRLRPVAPMLIPHKANVDSSIGEFAVDKGTEVIINLWALHHNEKEWHQPDQFMPERFLNPAGTQLISPSVSYLPFGAGPRSCIGEILARQELFLIMAWLLQRFDLEVPDDGQLPSLEGIPKVVFLIDSFKVKIKVRQAWREAQAEGST

SEQ ID NO: 12086 - protein, 508 aa, Homo sapiens; identical to SEQ ID NO: 12085

SEQ ID NO: 12087 - protein, 320 aa, Homo sapiens
MGDIPAVGLSSWKASPGKVTEAVKEAIDAGYRHFDCAYFYHNEREVGAGIRCKIKEGAVRREDLFIATKLWCTCHKKSLVETACRKSLKALKLNYLDLYLIHWPMGFKPPHPEWIMSCSELSFCLSHPRVQDLPLDESNMVIPSDTDFLDTWEAMEDLVITGLVKNIGVSNFNHEQLERLLNKPGLRFKPLTNQIECHPYLTQKNLISFCQSRDVSVTAYRPLGGSCEGVDLIDNPVIKRIAKEHGKSPAQILIRFQIQRNVIVIPGSITPSHIKENIQVFDFELTQHDMDNILSLNRNLRLAMFPITKNHKDYPFHIEY

SEQ ID NO: 12088 - protein, 307 aa, Homo sapiens
MGDIPAVGLSSWKASPGKVTEAVKEAIDAGYRHFDCAYFYHNEREVGAGIRCKIKEGAVRREDLFIATKLWCTCHKKSLVETACRKSLKALKLNYLDLYLIHWPMGFKPPHPEWIMSCSELSFCLSHPRVQDLPLDESNMVIPSDTDFLDTWEAMEDLVITGLVKNIGVSNFNHEQLERLLNKPGLRFKPLTNQIECHPYLTQKNLISFCQSRDVSVTAYRPLGGSCEGVDLIDNPVIKRIAKEHGKSPAQILIRFQIQRNVIVIPGSITPSHIKENIQVFDFELTQHDMDNILSLNRNLRLAMFPM

SEQ ID NO: 12089 - protein, 209 aa, Homo sapiens
MALMGGIGFIHHNCTPEFQAKEVRKVKKFEQGFITDPVVLTPSHTVGDVLEAKMRHGFSGIPITETGTIGSKLKNRDYPLASKDSHKQLLRGAAVGTPEDDKYRLDLLTQAGVDVVVLDLSQGNSVYQIATVHYIKQKYPHLQVIGMTAAQAKNLIDAAVDGLRIGMGCGSICITQEVMACGGPQGTALYKVAEYALCFGVSIIADGGI

SEQ ID NO: 12090 - protein, 144 aa, Homo sapiens
MITCTDLKKNRDYPLASKDSHKQLLRGAAVGTPEDDKYRLDLLTQAGVDVVVLDLSQGNSVYQIATVHYIKQKYPHLQVIGMTAAQAKNLIDAAVDGLRIGMGCGSICITQEVMACGGPQGTALYKVAEYALCFGVSIIADGGI

SEQ ID NO: 12091 - protein, 1649 aa, Homo sapiens [sequence omitted]

SEQ ID NO: 12092 - protein, 674 aa, Homo sapiens
MRATHGSNSLPSSARLGSSSNLQFKAERIKIPSTPRYPRSVVGSERGSVSHSECSTPPQSPLNIDTLSSCSQSQTSASTLPRIAVNPASLGERRKDRPYVEEPRHVKVQKGSEPLGISIVSGEKGGIYVSKVTVGSIAHQAGLEYGDQLLEFNGINLRSATEQQARLIIGQQCDTITILAQYNPHVHQLSSHSRSSSHLDPAGTHSTLQGSGTTTPEHPSVIDPLMEQDEGPSTPPAKQSSSRIAGDANKKTLEPRVVFIKKSQLELGVHLCGGNLHGVFVAEVEDDSPAKGPDGLVPGDLILEYGSLDVRNKTVEEVYVEMLKPRDGVRLKVQYRPEEFTKAKGLPGDSFYIRALYDRLADVEQELSFKKDDILYVDDTLPQGTFGSWMAWQLDENAQKIQRGQIPSKYVMDQEFSRRLSMSEVKDDNSATKTLSAAARRSFFRRKHKHKRSGSKDGKDLLALDAFSSDSIPLFEDSVSLAYQRVQKVDCTALRPVLILGPLLDVVKEMLVNEAPGKFCRCPLEVMKASQQAIERGVKDCLFVDYKRRSGHFDVTTVASIKEITEKNRHCLLDIAPHAIERLHHMHIYPIVIFIHYKSAKHIKEQRDPIYLRDKVTQRHSKEQFEAAQKLEQEYSRYFTGVIQGGALSSICTQILAMVNQEQNKVLWIPACPL

SEQ ID NO: 12093 - protein, 207 aa, Homo sapiens
MLALRCGSRWLGLLSVPRSVPLRLPAARACSKGSGDPSSSSSSGNPLVYLDVDANGKPLGRVVLELKADVVPKTAENFRALCTGEKGFGYKGSTFHRVIPSFMCQAGDFTNHNGTGGKSIYGSRFPDENFTLKHVGPGVLSMANAGPNTNGSQFFICTIKTDWLDGKHVVFGHVKEGMDVVKKIESFGSKSGRTSKKIVITDCGQLS

SEQ ID NO: 12094 - protein, 207 aa, Homo sapiens; identical to SEQ ID NO: 12093

SEQ ID NO: 12095 - protein, 155 aa, Homo sapiens
MLALRCGSRWLGLLSVPRSVPLRLPAARACSKGSGDPSSSSSSGNPLVYLDVDANGKPLGRVVLELKADVVPKTAENFRALCTGEKGFGYKGSTFHRVIPSFMCQAGDFTNHNGTGGKSIYGSRFPDENFTLKHVGPGWMASMLCSVTSKRAWTS

SEQ ID NO: 12096 - protein, 135 aa, Homo sapiens
PWASPCRALGLSFPISENGRQNDFFRPPSEHWSGGDGREGTCGGESSRSDRREGGLSTSGPARARGRGSRSLLGLSLDPELRGGCRGSWGERRGPAGAHVAALAQHGALPGSGPAPAVGLTLGVLGNGARGGFQQ

SEQ ID NO: 12097 - protein, 233 aa, Homo sapiens
MEKGPVRAPAEKPRGARCSNGFPERDPPRPGPSRPAEKPPRPEAKSAQPADGWKGERPRSEEDNELNLPNLAAAYSSILSSLGENPQRQGLLKTPWRAASAMQFFTKGYQETISDVLNDAIFDEDHDEMVIVKDIDMFSMCEHHLVPFVGKVHIGYLPNKQVLGLSKLARIVEIYSRRLQVQERLTKQIAVAITEALRPAGVGVVVEATKSNKYNKGLSPLLSSCHLFVAILK

SEQ ID NO: 12098 - protein, 250 aa, Homo sapiens
MEKGPVRAPAEKPRGARCSNGFPERDPPRPGPSRPAEKPPRPEAKSAQPADGWKGERPRSEEDNELNLPNLAAAYSSILSSLGENPQRQGLLKTPWRAASAMQFFTKGYQETISDVLNDAIFDEDHDEMVIVKDIDMFSMCEHHLVPFVGKVHIGYLPNKQVLGLSKLARIVEIYSRRLQVQERLTKQIAVAITEALRPAGVGVVVEATHMCMVMRGVQKMNSKTVTSTMLGVFREDPKTREEFLTLIRS

SEQ ID NO: 12099 - protein, 250 aa, Homo sapiens; identical to SEQ ID NO: 12098

SEQ ID NO: 12100 - protein, 235 aa, Homo sapiens
MFSHAGITGLLAWTLQPQWIQVRNTATSKDVTKRLKSIKNIQKITKSMQMMKSEVATLTAAGKEVMLVGIGDKIRGVLYRMHSDQFLVALKEVRRNPPAFGNVSVIALELLNSGYEFDEGSIVFNQFKSVISYKTEEKPIFFLNTIASAKSMSIYYNIDAEVLQNYQEYSLANSIYYSLKESTTSEQSARMTAMDNTSKNASEMIDKLTLTFNCTRQAVITKELTEIIFGAVALD

SEQ ID NO: 12101 - protein, 185 aa, Homo sapiens [sequence omitted]

SEQ ID NO: 12102 - protein, 284 aa, Homo sapiens
MAGCAARAPPGSEARLSLATFLLGASVLALPLLTRAGLQGRTGLALYVAGLNALLLLLYRPPRYQIAIRACFLGFVFGCGTLLSFSQSSWSHFGWYMCSLSLFHYSEYLVTAVNNPKSLSLDSFLLNHSLEYTVAALSSWLEFTLENIFWPELKQITWLSVTGLLMVVFGECLRKAAMFTAGSNFNHVVQNEKSDTHTLVTSGVYAWFRHPSYVGWFYWSIGTQVMLCNPICGVSYALTVWRFFRDRTEEEEISLIHFFGEEYLEYKKRVPTGLPFIKGVKVDL

SEQ ID NO: 12103 - protein, 284 aa, Homo sapiens; identical to SEQ ID NO: 12102

SEQ ID NO: 12104 - protein, 350 aa, Homo sapiens
MLLLRRSLSLNVLRKEVDRACFGEKAKQIMRPDDANVAGNVHGGTILKMIEEAGAIISTRHCNSQNGERCVAALARVERTDFLSPMCIGEVAHVSAEITYTSKHSVEVQVNVMSENILTGAKKLTNKATLWYVPLSLKNVDKVLEVPPVVYSRQEQEEEGRKRYEAQKLERMETKWRNGDIVQPVLNPEPNTVSYSQSSLIHLVGPSDCTLHGFVHGGVTMKLMDEVAGIVAARHCKTNIVTASVDAINFHDKIRKGCVITISGRMTFTSNKSMEIEVLVDADPVVDSSQKRYRAASAFFTYVSLSQEGRSLPVPQLVPETEDEKKRFEEGKGRYLQMKAKRQGHAEPQP

SEQ ID NO: 12105 - protein, 380 aa, Homo sapiens
MKLLARALRLCEFGRQASSRRLVAGQGCVGPRRGCCAPVQVVGPRADLPPCGACITGRIMRPDDANVAGNVHGGTILKMIEEAGAIISTRHCNSQNGERCVAALARVERTDFLSPMCIGEVAHVSAEITYTSKHSVEVQVNVMSENILTGAKKLTNKATLWYVPLSLKNVDKVLEVPPVVYSRQEQEEEGRKRYEAQKLERMETKWRNGDIVQPVLNPEPNTVSYSQSSLIHLVGPSDCTLHGFVHGGVTMKLMDEVAGIVAARHCKTNIVTASVDAINFHDKIRKGCVITISGRMTFTSNKSMEIEVLVDADPVVDSSQKRYRAASAFFTYVSLSQEGRSLPVPQLVPETEDEKKRFEEGKGRYLQMKAKRQGHAEPQP

SEQ ID NO: 12106 - protein, 370 aa, Homo sapiens
MARPGLIHSAPGLPDTCALLQPPAASAAAAPSMSGPDVETPSAIQICRIMRPDDANVAGNVHGGTILKMIEEAGAIISTRHCNSQNGERCVAALARVERTDFLSPMCIGEVAHVSAEITYTSKHSVEVQVNVMSENILTGAKKLTNKATLWYVPLSLKNVDKVLEVPPVVYSRQEQEEEGRKRYEAQKLERMETKWRNGDIVQPVLNPEPNTVSYSQSSLIHLVGPSDCTLHGFVHGGVTMKLMDEVAGIVAARHCKTNIVTASVDAINFHDKIRKGCVITISGRMTFTSNKSMEIEVLVDADPVVDSSQKRYRAASAFFTYVSLSQEGRSLPVPQLVPETEDEKKRFEEGKGRYLQMKAKRQGHAEPQP

SEQ ID NO: 12107 - protein, 329 aa, Homo sapiens
MAFQLSRIMRPDDANVAGNVHGGTILKMIEEAGAIISTRHCNSQNGERCVAALARVERTDFLSPMCIGEVAHVSAEITYTSKHSVEVQVNVMSENILTGAKKLTNKATLWYVPLSLKNVDKVLEVPPVVYSRQEQEEEGRKRYEAQKLERMETKWRNGDIVQPVLNPEPNTVSYSQSSLIHLVGPSDCTLHGFVHGGVTMKLMDEVAGIVAARHCKTNIVTASVDAINFHDKIRKGCVITISGRMTFTSNKSMEIEVLVDADPVVDSSQKRYRAASAFFTYVSLSQEGRSLPVPQLVPETEDEKKRFEEGKGRYLQMKAKRQGHAEPQP

SEQ ID NO: 12108 - protein, 1954 aa, Homo sapiens
MRGPVGTEEELPRLFAEEMENEDEMSEEEDGGLEAFDDFFPVEPVSLPKKKKPKKLKENKCKGKRKKKEGSNDELSENEEDLEEKSESEGSDYSPNKKKKKKLKDKKEKKAKRKKKDEDEDDNDDGCLKEPKSSGQLMAEWGLDDVDYLFSEEDYHTLTNYKAFSQFLRPLIAKKNPKIPMSKMMTVLGAKWREFSANNPFKGSSAAAAAAAVAAAVETVTISPPLAVSPPQVPQPVPIRKAKTKEGKGPGVRKKIKGSKDGKKKGKGKKTAGLKFRFGGISNKRKKGSSSEEDEREESDFDSASIHSASVRSECSAALGKKSKRRRKKKRIDDGDGYETDHQDYCEVCQQGGEIILCDTCPRAYHLVCLDPELEKAPEGKWSCPHCEKEGIQWEPKDDDDEEEEGGCEEEEDDHMEFCRVCKDGGELLCCDACPSSYHLHCLNPPLPEIPNGEWLCPRCTCPPLKGKVQRILHWRWTEPPAPFMVGLPGPDVEPSLPPPKPLEGIPEREFFVKWAGLSYWHCSWVKELQLELYHTVMYRNYQRKNDMDEPPPFDYGSGDEDGKSEKRKNKDPLYAKMEERFYRYGIKPEWMMIHRILNHSFDKKGDVHYLIKWKDLPYDQCTWEIDDIDIPYYDNLKQAYWGHRELMLGEDTRLPKRLLKKGKKLRDDKQEKPPDTPIVDPTVKFDKQPWYIDSTGGTLHPYQLEGLNWLRFSWAQGTDTILADEMGLGKTVQTIVFLYSLYKEGHSKGPYLVSAPLSTIINWEREFEMWAPDFYVVTYTGDKESRSVIRENEFSFEDNAIRSGKKVFRMKKEVQIKFHVLLTSYELITIDQAILGSIEWACLVVDEAHRLKNNQSKFFRVLNSYKIDYKLLLTGTPLQNNLEELFHLLNFLTPERFNNLEGFLEEFADISKEDQIKKLHDLLGPHMLRRLKADVFKNMPAKTELIVRVELSQMQKKYYKFILTRNFEALNSKGGGNQVSLLNIMMDLKKCCNHPYLFPVAAVEAPVLPNGSYDGSSLVKSSGKLMLLQKMLKKLRDEGHRVLIFSQMTKMLDLLEDFLEYEGYKYERIDGGITGGLRQEAIDRFNAPGAQQFCFLLSTRAGGLGINLATADTVIIYDSDWNPHNDIQAFSRAHRIGQNKKVMIYRFVTRASVEERITQVAKRKMMLTHLVVRPGLGSKSGSMTKQELDDILKFGTEELFKDDVEGMMSQGQRPVTPIPDVQSSKGGNLAASAKKKHGSTPPGDNKDVEDSSVIHYDDAAISKLLDRNQDATDDTELQNMNEYLSSFKVAQYVVREEDGVEEVEREIIKQEENVDPDYWEKLLRHHYEQQQEDLARNLGKGKRIRKQVNYNDASQEDQEWQDELSDNQSEYSIGSEDEDEDFEERPEGQSGRRQSRRQLKSDRDKPLPPLLARVGGNIEVLGFNARQRKAFLNAIMRWGMPPQDAFNSHWLVRDLRGKSEKEFRAYVSLFMRHLCEPGADGAETFADGVPREGLSRQHVLTRIGVMSLVRKKVQEFEHVNGKYSTPDLIPEGPEGKKSGEVISSDPNTPVPASPAHLLPAPLGLPDKMEAQLGYMDEKDPGAQKPRQPLEVQALPAALDRVESEDKHESPASKERAREERPEETEKAPPSPEQLPREEVLPEKEKILDKLELSLIHSRGDSSELRPDDTKAEEKEPIETQQNGDKEEDDEGKKEDKKGKFKFMFNIADGGFTELHTLWQNEERAAVSSGKIYDIWHRRHDYWLLAGIVTHGYARWQDIQNDPRYMILNEPFKSEVHKGNYLEMKNKFLARRFKLLEQALVIEEQLRRAAYLNMTQDPNHPAMALNARLAEVECLAESHQHLSKESLAGNKPANAVLHKVLNQLEELLSDMKADVTRLPSMLSRIPPVAARLQMSERSILSRLTNRAGDPTIQQGAFGSSQMYSNNFGPNFRGPGPGGIVNYNQMPLGPYVTDI

SEQ ID NO: 12109 - protein, 604 aa, Homo sapiens
MRRCNSGSGPPPSLLLLLLWLLAVPGANAAPRSALYSPSDPLTLLQADTVRGAVLGSRSAWAVEFFASWCGHCIAFAPTWKALAEDVKAWRPALYLAALDCAEETNSAVCRDFNIPGFPTVRFFKAFTKNGSGAVFPVAGADVQTLRERLIDALESHHDTWPPACPPLEPAKLEEIDGFFARNNEEYLALIFEKGGSYLGREVALDLSQHKGVAVRRVLNTEANVVRKFGVTDFPSCYLLFRNGSVSRVPVLMESRSFYTAYLQRLSGLTREAAQTTVAPTTANKIAPTVWKLADRSKIYMADLESALHYILRIEVGRFPVLEGQRLVALKKFVAVLAKYFPGRPLVQNFLHSVNEWLKRQKRNKIPYSFFKTALDDRKEGAVLAKKVNWIGCQGSEPHFRGFPCSLWVLFHFLTVQAARQNVDHSQEAAKAKEVLPAIRGYVHYFFGCRDCASHFEQMAAASMHRVGSPNAAVLWLWSSHNRVNARLAGAPSEDPQFPKVQWPPRELCSACHNERLDVPVWDVEATLNFLKAHFSPSNIILDFPAAGSAARRDVQNVAAAPELAMGALELESRNSTLDPGKPEMMKSPTNTTPHVPAEGPELI

SEQ ID NO: 12110 - protein, 747 aa, Homo sapiens
MRRCNSGSGPPPSLLLLLLWLLAVPGANAAPRSALYSPSDPLTLLQADTVRGAVLGSRSAWAVEFFASWCGHCIAFAPTWKALAEDVKAWRPALYLAALDCAEETNSAVCRDFNIPGFPTVRFFKAFTKNGSGAVFPVAGADVQTLRERLIDALESHHDTWPPACPPLEPAKLEEIDGFFARNNEEYLALIFEKGGSYLGREVALDLSQHKGVAVRRVLNTEANVVRKFGVTDFPSCYLLFRNGSVSRVPVLMESRSFYTAYLQRLSGLTREAAQTTVAPTTANKIAPTVWKLADRSKIYMADLESALHYILRIEVGRFPVLEGQRLVALKKFVAVLAKYFPGRPLVQNFLHSVNEWLKRQKRNKIPYSFFKTALDDRKEGAVLAKKVNWIGCQGSEPHFRGFPCSLWVLFHFLTVQAARQNVDHSQEAAKAKEVLPAIRGYVHYFFGCRDCASHFEQMAAASMHRVGSPNAAVLWLWSSHNRVNARLAGAPSEDPQFPKVQWPPRELCSACHNERLDVPVWDVEATLNFLKAHFSPSNIILDFPAAGSAARRDVQNVAAAPELAMGALELESRNSTLDPGKPEMMKSPTNTTPHVPAEGPEASRPPKLHPGLRAAPGQEPPEHMAELQRNEQEQPLGQWHLSKRDTGAALLAESRAEKNRLWGPLEVRRVGRSSKQLVDIPEGQLEARAGRGRGQWLQVLGGGFSYLDISLCVGLYSLSFMGLLAMYTYFQAKIRALKGHAGHPAA

SEQ ID NO: 12111 - protein, 65 aa, Homo sapiens [sequence omitted]

SEQ ID NO: 12112 - protein, 429 aa, Homo sapiens
MEKLGVEPEEEGGGDDEEDAEAWAMELADVGAAASSQGVHDQVLPTPNASSRVIVHVDLDCFYAQVEMISNPELKDKPLGVQQKYLVVTCNYEARKLGVKKLMNVRDAKEKCPQLVLVNGEDLTRYREMSYKVTELLEEFSPVVERLGFDENFVDLTEMVEKRLQQLQSDELSAVTVSGHVYNNQSINLLDVLHIRLLVGSQIAAEMREAMYNQLGLTGCAGVASNKLLAKLVSGVFKPNQQTVLLPESCQHLIHSLNHIKEIPGIGYKTAKCLEALGINSVRDLQTFSPKILEKELGISVAQRIQKLSFGEDNSPVILSGPPQSFSEEDSFKKCSSEVEAKNKIEELLASLLNRVCQDGRKPHTVRLIIRRYSSEKHYGRESRQCPIPSHVIQKLGTGLQSPDFCASSLMQRRLEDKLVKLEGVFTKH

SEQ ID NO: 12113 - protein, 739 aa, Homo sapiens [sequence omitted]

SEQ ID NO: 12114 - protein, 464 aa, Homo sapiens
MGRGWGFLFGLLGAVWLLSSGHGEEQPPETAAQRCFCQVSGYLDDCTCDVETIDRFNNYRLFPRLQKLLESDYFRYYKVNLKRPCPFWNDISQCGRRDCAVKPCQSDEVPDGIKSASYKYSEEANNLIEECEQAERLGAVDESLSEETQKAVLQWTKHDDSSDNFCEADDIQSPEAEYVDLLLNPERYTGYKGPDAWKIWNVIYEENCFKPQTIKRPLNPLASGQENTFYSWLEGLCVEKRAFYRLISGLHASINVHLSARYLLQETWLEKKWGHNITEFQQRFDGILTEGEGPRRLKNLYFLYLIELRALSKVLPFFERPDFQLFTGNKIQDEENKMLLLEILHEIKSFPLHFDENSFFAGDKKEAHKLKEDFRLHFRNISRIMDCVGCFKCRLWGKLQTQGLGTALKILFSEKLIANMPESGPSYEFHLTRQEIVSLFNAFGRISTSVKELENFRNLLQNIH

SEQ ID NO: 12115 - protein, 258 aa, Homo sapiens
MGRGWGFLFGLLGAVWLLSSGHGEEQPPETAAQRCFCQVSGYLDDCTCDVETIDRFNNYRLFPRLQKLLESDYFRYYKVNLKRPCPFWNDISQCGRRDCAVKPCQSDEVPDGIKSASYKYSEEANNLIEECEQAERLGAVDESLSEETQKAVLQWTKHDDSSDNFCEADDIQSPEAEYVDLLLNPERYTGYKGPDAWKIWNVIYEENCFKPQTIKRPLNPLASGQGKLLIEHFLQLARRSLCRKKSILQTYIWPTCKH

SEQ ID NO: 12116 - protein, 395 aa, Homo sapiens
MNGPVDGLCDHSLSEGVFMFTSESVGEGHPDKICDQISDAVLDAHLKQDPNAKVACETVCKTGMVLLCGEITSMAMVDYQRVVRDTIKHIGYDDSAKGFDFKTCNVLVALEQQSPDIAQCVHLDRNEEDVGAGDQGLMFGYATDETEECMPLTIILAHKLNARMADLRRSGLLPWLRPDSKTQVTVQYMQDNGAVIPVRIHTIVISVQHNEDITLEEMRRALKEQVIRAVVPAKYLDEDTVYHLQPSGRFVIGGPQGDAGVTGRKIIVDTYGGWGAHGGGAFSGKDYTKVDRSAAYAARWVAKSLVKAGLCRRVLVQVSYAIGVAEPLSISIFTYGTSQKTERELLDVVHKNFDLRPGVIVRDLDLKKPIYQKTACYGHFGRSEFPWEVPRKLVF

SEQ ID NO: 12117 - protein, 395 aa, Homo sapiens; identical to SEQ ID NO: 12116

SEQ ID NO: 12118 - protein, 111 aa, Homo sapiens
MKLFVDTDADTRLSRRVLRDISERGRDLEQILSQYITFVKPAFEEFCLPTKKYADVIIPRGADNLVAINLIVQHIQDILNGGPSKRQTNGCLNGYTPSRKRQASESSSRPH

SEQ ID NO: 12119 - protein, 261 aa, Homo sapiens
MAGDSEQTLQNHQQPNGGEPFLIGVSGGTASGKSSVCAKIVQLLGQNEVDYRQKQVVILSQDSFYRVLTSEQKAKALKGQFNFDHPDAFDNELILKTLKEITEGKTVQIPVYDFVSHSRKEETVTVYPADVVLFEGILAFYSQEVRDLFQMKLFVDTDADTRLSRRVLRDISERGRDLEQILSQYITFVKPAFEEFCLPTKKYADVIIPRGADNLVAINLIVQHIQDILNGGPSKRQTNGCLNGYTPSRKRQASESSSRPH

SEQ ID NO: 12120 - protein, 261 aa, Homo sapiens; identical to SEQ ID NO: 12119

SEQ ID NO: 12121 - protein, 56 aa, Homo sapiens
MVTRFLGPRYRELVKNWVPTAYTWGAVGAVGLVWATDWRLILDWVPYINGKFKKDN

SEQ ID NO: 12122 - protein, 56 aa, Homo sapiens; identical to SEQ ID NO: 12121

SEQ ID NO: 12123 - protein, 367 aa, Homo sapiens
MILCSRLCLPQSASLRMEPAPGLVEQPKCLEAGSPEPEPAPWQALPVLSEKQSGDVELVLAYAAPVLDKRQTSRLLKEVSALHPLPAQPHLKRVRPSRDAGSPHALEMLLCLAGPASGPRSLAELLPRPAVDPRGLGQPFLVPVPARPPLTRGQFEEARAHWPTSFHEDKQVTSALAGRLFSTQERAAMQSHMERAVWAARRAAARGLRAVGAVVVDPASDRVLATGHDCSCADNPLLHAVMVCVDLVARGQGRGTYDFRPFPACSFAPAAAPQAVRAGAVRKLDADEDGLPYLCTGYDLYVTREPCAMCAMALVHARILRVFYGAPSPDGALGTRFRIHARPDLNHRFQVFRGVLEEQCRWLDPDT

SEQ ID NO: 12124 - protein, 367 aa, Homo sapiens; identical to SEQ ID NO: 12123

SEQ ID NO: 12125 - protein, 367 aa, Homo sapiens; identical to SEQ ID NO: 12123

SEQ ID NO: 12126 - protein, 229 aa, Homo sapiens
MSEKENNFPPLPKFIPVKPCFYQNFSDEIPVEHQVLVKRIYRLWMFYCATLGVNLIACLAWWIGGGSGTNFGLAFVWLLLFTPCGYVCWFRPVYKAFRADSSFNFMAFFFIFGAQFVLTVIQAIGFSGWGACGWLSAIGFFQYSPGAAVVMLLPAIMFSVSAAMMAIAIMKVHRIYRGAGGSFQKAQTEWNTGTWRNPPSREAQYNNFSGNSLPEYPTVPSYPGSGQWP

SEQ ID NO: 12127 - protein, 185 aa, Homo sapiens
MFYCATLGVNLIACLAWWIGGGSGTNFGLAFVWLLLFTPCGYVCWFRPVYKAFRADSSFNFMAFFFIFGAQFVLTVIQAIGFSGWGACGWLSAIGFFQYSPGAAVVMLLPAIMFSVSAAMMAIAIMKVHRIYRGAGGSFQKAQTEWNTGTWRNPPSREAQYNNFSGNSLPEYPTVPSYPGSGQWP

SEQ ID NO: 12128 - protein, 1141 aa, Homo sapiens
MAVPGDAARVRDKPVHSGVSQAPTAGRDCHHRADPASPRDSGCRGCWGDLVLQPLRSSRKLSSALCAGSLSFLLALLVRLVRGEVGCDLEQCKEAAAAEEEEAAPGAEGGVFPGPRGGAPGGGARLSPWLQPSALLFSLLCAFFWMGLYLLRAGVRLPLAVALLAACCGGEALVQIGLGVGEDHLLSLPAAGVVLSCLAAATWLVLRLRLGVLMIALTSAVRTVSLISLERFKVAWRPYLAYLAGVLGILLARYVEQILPQSAEAAPREHLGSQLIAGTKEDIPVFKRRRRSSSVVSAEMSGCSSKSHRRTSLPCIPREQLMGHSEWDHKRGPRGSQSSGTSITVDIAVMGEAHGLITDLLADPSLPPNVCTSLRAVSNLLSTQLTFQAIHKPRVNPVTSLSENYTCSDSEESSEKDKLAIPKRLRRSLPPGLLRRVSSTWTTTTSATGLPTLEPAPVRRDRSTSIKLQEAPSSSPDSWNNPVMMTLTKSRSFTSSYAISAANHVKAKKQSRPGALAKISPLSSPCSSPLQGTPASSLVSKISAVQFPESADTTAKQSLGSHRALTYTQSAPDLSPQILTPPVICSSCGRPYSQGNPADEPLERSGVATRTPSRTDDTAQVTSDYETNNNSDSSDIVQNEDETECLREPLRKASACSTYAPETMMFLDKPILAPEPLVMDNLDSIMEQLNTWNFPIFDLVENIGRKCGRILSQVSYRLFEDMGLFEAFKIPIREFMNYFHALEIGYRDIPYHNRIHATDVLHAVWYLTTQPIPGLSTVINDHGSTSDSDSDSGFTHGHMGYVFSKTYNVTDDKYGCLSGNIPALELMALYVAAAMHDYDHPGRTNAFLVATSAPQAVLYNDRSVLENHHAAAAWNLFMSRPEYNFLINLDHVEFKHFRFLVIEAILATDLKKHFDFVAKFNGKVNDDVGIDWTNENDRLLVCQMCIKLADINGPAKCKELHLQWTDGIVNEFYEQGDEEASLGLPISPFMDRSAPQLANLQESFISHIVGPLCNSYDSAGLMPGKWVEDSDESGDTDDPEEEEEEAPAPNEEETCENNESPKKKTFKRRKIYCQITQHLLQNHKMWKKVIEEEQRLAGIENQSLDQTPQSHSSEQIQAIKEEEEEKGKPRGEEIPTQKPDQ

SEQ ID NO: 12129 - protein, 681 aa, Homo sapiens
MGSPVHRVSLGDTWSRQMHPDIESERYMQSFDVERLTNILDGGAQNTALRRKVESIIHSYPEFSCKDNYFMTQNERYKAAMRRAFHIRLIARRLGWLEDGRELGYAYRALSGDVALNIHRVFVRALRSLGSEEQIAKWDPLCKNIQIIATYAQTELGHGTYLQGLETEATYDAATQEFVIHSPTLTATKWWPGDLGRSATHALVQAQLICSGARRGMHAFIVPIRSLQDHTPLPGIIIGDIGPKMDFDQTDNGFLQLNHVRVPRENMLSRFAQVLPDGTYVKLGTAQSNYLPMVVVRVELLSGEILPILQKACVIAMRYSVIRRQSRLRPSDPEAKVLDYQTQQQKLFPQLAISYAFHFLAVSLLEFFQHSYTAILNQDFSFLPELHALSTGMKAMMSEFCTQGAEMCRRACGGHGYSKLSGLPSLVTKLSASCTYEGENTVLYLQVARFLVKSYLQTQMSPGSTPQRSLSPSVAYLTAPDLARCPAQRAADFLCPELYTTAWAHVAVRLIKDSVQHLQTLTQSGADQHEAWNQTTVIHLQAAKVHCYYVTVKGFTEALEKLENEPAIQQVLKRLCDLHAIHGILTNSGDFLHDAFLSGAQVDMARTAYLDLLRLIRKDAILLTDAFDFTDQCLNSALGCYDGNVYERLFQWAQKSPTNTQENPAYEEYIRPLLQSWRSKL

SEQ ID NO: 12130 - protein, 78 aa, Homo sapiens
MARTAYLDLLRLIRKDAILLTDAFDFTDQCLNSALGCYDGNVYERLFQWAQKSPTNTQENPAYEEYIRPLLQSWRSKL

SEQ ID NO: 12131 - protein, 683 aa, Homo sapiens [sequence omitted]

SEQ ID NO: 12132 - protein, 681 aa, Homo sapiens; identical to SEQ ID NO: 12129

SEQ ID NO: 12133 - protein, 258 aa, Homo sapiens
MLCGRPRSSSDNRNFLRERAGLSSAAVQTRIGNSAASRRSPAARPPVPAPPALPRGRPGTEGSTSLSAPAVLVVAVAVVVVVVSAVAWAMANYIHVPPGSPEVPKLNVTVQDQEEHRCREGALSLLQHLRPHWDPQEVTLQLFTDGITNKLIGCYVGNTMEDVVLVRIYGNKTELLVDRDEEVKSFRVLQAHGCAPQLYCTFNNGLCYEFIQGEALDPKHVCNPAIFSLSSLTLCKGKTTRCFGLTGCRGSRLLLSFF

SEQ ID NO: 12134 - protein, 452 aa, Homo sapiens
MLCGRPRSSSDNRNFLRERAGLSSAAVQTRIGNSAASRRSPAARPPVPAPPALPRGRPGTEGSTSLSAPAVLVVAVAVVVVVVSAVAWAMANYIHVPPGSPEVPKLNVTVQDQEEHRCREGALSLLQHLRPHWDPQEVTLQLFTDGITNKLIGCYVGNTMEDVVLVRIYGNKTELLVDRDEEVKSFRVLQAHGCAPQLYCTFNNGLCYEFIQGEALDPKHVCNPAIFRLIARQLAKIHAIHAHNGWIPKSNLWLKMGKYFSLIPTGFADEDINKRFLSDIPSSQILQEEMTWMKEILSNLGSPVVLCHNDLLCKNIIYNEKQGDVQFIDYEYSGYNYLAYDIGNHFNEFAGVSDVDYSLYPDRELQSQWLRAYLEAYKEFKGFGTEVTEKEVEILFIQVNQFALASHFFWGLWALIQAKYSTIEFDFLGYAIVRFNQYFKMKPEVTALKVPE

SEQ ID NO: 12135 - protein, 1186 aa, Homo sapiens
MPKIVLNGVTVDFPFQPYKCQQEYMTKVLECLQQKVNGILESPTGTGKTLCLLCTTLAWREHLRDGISARKIAERAQGELFPDRALSSWGNAAAAAGDPIACYTDIPKIIYASRTHSQLTQVINELRNTSYRPKVCVLGSREQLCIHPEVKKQESNHLQIHLCRKKVASRSCHFYNNVEEKSLEQELASPILDIEDLVKSGSKHRVCPYYLSRNLKQQADIIFMPYNYLLDAKSRRAHNIDLKGTVVIFDEAHNVEKMCEESASFDLTPHDLASGLDVIDQVLEEQTKAAQQGEPHPEFSADSPSPGLNMELEDIAKLKMILLRLEGAIDAVELPGDDSGVTKPGSYIFELFAEAQITFQTKGCILDSLDQIIQHLAGRAGVFTNTAGLQKLADIIQIVFSVDPSEGSPGSPAGLGALQSYKVHIHPDAGHRRTAQRSDAWSTTAARKRGKVLSYWCFSPGHSMHELVRQGVRSLILTSGTLAPVSSFALEMQIPFPVCLENPHIIDKHQIWVGVVPRGPDGAQLSSAFDRRFSEECLSSLGKALGNIARVVPYGLLIFFPSYPVMEKSLEFWRARDLARKMEALKPLFVEPRSKGSFSETISAYYARVAAPGSTGATFLAVCRGKASEGLDFSDTNGRGVIVTGLPYPPRMDPRVVLKMQFLDEMKGQGGAGGQFLSGQEWYRQQASRAVNQAIGRVIRHRQDYGAVFLCDHRFAFADARAQLPSWVRPHVRVYDNFGHVIRDVAQFFRVAERTMPAPAPRATAPSVRGEDAVSEAKSPGPFFSTRKAKSLDLHVPSLKQRSSGSPAAGDPESSLCVEYEQEPVPARQRPRGLLAALEHSEQRAGSPGEEQAHSCSTLSLLSEKRPAEEPRGGRKKIRLVSHPEEPVAGAQTDRAKLFMVAVKQELSQANFATFTQALQDYKGSDDFAALAACLGPLFAEDPKKHNLLQGFYQFVRPHHKQQFEEVCIQLTGRGCGYRPEHSIPRRQRAQPVLDPTGRTAPDPKLTVSTAAAQQLDPQEHLNQGRPHLSPRPPPTGDPGSQPQWGSGVPRAGKQGQHAVSAYLADARRALGSAGCSQLLAALTAYKQDDDLDKVLAVLAALTTAKPEDFPLLHSKVQHVCASTPQAALLTDVHRPDRPALPGHGATGTPGGEACRASCAYPQGSPTRPLTVREDREDPEQDLVLP

SEQ ID NO: 12136 - protein, 713 aa, Homo sapiens
MPKIVLNGVTVDFPFQPYKCQQEYMTKVLECLQQKVNGILESPTGTGKTLCLLCTTLAWREHLRDGISARKIAERAQGELFPDRALSSWGNAAAAAGDPIACYTDIPKIIYASRTHSQLTQVINELRNTSYRPKVCVLGSREQLCIHPEVKKQESNHLQIHLCRKKVASRSCHFYNNVEEKSLEQELASPILDIEDLVKSGSKHRVCPYYLSRNLKQQADIIFMPYNYLLDAKSRRAHNIDLKGTVVIFDEAHNVEKMCEESASFDLTPHDLASGLDVIDQVLEEQTKAAQQGLNMELEDIAKLKMILLRLEGAIDAVELPGDDSGVTKPGSYIFELFAEAQITFQTKGCILDSLDQIIQHLAGRWGFTAAAAGAAAPALCSKRQVVRPPVPSSHSVPSAAPRPTGKVLSYWCFSPGHSMHELVRQGVRSLILTSGTLAPVSSFALEMQIPFPVCLENPHIIDKHQIWVGVVPRGPDGAQLSSAFDRRFSEECLSSLGKALGNIARVVPYGLLIFFPSYPVMEKSLEFWRARDLARKMEALKPLFVEPRSKGSFSETISAYYARVAAPGSTGATFLAVCRGKASEGLDFSDTNGRGVIVTGLPYPPRMDPRVVLKMQFLDEMKGQGGAGGQEWYRQQASRAVNQAIGRVIRHRQDYGAVFLCDHRCVQSGGRRGARGHAHTPLGPWTLLPHMRPRLLQSLSGYSGSAWGPCSR

SEQ ID NO: 12137 - protein, 807 aa, Homo sapiens
MPKIVLNGVTVDFPFQPYKCQQEYMTKVLECLQQKVNGILESPTGTGKTLCLLCTTLAWREHLRDGISARKIAERAQGELFPDRALSSWGNAAAAAGDPIACYTDIPKIIYASRTHSQLTQVINELRNTSYRSLLRPGHVSVMLTSSDRRGSCVSPYSSRCRATLWVLETAPPRPTVLSPTRPKVCVLGSREQLCIHPEVKKQESNHLQIHLCRKKVASRSCHFYNNVEEKSLEQELASPILDIEDLVKSGSKHRVCPYYLSRNLKQQADIIFMPYNYLLDAKSRRAHNIDLKGTVVIFDEAHNVEKMCEESASFDLTPHDLASGLDVIDQVLEEQTKAAQQGEPHPEFSADSPSPGLNMELEDIAKLKMILLRLEGAIDAVELPGDDSGVTKPGSYIFELFAEAQITFQTKGCILDSLDQIIQHLAGRAGVFTNTAGLQKLADIIQIVFSVDPSEGSPGSPAGLGALQSYKVHIHPDAGHRRTAQRSDAWSTTAARKRGKVLSYWCFSPGHSMHELVRQGVRSLILTSGTLAPVSSFALEMQIPFPVCLENPHIIDKHQIWVGVVPRGPDGAQLSSAFDRRFSEECLSSLGKALGNIARVVPYGLLIFFPSYPVMEKSLEFWRARDLARKMEALKPLFVEPRSKGSFSETISAYYARVAAPGSTGATFLAVCRGKASEGLDFSDTNGRGVIVTGLPYPPRMDPRVVLKMQFLDEMKGQGGAGGQEWYRQQASRAVNQAIGRVIRHRQDYGAVFLCDHRCVQSGGRRGARGHAHTPLGPWTLLPHMRPRLLQSLSGYSGSAWGPCSR

SEQ ID NO: 12138 - protein, 1023 aa, Homo sapiens
MPKIVLNGVTVDFPFQPYKCQQEYMTKVLECLQQKVNGILESPTGTGKTLCLLCTTLAWREHLRDGISARKIAERAQGELFPDRALSSWGNAAAAAGDPIACYTDIPKIIYASRTHSQLTQVINELRNTSYRPKVCVLGSREQLCIHPEVKKQESNHLQIHLCRKKVASRSCHFYNNVEEKSLEQELASPILDIEDLVKSGSKHRVCPYYLSRNLKQQADIIFMPYNYLLDAKSRRAHNIDLKGTVVIFDEAHNVEKMCEESASFDLTPHDLASGLDVIDQVLEEQTKAAQQGEPHPEFSADSPSPGLNMELEDIAKLKMILLRLEGAIDAVELPGDDSGVTKPGSYIFELFAEAQITFQTKGCILDSLDQIIQHLAGRAGVFTNTAGLQKLADIIQIVFSVDPSEGSPGSPAGLGALQSYKVHIHPDAGHRRTAQRSDAWSTTAARKRGKVLSYWCFSPGHSMHELVRQGVRSLILTSGTLAPVSSFALEMQIPFPVCLENPHIIDKHQIWVGVVPRGPDGAQLSSAFDRRFSEECLSSLGKALGNIARVVPYGLLIFFPSYPVMEKSLEFWRARDLARKMEALKPLFVEPRSKGSFSETISAYYARVAAPGSTGATFLAVCRGKASEGLDFSDTNGRGVIVTGLPYPPRMDPRVVLKMQFLDEMKGQGGAGGQFLSGQEWYRQQASRAVNQAIGRVIRHRQDYGAVFLCDHRFAFADARAQLPSWVRPHVRVYDNFGHVIRDVAQFFRVAERTMPAPAPRATAPSVRGEDAVSEAKSPGPFFSTRKAKSLDLHVPSLKQRSSGSPAAGDPESSLCVEYEQEPVPARQRPRGLLAALEHSEQRAGSPGEEQAHSCSTLSLLSEKRPAEEPRGGRKKIRLVSHPEEPVAGAQTDRAKLFMVAVKQELSQANFATFTQALQDYKGSDDFAALAACLGPLFAEDPKKHNLLQGFYQFVRPHHKQQFEEVCIQLTGRGCGYRPEHSIPRRQRAQPVLDPTGNFPDALDQLCGSTSLHQEERRRIPS

SEQ ID NO: 12139 - protein, 300 aa, Homo sapiens
MRALEGPGLSLLCLVLALPALLPVPAVRGVAETPTYPWRDAETGERLVCAQCPPGTFVQRPCRRDSPTTCGPCPPRHYTQFWNYLERCRYCNVLCGEREEEARACHATHNRACRCRTGFFAHAGFCLEHASCPPGAGVIAPGTPSQNTQCQPCPPGTFSASSSSSEQCQPHRNCTALGLALNVPGSSSHDTLCTSCTGFPLSTRVPGAEECERAVIDFVAFQDISIKRLQRLLQALEAPEGWGPTPRAGRAALQLKLRRRLTELLGAQDGALLVRLLQALRVARMPGLERSVRERFLPVH

SEQ ID NO: 12140 - protein, 1219 aa, Homo sapiens
MPKIVLNGVTVDFPFQPYKCQQEYMTKVLECLQQKVNGILESPTGTGKTLCLLCTTLAWREHLRDGISARKIAERAQGELFPDRALSSWGNAAAAAGDPIACYTDIPKIIYASRTHSQLTQVINELRNTSYRPKVCVLGSREQLCIHPEVKKQESNHLQIHLCRKKVASRSCHFYNNVEEKSLEQELASPILDIEDLVKSGSKHRVCPYYLSRNLKQQADIIFMPYNYLLDAKSRRAHNIDLKGTVVIFDEAHNVEKMCEESASFDLTPHDLASGLDVIDQVLEEQTKAAQQGEPHPEFSADSPSPGLNMELEDIAKLKMILLRLEGAIDAVELPGDDSGVTKPGSYIFELFAEAQITFQTKGCILDSLDQIIQHLAGRAGVFTNTAGLQKLADIIQIVFSVDPSEGSPGSPAGLGALQSYKVHIHPDAGHRRTAQRSDAWSTTAARKRGKVLSYWCFSPGHSMHELVRQGVRSLILTSGTLAPVSSFALEMQIPFPVCLENPHIIDKHQIWVGVVPRGPDGAQLSSAFDRRFSEECLSSLGKALGNIARVVPYGLLIFFPSYPVMEKSLEFWRARDLARKMEALKPLFVEPRSKGSFSETISAYYARVAAPGSTGATFLAVCRGKASEGLDFSDTNGRGVIVTGLPYPPRMDPRVVLKMQFLDEMKGQGGAGGQFLSGQEWYRQQASRAVNQAIGRVIRHRQDYGAVFLCDHRFAFADARAQLPSWVRPHVRVYDNFGHVIRDVAQFFRVAERTMPAPAPRATAPSVRGEDAVSEAKSPGPFFSTRKAKSLDLHVPSLKQRSSGSPAAGDPESSLCVEYEQEPVPARQRPRGLLAALEHSEQRAGSPGEEQAHSCSTLSLLSEKRPAEEPRGGRKKIRLVSHPEEPVAGAQTDRAKLFMVAVKQELSQANFATFTQALQDYKGSDDFAALAACLGPLFAEDPKKHNLLQGFYQFVRPHHKQQFEEVCIQLTGRGCGYRPEHSIPRRQRAQPVLDPTGRTAPDPKLTVSTAAAQQLDPQEHLNQGRPHLSPRPPPTGDPGSQPQWGSGVPRAGKQGQHAVSAYLADARRALGSAGCSQLLAALTAYKQDDDLDKVLAVLAALTTAKPEDFPLLHRFSMFVRPHHKQRFSQTCTDLTGRPYPGMEPPGPQEERLAVPPVLTHRAPQPGPSRSEKTGKTQSKISSFLRQRPAGTVGAGGEDAGPSQSSGPPHGPAASEWGL

SEQ ID NO: 12141 - protein, 1175 aa, Homo sapiens
MPKIVLNGVTVDFPFQPYKCQQEYMTKVLECLQQKVNGILESPTGTGKTLCLLCTTLAWREHLRDGISARKIAERAQGELFPDRALSSWGNAAAAAGDPIACYTDIPKIIYASRTHSQLTQVINELRNTSYRPKVCVLGSREQLCIHPEVKKQESNHLQIHLCRKKVASRSCHFYNNVEEKSLEQELASPILDIEDLVKSGSKHRVCPYYLSRNLKQQADIIFMPYNYLLDAKSRRAHNIDLKGTVVIFDEAHNVEKMCEESASFDLTPHDLASGLDVIDQVLEEQTKAAQQGLNMELEDIAKLKMILLRLEGAIDAVELPGDDSGVTKPGSYIFELFAEAQITFQTKGCILDSLDQIIQHLAGRWGFTAAAAGAAAPALCSKRQVVRPPVPSSHSVPSAAPRPTGKVLSYWCFSPGHSMHELVRQGVRSLILTSGTLAPVSSFALEMQIPFPVCLENPHIIDKHQIWVGVVPRGPDGAQLSSAFDRRFSEECLSSLGKALGNIARVVPYGLLIFFPSYPVMEKSLEFWRARDLARKMEALKPLFVEPRSKGSFSETISAYYARVAAPGSTGATFLAVCRGKASEGLDFSDTNGRGVIVTGLPYPPRMDPRVVLKMQFLDEMKGQGGAGGQFLSGQEWYRQQASRAVNQAIGRVIRHRQDYGAVFLCDHRFAFADARAQLPSWVRPHVRVYDNFGHVIRDVAQFFRVAERTMPAPAPRATAPSVRGEDAVSEAKSPGPFFSTRKAKSLDLHVPSLKQRSSGSPAAGDPESSLCVEYEQEPVPARQRPRGLLAALEHSEQRAGSPGEEQAHSCSTLSLLSEKRPAEEPRGGRKKIRLVSHPEEPVAGAQTDRAKLFMVAVKQELSQANFATFTQALQDYKGSDDFAALAACLGPLFAEDPKKHNLLQGFYQFVRPHHKQQFEEVCIQLTGRGCGYRPEHSIPRRQRAQPVLDPTGRTAPDPKLTVSTAAAQQLDPQEHLNQGRPHLSPRPPPTGDPGSQPQWGSGVPRAGKQGQHAVSAYLADARRALGSAGCSQLLAALTAYKQDDDLDKVLAVLAALTTAKPEDFPLLHRFSMFVRPHHKQRFSQTCTDLTGRPYPGMEPPGPQEERLAVPPVLTHRAPQPGPSRSEKTGKTQSKISSFLRQRPAGTVGAGGEDAGPSQSSGPPHGPAASEWGL

SEQ ID NO: 12142 - protein, 342 aa, Homo sapiens
MGFWTWAAPPQADRGQRRWHVGQAQQGPVSALSRALPAPARTMRALEGPGLSLLCLVLALPALLPVPAVRGVAETPTYPWRDAETGERLVCAQCPPGTFVQRPCRRDSPTTCGPCPPRHYTQFWNYLERCRYCNVLCGEREEEARACHATHNRACRCRTGFFAHAGFCLEHASCPPGAGVIAPGTPSQNTQCQPCPPGTFSASSSSSEQCQPHRNCTALGLALNVPGSSSHDTLCTSCTGFPLSTRVPGAEECERAVIDFVAFQDISIKRLQRLLQALEAPEGWGPTPRAGRAALQLKLRRRLTELLGAQDGALLVRLLQALRVARMPGLERSVRERFLPVH

SEQ ID NO: 12143 - protein, 1400 aa, Homo sapiens [sequence omitted]

SEQ ID NO: 12144 - protein, 1137 aa, Homo sapiens
MPKIVLNGVTVDFPFQPYKCQQEYMTKVLECLQQKVNGILESPTGTGKTLCLLCTTLAWREHLRDGISARKIAERAQGELFPDRALSSWGNAAAAAGDPIACYTDIPKIIYASRTHSQLTQVINELRNTSYRPKVCVLGSREQLCIHPEVKKQESNHLQIHLCRKKVASRSCHFYNNVEEKSLEQELASPILDIEDLVKSGSKHRVCPYYLSRNLKQQADIIFMPYNYLLDAKSRRAHNIDLKGTVVIFDEAHNVEKMCEESASFDLTPHDLASGLDVIDQVLEEQTKAAQQGEPHPEFSADSPSPGLNMELEDIAKLKMILLRLEGAIDAVELPGDDSGVTKPGSYIFELFAEAQITFQTKGCILDSLDQIIQHLAGRAGVFTNTAGLQKLADIIQIVFSVDPSEGSPGSPAGLGALQSYKVHIHPDAGHRRTAQRSDAWSTTAARKRGKVLSYWCFSPGHSMHELVRQGVRSLILTSGTLAPVSSFALEMQIPFPVCLENPHIIDKHQIWVGVVPRGPDGAQLSSAFDRRFSEECLSSLGKALGNIARVVPYGLLIFFPSYPVMEKSLEFWRARDLARKMEALKPLFVEPRSKGSFSETISAYYARVAAPGSTGATFLAVCRGKFLSGQEWYRQQASRAVNQAIGRVIRHRQDYGAVFLCDHRFAFADARAQLPSWVRPHVRVYDNFGHVIRDVAQFFRVAERTMPAPAPRATAPSVRGEDAVSEAKSPGPFFSTRKAKSLDLHVPSLKQRSSGSPAAGDPESSLCVEYEQEPVPARQRPRGLLAALEHSEQRAGSPGEEQAHSCSTLSLLSEKRPAEEPRGGRKKIRLVSHPEEPVAGAQTDRAKLFMVAVKQELSQANFATFTQALQDYKGSDDFAALAACLGPLFAEDPKKHNLLQGFYQFVRPHHKQQFEEVCIQLTGRGCGYRPEHSIPRRQRAQPVLDPTGRTAPDPKLTVSTAAAQQLDPQEHLNQGRPHLSPRPPPTGDPGSQPQWGSGVPRAGKQGQHAVSAYLADARRALGSAGCSQLLAALTAYKQDDDLDKVLAVLAALTTAKPEDFPLLHSKVQHVCASTPQAALLTDVHRPDRPALPGHGATGTPGGEACRASCAYPQGSPTRPLTVREDREDPEQDLVLP

SEQ ID NO: 12145 - protein, 545 aa, Homo sapiens
MPAPAPRATAPSVRGEDAVSEAKSPGPFFSTRKAKSLDLHVPSLKQRSSGSPAAGDPESSLCVEYEQEPVPARQRPRGLLAALEHSEQRAGSPGEEQAHSCSTLSLLSEKRPAEEPRGGRKKIRLVSHPEEPVAGAQTDRAKLFMVAVKQELSQANFATFTQALQDYKGSDDFAALAACLGPLFAEDPKKHNLLQGFYQFVRPHHKQQFEEVCIQLTGRGCGYRPEHSIPRRQRAQPVLDPTGRTAPDPKLTVSTAAAQQLDPQEHLNQGRPHLSPRPPPTGDPGSQPQWGSGVPRAGKQGQHAVSAYLADARRALGSAGCSQLLAALTAYKQDDDLDKVLAVLAALTTAKPEDFPLLHRFSMFVRPHHKQRFSQTCTDLTGRPYPGMEPPGPQEERLAVPPVLTHRAPQPGPSRSEKTGKTQSKISSFLRQRPAGTVGAGGEDAGPSQSSGPPHGPAASEWGEPHGRDIAGQQATGAPGGPLSAGCVCQGCGAEDVVPFQCPACDFQRCQACWQRHLQASRMCPACHTASRKQSVMQVFWPEPQ

SEQ ID NO: 12146 - protein, 1400 aa, Homo sapiens [sequence omitted]

SEQ ID NO: 12147 - protein, 548 aa, Homo sapiens
MAAPPARADADPSPTSPPTARDTPGRQAEKSETACEDRSNAESLDRLLPPVGTGRSPRKRTTSQCKSEPPLLRTSKRTIYTAGRPPWYNEHGTQSKEAFAIGLGGGSASGKTTVARMIIEALDVPWVVLLSMDSFYKVLTEQQQEQAAHNNFNFDHPDAFDFDLIISTLKKLKQGKSVKVPIYDFTTHSRKKDWKTLYGANVIIFEGIMAFADKTLLELLDMKIFVDTDSDIRLVRRLRRDISERGRDIEGVIKQYNKFVKPSFDQYIQPTMRLADIVVPRGSGNTVAIDLIVQHVHSQLEERELSVRAALASAHQCHPLPRTLSVLKSTPQVRGMHTIIRDKETSRDEFIFYSKRLMRLLIEHALSFLPFQDCVVQTPQGQDYAGKCYAGKQITGVSILRAGETMEPALRAVCKDVRIGTILIQTNQLTGEPELHYLRLPKDISDDHVILMDCTVSTGAAAMMAVRVLLDHDVPEDKIFLLSLLMAEMGVHSVAYAFPRVRIITTAVDKRVNDLFRIIPGIGNFGDRYFGTDAVPDGSDEEEVAYTG

SEQ ID NO: 12148 - protein, 198 aa, Homo sapiens
MRLLIEHALSFLPFQDCVVQTPQGQDYAGKCYAGKQITGVSILRAGETMEPALRAVCKDVRIGTILIQTNQLTGEPEPDPCCPQLHYLRLPKDISDDHVILMDCTVSTGAAAMMAVRVLLDHDVPEDKIFLLSLLMAEMGVHSVAYAFPRVRIITTAVDKRVNDLFRIIPGIGNFGDRYFGTDAVPDGSDEEEVAYTG

SEQ ID NO: 12149 - protein, 323 aa, Homo sapiens [sequence omitted]

SEQ ID NO: 12150 - protein, 1144 aa, Homo sapiens
MPRNQGFSEPEYSAEYSAEYSVSLPSDPDRGVGRTHEISVRNSGSCLCLPRFMRLTFVPESLENLYQTYFKRQRHETLLVLVVFAALFDCYVVVMCAVVFSSDKLASLAVAGIGLVLDIILFVLCKKGLLPDRVTRRVLPYVLWLLITAQIFSYLGLNFARAHAASDTVGWQVFFVFSFFITLPLSLSPIVIISVVSCVVHTLVLGVTVAQQQQEELKGMQLLREILANVFLYLCAIAVGIMSYYMADRKHRKAFLEARQSLEVKMNLEEQSQQQENLMLSILPKHVADEMLKDMKKDESQKDQQQFNTMYMYRHENVSILFADIVGFTQLSSACSAQELVKLLNELFARFDKLAAKYHQLRIKILGDCYYCICGLPDYREDHAVCSILMGLAMVEAISYVREKTKTGVDMRVGVHTGTVLGGVLGQKRWQYDVWSTDVTVANKMEAGGIPGRVHISQSTMDCLKGEFDVEPGDGGSRCDYLEEKGIETYLIIASKPEVKKTATQNGLNGSALPNGAPASSKSSSPALIETKEPNGSAHSSGSTSEKPEEQDAQADNPSFPNPRRRLRLQDLADRVVDASEDEHELNQLLNEALLERESAQVVKKRNTFLLSMRFMDPEMETRYSVEKEKQSGAAFSCSCVVLLCTALVEILIDPWLMTNYVTFMVGEILLLILTICSLAAIFPRAFPKKLVAFSTWIDRTRWARNTWAMLAIFILVMANVVDMLSCLQYYTGPSNATAGMETEGSCLENPKYYNYVAVLSLIATIMLVQVSHMVKLTLMLLVAGAVATINLYAWRPVFDEYDHKRFREHDLPMVALEQMQGFNPGLNGTDRLPLVPSKYSMTVMVFLMMLSFYYFSRHVEKLARTLFLWKIEVHDQKERVYEMRRWNEALVTNMLPEHVARHFLGSKKRDEELYSQTYDEIGVMFASLPNFADFYTEESINNGGIECLRFLNEIISDFDSLLDNPKFRVITKIKTIGSTYMAASGVTPDVNTNGFASSNKEDKSERERWQHLADLADFALAMKDTLTNINNQSFNNFMLRIGMNKGGVLAGVIGARKPHYDIWGNTVNVASRMESTGVMGNIQVVEETQVILREYGFRFVRRGPIFVKGKGELLTFFLKGRDKLATFPNGPSVTLPHQVVDNS

SEQ ID NO: 12151 - protein, 1144 aa, Homo sapiens; identical to SEQ ID NO: 12150

SEQ ID NO: 12152 - protein, 1096 aa, Homo sapiens
MPRNQGFSEPEYSAEYSAEYSVSLPSDPDRGVGRTHEISVRNSGSCLCLPRFMRLTFVPESLENLYQTYFKRQRHETLLVLVVFAALFDCYVVVMCAVVFSSDKLASLAVAGIGLVLDIILFVLCKKGLLPDRVTRRVLPYVLWLLITAQIFSYLGLNFARAHAASDTVGWQVFFVFSFFITLPLSLSPIVIISVVSCVVHTLVLGVTVAQQQQEELKGMQLLREILANVFLYLCAIAVGIMSYYMADRKHRKAFLEARQSLEVKMNLEEQSQQQENLMLSILPKHVADEMLKDMKKDESQKDQQQFNTMYMYRHENVSILFADIVGFTQLSSACSAQELVKLLNELFARFDKLAAKYHQLRIKILGDCYYCICGLPDYREDHAVCSILMGLAMVEAISYVREKTKTGVDMRVGVHTGTVLGGVLGQKRWQYDVWSTDVTVANKMEAGGIPGRVHISQSTMDCLKGEFDVEPGDGGSRCDYLEEKGIETYLIIASKPEVKKTATQNGLNGSALPNGAPASSKSSSPALIETKEPNGSAHSSGSTSEKPEEQDAQADNPSFPNPRRRLRLQDLADRVVDASEDEHELNQLLNEALLERESAQVVKKRNTFLLSMRFMDPEMETRYSVEKEKQSGAAFSCSCVVLLCTALVEILIDPWLMTNYVTFMVGEILLLILTICSLAAIFPRAFPKKLVAFSTWIDRTRWARNTWAMLAIFILVMANVVDMLSCLQYYTGPSNATAGMETEGSCLENPKYYNYVAVLSLIATIMLVQVSHMVKLTLMLLVAGAVATINLYAWRPVFDEYDHKRFREHDLPMVALEQMQGFNPGLNGTDRLPLVPSKYSMTVMVFLMMLSFYYFSRHVEKLARTLFLWKIEVHDQKERVYEMRRWNEALVTNMLPEHVARHFLGSKKRDEELYSQTYDEIGVMFASLPNFADFYTEESINNGGIECLRFLNEIISDFDSVSAHPTLHSGHEAGPFHITSYNRLQRPEKLASFSQISPFRNTWTSAATWNCWAGEGEVRWEPGKSPTGSQDKDKDWPSNISRPLCPGTVSSNSEPVSIDWVTCIPGRMLLHTRGAPLGDCRFYVSVEVVETGPES

SEQ ID NO: 12153 - protein, 1108 aa, Homo sapiens
MPRNQGFSEPEYSAEYSAEYSVSLPSDPDRGVGRTHEISVRNSGSCLCLPRFMRLTFVPESLENLYQTYFKRQRHETLLVLVVFAALFDCYVVVMCAVVFSSDKLASLAVAGIGLVLDIILFVLCKKGLLPDRVTRRVLPYVLWLLITAQIFSYLGLNFARAHAASDTVGWQVFFVFSFFITLPLSLSPIVIISVVSCVVHTLVLGVTVAQQQQEELKGMQLLREILANVFLYLCAIAVGIMSYYMADRKHRKAFLEARQSLEVKMNLEEQSQQQENLMLSILPKHVADEMLKDMKKDESQKDQQQFNTMYMYRHENVSILFADIVGFTQLSSACSAQELVKLLNELFARFDKLAAKYHQLRIKILGDCYYCICGLPDYREDHAVCSILMGLAMVEAISYVREKTKTGVDMRVGVHTGTVLGGVLGQKRWQYDVWSTDVTVANKMEAGGIPGRVHISQSTMDCLKGEFDVEPGDGGSRCDYLEEKGIETYLIIASKPEVKKTATQNGLNGSALPNGAPASSKSSSPALIETKEPNGSAHSSGSTSEKPEEQDAQADNPSFPNPRRRLRLQDLADRVVDASEDEHELNQLLNEALLERESAQVVKKRNTFLLSMRFMDPEMETRYSVEKEKQSGAAFSCSCVVLLCTALVEILIDPWLMTNYVTFMVGEILLLILTICSLAAIFPRAFPKKLVAFSTWIDRTRWARNTWAMLAIFILVMANVVDMLSCLQYYTGPSNATAGMETEGSCLENPKYYNYVAVLSLIATIMLVQVSHMVKLTLMLLVAGAVATINLYAWRPVFDEYDHKRFREHDLPMVALEQMQGFNPGLNGTDRLPLVPSKYSMTVMVFLMMLSFYYFSRHVEKLARTLFLWKIEVHDQKERVYEMRRWNEALVTNMLPEHVARHFLGSKKRDEELYSQTYDEIGVMFASLPNFADFYTEESINNGGIECLRFLNEIISDFDSLLDNPKFRVITKIKTIGSTYMAASGVTPDVNTNGFASSNKEDKSERERWQHLADLADFALAMKDTLTNINNQSFNNFMLRIGMNKGGVLAGVIGARKPHYDIWGNTVNVASRMESTGVMGNIQWRLAEKLHERGKGTEEQAVAVSRW

SEQ ID NO: 12154 - protein, 912 aa, Homo sapiens
MPAMPSSGPGDTSSSAAEREEDRKDGEEQEEPRGKEERQEPSTTARKVGRPGRKRKHPPVESGDTPKDPAVISKSPSMAQDSGASELLPNGDLEKRSEPQPEEGSPAGGQKGGAPAEGEGAAETLPEASRAVENGCCTPKEGRGAPAEAGKEQKETNIESMKMEGSRGRLRGGLGWESSLRQRPMPRLTFQAGDPYYISKRKRDEWLARWKREAEKKAKVIAGMNAVEENQGPGESQKVEEASPPAVQQPTDPASPTVATTPEPVGSDAGDKNATKAGDDEPEYEDGRGFGIGELVWGKLRGFSWWPGRIVSWWMTGRSRAAEGTRWVMWFGDGKFSVVCVEKLMPLSSFCSAFHQATYNKQPMYRKAIYEVLQVASSRAGKLFPVCHDSDESDTAKAVEVQNKPMIEWALGGFQPSGPKGLEPPEEEKNPYKEVYTDMWVEPEAAAYAPPPPAKKPRKSTAEKPKVKEIIDERTRERLVYEVRQKCRNIEDICISCGSLNVTLEHPLFVGGMCQNCKNCFLECAYQYDDDGYQSYCTICCGGREVLMCGNNNCCRCFCVECVDLLVGPGAAQAAIKEDPWNCYMCGHKGTYGLLRRREDWPSRLQMFFANNHDQEFDPPKVYPPVPAEKRKPIRVLSLFDGIATGLLVLKDLGIQVDRYIASEVCEDSITVGMVRHQGKIMYVGDVRSVTQKHIQEWGPFDLVIGGSPCNDLSIVNPARKGLYEGTGRLFFEFYRLLHDARPKEGDDRPFFWLFENVVAMGVSDKRDISRFLESNPVMIDAKEVSAAHRARYFWGNLPGMNRPLASTVNDKLELQECLEHGRIAKFSKVRTITTRSNSIKQGKDQHFPVFMNEKEDILWCTEMERVFGFPVHYTDVSNMSRLARQRLLGRSWSVPVIRHLFAPLKEYFACV

SEQ ID NO: 12155 - protein, 912 aa, Homo sapiens; identical to SEQ ID NO: 12154

SEQ ID NO: 12156 - protein, 914 aa, Homo sapiens [sequence omitted]

SEQ ID NO: 12157 - protein, 459 aa, Homo sapiens
MTAEEMKATESGAQSAPLPMEGVDISPKQDEGVLKVIKREGTGTEMPMIGDRVFVHYTGWLLDGTKFDSSLDRKDKFSFDLGKGEVIKAWDIAIATMKVGEVCHITCKPEYAYGSAGSPPKIPPNATLVFEVELFEFKGEDLTEEEDGGIIRRIQTRGEGYAKPNEGAIVEVALEGYYKDKLFDQRELRFEIGEGENLDLPYGLERAIQRMEKGEHSIVYLKPSYAFGSVGKEKFQIPPNAELKYELHLKSFEKAKESWEMNSEEKLEQSTIVKERGTVYFKEGKYKQALLQYKKIVSWLEYESSFSNEEAQKAQALRLASHLNLAMCHLKLQAFSAAIESCNKALELDSNNEKGLFRRGEAHLAVNDFELARADFQKVLQLYPNNKAAKTQLAVCQQRIRRQLAREKKLYANMFERLAEEENKAKAEASSGDHPTDTEMKEEQKSNTAGSQSQVETEA

SEQ ID NO: 12158 - protein, 459 aa, Homo sapiens; identical to SEQ ID NO: 12157

SEQ ID NO: 12159 - protein, 55 aa, Homo sapiens
MTRVALQAEKLDHHPEWFNVYNKVHITLSTHECAGLSERDINLASFIEQVAVSMT

SEQ ID NO: 12160 - protein, 104 aa, Homo sapiens
MAGKAHRLSAEERDQLLPNLRAVGWNELEGRDAIFKQFHFKDFNRAFGFMTRVALQAEKLDHHPEWFNVYNKVHITLSTHECAGLSERDINLASFIEQVAVSMT

SEQ ID NO: 12161 - protein, 104 aa, Homo sapiens
MAGKAHRLSAEERDQLLPNLRAVGWNELEGRDAIFKQFHFKDFNRAFGFMTRVALQAEKLDHHPEWFNVYNKVSRLQASGVQQYHLLSWFSSLPTTDLGTCQPP

SEQ ID NO: 12162 - protein, 38 aa, Homo sapiens
MKEPSADPESVTHGSQRGVQEMEGAMFEQSGPQPEGQC

SEQ ID NO: 12163 - protein, 267 aa, Homo sapiens [sequence omitted]

SEQ ID NO: 12164 - protein, 331 aa, Homo sapiens
MGTPQKDVIIKSDAPDTLLLEKHADYIASYGSKKDDYEYCMSEYLRMSGIYWGLTVMDLMGQLHRMNREEILAFIKSCQHECGGISASIGHDPHLLYTLSAVQILTLYDSINVIDVNKVVEYVKGLQKEDGSFAGDIWGEIDTRFSFCAVATLALLGKLDAINVEKAIEFVLSCMNFDGGFGCRPGSESHAGQIYCCTGFLAITSQLHQVNSDLLGWWLCERQLPSGGLNGRPEKLPDVCYSWWVLASLKIIGRLHWIDREKLRNFILACQDEETGGFADRPGDMVDPFHTLFGIAGLSLLGEEQIKPVNPVFCMPEEVLQRVNVQPELVS

SEQ ID NO: 12165 - protein, 291 aa, Homo sapiens [sequence omitted]

SEQ ID NO: 12166 - protein, 591 aa, Homo sapiens
MKYILVTGGVISGIGKGIIASSVGTILKSCGLHVTSIKIDPYINIDAGTFSPYEHGEVFVLDDGGEVDLDLGNYERFLDIRLTKDNNLTTGKIYQYVINKERKGDYLGKTVQVVPHITDAIQEWVMRQALIPVDEDGLEPQVCVIELGGTVGDIESMPFIEAFRQFQFKVKRENFCNIHVSLVPQPSSTGEQKTKPTQNSVRELRGLGLSPDLVVCRCSNPLDTSVKEKISMFCHVEPEQVICVHDVSSIYRVPLLLEEQGVVDYFLRRLDLPIERQPRKMLMKWKEMADRYDRLLETCSIALVGKYTKFSDSYASVIKALEHSALAINHKLEIKYIDSADLEPITSQEEPVRYHEAWQKLCSAHGVLVPGGFGVRGTEGKIQAIAWARNQKKPFLGVCLGMQLAVVEFSRNVLGWQDANSTEFDPTTSHPVVVDMPEHNPGQMGGTMRLGKRRTLFQTKNSVMRKLYGDADYLEERHRHRFEVNPVWKKCLEEQGLKFVGQDVEGERMEIVELEDHPFFVGVQYHPEFLSRPIKPSPPYFGLLLASVGRLSHYLQKGCRLSPRDTYSDRSGSSSPDSEITELKFPSINHD

SEQ ID NO: 12167 - protein, 231 aa, Homo sapiens
MAGKKVLIVYAHQEPKSFNGSLKNVAVDELSRQGCTVTVSDLYAMNFEPRATDKDITGTLSNPEVFNYGVETHEAYKQRSLASDITDEQKKVREADLVIFQFPLYWFSVPAILKGWMDRVLCQGFAFDIPGFYDSGLLQGKLALLSVTTGGTAEMYTKTGVNGDSRYFLWPLQHGTLHFCGFKVLAPQISFAPEIASEEERKGMVAAWSQRLQTIWKEEPIPCTAHWHFGQ

SEQ ID NO: 12168 - protein, 231 aa, Homo sapiens; identical to SEQ ID NO: 12167

SEQ ID NO: 12169 - protein, 231 aa, Homo sapiens; identical to SEQ ID NO: 12167

SEQ ID NO: 12170 - protein, 231 aa, Homo sapiens; identical to SEQ ID NO: 12167

SEQ ID NO: 12171 - protein, 115 aa, Homo sapiens
MDRVLCQGFAFDIPGFYDSGLLQGKLALLSVTTGGTAEMYTKTGVNGDSRYFLWPLQHGTLHFCGFKVLAPQISFAPEIASEEERKGMVAAWSQRLQTIWKEEPIPCTAHWHFGQ

SEQ ID NO: 12172 - protein, 231 aa, Homo sapiens; identical to SEQ ID NO: 12167

SEQ ID NO: 12173 - protein, 274 aa, Homo sapiens
MPRNLLYSLLSSHLSPHFSTSVTSAKVAVNGVQLHYQQTGEGDHAVLLLPGMLGSGETDFGPQLKNLNKKLFTVVAWDPRGYGHSRPPDRDFPADFFERDAKDAVDLMKALKFKKVSLLGWSDGGITALIAAAKYPSYIHKMVIWGANAYVTDEDSMIYEGIRDVSKWSERTRKPLEALYGYDYFARTCEKWVDGIRQFKHLPDGNICRHLLPRVQCPALIVHGEKDPLVPRFHADFIHKHVKGSRLHLMPEGKHNLHLRFADEFNKLAEDFLQ

SEQ ID NO: 12174 - protein, 274 aa, Homo sapiens; identical to SEQ ID NO: 12173

SEQ ID NO: 12175 - protein, 348 aa, Homo sapiens
MGKHPAGRGFGAGRAEGGAGWRGEVGGAEGVASGQSGPGTALGLSACALPAATRPVTMVAVLGGRGVLRLRLLLSALKPGIHVPRAGPAAAFGTSVTSAKVAVNGVQLHYQQTGEGDHAVLLLPGMLGSGETDFGPQLKNLNKKLFTVVAWDPRGYGHSRPPDRDFPADFFERDAKDAVDLMKALKFKKVSLLGWSDGGITALIAAAKYPSYIHKMVIWGANAYVTDEDSMIYEGIRDVSKWSERTRKPLEALYGYDYFARTCEKWVDGIRQFKHLPDGNICRHLLPRVQCPALIVHGEKDPLVPRFHADFIHKHVKGSRLHLMPEGKHNLHLRFADEFNKLAEDFLQ

SEQ ID NO: 12176 - protein, 425 aa, Homo sapiens
MAAGFGRCCRCSLQVLRSISRFHWRSQHTKANRQREPGLGFSFEFTEQQKEFQATARKFAREEIIPVAAEYDKTGEYPVPLIRRAWELGLMNTHIPENCGGLGLGTFDACLISEELAYGCTGVQTAIEGNSLGQMPIIIAGNDQQKKKYLGRMTEEPLMCAYCVTEPGAGSDVAGIKTKAEKKGDEYIINGQKMWITNGGKANWYFLLARSDPDPKAPANKAFTGFIVEADTPGIQIGRKELNMGQRCSDTRGIVFEDVKVPKENVLIGDGAGFKVAMGAFDKTRPVVAAGAVGLAQRALDEATKYALERKTFGKLLVEHQAISFMLAEMAMKVELARMSYQRAAWEVDSGRRNTYYASIAKAFAGDIANQLATDAVQILGGNGFNTEYPVEKLMRDAKIYQIYEGTSQIQRLIVAREHIDKYKN

SEQ ID NO: 12177 - protein, 421 aa, Homo sapiens
MAAGFGRCCRVLRSISRFHWRSQHTKANRQREPGLGFSFEFTEQQKEFQATARKFAREEIIPVAAEYDKTGEYPVPLIRRAWELGLMNTHIPENCGGLGLGTFDACLISEELAYGCTGVQTAIEGNSLGQMPIIIAGNDQQKKKYLGRMTEEPLMCAYCVTEPGAGSDVAGIKTKAEKKGDEYIINGQKMWITNGGKANWYFLLARSDPDPKAPANKAFTGFIVEADTPGIQIGRKELNMGQRCSDTRGIVFEDVKVPKENVLIGDGAGFKVAMGAFDKTRPVVAAGAVGLAQRALDEATKYALERKTFGKLLVEHQAISFMLAEMAMKVELARMSYQRAAWEVDSGRRNTYYASIAKAFAGDIANQLATDAVQILGGNGFNTEYPVEKLMRDAKIYQIYEGTSQIQRLIVAREHIDKYKN

SEQ ID NO: 12178 - protein, 1107 aa, Homo sapiens
MDGKRRPGPGPGVPPKRARGGLWDDDDAPRPSQFEEDLALMEEMEAEHRLQEQEEEELQSVLEGVADGQVPPSAIDPRWLRPTPPALDPQTEPLIFQQLEIDHYVGPAQPVPGGPPPSRGSVPVLRAFGVTDEGFSVCCHIHGFAPYFYTPAPPGFGPEHMGDLQRELNLAISRDSRGGRELTGPAVLAVELCSRESMFGYHGHGPSPFLRITVALPRLVAPARRLLEQGIRVAGLGTPSFAPYEANVDFEIRFMVDTDIVGCNWLELPAGKYALRLKEKATQCQLEADVLWSDVVSHPPEGPWQRIAPLRVLSFDIECAGRKGIFPEPERDPVIQICSLGLRWGEPEPFLRLALTLRPCAPILGAKVQSYEKEEDLLQAWSTFIRIMDPDVITGYNIQNFDLPYLISRAQTLKVQTFPFLGRVAGLCSNIRDSSFQSKQTGRRDTKVVSMVGRVQMDMLQVLLREYKLRSYTLNAVSFHFLGEQKEDVQHSIITDLQNGNDQTRRRLAVYCLKDAYLPLRLLERLMVLVNAVEMARVTGVPLSYLLSRGQQVKVVSQLLRQAMHEGLLMPVVKSEGGEDYTGATVIEPLKGYYDVPIATLDFSSLYPSIMMAHNLCYTTLLRPGTAQKLGLTEDQFIRTPTGDEFVKTSVRKGLLPQILENLLSARKRAKAELAKETDPLRRQVLDGRQLALKVSANSVYGFTGAQVGKLPCLEISQSVTGFGRQMIEKTKQLVESKYTVENGYSTSAKVVYGDTDSVMCRFGVSSVAEAMALGREAADWVSGHFPSPIRLEFEKVYFPYLLISKKRYAGLLFSSRPDAHDRMDCKGLEAVRRDNCPLVANLVTASLRRLLIDRDPEGAVAHAQDVISDLLCNRIDISQLVITKELTRAASDYAGKQAHVELAERMRKRDPGSAPSLGDRVPYVIISAAKGVAAYMKSEDPLFVLEHSLPIDTQYYLEQQLAKPLLRIFEPILGEGRAEAVLLRGDHTRCKTVLTGKVGGLLAFAKRRNCCIGCRTVLSHQGAVCEFCQPRESELYQKEVSHLNALEERFSRLWTQCQRCQGSLHEDVICTSRDCPIFYMRKKVRKDLEDQEQLLRRFGPPGPEAW

SEQ ID NO: 12179 - protein, 154 aa, Homo sapiens
MALPPPAGTPDSGRPRSGSSGSGPAPAAGGPPPGDRTASAYHSPPLPPLPSPPTRFSPWSAGPGLVATGWRPPPCVGPWGRRPAGPGRHGGIPGDRTGQPGLPPPLDPHPSLLSLSSSPQRGPPGPRADPVPFSSQPSSGPVPPPKIRIPGPPL

SEQ ID NO: 12180 - protein, 684 aa, Homo sapiens
MVAPGAALSDLSPAPSGSGRQHKAVAMAEAAAAAGGTGLGAGASYGSAADRDRDPDPDRAGRRLRVLSGHLLGRPREALSTNECKARRAASAATAAPTATPAAQESGTIPKKRQEVMKWNGWGYNDSKFIFNKKGQIELTGKRYPLSGMGLPTFKEWIQNTLGVNVEHKTTSKASLNPSDTPPSVVNEDFLHDLKETNISYSQEADDRVFRAHGHCLHEIFLLREGMFERIPDIVLWPTCHDDVVKIVNLACKYNLCIIPIGGGTSVSYGLMCPADETRTIISLDTSQMNRILWVDENNLTAHVEAGITGQELERQLKESGYCTGHEPDSLEFSTVGGWVSTRASGMKKNIYGNIEDLVVHIKMVTPRGIIEKSCQGPRMSTGPDIHHFIMGSEGTLGVITEATIKIRPVPEYQKYGSVAFPNFEQGVACLREIAKQRCAPASIRLMDNKQFQFGHALKPQVSSIFTSFLDGLKKFYITKFKGFDPNQLSVATLLFEGDREKVLQHEKQVYDIAAKFGGLAAGEDNGQRGYLLTYVIAYIRDLALEYYVLGESFETSAPWDRVVDLCRNVKERITRECKEKGVQFAPFSTCRVTQTYDAGACIYFYFAFNYRGISDPLTVFEQTEAAAREEILANGGSLSHHHGVGKLRKQWLKESISDVGFGMLKSVKEYVDPNNIFGNRNLL

SEQ ID NO: 12181 - protein, 536 aa, Homo sapiens
MGLPTFKEWIQNTLGVNVEHKTTSKASLNPSDTPPSVVNEDFLHDLKETNISYSQEADDRVFRAHGHCLHEIFLLREGMFERIPDIVLWPTCHDDVVKIVNLACKYNLCIIPIGGGTSVSYGLMCPADETRTIISLDTSQMNRILWVDENNLTAHVEAGITGQELERQLKESGYCTGHEPDSLEFSTVGGWVSTRASGMKKNIYGNIEDLVVHIKMVTPRGIIEKSCQGPRMSTGPDIHHFIMGSEGTLGVITEATIKIRPVPEYQKYGSVAFPNFEQGVACLREIAKQRCAPASIRLMDNKQFQFGHALKPQVSSIFTSFLDGLKKFYITKFKGFDPNQLSVATLLFEGDREKVLQHEKQVYDIAAKFGGLAAGEDNGQRGYLLTYVIAYIRDLALEYYVLGESFETSAPWDRVVDLCRNVKERITRECKEKGVQFAPFSTCRVTQTYDAGACIYFYFAFNYRGISDPLTVFEQTEAAAREEILANGGSLSHHHGVGKLRKQWLKESISDVGFGMLKSVKEYVDPNNIFGNRNLL

SEQ ID NO: 12182 - protein, 300 aa, Homo sapiens
MLMHHQKYLQRFLGGKREKKQKEACSIPGIGKRMAEKIIEILESGHLRKLDHISESVPVLELFSNIWGAGTKTAQMWYQQGFRSLEDIRSQASLTTQQAIGLKHYSDFLERMPREEATEIEQTVQKAAQAFNSGLLCVACGSYRRGKATCGDVDVLITHPDGRSHRGIFSRLLDSLRQEGFLTDDLVSQEENGQQQKYLGVCRLPGPGRRHRRLDIIVVPYSEFACALLYFTGSAHFNRSMRALAKTKGMSLSEHALSTAVVRNTHGCKVGPGRVLPTPTEKDVFRLLGLPYREPAERDW

SEQ ID NO: 12183 - protein, 575 aa, Homo sapiens
MDPRGILKAFPKRQKIHADASSKVLAKIPRREEGEEAEEWLSSLRAHVVRTGIGRARAELFEKQIVQHGGQLCPAQGPGVTHIVVDEGMDYERALRLLRLPQLPPGAQLVKSAWLSLCLQERRLVDVAGFSIFIPSRYLDHPQPSKAEQDASIPPGTHEALLQTALSPPPPPTRPVSPPQKAKEAPNTQAQPISDDEASDGEETQVSAADLEALISGHYPTSLEGDCEPSPAPAVLDKWVCAQPSSQKATNHNLHITEKLEVLAKAYSVQGDKWRALGYAKAINALKSFHKPVTSYQEACSIPGIGKRMAEKIIEILESGHLRKLDHISESVPVLELFSNIWGAGTKTAQMWYQQGFRSLEDIRSQASLTTQQAIGLKHYSDFLERMPREEATEIEQTVQKAAQAFNSGLLCVACGSYRRGKATCGDVDVLITHPDGRSHRGIFSRLLDSLRQEGFLTDDLVSQEENGQQQKYLGVCRLPGPGRRHRRLDIIVVPYSEFACALLYFTGSAHFNRSMRALAKTKGMSLSEHALSTAVVRNTHGCKVGPGRVLPTPTEKDVFRLLGLPYREPAERDW

SEQ ID NO: 12184 - protein, 248 aa, Homo sapiens
MEALCVCSLMPLHWSWILTASHLAAFFQGFRSLEDIRSQASLTTQQAIGLKHYSDFLERMPREEATEIEQTVQKAAQAFNSGLLCVACGSYRRGKATCGDVDVLITHPDGRSHRGIFSRLLDSLRQEGFLTDDLVSQEENGQQQKYLGVCRLPGPGRRHRRLDIIVVPYSEFACALLYFTGSAHFNRSMRALAKTKGMSLSEHALSTAVVRNTHGCKVGPGRVLPTPTEKDVFRLLGLPYREPAERDW

SEQ ID NO: 12185 - protein, 575 aa, Homo sapiens; identical to SEQ ID NO: 12183

SEQ ID NO: 12186 - protein, 392 aa, Homo sapiens
MDLFGDLPEPERSPRPAAGKEAQKGPLLFDDLPPASSTDSGSGGPLLFDDLPPASSGDSGSLATSISQMVKTEGKGAKRKTSEEEKNGSEELVEKKVCKASSVIFGLKGYVAERKGEREEMQDAHVILNDITEECRPPSSLITRVSYFAVFDGHGGIRASKFAAQNLHQNLIRKFPKGDVISVEKTVKRCLLDTFKHTDEEFLKQASSQKPAWKDGSTATCVLAVDNILYIANLGDSRAILCRYNEESQKHAALSLSKEHNPTQYEERMRIQKAGGNVRDGRVLGVLEVSRSIGDGQYKRCGVTSVPDIRRCQLTPNDRFILLACDGLFKVFTPEEAVNFILSCLEDEKIQTREGKSAADARYEAACNRLANKAVQRGSADNVTVMVVRIGH

SEQ ID NO: 12187 - protein, 666 aa, Homo sapiens
MTGTPKTQEGAKDLEVDMNKTEVTPRLWTTCRDGEVLLRLSKHGPGHETPMTIPEFFRESVNRFGTYPALASKNGKKWEILNFNQYYEACRKAAKSLIKLGLERFHGVGILGFNSAEWFITAVGAILAGGLCVGIYATNSAEVCQYVITHAKVNILLVENDQQLQKILSIPQSSLEPLKAIIQYRLPMKKNNNLYSWDDFMELGRSIPDTQLEQVIESQKANQCAVLIYTSGTTGIPKGVMLSHDNITWIAGAVTKDFKLTDKHETVVSYLPLSHIAAQMMDIWVPIKIGALTYFAQADALKGTLVSTLKEVKPTVFIGVPQIWEKIHEMVKKNSAKSMGLKKKAFVWARNIGFKVNSKKMLGKYNTPVSYRMAKTLVFSKVKTSLGLDHCHSFISGTAPLNQETAEFFLSLDIPIGELYGLSESSGPHTISNQNNYRLLSCGKILTGCKNMLFQQNKDGIGEICLWGRHIFMGYLESETETTEAIDDEGWLHSGDLGQLDGLGFLYVTGHIKEILITAGGENVPPIPVETLVKKKIPIISNAMLVGDKLKFLSMLLTLKCEMNQMSGEPLDKLNFEAINFCRGLGSQASTVTEIVKQQDPLVYKAIQQGINAVNQEAMNNAQRIEKWVILEKDFSIYGGELGPMMKLKRHFVAQKYKKQIDHMYH

SEQ ID NO: 12188 - protein, 666 aa, Homo sapiens; identical to SEQ ID NO: 12187

SEQ ID NO: 12189 - protein, 1333 aa, Homo sapiens
MTADKLVFFVNGRKVVEKNADPETTLLAYLRRKLGLSGTKLGCGEGGCGACTVMLSKYDRLQNKIVHFSANACLAPICSLHHVAVTTVEGIGSTKTRLHPVQERIAKSHGSQCGFCTPGIVMSMYTLLRNQPEPTMEEIENAFQGNLCRCTGYRPILQGFRTFARDGGCCGGDGNNPNCCMNQKKDHSVSLSPSLFKPEEFTPLDPTQEPIFPPELLRLKDTPRKQLRFEGERVTWIQASTLKELLDLKAQHPDAKLVVGNTEIGIEMKFKNMLFPMIVCPAWIPELNSVEHGPDGISFGAACPLSIVEKTLVDAVAKLPAQKTEVFRGVLEQLRWFAGKQVKSVASVGGNIITASPISDLNPVFMASGAKLTLVSRGTRRTVQMDHTFFPGYRKTLLSPEEILLSIEIPYSREGEYFSAFKQASRREDDIAKVTSGMRVLFKPGTTEVQELALCYGGMANRTISALKTTQRQLSKLWKEELLQDVCAGLAEELHLPPDAPGGMVDFRCTLTLSFFFKFYLTVLQKLGQENLEDKCGKLDPTFASATLLFQKDPPADVQLFQEVPKGQSEEDMVGRPLPHLAADMQASGEAVYCDDIPRYENELSLRLVTSTRAHAKIKSIDTSEAKKVPGFVCFISADDVPGSNITGICNDETVFAKDKVTCVGHIIGAVVADTPEHTQRAAQGVKITYEELPAIITIEDAIKNNSFYGPELKIEKGDLKKGFSEADNVVSGEIYIGGQEHFYLETHCTIAVPKGEAGEMELFVSTQNTMKTQSFVAKMLGVPANRIVVRVKRMGGGFGGKETRSTVVSTAVALAAYKTGRPVRCMLDRDEDMLITGGRHPFLARYKVGFMKTGTVVALEVDHFSNVGNTQDLSQSIMERALFHMDNCYKIPNIRGTGRLCKTNLPSNTAFRGFGGPQGMLIAECWMSEVAVTCGMPAEEVRRKNLYKEGDLTHFNQKLEGFTLPRCWEECLASSQYHARKSEVDKFNKENCWKKRGLCIIPTKFGISFTVPFLNQAGALLHVYTDGSVLLTHGGTEMGQGLHTKMVQVASRALKIPTSKIYISETSTNTVPNTSPTAASVSADLNGQAVYAACQTILKRLEPYKKKNPSGSWEDWVTAAYMDTVSLSATGFYRTPNLGYSFETNSGNPFHYFSYGVACSEVEIDCLTGDHKNLRTDIVMDVGSSLNPAIDIGQVEGAFVQGLGLFTLEELHYSPEGSLHTRGPSTYKIPAFGSIPIEFRVSLLRDCPNKKAIYASKAVGEPPLFLAASIFFAIKDAIRAARAQHTGNNVKELFRLDSPATPEKIRNACVDKFTTLCVTGVPENCKPWSVRV

SEQ ID NO: 12190 - protein, 146 aa, Homo sapiens [sequence omitted]

SEQ ID NO: 12191 - protein, 616 aa, Homo sapiens
MNSPGGRGKKKGSGGASNPVPPRPPPPCLAPAPPAAGPAPPPESPHKRNLYYFSYPLFVGFALLRLVAFHLGLLFVWLCQRFSRALMAAKRSSGAAPAPASASAPAPVPGGEAERVRVFHKQAFEYISIALRIDEDEKAGQKEQAVEWYKKGIEELEKGIAVIVTGQGEQCERARRLQAKMMTNLVMAKDRLQLLEKMQPVLPFSKSQTDVYNDSTNLACRNGHLQSESGAVPKRKDPLTHTSNSLPRSKTVMKTGSAGLSGHHRAPSYSGLSMVSGVKQGSGPAPTTHKGTPKTNRTNKPSTPTTATRKKKDLKNFRNVDSNLANLIMNEIVDNGTAVKFDDIAGQDLAKQALQEIVILPSLRPELFTGLRAPARGLLLFGPPGNGKTMLAKAVAAESNATFFNISAASLTSKYVGEGEKLVRALFAVARELQPSIIFIDEVDSLLCERREGEHDASRRLKTEFLIEFDGVQSAGDDRVLVMGATNRPQELDEAVLRRFIKRVYVSLPNEETRLLLLKNLLCKQGSPLTQKELAQLARMTDGYSGSDLTALAKDAALGPIRELKPEQVKNMSASEMRNIRLSDFTESLKKIKRSVSPQTLEAYIRWNKDFGDTTV

SEQ ID NO: 12192 - protein, 584 aa, Homo sapiens
MNSPGGRGKKKGSGGASNPVPPRPPPPCLAPAPPAAGPAPPPESPHKRNLYYFSYPLFVGFALLRLVAFHLGLLFVWLCQRFSRALMAAKRSSGAAPAPASASAPAPVPGGEAERVRVFHKQAFEYISIALRIDEDEKAGQKEQAVEWYKKGIEELEKGIAVIVTGQGEQCERARRLQAKMMTNLVMAKDRLQLLESGAVPKRKDPLTHTSNSLPRSKTVMKTGSAGLSGHHRAPSYSGLSMVSGVKQGSGPAPTTHKGTPKTNRTNKPSTPTTATRKKKDLKNFRNVDSNLANLIMNEIVDNGTAVKFDDIAGQDLAKQALQEIVILPSLRPELFTGLRAPARGLLLFGPPGNGKTMLAKAVAAESNATFFNISAASLTSKYVGEGEKLVRALFAVARELQPSIIFIDEVDSLLCERREGEHDASRRLKTEFLIEFDGVQSAGDDRVLVMGATNRPQELDEAVLRRFIKRVYVSLPNEETRLLLLKNLLCKQGSPLTQKELAQLARMTDGYSGSDLTALAKDAALGPIRELKPEQVKNMSASEMRNIRLSDFTESLKKIKRSVSPQTLEAYIRWNKDFGDTTV

SEQ ID NO: 12193 - protein, 762 aa, Homo sapiens [sequence omitted]

SEQ ID NO: 12194 - protein, 955 aa, Homo sapiens
MATGLGEPVYGLSEDEGESRILRVKVVSGIDLAKKDIFGASDPYVKLSLYVADENRELALVQTKTIKKTLNPKWNEEFYFRVNPSNHRLLFEVFDENRLTRDDFLGQVDVPLSHLPTEDPTMERPYTFKDFLLRPRSHKSRVKGFLRLKMAYMPKNGGQDEENSDQRDDMEHGWEVVDSNDSASQHQEELPPPPLPPGWEEKVDNLGRTYYVNHNNRTTQWHRPSLMDVSSESDNNIRQINQEAAHRRFRSRRHISEDLEPEPSEGGDVPEPWETISEEVNIAGDSLGLALPPPPASPGSRTSPQELSEELSRRLQITPDSNGEQFSSLIQREPSSRLRSCSVTDAVAEQGHLPPPSVAYVHTTPGLPSGWEERKDAKGRTYYVNHNNRTTTWTRPIMQLAEDGASGSATNSNNHLIEPQIRRPRSLSSPTVTLSAPLEGAKDSPVRRAVKDTLSNPQSPQPSPYNSPKPQHKVTQSFLPPGWEMRIAPNGRPFFIDHNTKTTTWEDPRLKFPVHMRSKTSLNPNDLGPLPPGWEERIHLDGRTFYIDHNSKITQWEDPRLQNPAITGPAVPYSREFKQKYDYFRKKLKKPADIPNRFEMKLHRNNIFEESYRRIMSVKRPDVLKARLWIEFESEKGLDYGGVAREWFFLLSKEMFNPYYGLFEYSATDNYTLQINPNSGLCNEDHLSYFTFIGRVAGLAVFHGKLLDGFFIRPFYKMMLGKQITLNDMESVDSEYYNSLKWILENDPTELDLMFCIDEENFGQTYQVDLKPNGSEIMVTNENKREYIDLVIQWRFVNRVQKQMNAFLEGFTELLPIDLIKIFDENELELLMCGLGDVDVNDWRQHSIYKNGYCPNHPVIQWFWKAVLLMDAEKRIRLLQFVTGTSRVPMNGFAELYGSNGPQLFTIEQWGSPEKLPRAHTCFNRLDLPPYETFEDLREKLLMAVENAQGFEGVD

SEQ ID NO: 12195 - protein, 834 aa, Homo sapiens
MERPYTFKDFLLRPRSHKSRVKGFLRLKMAYMPKNGGQDEENSDQRDDMEHGWEVVDSNDSASQHQEELPPPPLPPGWEEKVDNLGRTYYVNHNNRTTQWHRPSLMDVSSESDNNIRQINQEAAHRRFRSRRHISEDLEPEPSEGGDVPEPWETISEEVNIAGDSLGLALPPPPASPGSRTSPQELSEELSRRLQITPDSNGEQFSSLIQREPSSRLRSCSVTDAVAEQGHLPPPSVAYVHTTPGLPSGWEERKDAKGRTYYVNHNNRTTTWTRPIMQLAEDGASGSATNSNNHLIEPQIRRPRSLSSPTVTLSAPLEGAKDSPVRRAVKDTLSNPQSPQPSPYNSPKPQHKVTQSFLPPGWEMRIAPNGRPFFIDHNTKTTTWEDPRLKFPVHMRSKTSLNPNDLGPLPPGWEERIHLDGRTFYIDHNSKITQWEDPRLQNPAITGPAVPYSREFKQKYDYFRKKLKKPADIPNRFEMKLHRNNIFEESYRRIMSVKRPDVLKARLWIEFESEKGLDYGGVAREWFFLLSKEMFNPYYGLFEYSATDNYTLQINPNSGLCNEDHLSYFTFIGRVAGLAVFHGKLLDGFFIRPFYKMMLGKQITLNDMESVDSEYYNSLKWILENDPTELDLMFCIDEENFGQTYQVDLKPNGSEIMVTNENKREYIDLVIQWRFVNRVQKQMNAFLEGFTELLPIDLIKIFDENELELLMCGLGDVDVNDWRQHSIYKNGYCPNHPVIQWFWKAVLLMDAEKRIRLLQFVTGTSRVPMNGFAELYGSNGPQLFTIEQWGSPEKLPRAHTCFNRLDLPPYETFEDLREKLLMAVENAQGFEGVD

SEQ ID NO: 12196 - protein, 373 aa, Homo sapiens
MFMFQKHKHMTCARPVFFVHVPREAVDGMVQETHQEAELILPAGGPCEEDTAAGGVTAHSCRRKGEERDRGPAIGFYSYVLVRAQQRDLMRGVAPQVWRMKEQVGATLREPRDKLCRKQAPPLGQCYLASSQPWEATCPCLTWVNDRQFLSLNTTHLLSCMLAPWGESRILRVKVVSGIDLAKKDIFGASCPLICQGPVWVATLLLRPLPASSPQPKRTEHCCPPHHPSPRGQNTAARLITPAQEDRTLLPASSPQPKRTEHCCPPHHPSPRGQNTAARLITPAQEDRTLLPASSPQPKGTEHCCPPHHPSPRGQNTAARLITPAQEDRTLLPASSPQPKGTGHCCPPHHPSPRGQNTAAHLITPAQGDRTLL

SEQ ID NO: 12197 - protein, 871 aa, Homo sapiens
MATGLGEPVYGLSEDEGESRILRVKVVSGIDLAKKDIFGASDPYVKLSLYVADENRELALVQTKTIKKTLNPKWNEEFYFRVNPSNHRLLFEVFDENRLTRDDFLGQVDVPLSHLPTEDPTMERPYTFKDFLLRPRSHKSRVKGFLRLKMAYMPKNGGQDEENSDQRDDMEHGWEVVDSNDSASQHQEELPPPPLPPGWEEKVDNLGRTYYVNHNNRTTQWHRPSLMDVSSESDNNIRQINQEAAHRRFRSRRHISEDLEPEPSEGGDVPEPWETISEEVNIAGDSLGLALPPPPASPGSRTSPQELSEELSRRLQITPDSNGEQFSSLIQREPSSRLRSCSVTDAVAEQGHLPPGAKDSPVRRAVKDTLSNPQSPQPSPYNSPKPQHKVTQSFLPPGWEMRIAPNGRPFFIDHNTKTTTWEDPRLKFPVHMRSKTSLNPNDLGPLPPGWEERIHLDGRTFYIDHNSKITQWEDPRLQNPAITGPAVPYSREFKQKYDYFRKKLKKPADIPNRFEMKLHRNNIFEESYRRIMSVKRPDVLKARLWIEFESEKGLDYGGVAREWFFLLSKEMFNPYYGLFEYSATDNYTLQINPNSGLCNEDHLSYFTFIGRVAGLAVFHGKLLDGFFIRPFYKMMLGKQITLNDMESVDSEYYNSLKWILENDPTELDLMFCIDEENFGQTYQVDLKPNGSEIMVTNENKREYIDLVIQWRFVNRVQKQMNAFLEGFTELLPIDLIKIFDENELELLMCGLGDVDVNDWRQHSIYKNGYCPNHPVIQWFWKAVLLMDAEKRIRLLQFVTGTSRVPMNGFAELYGSNGPQLFTIEQWGSPEKLPRAHTCFNRLDLPPYETFEDLREKLLMAVENAQGFEGVD

SEQ ID NO: 12198 - protein, 854 aa, Homo sapiens
MERPYTFKDFLLRPRSHKSRVKGFLRLKMAYMPKNGGQDEENSDQRDDMEHGWEVVDSNDSASQHQEELPPPPLPPGWEEKVDNLGRTYYVNHNNRTTQWHRPSLMDVSSESDNNIRQINQEAAHRRFRSRRHISEDLEPEPSEGGDVPEPWETISEEVNIAGDSLGLALPPPPASPGSRTSPQELSEELSRRLQITPDSNGEQFSSLIQREPSSRLRSCSVTDAVAEQGHLPPPSAPAGRARSSTVTGGEEPTPSVAYVHTTPGLPSGWEERKDAKGRTYYVNHNNRTTTWTRPIMQLAEDGASGSATNSNNHLIEPQIRRPRSLSSPTVTLSAPLEGAKDSPVRRAVKDTLSNPQSPQPSPYNSPKPQHKVTQSFLPPGWEMRIAPNGRPFFIDHNTKTTTWEDPRLKFPVHMRSKTSLNPNDLGPLPPGWEERIHLDGRTFYIDHNSKITQWEDPRLQNPAITGPAVPYSREFKQKYDYFRKKLKKPADIPNRFEMKLHRNNIFEESYRRIMSVKRPDVLKARLWIEFESEKGLDYGGVAREWFFLLSKEMFNPYYGLFEYSATDNYTLQINPNSGLCNEDHLSYFTFIGRVAGLAVFHGKLLDGFFIRPFYKMMLGKQITLNDMESVDSEYYNSLKWILENDPTELDLMFCIDEENFGQTYQVDLKPNGSEIMVTNENKREYIDLVIQWRFVNRVQKQMNAFLEGFTELLPIDLIKIFDENELELLMCGLGDVDVNDWRQHSIYKNGYCPNHPVIQWFWKAVLLMDAEKRIRLLQFVTGTSRVPMNGFAELYGSNGPQLFTIEQWGSPEKLPRAHTCFNRLDLPPYETFEDLREKLLMAVENAQGFEGVD

SEQ ID NO: 12199 - protein, 750 aa, Homo sapiens
MERPYTFKDFLLRPRSHKSRVKGFLRLKMAYMPKNGGQDEENSDQRDDMEHGWEVVDSNDSASQHQEELPPPPLPPGWEEKVDNLGRTYYVNHNNRTTQWHRPSLMDVSSESDNNIRQINQEAAHRRFRSRRHISEDLEPEPSEGGDVPEPWETISEEVNIAGDSLGLALPPPPASPGSRTSPQELSEELSRRLQITPDSNGEQFSSLIQREPSSRLRSCSVTDAVAEQGHLPPGAKDSPVRRAVKDTLSNPQSPQPSPYNSPKPQHKVTQSFLPPGWEMRIAPNGRPFFIDHNTKTTTWEDPRLKFPVHMRSKTSLNPNDLGPLPPGWEERIHLDGRTFYIDHNSKITQWEDPRLQNPAITGPAVPYSREFKQKYDYFRKKLKKPADIPNRFEMKLHRNNIFEESYRRIMSVKRPDVLKARLWIEFESEKGLDYGGVAREWFFLLSKEMFNPYYGLFEYSATDNYTLQINPNSGLCNEDHLSYFTFIGRVAGLAVFHGKLLDGFFIRPFYKMMLGKQITLNDMESVDSEYYNSLKWILENDPTELDLMFCIDEENFGQTYQVDLKPNGSEIMVTNENKREYIDLVIQWRFVNRVQKQMNAFLEGFTELLPIDLIKIFDENELELLMCGLGDVDVNDWRQHSIYKNGYCPNHPVIQWFWKAVLLMDAEKRIRLLQFVTGTSRVPMNGFAELYGSNGPQLFTIEQWGSPEKLPRAHTCFNRLDLPPYETFEDLREKLLMAVENAQGFEGVD

SEQ ID NO: 12200 - protein, 834 aa, Homo sapiens; identical to SEQ ID NO: 12195

SEQ ID NO: 12201 - protein, 975 aa, Homo sapiens
MATGLGEPVYGLSEDEGESRILRVKVVSGIDLAKKDIFGASDPYVKLSLYVADENRELALVQTKTIKKTLNPKWNEEFYFRVNPSNHRLLFEVFDENRLTRDDFLGQVDVPLSHLPTEDPTMERPYTFKDFLLRPRSHKSRVKGFLRLKMAYMPKNGGQDEENSDQRDDMEHGWEVVDSNDSASQHQEELPPPPLPPGWEEKVDNLGRTYYVNHNNRTTQWHRPSLMDVSSESDNNIRQINQEAAHRRFRSRRHISEDLEPEPSEGGDVPEPWETISEEVNIAGDSLGLALPPPPASPGSRTSPQELSEELSRRLQITPDSNGEQFSSLIQREPSSRLRSCSVTDAVAEQGHLPPPSAPAGRARSSTVTGGEEPTPSVAYVHTTPGLPSGWEERKDAKGRTYYVNHNNRTTTWTRPIMQLAEDGASGSATNSNNHLIEPQIRRPRSLSSPTVTLSAPLEGAKDSPVRRAVKDTLSNPQSPQPSPYNSPKPQHKVTQSFLPPGWEMRIAPNGRPFFIDHNTKTTTWEDPRLKFPVHMRSKTSLNPNDLGPLPPGWEERIHLDGRTFYIDHNSKITQWEDPRLQNPAITGPAVPYSREFKQKYDYFRKKLKKPADIPNRFEMKLHRNNIFEESYRRIMSVKRPDVLKARLWIEFESEKGLDYGGVAREWFFLLSKEMFNPYYGLFEYSATDNYTLQINPNSGLCNEDHLSYFTFIGRVAGLAVFHGKLLDGFFIRPFYKMMLGKQITLNDMESVDSEYYNSLKWILENDPTELDLMFCIDEENFGQTYQVDLKPNGSEIMVTNENKREYIDLVIQWRFVNRVQKQMNAFLEGFTELLPIDLIKIFDENELELLMCGLGDVDVNDWRQHSIYKNGYCPNHPVIQWFWKAVLLMDAEKRIRLLQFVTGTSRVPMNGFAELYGSNGPQLFTIEQWGSPEKLPRAHTCFNRLDLPPYETFEDLREKLLMAVENAQGFEGVD

SEQ ID NO: 12202 - protein, 834 aa, Homo sapiens; identical to SEQ ID NO: 12195

SEQ ID NO: 12203 - protein, 182 aa, Homo sapiens
MARLLWLLRGLTLGTAPRRAVRGQAGGGGPGTGPGLGEAGSLATCELPLAKSEWQKKLTPEQFYVTREKGTEPPFSGIYLNNKEAGMYHCVCCDSPLFSSEKKYCSGTGWPSFSEAHGTSGSDESHTGILRRLDTSLGSARTEVVCKQCEAHLGHVFPDGPGPNGQRFCINSVALKFKPRKH

SEQ ID NO: 12204 - protein, 159 aa, Homo sapiens
MARLLWLLRGLTLGTAPRRAVRGQAGGGGPGTGPGLGEAGSLATCELPLAKSEWQKKLTPEQFYVTREKGTEPPFSGIYLNNKEAGMYHCVCCDSPLFRSLLDIQKEVFSIKGSRSPSTSRGNGFDSEVLRKSTALALGGLRFPRLMVRLALMKATQGS

SEQ ID NO: 12205 - protein, 96 aa, Homo sapiens
MYHCVCCDSPLFSSEKKYCSGTGWPSFSEAHGTSGSDESHTGILRRLDTSLGSARTEVVCKQCEAHLGHVFPDGPGPNGQRFCINSVALKFKPRKH

SEQ ID NO: 12206 - protein, 103 aa, Homo sapiens
MARLLWLLRGLTLGTAPRRAVRGQAGGGGPGTGPGLGEAGSLATCELPLAKSEWQKKLTPEQFYVTREKGTEPPFSGIYLNNKEAGMYHCVCCDSPLFSVKLI

SEQ ID NO: 12207 - protein, 406 aa, Homo sapiens
MATPGNLGSSVLASKTKTKKKHFVAQKVKLFRASDPLLSVLMWGVNHSINELSHVQIPVMLMPDDFKAYSKIKVDNHLFNKENMPSHFKFKEYCPMVFRNLRERFGIDDQDFQNSLTRSAPLPNDSQARSGARFHTSYDKRYIIKTITSEDVAEMHNILKKYHQYIVECHGITLLPQFLGMYRLNVDGVEIYVIVTRNVFSHRLSVYRKYDLKGSTVAREASDKEKAKELPTLKDNDFINEGQKIYIDDNNKKVFLEKLKKDVEFLAQLKLMDYSLLVGIHDVERAEQEEVECEENDGEEEGESDGTHPVGTPPDSPGNTLNSSPPLAPGEFDPNIDVYGIKCHENSPRKEVYFMAIIDILTHYDAKKKAAHAAKTVKHGAGAEISTVNPEQYSKRFLDFIGHILT

SEQ ID NO: 12208 - protein, 406 aa, Homo sapiens; identical to SEQ ID NO: 12207

SEQ ID NO: 12209 - protein, 250 aa, Homo sapiens [sequence omitted]

SEQ ID NO: 12210 - protein, 175 aa, Homo sapiens
MWLYRNPYVEAEYFPTKPMFVIAFLSPLSLIFLAKFLKKADTRDSRQACLAASLALALNGVFTNTIKLIVGRPRPDFFYRCFPDGLAHSDLMCTGDKDVVNEGRKSFPSGHSSFAFAGLAFASFYLAGKLHCFTPQGRGKSWRFCAFLSPLLFAAVIALSRTCDYKHHWQGPFKW

SEQ ID NO: 12211 - protein, 272 aa, Homo sapiens [sequence omitted]

SEQ ID NO: 12212 - protein, 593 aa, Homo sapiens
MMLTGRSIRADRAKKMGLVDQLVEPLGPGLKPPEERTIEYLEEVAITFAKGLADKKISPKRDKGLVEKLTAYAMTIPFVRQQVYKKVEEKVRKQTKGLYPAPLKIIDVVKTGIEQGSDAGYLCESQKFGELVMTKESKALMGLYHGQVLCKKNKFGAPQKDVKHLAILGAGLMGAGIAQVSVDKGLKTILKDATLTALDRGQQQVFKGLNDKVKKKALTSFERDSIFSNLTGQLDYQGFEKADMVIEAVFEDLSLKHRVLKEVEAVIPDHCIFASNTSALPISEIAAVSKRPEKVIGMHYFSPVDKMQLLEIITTEKTSKDTSASAVAVGLKQGKVIIVVKDGPGFYTTRCLAPMMSEVIRILQEGVDPKKLDSLTTSFGFPVGAATLVDEVGVDVAKHVAEDLGKVFGERFGGGNPELLTQMVSKGFLGRKSGKGFYIYQEGVKRKDLNSDMDSILASLKLPPKSEVSSDEDIQFRLVTRFVNEAVMCLQEGILATPAEGDIGAVFGLGFPPCLGGWSRRLGRKLTLAWSPCCVSFNEVLFLYSGPFRFVDLYGAQKIVDRLKKYEAAYGKQFTPCQLLADHANSPNKKFYQ

SEQ ID NO: 12213 - protein, 763 aa, Homo sapiens
MVACRAIGILSRFSAFRILRSRGYICRNFTGSSALLTRTHINYGVKGDVAVVRINSPNSKVNTLSKELHSEFSEVMNEIWASDQIRSAVLISSKPGCFIAGADINMLAACKTLQEVTQLSQEAQRIVEKLEKSTKPIVAAINGSCLGGGLEVAISCQYRIATKDRKTVLGTPEVLLGALPGAGGTQRLPKMVGVPAALDMMLTGRSIRADRAKKMGLVDQLVEPLGPGLKPPEERTIEYLEEVAITFAKGLADKKISPKRDKGLVEKLTAYAMTIPFVRQQVYKKVEEKVRKQTKGLYPAPLKIIDVVKTGIEQGSDAGYLCESQKFGELVMTKESKALMGLYHGQVLCKKNKFGAPQKDVKHLAILGAGLMGAGIAQVSVDKGLKTILKDATLTALDRGQQQVFKGLNDKVKKKALTSFERDSIFSNLTGQLDYQGFEKADMVIEAVFEDLSLKHRVLKEVEAVIPDHCIFASNTSALPISEIAAVSKRPEKVIGMHYFSPVDKMQLLEIITTEKTSKDTSASAVAVGLKQGKVIIVVKDGPGFYTTRCLAPMMSEVIRILQEGVDPKKLDSLTTSFGFPVGAATLVDEVGVDVAKHVAEDLGKVFGERFGGGNPELLTQMVSKGFLGRKSGKGFYIYQEGVKRKDLNSDMDSILASLKLPPKSEVSSDEDIQFRLVTRFVNEAVMCLQEGILATPAEGDIGAVFGLGFPPCLGGPFRFVDLYGAQKIVDRLKKYEAAYGKQFTPCQLLADHANSPNKKFYQ

SEQ ID NO: 12214 - protein, 372 aa, Homo sapiens [sequence omitted]

SEQ ID NO: 12215 - protein, 372 aa, Homo sapiens [sequence omitted]

SEQ ID NO: 12216 - protein, 285 aa, Homo sapiens
MVGVKPVGSDPDFQPELSGAGSRLAVVKFTMRGCGPCLRIAPAFSSMSNKYPQAVFLEVDVHQCQGTAATNNISATPTFLFFRNKVRIDQYQGADAVGLEEKIKQHLENDPGSNEDTDIPKGYMDLMPFINKAGCECLNESDEHGFDNCLRKDTTFLESDCDEQLLITVAFNQPVKLYSMKFQGPDNGQGPKYVKIFINLPRSMDFEEAERSEPTQALELTEDDIKEDGIVPLRYVKFQNVNSVTIFVQSNQGEEETTRISYFTFIGTPVQATNMNDFKRVSLLK

SEQ ID NO: 12217 - protein, 289 aa, Homo sapiens
MVGVKPVGSDPDFQPELSGAGSRLAVVKFTMRGCGPCLRIAPAFSSMSNKYPQAVFLEVDVHQCQGTAATNNISATPTFLFFRNKVRIDQYQGADAVGLEEKIKQHLENDPGSNEDTDIPKGYMDLMPFINKAGCECLNESDEHGFDNCLRKDTTFLESDCDEQLLITVAFNQPVKLYSMKFQGPDNGQGPKYVKIFINLPRSMDFEEAERSEPTQALELTEDDIKEDGIVPLRYVKFQNVNSVTIFVQSNQGEEETTRISYFTFIGTPVQATNMNDFKRVVGKKGESH

SEQ ID NO: 12218 - protein, 289 aa, Homo sapiens; identical to SEQ ID NO: 12217

SEQ ID NO: 12219 - protein, 325 aa, Homo sapiens
MVGVKPVGSDPDFQPELSGAGSRLAVVKFTMRGCGPCLRIAPAFSSMSNKYPQAVFLEVDVHQCQGTAATNNISATPTFLFFRNKVRIDQYQGADAVGLEEKIKQHLENDPGSNEDTDIPKGYMDLMPFINKAGCECLNESDEHGFDNCLRKDTTFLESDCDEQLLITVAFNQPVKLYSMKFQGPDNGQGPKYVKIFINLPRSMDFEEAERSEPTQALELTEDDIKEDGIVPLRYVKFQNVNSVTIFVQSNQGEEETTRISYFTFIGTPVQATNMNDFKRHLSALTLPMFSPLLVQDFYSFYHLDQPCYLENTHWQVESYQPVKQ

SEQ ID NO: 12220 - protein, 70 aa, Homo sapiens
MWFEILPGLSVMGVCLLIPGLATAYIHRFTNGGKEKRVAHFGYHWSLMERDRRISGVDRYYVSKGLENID

SEQ ID NO: 12221 - protein, 573 aa, Homo sapiens
MARAVGPERRLLAVYTGGTIGMRSELGVLVPGTGLAAILRTLPMFHDEEHARARGLSEDTLVLPPASRNQRILYTVLECQPLFDSSDMTIAEWVCLAQTIKRHYEQYHGFVVIHGTDTMAFAASMLSFMLENLQKTVILTGAQVPIHALWSDGRENLLGALLMAGQYVIPEVCLFFQNQLFRGNRATKVDARRFAAFCSPNLLPLATVGADITINRELVRKVDGKAGLVVHSSMEQDVGLLRLYPGIPAALVRAFLQPPLKGVVMETFGSGNGPTKPDLLQELRVATERGLVIVNCTHCLQGAVTTDYAAGMAMAGAGVISGFDMTSEAALAKLSYVLGQPGLSLDVRKELLTKDLRGEMTPPSVEERRPSLQGNTLGGGVSWLLSLSGSQEADALRNALVPSLACAAAHAGDVEALQALVELGSDLGLVDFNGQTPLHAAARGGHTEAVTMLLQRGVDVNTRDTDGFSPLLLAVRGRHPGVIGLLREAGASLSTQELEEAGTELCRLAYRADLEGLQVWWQAGADLGQPGYDGHSALHVAEAAGNLAVVAFLQSLEGAVGAQAPCPEVLPGV

SEQ ID NO: 12222 - protein, 148 aa, Homo sapiens [sequence omitted]

SEQ ID NO: 12223 - protein, 1178 aa, Homo sapiens [sequence omitted]

SEQ ID NO: 12224 - protein, 858 aa, Homo sapiens [sequence omitted]

SEQ ID NO: 12225 - protein, 137 aa, Homo sapiens [sequence omitted]

SEQ ID NO: 12226 - protein, 858 aa, Homo sapiens [sequence omitted]

SEQ ID NO: 12227 - protein, 773 aa, Homo sapiens [sequence omitted]

SEQ ID NO: 12228 - protein, 1258 aa, Homo sapiens
MASACGAPGPGGALGSQAPSWYHRDLSRAAAEELLARAGRDGSFLVRDSESVAGAFALCVLYQKHVHTYRILPDGEDFLAVQTSQGVPVRRFQTLGELIGLYAQPNQGLVCALLLPVEGEREPDPPDDRDASDGEDEKPPLPPRSGSTSISAPTGPSSPLPAPETPTAPAAESAPNGLSTVSHDYLKGSYGLDLEAVRGGASHLPHLTRTLATSCRRLHSEVDKVLSGLEILSKVFDQQSSPMVTRLLQQQNLPQTGEQELESLVLKLSVLKDFLSGIQKKALKALQDMSSTAPPAPQPSTRKAKTIPVQAFEVKLDVTLGDLTKIGKSQKFTLSVDVEGGRLVLLRRQRDSQEDWTTFTHDRIRQLIKSQRVQNKLGVVFEKEKDRTQRKDFIFVSARKREAFCQLLQLMKNKHSKQDEPDMISVFIGTWNMGSVPPPKNVTSWFTSKGLGKTLDEVTVTIPHDIYVFGTQENSVGDREWLDLLRGGLKELTDLDYRPIAMQSLWNIKVAVLVKPEHENRISHVSTSSVKTGIANTLGNKGAVGVSFMFNGTSFGFVNCHLTSGNEKTARRNQNYLDILRLLSLGDRQLNAFDISLRFTHLFWFGDLNYRLDMDIQEILNYISRKEFEPLLRVDQLNLEREKHKVFLRFSEEEISFPPTYRYERGSRDTYAWHKQKPTGVRTNVPSWCDRILWKSYPETHIICNSYGCTDDIVTSDHSPVFGTFEVGVTSQFISKKGLSKTSDQAYIEFESIEAIVKTASRTKFFIEFYSTCLEEYKKSFENDAQSSDNINFLKVQWSSRQLPTLKPILADIEYLQDQHLLLTVKSMDGYESYGECVVALKSMIGSTAQQFLTFLSHRGEETGNIRGSMKVRVPTERLGTRERLYEWISIDKDEAGAKSKAPSVSRGSQEPRSGSRKPAFTEASCPLSRLFEEPEKPPPTGRPPAPPRAAPREEPLTPRLKPEGAPEPEGVAAPPPKNSFNNPAYYVLEGVPHQLLPPEPPSPARAPVPSATKNKVAITVPAPQLGHHRHPRVGEGSSSDEESGGTLPPPDFPPPPLPDSAIFLPPSLDPLPGPVVRGRGGAEARGPPPPKAHPRPPLPPGPSPASTFLGEVASGDDRSCSVLQMAKTLSEVDYAPAGPARSALLPGPLELQPPRGLPSDYGRPLSFPPPRIRESIQEDLAEEAPCLQGGRASGLGEAGMSAWLRAIGLERYEEGLVHNGWDDLEFLSDITEEDLEEAGVQDPAHKRLLLDTLQLSK

SEQ ID NO: 12229 - protein, 1258 aa, Homo sapiens; identical to SEQ ID NO: 12228

SEQ ID NO: 12230 - protein, 1267 aa, Homo sapiens
MASACGAPGPGGALGSQAPSWYHRDLSRAAAEELLARAGRDGSFLVRDSESVAGAFALCVLYQKHVHTYRILPDGEDFLAVQTSQGVPVRRFQTLGELIGLYAQPNQGLVCALLLPVEGEREPDPPDDRDASDGEDEKPPLPPRSGSTSISAPTGPSSPLPAPETPTAPAAESAPNGLSTVSHDYLKGSYGLDLEAVRGGASHLPHLTRTLATSCRRLHSEVDKVLSGLEILSKVFDQQSSPMVTRLLQQQNLPQTGEQELESLVLKLSVLKDFLSGIQKKALKALQDMSSTAPPAPQPSTRKAKTIPVQAFEVKLDVTLGDLTKIGKSQKFTLSVDVEGGRLVLLRRQRDSQEDWTTFTHDRIRQLIKSQRVQNKLGVVFEKEKDRTQRKDFIFVSARKREAFCQLLQLMKNKHSKQDEPDMISVFIGTWNMGSVPPPKNVTSWFTSKGLGKTLDEVTVTIPHDIYVFGTQENSVGDREWLDLLRGGLKELTDLDYRPIAMQSLWNIKVAVLVKPEHENRISHVSTSSVKTGIANTLGNKGAVGVSFMFNGTSFGFVNCHLTSGNEKTARRNQNYLDILRLLSLGDRQLNAFDISLRFTHLFWFGDLNYRLDMDIQEILNYISRKEFEPLLRVDQLNLEREKHKVFLRFSEEEISFPPTYRYERGSRDTYAWHKQKPTGVRTNVPSWCDRILWKSYPETHIICNSYGCTDDIVTSDHSPVFGTFEVGVTSQFISKKGLSKTSDQAYIEFESIEAIVKTASRTKFFIEFYSTCLEEYKKSFENDAQSSDNINFLKVQWSSRQLPTLKPILADIEYLQDQHLLLTVKSMDGYESYGECVVALKSMIGSTAQQFLTFLSHRGEETGNIRGSMKVRVPTERLGTRERLYEWISIDKDEAGAKSKAPSVSRGSQEPRSGSRKPAFTEASCPLSRLFEEPEKPPPTGRPPAPPRAAPREEPLTPRLKPEGAPEPEGVAAPPPKNSFNNPAYYVLEGVPHQLLPPEPPSPARAPVPSATKNKVAITVPAPQLGHHRHPRVGEGSSSDEESGGTLPPPDFPPPPLPDSAIFLPPSLDPLPGPVVRGRGGAEARGPPPPKAHPRPPLPPGPSPASTFLGEVASGDDRSCSVLQMAKTLSEVDYAPAGPARSALLPGPLELQPPRGLPSDYGRPLSFPPPRIRESIQEDLAEEAPCLQGGRASGLGEAGMSAWLRAIGLERYEEGLVHNGWDDLEFSTVTSPRRTWRRLGCRTRLTSASFWTPCSSASDSGGTTKL

SEQ ID NO: 12231 - protein, 423 aa, Homo sapiens
MRSLGANMAAALRAAGVLLRDPLASSSWRVCQPWRWKSGAAAAAVTTETAQHAQGAKPQVQPQKRKPKTGILMLNMGGPETLGDVHDFLLRLFLDRDLMTLPIQNKLAPFIAKRRTPKIQEQYRRIGGGSPIKIWTSKQGEGMVKLLDELSPNTAPHKYYIGFRYVHPLTEEAIEEMERDGLERAIAFTQYPQYSCSTTGSSLNAIYRYYNQVGRKPTMKWSTIDRWPTHHLLIQCFADHILKELDHFPLEKRSEVVILFSAHSLPMSVVNRGDPYPQEVSATVQKVMERLEYCNPYRLVWQSKVGPMPWLGPQTDESIKGLCERGRKNILLVPIAFTSDHIETLYELDIEYSQVLAKECGVENIRRAESLNGNPLFSKALADLVHSHIQSNELCSKQLTLSCPLCVNPVCRETKSFFTSQQL

SEQ ID NO: 12232 - protein, 547 aa, Homo sapiens
MVLELYVSDREGSDATGDGTKEKPFKTGLKALMTVGKEPFPTIYVDSQKENERWNVISKSQLKNIKKMWHREQMKSESREKKEAEDSLRREKNLEEAKKITIKNDPSLPEPKCVKIGALEGYRGQRVKVFGWVHRLRRQGKNLMFLVLRDGTGYLQCVLADELCQCYNGVLLSTESSVAVYGMLNLTPKGKQAPGGHELSCDFWELIGLAPAGGADNLINEESDVDVQLNNRHMMIRGENMSKILKARSMVTRCFRDHFFDRGYYEVTPPTLVQTQVEGGATLFKLDYFGEEAFLTQSSQLYLETCLPALGDVFCIAQSYRAEQSRTRRHLAEYTHVEAECPFLTFDDLLNRLEDLVCDVVDRILKSPAGSIVHELNPNFQPPKRPFKRMNYSDAIVWLKEHDVKKEDGTFYEFGEDIPEAPERLMTDTINEPILLCRFPVEIKSFYMQRCPEDSRLTESVDVLMPNVGEIVGGSMRIFDSEEILAGYKREGIDPTPYYWYTDQRKYGTCPHGGYGLGLERFLTWILNRYHIRDVCLYPRFVQRCTP

SEQ ID NO: 12233 - protein, 548 aa, Homo sapiens
MVLAELYVSDREGSDATGDGTKEKPFKTGLKALMTVGKEPFPTIYVDSQKENERWNVISKSQLKNIKKMWHREQMKSESREKKEAEDSLRREKNLEEAKKITIKNDPSLPEPKCVKIGALEGYRGQRVKVFGWVHRLRRQGKNLMFLVLRDGTGYLQCVLADELCQCYNGVLLSTESSVAVYGMLNLTPKGKQAPGGHELSCDFWELIGLAPAGGADNLINEESDVDVQLNNRHMMIRGENMSKILKARSMVTRCFRDHFFDRGYYEVTPPTLVQTQVEGGATLFKLDYFGEEAFLTQSSQLYLETCLPALGDVFCIAQSYRAEQSRTRRHLAEYTHVEAECPFLTFDDLLNRLEDLVCDVVDRILKSPAGSIVHELNPNFQPPKRPFKRMNYSDAIVWLKEHDVKKEDGTFYEFGEDIPEAPERLMTDTINEPILLCRFPVEIKSFYMQRCPEDSRLTESVDVLMPNVGEIVGGSMRIFDSEEILAGYKREGIDPTPYYWYTDQRKYGTCPHGGYGLGLERFLTWILNRYHIRDVCLYPRFVQRCTP

SEQ ID NO: 12234 - protein, 1251 aa, Homo sapiens
MSTERDSETTFDEDSQPNDEVVPYSDDETEDELDDQGSAVEPEQNRVNREAEENREPFRKECTWQVKANDRKYHEQPHFMNTKFLCIKESKYANNAIKTYKYNAFTFIPMNLFEQFKRAANLYFLALLILQAVPQISTLAWYTTLVPLLVVLGVTAIKDLVDDVARHKMDKEINNRTCEVIKDGRFKVAKWKEIQVGDVIRLKKNDFVPADILLLSSSEPNSLCYVETAELDGETNLKFKMSLEITDQYLQREDTLATFDGFIECEEPNNRLDKFTGTLFWRNTSFPLDADKILLRGCVIRNTDFCHGLVIFAGADTKIMKNSGKTRFKRTKIDYLMNYMVYTIFVVLILLSAGLAIGHAYWEAQVGNSSWYLYDGEDDTPSYRGFLIFWGYIIVLNTMVPISLYVSVEVIRLGQSHFINWDLQMYYAEKDTPAKARTTTLNEQLGQIHYIFSDKTGTLTQNIMTFKKCCINGQIYGDHRDASQHNHNKIEQVDFSWNTYADGKLAFYDHYLIEQIQSGKEPEVRQFFFLLAVCHTVMVDRTDGQLNYQAASPDEGALVNAARNFGFAFLARTQNTITISELGTERTYNVLAILDFNSDRKRMSIIVRTPEGNIKLYCKGADTVIYERLHRMNPTKQETQDALDIFANETLRTLCLCYKEIEEKEFTEWNKKFMAASVASTNRDEALDKVYEEIEKDLILLGATAIEDKLQDGVPETISKLAKADIKIWVLTGDKKETAENIGFACELLTEDTTICYGEDINSLLHARMENQRNRGGVYAKFAPPVQESFFPPGGNRALIITGSWLNEILLEKKTKRNKILKLKFPRTEEERRMRTQSKRRLEAKKEQRQKNFVDLACECSAVICCRVTPKQKAMVVDLVKRYKKAITLAIGDGANDVNMIKTAHIGVGISGQEGMQAVMSSDYSFAQFRYLQRLLLVHGRWSYIRMCKFLRYFFYKNFAFTLVHFWYSFFNGYSAQTAYEDWFITLYNVLYTSLPVLLMGLLDQDVSDKLSLRFPGLYIVGQRDLLFNYKRFFVSLLHGVLTSMILFFIPLGAYLQTVGQDGEAPSDYQSFAVTIASALVITVNFQIGLDTSYWTFVNAFSIFGSIALYFGIMFDFHSAGIHVLFPSAFQFTGTASNALRQPYIWLTIILTVAVCLLPVVAIRFLSMTIWPSESDKIQKHRKRLKAEEQWQRRQQVFRRGVSTRRSAYAFSHQRGYADLISSGRSIRKKRSPLDAIVADGTAEYRRTGDS

SEQ ID NO: 12235 - protein, 1251 aa, Homo sapiens; identical to SEQ ID NO: 12234

SEQ ID NO: 12236 - protein, 625 aa, Homo sapiens
MNPTKQETQDALDEIEEKEFTEWNKKFMAASVASTNRDEALDKVYEEIEKDLILLGATAIEDKLQDGVPETISKLAKADIKIWVLTGDKKETAENIGFACELLTEDTTICYGEDINSLLHARMENQRNRGGVYAKFAPPVQESFFPPGGNRALIITGSWLNEILLEKKTKRNKILKLKFPRTEEERRMRTQSKRRLEAKKEQRQKNFVDLACECSAVICCRVTPKQKAMVVDLVKRYKKAITLAIGDGANDVNMIKTAHIGVGISGQEGMQAVMSSDYSFAQFRYLQRLLLVHGRWSYIRMCKFLRYFFYKNFAFTLVHFWYSFFNGYSAQTAYEDWFITLYNVLYTSLPVLLMGLLDQDVSDKLSLRFPGLYIVGQRDLLFNYKRFFVSLLHGVLTSMILFFIPLGAYLQTVGQDGEAPSDYQSFAVTIASALVITVNFQIGLDTSYWTFVNAFSIFGSIALYFGIMFDFHSAGIHVLFPSAFQFTGTASNALRQPYIWLTIILTVAVCLLPVVAIRFLSMTIWPSESDKKPKRFPTARFLQNSKLMGSLIQKHRKRLKAEEQWQRRQQVFRRGVSTRRSAYAFSHQRGYADLISSGRSIRKKRSPLDAIVADGTAEYRRTGDS

SEQ ID NO: 12237 - protein, 171 aa, Homo sapiens
MESGDEAAIERHRVHLRSATLRDAVPATLHLLPCEVAVDGPAPVGRFFTPAIRQGPEGLEVSFRGRCLRGEEVAVPPGLVGYVMVTEEKKVSMGKPDPLRDSGTDDQEEEPLERDFDRFIGATANFSRFTLWGLETIPGPDAKVRGALTWPSLATPVADSRTGARGLRTRA

SEQ ID NO: 12238 - protein, 164 aa, Homo sapiens
MESGDEAAIERHRVHLRSATLRDAVPATLHLLPCEVAVDGPAPVGRFFTPAIRQGPEGLEVSFRGRCLRGEEVAVPPGLVGYVMVTEEKKVSMGKPDPLRDSGTDDQEEEPLERDFDRFIGATANFSRFTLWGLETIPGPDAKVRGALTWPSLAAAIHAQVPED

SEQ ID NO: 12239 - protein, 523 aa, Homo sapiens
MQRAAALVRRGCGPRTPSSWGRSQSSAAAEASAVLKVRPERSRRERILTLESMNPQVKAVEYAVRGPIVLKAGEIELELQRGIKKPFTEVIRANIGDAQAMGQQPITFLRQVMALCTYPNLLDSPSFPEDAKKRARRILQACGGNSLGSYSASQGVNCIREDVAAYITRRDGGVPADPDNIYLTTGASDGISTILKILVSGGGKSRTGVMIPIPQYPLYSAVISELDAIQVNYYLDEENCWALNVNELRRAVQEAKDHCDPKVLCIINPGNPTGQVQSRKCIEDVIHFAWEEKLFLLADEVYQDNVYSPDCRFHSFKKVLYEMGPEYSSNVELASFHSTSKGYMGECGYRGGYMEVINLHPEIKGQLVKLLSVRLCPPVSGQAAMDIVVNPPVAGEESFEQFSREKESVLGNLAKKAKLTEDLFNQVPGIHCNPLQGAMYAFPRIFIPAKAVEAAQAHQMAPDMFYCMKLLEETGICVVPGSGFGQREGTYHFRMTILPPVEKLKTVLQKVKDFHINFLEKYA

SEQ ID NO: 12240 - protein, 523 aa, Homo sapiens; identical to SEQ ID NO: 12239

SEQ ID NO: 12241 - protein, 614 aa, Homo sapiens
MSGIKKQKTENQQKSTNVVYQAHHVSRNKRGQVVGTRGGFRGCTVWLTGLSGAGKTTISFALEEYLVSHAIPCYSLDGDNVRHGLNRNLGFSPGDREENIRRIAEVAKLFADAGLVCITSFISPFAKDRENARKIHESAGLPFFEIFVDAPLNICESRDVKGLYKRARAGEIKGFTGIDSDYEKPETPERVLKTNLSTVSDCVHQVVELLQEQNIVPYTIIKDIHELFVPENKLDHVRAEAETLPSLSITKLDLQWVQVLSEGWATPLKGFMREKEYLQVMHFDTLLDDGVINMSIPIVLPVSAEDKTRLEGCSKFVLAHGGRRVAILRDAEFYEHRKEERCSRVWGTTCTKHPHIKMVMESGDWLVGGDLQVLEKIRWNDGLDQYRLTPLELKQKCKEMNADAVFAFQLRNPVHNGHALLMQDTRRRLLERGYKHPVLLLHPLGGWTKDDDVPLDWRMKQHAAVLEEGVLDPKSTIVAIFPSPMLYAGPTEVQWHCRSRMIAGANFYIVGRDPAGMPHPETKKDLYEPTHGGKVLSMAPGLTSVEIIPFRVAAYNKAKKAMDFYDPARHNEFDFISGTRMRKLAREGENPPDGFMAPKAWKVLTDYYRSLEKN

SEQ ID NO: 12242 - protein, 341 aa, Homo sapiens [sequence omitted]

SEQ ID NO: 12243 - protein, 624 aa, Homo sapiens
MSGIKKQKTENQQKSTNVVYQAHHVSRNKRGQVVGTRGGFRGCTVWLTGLSGAGKTTISFALEEYLVSHAIPCYSLDGDNVRHGLNRNLGFSPGDREENIRRIAEVAKLFADAGLVCITSFISPFAKDRENARKIHESAGLPFFEIFVDAPLNICESRDVKGLYKRARAGEIKGFTGIDSDYEKPETPERVLKTNLSTVSDCVHQVVELLQEQNIVPYTIIKDIHELFVPENKLDHVRAEAETLPSLSITKLDLQWVQVLSEGWATPLKGFMREKEYLQVMHFDTLLDVFVHHMALSTDGVINMSIPIVLPVSAEDKTRLEGCSKFVLAHGGRRVAILRDAEFYEHRKEERCSRVWGTTCTKHPHIKMVMESGDWLVGGDLQVLEKIRWNDGLDQYRLTPLELKQKCKEMNADAVFAFQLRNPVHNGHALLMQDTRRRLLERGYKHPVLLLHPLGGWTKDDDVPLDWRMKQHAAVLEEGVLDPKSTIVAIFPSPMLYAGPTEVQWHCRSRMIAGANFYIVGRDPAGMPHPETKKDLYEPTHGGKVLSMAPGLTSVEIIPFRVAAYNKAKKAMDFYDPARHNEFDFISGTRMRKLAREGENPPDGFMAPKAWKVLTDYYRSLEKN

SEQ ID NO: 12244 - protein, 151 aa, Homo sapiens
MMKAQFMSLWDGLDTDHSCQVIVMGATNRPQDLDSAIMRRMPTRFHINQPALKQREAILKLILKNENVDRHVDLLEVAQETDGFSGSDLKEMCRDAALLCVREYVNSTSEESHDEDEIRPVQQQDLHRAIEKMKKSKDAAFQNVLTHVCLD

SEQ ID NO: 12245 - protein, 287 aa, Homo sapiens
MVHAEAFSRPLSRNEVVGLIFRLTIFGAVTYFTIKWMVDAIDPTRKQKVEAQKQAEKLMKQIGVKNVKLSEYEMSIAAHLVDPLNMHVTWSDIAGLDDVITDLKDTVILPIKKKHLFENSRLLQPPKGVLLYGPPGCGKTLIAKATAKEAGCRFINLQPSTLTDKWYGESQKLAAAVFSLAIKLQPSIIFIDEIDSFLRNRSSSDHEATAMMKAQFMSLWDGLDTDHSCQVIVMGATNRPQDLDSAIMRRMPTRFHINQPALKQREAILKLILKNENLRKLKPREVL

SEQ ID NO: 12246 - protein, 361 aa, Homo sapiens
MVHAEAFSRPLSRNEVVGLIFRLTIFGAVTYFTIKWMVDAIDPTRKQKVEAQKQAEKLMKQIGVKNVKLSEYEMSIAAHLVDPLNMHVTWSDIAGLDDVITDLKDTVILPIKKKHLFENSRLLQPPKGVLLYGPPGCGKTLIAKATAKEAGCRFINLQPSTLTDKWYGESQKLAAAVFSLAIKLQPSIIFIDEIDSFLRNRSSSDHEATAMMKAQFMSLWDGLDTDHSCQVIVMGATNRPQDLDSAIMRRMPTRFHINQPALKQREAILKLILKNENVDRHVDLLEVAQETDGFSGSDLKEMCRDAALLCVREYVNSTSEESHDEDEIRPVQQQDLHRAIEKMKKSKDAAFQNVLTHVCLD

SEQ ID NO: 12247 - protein, 361 aa, Homo sapiens; identical to SEQ ID NO: 12246

SEQ ID NO: 12248 - protein, 454 aa, Homo sapiens
MFLAQRSLCSLSGRAKFLKTISSSKILGFSTSAKMSLKFTNAKRIEGLDSNVWIEFTKLAADPSVVNLGQGFPDISPPTYVKEELSKIAAIDSLNQYTRGFGHPSLVKALSYLYEKLYQKQIDSNKEILVTVGAYGSLFNTIQALIDEGDEVILIVPFYDCYEPMVRMAGATPVFIPLRSKPVYGKRWSSSDWTLDPQELESKFNSKTKAIILNTPHNPLGKVYNREELQVIADLCIKYDTLCISDEVYEWLVYSGNKHLKIATFPGMWERTITIGSAGKTFSVTGWKLGWSIGPNHLIKHLQTVQQNTIYTCATPLQEALAQAFWIDIKRMDDPECYFNSLPKELEVKRDRMVRLLESVGLKPIVPDGGYFIIADVSLLDPDLSDMKNNEPYDYKFVKWMTKHKKLSAIPVSAFCNSETKSQFEKFVRFCFIKKDSTLDAAEEIIKAWSVQKS

SEQ ID NO: 12249 - protein, 390 aa, Homo sapiens
MVEADRPGKLFIGGLNTETNEKALETVFGKYGRIVEVLLIKDRETNKSRGFAFVTFESPADAKDAARDMNGKSLDGKAIKVEQATKPSFERGRHGPPPPPRSRGPPRGFGAGRGGSGGTRGPPSRGGHMDDGGYSMNFNMSSSRGPLPVKRGPPPRSGGPSPKRSAPSGLVRSSSGMGGRAPLSRGRDSYGGPPRREPLPSRRDVYLSPRDDGYSTKDSYSSRDYPSSRDTRDYAPPPRDYTYRDYGHSSSRDDYPSRGYGDRDGYGRDRDYSDHPSGGSYRDSYESYGNSRSAPLTRGPPPSYGGSSRYDDYSSSRDGYGGSRDSYSSSRSDLYSSCDRVGRQERGLPPSVERGYPSSRDSYSSSSRGAPRGAGPGGSRSDRGGGRSRY

SEQ ID NO: 12250 - protein, 465 aa, Homo sapiens [sequence omitted]

SEQ ID NO: 12251 - protein, 390 aa, Homo sapiens; identical to SEQ ID NO: 12249

SEQ ID NO: 12252 - protein, 391 aa, Homo sapiens [sequence omitted]

SEQ ID NO: 12253 - protein, 390 aa, Homo sapiens; identical to SEQ ID NO: 12249

SEQ ID NO: 12254 - protein, 270 aa, Homo sapiens
MPQAFLLGSIHEPAGALMEPQPCPGSLAESFLEEELRLNAELSQLQFSEPVGIIYNPVEYAWEPHRNYVTRYCQGPKEVLFLGMNPGPFGMAQTGVPFGEVSMVRDWLGIVGPVLTPPQEHPKRPVLGLECPQSEVSGARFWGFFRNLCGQPEVFFHHCFVHNLCPLLFLAPSGRNLTPAELPAKQREQLLGICDAALCRQVQLLGVRLVVGVGRLAEQRARRALAGLMPEVQVEGLLHPSPRNPQANKGWEAVAKERLNELGLLPLLLK

SEQ ID NO: 12255 - protein, 270 aa, Homo sapiens; identical to SEQ ID NO: 12254

SEQ ID NO: 12256 - protein, 270 aa, Homo sapiens; identical to SEQ ID NO: 12254

SEQ ID NO: 12257 - protein, 270 aa, Homo sapiens; identical to SEQ ID NO: 12254

SEQ ID NO: 12258 - protein, 270 aa, Homo sapiens; identical to SEQ ID NO: 12254

SEQ ID NO: 12259 - protein, 177 aa, Homo sapiens
MPQAFLLGSIHEPAGALMEPQPCPGSLAESFLEEELRLNAELSQLQFSEPVGIIYNPVEYAWEPHRNYVTRYCQGPKEVLFLGMNPGPFGMAQTGVPFGEVSMVRDWLGIVGPVLTPPQEHPKRPVLGLECPQSEGPRQSMGHEIKSELLMGGCSWIRGKIQCDRVQVRRPGFSSQL

SEQ ID NO: 12260 - protein, 270 aa, Homo sapiens; identical to SEQ ID NO: 12254

SEQ ID NO: 12261 - protein, 325 aa, Homo sapiens
MGHRFLRGLLTLLLPPPPLYTRHRMLGPESVPPPKRSRSKLMAPPRIGTHNGTFHCDEALACALLRLLPEYRDAEIVRTRDPEKLASCDIVVDVGGEYDPRRHRYDHHQRSFTETMSSLSPGKPWQTKLSSAGLIYLHFGHKLLAQLLGTSEEDSMVGTLYDKAGFKRAMDLVQEEFLQRLDFYQHSWLPARALVEEALAQRFQVDPSGEIVELAKGACPWKEHLYHLESGLSPPVAIFFVIYTDQAGQWRIQCVPKEPHSFQSRLPLPEPWRGLRDEALDQVSGIPGCIFVHASGFIGGHRTREGALSMARATLAQRSYLPQIS

SEQ ID NO: 12262 - protein, 376 aa, Homo sapiens
MGHRFLRGLLTLLLPPPPLYTRHRMLGPESVPPPKRSRSKLMAPPRIGTHNGTFHCDEALACALLRLLPEYRDAEIVRTRDPEKLASCDIVVDVGGEYDPRRHRYDHHQRSFTETMSSLSPGKPWQTKLSSAGLIYLHFGHKLLAQLLGTSEEDSMVGTLYDKMYENFVEEVDAVDNGISQWAEGEPRYALTTTLSARVARLNPTWNHPDQDTEAGFKRAMDLVQEEFLQRLDFYQHSWLPARALVEEALAQRFQVDPSGEIVELAKGACPWKEHLYHLESGLSPPVAIFFVIYTDQAGQWRIQCVPKEPHSFQSRLPLPEPWRGLRDEALDQVSGIPGCIFVHASGFIGGHRTREGALSMARATLAQRSYLPQIS

SEQ ID NO: 12263 - protein, 497 aa, Homo sapiens
METKLPPASTPTSPSSPGLSPVPPPDKVDGFSRRSLRRARPRRSHSSSQFRYQSNQQELTPLPLLKDVPASELHELLSRKLAQCGVMFDFLDCVADLKGKEVKRAALNELVECVGSTRGVLIEPVYPDIIRMISVNIFRTLPPSENPEFDPEEDEPNLEPSWPHLQLVYEFFLRFLESPDFQPSVAKRYVDQKFVLMLLELFDSEDPREREYLKTILHRVYGKFLGLRAYIRKQCNHIFLRFIYEFEHFNGVAELLEILGSIINGFALPLKTEHKQFLVRVLIPLHSVKSLSVFHAQLAYCVVQFLEKDATLTEHVIRGLLKYWPKTCTQKEVMFLGEMEEILDVIEPSQFVKIQEPLFKQVARCVSSPHFQVAERALYFWNNEYILSLIEDNCHTVLPAVFGTLYQVSKEHWNQTIVSLIYNVLKTFMEMNGKLFDELTASYKLEKQQEQQKAQERQELWQGLEELRLRRLQGTQGAKEAPLQRLTPQVAASGGQS

SEQ ID NO: 12264 - protein, 497 aa, Homo sapiens; identical to SEQ ID NO: 12263

SEQ ID NO: 12265 - protein, 125 aa, Homo sapiens
MKLLTHNLLSSHVRGVGSRGFPLRLQATEVRICPVEFNPNFVARMIPKVEWSAFLEAADNLRLIQVPKGPVEGYEENEEFLRTMHHLLLEVEVIEGTLQCPESGRMFPISRGIPNMLLSEEETES

SEQ ID NO: 12266 - protein, 104 aa, Homo sapiens
MKLLTHNLLSSHVRGVGSRGFPLRLQATEVRICPVEFNPLRLIQVPKGPVEGYEENEEFLRTMHHLLLEVEVIEGTLQCPESGRMFPISRGIPNMLLSEEETES

SEQ ID NO: 12267 - protein, 125 aa, Homo sapiens; identical to SEQ ID NO: 12265

SEQ ID NO: 12268 - protein, 842 aa, Homo sapiens
MSRPLSDQEKRKQISVRGLAGVENVTELKKNFNRHLHFTLVKDRNVATPRDYYFALAHTVRDHLVGRWIRTQQHYYEKDPKRIYYLSLEFYMGRTLQNTMVNLALENACDEATYQLGLDMEELEEIEEDAGLGNGGLGRLAACFLDSMATLGLAAYGYGIRYEFGIFNQKISGGWQMEEADDWLRYGNPWEKARPEFTLPVHFYGHVEHTSQGAKWVDTQVVLAMPYDTPVPGYRNNVVNTMRLWSAKAPNDFNLKDFNVGGYIQAVLDRNLAENISRVLYPNDNFFEGKELRLKQEYFVVAATLQDIIRRFKSSKFGCRDPVRTNFDAFPDKVAIQLNDTHPSLAIPELMRILVDLERMDWDKAWDVTVRTCAYTNHTVLPEALERWPVHLLETLLPRHLQIIYEINQRFLNRVAAAFPGDVDRLRRMSLVEEGAVKRINMAHLCIAGSHAVNGVARIHSEILKKTIFKDFYELEPHKFQNKTNGITPRRWLVLCNPGLAEVIAERIGEDFISDLDQLRKLLSFVDDEAFIRDVAKVKQENKLKFAAYLEREYKVHINPNSLFDIQVKRIHEYKRQLLNCLHVITLYNRIKREPNKFFVPRTVMIGGKAAPGYHMAKMIIRLVTAIGDVVNHDPAVGDRLRVIFLENYRVSLAEKVIPAADLSEQISTAGTEASGTGNMKFMLNGALTIGTMDGANVEMAEEAGEENFFIFGMRVEDVDKLDQRGYNAQEYYDRIPELRQVIEQLSSGFFSPKQPDLFKDIVNMLMHHDRFKVFADYEDYIKCQEKVSALYKNPREWTRMVIRNIATSGKFSSDRTIAQYAREIWGVEPSRQRLPAPDEAI

SEQ ID NO: 12269 - protein, 129 aa, Homo sapiens
MPMASPQTLVLYLLVLAVTEAWGQEAVIPGCHLHPFNVTVRSDRQGTCQGSHVAQACVGHCESSAFPSRYSVLVASGYRHNITSVSQCCTISGLKKVKVQLQCVGSRREELEIFTARACQCDMCRLSRY

SEQ ID NO: 12270 - protein, 129 aa, Homo sapiens; identical to SEQ ID NO: 12269

SEQ ID NO: 12271 - protein, 129 aa, Homo sapiens; identical to SEQ ID NO: 12269

SEQ ID NO: 12272 - protein, 2080 aa, Homo sapiens [sequence omitted]

SEQ ID NO: 12273 - protein, 2542 aa, Homo sapiens
MAVWEAEQLGGLQRGDLLTPPAPDGDGRTAPLGQPPGAQLYCPACLVTCHSQEAFENHCASSEHAQMVAFDQALPWEHRSPPPGLSKFELCPKPDLCEYGDACTKAHSAQELQEWVRRTQAVELRGQAAWQDGLVPYQERLLAEYQRSSSEVLVLAETLDGVRVTCNQPLMYQAQERKTQYSWTFAVHSEEPLLHVALLKQEPGADFSLVAPGLPPGRLYARGERFRVPSSTADFQVGVRVQAASFGTFEQWVVFDFGRRPVLLQKLGLQLGQGRRPGPCRNLALGHPEEMERWHTGNRHVVPGVERTAEQTALMAKYKGPALALEFNRSSVASGPISPTNYRQRMHQFLYEEEAAQQQLVAKLTLRGQVFLKTALQTPALNMLFAPPGALYAEVPVPSSLMPDTDQGFLLGRAVSTALVAPVPAPDNTVFEVRLERRASSEQALWLLLPARCCLALGLQPEARLVLEVQFQIDPMTFRLWHQAVDTLPEEQLVVPDLPTCALPRPWSVPPLRRGNRKQELAVALIAGWGPGDGRRVPPLLIYGPFGTGKTYTLAMASLEVIRRPETKVLICTHTNSAADIYIREYFHSHVSGGHPEATPLRVMYTDRPLSQTDPVTLQYCCLTDDRQAFRPPTRAELARHRVVVTTTSQARELRVPVGFFSHILIDEAAQMLECEALTPLAYASHGTRLVLAGDHMQVTPRLFSVARARAAEHTLLHRLFLCYQQETHEVARQSRLVFHENYRCTDAIVSFISRHFYVAKGNPIHARGKVPPHPRHYPLMFCHVAGNPDRDMSMASWLNLAEIAQVVEKVQEAYNTWPSCWGGREQRCICVVSHGAQFRVVVLSTVHTCQSLLSPGALAPEFFTDARVLNTVLTRAQSQLVVVGDAVALCSFGACGKLWESFIRECVERHSVCPEGLSMEQVEQGVAQRRRWPPRGTQAGAAGNWEAAPEPVGDLAEEQAAVVTAMVKAEPGDEALSPASRDITATTAQTEAAAAPAGDAVKEDVVPGACAAGAAAAAGVESTEAEDAEADFWPWDGELNADDAILRELLDESQKVMVTVGEDGLLDTVARPESLQQARLYENLPPAALRKLLRAEPERYRHCSFVPETFERASAIPLDDASSGPIQVRGRLDCGMAFAGDEVLVQLLSGDKAPEGRLRGRVLGVLKRKRHELAFVCRMDTWDPRIMVPINGSVTKIFVAELKDPSQVPIYSLRKGRLQRVGLERLTAEARHSRLFWVQIVLWRQGFYYPLGIVREVLPEASTWEQGLRILGLEYSLRVPPSDQATITKVLQKYHTELGRVAGRREDCRAFLTFTVDPQGACNLDDALSVRDLGPRCEVAVHITDVASFVPRDGVLDVEARRQGAAFYAPGREPVPMLPASLCQDVLSLLPGRDRLAISLFLTMEKASGQLKSLRFAPSVVQSDRQLSYEEAEEVIRQHPGAGRELPARLDSVDACVVAACYFSRLLRRHRLRSDCFYEQPDEDGTLGFRAAHIMVKEYMIQFNRLVAEFLVGSECTRTVTPLRWQPAPRSQQLKALCEKHGDRVPLSLHLGHHLHGGGGSPPDTRLHLLASLWKQVQFAARTQDYEQMVDLVTTDDMHPFLAPAGRDLRKALERSAFGRCARGHQQQGGHYSLQVDWYTWATSPIRRYLDVVLQRQILLALGHGGSAYSARDIDGLCQAFSLQHALAQSYQRRARSLHLAVQLKAQPLDKLGFVVDVEAGSRCFRLLFPSNRETLPDPCPVPYGSLQLAEHPHALAGRPGLRLLWRRRVYSAQGSSPPLPLPGTVPDPHTLAVETALWKQLLELVELQRWPEAAALIQEKGEASQRRELVQVQRSHCGHFLEVARELGSGDTLQVQLGTSLQHGFLVPSPQLWTVAPGFSLCLEHVERPGDCFSGRVYRAPRDRYRDVDEYACVWEPFCALESATGAVAENDSVTLQHLSVSWEASRTPQGQLQGAFRLEAAFLEENCADINFSCCYLCIRLEGLPAPTASPRPGPSSLGPGLNVDPGTYTWVAHGQTQDWDQERRADRQEAPRRVHLFVHHMGMEKVPEEVLRPGTLFTVELLPKQLPDLRKEEAVRGLEEASPLVTSIALGRPVPQPLCRGKTIVGLHIVFWFHKSNQEQVQPGGPPRGEKRLGGPCILYCGPSNKSVDVLAGLLLRRMELKPLRVYSEQAEASEFPVPRVGSRKLLRKSPREGRPNQSLRSITLHHRIRQAPNPYSSEIKAFDTRLQRGELFSREDLVWYKKVLWEARKFELDRHEVILCTCSCAASASLKILDVRQILVDEAGMATEPETLIPLVQFPQAEKVVLLGDHKQLRPVVKNERLQNLGLDRSLFERYHEDAHMLDTQYRMHEGICAFPSVAFYKSKLKTWQGLRRPPSVLGHAGKESCPVIFGHVQGHERSLLVSTDEGNENSKANLEEVAEVALRREGIAGVAVSSITKSQGSEWRYVLVSTVRTCAKSDLDQRPTKSWLKKFLGFVVDPNQVNVAVTRAQEGLCLIGDHLLLRCCPLWRSLLDFCEAQQTLVPAGQVRVCRRPTMPS

SEQ ID NO: 12274 - protein, 537 aa, Homo sapiens
MASPGSGFWSFGSEDGSGDSENPGTARAWCQVAQKFTGGIGNKLCALLYGDAEKPAESGGSQPPRAAARKAACACDQKPCSCSKVDVNYAFLHATDLLPACDGERPTLAFLQDVMNILLQYVVKSFDRSTKVIDFHYPNELLQEYNWELADQPQNLEEILMHCQTTLKYAIKTGHPRYFNQLSTGLDMVGLAADWLTSTANTNMFTYEIAPVFVLLEYVTLKKMREIIGWPGGSGDGIFSPGGAISNMYAMMIARFKMFPEVKEKGMAALPRLIAFTSEHSHFSLKKGAAALGIGTDSVILIKCDERGKMIPSDLERRILEAKQKGFVPFLVSATAGTTVYGAFDPLLAVADICKKYKIWMHVDGLMQNCNQMHASYLFQQDKHYDLSYDTGDKALQCGRHVDVFKLWLMWRAKGTTGFEAHVDKCLELAEYLYNIIKNREGYEMVFDGKPQHTNVCFWYIPPSLRTLEDNEERMSRLSKVAPVIKARMMEYGTTMVSYQPLGDKVNFFRMVISNPAATHQDIDFLIEEIERLGQDL

SEQ ID NO: 12275 - protein, 78 aa, Homo sapiens
MASPGSGFWSFGSEDGSGDSENPGTARAWCQVAQKFTGGIGNKLCDLLPACDGERPTLAFLQDVMNILLQYVVKSFDR

SEQ ID NO: 12276 - protein, 585 aa, Homo sapiens
MASPGSGFWSFGSEDGSGDSENPGTARAWCQVAQKFTGGIGNKLCALLYGDAEKPAESGGSQPPRAAARKAACACDQKPCSCSKVDVNYAFLHATDLLPACDGERPTLAFLQDVMNILLQYVVKSFDRSTKVIDFHYPNELLQEYNWELADQPQNLEEILMHCQTTLKYAIKTGHPRYFNQLSTGLDMVGLAADWLTSTANTNMFTYEIAPVFVLLEYVTLKKMREIIGWPGGSGDGIFSPGGAISNMYAMMIARFKMFPEVKEKGMAALPRLIAFTSEHSHFSLKKGAAALGIGTDSVILIKCDERGKMIPSDLERRILEAKQKGFVPFLVSATAGTTVYGAFDPLLAVADICKKYKIWMHVDAAWGGGLLMSRKHKWKLSGVERANSVTWNPHKMMGVPLQCSALLVREEGLMQNCNQMHASYLFQQDKHYDLSYDTGDKALQCGRHVDVFKLWLMWRAKGTTGFEAHVDKCLELAEYLYNIIKNREGYEMVFDGKPQHTNVCFWYIPPSLRTLEDNEERMSRLSKVAPVIKARMMEYGTTMVSYQPLGDKVNFFRMVISNPAATHQDIDFLIEEIERLGQDL

SEQ ID NO: 12277 - protein, 580 aa, Homo sapiens
MSDFEEWISGTYRKMEEGPLPLLTFATAPYHDQKPGTSGLRKKTYYFEEKPCYLENFIQSIFFSIDLKDRQGSSLVVGGDGRYFNKSAIETIVQMAAANGIGRLVIGQNGILSTPAVSCIIRKIKAIGGIILTASHNPGGPNGDFGIKFNISNGGPAPEAITDKIFQISKTIEEYAVCPDLKVDLGVLGKQQFDLENKFKPFTVEIVDSVEAYATMLRSIFDFSALKELLSGPNRLKIRIDAMHGVVGPYVKKILCEELGAPANSAVNCVPLEDFGGHHPDPNLTYAADLVETMKSGEHDFGAAFDGDGDRNMILGKHGFFVNPSDSVAVIAANIFSIPYFQQTGVRGFARSMPTSGALDRVASATKIALYETPTGWKFFGNLMDASKLSLCGEESFGTGSDHIREKDGLWAVLAWLSILATRKQSVEDILKDHWQKYGRNFFTRYDYEEVEAEGANKMMKDLEALMFDRSFVGKQFSANDKVYTVEKADNFEYSDPVDGSISRNQGLRLIFTDGSRIVFRLSGTGSAGATIRLYIDSYEKDVAKINQDPQVMLAPLISIALKVSQLQERTGRTAPTVIT

SEQ ID NO: 12278 - protein, 562 aa, Homo sapiens
MVKIVTVKTQAYQDQKPGTSGLRKRVKVFQSSANYAENFIQSIISTVEPAQRQEATLVVGGDGRFYMKEAIQLIARIAAANGIGRLVIGQNGILSTPAVSCIIRKIKAIGGIILTASHNPGGPNGDFGIKFNISNGGPAPEAITDKIFQISKTIEEYAVCPDLKVDLGVLGKQQFDLENKFKPFTVEIVDSVEAYATMLRSIFDFSALKELLSGPNRLKIRIDAMHGVVGPYVKKILCEELGAPANSAVNCVPLEDFGGHHPDPNLTYAADLVETMKSGEHDFGAAFDGDGDRNMILGKHGFFVNPSDSVAVIAANIFSIPYFQQTGVRGFARSMPTSGALDRVASATKIALYETPTGWKFFGNLMDASKLSLCGEESFGTGSDHIREKDGLWAVLAWLSILATRKQSVEDILKDHWQKYGRNFFTRYDYEEVEAEGANKMMKDLEALMFDRSFVGKQFSANDKVYTVEKADNFEYSDPVDGSISRNQGLRLIFTDGSRIVFRLSGTGSAGATIRLYIDSYEKDVAKINQDPQVMLAPLISIALKVSQLQERTGRTAPTVIT

SEQ ID NO: 12279 - protein, 558 aa, Homo sapiens [sequence omitted]

SEQ ID NO: 12280 - protein, 318 aa, Homo sapiens
MPEFVLSLLEKMQTQEILRILRLPELGDLGQFFRSLSATTLVSMGALAAILAYWFTHRPKALQPPCNLLMQSEEVEDSGGARRSVIGSGPQLLTHYYDDARTMYQVFRRGLSISGNGPCLGFRKPKQPYQWLSYQEVADRAEFLGSGLLQHNCKACTDQFIGVFAQNRPEWIIVELACYTYSMVVVPLYDTLGPGAIRYIINTADISTVIVDKPQKAVLLLEHVERKETPGLKLIILMDPFEEALKERGQKCGVVIKSMQAVEDCGQENHQAPVPPQPDDLSIVCFTSGTTGKQRHADPQPWLPAPFPGGLAGDCWSL

SEQ ID NO: 12281 - protein, 558 aa, Homo sapiens [sequence omitted]

SEQ ID NO: 12282 - protein, 572 aa, Homo sapiens [sequence omitted]

SEQ ID NO: 12283 - protein, 708 aa, Homo sapiens
MPEFVLSLLEKMQTQEILRILRLPELGDLGQFFRSLSATTLVSMGALAAILAYWFTHRPKALQPPCNLLMQSEEVEDSGGARRSVIGSGPQLLTHYYDDARTMYQVFRRGLSISGNGPCLGFRKPKQPYQWLSYQEVADRAEFLGSGLLQHNCKACTDQFIGVFAQNRPEWIIVELACYTYSMVVVPLYDTLGPGAIRYIINTADISTVIVDKPQKAVLLLEHVERKETPGLKLIILMDPFEEALKERGQKCGVVIKSMQAVEDCGQENHQAPVPPQPDDLSIVCFTSGTTGNPKGAMLTHGNVVADFSGFLKVTESQWAPTCADVHISYLPLAHMFERMVQSVVYCHGGRVGFFQGDIRLLSDDMKALCPTIFPVVPRLLNRMYDKIFSQANTPLKRWLLEFAAKRKQAEVRSGIIRNDSIWDELFFNKIQASLGGCVRMIVTGAAPASPTVLGFLRAALGCQVYEGYGQTECTAGCTFTTPGDWTSGHVGAPLPCNHIKLVDVEELNYWACKGEGEICVRGPNVFKGYLKDPDRTKEALDSDGWLHTGDIGKWLPAGTLKIIDRKKHIFKLAQGEYVAPEKIENIYIRSQPVAQIYVHGDSLKAFLVGIVVPDPEVMPSWAQKRGIEGTYADLCTNKDLKKAILEDMVRLGKESGLHSFEQVKAIHIHSDMFSVQNGLLTPTLKAKRPELREYFKKQIEELYSISM

SEQ ID NO: 12284 - protein, 606 aa, Homo sapiens
MYQVFRRGLSISGNGPCLGFRKPKQPYQWLSYQEVADRAEFLGSGLLQHNCKACTDQFIGVFAQNRPEWIIVELACYTYSMVVVPLYDTLGPGAIRYIINTADISTVIVDKPQKAVLLLEHVERKETPGLKLIILMDPFEEALKERGQKCGVVIKSMQAVEDCGQENHQAPVPPQPDDLSIVCFTSGTTGNPKGAMLTHGNVVADFSGFLKVTEKVIFPRQDDVLISFLPLAHMFERVIQSVVYCHGGRVGFFQGDIRLLSDDMKALCPTIFPVVPRLLNRMYDKIFSQANTPLKRWLLEFAAKRKQAEVRSGIIRNDSIWDELFFNKIQASLGGCVRMIVTGAAPASPTVLGFLRAALGCQVYEGYGQTECTAGCTFTTPGDWTSGHVGAPLPCNHIKLVDVEELNYWACKGEGEICVRGPNVFKGYLKDPDRTKEALDSDGWLHTGDIGKWLPAGTLKIIDRKKHIFKLAQGEYVAPEKIENIYIRSQPVAQIYVHGDSLKAFLVGIVVPDPEVMPSWAQKRGIEGTYADLCTNKDLKKAILEDMVRLGKESGLHSFEQVKAIHIHSDMFSVQNGLLTPTLKAKRPELREYFKKQIEELYSISM

SEQ ID NO: 12285 - protein, 697 aa, Homo sapiens
MQTQEILRILRLPELGDLGQFFRSLSATTLVSMGALAAILAYWFTHRPKALQPPCNLLMQSEEVEDSGGARRSVIGSGPQLLTHYYDDARTMYQVFRRGLSISGNGPCLGFRKPKQPYQWLSYQEVADRAEFLGSGLLQHNCKACTDQFIGVFAQNRPEWIIVELACYTYSMVVVPLYDTLGPGAIRYIINTADISTVIVDKPQKAVLLLEHVERKETPGLKLIILMDPFEEALKERGQKCGVVIKSMQAVEDCGQENHQAPVPPQPDDLSIVCFTSGTTGNPKGAMLTHGNVVADFSGFLKVTESQWAPTCADVHISYLPLAHMFERMVQSVVYCHGGRVGFFQGDIRLLSDDMKALCPTIFPVVPRLLNRMYDKIFSQANTPLKRWLLEFAAKRKQAEVRSGIIRNDSIWDELFFNKIQASLGGCVRMIVTGAAPASPTVLGFLRAALGCQVYEGYGQTECTAGCTFTTPGDWTSGHVGAPLPCNHIKLVDVEELNYWACKGEGEICVRGPNVFKGYLKDPDRTKEALDSDGWLHTGDIGKWLPAGTLKIIDRKKHIFKLAQGEYVAPEKIENIYIRSQPVAQIYVHGDSLKAFLVGIVVPDPEVMPSWAQKRGIEGTYADLCTNKDLKKAILEDMVRLGKESGLHSFEQVKAIHIHSDMFSVQNGLLTPTLKAKRPELREYFKKQIEELYSISM

SEQ ID NO: 12286 - protein, 126 aa, Homo sapiens
MADEIAKAQVARPGGDTIFGKIIRKEIPAKIIFEDDRCLAFHDISPQAPTHFLVIPKKHISQISVAEDDDESLLGHLMIVGKKCAADLGLNKGYRMVVNEGSDGGQSVYHVHLHVLGGRQMHWPPG

SEQ ID NO: 12287 - protein, 1927 aa, Homo sapiens [sequence omitted]

SEQ ID NO: 12288 - protein, 423 aa, Homo sapiens
MAGKRSGWSRAALLQLLLGVNLVVMPPTRARSLRFVTLLYRHGDRSPVKTYPKDPYQEEEWPQGFGQLTKEGMLQHWELGQALRQRYHGFLNTSYHRQEVYVRSTDFDRTLMSAEANLAGLFPPNGMQRFNPNISWQPIPVHTVPITEDRLLKFPLGPCPRYEQLQNETRQTPEYQNESSRNAQFLDMVANETGLTDLTLETVWNVYDTLFCEQTHGLRLPPWASPQTMQRLSRLKDFSFRFLFGIYQQAEKARLQGGVLLAQIRKNLTLMATTSQLPKLLVYSAHDTTLVALQMALDVYNGEQAPYASCHIFELYQEDSGNFSVEMYFRNESDKAPWPLSLPGCPHRCPLQDFLRLTEPVVPKDWQQECQLASGPADTEVIVALAVCGSILFLLIVLLLTVLFRMQAQPPGYRHVADGEDHA

SEQ ID NO: 12289 - protein, 423 aa, Homo sapiens; identical to SEQ ID NO: 12288

SEQ ID NO: 12290 - protein, 515 aa, Homo sapiens
MVSIPEYYEGKNVLLTGATGFLGKVLLEKLLRSCPKVNSVYVLVRQKAGQTPQERVEEVLSGKLFDRLRDENPDFREKIIAINSELTQPKLALSEEDKEVIIDSTNIIFHCAATVRFNENLRDAVQLNVIATRQLILLAQQMKNLEVFMHVSTAYAYCNRKHIDEVVYPPPVDPKKLIDSLEWMDDGLVNDITPKLIGDRPNTYIYTKALAEYVVQQEGAKLNVAIVRPSIVGASWKEPFPGWIDNFNGPSGLFIAAGKGILRTIRASNNALADLVPVDVVVNMSLAAAWYSGVNRPRNIMVYNCTTGSTNPFHWGEVEYHVISTFKRNPLEQAFRRPNVNLTSNHLLYHYWIAVSHKAPAFLYDIYLRMTGRSPRMMKTITRLHKAMVFLEYFTSNSWVWNTENVNMLMNQLNPEDKKTFNIDVRQLHWAEYIENYCLGTKKYVLNEEMSGLPAARKHLNKLRNIRYGFNTILVILIWRIFIARSQMARNIWYFVVSLCYKFLSYFRASSTMRY

SEQ ID NO: 12291 - protein, 515 aa, Homo sapiens; identical to SEQ ID NO: 12290

SEQ ID NO: 12292 - protein, 339 aa, Homo sapiens [sequence omitted]

SEQ ID NO: 12293 - protein, 511 aa, Homo sapiens
MALRAMRGIVNGAAPELPVPTGGPAVGAREQALAVSRNYLSQPRLTYKTVSGVNGPLVILDHVKFPRYAEIVHLTLPDGTKRSGQVLEVSGSKAVVQVFEGTSGIDAKKTSCEFTGDILRTPVSEDMLGRVFNGSGKPIDRGPVVLAEDFLDIMGQPINPQCRIYPEEMIQTGISAIDGMNSIARGQKIPIFSAAGLPHNEIAAQICRQAGLVKKSKDVVDYSEENFAIVFAAMGVNMETARFFKSDFEENGSMDNVCLFLNLANDPTIERIITPRLALTTAEFLAYQCEKHVLVILTDMSSYAEALREVSAAREEVPGRRGFPGYMYTDLATIYERAGRVEGRNGSITQIPILTMPNDDITHPIPDLTGYITEGQIYVDRQLHNRQIYPPINVLPSLSRLMKSAIGEGMTRKDHADVSNQLYACYAIGKDVQAMKAVVGEEALTSDDLLYLEFLQKFERNFIAQGPYENRTVFETLDIGWQLLRIFPKEMLKRIPQSTLSEFYPRDSAKH

SEQ ID NO: 12294 - protein, 511 aa, Homo sapiens; identical to SEQ ID NO: 12293

SEQ ID NO: 12295 - protein, 550 aa, Homo sapiens
MVGEEKMSLRNRLSKSRENPEEDEDQRNPAKESLETPSNGRIDIKQLIAKKIKLTAEAEELKPFFMKEVGSHFDDFVTNLIEKSASLDNGGCALTTFSVLEGEKNNHRAKDLRAPPEQGKIFIARRSLLDELLEVDHIRTIYHMFIALLILFILSTLVVDYIDEGRLVLEFSLLSYAFGKFPTVVWTWWIMFLSTFSVPYFLFQHWATGYSKSSHPLIRSLFHGFLFMIFQIGVLGFGPTYVVLAYTLPPASRFIIIFEQIRFVMKAHSFVRENVPRVLNSAKEKSSTVPIPTVNQYLYFLFAPTLIYRDSYPRNPTVRWGYVAMKFAQVFGCFFYVYYIFERLCAPLFRNIKQEPFSARVLVLCVFNSILPGVLILFLTFFAFLHCWLNAFAEMLRFGDRMFYKDWWNSTSYSNYYRTWNVVVHDWLYYYAYKDFLWFFSKRFKSAAMLAVFAVSAVVHEYALAVCLSFFYPVLFVLFMFFGMAFNFIVNDSRKKPIWNVLMWTSLFLGNGVLLCFYSQEWYARQHCPLKNPTFLDYVRPRSWTCRYVF

SEQ ID NO: 12296 - protein, 550 aa, Homo sapiens; identical to SEQ ID NO: 12295

SEQ ID NO: 12297 - protein, 485 aa, Homo sapiens
MKEVGSHFDDFVTNLIEKSASLDNGGCALTTFSVLEGEKNNHRAKDLRAPPEQGKIFIARRSLLDELLEVDHIRTIYHMFIALLILFILSTLVVDYIDEGRLVLEFSLLSYAFGKFPTVVWTWWIMFLSTFSVPYFLFQHWATGYSKSSHPLIRSLFHGFLFMIFQIGVLGFGPTYVVLAYTLPPASRFIIIFEQIRFVMKAHSFVRENVPRVLNSAKEKSSTVPIPTVNQYLYFLFAPTLIYRDSYPRNPTVRWGYVAMKFAQVFGCFFYVYYIFERLCAPLFRNIKQEPFSARVLVLCVFNSILPGVLILFLTFFAFLHCWLNAFAEMLRFGDRMFYKDWWNSTSYSNYYRTWNVVVHDWLYYYAYKDFLWFFSKRFKSAAMLAVFAVSAVVHEYALAVCLSFFYPVLFVLFMFFGMAFNFIVNDSRKKPIWNVLMWTSLFLGNGVLLCFYSQEWYARQHCPLKNPTFLDYVRPRSWTCRYVF

SEQ ID NO: 12298 - protein, 550 aa, Homo sapiens; identical to SEQ ID NO: 12295

SEQ ID NO: 12299 - protein, 244 aa, Homo sapiens
MEVTGVSAPTVTVFISSSLNTFRSEKRYSRSLTIAEFKCKLELLVGSPASCMELELYGVDDKFYSKLDQEDALLGSYPVDDGCRIHVIDHSGARLGEYEDVSRVEKYTISQEAYDQRQDTVRSFLKRSKLGRYNEEERAQQEAEAAQRLAEEKAQASSIPVGSRCEVRAAGQSPRRGTVMYVGLTDFKPGYWIGVRYDEPLGKNDGSVNGKRYFECQAKYGAFVKPAVVTVGDFPEEDYGLDEI

SEQ ID NO: 12300 - protein, 193 aa, Homo sapiens
MELELYGVDDKFYSKLDQEDALLGSYPVDDGCRIHVIDHSGARLGEYEDVSRVEKYTISQEAYDQRQDTVRSFLKRSKLGRYNEEERAQQEAEAAQRLAEEKAQASSIPVGSRCEVRAAGQSPRRGTVMYVGLTDFKPGYWIGVRYDEPLGKNDGSVNGKRYFECQAKYGAFVKPAVVTVGDFPEEDYGLDEI

SEQ ID NO: 12301 - protein, 252 aa, Homo sapiens
MEVTGVSAPTVTVFISSSLNTFRSEKRYSRSLTIAEFKCKLELLVGSPASCMELELYGVDDKFYSKLDQEDALLGSYPVDDGCRIHVIDHSGARLGEYEDVSRVEKYTISQEAYDQRQGTGRWASRDTVRSFLKRSKLGRYNEEERAQQEAEAAQRLAEEKAQASSIPVGSRCEVRAAGQSPRRGTVMYVGLTDFKPGYWIGVRYDEPLGKNDGSVNGKRYFECQAKYGAFVKPAVVTVGDFPEEDYGLDEI

SEQ ID NO: 12302 - protein, 114 aa, Homo sapiens
RPPRTKSFWVLSLPGPSRQPGHPQARLQGESPPNPAGSSRVSQALIRSFSSTARNRFQNRVREKQKLFQEDNDIPLYLKGGIVDNILYRVTMTLCLGGTVYSLYSLGWASFPRN

SEQ ID NO: 12303 - protein, 217 aa, Homo sapiens
TEQGVGTRPYAFPHSHIPAGRERSGEELHLPPAEISKNLQKCIPWYRFGLRWDQAKFRDRNGCALRPRVRVWTASSVVDESEEQDSPQPSPSPSPSPAASPAVTLRAAGGAWGSWTEEDYACPWAEKGGDSGGRGQGRMQALRVSQALIRSFSSTARNRFQNRVREKQKLFQEDNDIPLYLKGGIVDNILYRVTMTLCLGGTVYSLYSLGWASFPRN

SEQ ID NO: 12304 - protein, 86 aa, Homo sapiens
MAEDMETKIKNYKTAPFDSRFPNQNQTRNCWQNYLDFHRCQKAMTAKGGDISVCEWYQRVYQSLCPTSWVTDWDEQRAEGTFPGKI

SEQ ID NO: 12305 - protein, 408 aa, Homo sapiens
MSKRDIVLTNVTVVQLLRQPCPVTRAPPPPEPKAEVEPQPQPEPTPVREEIKPPPPPLPPHPATPPPKMVSVARELTVGINGFGRIGRLVLRACMEKGVKVVAVNDPFIDPEYMVYMFKYDSTHGRYKGSVEFRNGQLVVDNHEISVYQCKEPKQIPWRAVGSPYVVESTGVYLSIQAASDHISAGAQRVVISAPSPDAPMFVMGVNENDYNPGSMNIVSNASCTTNCLAPLAKVIHERFGIVEGLMTTVHSYTATQKTVDGPSRKAWRDGRGAHQNIIPASTGAAKAVTKVIPELKGKLTGMAFRVPTPDVSVVDLTCRLAQPAPYSAIKEAVKAAAKGPMAGILAYTEDEVVSTDFLGDTHSSIFDAKAGIALNDNFVKLISWYDNEYGYSHRVVDLLRYMFSRDK

SEQ ID NO: 12306 - protein, 417 aa, Homo sapiens
MSKRDIVLTNVTVVQLLRQPCPVTRAPPPPEPKAEVEPQPQPEPTPVREEIKPPPPPLPPHPATPPPKMVSVARELTVGINGFGRIGRLVLRACMEKGVKVVAVNDPFIDPEYMVYMFKYDSTHGRYKGSVEFRNGQLVVDNHEISVYQCKEPKQIPWRAVGSPYVVESTGVYLSIQAASDHISAGAQRVVISAPSPDAPMFVMGVNENDYNPGSMNIVSVRAHLGCFSNASCTTNCLAPLAKVIHERFGIVEGLMTTVHSYTATQKTVDGPSRKAWRDGRGAHQNIIPASTGAAKAVTKVIPELKGKLTGMAFRVPTPDVSVVDLTCRLAQPAPYSAIKEAVKAAAKGPMAGILAYTEDEVVSTDFLGDTHSSIFDAKAGIALNDNFVKLISWYDNEYGYSHRVVDLLRYMFSRDK

SEQ ID NO: 12307 - protein, 125 aa, Homo sapiens
MEPDGTYEPGFVGIRFCQECNNMLYPKEDKENRILLYACRNCDYQQEADNSCIYVNKITHEVDELTQIIADVSQDPTLPRTEDHPCQKCGHKEAVFFQSHSARAEDAMRLYYVCTAPHCGHRWTE

SEQ ID NO: 12308 - protein, 125 aa, Homo sapiens; identical to SEQ ID NO: 12307

SEQ ID NO: 12309 - protein, 1035 aa, Homo sapiens
MGKAENYELYSVELGPGPGGDMAAKMSKKKKAGGGGGKRKEKLENMKKEMEINDHQLSVAELEQKYQTSATKGLSASLAAELLLRDGPNALRPPRGTPEYVKFARQLAGGLQCLMWVAAAICLIAFAIQASEGDLTTDDNLYLAIALIAVVVVTGCFGYYQEFKSTNIIASFKNLVPQQATVIRDGDKFQINADQLVVGDLVEMKGGDRVPADIRILAAQGCKVDNSSLTGESEPQTRSPECTHESPLETRNIAFFSTMCLEGTAQGLVVNTGDRTIIGRIASLASGVENEKTPIAIEIEHFVDIIAGLAILFGATFFIVAMCIGYTFLRAMVFFMAIVVAYVPEGLLATVTVCLSLTAKRLASKNCVVKNLEAVETLGSTSVICSDKTGTLTQNRMTVSHLWFDNHIHTADTTEDQSGQTFDQSSETWRALCRVLTLCNRAAFKSGQDAVPVPKRIVIGDASETALLKFSELTLGNAMGYRDRFPKVCEIPFNSTNKFQLSIHTLEDPRDPRHLLVMKGAPERVLERCSSILIKGQELPLDEQWREAFQTAYLSLGGLGERVLGFCQLYLNEKDYPPGYAFDVEAMNFPSSGLCFAGLVSMIDPPRATVPDAVLKCRTAGIRVIMVTGDHPITAKAIAASVGIISEGSETVEDIAARLRVPVDQVNRKDARACVINGMQLKDMDPSELVEALRTHPEMVFARTSPQQKLVIVESCQRLGAIVAVTGDGVNDSPALKKADIGVAMGIAGSDAAKNAADMILLDDNFASIVTGVEQGRLIFDNLKKSIAYTLTKNIPELTPYLIYITVSVPLPLGCITILFIELCTDIFPSVSLAYEKAESDIMHLRPRNPKRDRLVNEPLAAYSYFQIGAIQSFAGFTDYFTAMAQEGWFPLLCVGLRAQWEDHHLQDLQDSYGQEWTFGQRLYQQYTCYTVFFISIEVCQIADVLIRKTRRLSAFQQGFFRNKILVIAIVFQVCIGCFLCYCPGMPNIFNFMPIRFQWWLVPLPYGILIFVYDEIRKLGVRCCPGSWWDQELYY

SEQ ID NO: 12310 - protein, 1026 aa, Homo sapiens
MGKAENYELYSVELGPGPGGDMAAKMSKKKKAGGGGGKRKEKLENMKKEMEINDHQLSVAELEQKYQTSATKGLSASLAAELLLRDGPNALRPPRGTPEYVKFARQLAGGLQCLMWVAAAICLIAFAIQASEGDLTTDDNLYLAIALIAVVVVTGCFGYYQEFKSTNIIASFKNLVPQQATVIRDGDKFQINADQLVVGDLVEMKGGDRVPADIRILAAQGCKVDNSSLTGESEPQTRSPECTHESPLETRNIAFFSTMCLEGTAQGLVVNTGDRTIIGRIASLASGVENEKTPIAIEIEHFVDIIAGLAILFGATFFIVAMCIGYTFLRAMVFFMAIVVAYVPEGLLATVTVCLSLTAKRLASKNCVVKNLEAVETLGSTSVICSDKTGTLTQNRMTVSHLWFDNHIHTADTTEDQSGQTFDQSSETWRALCRVLTLCNRAAFKSGQDAVPVPKRIVIGDASETALLKFSELTLGNAMGYRDRFPKVCEIPFNSTNKFQLSIHTLEDPRDPRHLLVMKGAPERVLERCSSILIKGQELPLDEQWREAFQTAYLSLGGLGERVLGFCQLYLNEKDYPPGYAFDVEAMNFPSSGLCFAGLVSMIDPPRATVPDAVLKCRTAGIRVIMVTGDHPITAKAIAASVGIISEGSETVEDIAARLRVPVDQVNRKDARACVINGMQLKDMDPSELVEALRTHPEMVFARTSPQQKLGAIVAVTGDGVNDSPALKKADIGVAMGIAGSDAAKNAADMILLDDNFASIVTGVEQGRLIFDNLKKSIAYTLTKNIPELTPYLIYITVSVPLPLGCITILFIELCTDIFPSVSLAYEKAESDIMHLRPRNPKRDRLVNEPLAAYSYFQIGAIQSFAGFTDYFTAMAQEGWFPLLCVGLRAQWEDHHLQDLQDSYGQEWTFGQRLYQQYTCYTVFFISIEVCQIADVLIRKTRRLSAFQQGFFRNKILVIAIVFQVCIGCFLCYCPGMPNIFNFMPIRFQWWLVPLPYGILIFVYDEIRKLGVRCCPGSWWDQELYY

SEQ ID NO: 12311 - protein, 935 aa, Homo sapiens [sequence omitted]

SEQ ID NO: 12312 - protein, 336 aa, Homo sapiens
  VARIANT (1)...(336): Xaa = Any Amino Acid
MSFETMPSTETKPCSRTQACSEAKPSSRTQMSSETMPSSRTQMGSETMPSSRTQMGSETEPSSRTQMGSETEPSSKTQMGSETMPSSRTQMGSETEPSSRTQMGSETEPSSRTQMGSETMPSSRTQMGSETKPSSRTQMSSETMPSSRTQMSSETEPSIETKPCSRVQASSETKPSSRTQISSETKPSIETKPCSRIQATSEAKPSSRTQVSPETKPSSRTQISSETNPSIETKPCSRTQATSEAKPSSRTQIRSETKPCSEAQASSETKHISRIQLSPDNKPNSGTQTHFKTQTSLETNPSSRIQASSETKPCWKTQADSGTLDSSTMQPHLDTX

SEQ ID NO: 12313 - protein, 312 aa, Homo sapiens
MEGAAAREARGTETPRASAPPPAPSEPPAAPRARPRLVFRTQLAHGSPTGKIEGFTNVRELYAKIAEAFGIAPTEILFCTLNSHKVDMQKLLGGQIGLEDFIFAHVRGETKEVEVTKTEDALGLTITDNGAGYAFIKRIKEGSIINRIEAVCVGDSIEAINDHSIVGCRHYEVAKMLRELPKSQPFTLRLVQPKRAFDMIGQRSRSSKCPVEAKVTSGRETLRLRSGGAATVEEAPSEFEEEASRKVDDLLESYMGIRDPELASTMVETSKKTASAQEFARCLDSVLGEFAFPDEFVVEVWAAIGEAREACG

SEQ ID NO: 12314 - protein, 336 aa, Homo sapiens
MEGAAAREARGTETPRASAPPPAPSEPPAAPRARPRLVFRTQLAHGSPTGKIEGFTNVRELYAKIAEAFGIAPTEVRSPDTGAQDHPPDGVRGSFSPGKILFCTLNSHKVDMQKLLGGQIGLEDFIFAHVRGETKEVEVTKTEDALGLTITDNGAGYAFIKRIKEGSIINRIEAVCVGDSIEAINDHSIVGCRHYEVAKMLRELPKSQPFTLRLVQPKRAFDMIGQRSRSSKCPVEAKVTSGRETLRLRSGGAATVEEAPSEFEEEASRKVDDLLESYMGIRDPELASTMVETSKKTASAQEFARCLDSVLGEFAFPDEFVVEVWAAIGEAREACG

SEQ ID NO: 12315 - protein, 735 aa, Homo sapiens
MELEVPDEAESAEAGAVPSEAAWAAESGAAAGLAQKKAAPTEVLSMTAQPGPGHGKKLGHRGVDASGETTYKKTTSSTLKGAIQLGIGYTVGHLSSKPERDVLMQDFYVVESIFFPSEGSNLTPAHHFQDFRFKTYAPVAFRYFRELFGIRPDDYLYSLCNEPLIELSNPGASGSLFYVTSDDEFIIKTVMHKEAEFLQKLLPGYYMNLNQNPRTLLPKFYGLYCVQSGGKNIRVVVMNNILPRVVKMHLKFDLKGSTYKRRASKKEKEKSFPTYKDLDFMQDMPEGLLLDADTFSALVKTLQRDCLVLESFKIMDYSLLLGVHNIDQHERERQAQGAQSTSDEKRPVGQKALYSTAMESIQGGAARGEAIESDDTMGGIPAVNGRGERLLLHIGIIDILQSYRFIKKLEHTWKALVHDGDTVSVHRPSFYAERFFKFMSNTVFRKNSSLKSSPSKKGRGGALLAVKPLGPTAAFSASQIPSEREEAQYDLRGARSYPTLEDEGRPDLLPCTPPSFEEATTASIATTLSSTSLSIPERSPSETSEQPRYRRRTQSSGQDGRPQEEPPAEEDLQQITVQVEPACSVEIVVPKEEDAGVEASPAGASAAVEVETASQASDEEGAPASQASDEEDAPATDIYFPTDERSWVYSPLHYSAQAPPASDGESDTPPTQSRAPLLLRLPPKALPTPLRPRAREMPASPPHRTSSSPCTDADGRAPPRQASQGPGTPVGSLPL

SEQ ID NO: 12316 - protein, 283 aa, Homo sapiens
MAAAPQAPGRGSLRKTRPLVVKTSLNNPYIIRWSALESEDMHFILQTLEDRLKAIGLQKIEDKKKKNKTPFLKKESREKCSIAVDISENLKEKKTDAKQQVSGWTPAHVRKQLAIGVNEVTRALERRELLLVLVCKSVKPAMITSHLIQLSLSRSVPACQVPRLSERIAPVIGLKCVLALAFKKNTTDFVDEVRAIIPRVPSLSVPWLQDRIEDSGENLETEPLESQDRELLDTSFEDLSKPKRKLADGRQASVTLQPLKIKKLIPNPNKIRKPPKSKKATPK

SEQ ID NO: 12317 - protein, 283 aa, Homo sapiens; identical to SEQ ID NO: 12316

SEQ ID NO: 12318 - protein, 283 aa, Homo sapiens; identical to SEQ ID NO: 12316

SEQ ID NO: 12319 - protein, 288 aa, Homo sapiens
MDLMVEASPRRIFANAHTYHINSISVNSDHETYLSADDLRINLWHLEITDRSFNIVDIKPANMEELTEVITAAEFHPHQCNVFVYSSSKGTIRLCDMRSSALCDRHSKFFEEPEDPSSRSFFSEIISSISDVKFSHSGRYMMTRDYLSVKVWDLNMESRPVETHQVHEYLRSKLCSLYENDCIFDKFECCWNGSDSAIMTGSYNNFFRMFDRDTRRDVTLEASRESSKPRASLKPRKVCTGGKRRKDEISVDSLDFNKKILHTAWHPVDNVIAVAATNNLYIFQDKIN

SEQ ID NO: 12320 - protein, 226 aa, Homo sapiens
MEELTEVITAAEFHPHQCNVFVYSSSKGTIRLCDMRSSALCDRHSKFFEEPEDPSSRSFFSEIISSISDVKFSHSGRYMMTRDYLSVKVWDLNMESRPVETHQVHEYLRSKLCSLYENDCIFDKFECCWNGSDSAIMTGSYNNFFRMFDRDTRRDVTLEASRESSKPRASLKPRKVCTGGKRRKDEISVDSLDFNKKILHTAWHPVDNVIAVAATNNLYIFQDKIN

SEQ ID NO: 12321 - protein, 288 aa, Homo sapiens; identical to SEQ ID NO: 12319

SEQ ID NO: 12322 - protein, 288 aa, Homo sapiens; identical to SEQ ID NO: 12319

SEQ ID NO: 12323 - protein, 303 aa, Homo sapiens
MLFIKFIHLEVFSMPERAIARHEVREIEQRHTMDGPRQDATLDEEEDMVIIYNRVPKTASTSFTNIAYDLCAKNKYHVLHINTTKNNPVMSLQDQVRFVKNITSWKEMKPGFYHGHVSYLDFAKFGVKKKPIYINVIRDPIERLVSYYYFLRFGDDYRPGLRRRKQGDKKTFDECVAEGGSDCAPEKLWLQIPFFCGHSSECWNVGSRWAMDQAKYNLINEYFLVGVTEELEDFIMLLEAALPRFFRGATELYRTAPDTATPSHRHGPICGSKSISSLLVKVSPVCKDSHCLGKCSRNGLSAV

SEQ ID NO: 12324 - protein, 356 aa, Homo sapiens
MGLLRIMMPPKLQLLAVVAFAVAMLFLENQIQKLEESRSKLERAIARHEVREIEQRHTMDGPRQDATLDEEEDMVIIYNRVPKTASTSFTNIAYDLCAKNKYHVLHINTTKNNPVMSLQDQVRFVKNITSWKEMKPGFYHGHVSYLDFAKFGVKKKPIYINVIRDPIERLVSYYYFLRFGDDYRPGLRRRKQGDKKTFDECVAEGGSDCAPEKLWLQIPFFCGHSSECWNVGSRWAMDQAKYNLINEYFLVGVTEELEDFIMLLEAALPRFFRGATELYRTGKKSHLRKTTEKKLPTKQTIAKLQQSDIWKMENEFYEFALEQFQFIRAHAVREKDGDLYILAQNFFYEKIYPKSN

SEQ ID NO: 12325 - protein, 298 aa, Homo sapiens [sequence omitted]

SEQ ID NO: 12326 - protein, 150 aa, Homo sapiens
MGLLRIMMPPKLQLLAVVAFAVAMLFLENQIQKLEESRSKLGEELNCPGLSAVEGAEEALPPEQVGVHLTWGLARGLKAVSKRTGNKGQREHELQEWVELSLSGVLGSRGHGAEVASKGPCNCQLREAGRVVRERECKASSEYGNEGPEI

SEQ ID NO: 12327 - protein, 356 aa, Homo sapiens; identical to SEQ ID NO: 12324

SEQ ID NO: 12328 - protein, 389 aa, Homo sapiens [sequence omitted]

SEQ ID NO: 12329 - protein, 440 aa, Homo sapiens [sequence omitted]

SEQ ID NO: 12330 - protein, 190 aa, Homo sapiens
MENQVLTPHVYWAQRHRELYLRVELSDVQNPAISITENVLHFKAQGHGAKGDNVYEFHLEFLDLVKPEPVYKLTQRQVNITVQKKVSQWWERLTKQEKRPLFLAPDFDRWLDESDAEMELRAKEEERLNKLRLESEGSPETLTNLRKGYLFMYNLVQFLGFSWIFVNLTVRFCILGKGNPFMTHSILWLT

SEQ ID NO: 12331 - protein, 189 aa, Homo sapiens
MENQVLTPHVYWAQRHRELYLRVELSDVQNPAISITENVLHFKAQGHGAKGDNVYEFHLEFLDLVKPEPVYKLTQRQVNITVQKKVSQWWERLTKQEKRPLFLAPDFDRWLDESDAEMELRAKEEERLNKLRLESEGSPETLTNLRKGYLFMYNLVQFLGFSWIFVNLTVRFCILGKSPFMTHSILWLT

SEQ ID NO: 12332 - protein, 32 aa, Homo sapiens
MFNTSFNFSSYLEEEKVLNYYSLNKFIDHCLR

SEQ ID NO: 12333 - protein, 91 aa, Homo sapiens
CVDRIVGAVREGVLKKTTGLVGLAVCNTPHERLRILYTKILDVLEEIPKNAAYRKYTEQITNEKLAMVKAEPDVKKLEDQLQGSQLEEVIL

SEQ ID NO: 12334 - protein, 796 aa, Homo sapiens [sequence omitted]

SEQ ID NO: 12335 - protein, 1112 aa, Homo sapiens
MRRDERDAKAMRSLQPPDGAGSPPESLRNGYVKSCVSPLRQDPPRGFFFHLCRFCNVELRPPPASPQQPRRCSPFCRARLSLGALAAFVLALLLGAEPESWAAGAAWLRTLLSVCSHSLSPLFSIACAFFFLTCFLTRTKRGPGPGRSCGSWWLLALPACCYLGDFLVWQWWSWPWGDGDAGSAAPHTPPEAAAGRLLLVLSCVGLLLTLAHPLRLRHCVLVLLLASFVWWVSFTSLGSLPSALRPLLSGLVGGAGCLLALGLDHFFQIREAPLHPRLSSAAEEKVPVIRPRRRSSCVSLGETAASYYGSCKIFRRPSLPCISREQMILWDWDLKQWYKPHYQNSGGGNGVDLSVLNEARNMVSDLLTDPSLPPQVISSLRSISSLMGAFSGSCRPKINPLTPFPGFYPCSEIEDPAEKGDRKLNKGLNRNSLPTPQLRRSSGTSGLLPVEQSSRWDRNNGKRPHQEFGISSQGCYLNGPFNSNLLTIPKQRSSSVSLTHHVGLRRAGVLSSLSPVNSSNHGPVSTGSLTNRSPIEFPDTADFLNKPSVILQRSLGNAPNTPDFYQQLRNSDSNLCNSCGHQMLKYVSTSESDGTDCCSGKSGEEENIFSKESFKLMETQQEEETEKKDSRKLFQEGDKWLTEEAQSEQQTNIEQEVSLDLILVEEYDSLIEKMSNWNFPIFELVEKMGEKSGRILSQVMYTLFQDTGLLEIFKIPTQQFMNYFRALENGYRDIPYHNRIHATDVLHAVWYLTTRPVPGLQQIHNGCGTGNETDSDGRINHGRIAYISSKSCSNPDESYGCLSSNIPALELMALYVAAAMHDYDHPGRTNAFLVATNAPQAVLYNDRSVLENHHAASAWNLYLSRPEYNFLLHLDHVEFKRFRFLVIEAILATDLKKHFDFLAEFNAKANDVNSNGIEWSNENDRLLVCQVCIKLADINGPAKVRDLHLKWTEGIVNEFYEQGDEEANLGLPISPFMDRSSPQLAKLQESFITHIVGPLCNSYDAAGLLPGQWLEAEEDNDTESGDDEDGEELDTEDEEMENNLNPKPPRRKSRRRIFCQLMHHLTENHKIWKEIVEEEEKCKADGNKLQVENSSLPQADEIQVIEEADEEE

SEQ ID NO: 12336 - protein, 479 aa, Homo sapiens
MLSRLRVVSTTCTLACRHLHIKEKGKPLMLNPRTNKGMAFTLQERQMLGLQGLLPPKIETQDIQALRFHRNLKKMTSPLEKYIYIMGIQERNEKLFYRILQDDIESLMPIVYTPTVGLACSQYGHIFRRPKGLFISISDRGHVRSIVDNWPENHVKAVVVTDGERILGLGDLGVYGMGIPVGKLCLYTACAGIRPDRCLPVCIDVGTDNIALLKDPFYMGLYQKRDRTQQYDDLIDEFMKAITDRYGRNTLIQFEDFGNHNAFRFLRKYREKYCTFNDDIQGTAAVALAGLLAAQKVISKPISEHKILFLGAGEAALGIANLIVMSMVENGLSEQEAQKKIWMFDKYGLLVKGRKAKIDSYQEPFTHSAPESIPDTFEDAVNILKPSTIIGVAGAGRLFTPDVIRAMASINERPVIFALSNPTAQAECTAEEAYTLTEGRCLFASGSPFGPVKLTDGRVFTPGQGNNVYIFPGYRIPIC

SEQ ID NO: 12337 - protein, 584 aa, Homo sapiens
MLSRLRVVSTTCTLACRHLHIKEKGKPLMLNPRTNKGMAFTLQERQMLGLQGLLPPKIETQDIQALRFHRNLKKMTSPLEKYIYIMGIQERNEKLFYRILQDDIESLMPIVYTPTVGLACSQYGHIFRRPKGLFISISDRGHVRSIVDNWPENHVKAVVVTDGERILGLGDLGVYGMGIPVGKLCLYTACAGIRPDRCLPVCIDVGTDNIALLKDPFYMGLYQKRDRTQQYDDLIDEFMKAITDRYGRNTLIQFEDFGNHNAFRFLRKYREKYCTFNDDIQGTAAVALAGLLAAQKVISKPISEHKILFLGAGEAALGIANLIVMSMVENGLSEQEAQKKIWMFDKYGLLVKGRKAKIDSYQEPFTHSAPESIPDTFEDAVNILKPSTIIGVAGAGRLFTPDVIRAMASINERPVIFALSNPTAQAECTAEEAYTLTEGRCLFASGSPFGPVKLTDGRVFTPGQGNNVYIFPGVALAVILCNTRHISDSVFLEAAKALTSQLTDEELAQGRLYPPLANIQEVSINIAIKVTEYLYANKMAFRYPEPEDKAKYVKERTWRSEYDSLLPDVYEWPESASSPPVITE

SEQ ID NO: 12338 - protein, 304 aa, Homo sapiens
MGIPVGKLCLYTACAGIRPDRCLPVCIDVGTDNIALLKDPFYMGLYQKRDRTQQYDDLIDEFMKAITDRYGRNTLIQFEDFGNHNAFRFLRKYREKYCTFNDDIQGTAAVALAGLLAAQKVISKPISEHKILFLGAGEAALGIANLIVMSMVENGLSEQEAQKKIWMFDKYGLLVKGRKAKIDSYQEPFTHSAPESIPDTFEDAVNILKPSTIIGVAGAGRLFTPDVIRAMASINERPVIFALSNPTAQAECTAEEAYTLTEGRCLFASGSPFGPVKLTDGRVFTPGQGNNVYIFPGPDKPIDR

SEQ ID NO: 12339 - protein, 2225 aa, Homo sapiens
MAALVLEDGSVLRGQPFGAAVSTAGEVVFQTGMVGYPEALTDPSYKAQILVLTYPLIGNYGIPPDEMDEFGLCKWFESSGIHVAALVVGECCPTPSHWSATRTLHEWLQQHGIPGLQGVDTRELTKKLREQGSLLGKLVQNGTEPSSLPFLDPNARPLVPEVSIKTPRVFNTGGAPRILALDCGLKYNQIRCLCQRGAEVTVVPWDHALDSQEYEGLFLSNGPGDPASYPSVVSTLSRVLSEPNPRPVFGICLGHQLLALAIGAKTYKMRYGNRGHNQPCLLVGSGRCFLTSQNHGFAVETDSLPADWAPLFTNANDGSNEGIVHNSLPFFSVQFHPEHQAGPSDMELLFDIFLETVKEATAGNPGGQTVRERLTERLCPPGIPTPGSGLPPPRKVLILGSGGLSIGQAGEFDYSGSQAIKALKEENIQTLLINPNIATVQTSQGLADKVYFLPITPHYVTQVIRNERPDGVLLTFGGQTALNCGVELTKAGVLARYGVRVLGTPVETIELTEDRRAFAARMAEIGEHVAPSEAANSLEQAQAAAERLGYPVLVRAAFALGGLGSGFASNREELSALVAPAFAHTSQVLVDKSLKGWKEIEYEVVRDAYGNCVTVCNMENLDPLGIHTGESIVVAPSQTLNDREYQLLRQTAIKVTQHLGIVGECNVQYALNPESEQYYIIEVNARLSRSSALASKATGYPLAYVAAKLALGIPLPELRNSVTGGTAAFEPSVDYCVVKIPRWDLSKFLRVSTKIGSCMKSVGEVMGIGRSFEEAFQKALRMVDENCVGFDHTVKPVSDMELETPTDKRIFVVAAALWAGYSVDRLYELTRIDRWFLHRMKRIIAHAQLLEQHRGQPLPPDLLQQAKCLGFSDKQIALAVLSTELAVRKLRQELGICPAVKQIDTVAAEWPAQTNYLYLTYWGTTHDLTFRTPHVLVLGSGVYRIGSSVEFDWCAVGCIQQLRKMGYKTIMVNYNPETVSTDYDMCDRLYFDEISFEVVMDIYELENPEGVILSMGGQLPNNMAMALHRQQCRVLGTSPEAIDSAENRFKFSRLLDTIGISQPQWRELSDLESARQFCQTVGYPCVVRPSYVLSGAAMNVAYTDGDLERFLSSAAAVSKEHPVVISKFIQEAKEIDVDAVASDGVVAAIAISEHVENAGVHSGDATLVTPPQDITAKTLERIKAIVHAVGQELQVTGPFNLQLIAKDDQLKVIECNVRVSRSFPFVSKTLGVDLVALATRVIMGEEVEPVGLMTGSGVVGVKVPQFSFSRLAGADVVLGVEMTSTGEVAGFGESRCEAYLKAMLSTGFKIPKKNILLTIGSYKNKSELLPTVRLLESLGYSLYASLGTADFYTEHGVKVTAVDWHFEEAVDGECPPQRSILEQLAEKNFELVINLSMRGAGGRRLSSFVTKGYRTRRLAADFSVPLIIDIKCTKLFVEALGQIGPAPPLKVHVDCMTSQKLVRLPGLIDVHVHLREPGGTHKEDFASGTAAALAGGITMVCAMPNTRPPIIDAPALALAQKLAEAGARCDFALFLGASSENAGTLGTVAGSAAGLKLYLNETFSELRLDSVVQWMEHFETWPSHLPIVAHAEQQTVAAVLMVAQLTQRSVHICHVARKEEILLIKAAKARGLPVTCEVAPHHLFLSHDDLERLGPGKGEVRPELGSRQDVEALWENMAVIDCFASDHAPHTLEEKCGSRPPPGFPGLETMLPLLLTAVSEGRLSLDDLLQRLHHNPRRIFHLPPQEDTYVEVDLEHEWTIPSHMPFSKAHWTPFEGQKVKGTVRRVVLRGEVAYIDGQVLVPPGYGQDVRKWPQGAVPQLPPSAPATSEMTTTPERPRRGIPGLPDGRFHLPPRIHRASDPGLPAEEPKEKSSRKVAEPELMGTPDGTCYPPPPVPRQASPQNLGTPGLLHPQTSPLLHSLVGQHILSVQQFTKDQMSHLFNVAHTLRMMVQKERSLDILKGKVMASMFYEVSTRTSSSFAAAMARLGGAVLSFSEATSSVQKGESLADSVQTMSCYADVVVLRHPQPGAVELAAKHCRRPVINAGDGVGEHPTQALLDIFTIREELGTVNGMTITMVGDLKHGRTVHSLACLLTQYRVSLRYVAPPSLRMPPTVRAFVASRGTKQEEFESIEEALPDTDVLYMTRIQKERFGSTQEYEACFGQFILTPHIMTRAKKKMVVMHPMPRVNEISVEVDSDPRAAYFRQAENGMYIRMALLATVLGRF

SEQ ID NO: 12340 - protein, 2225 aa, Homo sapiens; identical to SEQ ID NO: 12339

SEQ ID NO: 12341 - protein, 2225 aa, Homo sapiens; identical to SEQ ID NO: 12339

SEQ ID NO: 12342 - protein, 686 aa, Homo sapiens
MKPSWLQCRKVTSAGGLGGPLPGSSPARGAGAALRALVVPGPRGGLGGRGCRALSSGSGSEYKTHFAASVTDPERFWGKAAEQISWYKPWTKTLENKHSPSTRWFVEGMLNICYNAVDRHIENGKGDKIAIIYDSPVTNTKATFTYKEVLEQVSKLAGVLVKHGIKKGDTVVIYMPMIPQAMYTMLACARIGAIHSLIFGGFASKELSSRIDHVKPKVVVTASFGIEPGRRVEYVPLVEEALKIGQHKPDKILIYNRPNMEAVPLAPGRDLDWDEEMAKAQSHDCVPVLSEHPLYILYTSGTTGLPKGVIRPTGGYAVMLHWSMSSIYGLQPGEVWWAASDLGWVVGHSYICYGPLLHGNTTVLYEGKPVGTPDAGAYFRVLAEHGVAALFTAPTAIRAIRQQDPGAALGKQYSLTRFKTLFVAGERCDVETLEWSKNVFRVPVLDHWWQTETGSPITASCVGLGNSKTPPPGQAGKSVPGYNVMILDDNMQKLKARCLGNIVVKLPLPPGAFSGLWKNQEAFKHLYFEKFPGYYDTMDAGYMDEEGYLYVMSRVDDVINVAGHRISAGAIEESILSHGTVADCAVVGKEDPLKGHVPLALCVLRKDINATEEQVLEEIVKHVRQNIGPVAAFRNAVFVKQLPKTRSGKIPRSALSAIVNGKPYKITSTIEDPSIFGHVEEMLKQA

SEQ ID NO: 12343 - protein, 394 aa, Homo sapiens
MLMRKVPGFVPASPWGLRLPQKFLFLLFLSGLVTLCFGALFLLPHSSRLKRLFLAPRTQQPGLEVVAEIAGHAPAREQEPPPNPAPAAPAPGEDDPSSWASPRRRKGGLRRTRPTGPREEATAARGNSIPASRPGDEGVPFRFDFNAFRSRLRHPVLGTRADESQEPQSQVRAQREKIKEMMQFAWQSYKRYAMGKNELRPLTKDGYEGNMFGGLSGATVIDSLDTLYLMELKEEFQEAKAWVGESFHLNVSGEASLFEVNIRYIGGLLSAFYLTGEEVFRIKAIRLGEKLLPAFNTPTGIPKGVVSFKSGNWGWATAGSSSILAEFGSLHLEFLHLTELSGNQVFAEKASQEHPQGPQEDRKALWPLPQLPQPSEWELGATPCLSWRTRGQFL

SEQ ID NO: 12344 - protein, 373 aa, Homo sapiens [sequence omitted]

SEQ ID NO: 12345 - protein, 553 aa, Homo sapiens
MLSVRVAAAVVRALPRRAGLVSRNALGSSFIAARNFHASNTHLQKTGTAEMSSILEERILGADTSVDLEETGRVLSIGDGIARVHGLRNVQAEEMVEFSSGLKGMSLNLEPDNVGVVVFGNDKLIKEGDIVKRTGAIVDVPVGEELLGRVVDALGNAIDGKGPIGSKTRRRVGLKAPGIIPRISVREPMQTGIKAVDSLVPIGRGQRELIIGDRQTGKTSIAIDTIINQKRFNDGSDEKKKLYCIYVAIGQKRSTVAQLVKRLTDADAMKYTIVVSATASDAAPLQYLAPYSGCSMGEYFRDNGKHALIIYDDLSKQAVAYRQMSLLLRRPPGREAYPGDVFYLHSRLLERAAKMNDAFGGGSLTALPVIETQAGDVSAYIPTNVISITDGQIFLETELFYKGIRPAINVGLSVSRVGSAAQTRAMKQVAGTMKLELAQYREVAAFAQFGSDLDAATQQLLSRGVRLTELLKQGQYSPMAIEEQVAVIYAGVRGYLDKLEPSKITKFENAFLSHVVSQHQALLGTIRADGKISEQSDAKLKEIVTNFLAGFEA

SEQ ID NO: 12346 - protein, 221 aa, Homo sapiens [sequence omitted]

SEQ ID NO: 12347 - protein, 553 aa, Homo sapiens; identical to SEQ ID NO: 12345

SEQ ID NO: 12348 - protein, 432 aa, Homo sapiens [sequence omitted]

SEQ ID NO: 12349 - protein, 449 aa, Homo sapiens [sequence omitted]

SEQ ID NO: 12350 - protein, 449 aa, Homo sapiens [sequence omitted]

SEQ ID NO: 12351 - protein, 1445 aa, Homo sapiens
MRRLLEPCWWILFLKITSSVLHYVVCFPALTEGYVGALHENRHGSAVQIRRRKASGDPYWAYSGAYGPEHWVTSSVSCGGRHQSPIDILDQYARVGEEYQELQLDGFDNESSNKTWMKNTGKTVAILLKDDYFVSGAGLPGRFKAEKVEFHWGHSNGSAGSEHSINGRRFPVEMQIFFYNPDDFDSFQTAISENRIIGAMAIFFQVSPRDNSALDPIIHGLKGVVHHEKETFLDPFVLRDLLPASLGSYYRYTGSLTTPPCSEIVEWIVFRRPVPISYHQLEAFYSIFTTEQQDHVKSVEYLRNNFRPQQRLHDRVVSKSAVRDSWNHDMTDFLENPLGTEASKVCSSPPIHMKVQPLNQTALQVSWSQPETIYHPPIMNYMISYSWTKNEDEKEKTFTKDSDKDLKATISHVSPDSLYLFRVQAVCRNDMRSDFSQTMLFQANTTRIFQGTRIVKTGVPTASPASSADMAPISSGSSTWTSSGIPFSFVSMATGMGPSSSGSQATVASVVTSTLLAGLGFGGGGISSFPSTVWPTRLPTAASASKQAARPVLATTEALASPGPDGDSSPTKDGEGTEEGEKDEKSESEDGEREHEEDGEKDSEKKEKSGVTHAAEERNQTEPSPTPSSPNRTAEGGHQTIPGHEQDHTAVPTDQTGGRRDAGPGLDPDMVTSTQVPPTATEEQYAGSDPKRPEMPSKKPMSRGDRFSEDSRFITVNPAEKNTSGMISRPAPGRMEWIIPLIVVSALTFVCLILLIAVLVYWRGCNKIKSKGFPRRFREVPSSGERGEKGSRKCFQTAHFYVEDSSSPRVVPNESIPIIPIPDDMEAIPVKQFVKHIGELYSNNQHGFSEDFEEVQRCTADMNITAEHSNHPENKHKNRYINILAYDHSRVKLRPLPGKDSKHSDYINANYVDGYNKAKAYIATQGPLKSTFEDFWRMIWEQNTGIIVMITNLVEKGRRKCDQYWPTENSEEYGNIIVTLKSTKIHACYTVRRFSIRNTKVKKGQKGNPKGRQNERVVIQYHYTQWPDMGVPEYALPVLTFVRRSSAARMPETGPVLVHCSAGVGRTGTYIVIDSMLQQIKDKSTVNVLGFLKHIRTQRNYLVQTEEQYIFIHDALLEAILGKETEVSSNQLHSYVNSILIPGVGGKTRLEKQFKLVTQCNAKYVECFSAQKECNKEKNRNSSVVPSERARVGLAPLPGMKGTDYINASYIMGYYRSNEFIITQHPLPHTTKDFWRMIWDHNAQIIVMLPDNQSLAEDEFVYWPSREESMNCEAFTVTLISKDRLCLSNEEQIIIHDFILEATQDDYVLEVRHFQCPKWPNPDAPISSTFELINVIKEEALTRDGPTIVHDEYGAVSAGMLCALTTLSQQLENENAVDVFQVAKMINLMRPGVFTDIEQYQFIYKAMLSLVSTKENGNGPMTVDKNGAVLIADESDPAESMESLV

SEQ ID NO: 12352 - protein, 753 aa, Homo sapiens
MGSGTSTQHHFAFQNAERAFKAAALIQRWYRRYVARLEMRRRCTWSIFQSIEYAGQQDQVKLHDFFSYLMDHFIPSSHNDRDFLTRIFTEDRFAQDSEMKKCSDYESIEVPDSYTGPRLSFPLLPDHATALVEAFRLKQQLHARYVLNLLYETKKHLVQLPNINRVSTCYSEEITVCGDLHGQLDDLIFIFYKNGLPSPERSYVFNGDFVDRGKDSVEILMILFAFMLVYPKEFHLNRGNHEDHMVNLRYGFTKEVMNKYKVHGKEILRTLQDVFCWLPLATLIDEKVLILHGGVSDITDLELLDKIERSKIVSTMRCKTRQKSEKQMEEKRRANQKSSAQGPIPWFLPESRSLPSSPLRLGSYKAQKTSRSSSIPCSGSLDGRELSRQVRSSVELELERCRQQAGLLVTGEKEEPSRSASEADSEAGELRKPTQEEWRQVVDILWSDPMAQEGCKANTIRGGGCYFGPDVTQQLLQKYNLQFLIRSHECKPEGYEFCHNRKVLTIFSASNYYEVGSNRGAYVKLGPALTPHIVQYQANKVTHTLTMRQRISRVEESALRALREKLFAHSSDLLSEFKKHDADKVGLITLSDWAAAVESVLHLGLPWRMLRPQLVNSSADNMLEYKSWLKNLAKEQLSRENIQSSLLETLYRNRSNLETIFRIIDSDHSGFISLDEFRQTWKLFSSHMNIDITDDCICDLARSIDFNKDGHIDINEFLEAFRLVEKSCPEGDASECPQATNAKDSGCSSPGAH

SEQ ID NO: 12353 - protein, 115 aa, Homo sapiens [sequence omitted]

SEQ ID NO: 12354 - protein, 156 aa, Homo sapiens
MASRVLSAYVSRLPAAFAPLPRVRMLAVARPLSTALCSAGTQTRLGTLQPALVLAQVPGRVTQLCRQYSDMPPLTLEGIQDRVLYVLKLYDKIDPEKLSVNSHFMKDLGLDSLDQVEIIMAMEDEFGFEIPDIDAEKLMCPQEIVDYIADKKDVYE

SEQ ID NO: 12355 - protein, 385 aa, Homo sapiens
MTEVGLLSINLSINSTHAALLPIRYDNRCRNMSQEQVAQKLAKDPKPAIRFRLEQVVPAFQDLVYGWNRHEVASVEGDPVIMKSDGFPTYHLACVVDDHHMGISHVLRGSEWLVSTAKHLLLYQALGWQPPHFAHLPLLLNRDGSKLSKRQGDVFLEHFAADGFLPDSLLDIITNCGSGFAENQMGRTLPELITQFNLTQVTCHSALLDLEKLPEFNRLHLQRLVSNESQRRQLVGKLQVLVEEAFGCQLQNRDVLNPVYVERILLLRQGHICRLQDLVSPVYSYLWTRPAVGRAQLDAISEKVDVIAKRVLGLLERSSMSLTQDMLNGELKKLSEGLEGTKYSNVMKLLRMALSGQQQGPPVAEMMLALGPKEVRERIQKVVSS

SEQ ID NO: 12356 - protein, 523 aa, Homo sapiens
MAALLRRLLQRERPSAASGRPVGRREANLGTDAGVAVRVRFAPSPTGFLHLGGLRTALYNYIFAKKYQGSFILRLEDTDQTRVVPGAAENIEDMLEWAGIPPDESPRRGGPAGPYQQSQRLELYAQATEALLKTGAAYPCFCSPQRLELLKKEALRNHQTPRYDNRCRNMSQEQVAQKLAKDPKPAIRFRLEQVVPAFQDLVYGWNRHEVASVEGDPVIMKSDGFPTYHLACVVDDHHMGISHVLRGSEWLVSTAKHLLLYQALGWQPPHFAHLPLLLNRDGSKLSKRQGDVFLEHFAADGFLPDSLLDIITNCGSGFAENQMGRTLPELITQFNLTQVTCHSALLDLEKLPEFNRLHLQRLVSNESQRRQLVGKLQVLVEEAFGCQLQNRDVLNPVYVERILLLRQGHICRLQDLVSPVYSYLWTRPAVGRAQLDAISEKVDVIAKRVLGLLERSSMSLTQDMLNGELKKLSEGLEGTKYSNVMKLLRMALSGQQQGPPVAEMMLALGPKEVRERIQKVVSS

SEQ ID NO: 12357 - protein, 313 aa, Homo sapiens
MTEVGLLSINLSINSTHAALLPIRYDNRCRNMSQEQVAQKLAKDPKPAIRFRLEQVVPAFQDLVYGWNRHEVASVEGDPVIMKSDGFPTYHLACVVDDHHMGISHVLRGSEWLVSTAKHLLLYQALGWQPPHFAHLPLLLNRDGSKLSKRQGDVFLEHFAADGFLPDSLLDIITNCGSGFAENQMGRTLPELITQFNLTQVTCHSALLDLEKLPEFNRLHLQRLVSNESQRRQLVGKLQVLVEEAFGCQLQNRDVLNPVYVERILLLRQGHICRLQDLVSPVYSYLWTRPAVGRAQLDAISEKVDVIAKRVLG

SEQ ID NO: 12358 - protein, 262 aa, Homo sapiens
MTQPVPRLSVPAALALGSAALGAAFATGLFLGRRCPPWRGRREQCLLPPEDSRLWQYLLSRSMREHPALRSLRLLTLEQPQGDSMMTCEQAQLLANLARLIQAKKALDLGTFTGYSALALALALPADGRVVTCEVDAQPPELGRPLWRQAEAEHKIDLRLKPALETLDELLAAGEAGTFDVAVVDADKENCSAYYERCLQLLRPGGILAVLRVLWRGKVLQPPKGDVAAECVRNLNERIRRDVRVYISLLPLGDGLTLAFKI

SEQ ID NO: 12359 - protein, 226 aa, Homo sapiens
MARPARAVPASPRGQPPVAVSSEPLHAGAPGAAKPEAGQQGAGRKRASLSTPAGPTWLCDLGLGPGPPWASGFPGPGAVGVPKGQSPRPRPEPRPWGLGPPGRRWVTCMAGATLSFHAADPGAAAGGFYDDLRAGPALGQPGAAHPGQEGAGPGHLHGLLRPGPGPGAARGRARGDLRGGRAAPGAGTAPVEAGERPRLALQPQAGAQRLTRSLRRPRRSTRSTSG

SEQ ID NO: 12360 - protein, 345 aa, Homo sapiens
MEPLRVLELYSGVGGMHHALRESCIPAQVVAAIDVNTVANEVYKYNFPHTQLLAKTIEGITLEEFDRLSFDMILMSPPCQPFTRDLLIQTIENCGFQYQEFLLSPTSLGIPNSRLRYFLIAKLQSEPLPFQAPGQVLMEFPKIESVHPQKYAMDVENKIQEKNVEPNISFDGSIQCSGKDAILFKLETAEEIHRKNQQDSDLSVKMLKDFLEDDTDVNQYLLPPKSLLRYALLLDIVQPTCRRSVCFTKGYGSYIEGTGSVLQTAEDVQVENIYKSLTNLSQEEQITKLLILKLRYFTPKEIANLLGFPPEFGFPEKITVKQRYRLLGNSLNVHVVAKLIKILYE

SEQ ID NO: 12361 - protein, 367 aa, Homo sapiens
MEPLRVLELYSGVGGMHHALRESCIPAQVVAAIDVNTVANEVYKYNFPHTQLLAKTIEGITLEEFDRLSFDMILMSPPCQPFTRLQKLPKYILLENVKGFEVSSTRDLLIQTIENCGFQYQEFLLSPTSLGIPNSRLRYFLIAKLQSEPLPFQAPGQVLMEFPKIESVHPQKYAMDVENKIQEKNVEPNISFDGSIQCSGKDAILFKLETAEEIHRKNQQDSDLSVKMLKDFLEDDTDVNQYLLPPKSLLRYALLLDIVQPTCRRSVCFTKGYGSYIEGTGSVLQTAEDVQVENIYKSLTNLSQEEQITKLLILKLRYFTPKEIANLLGFPPEFGFPEKITVKQRYRLLGNSLNVHVVAKLIKILYE

SEQ ID NO: 12362 - protein, 391 aa, Homo sapiens
MEPLRVLELYSGVGGMHHALRESCIPAQVVAAIDVNTVANEVYKYNFPHTQLLAKTIEGITLEEFDRLSFDMILMSPPCQPFTRIGRQGDMTDSRTNSFLHILDILPRLQKLPKYILLENVKGFEVSSTRDLLIQTIENCGFQYQEFLLSPTSLGIPNSRLRYFLIAKLQSEPLPFQAPGQVLMEFPKIESVHPQKYAMDVENKIQEKNVEPNISFDGSIQCSGKDAILFKLETAEEIHRKNQQDSDLSVKMLKDFLEDDTDVNQYLLPPKSLLRYALLLDIVQPTCRRSVCFTKGYGSYIEGTGSVLQTAEDVQVENIYKSLTNLSQEEQITKLLILKLRYFTPKEIANLLGFPPEFGFPEKITVKQRYRLLGNSLNVHVVAKLIKILYE

SEQ ID NO: 12363 - protein, 391 aa, Homo sapiens; identical to SEQ ID NO: 12362

SEQ ID NO: 12364 - protein, 255 aa, Homo sapiens
MVLLLVILIPVLVSSAGTSAHYEMLGTCRMVCDPYGGTKAPSTAATPDRGLMQSLPTFIQGPKGEAGRPGKAGPRGPPGEPGPPGPMGPPGEKGEPGRQGLPGPPGAPGLNAAGAISAATYSTVPKIAFYAGLKRQHEGYEVLKFDDVVTNLGNHYDPTTGKFTCSIPGIYFFTYHVLMRGGDGTSMWADLCKNNQVRASAIAQDADQNYDYASNSVVLHLEPGDEVYIKLDGGKAHGGNNNKYSTFSGFIIYAD

SEQ ID NO: 12365 - protein, 349 aa, Homo sapiens
MSSLSGKVQTVLGLVEPSKLGRTLTHEHLAMTFDCCYCPPPPCQEAISKEPIVMKNLYWIQKNAYSHKENLQLNQETEAIKEELLYFKANGGGALVENTTTGISRDTQTLKRLAEETGVHIISGAGFYVDATHSSETRAMSVEQLTDVLMNEILHGADGTSIKCGIIGEIGCSWPLTESERKVLQATAHAQAQLGCPVIIHPGRSSRAPFQIIRILQEAGADISKTVMSHLDRTILDKKELLEFAQLGCYLEYDLFGTELLHYQLGPDIDMPDDNKRIRRVRLLVEEGCEDRILVAHDIHTKTRLMKYGGHGYSHILTNVVPKMLLRGITENVLDKILIENPKQWLTFK

SEQ ID NO: 12366 - protein, 349 aa, Homo sapiens; identical to SEQ ID NO: 12365

SEQ ID NO: 12367 - protein, 349 aa, Homo sapiens; identical to SEQ ID NO: 12365

SEQ ID NO: 12368 - protein, 1208 aa, Homo sapiens
MERLRDVRERLQAWERAFRRQRGRRPSQDDVEAAPEETRALYREYRTLKRTTGQAGGGLRSSESLPAAAEEAPEPRCWGPHLNRAATKSPQPTPGRSRQGSVPDYGQRLKANLKGTLQAGPALGRRPWPLGRASSKASTPKPPGTGPVPSFAEKVSDEPPQLPEPQPRPGRLQHLQASLSQRLGSLDPGWLQRCHSEVPDFLGAPKACRPDLGSEESQLLIPGESAVLGPGAGSQGPEASAFQEVSIRVGSPQPSSSGGEKRRWNEDPWESPAQVQQESSQAGPPSEGAGAVAVEEDPPGEPVQAQPPQPCSSPSNPRYHGLSPSSQARAGKAEGTAPLHIFPRLARHDRGNYVRLNMKQKHYVRGRALRSRLLRKQAWKQKWRKKGECFGGGGATVTTKESCFLNEQFDHWAAQCPRPASEEDTDAVGPEPLVPSPQPVPEVPSLDPTVLPLYSLGPSGQLAETPAEVFQALEQLGHQAFRPGQERAVMRILSGISTLLVLPTGAGKSLCYQLPALLYSRRSPCLTLVVSPLLSLMDDQVSGLPPCLKAACIHSGMTRKQRESVLQKIRAAQVHVLMLTPEALVGAGGLPPAAQLPPVAFACIDEAHCLSQWSHNFRPCYLRVCKVLRERMGVHCFLGLTATATRRTASDVAQHLAVAEEPDLHGPAPVPTNLHLSVSMDRDTDQALLTLLQGKRFQNLDSIIIYCNRREDTERIAALLRTCLHAAWVPGSGGRAPKTTAEAYHAGMCSRERRRVQRAFMQGQLRVVVATVAFGMGLDRPDVRAVLHLGLPPSFESYVQAVGRAGRDGQPAHCHLFLQPQGEDLRELRRHVHADSTDFLAVKRLVQRVFPACTCTCTRPPSEQEGAVGGERPVPKYPPQEAEQLSHQAAPGPRRVCMGHERALPIQLTVQALDMPEEAIETLLCYLELHPHHWLELLATTYTHCRLNCPGGPAQLQALAHRCPPLAVCLAQQLPEDPGQGSSSVEFDMVKLVDSMGWELASVRQALCQLQWDHEPRTGVRRGTGVLVEFSELAFHLRSPGDLTAEEKDQICDFLYGRVQARERQALARLRRTFQAFHSVAFPSCGPCLEQQDEERSTRLKDLLGRYFEEEEGQEPGGMEDAQGPEPGQARLQDWEDQVRCDIRQFLSLRPEEKFSSRAVARIFHGIGSPCYPAQVYGQDRRFWRKYLHLSFHALVGLATEELLQVAR

SEQ ID NO: 12369 - protein, 346 aa, Homo sapiens [sequence omitted]

SEQ ID NO: 12370 - protein, 496 aa, Homo sapiens [sequence omitted]

SEQ ID NO: 12371 - protein, 496 aa, Homo sapiens [sequence omitted]

SEQ ID NO: 12372 - protein, 488 aa, Homo sapiens
MGDRGSSRRRRTGSRPSSHGGGGPAAAEEEVRDAAAGPDVGAAGDAPAPAPNKDGDAGVGSGHWELRCHRLQDSLFSSDSGFSNYRGILNWCVVMLILSNARLFLENLIKYGILVDPIQVVSLFLKDPYSWPAPCLVIAANVFAVAAFQVEKRLAVGALTEQAGLLLHVANLATILCFPAAVVLLVESITPVGSLLALMAHTILFLKLFSYRDVNSWCRRARAKAASAGKKASSAAAPHTVSYPDNLTYRDLYYFLFAPTLCYELNFPRSPRIRKRFLLRRILEMLFFTQLQVGLIQQWMVPTIQNSMKPFKDMDYSRIIERLLKLAVPNHLIWLIFFYWLFHSCLNAVAELMQFGDREFYRDWWNSESVTYFWQNWNIPVHKWCIRHFYKPMLRRGSSKWMARTGVFLASAFFHEYLVSVPLRMFRLWAFTGMMAQIPLAWFVGRFFQGNYGNAAVWLSLIIGQPIAVLMYVHDYYVLNYEAPAAEA

SEQ ID NO: 12373 - protein, 387 aa, Homo sapiens
MGDRGSSRRRRTGSRPSSHGGGGPAAAEEEVRDAAAGPDVGAAGDAPAPAPNKDGDAGVGSGHWELRCHRLQDSLFSSDSGFSNYRGILNWCVVMLILSNARLFLENLIKYGILVDPIQVVSLFLKDPYSWPAPCLVIAANVFAVAAFQVEKRLAVGALTEQAGLLLHVANLATILCFPAAVVLLVESITPVGSLLALMAHTILFLKLFSYRDVNSWCRRARAKAASAGKKASSAAAPHTVSYPDNLTYRDLYYFLFAPTLCYELNFPRSPRIRKRFLLRRILEMLFFTQLQVGLIQQWMVPTIQNSMKPFKDMDYSRIIERLLKLAVPNHLIWLIFFYWLFHSCLNAVAELMQFGDREFYRDWWNSESVTYFWQNWNIPVHKWCIR

SEQ ID NO: 12374 - protein, 488 aa, Homo sapiens; identical to SEQ ID NO: 12372

SEQ ID NO: 12375 - protein, 421 aa, Homo sapiens
MGDRGSSRRRRTGSRPSSHGGGGPAAAEEEVRDAAAGPDVGAAGDAPAPAPNKDGDAGVGSGHWELRCHRLQDSLFSSDSGFSNYRGILNWCVVMLILSNARLFLENLIKYGILVDPIQVVSLFLKDPYSWPAPCLVIAANVFAVAAFQVEKRLAVGALTEQAGLLLHVANLATILCFPAAVVLLVESITPVGSLLALMAHTILFLKLFSYRDVNSWCRRARAKAASAGKKASSAAAPHTVSYPDNLTYRDLYYFLFAPTLCYELNFPRSPRIRKRFLLRRILEMLFFTQLQVGLIQQWMVPTIQNSMKPFKDMDYSRIIERLLKLATLLQAHASTGQQQVDGQDRGVPGLGLLPRVPGERPSANVPPLGVHGHDGSDPTGLVRGPLFPGQLWQRSCVAVAHHRTANSRPHVRPRLLRAQL

SEQ ID NO: 12376 - protein, 464 aa, Homo sapiens
MASFVRQLNMYGFRKVVHIEQGGLVKPERDDTEFQHPCFLRGQEQLLENIKRKVTSVSTLKSEDIKIRQDSVTKLLTDVQLMKGKQECMDSKLLAMKHENEALWREVASLRQKHAQQQKVVNKLIQFLISLVQSNRILGVKRKIPLMLNDSGSAHSMPKYSRQFSLEHVHGSGPYSAPSPAYSSSSLYAPDAVASSGPIISDITELAPASPMASPGGSIDERPLSSSPLVRVKEEPPSPPQSPRVEEASPGRPSSVDTLLSPTALIDSILRESEPAPASVTALTDARGHTDTEGRPPSPPPTSTPEKCLSVACLDKNELSDHLDAMDSNLDNLQTMLSSHGFSVDTSALLDLFSPSVTVPDMSLPDLDSSLASIQELLSPQEPPRPPEAENSSPDSGKQLVHYTAQPLFLLDPGSVDTGSNDLPVLFELGEGSYFSEGDGFAEDPTISLLTGSEPPKAKDPTVS

SEQ ID NO: 12377 - protein, 315 aa, Homo sapiens
MPLKLRGKKKAKSKETAGLVEGEPTGAGGGSLSASRAPARRLVFHAQLAHGSATGRVEGFSSIQELYAQIAGAFEISPSEILYCTLNTPKIDMERLLGGQLGLEDFIFAHVKGIEKEVNVYKSEDSLGLTITDNGVGYAFIKRIKDGGVIDSVKTICVGDHIESINGENIVGWRHYDVAKKLKELKKEELFTMKLIEPKKAFEIELRSKAGKSSGEKIGCGRATLRLRSKGPATVEEMPSETKAKAIEKIDDVLELYMGIRDIDLATTMFEAGKDKVNPDEFAVALDETLGDFAFPDEFVFDVWGVIGDAKRRGL

SEQ ID NO: 12378 - protein, 631 aa, Homo sapiens
MPRYGASLRQSCPRSGREQGQDGTAGAPGLLWMGLVLALALALALALALSDSRVLWAPAEAHPLSPQGHPARLHRIVPRLRDVFGWGNLTCPICKGLFTAINLGLKKEPNVARVGSVAIKLCNLLKIAPPAVCQSIVHLFEDDMVEVWRRSVLSPSEACGLLLGSTCGHWDIFSSWNISLPTVPKPPPKPPSPPAPGAPVSRILFLTDLHWDHDYLEGTDPDCADPLCCRRGSGLPPASRPGAGYWGEYSKCDLPLRTLESLLSGLGPAGPFDMVYWTGDIPAHDVWHQTRQDQLRALTTVTALVRKFLGPVPVYPAVGNHESTPVNSFPPPFIEGNHSSRWLYEAMAKAWEPWLPAEALRTLRIGGFYALSPYPGLRLISLNMNFCSRENFWLLINSTDPAGQLQWLVGELQAAEDRGDKVHIIGHIPPGHCLKSWSWNYYRIVARYENTLAAQFFGHTHVDEFEVFYDEETLSRPLAVAFLAPSATTYIGLNPGYRVYQIDGNYSGSSHVVLDHETYILNLTQANIPGAIPHWQLLYRARETYGLPNTLPTAWHNLVYRMRGDMQLFQTFWFLYHKGHPPSEPCGTPCRLATLCAQLSARADSPALCRHLMPDGSLPEAQSLWPRPLFC

SEQ ID NO: 12379 - protein, 587 aa, Homo sapiens
MPRYGASLRQSCPRSGREQGQDGTAGAPGLLWMGLVLALALALALALALSDSRVLWAPAEAHPLSPQGHPARLHRIVPRLRDVFGWGNLTCPICKGLFTAINLGLKKEPNVARVGSVAIKLCNLLKIAPPAVCQSIVHLFEDDMVEVWRRSVLSPSEACGLLLGSTCGHWDIFSSWNISLPTVPKPPPKPPSPPAPGAPVSRILFLTDLHWDHDYLEGTDPDCADPLCCRRGSGLPPASRPGAGYWGEYSKCDLPLRTLESLLSGLGPAGPFDMVYWTGDIPAHDVWHQTRQDQLRALTTVTALVRKFLGPVPVYPAVGNHESTPVNSFPPPFIEGNHSSRWLYEAMAKAWEPWLPAEALRTLRYLSSVETQEGKRKVHIIGHIPPGHCLKSWSWNYYRIVARYENTLAAQFFGHTHVDEFEVFYDEETLSRPLAVAFLAPSATTYIGLNPGYRVYQIDGNYSGSSHVVLDHETYILNLTQANIPGAIPHWQLLYRARETYGLPNTLPTAWHNLVYRMRGDMQLFQTFWFLYHKGHPPSEPCGTPCRLATLCAQLSARADSPALCRHLMPDGSLPEAQSLWPRPLFC

SEQ ID NO: 12380 - protein, 324 aa, Homo sapiens
MKAHLSIASLPPSLRATTPPAGSMKRWPRLGSPGCLPKPCAPSGTYRPWKPRKGKERIGGFYALSPYPGLRLISLNMNFCSRENFWLLINSTDPAGQLQWLVGELQAAEDRGDKVHIIGHIPPGHCLKSWSWNYYRIVARYENTLAAQFFGHTHVDEFEVFYDEETLSRPLAVAFLAPSATTYIGLNPGYRVYQIDGNYSGSSHVVLDHETYILNLTQANIPGAIPHWQLLYRARETYGLPNTLPTAWHNLVYRMRGDMQLFQTFWFLYHKGHPPSEPCGTPCRLATLCAQLSARADSPALCRHLMPDGSLPEAQSLWPRPLFC

SEQ ID NO: 12381 - protein, 794 aa, Homo sapiens
MPLADKEAGAVAAVILVHCGQLSDNEEWSLQAVEKHTLVALRRVQVLQQRGPREAPRAVQNPPEGTAEDQKGGAAYTDRDRKILQLCGELYDLDASSLQLKVLQYLQQETRASRCCLLLVSEDNLQLSCKVIGDKVLGEEVSFPLTGCLGQVVEDKKSIQLKDLTSEDVQQLQSMLGCELQAMLCVPVISRATDQVVALACAFNKLEGDLFTDEDEHVIQHCFHYTSTVLTSTLAFQKEQKLKCECQALLQVAKNLFTHLDDVSVLLQEIITEARNLSNAEICSVFLLDQNELVAKVFDGGVVDDESYEIRIPADQGIAGHVATTGQILNIPDAYAHPLFYRGVDDSTGFRTRNILCFPIKNENQEVIGVAELVNKINGPWFSKFDEDLATAFSIYCGISIAHSLLYKKVNEAQYRSHLANEMMMYHMKVSDDEYTKLLHDGIQPVAAIDSNFASFTYTPRSLPEDDTSMAILSMLQDMNFINNYKIDCPTLARFCLMVKKGYRDPPYHNWMHAFSVSHFCYLLYKNLELTNYLEDIEIFALFISCMCHDLDHRGTNNSFQVASKSVLAALYSSEGSVMERHHFAQAIAILNTHGCNIFDHFSRKDYQRMLDLMRDIILATDLAHHLRIFKDLQKMAEVGYDRNNKQHHRLLLCLLMTSCDLSDQTKGWKTTRKIAELIYKEFFSQGDLEKAMGNRPMEMMDREKAYIPELQISFMEHIAMPIYKLLQDLFPKAAELYERVASNREHWTKVSHKFTIRGLPSNNSLDFLDEEYEVPDLDGTRAPINGCCSLDAE

SEQ ID NO: 12382 - protein, 197 aa, Homo sapiens
MTPLPSPQDYQRMLDLMRDIILATDLAHHLRIFKDLQKMAEVGYDRNNKQHHRLLLCLLMTSCDLSDQTKGWKTTRKIAELIYKEFFSQGDLEKAMGNRPMEMMDREKAYIPELQISFMEHIAMPIYKLLQDLFPKAAELYERVASNREHWTKVSHKFTIRGLPSNNSLDFLDEEYEVPDLDGTRAPINGCCSLDAE

SEQ ID NO: 12383 - protein, 941 aa, Homo sapiens
MGQACGHSILCRSQQYPAARPAEPRGQQVFLKPDEPPPPPQPCADSLQDALLSLGSVIDISGLQRAVKEALSAVLPRVETVYTYLLDGESQLVCEDPPHELPQEGKVREAIISQKRLGCNGLGFSDLPGKPLARLVAPLAPDTQVLVMPLADKEAGAVAAVILVHCGQLSDNEEWSLQAVEKHTLVALRRVQVLQQRGPREAPRAVQNPPEGTAEDQKGGAAYTDRDRKILQLCGELYDLDASSLQLKVLQYLQQETRASRCCLLLVSEDNLQLSCKVIGDKVLGEEVSFPLTGCLGQVVEDKKSIQLKDLTSEDVQQLQSMLGCELQAMLCVPVISRATDQVVALACAFNKLEGDLFTDEDEHVIQHCFHYTSTVLTSTLAFQKEQKLKCECQALLQVAKNLFTHLDDVSVLLQEIITEARNLSNAEICSVFLLDQNELVAKVFDGGVVDDESYEIRIPADQGIAGHVATTGQILNIPDAYAHPLFYRGVDDSTGFRTRNILCFPIKNENQEVIGVAELVNKINGPWFSKFDEDLATAFSIYCGISIAHSLLYKKVNEAQYRSHLANEMMMYHMKVSDDEYTKLLHDGIQPVAAIDSNFASFTYTPRSLPEDDTSMAILSMLQDMNFINNYKIDCPTLARFCLMVKKGYRDPPYHNWMHAFSVSHFCYLLYKNLELTNYLEDIEIFALFISCMCHDLDHRGTNNSFQVASKSVLAALYSSEGSVMERHHFAQAIAILNTHGCNIFDHFSRKDYQRMLDLMRDIILATDLAHHLRIFKDLQKMAEVGYDRNNKQHHRLLLCLLMTSCDLSDQTKGWKTTRKIAELIYKEFFSQGDLEKAMGNRPMEMMDREKAYIPELQISFMEHIAMPIYKLLQDLFPKAAELYERVASNREHWTKVSHKFTIRGLPSNNSLDFLDEEYEVPDLDGTRAPINGCCSLDAE

SEQ ID NO: 12384 - protein, 533 aa, Homo sapiens
MKLWVSALLMAWFGVLSCVQAEFFTSIGHMTDLIYAEKELVQSLKEYILVEEAKLSKIKSWANKMEALTSKSAADAEGYLAHPVNAYKLVKRLNTDWPALEDLVLQDSAAGFIANLSVQRQFFPTDEDEIGAAKALMRLQDTYRLDPGTISRGELPGTKYQAMLSVDDCFGMGRSAYNEGDYYHTVLWMEQVLKQLDAGEEATTTKSQVLDYLSYAVFQLGDLHRALELTRRLLSLDPSHERAGGNLRYFEQLLEEEREKTLTNQTEAELATPEGIYERPVDYLPERDVYESLCRGEGVKLTPRRQKRLFCRYHHGNRAPQLLIAPFKEEDEWDSPHIVRYYDVMSDEEIERIKEIAKPKLARATVRDPKTGVLTVASYRVSKSSWLEEDDDPVVARVNRRMQHITGLTVKTAELLQVANYGVGGQYEPHFDFSRRPFDSGLKTEGNRLATFLNYMSDVEAGGATVFPDLGAAIWPKKGTAVFWYNLLRSGEGDYRTRHAACPVLVGCKWVSNKWFHERGQEFLRPCGSTEVD

SEQ ID NO: 12385 - protein, 567 aa, Homo sapiens
MKRQLVTNSFLHHLLIGQKRPRNAPRTLPSVTMKLWVSALLMAWFGVLSCVQAEFFTSIGHMTDLIYAEKELVQSLKEYILVEEAKLSKIKSWANKMEALTSKSAADAEGYLAHPVNAYKLVKRLNTDWPALEDLVLQDSAAGFIANLSVQRQFFPTDEDEIGAAKALMRLQDTYRLDPGTISRGELPGTKYQAMLSVDDCFGMGRSAYNEGDYYHTVLWMEQVLKQLDAGEEATTTKSQVLDYLSYAVFQLGDLHRALELTRRLLSLDPSHERAGGNLRYFEQLLEEEREKTLTNQTEAELATPEGIYERPVDYLPERDVYESLCRGEGVKLTPRRQKRLFCRYHHGNRAPQLLIAPFKEEDEWDSPHIVRYYDVMSDEEIERIKEIAKPKLARATVRDPKTGVLTVASYRVSKSSWLEEDDDPVVARVNRRMQHITGLTVKTAELLQVANYGVGGQYEPHFDFSRNDERDTFKHLGTGNRVATFLNYMSDVEAGGATVFPDLGAAIWPKKGTAVFWYNLLRSGEGDYRTRHAACPVLVGCKWVSNKWFHERGQEFLRPCGSTEVD

SEQ ID NO: 12386 - protein, 535 aa, Homo sapiens
MKLWVSALLMAWFGVLSCVQAEFFTSIGHMTDLIYAEKELVQSLKEYILVEEAKLSKIKSWANKMEALTSKSAADAEGYLAHPVNAYKLVKRLNTDWPALEDLVLQDSAAGFIANLSVQRQFFPTDEDEIGAAKALMRLQDTYRLDPGTISRGELPGTKYQAMLSVDDCFGMGRSAYNEGDYYHTVLWMEQVLKQLDAGEEATTTKSQVLDYLSYAVFQLGDLHRALELTRRLLSLDPSHERAGGNLRYFEQLLEEEREKTLTNQTEAELATPEGIYERPVDYLPERDVYESLCRGEGVKLTPRRQKRLFCRYHHGNRAPQLLIAPFKEEDEWDSPHIVRYYDVMSDEEIERIKEIAKPKLARATVRDPKTGVLTVASYRVSKSSWLEEDDDPVVARVNRRMQHITGLTVKTAELLQVANYGVGGQYEPHFDFSRNDERDTFKHLGTGNRVATFLNYMSDVEAGGATVFPDLGAAIWPKKGTAVFWYNLLRSGEGDYRTRHAACPVLVGCKWVSNKWFHERGQEFLRPCGSTEVD

SEQ ID NO: 12387 - protein, 488 aa, Homo sapiens
MWVDALVFLFLWFHSWANKMEALTSKSAADAEGYLAHPVNAYKLVKRLNTDWPALEDLVLQDSAAGFIANLSVQRQFFPTDEDEIGAAKALMRLQDTYRLDPGTISRGELPGTKYQAMLSVDDCFGMGRSAYNEGDYYHTVLWMEQVLKQLDAGEEATTTKSQVLDYLSYAVFQLGDLHRALELTRRLLSLDPSHERAGGNLRYFEQLLEEEREKTLTNQTEAELATPEGIYERPVDYLPERDVYESLCRGEGVKLTPRRQKRLFCRYHHGNRAPQLLIAPFKEEDEWDSPHIVRYYDVMSDEEIERIKEIAKPKLARATVRDPKTGVLTVASYRVSKSSWLEEDDDPVVARVNRRMQHITGLTVKTAELLQVANYGVGGQYEPHFDFSRRPFDSGLKTEGNRLATFLNYMSDVEAGGATVFPDLGAAIWPKKGTAVFWYNLLRSGEGDYRTRHAACPVLVGCKWVSNKWFHERGQEFLRPCGSTEVD

SEQ ID NO: 12388 - protein, 533 aa, Homo sapiens; identical to SEQ ID NO: 12384

SEQ ID NO: 12389 - protein, 565 aa, Homo sapiens
MKRQLVTNSFLHHLLIGQKRPRNAPRTLPSVTMKLWVSALLMAWFGVLSCVQAEFFTSIGHMTDLIYAEKELVQSLKEYILVEEAKLSKIKSWANKMEALTSKSAADAEGYLAHPVNAYKLVKRLNTDWPALEDLVLQDSAAGFIANLSVQRQFFPTDEDEIGAAKALMRLQDTYRLDPGTISRGELPGTKYQAMLSVDDCFGMGRSAYNEGDYYHTVLWMEQVLKQLDAGEEATTTKSQVLDYLSYAVFQLGDLHRALELTRRLLSLDPSHERAGGNLRYFEQLLEEEREKTLTNQTEAELATPEGIYERPVDYLPERDVYESLCRGEGVKLTPRRQKRLFCRYHHGNRAPQLLIAPFKEEDEWDSPHIVRYYDVMSDEEIERIKEIAKPKLARATVRDPKTGVLTVASYRVSKSSWLEEDDDPVVARVNRRMQHITGLTVKTAELLQVANYGVGGQYEPHFDFSRRPFDSGLKTEGNRLATFLNYMSDVEAGGATVFPDLGAAIWPKKGTAVFWYNLLRSGEGDYRTRHAACPVLVGCKWVSNKWFHERGQEFLRPCGSTEVD

SEQ ID NO: 12390 - protein, 1312 aa, Homo sapiens
MSRIEKMSILGVRSFGIEDKDKQIITFFSPLTILVGPNGAGKTTIIECLKYICTGDFPPGTKGNTFVHDPKVAQETDVRAQIRLQFRDVNGELIAVQRSMVCTQKSKKTEFKTLEGVITRTKHGEKVSLSSKCAEIDREMISSLGVSKAVLNNVIFCHQEDSNWPLSEGKALKQKFDEIFSATRYIKALETLRQVRQTQGQKVKEYQMELKYLKQYKEKACEIRDQITSKEAQLTSSKEIVKSYENELDPLKNRLKEIEHNLSKIMKLDNEIKALDSRKKQMEKDNSELEEKMEKVFQGTDEQLNDLYHNHQRTVREKERKLVDCHRELEKLNKESRLLNQEKSELLVEQGRLQLQADRHQEHIRARDSLIQSLATQLELDGFERGPFSERQIKNFHKLVRERQEGEAKTANQLMNDFAEKETLKQKQIDEIRDKKTGLGRIIELKSEILSKKQNELKNVKYELQQLEGSSDRILELDQELIKAERELSKAEKNSNVETLKMEVISLQNEKADLDRTLRKLDQEMEQLNHHTTTRTQMEMLTKDKADKDEQIRKIKSRHSDELTSLLGYFPNKKQLEDWLHSKSKEINQTRDRLAKLNKELASSEQNKNHINNELKRKEEQLSSYEDKLFDVCGSQDFESDLDRLKEEIEKSSKQRAMLAGATAVYSQFITQLTDENQSCCPVCQRVFQTEAELQEVISDLQSKLRLAPDKLKSTESELKKKEKRRDEMLGLVPMRQSIIDLKEKEIPELRNKLQNVNRDIQRLKNDIEEQETLLGTIMPEEESAKVCLTDVTIMERFQMELKDVERKIAQQAAKLQGIDLDRTVQQVNQEKQEKQHKLDTVSSKIELNRKLIQDQQEQIQHLKSTTNELKSEKLQISTNLQRRQQLEEQTVELSTEVQSLYREIKDAKEQVSPLETTLEKFQQEKEELINKKNTSNKIAQDKLNDIKEKVKNIHGYMKDIENYIQDGKDDYKKQKETELNKVIAQLSECEKHKEKINEDMRLMRQDIDTQKIQERWLQDNLTLRKRNEELKEVEEERKQHLKEMGQMQVLQMKSEHQKLEENIDNIKRNHNLALGRQKGYEEEIIHFKKELREPQFRDAEEKYREMMIVMRTTELVNKDLDIYYKTLDQAIMKFHSMKMEEINKIIRDLWRSTYRGQDIEYIEIRSDADENVSASDKRRNYNYRVVMLKGDTALDMRGRCSAGQKVLASLIIRLALAETFCLNCGIIALDEPTTNLDRENIESLAHALVEIIKSRSQQRNFQLLVITHDEDFVELLGRSEYVEKFYRIKKNIDQCSEIVKCSVSSLGFNVH

SEQ ID NO: 12391 - protein, 1315 aa, Homo sapiens [sequence omitted]

SEQ ID NO: 12392 - protein, 1173 aa, Homo sapiens
MISSLGVSKAVLNNVIFCHQEDSNWPLSEGKALKQKFDEIFSATRYIKALETLRQVRQTQGQKVKEYQMELKYLKQYKEKACEIRDQITSKEAQLTSSKEIVKSYENELDPLKNRLKEIEHNLSKIMKLDNEIKALDSRKKQMEKDNSELEEKMEKVFQGTDEQLNDLYHNHQRTVREKERKLVDCHRELEKLNKESRLLNQEKSELLVEQGRLQLQADRHQEHIRARDSLIQSLATQLELDGFERGPFSERQIKNFHKLVRERQEGEAKTANQLMNDFAEKETLKQKQIDEIRDKKTGLGRIIELKSEILSKKQNELKNVKYELQQLEGSSDRILELDQELIKAERELSKAEKNSNVETLKMEVISLQNEKADLDRTLRKLDQEMEQLNHHTTTRTQMEMLTKDKADKDEQIRKIKSRHSDELTSLLGYFPNKKQLEDWLHSKSKEINQTRDRLAKLNKELASSEQNKNHINNELKRKEEQLSSYEDKLFDVCGSQDFESDLDRLKEEIEKSSKQRAMLAGATAVYSQFITQLTDENQSCCPVCQRVFQTEAELQEVISDLQSKLRLAPDKLKSTESELKKKEKRRDEMLGLVPMRQSIIDLKEKEIPELRNKLQNVNRDIQRLKNDIEEQETLLGTIMPEEESAKVCLTDVTIMERFQMELKDVERKIAQQAAKLQGIDLDRTVQQVNQEKQEKQHKLDTVSSKIELNRKLIQDQQEQIQHLKSTTNELKSEKLQISTNLQRRQQLEEQTVELSTEVQSLYREIKDAKEQVSPLETTLEKFQQEKEELINKKNTSNKIAQDKLNDIKEKVKNIHGYMKDIENYIQDGKDDYKKQKETELNKVIAQLSECEKHKEKINEDMRLMRQDIDTQKIQERWLQDNLTLRKRNEELKEVEEERKQHLKEMGQMQVLQMKSEHQKLEENIDNIKRNHNLALGRQKGYEEEIIHFKKELREPQFRDAEEKYREMMIVMRTTELVNKDLDIYYKTLDQAIMKFHSMKMEEINKIIRDLWRSTYRGQDIEYIEIRSDADENVSASDKRRNYNYRVVMLKGDTALDMRGRCSAGQKVLASLIIRLALAETFCLNCGIIALDEPTTNLDRENIESLAHALVEIIKSRSQQRNFQLLVITHDEDFVELLGRSEYVEKFYRIKKNIDQCSEIVKCSVSSLGFNVH

SEQ ID NO: 12393 - protein, 504 aa, Homo sapiens
MSKAIAFEIIQKYEPIEEVRKAHQMSLEGFTRYMDSRECLLFKNECRKVYQDMTHPLNDYFISSSHNTYLVSDQLLGPSDLWGYVSALVKGCRCLEIDCWDGAQNEPVVYHGYTLTSKLLFKTVIQAIHKYAFMTSDYPVVLSLENHCSTAQQEVMADNLQATFGESLLSDMLDDFPDTLPSPEALKFKILVKNKKIGTLKETHERKGSDKRGDNQDKETGVKKLPGVMLFKKKKTRKLKIALALSDLVIYTKAEKFKSFQHSRLYQQFNENNSIGETQARKLSKLRVHEFIFHTRKFITRIYPKATRADSSNFNPQEFWNIGCQMVALNFQTPGLPMDLQNGKFLDNGGSGYILKPHFLRESKSYFNPSNIKEGMPITLTIRLISGIQLPLTHSSSNKGDSLVIIEVFGVPNDQMKQQTRVIKKNAFSPRWNETFTFIIHVPELALIRFVVEGQGLIAGNEFLGQYTLPLLCMNKGYRRIPLFSRMGESLEPASLFVYVWYVR

SEQ ID NO: 12394 - protein, 545 aa, Homo sapiens [sequence omitted]

SEQ ID NO: 12395 - protein, 468 aa, Homo sapiens [sequence omitted]

SEQ ID NO: 12396 - protein, 175 aa, Homo sapiens [sequence omitted]

SEQ ID NO: 12397 - protein, 383 aa, Homo sapiens
MGVKASQTGFVVLVLLQCCSAYKLVCYYTSWSQYREGDGSCFPDALDRFLCTHIIYSFANISNDHIDTWEWNDVTLYGMLNTLKNRNPNLKTLLSVGGWNFGSQRFSKIASNTQSRRTFIKSVPPFLRTHGFDGLDLAWLYPGRRDKQHFTTLIKEMKAEFIKEAQPGKKQLLLSAALSAGKVTIDSSYDIAKISQHLDFISIMTYDFHGAWRGTTGHHSPLFRGQEDASPDRFSNTDYAVGYMLRLGAPASKLVMGIPTFGRSFTLASSETGVGAPISGPGIPGRFTKEAGTLAYYEICDFLRGATVHRILGQQVPYATKGNQWVGYDDQESVKSKVQYLKDRQLAGAMVWALDLDDFQGSFCGQDLRFPLTNAIKDALAAT

SEQ ID NO: 12398 - protein, 383 aa, Homo sapiens; identical to SEQ ID NO: 12397

SEQ ID NO: 12399 - protein, 109 aa, Homo sapiens
MASTALAKPQMCGLLAKCLQFHIVGAFIVSLGVAAVCKIAVAEPRKKTYADFYRNYDSVKDLEEMGKADDALALEMTSSCSKSADIPRGEIHGFDHFLLNCLHFLRKAF

SEQ ID NO: 12400 - protein, 493 aa, Homo sapiens
MEKYENLGLVGEGSYGMVMKCRNKDTGRIVAIKKFLESDDDKMVKKIAMREIKLLKQLRHENLVNLLEVCKKKKRWYLVFEFVDHTILDDLELFPNGLDYQVVQKYLFQIINGIGFCHSHNIIHRDIKPENILVSQSGVVKLCDFGFARTLAAPGEVYTDYVATRWYRAPELLVGDVKYGKAVDVWAIGCLVTEMFMGEPLFPGDSDIDQLYHIMMCLGNLIPRHQELFNKNPVFAGVRLPEIKEREPLERRYPKLSEVVIDLAKKCLHIDPDKRPFCAELLHHDFFQMDGFAERFSQELQLKVQKDARNVSLSKKSQNRKKEKEKDDSLVEERKTLVVQDTNADPKIKDYKLFKIKGSKIDGEKAEKGNRASNASCLHDSRTSHNKIVPSTSLKDCSNVSVDHTRNPSVAIPPLTHNLSAVAPSINSGMGTETIPIQGYRVDEKTKKCSIPFVKPNRHSPSGIYNINVTTLVSGPPLSDDSGADLPQMEHQH

SEQ ID NO: 12401 - protein, 384 aa, Homo sapiens [sequence omitted]

SEQ ID NO: 12402 - protein, 373 aa, Homo sapiens
MTTSASSHLNKGIKQVYMSLPQGEKVQAMYIWIDGTGEGLRCKTRTLDSEPKCVEELPEWNFDGSSTLQSEGSNSDMYLVPAAMFRDPFRKDPNKLVLCEVFKYNRRPAETNLRHTCKRIMDMVSNQHPWFGMEQEYTLMGTDGHPFGWPSNGFPGPQGPYYCGVGADRAYGRDIVEAHYRACLYAGVKIAGTNAEVMPAQWEFQIGPCEGISMGDHLWVARFILHRVCEDFGVIATFDPKPIPGNWNGAGCHTNFSTKAMREENGLKYIEEAIEKLSKRHQYHIRAYDPKGGLDNARRLTGFHETSNINDFSAGVANRSASIRIPRTVGQEKKGYFEDRRPSANCDPFSVTEALIRTCLLNETGDEPFQYKN

SEQ ID NO: 12403 - protein, 373 aa, Homo sapiens; identical to SEQ ID NO: 12402

SEQ ID NO: 12404 - protein, 206 aa, Homo sapiens [sequence omitted]

SEQ ID NO: 12405 - protein, 373 aa, Homo sapiens; identical to SEQ ID NO: 12402

SEQ ID NO: 12406 - protein, 266 aa, Homo sapiens
MAFPKKKLQGLVAATITPMTENGLDQVIIHVGALSLKESQELAQHAAEIGADGIAVIAPFFLKPWTKDILINFLKEVAAAAPALPFYYYHIPALTGVKIRAEELLDGILDKIPTFQGLKFSDTDLLDFGQCVDQNRQQQFAFLFGVDEQLLSALVMGATGAVGSTYNYLGKKTNQMLEAFEQKDFSLALNYQFCIQRFINFVVKLGFGVSQTKAIMTLVSGIPMGPPRLPLQKASREFTDSAEAKLKSLDFLSFTDLKDGNLEAGS

SEQ ID NO: 12407 - protein, 320 aa, Homo sapiens
MAFPKKKLQGLVAATITPMTENGEINFSVIGQYVDYLVKEQGVKNIFVNGTTGEGLSLSVSERRQVAEEWVTKGKDKLDQVIIHVGALSLKESQELAQHAAEIGADGIAVIAPFFLKPWTKDILINFLKEVAAAAPALPFYYYHIPALTGVKIRAEELLDGILDKIPTFQGLKFSDTDLLDFGQCVDQNRQQQFAFLFGVDEQLLSALVMGATGAVGSTYNYLGKKTNQMLEAFEQKDFSLALNYQFCIQRFINFVVKLGFGVSQTKAIMTLVSGIPMGPPRLPLQKASREFTDSAEAKLKSLDFLSFTDLKDGNLEAGS

SEQ ID NO: 12408 - protein, 276 aa, Homo sapiens
MAFPKKKLQGLVAATITPMTENGEINFSVIGQYVDYLVKEQGVKNIFVNGTTGEGLSLSVSERRQVAEEWVTKGKDKLDQVIIHVGALSLKESQELAQHAAEIGADGIAVIAPFFLKPWTKDILINFLKEVAAAAPALPFYYYHIPALTGVKIRAEELLDGILDKIPTFQGLKFSDTDLLDFGQCVDQNRQQQFAFLFGVDEFCIQRFINFVVKLGFGVSQTKAIMTLVSGIPMGPPRLPLQKASREFTDSAEAKLKSLDFLSFTDLKDGNLEAGS

SEQ ID NO: 12409 - protein, 220 aa, Homo sapiens
MAISVAASKAKQAPLTHPYKPEFPEVTLIPGYAFFTVNGTDSCPPVDRPFTGTQWSLQGWCSGVNPKRPERRWAVGILRTPRKQQPKPHNAEPRDSGDCRALRKRRKIKTQRSPGGARTREGLACRRGRGRFALGVARDRRTQTARRPGRSGGGALGPDSRVGETLTDPEERGKADTLGNGSGEGVNAKSVGTDGGRRTYSPGLFADSISAGSPKVLSSK

SEQ ID NO: 12410 - protein, 320 aa, Homo sapiens; identical to SEQ ID NO: 12407

SEQ ID NO: 12411 - protein, 235 aa, Homo sapiens
MKYPSPFFVFGEKIRTRAISAKGMTLVTPLQLLLFASKKVQSDGQIVLVDDWIKLQISHEAAACITGLRAAMEALVVEVTKQPAIISQLDPVNERMLNMIRQISRPSAAGINLMIGSTRYGDGPRPPKMARYDNGSGYRRGGSSYSGGGYGGGYSSGGYGSGGYGGSANSFRAGYGAGVGGGYRGVSRGGFRGNSGGDYRGPSGGYRGSGGFQRGGGRGAYGTGYFGQGRGGGGY

SEQ ID NO: 12412 - protein, 1270 aa, Homo sapiens
MGDVKNFLYAWCGKRKMTPSYEIRAVGNKNRQKFMCEVQVEGYNYTGMGNSTNKKDAQSNAARDFVNYLVRINEIKSEEVPAFGVASPPPLTDTPDTTANAEGDLPTTMGGPLPPHLALKAENNSEVGASGYGVPGPTWDRGANLKDYYSRKEEQEVQATLESEEVDLNAGLHGNWTLENAKARLNQYFQKEKIQGEYKYTQVGPDHNRSFIAEMTIYIKQLGRRIFAREHGSNKKLAAQSCALSLVRQLYHLGVVEAYSGLTKKKEGETVEPYKVNLSQDLEHQLQNIIQELNLEILPPPEDPSVPVALNIGKLAQFEPSQRQNQVGVVPWSPPQSNWNPWTSSNIDEGPLAFATPEQISMDLKNELMYQLEQDHDLQAILQERELLPVKKFESEILEAISQNSVVIIRGATGCGKTTQVPQFILDDFIQNDRAAECNIVVTQPRRISAVSVAERVAFERGEEPGKSCGYSVRFESILPRPHASIMFCTVGVLLRKLEAGIRGISHVIVDEIHERDINTDFLLVVLRDVVQAYPEVRIVLMSATIDTSMFCEYFFNCPIIEVYGRTYPVQEYFLEDCIQMTHFVPPPKDKKKKDKDDDGGEDDDANCNLICGDEYGPETRLSMSQLNEKETPFELIEALLKYIETLNVPGAVLVFLPGWNLIYTMQKHLEMNPHFGSHRYQILPLHSQIPREEQRKVFDPVPVGVTKVILSTNIAETSITINDVVYVIDSCKQKVKLFTAHNNMTNYATVWASKTNLEQRKGRAGRVRPGFCFHLCSRARFERLETHMTPEMFRTPLHEIALSIKLLRLGGIGQFLAKAIEPPPLDAVIEAEHTLRELDALDANDELTPLGRILAKLPIEPRFGKMMIMGCIFYVGDAICTIAAATCFPEPFINEGKRLGYIHRNFAGNRFSDHVALLSVFQAWDDARMGGEEAEIRFCEHKRLNMATLRMTWEAKVQLKEILINSGFPEDCLLTQVFTNTGPDNNLDVVISLLAFGVYPNVCYHKEKRKILTTEGRNALIHKSSVNCPFSSQDMKYPSPFFVFGEKIRTRAISAKGMTLVTPLQLLLFASKKVQSDGQIVLVDDWIKLQISHEAAACITGLRAAMEALVVEVTKQPAIISQLDPVNERMLNMIRQISRPSAAGINLMIGSTRYGDGPRPPKMARYDNGSGYRRGGSSYSGGGYGGGYSSGGYGSGGYGGSANSFRAGYGAGVGGGYRGVSRGGFRGNSGGDYRGPSGGYRGSGGFQRGGGRGAYGTGYFGQGRGGGGY

SEQ ID NO: 12413 - protein, 1014 aa, Homo sapiens [sequence omitted]

SEQ ID NO: 12414 - protein, 1073 aa, Homo sapiens
MKTLLLDLALWSLLFQPGWLSFSSQVSQNCHNGSYEISVLMMGNSAFAEPLKNLEDAVNEGLEIVRGRLQNAGLNVTVNATFMYSDGLIHNSGDCRSSTCEGLDLLRKISNAQRMGCVLIGPSCTYSTFQMYLDTELSYPMISAGSFGLSCDYKETLTRLMSPARKLMYFLVNFWKTNDLPFKTYSWSTSYVYKNGTETEDCFWYLNALEASVSYFSHELGFKVVLRQDKEFQDILMDHNRKSNVIIMCGGPEFLYKLKGDRAVAEDIVIILVDLFNDQYLEDNVTAPDYMKNVLVLTLSPGNSLLNSSFSRNLSPTKRDFALAYLNGILLFGHMLKIFLENGENITTPKFAHAFRNLTFEGYDGPVTLDDWGDVDSTMVLLYTSVDTKKYKVLLTYDTHVNKTYPVDMSPTFTWKNSKLPNDITGRGPQILMIAVFTLTGAVVLLLLVALLMLRKYRKDYELRQKKWSHIPPENIFPLETNETNHVSLKIDDDKRRDTIQRLRQCKYDKKRVILKDLKHNDGNFTEKQKIELNKLLQIDYYNLTKFYGTVKLDTMIFGVIEYCERGSLREVLNDTISYPDGTFMDWEFKISVLYDIAKGMSYLHSSKTEVHGRLKSTNCVVDSRMVVKITDFGCNSILPPKKDLWTAPEHLRQANISQKGDVYSYGIIAQEIILRKETFYTLSCRDRNEKIFRVENSNGMKPFRPDLFLETAEEKELEVYLLVKNCWEEDPEKRPDFKKIETTLAKIFGLFHDQKNESYMDTLIRRLQLYSRNLEHLVEERTQLYKAERDRADRLNFMLLPRLVVKSLKEKGFVEPELYEEVTIYFSDIVGFTTICKYSTPMEVVDMLNDIYKSFDHIVDHHDVYKVETIGDAYMVASGLPKRNGNRHAIDIAKMALEILSFMGTFELEHLPGLPIWIRIGVHSGPCAAGVVGIKMPRYCLFGDTVNTASRMESTGLPLRIHVSGSTIAILKRTECQFLYEVRGETYLKGRGNETTYWLTGMKDQKFNLPTPPTVENQQRLQAEFSDMIANSLQKRQAAGIRSQKPRRVASYKKGTLEYLQLNTTDKESTYF

SEQ ID NO: 12415 - protein, 273 aa, Homo sapiens
MEAAPSRFMFLLFLLTCELAAEVAAEVEKSSDGPGAAQEPTWLTDVPAAMEFIAATEVAVIGFFQDLEIPAVPILHSMVQKFPGVSFGISTDSEVLTHYNITGNTICLFRLVDNEQLNLEDEDIESIDATKLSRFIEINSLHMVTEYNPVTVIGLFNSVIQIHLLLIMNKASPEYEENMHRYQKAAKLFQGKILFILVDSGMKENGKVISFFKLKESQLPALAIYQTLDDEWDTLPTAEVSVEHVQNFCDGFLSGKLLKENRESEGKTPKVEL

SEQ ID NO: 12416 - protein, 222 aa, Homo sapiens
MAGSSEEAPDYGRGVVIMDDWPGYDLNLFTYPQHYYGDLEYVLIPHGIIVDRIERLAKDIMKDIGYSDIMVLCVLKGGYKFCADLVEHLKNISRNSDRFVSMKVDFIRLKSYRSMGEMQIIGGDDLSTLAGKNVLIVEDVVGTGRTMKALLSNIEKYKPNMIKVASLLVKRTSRSDGFRPDYAGFEIPNLFVVGYALDYNEYFRDLNHICVINEHGKEKYRV

SEQ ID NO: 12417 - protein, 225 aa, Homo sapiens
MAGSSEEAPDYGRGVVIMDDWPGYDLNLFTYPQHYYGDLEYVLIPHGIIVDRIERLAKDIMKDIGYSDIMVLCVLKGGYKFCADLVEHLKNISRNSDRFVSMKVDFIRLKSYRNDQSMGEMQIIGGDDLSTLAGKNVLIVEDVVGTGRTMKALLSNIEKYKPNMIKVASLLVKRTSRSDGFRPDYAGFEIPNLFVVGYALDYNEYFRDLNHICVINEHGKEKYRV

SEQ ID NO: 12418 - protein, 1922 aa, Homo sapiens
MKSPALQPLSMAGLQLMTPASSPMGPFFGLPWQQEAIHDNIYTPRKYQVELLEAALDHNTIVCLNTGSGKTFIAVLLTKELSYQIRGDFSRNGKRTVFLVNSANQVAQQVSAVRTHSDLKVGEYSNLEVNASWTKERWNQEFTKHQVLIMTCYVALNVLKNGYLSLSDINLLVFDECHLAILDHPYREIMKLCENCPSCPRILGLTASILNGKCDPEELEEKIQKLEKILKSNAETATDLVVLDRYTSQPCEIVVDCGPFTDRSGLYERLLMELEEALNFINDCNISVHSKERDSTLISKQILSDCRAVLVVLGPWCADKVAGMMVRELQKYIKHEQEELHRKFLLFTDTFLRKIHALCEEHFSPASLDLKFVTPKVIKLLEILRKYKPYERQQFESVEWYNNRNQDNYVSWSDSEDDDEDEEIEEKEKPETNFPSPFTNILCGIIFVERRYTAVVLNRLIKEAGKQDPELAYISSNFITGHGIGKNQPRNKQMEAEFRKQEEVLRKFRAHETNLLIATSIVEEGVDIPKCNLVVRFDLPTEYRSYVQSKGRARAPISNYIMLADTDKIKSFEEDLKTYKAIEKILRNKCSKSVDTGETDIDPVMDDDDVFPPYVLRPDDGGPRVTINTAIGHINRYCARLPSDPFTHLAPKCRTRELPDGTFYSTLYLPINSPLRASIVGPPMSCVRLAERVVALICCEKLHKIGELDDHLMPVGKETVKYEEELDLHDEEETSVPGRPGSTKRRQCYPKAIPECLRDSYPRPDQPCYLYVIGMVLTTPLPDELNFRRRKLYPPEDTTRCFGILTAKPIPQIPHFPVYTRSGEVTISIELKKSGFMLSLQMLELITRLHQYIFSHILRLEKPALEFKPTDADSAYCVLPLNVVNDSSTLDIDFKFMEDIEKSEARIGIPSTKYTKETPFVFKLEDYQDAVIIPRYRNFDQPHRFYVADVYTDLTPLSKFPSPEYETFAEYYKTKYNLDLTNLNQPLLDVDHTSSRLNLLTPRHLNQKGKALPLSSAEKRKAKWESLQNKQILVPELCAIHPIPASLWRKAVCLPSILYRLHCLLTAEELRAQTASDAGVGVRSLPADFRYPNLDFGWKKSIDSKSFISISNSSSAENDNYCKHSTIVPENAAHQGANRTSSLENHDQMSVNCRTLLSESPGKLHVEVSADLTAINGLSYNQNLANGSYDLANRDFCQGNQLNYYKQEIPVQPTTSYSIQNLYSYENQPQPSDECTLLSNKYLDGNANKSTSDGSPVMAVMPGTTDTIQVLKGRMDSEQSPSIGYSSRTLGPNPGLILQALTLSNASDGFNLERLEMLGDSFLKHAITTYLFCTYPDAHEGRLSYMRSKKVSNCNLYRLGKKKGLPSRMVVSIFDPPVNWLPPGYVVNQDKSNTDKWEKDEMTKDCMLANGKLDEDYEEEDEEEESLMWRAPKEEADYEDDFLEYDQEHIRFIDNMLMGSGAFVKKISLSPFSTTDSAYEWKMPKKSSLGSMPFSSDFEDFDYSSWDAMCYLDPSKAVEEDDFVVGFWNPSEENCGVDTGKQSISYDLHTEQCIADKSIADCVEALLGCYLTSCGERAAQLFLCSLGLKVLPVIKRTDREKALCPTRENFNSQQKNLSVSCAAASVASSRSSVLKDSEYGCLKIPPRCMFDHPDADKTLNHLISGFENFEKKINYRFKNKAYLLQAFTHASYHYNTITDCYQRLEFLGDAILDYLITKHLYEDPRQHSPGVLTDLRSALVNNTIFASLAVKYDYHKYFKAVSPELFHVIDDFVQFQLEKNEMQGMDSELRRSEEDEEKEEDIEVPKAMGDIFESLAGAIYMDSGMSLETVWQVYYPMMRPLIEKFSANVPRSPVRELLEMEPETAKFSPAERTYDGKVRVTVEVVGKGKFKGVGRSYRIAKSAAARRALRSLKANQPQVPNS

SEQ ID NO: 12419 - protein, 1923 aa, Homo sapiens [sequence omitted]

SEQ ID NO: 12420 - protein, 1922 aa, Homo sapiens; identical to SEQ ID NO: 12418

SEQ ID NO: 12421 - protein, 52 aa, Homo sapiens
MKRKTKTPSEGGQVLAEQRGSRSCQRLTARKALPILVFTIETATACTDHFGS

SEQ ID NO: 12422 - protein, 157 aa, Homo sapiens
MSGSLGRAAAALLRWGRGAGGGGLWGPGVRAAGSGAGGGGSAEQLDALVKKDKVVVFLKGTPEQPQCGFSNAVVQILRLHGVRDYAAYNVLDDPELRQGIKDYSNWPTIPQVYLNGEFVGGCDILLQMHQNGDLVEELKKLGIHSALLDEKKDQDSK

SEQ ID NO: 12423 - protein, 167 aa, Homo sapiens
MESILGSASCTEPSSALEVNSPPSQPPQPVVPAKPVQCVHHVSTQPSCPGRGKMSKLLNPEEMTSRDYYFDSYAHFGIHEEMLKDEVRTLTYRNSMYHNKHVFKDKVVLDVGSGTGILSMFAAKAGAKKVFGVPSPFLKAWPEASETPSVPLCEYFSREWSLPEAWG

SEQ ID NO: 12424 - protein, 394 aa, Homo sapiens
MGMKHSSRCLLLRRKMAENAAESTEVNSPPSQPPQPVVPAKPVQCVHHVSTQPSCPGRGKMSKLLNPEEMTSRDYYFDSYAHFGIHEEMLKDEVRTLTYRNSMYHNKHVFKDKVVLDVGSGTGILSMFAAKAGAKKVFGIECSSISDYSEKIIKANHLDNIITIFKGKVEEVELPVEKVDIIISEWMGYCLFYESMLNTVIFARDKWLKPGGLMFPDRAALYVVAIEDRQYKDFKIHWWENVYGFDMTCIRDVAMKEPLVDIVDPKQVVTNACLIKEVDIYTVKTEELSFTSAFCLQIQRNDYVHALVTYFNIEFTKCHKKMGFSTAPDAPYTHWKQTVFYLEDYLTVRRGEEIYGTISMKPNAKNVRDLDFTVDLDFKGQLCETSVSNDYKMR

SEQ ID NO: 12425 - protein, 148 aa, Homo sapiens
MKALIVLGLVLLSVTVQGKVFERCELARTLKRLGMDGYRGISLANWMCLAKWESGYNTRATNYNAGDRSTDYGIFQINSRYWCNDGKTPGAVNACHLSCSALLQDNIADAVACAKRVVRDPQGIRAWVAWRNRCQNRDVRQYVQGCGV

SEQ ID NO: 12426 - protein, 148 aa, Homo sapiens; identical to SEQ ID NO: 12425

SEQ ID NO: 12427 - protein, 148 aa, Homo sapiens; identical to SEQ ID NO: 12425

SEQ ID NO: 12428 - protein, 445 aa, Homo sapiens
MTAKTFFIIHGWTMSGIFENWLHKLVSALHTREKDANVVVVDWLPLAHQLYTDAVNNTRVVGHSIARMLDWLQEKDDFSLGNVHLIGYSLGAHVAGYAGNFVKGTVGRITGLDPAGPMFEGADIHKRLSPDDADFVDVLHTYTRSFGLSIGIQMPVGHIDIYPNGGDFQPGCGLNDVLGSIAYGTITEVVKCEHERAVHLFVDSLVNQDKPSFAFQCTDSNRFKKGICLSCRKNRCNSIGYNAKKMRNKRNSKMYLKTRAGMPFRVYHYQMKIHVFSYKNMGEIEPTFYVTLYGTNADSQTLPLEIVERIEQNATNTFLVYTEEDLGDLLKIQLTWEGASQSWYNLWKEFRSYLSQPRNPGRELNIRRIRVKSGETQRKLTFCTEDPENTSISPGRELWFRKCRDGWRMKNETRSGQQFTKEPEQEHHFTEDEKKNYFNCSSLKA

SEQ ID NO: 12429 - protein, 500 aa, Homo sapiens
MSNSVPLLCFWSLCYCFAAGSPVPFGPEGRLEDKLHKPKATQTEVKPSVRFNLRTSKDPEHEGCYLSVGHSQPLEDCSFNMTAKTFFIIHGWTMSGIFENWLHKLVSALHTREKDANVVVVDWLPLAHQLYTDAVNNTRVVGHSIARMLDWLQEKDDFSLGNVHLIGYSLGAHVAGYAGNFVKGTVGRITGLDPAGPMFEGADIHKRLSPDDADFVDVLHTYTRSFGLSIGIQMPVGHIDIYPNGGDFQPGCGLNDVLGSIAYGTITEVVKCEHERAVHLFVDSLVNQDKPSFAFQCTDSNRFKKGICLSCRKNRCNSIGYNAKKMRNKRNSKMYLKTRAGMPFRVYHYQMKIHVFSYKNMGEIEPTFYVTLYGTNADSQTLPLEIVERIEQNATNTFLVYTEEDLGDLLKIQLTWEGASQSWYNLWKEFRSYLSQPRNPGRELNIRRIRVKSGETQRKLTFCTEDPENTSISPGRELWFRKCRDGWRMKNETSPTVELP

SEQ ID NO: 12430 - protein, 500 aa, Homo sapiens; identical to SEQ ID NO: 12429

SEQ ID NO: 12431 - protein, 928 aa, Homo sapiens
MQTACQAVQHQRGRRSIYNAAVWYYHHCQDRMPIVMVTEDEEAIQQYGSETEGVFVITFKNYLDNFWPDLKAAHELCDSILQSRRERENESQESHGKEYPEHLPLEVLEAGIKSGRYIQGILNVNKHRAQIEAFVRLQGASSKDSDLVSDILIHGMKARNRSIHGDVVVVELLPKNEWKGRTVALCENDCDDKASGESPSEPMPTGRVVGILQKNWRDYVVTFPSKEEVQSQGKNAQKILVTPWDYRIPKIRISTQQAETLQDFRVVVRIDSWESTSVYPNGHFVRVLGRIGDLEGEIATILVENSISVIPFSEAQMCEMPVNTPESPWKVSPEEEQKRKDLRKSHLVFSIDPKGCEDVDDTLSVRTLNNGNLELGVHIADVTHFVAPNSYIDIEARTRATTYYLADRRYDMLPSVLSADLCSLLGGVDRYAVSIMWELDKASYEIKKVWYGRTIIRSAYKLFYEAAQELLDGNLSVVDDIPEFKDLDEKSRQAKLEELVWAIGKLTDIARHVRAKRDGCGALELEGVEVCVQLDDKKNIHDLIPKQPLEVHETVAECMILANHWVAKKIWESFPHQALLRQHPPPHQEFFSELRECAKAKGFFIDTRSNKTLADSLDNANDPHDPIVNRLLRSMATQAMSNALYFSTGSCAEEEFHHYGLALDKYTHFTSPIRRYSDIVVHRLLMAAISKDKKMEIKGNLFSNKDLEELCRHINNRNQAAQHSQKQSTELFQCMYFKDKDPATEERCISDGVIYSIRTNGVLLFIPRFGIKGAAYLKNKDGLVISCGPDSCSEWKPGSLQRFQNKITSTTTDGESVTFHLFDHVTVRISIQASRCHSDTIRLEIISNKPYKIPNTELIHQSSPLLKSELVKEVTKSVEEAQLAQEVKVNIIQEEYQEYRQTKGRSLYTLLEEIRDLALLDVSNNYGI

SEQ ID NO: 12432 - protein, 971 aa, Homo sapiens
MQTACQAVQHQRGRRQYNKLRNLLKDARHDCILFANEFQQCCYLPRERGESMEKWQTRSIYNAAVWYYHHCQDRMPIVMVTEDEEAIQQYGSETEGVFVITFKNYLDNFWPDLKAAHELCDSILQSRRERENESQESHGKEYPEHLPLEVLEAGIKSGRYIQGILNVNKHRAQIEAFVRLQGASSKDSDLVSDILIHGMKARNRSIHGDVVVVELLPKNEWKGRTVALCENDCDDKASGESPSEPMPTGRVVGILQKNWRDYVVTFPSKEEVQSQGKNAQKILVTPWDYRIPKIRISTQQAETLQDFRVVVRIDSWESTSVYPNGHFVRVLGRIGDLEGEIATILVENSISVIPFSEAQMCEMPVNTPESPWKVSPEEEQKRKDLRKSHLVFSIDPKGCEDVDDTLSVRTLNNGNLELGVHIADVTHFVAPNSYIDIEARTRATTYYLADRRYDMLPSVLSADLCSLLGGVDRYAVSIMWELDKASYEIKKVWYGRTIIRSAYKLFYEAAQELLDGNLSVVDDIPEFKDLDEKSRQAKLEELVWAIGKLTDIARHVRAKRDGCGALELEGVEVCVQLDDKKNIHDLIPKQPLEVHETVAECMILANHWVAKKIWESFPHQALLRQHPPPHQEFFSELRECAKAKGFFIDTRSNKTLADSLDNANDPHDPIVNRLLRSMATQAMSNALYFSTGSCAEEEFHHYGLALDKYTHFTSPIRRYSDIVVHRLLMAAISKDKKMEIKGNLFSNKDLEELCRHINNRNQAAQHSQKQSTELFQCMYFKDKDPATEERCISDGVIYSIRTNGVLLFIPRFGIKGAAYLKNKDGLVISCGPDSCSEWKPGSLQRFQNKITSTTTDGESVTFHLFDHVTVRISIQASRCHSDTIRLEIISNKPYKIPNTELIHQSSPLLKSELVKEVTKSVEEAQLAQEVKVNIIQEEYQEYRQTKGRSLYTLLEEIRDLALLDVSNNYGI

SEQ ID NO: 12433 - protein, 920 aa, Homo sapiens
MEKWQTRSIYNAAVWYYHHCQDRMPIVMVTEDEEAIQQYGSETEGVFVITFKNYLDNFWPDLKAAHELCDSILQSRRERENESQESHGKEYPEHLPLEVLEAGIKSGRYIQGILNVNKHRAQIEAFVRLQGASSKDSDLVSDILIHGMKARNRSIHGDVVVVELLPKNEWKGRTVALCENDCDDKASGESPSEPMPTGRVVGILQKNWRDYVVTFPSKEEVQSQGKNAQKILVTPWDYRIPKIRISTQQAETLQDFRVVVRIDSWESTSVYPNGHFVRVLGRIGDLEGEIATILVENSISVIPFSEAQMCEMPVNTPESPWKVSPEEEQKRKDLRKSHLVFSIDPKGCEDVDDTLSVRTLNNGNLELGVHIADVTHFVAPNSYIDIEARTRATTYYLADRRYDMLPSVLSADLCSLLGGVDRYAVSIMWELDKASYEIKKVWYGRTIIRSAYKLFYEAAQELLDGNLSVVDDIPEFKDLDEKSRQAKLEELVWAIGKLTDIARHVRAKRDGCGALELEGVEVCVQLDDKKNIHDLIPKQPLEVHETVAECMILANHWVAKKIWESFPHQALLRQHPPPHQEFFSELRECAKAKGFFIDTRSNKTLADSLDNANDPHDPIVNRLLRSMATQAMSNALYFSTGSCAEEEFHHYGLALDKYTHFTSPIRRYSDIVVHRLLMAAISKDKKMEIKGNLFSNKDLEELCRHINNRNQAAQHSQKQSTELFQCMYFKDKDPATEERCISDGVIYSIRTNGVLLFIPRFGIKGAAYLKNKDGLVISCGPDSCSEWKPGSLQRFQNKITSTTTDGESVTFHLFDHVTVRISIQASRCHSDTIRLEIISNKPYKIPNTELIHQSSPLLKSELVKEVTKSVEEAQLAQEVKVNIIQEEYQEYRQTKGRSLYTLLEEIRDLALLDVSNNYGI

SEQ ID NO: 12434 - protein, 272 aa, Homo sapiens
MSCHNCSDPQVLCSSGQLFLQPLWDHLRSWEALLQSPFFPVIFSITTYVGFCLPFVVLDILCSWVPALRRYKIHPDFSPSAQQLLPCLGQTLYQHVMFVFPVTLLHWARSPALLPHEAPELLLLLHHILFCLLLFDMEFFVWHLLHHKVPWLYRTFHKVHHQNSSSFALATQYMSVWELFSLGFFDMMNVTLLGCHPLTTLTFHVVNIWLSVEDHSGYNFPWSTHRLVPFGWYGGVVHHDLHHSHFNCNFAPYFTHWDKILGTLRTASVPAR

SEQ ID NO: 12435 - protein, 399 aa, Homo sapiens
MKMRFLGLVVCLVLWTLHSEGSGGKLTAVDPETNMNVSEIISYWGFPSEEYLVETEDGYILCLNRIPHGRKNHSDKGPKPVVFLQHGLLADSSNWVTNLANSSLGFILADAGFDVWMGNSRGNTWSRKHKTLSVSQDEFWAFSYDEMAKYDLPASINFILNKTGQEQVYYVGHSQGTTIGFIAFSQIPELAKRIKMFFALGPVASVAFCTSPMAKLGRLPDHLIKDLFGDKEFLPQSAFLKWLGTHVCTHVILKELCGNLCFLLCGFNERNLNMSRVDVYTTHSPAGTSVQNMLHWSQAVKFQKFQAFDWGSSAKNYFHYNQSYPPTYNVKDMLVPTAVWSGGHDWLADVYDVNILLTQITNLVFHESIPEWEHLDFIWGLDAPWRLYNKIINLMRKYQ

SEQ ID NO: 12436 - protein, 399 aa, Homo sapiens; identical to SEQ ID NO: 12435

SEQ ID NO: 12437 - protein, 399 aa, Homo sapiens; identical to SEQ ID NO: 12435

SEQ ID NO: 12438 - protein, 373 aa, Homo sapiens
MKLINGKKQTFPWFGMDIGGTLVKLVYFEPKDITAEEEQEEVENLKSIRKYLTSNTAYGKTGIRDVHLELKNLTMCGRKGNLHFIRFPSCAMHRFIQMGSEKNFSSLHTTLCATGGGAFKFEEDFRMIADLQLHKLDELDCLIQGLLYVDSVGFNGKPECYYFENPTNPELCQKKPYCLDNPYPMLLVNMGSGVSILAVYSKDNYKRVTGTSLGGGTFLGLCCLLTGCETFEEALEMAAKGDSTNVDKLVKDIYGGDYERFGLQGSAVASSFGNMMSKEKRDSISKEDLARATLVTITNNIGSIARMCALNENIDRVVFVGNFLRINMVSMKLLAYAMDFWSKGQLKALFLEHEGYFGAVGALLELFKMTDDK

SEQ ID NO: 12439 - protein, 314 aa, Homo sapiens
MKLINGKKQTFPWFGMDIGGTLVKLVYFEPKDITAEEEQEEVENLKSIRKYLTSNTAYGKTGIRDVHLELKNLTMCGRKGNLHFIRFPSCAMHRFIQMGSEKNFSSLHTTLCATGGGAFKFEEDFRMIADLQLHKLDELDCLIQGLLYVDSVGFNGKPECYYFENPTNPELCQKKPYCLDNPYPMLLVNMGSGVSILAVYSKDNYKRVTGTSFGNMMSKEKRDSISKEDLARATLVTITNNIGSIARMCALNENIDRVVFVGNFLRINMVSMKLLAYAMDFWSKGQLKALFLEHEGYFGAVGALLELFKMTDDK

SEQ ID NO: 12440 - protein, 598 aa, Homo sapiens
MLKLVGGGGGQDWACSVAGTSLGGEEAAFEVARPGDQGKAGGGSPGWGCAGIPDSAPGAGVLQAGAVGPARGGQGAEEVGESAGGGEERRVRHPQAPALRLLNRKPQGGSGEIKTPENDLQRGRLSRGPRTAPPAPGMGDRSGQQERSVPHSPGAPVGTSAAAVNGLLHNGFHPPPVQPPHVCSRGPVGGSDAAPQRLPLLPELQPQPLLPQHDSPAKKCRLRRRMDSGRKNRPPFPWFGMDIGGTLVKLVYFEPKDITAEEEQEEVENLKSIRKYLTSNTAYGKTGIRDVHLELKNLTMCGRKGNLHFIRFPSCAMHRFIQMGSEKNFSSLHTTLCATGGGAFKFEEDFRMIADLQLHKLDELDCLIQGLLYVDSVGFNGKPECYYFENPTNPELCQKKPYCLDNPYPMLLVNMGSGVSILAVYSKDNYKRVTGTSLGGGTFLGLCCLLTGCETFEEALEMAAKGDSTNVDKLVKDIYGGDYERFGLQGSAVASSFGNMMSKEKRDSISKEDLARATLVTITNNIGSIARMCALNENIDRVVFVGNFLRINMVSMKLLAYAMDFWSKGQLKALFLEHEGYFGAVGALLELFKMTDDK

SEQ ID NO: 12441 - protein, 500 aa, Homo sapiens
MSPGLLLLGSAVLLAFGLCCTFVHRARSRYEHIPGPPRPSFLLGHLPCFWKKDEVGGRVLQDVFLDWAKKYGPVVRVNVFHKTSVIVTSPESVKKFLMSTKYNKDSKMYRALQTVFGERLFGQGLVSECNYERWHKQRRVIDLAFSRSSLVSLMETFNEKAEQLVEILEAKADGQTPVSMQDMLTYTAMDILAKAAFGMETSMLLGAQKPLSQAVKLMLEGITASRNTLAKFLPGKRKQLREVRESIRFLRQVGRDWVQRRREALKRGEEVPADILTQILKAEEGAQDDEGLLDNFVTFFIAGHETSANHLAFTVMELSRQPEIVARLQAEVDEVIGSKRYLDFEDLGRLQYLSQVLKESLRLYPPAWGTFRLLEEETLIDGVRVPGNTPLLFSTYVMGRMDTYFEDPLTFNPDRFGPGAPKPRFTYFPFSLGHRSCIGQQFAQMEVKVVMAKLLQRLEFRLVPGQRFGLQEQATLKPLDPVLCTLRPRGWQPAPPPPPC

SEQ ID NO: 12442 - protein, 509 aa, Homo sapiens
MDPPRASHLSPRKKRPRQTGALMASSPQDIKFQDLVVFILEKKMGTTRRAFLMELARRKGFRVENELSDSVTHIVAENNSGSDVLEWLQAQKVQVSSQPELLDVSWLIECIGAGKPVEMTGKHQLVVRRDYSDSTNPGPPKTPPIAVQKISQYACQRRTTLNNCNQIFTDAFDILAENCEFRENEDSCVTFMRAASVLKSLPFTIISMKDTEGIPCLGSKVKGIIEEIIEDGESSEVKAVLNDERYQSFKLFTSVFGVGLKTSEKWFRMGFRTLSKVRSDKSLKFTRMQKAGFLYYEDLVSCVTRAEAEAVSVLVKEAVWAFLPDAFVTMTGGFRRGKKMGHDVDFLITSPGSTEDEEQLLQKVMNLWEKKGLLLYYDLVESTFEKLRLPSRKVDALDHFQKCFLIFKLPRQRVDSDQSSWQEGKTWKAIRVDLVLCPYERRAFALLGWTGSRQFERDLRRYATHERKMILDNHALYDKTKRIFLKAESEEEIFAHLGLDYIEPWERNA

SEQ ID NO: 12443 - protein, 311 aa, Homo sapiens
MKPIIRKPLELWTLGEPLHKSLLYPKTRLSSPQIMLCNFASMARTTMSTHIASCAMGRIRHSGRNWPRTFRQVASNEILRDPCFHPGYKKVVNVSDLYKTPCTKRFEMTLPFQQFEIQGIGNYQQCHQSILELFNTSYCPYSQCAFNGIFLPPLQGDFGAFSAFYFVMKFLNLTSEKVSQEKVTEMMKKFCAQPWEEIKTSYAGVKEKYLSEYCFSGTYILSLLLQGYHFTADSWEHIHFIGKIQGSDAGWTLGYMLNLTNMIPAEQPLSTPLSHSTYVFLMVLFSLVLFTVAIIGLLIFHKPSYFWKDMV

SEQ ID NO: 12444 - protein, 191 aa, Homo sapiens
MERAREVIPRSQHQETPVYLGATAGMRLLRMESEELADRVLDVVERSLSNYPFDFQGARIITGQEEGAYGWITINYLLGKFSQKTRWFSIVPYETNNQETFGALDLGGASTQVTFVPQNQTIESPDNALQFRLYGKDYNVYTHSFLCYGKDQALWQKLAKDIQASITQSRPAPFTSAPPAPTSCCFLFQIQ

SEQ ID NO: 12445 - protein, 522 aa, Homo sapiens
MGREELFLTFSFSSGFQESNVKTFCSKNILAILGFSSIIAVIALLAVGLTQNKALPENVKYGIVLDAGSSHTSLYIYKWPAEKENDTGVVHQVEECRVKGPGISKFVQKVNEIGIYLTDCMERAREVIPRSQHQETPVYLGATAGMRLLRMESEELADRVLDVVERSLSNYPFDFQGARIITGQEEGAYGWITINYLLGKFSQKTRWFSIVPYETNNQETFGALDLGGASTQVTFVPQNQTIESPDNALQFRLYGKDYNVYTHSFLCYGKDQALWQKLAKDIQVASNEILRDPCFHPGYKKVVNVSDLYKTPCTKRFEMTLPFQQFEIQGIGNYQQCHQSILELFNTSYCPYSQCAFNGIFLPPLQGDFGAFSAFYFVMKFLNLTSEKVSQEKVTEMMKKFCAQPWEEIKTSYAGVKEKYLSEYCFSGTYILSLLLQGYHFTADSWEHIHFIGKIQGSDAGWTLGYMLNLTNMIPAEQPLSTPLSHSTYVFLMVLFSLVLFTVAIIGLLIFHKPSYFWKDMV

SEQ ID NO: 12446 - protein, 402 aa, Homo sapiens
MERAREVIPRSQHQETPVYLGATAGMRLLRMESEELADRVLDVVERSLSNYPFDFQGARIITGQEEGAYGWITINYLLGKFSQKTRWFSIVPYETNNQETFGALDLGGASTQVTFVPQNQTIESPDNALQFRLYGKDYNVYTHSFLCYGKDQALWQKLAKDIQVASNEILRDPCFHPGYKKVVNVSDLYKTPCTKRFEMTLPFQQFEIQGIGNYQQCHQSILELFNTSYCPYSQCAFNGIFLPPLQGDFGAFSAFYFVMKFLNLTSEKVSQEKVTEMMKKFCAQPWEEIKTSYAGVKEKYLSEYCFSGTYILSLLLQGYHFTADSWEHIHFIGKIQGSDAGWTLGYMLNLTNMIPAEQPLSTPLSHSTYVFLMVLFSLVLFTVAIIGLLIFHKPSYFWKDMV

SEQ ID NO: 12447 - protein, 510 aa, Homo sapiens
MEDTKESNVKTFCSKNILAILGFSSIIAVIALLAVGLTQNKALPENVKYGIVLDAGSSHTSLYIYKWPAEKENDTGVVHQVEECRVKGPGISKFVQKVNEIGIYLTDCMERAREVIPRSQHQETPVYLGATAGMRLLRMESEELADRVLDVVERSLSNYPFDFQGARIITGQEEGAYGWITINYLLGKFSQKTRWFSIVPYETNNQETFGALDLGGASTQVTFVPQNQTIESPDNALQFRLYGKDYNVYTHSFLCYGKDQALWQKLAKDIQVASNEILRDPCFHPGYKKVVNVSDLYKTPCTKRFEMTLPFQQFEIQGIGNYQQCHQSILELFNTSYCPYSQCAFNGIFLPPLQGDFGAFSAFYFVMKFLNLTSEKVSQEKVTEMMKKFCAQPWEEIKTSYAGVKEKYLSEYCFSGTYILSLLLQGYHFTADSWEHIHFIGKIQGSDAGWTLGYMLNLTNMIPAEQPLSTPLSHSTYVFLMVLFSLVLFTVAIIGLLIFHKPSYFWKDMV

SEQ ID NO: 12448 - protein, 155 aa, Homo sapiens
MTKDMFPGPYPRTPEERAAAAKKYNMRVEDYEPYPDDGMGYGDYPKLPDRSQHERDPWYSWDQPGLRLNWGEPMHWHLDMYNRNRVDTSPTPVSWHVMCMQLFGFLAFMIFMCWVGDVYPVYQPVGPKQYPYNNLYLERGGDPSKEPERVVHYEI

SEQ ID NO: 12449 - protein, 186 aa, Homo sapiens
MAVARAGVLGVQWLQRASRNVMPLGARTASHMTKDMFPGPYPRTPEERAAAAKKYNMRVEDYEPYPDDGMGYGDYPKLPDRSQHERDPWYSWDQPGLRLNWGEPMHWHLDMYNRNRVDTSPTPVSWHVMCMQLFGFLAFMIFMCWVGDVYPVYQPVGPKQYPYNNLYLERGGDPSKEPERVVHYEI

SEQ ID NO: 12450 - protein, 313 aa, Homo sapiens
MEPGPDGPAASGPAAIREGWFRETCSLWPGQALSLQVEQLLHHRRSRYQDILVFRSKTYGNVLVLDGVIQCTERDEFSYQEMIANLPLCSHPNPRKVLIIGGGDGGVLREVVKHPSVESVVQCEIDEDVIQVSKKFLPGMAIGYSSSKLTLHVGDGFEFMKQNQDAFDVIITDSSDPMGPAESLFKESYYQLMKTALKEDGVLCCQGECQWLHLDLIKEMRQFCQSLFPVVAYAYCTIPTYPSGQIGFMLCSKNPSTNFQEPVQPLTQQQVAQMQLKYYNSDVHRAAFVLPEFARKSALLTGLMSLQALNDVS

SEQ ID NO: 12451 - protein, 302 aa, Homo sapiens
MEPGPDGPAASGPAAIREGWFRETCSLWPGQALSLQVEQLLHHRRSRYQDILVFRSKTYGNVLVLDGVIQCTERDEFSYQEMIANLPLCSHPNPRKVLIIGGGDGGVLREVVKHPSVESVVQCEIDEDVIQVSKKFLPGMAIGYSSSKLTLHVGDGFEFMKQNQDAFDVIITDSSDPMGPAESLFKESYYQLMKTALKEDGVLCCQGECQWLHLDLIKEMRQFCQSLFPVVAYAYCTIPTYPSGQIGFMLCSKNPSTNFQEPVQPLTQQQVAQMQLKYYNSDVHRAAFVLPEFARKALNDVS

SEQ ID NO: 12452 - protein, 338 aa, Homo sapiens
MAASQVLGEKINILSGETVKAGDRDPLGNDCPEQDRLPQRSWRQKCASYVLALRPWSFSASLTPVALGSALAYRSHGVLDPRLLVGCAVAVLAVHGAGNLVNTYYDFSKGIDHKKSDDRTLVDRILEPQDVVRFGVFLYTLGCVCAACLYYLSPLKLEHLALIYFGGLSGSFLYTGGIGFKYVALGDLIILITFGPLAVMFAYAIQVGSLAIFPLVYAIPLALSTEAILHSNNTRDMESDREAGIVTLAILIGPTFSYILYNTLLFLPYLVFSILATHCTISLALPLLTIPMAFSLERQFRSQAFNKLPQRTAKLNLLLGLFYVFGIILAPAGSLPKI

SEQ ID NO: 12453 - protein, 2549 aa, Homo sapiens
MLGTGPAAATTAATTSSNVSVLQQFASGLKSRNEETRAKAAKELQHYVTMELREMSQEESTRFYDQLNHHIFELVSSSDANERKGGILAIASLIGVEGGNATRIGRFANYLRNLLPSNDPVVMEMASKAIGRLAMAGDTFTAEYVEFEVKRALEWLGADRNEGRRHAAVLVLRELAISVPTFFFQQVQPFFDNIFVAVWDPKQAIREGAVAALRACLILTTQREPKEMQKPQWYRHTFEEAEKGFDETLAKEKGMNRDDRIHGALLILNELVRISSMEGERLREEMEEITQQQLVHDKYCKDLMGFGTKPRHITPFTSFQAVQPQQSNALVGLLGYSSHQGLMGFGTSPSPAKSTLVESRCCRDLMEEKFDQVCQWVLKCRNSKNSLIQMTILNLLPRLAAFRPSAFTDTQYLQDTMNHVLSCVKKEKERTAAFQALGLLSVAVRSEFKVYLPRVLDIIRAALPPKDFAHKRQKAMQVDATVFTCISMLARAMGPGIQQDIKELLEPMLAVGLSPALTAVLYDLSRQIPQLKKDIQDGLLKMLSLVLMHKPLRHPGMPKGLAHQLASPGLTTLPEASDVGSITLALRTLGSFEFEGHSLTQFVRHCADHFLNSEHKEIRMEAARTCSRLLTPSIHLISGHAHVVSQTAVQVVADVLSKLLVVGITDPDPDIRYCVLASLDERFDAHLAQAENLQALFVALNDQVFEIRELAICTVGRLSSMNPAFVMPFLRKMLIQILTELEHSGIGRIKEQSARMLGHLVSNAPRLIRPYMEPILKALILKLKDPDPDPNPGVINNVLATIGELAQVSGLEMRKWVDELFIIIMDMLQDSSLLAKRQVALWTLGQLVASTGYVVEPYRKYPTLLEVLLNFLKTEQNQGTRREAIRVLGLLGALDPYKHKVNIGMIDQSRDASAVSLSESKSSQDSSDYSTSEMLVNMGNLPLDEFYPAVSMVALMRIFRDQSLSHHHTMVVQAITFIFKSLGLKCVQFLPQVMPTFLNVIRVCDGAIREFLFQQLGMLVSFVKSHIRPYMDEIVTLMREFWVMNTSIQSTIILLIEQIVVALGGEFKLYLPQLIPHMLRVFMHDNSPGRIVSIKLLAAIQLFGANLDDYLHLLLPPIVKLFDAPEAPLPSRKAALETVDRLTESLDFTDYASRIIHPIVRTLDQSPELRSTAMDTLSSLVFQLGKKYQIFIPMVNKVLVRHRINHQRYDVLICRIVKGYTLADEEEDPLIYQHRMLRSGQGDALASGPVETGPMKKLHVSTINLQKAWGAARRVSKDDWLEWLRRLSLELLKDSSSPSLRSCWALAQAYNPMARDLFNAAFVSCWSELNEDQQDELIRSIELALTSQDIAEVTQTLLNLAEFMEHSDKGPLPLRDDNGIVLLGERAAKCRAYAKALHYKELEFQKGPTPAILESLISINNKLQQPEAAAGVLEYAMKHFGELEIQATWYEKLHEWEDALVAYDKKMDTNKDDPELMLGRMRCLEALGEWGQLHQQCCEKWTLVNDETQAKMARMAAAAAWGLGQWDSMEEYTCMIPRDTHDGAFYRAVLALHQDLFSLAQQCIDKARDLLDAELTAMAGESYSRAYGAMVSCHMLSELEEVIQYKLVPERREIIRQIWWERLQGCQRIVEDWQKILMVRSLVVSPHEDMRTWLKYASLCGKSGRLALAHKTLVLLLGVDPSRQLDHPLPTVHPQVTYAYMKNMWKSARKIDAFQHMQHFVQTMQQQAQHAIATEDQQHKQELHKLMARCFLKLGEWQLNLQGINESTIPKVLQYYSAATEHDRSWYKAWHAWAVMNFEAVLHYKHQNQARDEKKKLRHASGANITNATTAATTAATATTTASTEGSNSESEAESTENSPTPSPLQKKVTEDLSKTLLMYTVPAVQGFFRSISLSRGNNLQDTLRVLTLWFDYGHWPDVNEALVEGVKAIQIDTWLQVIPQLIARIDTPRPLVGRLIHQLLTDIGRYHPQALIYPLTVASKSTTTARHNAANKILKNMCEHSNTLVQQAMMVSEELIRVAILWHEMWHEGLEEASRLYFGERNVKGMFEVLEPLHAMMERGPQTLKETSFNQAYGRDLMEAQEWCRKYMKSGNVKDLTQAWDLYYHVFRRISKQLPQLTSLELQYVSPKLLMCRDLELAVPGTYDPNQPIIRIQSIAPSLQVITSKQRPRKLTLMGSNGHEFVFLLKGHEDLRQDERVMQLFGLVNTLLANDPTSLRKNLSIQRYAVIPLSTNSGLIGWVPHCDTLHALIRDYREKKKILLNIEHRIMLRMAPDYDHLTLMQKVEVFEHAVNNTAGDDLAKLLWLKSPSSEVWFDRRTNYTRSLAVMSMVGYILGLGDRHPSNLMLDRLSGKILHIDFGDCFEVAMTREKFPEKIPFRLTRMLTNAMEVTGLDGNYRITCHTVMEVLREHKDSVMAVLEAFVYDPLLNWRLMDTNTKGNKRSRTRTDSYSAGQSVEILDGVELGEPAHKKTGTTVPESIHSFIGDGLVKPEALNKKAIQIINRVRDKLTGRDFSHDDTLDVPTQVELLIKQATSHENLCQCYIGWCPFW

SEQ ID NO: 12454 - protein, 1283 aa, Homo sapiens
MLGTGPAAATTAATTSSNVSVLQQFASGLKSRNEETRAKAAKELQHYVTMELREMSQEESTRFYDQLNHHIFELVSSSDANERKGGILAIASLIGVEGGNATRIGRFANYLRNLLPSNDPVVMEMASKAIGRLAMAGDTFTAEYVEFEVKRALEWLGADRNEGRRHAAVLVLRELAISVPTFFFQQVQPFFDNIFVAVWDPKQAIREGAVAALRACLILTTQREPKEMQKPQWYRHTFEEAEKGFDETLAKEKGMNRDDRIHGALLILNELVRISSMEGERLREEMEEITQQQLVHDKYCKDLMGFGTKPRHITPFTSFQAVQPQQSNALVGLLGYSSHQGLMGFGTSPSPAKSTLVESRCCRDLMEEKFDQVCQWVLKCRNSKNSLIQMTILNLLPRLAAFRPSAFTDTQYLQDTMNHVLSCVKKEKERTAAFQALGLLSVAVRSEFKVYLPRVLDIIRAALPPKDFAHKRQKAMQVDATVFTCISMLARAMGPGIQQDIKELLEPMLAVGLSPALTAVLYDLSRQIPQLKKDIQDGLLKMLSLVLMHKPLRHPGMPKGLAHQLASPGLTTLPEASDVGSITLALRTLGSFEFEGHSLTQFVRHCADHFLNSEHKEIRMEAARTCSRLLTPSIHLISGHAHVVSQTAVQVVADVLSKLLVVGITDPDPDIRYCVLASLDERFDAHLAQAENLQALFVALNDQVFEIRELAICTVGRLSSMNPAFVMPFLRKMLIQILTELEHSGIGRIKEQSARMLGHLVSNAPRLIRPYMEPILKALILKLKDPDPDPNPGVINNVLATIGELAQVSGLEMRKWVDELFIIIMDMLQDSSLLAKRQVALWTLGQLVASTGYVVEPYRKYPTLLEVLLNFLKTEQNQGTRREAIRVLGLLGALDPYKHKVNIGMIDQSRDASAVSLSESKSSQDSSDYSTSEMLVNMGNLPLDEFYPAVSMVALMRIFRDQSLSHHHTMVVQAITFIFKSLGLKCVQFLPQVMPTFLNVIRVCDGAIREFLFQQLGMLVSFVKSHIRPYMDEIVTLMREFWVMNTSIQSTIILLIEQIVVALGGEFKLYLPQLIPHMLRVFMHDNSPGRIVSIKLLAAIQLFGANLDDYLHLLLPPIVKLFDAPEAPLPSRKAALETVDRLTESLDFTDYASRIIHPIVRTLDQSPELRSTAMDTLSSLVFQLGKKYQIFIPMVNKVLVRHRINHQRYDVLICRIVKGYTLADEEEDPLIYQHRMLRSGQGDALASGPVETGPMKKLHVSTINLQKPGALPGGSPKMTGWNG

SEQ ID NO: 12455 - protein, 2500 aa, Homo sapiens
MLGTGPAAATTAATTSSNVSVLQQFASGLKSRNEETRAKAAKELQHYVTMELREMSQEESTRFYDQLNHHIFELVSSSDANERKGGILAIASLIGVEGGNATRIGRFANYLRNLLPSNDPVVMEMASKAIGRLAMAGDTFTAEYVEFEVKRALEWLGADRNEGRRHAAVLVLRELAISVPTFFFQQVQPFFDNIFVAVWDPKQAIREGAVAALRACLILTTQREPKEMQKPQWYRHTFEEAEKGFDETLAKEKGMNRDDRIHGALLILNELVRISSMEGERLREEMEEITQQQLVHDKYCKDLMGFGTKPRHITPFTSFQAVQPQQSNALVGLLGYSSHQGLMGFGTSPSPAKSTLVESRCCRDLMEEKFDQVCQWVLKCRNSKNSLIQMTILNLLPRLAAFRPSAFTDTQYLQDTMNHVLSCVKKEKERTAAFQALGLLSVAVRSEFKVYLPRVLDIIRAALPPKDFAHKRQKAMQVDATVFTCISMLARAMGPGIQQDIKELLEPMLAVGLSPALTAVLYDLSRQIPQLKKDIQDGLLKMLSLVLMHKPLRHPGMPKGLAHQLASPGLTTLPEASDVGSITLALRTLGSFEFEGHSLTQFVRHCADHFLNSEHKEIRMEAARTCSRLLTPSIHLISGHAHVVSQTAVQVVADVLSKLLVVGITDPDPDIRYCVLASLDERFDAHLAQAENLQALFVALNDQVFEIRELAICTVGRLSSMNPAFVMPFLRKMLIQILTELEHSGIGRIKEQSARMLGHLVSNAPRLIRPYMEPILKALILKLKDPDPDPNPGVINNVLATIGELAQVSGLEMRKWVDELFIIIMDMLQDSSLLAKRQVALWTLGQLVASTGYVVEPYRKYPTLLEVLLNFLKTEQNQGTRREAIRVLGLLGALDPYKHKVNIGMIDQSRDASAVSLSESKSSQDSSDYSTSEMLVNMGNLPLDEFYPAVSMVALMRIFRDQSLSHHHTMVVQAITFIFKSLGLKCVQFLPQVMPTFLNVIRVCDGAIREFLFQQLGMLVSFVKSHIRPYMDEIVTLMREFWVMNTSIQSTIILLIEQIVVALGGEFKLYLPQLIPHMLRVFMHDNSPGRIVSIKLLAAIQLFGANLDDYLHLLLPPIVKLFDAPEAPLPSRKAALETVDRLTESLDFTDYASRIIHPIVRTLDQSPELRSTAMDTLSSLVFQLGKKYQIFIPMVNKVLVRHRINHQRYDVLICRIVKAWGAARRVSKDDWLEWLRRLSLELLKDSSSPSLRSCWALAQAYNPMARDLFNAAFVSCWSELNEDQQDELIRSIELALTSQDIAEVTQTLLNLAEFMEHSDKGPLPLRDDNGIVLLGERAAKCRAYAKALHYKELEFQKGPTPAILESLISINNKLQQPEAAAGVLEYAMKHFGELEIQATWYEKLHEWEDALVAYDKKMDTNKDDPELMLGRMRCLEALGEWGQLHQQCCEKWTLVNDETQAKMARMAAAAAWGLGQWDSMEEYTCMIPRDTHDGAFYRAVLALHQDLFSLAQQCIDKARDLLDAELTAMAGESYSRAYGAMVSCHMLSELEEVIQYKLVPERREIIRQIWWERLQGCQRIVEDWQKILMVRSLVVSPHEDMRTWLKYASLCGKSGRLALAHKTLVLLLGVDPSRQLDHPLPTVHPQVTYAYMKNMWKSARKIDAFQHMQHFVQTMQQQAQHAIATEDQQHKQELHKLMARCFLKLGEWQLNLQGINESTIPKVLQYYSAATEHDRSWYKAWHAWAVMNFEAVLHYKHQNQARDEKKKLRHASGANITNATTAATTAATATTTASTEGSNSESEAESTENSPTPSPLQKKVTEDLSKTLLMYTVPAVQGFFRSISLSRGNNLQDTLRVLTLWFDYGHWPDVNEALVEGVKAIQIDTWLQVIPQLIARIDTPRPLVGRLIHQLLTDIGRYHPQALIYPLTVASKSTTTARHNAANKILKNMCEHSNTLVQQAMMVSEELIRVAILWHEMWHEGLEEASRLYFGERNVKGMFEVLEPLHAMMERGPQTLKETSFNQAYGRDLMEAQEWCRKYMKSGNVKDLTQAWDLYYHVFRRISKQLPQLTSLELQYVSPKLLMCRDLELAVPGTYDPNQPIIRIQSIAPSLQVITSKQRPRKLTLMGSNGHEFVFLLKGHEDLRQDERVMQLFGLVNTLLANDPTSLRKNLSIQRYAVIPLSTNSGLIGWVPHCDTLHALIRDYREKKKILLNIEHRIMLRMAPDYDHLTLMQKVEVFEHAVNNTAGDDLAKLLWLKSPSSEVWFDRRTNYTRSLAVMSMVGYILGLGDRHPSNLMLDRLSGKILHIDFGDCFEVAMTREKFPEKIPFRLTRMLTNAMEVTGLDGNYRITCHTVMEVLREHKDSVMAVLEAFVYDPLLNWRLMDTNTKGNKRSRTRTDSYSAGQSVEILDGVELGEPAHKKTGTTVPESIHSFIGDGLVKPEALNKKAIQIINRVRDKLTGRDFSHDDTLDVPTQVELLIKQATSHENLCQCYIGWCPFW

SEQ ID NO: 12456 - protein, 2427 aa, Homo sapiens
MEMASKAIGRLAMAGDTFTAEYVEFEVKRALEWLGADRNEGRRHAAVLVLRELAISVPTFFFQQVQPFFDNIFVAVWDPKQAIREGAVAALRACLILTTQREPKEMQKPQWYRHTFEEAEKGFDETLAKEKGMNRDDRIHGALLILNELVRISSMEGERLREEMEEITQQQLVHDKYCKDLMGFGTKPRHITPFTSFQAVQPQQSNALVGLLGYSSHQGLMGFGTSPSPAKSTLVESRCCRDLMEEKFDQVCQWVLKCRNSKNSLIQMTILNLLPRLAAFRPSAFTDTQYLQDTMNHVLSCVKKEKERTAAFQALGLLSVAVRSEFKVYLPRVLDIIRAALPPKDFAHKRQKAMQVDATVFTCISMLARAMGPGIQQDIKELLEPMLAVGLSPALTAVLYDLSRQIPQLKKDIQDGLLKMLSLVLMHKPLRHPGMPKGLAHQLASPGLTTLPEASDVGSITLALRTLGSFEFEGHSLTQFVRHCADHFLNSEHKEIRMEAARTCSRLLTPSIHLISGHAHVVSQTAVQVVADVLSKLLVVGITDPDPDIRYCVLASLDERFDAHLAQAENLQALFVALNDQVFEIRELAICTVGRLSSMNPAFVMPFLRKMLIQILTELEHSGIGRIKEQSARMLGHLVSNAPRLIRPYMEPILKALILKLKDPDPDPNPGVINNVLATIGELAQVSGLEMRKWVDELFIIIMDMLQDSSLLAKRQVALWTLGQLVASTGYVVEPYRKYPTLLEVLLNFLKTEQNQGTRREAIRVLGLLGALDPYKHKVNIGMIDQSRDASAVSLSESKSSQDSSDYSTSEMLVNMGNLPLDEFYPAVSMVALMRIFRDQSLSHHHTMVVQAITFIFKSLGLKCVQFLPQVMPTFLNVIRVCDGAIREFLFQQLGMLVSFVKSHIRPYMDEIVTLMREFWVMNTSIQSTIILLIEQIVVALGGEFKLYLPQLIPHMLRVFMHDNSPGRIVSIKLLAAIQLFGANLDDYLHLLLPPIVKLFDAPEAPLPSRKAALETVDRLTESLDFTDYASRIIHPIVRTLDQSPELRSTAMDTLSSLVFQLGKKYQIFIPMVNKVLVRHRINHQRYDVLICRIVKGYTLADEEEDPLIYQHRMLRSGQGDALASGPVETGPMKKLHVSTINLQKAWGAARRVSKDDWLEWLRRLSLELLKDSSSPSLRSCWALAQAYNPMARDLFNAAFVSCWSELNEDQQDELIRSIELALTSQDIAEVTQTLLNLAEFMEHSDKGPLPLRDDNGIVLLGERAAKCRAYAKALHYKELEFQKGPTPAILESLISINNKLQQPEAAAGVLEYAMKHFGELEIQATWYEKLHEWEDALVAYDKKMDTNKDDPELMLGRMRCLEALGEWGQLHQQCCEKWTLVNDETQAKMARMAAAAAWGLGQWDSMEEYTCMIPRDTHDGAFYRAVLALHQDLFSLAQQCIDKARDLLDAELTAMAGESYSRAYGAMVSCHMLSELEEVIQYKLVPERREIIRQIWWERLQGCQRIVEDWQKILMVRSLVVSPHEDMRTWLKYASLCGKSGRLALAHKTLVLLLGVDPSRQLDHPLPTVHPQVTYAYMKNMWKSARKIDAFQHMQHFVQTMQQQAQHAIATEDQQHKQELHKLMARCFLKLGEWQLNLQGINESTIPKVLQYYSAATEHDRSWYKAWHAWAVMNFEAVLHYKHQNQARDEKKKLRHASGANITNATTAATTAATATTTASTEGSNSESEAESTENSPTPSPLQKKVTEDLSKTLLMYTVPAVQGFFRSISLSRGNNLQDTLRVLTLWFDYGHWPDVNEALVEGVKAIQIDTWLQVIPQLIARIDTPRPLVGRLIHQLLTDIGRYHPQALIYPLTVASKSTTTARHNAANKILKNMCEHSNTLVQQAMMVSEELIRVAILWHEMWHEGLEEASRLYFGERNVKGMFEVLEPLHAMMERGPQTLKETSFNQAYGRDLMEAQEWCRKYMKSGNVKDLTQAWDLYYHVFRRISKQLPQLTSLELQYVSPKLLMCRDLELAVPGTYDPNQPIIRIQSIAPSLQVITSKQRPRKLTLMGSNGHEFVFLLKGHEDLRQDERVMQLFGLVNTLLANDPTSLRKNLSIQRYAVIPLSTNSGLIGWVPHCDTLHALIRDYREKKKILLNIEHRIMLRMAPDYDHLTLMQKVEVFEHAVNNTAGDDLAKLLWLKSPSSEVWFDRRTNYTRSLAVMSMVGYILGLGDRHPSNLMLDRLSGKILHIDFGDCFEVAMTREKFPEKIPFRLTRMLTNAMEVTGLDGNYRITCHTVMEVLREHKDSVMAVLEAFVYDPLLNWRLMDTNTKGNKRSRTRTDSYSAGQSVEILDGVELGEPAHKKTGTTVPESIHSFIGDGLVKPEALNKKAIQIINRVRDKLTGRDFSHDDTLDVPTQVELLIKQATSHENLCQCYIGWCPFW

SEQ ID NO: 12457 - protein, 141 aa, Homo sapiens [sequence omitted]

SEQ ID NO: 12458 - protein, 356 aa, Homo sapiens
MSPCGRARRQTSRGAMAVLAWKFPRTRLPMGASALCVVVLCWLYIFPVYRLPNEKEIVQGVLQQGTAWRRNQTAARAFRKQMEDCCDPAHLFAMTKMNSPMGKSMWYDGEFLYSFTIDNSTYSLFPQATPFQLPLKKCAVVGNGGILKKSGCGRQIDEANFVMRCNLPPLSSEYTKDVGSKSQLVTANPSIIRQRFQNLLWSRKTFVDNMKIYNHSYIYMPAFSMKTGTEPSLRVYYTLSDVGANQTVLFANPNFLRSIGKFWKSRGIHAKRLSTGLFLVSAALGLCEEVAIYGFWPFSVNMHEQPISHHYYDNVLPFSGFHAMPEEFLQLWYLHKIGALRMQLDPCEDTSLQPTS

SEQ ID NO: 12459 - protein, 334 aa, Homo sapiens
MATLKEKLIAPVAEEEATVPNNKITVVGVGQVGMACAISILGKSLADELALVDVLEDKLKGEMMDLQHGSLFLQTPKIVADKDYSVTANSKIVVVTAGVRQQEGESRLNLVQRNVNVFKFIIPQIVKYSPDCIIIVVSNPVDILTYVTWKLSGLPKHRVIGSGCNLDSARFRYLMAEKLGIHPSSCHGWILGEHGDSSVAVWSGVNVAGVSLQELNPEMGTDNDSENWKEVHKMVVESAYEVIKLKGYTNWAIGLSVADLIESMLKNLSRIHPVSTMVKGMYGIENEVFLSLPCILNARGLTSVINQKLKDDEVAQLKKSADTLWDIQKDLKDL

SEQ ID NO: 12460 - protein, 334 aa, Homo sapiens; identical to SEQ ID NO: 12459

SEQ ID NO: 12461 - protein, 434 aa, Homo sapiens
MDSVEKGAATSVSNPRGRPSRGRPPKLQRNSRGGQGRGVEKPPHLAALILARGGSKGIPLKNIKHLAGVPLIGWVLRAALDSGAFQSVWVSTDHDEIENVAKQFGAQVHRRSSEVSKDSSTSLDAIIEFLNYHNEVDIVGNIQATSPCLHPTDLQKVAEMIREEGYDSVFSVVRRHQFRWSEIQKGVREVTEPLNLNPAKRPRRQDWDGELYENGSFYFAKRHLIEMGYLQGGKMAYYEMRAEHSVDIDVDIDWPIAEQRVLRYGYFGKEKLKEIKLLVCNIDGCLTNGHIYVSGDQKEIISYDVKDAIGISLLKKSGIEVRLISERACSKQTLSSLKLDCKMEVSVSDKLAVVDEWRKEMGLCWKEVAYLGNEVSDEECLKRVGLSGAPADACSTAQKAVGYICKCNGGRGAIREFAEHICLLMEKVNNSCQK

SEQ ID NO: 12462 - protein, 379 aa, Homo sapiens
MDSVEKGAATSVSNPRGRPSRGRPPKLQRNSRGGQGRGVEKPPHLAALILARGGSKGIPLKNIKHLAGVPLIGWVLRAALDSGAFQSVWVSTDHDEIENVAKQFGAQVHRRSSEVSKDSSTSLDAIIEFLNYHNEVDIVGNIQATSPCLHPTDLQKVAEMIREEGYDSVFSVVRRHQFRWSEIQKGVREVTEPLNLNPAKRPRRQDWDGELYENGSFYFAKRHLIEMGYLQGGKMAYYEMRAEHSVDIDVDIDWPIAEQRVLRYGYFGKEKLKEIKLLVCNIDGCLTNGHIYVSGDQKEIISYDVKDAIGISLLKKSGIEVRLISERACSKQTLSSLKLDCKMEVSVSDKLAVVDEWRKEMGLCWKEVAYLVFILLDRK

SEQ ID NO: 12463 - protein, 399 aa, Homo sapiens
MSDILRELLCVSEKAANIARACRQQEALFQLLIEEKKEGEKNKKFAVDFKTLADVLVQEVIKQNMENKFPGLEKNIFGEESNEFTNDWGEKITLRLCSTEEETAELLSKVLNGNKVASEALARVVHQDVAFTDPTLDSTEINVPQDILGIWVDPIDSTYQYIKGSADIKSNQGIFPCGLQCVTILIGVYDIQTGVPLMGVINQPFVSRDPNTLRWKGQCYWGLSYMGTNMHSLQLTISRRNGSETHTGNTGSEAAFSPSFSAVISTSEKETIKAALSRVCGDRIFGAAGAGYKSLCVVQGLVDIYIFSEDTTFKWDSCAAHAILRAMGGGIVDLKECLERNPETGLDLPQLVYHVENEGAAGVDRWANKGGLIAYRSRKRLETFLSLLVQNLAPAETHT

SEQ ID NO: 12464 - protein, 399 aa, Homo sapiens; identical to SEQ ID NO: 12463

SEQ ID NO: 12465 - protein, 440 aa, Homo sapiens
MPGMPGRARPGAASLPGQGPRRPARRGEEPSRRHRLTYPRRGDGARRSPARAPDPRRRGSGAGTLWFNAFKRTNTILHHLRMSKHTDAAEEVLLEKKGCAGVITLNRPKFLNALTLNMIRQIYPQLKKWEQDPETFLIIIKGAGGKAFCAGGDIRVISEAEKAKQKIAPVFFREEYMLNNAVGSCQKPYVALIHGITMGGGVGLSVHGQFRVATEKCLFAMPETAIGLFPDVGGGYFLPRLQGKLGYFLALTGFRLKGRDVYRAGIATHFVDSEKLAMLEEDLLALKSPSKENIASVLENYHTESKIDRDKSFILEEHMDKINSCFSANTVEEIIENLQQDGSSFALEQLKVINKMSPTSLKITLRQLMEGSSKTLQEVLTMEYRLSQACMRGHDFHEGVRAVLIDKDQSPKWKPADLKEVTEEDLNNHFKSLGSSDLKF

SEQ ID NO: 12466 - protein, 386 aa, Homo sapiens [sequence omitted]

SEQ ID NO: 12467 - protein, 386 aa, Homo sapiens [sequence omitted]

SEQ ID NO: 12468 - protein, 327 aa, Homo sapiens [sequence omitted]

SEQ ID NO: 12469 - protein, 408 aa, Homo sapiens
MPGMPGRARPGAASLPGQGPRRPARRGEEPSRRHRLTYPRRGDGARRSPARAPDPRRRGSGAGTLWFNAFKRTNTILHHLRMSKHTDAAEEVLLEKWEQDPETFLIIIKGAGGKAFCAGGDIRVISEAEKAKQKIAPVFFREEYMLNNAVGSCQKPYVALIHGITMGGGVGLSVHGQFRVATEKCLFAMPETAIGLFPDVGGGYFLPRLQGKLGYFLALTGFRLKGRDVYRAGIATHFVDSEKLAMLEEDLLALKSPSKENIASVLENYHTESKIDRDKSFILEEHMDKINSCFSANTVEEIIENLQQDGSSFALEQLKVINKMSPTSLKITLRQLMEGSSKTLQEVLTMEYRLSQACMRGHDFHEGVRAVLIDKDQSPKWKPADLKEVTEEDLNNHFKSLGSSDLKF

SEQ ID NO: 12470 - protein, 643 aa, Homo sapiens
MCGICCSVNFSAEHFSQDLKEDLLYNLKQRGPNSSKQLLKSDVNYQCLFSAHVLHLRGVLTTQPVEDERGNVFLWNGEIFSGIKVEAEENDTQILFNYLSSCKNESEILSLFSEVQGPWSFIYYQASSHYLWFGRDFFGRRSLLWHFSNLGKSFCLSSVGTQTSGLANQWQEVPASGLFRIDLKSTVISRCIILQLYPWKYISRENIIEENVNSLSQISADLPAFVSVVANEAKLYLEKPVVPLNMMLPQAALETHCSNISNVPPTREILQVFLTDVHMKEVIQQFIDVLSVAVKKRVLCLPRDENLTANEVLKTCDRKANVAILFSGGIDSMVIATLADRHIPLDEPIDLLNVAFIAEEKTMPTTFNREGNKQKNKCEIPSEEFSKDVAAAAADSPNKHVSVPDRITGRAGLKELQAVSPSRIWNFVEINVSMEELQKLRRTRICHLIRPLDTVLDDSIGCAVWFASRGIGWLVAQEGVKSYQSNAKVVLTGIGADEQLAGYSRHRVRFQSHGLEGLNKEIMMELGRISSRNLGRDDRVIGDHGKEARFPFLDENVVSFLNSLPIWEKANLTLPRGIGEKLLLRLAAVELGLTASALLPKRAMQFGSRIAKMEKINEKASDKCGRLQIMSLENLSIEKETKL

SEQ ID NO: 12471 - protein, 643 aa, Homo sapiens; identical to SEQ ID NO: 12470

SEQ ID NO: 12472 - protein, 643 aa, Homo sapiens; identical to SEQ ID NO: 12470

SEQ ID NO: 12473 - protein, 203 aa, Homo sapiens
MAAAAVSSAKRSLRGELKQRLRAMSAEERLRQSRVLSQKVIAHSEYQKSKRISIFLSMQDEIETEEIIKDIFQRGKICFIPRYRFQSNHMDMVRIESPEEISLLPKTSWNIPQPGEGDVREEALSTGGLDLIFMPGLGFDKHGNRLGRGKGYYDAYLKRCLQHQEVKPYTLALAFKEQICLQVPVNENDMKVDEVLYEDSSTA

SEQ ID NO: 12474 - protein, 520 aa, Homo sapiens
MPLELTQSRVQKIWVPVDHRPSLPRSCGPKLTNSPTVIVMVGLPARGKTYISKKLTRYLNWIGVPTKVFNVGEYRREAVKQYSSYNFFRPDNEEAMKVRKQCALAALRDVKSYLAKEGGQIAVFDATNTTRERRHMILHFAKENDFKAFFIESVCDDPTVVASNIMEVKISSPDYKDCNSAEAMDDFMKRISCYEASYQPLDPDKCDRDLSLIKVIDVGRRFLVNRVQDHIQSRIVYYLMNIHVQPRTIYLCRHGENEHNLQGRIGGDSGLSSRGKKFASALSKFVEEQNLKDLRVWTSQLKSTIQTAEALRLPYEQWKALNEIDAGVCEELTYEEIRDTYPEEYALREQDKYYYRYPTGESYQDLVQRLEPVIMELERQENVLVICHQAVLRCLLAYFLDKSAEEMPYLKCPLHTVLKLTPVAYGCRVESIYLNVESVCTHRERSEDAKKGPNPLMRRNSVTPLASPEPTKKPRINSFEEHVASTSAALPSCLPPEVPTQLPGQNMKGSRSSADSSRKH

SEQ ID NO: 12475 - protein, 520 aa, Homo sapiens; identical to SEQ ID NO: 12474

SEQ ID NO: 12476 - protein, 506 aa, Homo sapiens
MPFRKACGPKLTNSPTVIVMVGLPARGKTYISKKLTRYLNWIGVPTKVFNVGEYRREAVKQYSSYNFFRPDNEEAMKVRKQCALAALRDVKSYLAKEGGQIAVFDATNTTRERRHMILHFAKENDFKAFFIESVCDDPTVVASNIMEVKISSPDYKDCNSAEAMDDFMKRISCYEASYQPLDPDKCDRDLSLIKVIDVGRRFLVNRVQDHIQSRIVYYLMNIHVQPRTIYLCRHGENEHNLQGRIGGDSGLSSRGKKFASALSKFVEEQNLKDLRVWTSQLKSTIQTAEALRLPYEQWKALNEIDAGVCEELTYEEIRDTYPEEYALREQDKYYYRYPTGESYQDLVQRLEPVIMELERQENVLVICHQAVLRCLLAYFLDKSAEEMPYLKCPLHTVLKLTPVAYGCRVESIYLNVESVCTHRERSEDAKKGPNPLMRRNSVTPLASPEPTKKPRINSFEEHVASTSAALPSCLPPEVPTQLPGQPLLGQACLRTVCHIFSKFSPY

SEQ ID NO: 12477 - protein, 182 aa, Homo sapiens
MPFRKACGPKLTNSPTVIVMVGLPARGKTYISKKLTRYLNWIGVPTKVFNVGEYRREAVKQYSSYNFFRPDNEEAMKVRKQCALAALRDVKSYLAKEGGQIAVFDATNTTRERRHMILHFAKENDFKAFFIESVCDDPTVVASNIMVRQPGAPCFCGSVDHKGICSLRKWGTGSSSEAQLSP

SEQ ID NO: 12478 - protein, 503 aa, Homo sapiens
MPFRKACGPKLTNSPTVIVMVGLPARGKTYISKKLTRYLNWIGVPTKVFNVGEYRREAVKQYSSYNFFRPDNEEAMKVRKQCALAALRDVKSYLAKEGGQIAVFDATNTTRERRHMILHFAKENDFKAFFIESVCDDPTVVASNIMEVKISSPDYKDCNSAEAMDDFMKRISCYEASYQPLDPDKCDRDLSLIKVIDVGRRFLVNRVQDHIQSRIVYYLMNIHVQPRTIYLCRHGENEHNLQGRIGGDSGLSSRGKKFASALSKFVEEQNLKDLRVWTSQLKSTIQTAEALRLPYEQWKALNEIDAGVCEELTYEEIRDTYPEEYALREQDKYYYRYPTGESYQDLVQRLEPVIMELERQENVLVICHQAVLRCLLAYFLDKSAEEMPYLKCPLHTVLKLTPVAYGCRVESIYLNVESVCTHRERSEDAKKGPNPLMRRNSVTPLASPEPTKKPRINSFEEHVASTSAALPSCLPPEVPTQLPGQPLLGQACLNWKGVMRNAA

SEQ ID NO: 12479 - protein, 1390 aa, Homo sapiens
MVKEQFRETDVAKKISHICFGMKSPEEMRQQAHIQVVSKNLYSQDNQHAPLLYGVLDHRMGTSEKDRPCETCGKNLADCLGHYGYIDLELPCFHVGYFRAVIGILQMICKTCCHIMLSQEEKKQFLDYLKRPGLTYLQKRGLKKKISDKCRKKNICHHCGAFNGTVKKCGLLKIIHEKYKTNKKVVDPIVSNFLQSFETAIEHNKEVEPLLGRAQENLNPLVVLNLFKRIPAEDVPLLLMNPEAGKPSDLILTRLLVPPLCIRPSVVSDLKSGTNEDDLTMKLTEIIFLNDVIKKHRISGAKTQMIMEDWDFLQLQCALYINSELSGIPLNMAPKKWTRGFVQRLKGKQGRFRGNLSGKRVDFSGRTVISPDPNLRIDEVAVPVHVAKILTFPEKVNKANINFLRKLVQNGPEVHPGANFIQQRHTQMKRFLKYGNREKMAQELKYGDIVERHLIDGDVVLFNRQPSLHKLSIMAHLARVKPHRTFRFNECVCTPYNADFDGDEMNLHLPQTEEAKAEALVLMGTKANLVTPRNGEPLIAAIQDFLTGAYLLTLKDTFFDRAKACQIIASILVGKDEKIKVRLPPPTILKPVTLWTGKQIFSVILRPSDDNPVRANLRTKGKQYCGKGEDLCANDSYVTIQNSELMSGSMDKGTLGSGSKNNIFYILLRDWGQNEAADAMSRLARLAPVYLSNRGFSIGIGDVTPGQGLLKAKYELLNAGYKKCDEYIEALNTGKLQQQPGCTAEETLEALILKELSVIRDHAGSACLRELDKSNSPLTMALCGSKGSFINISQMIACVGQQAISGSRVPDGFENRSLPHFEKHSKLPAAKGFVANSFYSGLTPTEFFFHTMAGREGLVDTAVKTAETGYMQRRLVKSLEDLCSQYDLTVRSSTGDIIQFIYGGDGLDPAAMEGKDEPLEFKRVLDNIKAVFPCPSEPALSKNELILTTESIMKKSEFLCCQDSFLQEIKKFIKGVSEKIKKTRDKYGINDNGTTEPRVLYQLDRITPTQVEKFLETCRDKYMRAQMEPGSAVGALCAQSIGEPGTQMTLKTFHFAGVASMNITLGVPRIKEIINASKAISTPIITAQLDKDDDADYARLVKGRIEKTLLGEISEYIEEVFLPDDCFILVKLSLERIRLLRLEVNAETVRYSICTSKLRVKPGDVAVHGEAVVCVTPRENSKSSMYYVLQFLKEDLPKVVVQGIPEVSRAVIHIDEQSGKEKYKLLVEGDNLRAVMATHGVKGTRTTSNNTYEVEKTLGIEAARTTIINEIQYTMVNHGMSIDRRHVMLLSDLMTYKGEVLGITRFGLAKMKESVLMLASFEKTADHLFDAAYFGQKDSVCGVSECIIMGIPMNIGTGLFKLLHKADRDPNPPKRPLIFDTNEFHIPLVT

SEQ ID NO: 12480 - protein, 559 aa, Homo sapiens
MRKFAYCKVVLATSLIWVLLDMFLLLYFSECNKCDEKKERGLPAGDVLEPVQKPHEGPGEMGKPVVIPKEDQEKMKEMFKINQFNLMASEMIALNRSLPDVRLEGCKTKVYPDNLPTTSVVIVFHNEAWSTLLRTVHSVINRSPRHMIEEIVLVDDASERDFLKRPLESYVKKLKVPVHVIRMEQRSGLIRARLKGAAVSKGQVITFLDAHCECTVGWLEPLLARIKHDRRTVVCPIIDVISDDTFEYMAGSDMTYGGFNWKLNFRWYPVPQREMDRRKGDRTLPVRTPTMAGGLFSIDRDYFQEIGTYDAGMDIWGGENLEISFRIWQCGGTLEIVTCSHVGHVFRKATPYTFPGGTGQIINKNNRRLAEVWMDEFKNFFYIISPGVTKVDYGDISSRVGLRHKLQCKPFSWYLENIYPDSQIPRHYFSLGEIRNVETNQCLDNMARKENEKVGIFNCHGMGGNQVFSYTANKEIRTDDLCLDVSKLNGPVTMLKCHHLKGNQLWEYDPVKLTLQHVNSNQCLDKATEEDSQVPSIRDCNGSRSQQWLLRNVTLPEIF

SEQ ID NO: 12481 - protein, 559 aa, Homo sapiens; identical to SEQ ID NO: 12480

SEQ ID NO: 12482 - protein, 559 aa, Homo sapiens; identical to SEQ ID NO: 12480

SEQ ID NO: 12483 - protein, 559 aa, Homo sapiens; identical to SEQ ID NO: 12480

SEQ ID NO: 12484 - protein, 919 aa, Homo sapiens [sequence omitted]

SEQ ID NO: 12485 - protein, 49 aa, Homo sapiens
MGIKFLEVIKPFCAVLPEIQKPERKIQFREKVLWTAITLFIFLVCCQIE

SEQ ID NO: 12486 - protein, 418 aa, Homo sapiens
MGIKFLEVIKPFCAVLPEIQKPERKIQFREKVLWTAITLFIFLVCCQIPLFGIMSSDSADPFYWMRVILASNRGTLMELGISPIVTSGLIMQLLAGAKIIEVGDTPKDRALFNGAQKLFGMIITIGQAIVYVMTGMYGDPAEMGAGICLLIIIQLFVAGLIVLLLDELLQKGYGLGSGISLFIATNICETIVWKAFSPTTINTGRGTEFEGAVIALFHLLATRTDKVRALREAFYRQNLPNLMNLIATVFVFAVVIYFQGFRVDLPIKSARYRGQYSSYPIKLFYTSNIPIILQSALVSNLYVISQMLSVRFSGNFLVNLLGQWADVSGGGPARSYPVGGLCYYLSPPESMGAIFEDPVHVVVYIIFMLGSCAFFSKTWIEVSGSSAKDVAKQLKEQQMVMRGHRDTSMVHELNSARA

SEQ ID NO: 12487 - protein, 303 aa, Homo sapiens
MAAVAVLRAFGASGPMCLRRGPWAQLPARFCSRDPAGAGRRESEPRPTSARQLDGIRNIVLSNPKKRNTLSLAMLKSLQSDILHDADSNDLKVIIISAEGPVFSSGHDLKELTEEQGRDYHAEVFQTCSKVMMHIRNHPVPVIAMVNGLATAAGCQLVASCDIAVASDKSSFATPGVNVGLFCSTPGVALARAVPRKVALEMLFTGEPISAQEALLHGLLSKVVPEAELQEETMRIARKIASLSRPVVSLGKATFYKQLPQDLGTAYYLTSQAMVDNLALRDGQEGITAFLQKRKPVWSHEPV

SEQ ID NO: 12488 - protein, 356 aa, Homo sapiens [sequence omitted]

SEQ ID NO: 12489 - protein, 527 aa, Homo sapiens
MRPRPRSAPGKPRRRSRARLRSSRTPSLHEEISDFYEYMSPRPEEEKMRMEVVNRIESVIKELWPSADVQIFGSFKTGLYLPTSDIDLVVFGKWENLPLWTLEEALRKHKVADEDSVKVLDKATVPIIKLTDSFTEVKVDISFNVQNGVRAADLIKDFTKKYPVLPYLVLVLKQFLLQRDLNEVFTGGIGSYSLFLMAVSFLQLHPREDACIPNTNYGVLLIEFFELYGRHFNYLKTGIRIKDGGSYVAKDEVQKNMLDGYRPSMLYIEDPLQPGNDVGRSSYGAMQVKQAFDYAYVVLSHAVSPIAKYYPNNETESILGRIIRVTDEVATYRDWISKQWGLKNRPEPSCNGNGVTLIVDTQQLDKCNNNLSEENEALGKCRSKTSESLSKHSSNSSSGPVSSSSATQSSSSDVDSDATPCKTPKQLLCRPSTGNRVGSQDVSLESSQAVGKMQSTQTTNTSNSTNKSQHGSARLFRSSSKGFQGTTQTSHGSLMTNKQHQGKSNNQYYHGKKRKHKRDAPLSDLCR

SEQ ID NO: 12490 - protein, 527 aa, Homo sapiens; identical to SEQ ID NO: 12489

SEQ ID NO: 12491 - protein, 175 aa, Homo sapiens
MAVSFLQLHPREDACIPNTNYGVLLIEFFELYGRHFNYLKTGIRIKDGGSYVAKDEVQKNMLDGYRPSMLYIEDPLQPGNDVGRSSYGAMQVKQAFDYAYVVLSHAVSPIAKYYPNNETESILGRIIRVTDEVATYRDWISKQWGLKNRPEPSCNALFKLFIRSSVVLFCHTVQL

SEQ ID NO: 12492 - protein, 371 aa, Homo sapiens [sequence omitted]

SEQ ID NO: 12493 - protein, 880 aa, Homo sapiens
MQDASRDLFTYTVKCIQIRRKLRIEKRQQENLLLSVLPAHISMGMKLAIIERLKEHGDRRCMPDNNFHSLYVKRHQNVSILYADIVGFTQLASDCSPKELVVVLNELFGKFDQIAKANECMRIKILGDCYYCVSGLPVSLPTHARNCVKMGLDMCQAIKQVREATGVDINMRVGIHSGNVLCGVIGLRKWQYDVWSHDVSLANRMEAAGVPGRVHITEATLKHLDKAYEVEDGHGQQRDPYLKEMNIRTYLVIDPRSQQPPPPSQHLPRPKGDAALKMRASVRMTRYLESWGAARPFAHLNHRESVSSGETHVPNGRRPKSVPQRHRRTPDRSMSPKGRSEDDSYDDEMLSAIEGLSSTRPCCSKSDDFYTFGSIFLEKGFEREYRLAPIPRARHDFACASLIFVCILLVHVLLMPRTAALGVSFGLVACVLGLVLGLCFATKFSRCCPARGTLCTISERVETQPLLRLTLAVLTIGSLLTVAIINLPLMPFQVPELPVGNETGLLAASSKTRALCEPLPYYTCSCVLGFIACSVFLRMSLEPKVVLLTVALVAYLVLFNLSPCWQWDCCGQGLGNLTKPNGTTSGTPSCSWKDLKTMTNFYLVLFYITLLTLSRQIDYYCRLDCLWKKKFKKEHEEFETMENVNRLLLENVLPAHVAAHFIGDKLNEDWYHQSYDCVCVMFASVPDFKVFYTECDVNKEGLECLRLLNEIIADFDELLLKPKFSGVEKIKTIGSTYMAAAGLSVASGHENQELERQHAHIGVMVEFSIALMSKLDGINRHSFNSFRLRVGINHGPVIAGVIGARKPQYDIWGNTVNVASRMESTGELGKIQVTEETCTILQGLGYSCECRGLINVKGKGELRTYFVCTDTAKFQGLGLN

SEQ ID NO: 12494 - protein, 947 aa, Homo sapiens
MPAKGRYFLNEGEEGPDQDALYEKYQLTSQHGPLLLTLLLVAATACVALIIIAFSQGDPSRHQAILGMAFLVLAVFAALSVLMYVECLLRRWLRALALLTWACLVALGYVLVFDAWTKAACAWEQVPFFLFIVFVVYTLLPFSMRGAVAVGAVSTASHLLVLGSLMGGFTTPSVRVGLQLLANAVIFLCGNLTGAFHKHQMQDASRDLFTYTVKCIQIRRKLRIEKRQQENLLLSVLPAHISMGMKLAIIERLKEHGDRRCMPDNNFHSLYVKRHQNVSILYADIVGFTQLASDCSPKELVVVLNELFGKFDQIAKANECMRIKILGDCYYCVSGLPVSLPTHARNCVKMGLDMCQAIKQVREATGVDINMRVGIHSGNVLCGVIGLRKWQYDVWSHDVSLANRMEAAGVPGRVHITEATLKHLDKAPCCSKSDDFYTFGSIFLEKGFEREYRLAPIPRARHDFACASLIFVCILLVHVLLMPRTAALGVSFGLVACVLGLVLGLCFATKFSRCCPARGTLCTISERVETQPLLRLTLAVLTIGSLLTVAIINLPLMPFQVPELPVGNETGLLAASSKTRALCEPLPYYTCSCVLGFIACSVFLRMSLEPKVVLLTVALVAYLVLFNLSPCWQWDCCGQGLGNLTKPNGTTSGTPSCSWKDLKTMTNFYLVLFYITLLTLSRQIDYYCRLDCLWKKKFKKEHEEFETMENVNRLLLENVLPAHVAAHFIGDKLNEDWYHQSYDCVCVMFASVPDFKVFYTECDVNKEGLECLRLLNEIIADFDELLLKPKFSGVEKIKTIGSTYMAAAGLSVASGHENQELERQHAHIGVMVEFSIALMSKLDGINRHSFNSFRLRVGINHGPVIAGVIGARKPQYDIWGNTVNVASRMESTGELGKIQVTEETCTILQGLGYSCECRGLINVKGKGELRTYFVCTDTAKFQGLGLN

SEQ ID NO: 12495 - protein, 1080 aa, Homo sapiens
MPAKGRYFLNEGEEGPDQDALYEKYQLTSQHGPLLLTLLLVAATACVALIIIAFSQGDPSRHQAILGMAFLVLAVFAALSVLMYVECLLRRWLRALALLTWACLVALGYVLVFDAWTKAACAWEQVPFFLFIVFVVYTLLPFSMRGAVAVGAVSTASHLLVLGSLMGGFTTPSVRVGLQLLANAVIFLCGNLTGAFHKHQMQDASRDLFTYTVKCIQIRRKLRIEKRQQENLLLSVLPAHISMGMKLAIIERLKEHGDRRCMPDNNFHSLYVKRHQNVSILYADIVGFTQLASDCSPKELVVVLNELFGKFDQIAKANECMRIKILGDCYYCVSGLPVSLPTHARNCVKMGLDMCQAIKQVREATGVDINMRVGIHSGNVLCGVIGLRKWQYDVWSHDVSLANRMEAAGVPGRVHITEATLKHLDKAYEVEDGHGQQRDPYLKEMNIRTYLVIDPRSQQPPPPSQHLPRPKGDAALKMRASVRMTRYLESWGAARPFAHLNHRESVSSGETHVPNGRRPKSVPQRHRRTPDRSMSPKGRSEDDSYDDEMLSAIEGLSSTRPCCSKSDDFYTFGSIFLEKGFEREYRLAPIPRARHDFACASLIFVCILLVHVLLMPRTAALGVSFGLVACVLGLVLGLCFATKFSRCCPARGTLCTISERVETQPLLRLTLAVLTIGSLLTVAIINLPLMPFQVPELPVGNETGLLAASSKTRALCEPLPYYTCSCVLGFIACSVFLRMSLEPKVVLLTVALVAYLVLFNLSPCWQWDCCGQGLGNLTKPNGTTSGTPSCSWKDLKTMTNFYLVLFYITLLTLSRQIDYYCRLDCLWKKKFKKEHEEFETMENVNRLLLENVLPAHVAAHFIGDKLNEDWYHQSYDCVCVMFASVPDFKVFYTECDVNKEGLECLRLLNEIIADFDELLLKPKFSGVEKIKTIGSTYMAAAGLSVASGHENQELERQHAHIGVMVEFSIALMSKLDGINRHSFNSFRLRVGINHGPVIAGVIGARKPQYDIWGNTVNVASRMESTGELGKIQVTEETCTILQGLGYSCECRGLINVKGKGELRTYFVCTDTAKFQGLGLN

SEQ ID NO: 12496 - protein, 860 aa, Homo sapiens
MLLPTPAPAPAPAPSRARAPSPAAPPIRSGPARHRPLALGPGGGAGGAAVPSQARAGRVPIACCAPGRAAPLGLLAMDADDSRAPKGSLRKFLEHLSGAGKAIGVLTSGGDAQGMNAAVRAVVRMGIYVGAKVYFIYEGYQGMVDGGSNIAEADWESVSSILQVGGTIIGSARCQAFRTREGRLKAACNLLQRGITNLCVIGGDGSLTGANLFRKEWSGLLEELARNGQIDKEAVQKYAYLNVVGMVGSIDNDFCGTDMTIGTDSALHRIIEVVDAIMTTAQSHQRTFVLEVMGRHCGYLALVSALACGADWVFLPESPPEEGWEEQMCVKLSENRARKKRLNIIIVAEGAIDTQNKPITSEKIKELVVTQLGYDTRVTILGHVQRGGTPSAFDRILASRMGVEAVIALLEATPDTPACVVSLNGNHAVRLPLMECVQMTQDVQKAMDERRFQDAVRLRGRSFAGNLNTYKRLAIKLPDDQIPKTNCNVAVINVGAPAAGMNAAVRSAVRVGIADGHRMLAIYDGFDGFAKGQIKEIGWTDVGGWTGQGGSILGTKRVLPGKYLEEIATQMRTHSINALLIIGGFEAYLGLLELSAAREKHEEFCVPMVMVPATVSNNVPGSDFSIGADTALNTITDTCDRIKQSASGTKRRVFIIETMGGYCGYLANMGGLAAGADAAYIFEEPFDIRDLQSNVEHLTEKMKTTIQRGLVLRNESCSENYTTDFIYQLYSEEGKGVFDCRKNVLGHMQQGGAPSPFDRNFGTKISARAMEWITAKLKEARGRGKKFTTDDSICVLGISKRNVIFQPVAELKKQTDFEHRIPKEQWWLKLRPLMKILAKYKASYDVSDSGQLEHVQPWSV

SEQ ID NO: 12497 - protein, 769 aa, Homo sapiens
MDADDSRAPKGSLRKFLEHLSGAGKAIGVLTSGGDAQGMNAAVRAVVRMGIYVGAKVYFIYEGYQGMVDGGSNIAEADWESVSSILQVGGTIIGSARCQAFRTREGRLKAACNLLQRGITNLCVIGGDGSLTGANLFRKEWSGLLEELARNGQIDKEAVQKYAYLNVVGMVGSIDNDFCGTDMTIGTDSALHRIIEVVDAIMTTAQSHQRTFVLEVMGRHCGYLALVSALACGADWVFLPESPPEEGWEEQMCVKLSENRARKKRLNIIIVAEGAIDTQNKPITSEKIKELVVTQLGYDTRVTILGHVQRGGTPSAFDRILAPDTPACVVSLNGNHAVRLPLMECVQMTQDVQKAMDERRFQDAVRLRGRSFAGNLNTYKRLAIKLPDDQIPKTNCNVAVINVGAPAAGMNAAVRSAVRVGIADGHRMLAIYDGFDGFAKGQIKEIGWTDVGGWTGQGGSILGTKRVLPGKYLEEIATQMRTHSINALLIIGGFEAYLGLLELSAAREKHEEFCVPMVMVPATVSNNVPGSDFSIGADTALNTITDTCDRIKQSASGTKRRVFIIETMGGYCGYLANMGGLAAGADAAYIFEEPFDIRDLQSNVEHLTEKMKTTIQRGLVLRNESCSENYTTDFIYQLYSEEGKGVFDCRKNVLGHMQQGGAPSPFDRNFGTKISARAMEWITAKLKEARGRGKKFTTDDSICVLGISKRNVIFQPVAELKKQTDFEHRIPKEQWWLKLRPLMKILAKYKASYDVSDSGQLEHVQPWSV

SEQ ID NO: 12498 - protein, 834 aa, Homo sapiens
MLLPTPAPAPAPAPSRARAPSPAAPPIRSGPARHRPLALGPGGGAGGAAVPSQARAGRVPIACCAPGRAAPLGLLAMDADDSRAPKGSLRKFLEHLSGAGKAIGVLTSGGDAQGMNAAVRAVVRMGIYVGAKVYFIYEGGTIIGSARCQAFRTREGRLKAACNLLQRGITNLCVIGGDGSLTGANLFRKEWSGLLEELARNGQIDKEAVQKYAYLNVVGMVGSIDNDFCGTDMTIGTDSALHRIIEVVDAIMTTAQSHQRTFVLEVMGRHCGYLALVSALACGADWVFLPESPPEEGWEEQMCVKLSENRARKKRLNIIIVAEGAIDTQNKPITSEKIKELVVTQLGYDTRVTILGHVQRGGTPSAFDRILASRMGVEAVIALLEATPDTPACVVSLNGNHAVRLPLMECVQMTQDVQKAMDERRFQDAVRLRGRSFAGNLNTYKRLAIKLPDDQIPKTNCNVAVINVGAPAAGMNAAVRSAVRVGIADGHRMLAIYDGFDGFAKGQIKEIGWTDVGGWTGQGGSILGTKRVLPGKYLEEIATQMRTHSINALLIIGGFEAYLGLLELSAAREKHEEFCVPMVMVPATVSNNVPGSDFSIGADTALNTITDTCDRIKQSASGTKRRVFIIETMGGYCGYLANMGGLAAGADAAYIFEEPFDIRDLQSNVEHLTEKMKTTIQRGLVLRNESCSENYTTDFIYQLYSEEGKGVFDCRKNVLGHMQQGGAPSPFDRNFGTKISARAMEWITAKLKEARGRGKKFTTDDSICVLGISKRNVIFQPVAELKKQTDFEHRIPKEQWWLKLRPLMKILAKYKASYDVSDSGQLEHVQPWSV

SEQ ID NO: 12499 - protein, 784 aa, Homo sapiens
MDADDSRAPKGSLRKFLEHLSGAGKAIGVLTSGGDAQGMNAAVRAVVRMGIYVGAKVYFIYEGYQGMVDGGSNIAEADWESVSSILQVGGTIIGSARCQAFRTREGRLKAACNLLQRGITNLCVIGGDGSLTGANLFRKEWSGLLEELARNGQIDKEAVQKYAYLNVVGMVGSIDNDFCGTDMTIGTDSALHRIIEVVDAIMTTAQSHQRTFVLEVMGRHCGYLALVSALACGADWVFLPESPPEEGWEEQMCVKLSENRARKKRLNIIIVAEGAIDTQNKPITSEKIKELVVTQLGYDTRVTILGHVQRGGTPSAFDRILASRMGVEAVIALLEATPDTPACVVSLNGNHAVRLPLMECVQMTQDVQKAMDERRFQDAVRLRGRSFAGNLNTYKRLAIKLPDDQIPKTNCNVAVINVGAPAAGMNAAVRSAVRVGIADGHRMLAIYDGFDGFAKGQIKEIGWTDVGGWTGQGGSILGTKRVLPGKYLEEIATQMRTHSINALLIIGGFEAYLGLLELSAAREKHEEFCVPMVMVPATVSNNVPGSDFSIGADTALNTITDTCDRIKQSASGTKRRVFIIETMGGYCGYLANMGGLAAGADAAYIFEEPFDIRDLQSNVEHLTEKMKTTIQRGLVLRNESCSENYTTDFIYQLYSEEGKGVFDCRKNVLGHMQQGGAPSPFDRNFGTKISARAMEWITAKLKEARGRGKKFTTDDSICVLGISKRNVIFQPVAELKKQTDFEHRIPKEQWWLKLRPLMKILAKYKASYDVSDSGQLEHVQPWSV

SEQ ID NO: 12500 - protein, 399 aa, Homo sapiens
MVECLTSLLLLNFLKVRISFLKHFTPFIIICDVLQWFYSSAITAIATSVCHGPPCRQLHHALMPHGKGGRSSVSGIVATVFGATGFLGRYVVNHLGRMGSQVIIPYRCDKYDIMHLRPMGDLGQLLFLEWDARDKDSIRRVVQHSNVVINLIGRDWETKNFDFEDVFVKIPQAIAQLSKEAGVEKFIHVSHLNANIKSSSRYLRNKAVGEKVVRDAFPEAIIVKPSDIFGREDRFLNSFASMHRFGPIPLGSLGWKTVKQPVYVVDVSKGIVNAVKDPDANGKSFAFVGPSRYLLFHLVKYIFAVAHRLFLPFPLPLFAYRWVARVFEISPFEPWITRDKVERMHITDMKLPHLPGLEDLGIQATPLELKAIEVLRRHRTYRWLSAEIEDVKPAKTVNI

SEQ ID NO: 12501 - protein, 377 aa, Homo sapiens
MAAAAQSRVVRVLSMSRSAITAIATSVCHGPPCRQLHHALMPHGKGGRSSVSGIVATVFGATGFLGRYVVNHLGRMGSQVIIPYRCDKYDIMHLRPMGDLGQLLFLEWDARDKDSIRRVVQHSNVVINLIGRDWETKNFDFEDVFVKIPQAIAQLSKEAGVEKFIHVSHLNANIKSSSRYLRNKAVGEKVVRDAFPEAIIVKPSDIFGREDRFLNSFASMHRFGPIPLGSLGWKTVKQPVYVVDVSKGIVNAVKDPDANGKSFAFVGPSRYLLFHLVKYIFAVAHRLFLPFPLPLFAYRWVARVFEISPFEPWITRDKVERMHITDMKLPHLPGLEDLGIQATPLELKAIEVLRRHRTYRWLSAEIEDVKPAKTVNI

SEQ ID NO: 12502 - protein, 637 aa, Homo sapiens [sequence omitted]

SEQ ID NO: 12503 - protein, 337 aa, Homo sapiens
MVNAGAIVVSSLIKMDCNKAEKFDFVLQYLNKMAGNEYMGFSNATFQSEKETGDRNYAIGYYLKEKKCFPKGVDMMAALDLYFQLCSVEVTCESGSVMAATLANGGICPITGESVLSAEAVRNTLSLMHSCGMYDFSGQFAFHVGLPAKSAVSGAILLVVPNVMGMMCLSPPLDKLGNSHRGTSFCQKLVSLFNFHNYDNLRHCARKLDPRREGAEIRNKTVVNLLFAAYSGDVSALRRFALSAMDMEQKDYDSRTALHVAAAEGHIEVVKFLIEACKVNPFAKDRWGNIPLDDAVQFNHLEVVKLLQDYQDSYTLSETQAEAAAEALSKENLESMV

SEQ ID NO: 12504 - protein, 602 aa, Homo sapiens
MRSMKALQKALSRAGSHCGRGGWGHPSRSPLLGGGVRHHLSEAAAQGRETPHSHQPQHQDHDSSESGMLSRLGDLLFYTIAEGQERIPIHKFTTALKATGLQTSDPRLRDCMSEMHRVVQESSSGGLLDRDLFRKCVSSNIVLLTQAFRKKFVIPDFEEFTGHVDRIFEDVKELTGGKVAAYIPQLAKSNPDLWGVSLCTVDGQRHSVGHTKIPFCLQSCVKPLTYAISISTLGTDYVHKFVGKEPSGLRYNKLSLNEEGIPHNPMVNAGAIVVSSLIKMDCNKAEKFDFVLQYLNKMAGNEYMGFSNATFQSEKETGDRNYAIGYYLKEKKCFPKGVDMMAALDLYFQLCSVEVTCESGSVMAATLANGGICPITGESVLSAEAVRNTLSLMHSCGMYDFSGQFAFHVGLPAKSAVSGAILLVVPNVMGMMCLSPPLDKLGNSHRGTSFCQKLVSLFNFHNYDNLRHCARKLDPRREGAEIRNKTVVNLLFAAYSGDVSALRRFALSAMDMEQKDYDSRTALHVAAAEGHIEVVKFLIEACKVNPFAKDRWGNIPLDDAVQFNHLEVVKLLQDYQDSYTLSETQAEAAAEALSKENLESMV

SEQ ID NO: 12505 - protein, 545 aa, Homo sapiens
MLLLHRAVVLRLQQACRLKSIPSRICIQACSTNDSFQPQRPSLTFSGDNSSTQGWRVMGTLLGLGAVLAYQDHRCRAAQESTHIYTKEEVSSHTSPETGIWVTLGSEVFDVTEFVDLHPGGPSKLMLAAGGPLEPFWALYAVHNQSHVRELLAQYKIGELNPEDKVAPTVETSDPYADDPVRHPALKVNSQRPFNAEPPPELLTENYITPNPIFFTRNHLPVPNLDPDTYRLHVVGAPGGQSLSLSLDDLHNFPRYEITVTLQCAGNRRSEMTQVKEVKGLEWRTGAISTARWAGARLCDVLAQAGHQLCETEAHVCFEGLDSDPTGTAYGASIPLARAMDPEAEVLLAYEMNGQPLPRDHGFPVRVVVPGVVGARHVKWLGRVSVQPEESYSHWQRRDYKGFSPSVDWETVDFDSAPSIQELPVQSAITEPRDGETVESGEVTIKGYAWSGGGRAVIRVDVSLDGGLTWQVAKLDGEEQRPRKAWAWRLWQLKAPVPAGQKELNIVCKAVDDGYNVQPDTVAPIWNLRGVLSNAWHRVHVYVSP

SEQ ID NO: 12506 - protein, 545 aa, Homo sapiens; identical to SEQ ID NO: 12505

SEQ ID NO: 12507 - protein, 545 aa, Homo sapiens; identical to SEQ ID NO: 12505

SEQ ID NO: 12508 - protein, 545 aa, Homo sapiens; identical to SEQ ID NO: 12505

SEQ ID NO: 12509 - protein, 529 aa, Homo sapiens
MLGFVGRVAAAPASGALRRLTPSASLPPAQLLLRAAPTAVHPVRDYAAQTSPSPKAGAATGRIVAVIGAVVDVQFDEGLPPILNALEVQGRETRLVLEVAQHLGESTVRTIAMDGTEGLVRGQKVLDSGAPIKIPVGPETLGRIMNVIGEPIDERGPIKTKQFAPIHAEAPEFMEMSVEQEILVTGIKVVDLLAPYAKGGKIGLFGGAGVGKTVLIMELINNVAKAHGGYSVFAGVGERTREGNDLYHEMIESGVINLKDATSKVALVYGQMNEPPGARARVALTGLTVAEYFRDQEGQDVLLFIDNIFRFTQAGSEVSALLGRIPSAVGYQPTLATDMGTMQERITTTKKGSITSVQAIYVPADDLTDPAPATTFAHLDATTVLSRAIAELGIYPAVDPLDSTSRIMDPNIVGSEHYDVARGVQKILQDYKSLQDIIAILGMDELSEEDKLTVSRARKIQRFLSQPFQVAEVFTGHMGKLVPLKETIKGFQQILAGEYDHLPEQAFYMVGPIEEAVAKADKLAEEHSS

SEQ ID NO: 12510 - protein, 598 aa, Homo sapiens
MMRVAEYLDWDVSELRPILQEMMKEIDYDGSGSVSQAEWVRAGATTVPLLVLLGLEMTLKDDGQHMWRPKRFPRPVYCNLCESSIGLGKQGLSCNLCKYTVHDQCAMKALPCEVSTYAKSRKDIGVQSHVWVRGGCESGRCDRCQKKIRIYHSLTGLHCVWCHLEIHDDCLQAVGHECDCGLLRDHILPPSSIYPSVLASGPDRKNSKTSQKTMDDLNLSTSEALRIDPVPNTHPLLVFVNPKSGGKQGQRVLWKFQYILNPRQVFNLLKDGPEIGLRLFKDVPDSRILVCGGDGTVGWILETIDKANLPVLPPVAVLPLGTGNDLARCLRWGGGYEGQNLAKILKDLEMSKVVHMDRWSVEVIPQQTEEKSDPVPFQIINNYFSIGVDASIAHRFHIMREKYPEKFNSRMKNKLWYFEFATSESIFSTCKKLEESLTVEICGKPLDLSNLSLEGIAVLNIPSMHGGSNLWGDTRRPHGDIYGINQALGATAKVITDPDILKTCVPDLSDKRLEVVGLEGAIEMGQIYTKLKNAGRRLAKCSEITFHTTKTLPMQIDGEPWMQTPCTVSIDDPSQKLNPWAPWILNPHSTASLHPSDA

SEQ ID NO: 12511 - protein, 735 aa, Homo sapiens
MAKERGLISPSDFAQLQKYMEYSTKKVSDVLKLFEDGEMAKYVQGDAIGYEGFQQFLKIYLEVDNVPRHLSLALFQSFETGHCLNETNVTKDVVCLNDVSCYFSLLEGGRPEDKLEFTFKLYDTDRNGILDSSEVDKIILQMMRVAEYLDWDVSELRPILQEMMKEIDYDGSGSVSQAEWVRAGATTVPLLVLLGLEMTLKDDGQHMWRPKRFPRPVYCNLCESSIGLGKQGLSCNLCKYTVHDQCAMKALPCEVSTYAKSRKDIGVQSHVWVRGGCESGRCDRCQKKIRIYHSLTGLHCVWCHLEIHDDCLQAVGHECDCGLLRDHILPPSSIYPSVLASGPDRKNSKTSQKTMDDLNLSTSEALRIDPVPNTHPLLVFVNPKSGGKQGQRVLWKFQYILNPRQVFNLLKDGPEIGLRLFKDVPDSRILVCGGDGTVGWILETIDKANLPVLPPVAVLPLGTGNDLARCLRWGGGYEGQNLAKILKDLEMSKVVHMDRWSVEVIPQQTEEKSDPVPFQIINNYFSIGVDASIAHRFHIMREKYPEKFNSRMKNKLWYFEFATSESIFSTCKKLEESLTVEICGKPLDLSNLSLEGIAVLNIPSMHGGSNLWGDTRRPHGDIYGINQALGATAKVITDPDILKTCVPDLSDKRLEVVGLEGAIEMGQIYTKLKNAGRRLAKCSEITFHTTKTLPMQIDGEPWMQTPCTIKITHKNQMPMLMGPPPRSTNFFGFLS

SEQ ID NO: 12512 - protein, 735 aa, Homo sapiens; identical to SEQ ID NO: 12511

SEQ ID NO: 12513 - protein, 735 aa, Homo sapiens; identical to SEQ ID NO: 12511

SEQ ID NO: 12514 - protein, 735 aa, Homo sapiens; identical to SEQ ID NO: 12511

SEQ ID NO: 12515 - protein, 471 aa, Homo sapiens
MPNSEPASLLELFNSIATQGELVRSLKAGNASKDEIDSAVKMLVSLKMSYKAAAGEDYKADCPPGNPAPTSNHGPDATEAEEDFVDPWTVQTSSAKGIDYDKLIVRFGSSKIDKELINRIERATGQRPHHFLRRGIFFSHRDMNQVLDAYENKKPFYLYTGRGPSSEAMHVGHLIPFIFTKWLQDVFNVPLVIQMTDDEKYLWKDLTLDQAYSYAVENAKDIIACGFDINKTFIFSDLDYMGMSSGFYKNVVKIQKHVTFNQVKGIFGFTDSDCIGKISFPAIQAAPSFSNSFPQIFRDRTDIQCLIPCAIDQDPYFRMTRDVAPRIGYPKPALLHSTFFPALQGAQTKMSASDPNSSIFLTDTAKQIKTKVNKHAFSGGRDTIEEHRQFGGNCDVDVSFMYLTFFLEDDDKLEQIRKDYTSGAMLTGELKKALIEVLQPLIAEHQARRKEVTDEIVKEFMTPRKLSFDFQ

SEQ ID NO: 12516 - protein, 471 aa, Homo sapiens; identical to SEQ ID NO: 12515

SEQ ID NO: 12517 - protein, 471 aa, Homo sapiens; identical to SEQ ID NO: 12515

SEQ ID NO: 12518 - protein, 471 aa, Homo sapiens; identical to SEQ ID NO: 12515

SEQ ID NO: 12519 - protein, 471 aa, Homo sapiens; identical to SEQ ID NO: 12515

SEQ ID NO: 12520 - protein, 471 aa, Homo sapiens; identical to SEQ ID NO: 12515

SEQ ID NO: 12521 - protein, 482 aa, Homo sapiens
MPPSPLDDRVVVALSRPVRPQDLNLCLDSSYLGSANPGSNSHPPVIATTVVSLKAANLTYMPSSSGSARSLNCGCSSASCCTVATYDKDNQAQTQAIAAGTTTTAIGTSTTCPANQMVNNNENTGSLSPSSGVGSPVSGTPKQLASIKIIYPNDLAKKMTKCSKSHLPSQGPVIIDCRPFMEYNKSHIQGAVHINCADKISRRRLQQGKITVLDLISCREGKDSFKRIFSKEIIVYDENTNEPSRVMPSQPLHIVLESLKREGKEPLVLKGGLSSFKQNHENLCDNSLQLQECREVGGGASAASSLLPQPIPTTPDIENAELTPILPFLFLGNEQDAQDLDTMQRLNIGYVINVTTHLPLYHYEKGLFNYKRLPATDSNKQNLRQYFEEAFEFIEEAHQCGKGLLIHCQAGVSRSATIVIAYLMKHTRMTMTDAYKFVKGKRPIISPNLNFMGQLLEFEEDLNNGVTPRILTPKLMGVETVV

SEQ ID NO: 12522 - protein, 140 aa, Homo sapiens
MQRLNIGYVINVTTHLPLYHYEKGLFNYKRLPATDSNKQNLRQYFEEAFEFIEEAHQCGKGLLIHCQAGVSRSATIVIAYLMKHTRMTMTDAYKFVKGKRPIISPNLNFMGQLLEFEEDLNNGVTPRILTPKLMGVETVV

SEQ ID NO: 12523 - protein, 703 aa, Homo sapiens
MLRGRSLSVTSLGGLPQWEVEELPVEELLLFEVAWEVTNKVGGIYTVIQTKAKTTADEWGENYFLIGPYFEHNMKTQVEQCEPVNDAVRRAVDAMNKHGCQVHFGRWLIEGSPYVVLFDIGYSAWNLDRWKGDLWEACSVGIPYHDREANDMLIFGSLTAWFLKEVTDHADGKYVVAQFHEWQAGIGLILSRARKLPIATIFTTHATLLGRYLCAANIDFYNHLDKFNIDKEAGERQIYHRYCMERASVHCAHVFTTVSEITAIEAEHMLKRKPDVVTPNGLNVKKFSAVHEFQNLHAMYKARIQDFVRGHFYGHLDFDLEKTLFLFIAGRYEFSNKGADIFLESLSRLNFLLRMHKSDITVVVFFIMPAKTNNFNVETLKGQAVRKQLWDVAHSVKEKFGKKLYDALLRGEIPDLNDILDRDDLTIMKRAIFSTQRQSLPPVTTHNMIDDSTDPILSTIRRIGLFNNRTDRVKVILHPEFLSSTSPLLPMDYEEFVRGCHLGVFPSYYEPWGYTPAECTVMGIPSVTTNLSGFGCFMQEHVADPTAYGIYIVDRRFRSPDDSCNQLTKFLYGFCKQSRRQRIIQRNRTERLSDLLDWRYLGRYYQHARHLTLSRAFPDKFHVELTSPPTTEGFKYPRPSSVPPSPSGSQASSPQSSDVEDEVEDERYDEEEEAERDRLNIKSPFSLSHVPHGKKKLHGEYKN

SEQ ID NO: 12524 - protein, 703 aa, Homo sapiens; identical to SEQ ID NO: 12523

SEQ ID NO: 12525 - protein, 736 aa, Homo sapiens
MSLLFSRCNSIVTVKKNKRHMAEVNASPLKHFVTAKKKINGIFEQLGAYIQESATFLEDTYRNAELDPVTTEEQVLDVKGYLSKVRGISEVLARRHMKVAFFGRTSNGKSTVINAMLWDKVLPSGIGHTTNCFLRVEGTDGHEAFLLTEGSEEKRSAKTVNQLAHALHQDKQLHAGSLVSVMWPNSKCPLLKDDLVLMDSPGIDVTTELDSWIDKFCLDADVFVLVANSESTLMQTEKHFFHKVRRQHMERCTSFLVDELGVVDRSQAGDRIFFVSAKEVLNARIQKAQGMPEGGGALAEGFQVRMFEFQNFERRFEECISQSAVKTKFEQHTVRAKQIAEAVRLIMDSLHMAAREQQVYCEEMREERQDRLKFIDKQLELLAQDYKLRIKQITEEVERQVSTAMAEEIRRLSVLVDDYQMDFHPSPVVLKVYKNELHRHIEEGLGRNMSDRCSTAITNSLQTMQQDMIDGLKPLLPVSVRSQIDMLVPRQCFSLNYDLNCDKLCADFQEDIEFHFSLGWTMLVNRFLGPKNSRRALMGYNDQASKVPHLKGIVGGPASHPSDASQPQHAPTATGLAHPGGVHGFHGYRPGLLDIQDLHGHSCCWRSVGWRLIALSFGLYGLLYVYERLTWTTKAKERAFKRQFVEHASEKLQLVISYTGSNCSHQVQQELSGTFAHLCQQVDVTRENLEQEIAAMNKKIEVLDSLQSKAKLLRNKAGWLDSELNMFTHQYLQPSR

SEQ ID NO: 12526 - protein, 757 aa, Homo sapiens
MSLLFSRCNSIVTVKKNKRHMAEVNASPLKHFVTAKKKINGIFEQLGAYIQESATFLEDTYRNAELDPVTTEEQVLDVKGYLSKVRGISEVLARRHMKVAFFGRTSNGKSTVINAMLWDKVLPSGIGHTTNCFLRVEGTDGHEAFLLTEGSEEKRSAKTVNQLAHALHQDKQLHAGSLVSVMWPNSKCPLLKDDLVLMDSPGIDVTTELDSWIDKFCLDADVFVLVANSESTLMQTEKHFFHKVSERLSRPNIFILNNRWDASASEPEYMEEVRRQHMERCTSFLVDELGVVDRSQAGDRIFFVSAKEVLNARIQKAQGMPEGGGALAEGFQVRMFEFQNFERRFEECISQSAVKTKFEQHTVRAKQIAEAVRLIMDSLHMAAREQQVYCEEMREERQDRLKFIDKQLELLAQDYKLRIKQITEEVERQVSTAMAEEIRRLSVLVDDYQMDFHPSPVVLKVYKNELHRHIEEGLGRNMSDRCSTAITNSLQTMQQDMIDGLKPLLPVSVRSQIDMLVPRQCFSLNYDLNCDKLCADFQEDIEFHFSLGWTMLVNRFLGPKNSRRALMGYNDQVQRPIPLTPANPSMPPLPQGSLTQEEFMVSMVTGLASLTSRTSMGILVVGGVVWKAVGWRLIALSFGLYGLLYVYERLTWTTKAKERAFKRQFVEHASEKLQLVISYTGSNCSHQVQQELSGTFAHLCQQVDVTRENLEQEIAAMNKKIEVLDSLQSKAKLLRNKAGWLDSELNMFTHQYLQPSR

SEQ ID NO: 12527 - protein, 727 aa, Homo sapiens
MRPLLLLALLGWLLLAEAKGDAKPEDNLLVLTVATKETEGFRRFKRSAQFFNYKIQALGLGEDWNVEKGTSAGGGQKVRLLKKALEKHADKEDLVILFADSYDVLFASGPRELLKKFRQARSQVVFSAEELIYPDRRLETKYPVVSDGKRFLGSGGFIGYAPNLSKLVAEWEGQDSDSDQLFYTKIFLDPEKREQINITLDHRCRIFQNLDGALDEVVLKFEMGHVRARNLAYDTLPVLIHGNGPTKLQLNYLGNYIPRFWTFETGCTVCDEGLRSLKGIGDEALPTVLVGVFIEQPTPFVSLFFQRLLRLHYPQKHMRLFIHNHEQHHKAQVEEFLAQHGSEYQSVKLVGPEVRMANADARNMGADLCRQDRSCTYYFSVDADVALTEPNSLRLLIQQNKNVIAPLMTRHGRLWSNFWGALSADGYYARSEDYVDIVQGRRVGVWNVPYISNIYLIKGSALRGELQSSDLFHHSKLDPDMAFCANIRQQDVFMFLTNRHTLGHLLSLDSYRTTHLHNDLWEVFSNPEDWKEKYIHQNYTKALAGKLVETPCPDVYWFPIFTEVACDELVEEMEHFGQWSLGNNKDNRIQGGYENVPTIDIHMNQIGFEREWHKFLLEYIAPMTEKLYPGYYTRAQFDLAFVVRYKPDEQPSLMPHHDASTFTINIALNRVGVDYEGGGCRFLRYNCSIRAPRKGWTLMHPGRLTHYHEGLPTTRGTRYIAVSFVDP

SEQ ID NO: 12528 - protein, 727 aa, Homo sapiens; identical to SEQ ID NO: 12527

SEQ ID NO: 12529 - protein, 679 aa, Homo sapiens
MCRGCGCLPPDAPCPTLCSRNPAMVNEARGNSSLNPCLEGSASSGSESSKDSSRCSTPGLDPERHERLREKMRRRLESGDKWFSLEFFPPRTAEGAVNLISRFDRMAAGGPLYIDVTWHPAGDPGSDKETSSMMIASTAVNYCGLETILHMTCCRQRLEEITGHLHKAKQLGLKNIMALRGDPIGDQWEEEEGGFNYAVDLVKHIRSEFGDYFDICVAGYPKGHPEAGSFEADLKHLKEKVSAGADFIITQLFFEADTFFRFVKACTDMGITCPIVPGIFPIQGYHSLRQLVKLSKLEVPQEIKDVIEPIKDNDAAIRNYGIELAVSLCQELLASGLVPGLHFYTLNREMATTEVLKRLGMWTEDPRRPLPWALSAHPKRREEDVRPIFWASRPKSYIYRTQEWDEFPNGRWGNSSSPAFGELKDYYLFYLKSKSPKEELLKMWGEELTSEESVFEVFVLYLSGEPNRNGHKVTCLPWNDEPLAAETSLLKEELLRVNRQGILTINSQPNINGKPSSDPIVGWGPSGGYVFQKAYLEFFTSRETAEALLQVLKKYELRVNYHLVNVKGENITNAPELQPNAVTWGIFPGREIIQPTVVDPVSFMFWKDEAFALWIERWGKLYEEESPSRTIIQYIHDNYFLVNLVDNDFPLDNCLWQVVEDTLELLNRPTQNARETEAP

SEQ ID NO: 12530 - protein, 656 aa, Homo sapiens [sequence omitted]

SEQ ID NO: 12531 - protein, 679 aa, Homo sapiens; identical to SEQ ID NO: 12529

SEQ ID NO: 12532 - protein, 656 aa, Homo sapiens [sequence omitted]

SEQ ID NO: 12533 - protein, 656 aa, Homo sapiens [sequence omitted]

SEQ ID NO: 12534 - protein, 656 aa, Homo sapiens [sequence omitted]

SEQ ID NO: 12535 - protein, 153 aa, Homo sapiens
MPQLCTRASSSEIPGRLLTTLQSAQGQKFLHFAKSDSFLDDIFAAWMAQRLKTHLLTETWQRKRQELPSNCSLPYHVYNIKAIKLSRHSYFSSYQDHAKWCISQKGTKNRWTCIGDLNRSPHQAFRSGGFICTQNWQIYQAFQGLVLYYESCK

SEQ ID NO: 12536 - protein, 361 aa, Homo sapiens
MKQKMMARLLRTSFALLFLGLFGVLGAATISCRNEEGKAVDWFTFYKLPKRQNKESGETGLEYLYLDSTTRSWRKSEQLMNDTKSVLGRTLQQLYEAYASKSNNTAYLIYNDGVPKPVNYSRKYGHTKGLLLWNRVQGFWLIHSIPQFPPIPEEGYDYPPTGRRNGQSGICITFKYNQYEAIDSQLLVCNPNVYSCSIPATFHQELIHMPQLCTRASSSEIPGRLLTTLQSAQGQKFLHFAKSDSFLDDIFAAWMAQRLKTHLLTETWQRKRQELPSNCSLPYHVYNIKAIKLSRHSYFSSYQDHAKWCISQKGTKNRWTCIGDLNRSPHQAFRSGGFICTQNWQIYQAFQGLVLYYESCK

SEQ ID NO: 12537 - protein, 563 aa, Homo sapiens
MLLPAPALRRALLSRPWTGAGLRWKHTSSLKVANEPVLAFTQGSPERDALQKALKDLKGRMEAIPCVVGDEEVWTSDVQYQVSPFNHGHKVAKFCYADKSLLNKAIEAALAARKEWDLKPIADRAQIFLKAADMLSGPRRAEILAKTMVGQGKTVIQAEIDAAAELIDFFRFNAKYAVELEGQQPISVPPSTNSTVYRGLEGFVAAISPFNFTAIGGNLAGAPALMGNVVLWKPSDTAMLASYAVYRILREAGLPPNIIQFVPADGPLFGDTVTSSEHLCGINFTGSVPTFKHLWKQVAQNLDRFHTFPRLAGECGGKNFHFVHRSADVESVVSGTLRSAFEYGGQKCSACSRLYVPHSLWPQIKGRLLEEHSRIKVGDPAEDFGTFFSAVIDAKSFARIKKWLEHARSSPSLTILAGGKCDDSVGYFVEPCIVESKDPQEPIMKEEIFGPVLSVYVYPDDKYKETLQLVDSTTSYGLTGAVFSQDKDVVQEATKVLRNAAGNFYINDKSTGSIVGQQPFGGARASGTNDKPGGPHYILRWTSPQVIKETHKPLGDWSYAYMQ

SEQ ID NO: 12538 - protein, 563 aa, Homo sapiens; identical to SEQ ID NO: 12537

SEQ ID NO: 12539 - protein, 563 aa, Homo sapiens; identical to SEQ ID NO: 12537

SEQ ID NO: 12540 - protein, 298 aa, Homo sapiens
MFSRAGVAGLSAWTLQPQWIQVRNMATLKDITRRLKSIKNIQKITKSMKMVAAAKYARAERELKPARIYGLGSLALYEKADIKGPEDKKKHLLIGVSSDRGLCGAIHSSIAKQMKSEVATLTAAGKEVMLVGIGDKIRGILYRTHSDQFLVAFKEVGRKPPTFGDASVIALELLNSGYEFDEGSIIFNKFRSVISYKTEEKPIFSLNTVASADSMSIYDDIDADVLQNYQEYNLANIIYYSLKESTTSEQSARMTAMDNASKNASEMIDKLTLTFNRTRQAVITKELIEIISGAAALD

SEQ ID NO: 12541 - protein, 297 aa, Homo sapiens
MFSRAGVAGLSAWTLQPQWIQVRNMATLKDITRRLKSIKNIQKITKSMKMVAAAKYARAERELKPARIYGLGSLALYEKADIKGPEDKKKHLLIGVSSDRGLCGAIHSSIAKQMKSEVATLTAAGKEVMLVGIGDKIRGILYRTHSDQFLVAFKEVGRKPPTFGDASVIALELLNSGYEFDEGSIIFNKFRSVISYKTEEKPIFSLNTVASADSMSIYDDIDADVLQNYQEYNLANIIYYSLKESTTSEQSARMTAMDNASKNASEMIDKLTLTFNRTRQAVITKELIEIISGAAAL

SEQ ID NO: 12542 - protein, 280 aa, Homo sapiens
MAAVVALSLRRRLPATTLGGACLQASRGAQTAAATAPRIKKFAIYRWDPDKAGDKPHMQTYEVDLNKCGPMVLDALIKIKNEVDSTLTFRRSCREGICGSCAMNINGGNTLACTRRIDTNLNKVSKIYPLPHMYVIKDLVPDLSNFYAQYKSIEPYLKKKDESQEGKQQYLQSIEEREKLDGLYECILCACCSTSCPSYWWNGDKYLGPAVLMQAYRWMIDSRDDFTEERLAKLQDPFSLYRCHTIMNCTRTCPKGLNPGKAIAEIKKMMATYKEKKASV

SEQ ID NO: 12543 - protein, 223 aa, Homo sapiens
MQTYEVDLNKCGPMVLDALIKIKNEVDSTLTFRRSCREGICGSCAMNINGGNTLACTRRIDTNLNKVSKIYPLPHMYVIKDLVPDLSNFYAQYKSIEPYLKKKDESQEGKQQYLQSIEEREKLDGLYECILCACCSTSCPSYWWNGDKYLGPAVLMQAYRWMIDSRDDFTEERLAKLQDPFSLYRCHTIMNCTRTCPKGLNPGKAIAEIKKMMATYKEKKASV

SEQ ID NO: 12544 - protein, 664 aa, Homo sapiens
MSLQRIVRVSLEHPTSAVCVAGVETLVDIYGSVPEGTEMFEVYGTPGVDIYISPNMERGRERADTRRWRFDATLEIIVVMNSPSNDLNDSHVQISYHSSHEPLPLAYAVLYLTCVDISLDCDLNCEGRQDRNFVDKRQWVWGPSGYGGILLVNCDRDDPSCDVQDNCDQHVHCLQDLEDMSVMVLRTQGPAALFDDHKLVLHTSSYDAKRAQVFHICGPEDVCEAYRHVLGQDKVSYEVPRLHGDEERFFVEGLSFPDAGFTGLISFHVTLLDDSNEDFSASPIFTDTVVFRVAPWIMTPSTLPPLEVYVCRVRNNTCFVDAVAELARKAGCKLTICPQAENRNDRWIQDEMELGYVQAPHKTLPVVFDSPRNGELQDFPYKRILGPDFGYVTREPRDRSVSGLDSFGNLEVSPPVVANGKEYPLGRILIGGNLPGSSGRRVTQVVRDFLHAQKVQPPVELFVDWLAVGHVDEFLSFVPAPDGKGFRMLLASPGACFKLFQEKQKCGHGRALLFQGVVDDEQVKTISINQVLSNKDLINYNKFVQSCIDWNREVLKRELGLAECDIIDIPQLFKTERKKATAFFPDLVNMLVLGKHLGIPKPFGPIINGCCCLEEKVRSLLEPLGLHCTFIDDFTPYHMLHGEVHCGTNVCRKPFSFKWWNMVP

SEQ ID NO: 12545 - protein, 407 aa, Homo sapiens
MAQGTLIRVTPEQPTHAVCVLGTLTQLDICSSAPEDCTSFSINASPGVVVDIAHGPPAKKKSTGSSTWPLDPGVEVTLTMKVASGSTGDQKVQISYYGPKTPPVKALLYLTGVEISLCADITRTGKVKPTRAVKDQRTWTWGPCGQGAILLVNCDRDNLESSAMDCEDDEVLDSEDLQDMSLMTLSTKTPKDFFTNHTLVLHVARSEMDKVRVFQATRGKLSSKCSVVLGPKWPSHYLMVPGGKHNMDFYVEALAFPDTDFPGLITLTISLLDTSNLELPEAVVFQDSVVFRVAPWIMTPNTQPPQEVYACSIFENEDFLKSVTTLAMKAKCKLTICPEEENMDDQWMQDEMEIGYIQAPHKTLPVVFDSPRNRGLKEFPIKRVMVPAWGGEGAQLPKPSCLETPSF

SEQ ID NO: 12546 - protein, 663 aa, Homo sapiens
MAQGTLIRVTPEQPTHAVCVLGTLTQLDICSSAPEDCTSFSINASPGVVVDIAHGPPAKKKSTGSSTWPLDPGVEVTLTMKVASGSTGDQKVQISYYGPKTPPVKALLYLTGVEISLCADITRTGKVKPTRAVKDQRTWTWGPCGQGAILLVNCDRDNLESSAMDCEDDEVLDSEDLQDMSLMTLSTKTPKDFFTNHTLVLHVARSEMDKVRVFQATRGKLSSKCSVVLGPKWPSHYLMVPGGKHNMDFYVEALAFPDTDFPGLITLTISLLDTSNLELPEAVVFQDSVVFRVAPWIMTPNTQPPQEVYACSIFENEDFLKSVTTLAMKAKCKLTICPEEENMDDQWMQDEMEIGYIQAPHKTLPVVFDSPRNRGLKEFPIKRVMGPDFGYVTRGPQTGGISGLDSFGNLEVSPPVTVRGKEYPLGRILFGDSCYPSNDSRQMHQALQDFLSAQQVQAPVKLYSDWLSVGHVDEFLSFVPAPDRKGFRLLLASPRSCYKLFQEQQNEGHGEALLFEGIKKKKQQKIKNILSNKTLREHNSFVERCIDWNRELLKRELGLAESDIIDIPQLFKLKEFSKAEAFFPNMVNMLVLGKHLGIPKPFGPVINGRCCLEEKVCSLLEPLGLQCTFINDFFTYHIRHGEVHCGTNVRRKPFSFKWWNMVP

SEQ ID NO: 12547 - protein, 1180 aa, Homo sapiens
MSADSSPLVGSTPTGYGTLTIGTSIDPLSSSVSSVRLSGYCGSPWRVIGYHVVVWMMAGIPLLLFRWKPLWGVRLRLRPCNLAHAETLVIEIRDKEDSSWQLFTVQVQTEAIGEGSLEPSPQSQAEDGRSQAAVGAVPEGAWKDTAQLHKSEEAVSVGQKRVLRYYLFQGQRYIWIETQQAFYQVSLLDHGRSCDDVHRSRHGLSLQDQMVRKAIYGPNVISIPVKSYPQLLVDEALNPYYGFQAFSIALWLADHYYWYALCIFLISSISICLSLYKTRKQSQTLRDMVKLSMRVCVCRPGGEEEWVDSSELVPGDCLVLPQEGGLMPCDAALVAGECMVNESSLTGESIPVLKTALPEGLGPYCAETHRRHTLFCGTLILQARAYVGPHVLAVVTRTGFCTAKGGLVSSILHPRPINFKFYKHSMKFVAALSVLALLGTIYSIFILYRNRVPLNEIVIRALDLVTVVVPPALPAAMTVCTLYAQSRLRRQGIFCIHPLRINLGGKLQLVCFDKTGTLTEDGLDVMGVVPLKGQAFLPLVPEPRRLPVGPLLRALATCHALSRLQDTPVGDPMDLKMVESTGWVLEEEPAADSAFGTQVLAVMRPPLWEPQLQAMEEPPVPVSVLHRFPFSSALQRMSVVVAWPGATQPEAYVKGSPELVAGLCNPETVPTDFAQMLQSYTAAGYRVVALASKPLPTVPSLEAAQQLTRDTVEGDLSLLGLLVMRNLLKPQTTPVIQALRRTRIRAVMVTGDNLQTAVTVARGCGMVAPQEHLIIVHATHPERGQPASLEFLPMESPTAVNGVKDPDQAASYTVEPDPRSRHLALSGPTFGIIVKHFPKLLPKVLVQGTVFARMAPEQKTELVCELQKLQYCVGMCGDGANDCGALKAADVGISLSQAEASVVSPFTSSMASIECVPMVIREGRCSLDTSFSVFKYMALYSLTQFISVLILYTINTNLGDLQFLAIDLVITTTVAVLMSRTGPALVLGRVRPPGALLSVPVLSSLLLQMVLVTGVQLGGYFLTLAQPWFVPLNRTVAAPDNLPNYENTVVFSLSSFQYLILAAAVSKGAPFRRPLYTNVPFLVALALLSSVLVGLVLVPGLLQGPLALRNITDTGFKLLLLGLVTLNFVGAFMLESVLDQCLPACLRRLRPKRASKKRFKQLERELAEQPWPPLPAGPLR

SEQ ID NO: 12548 - protein, 1175 aa, Homo sapiens
MSADSSPLVGSTPTGYGTLTIGTSIDPLSSSVSSVRLSGYCGSPWRVIGYHVVVWMMAGIPLLLFRWKPLWGVRLRLRPCNLAHAETLVIEIRDKEDSSWQLFTVQVQTEAIGEGSLEPSPQSQAEDGRSQAAVGAVPEGAWKDTAQLHKSEEAKRVLRYYLFQGQRYIWIETQQAFYQVSLLDHGRSCDDVHRSRHGLSLQDQMVRKAIYGPNVISIPVKSYPQLLVDEALNPYYGFQAFSIALWLADHYYWYALCIFLISSISICLSLYKTRKQSQTLRDMVKLSMRVCVCRPGGEEEWVDSSELVPGDCLVLPQEGGLMPCDAALVAGECMVNESSLTGESIPVLKTALPEGLGPYCAETHRRHTLFCGTLILQARAYVGPHVLAVVTRTGFCTAKGGLVSSILHPRPINFKFYKHSMKFVAALSVLALLGTIYSIFILYRNRVPLNEIVIRALDLVTVVVPPALPAAMTVCTLYAQSRLRRQGIFCIHPLRINLGGKLQLVCFDKTGTLTEDGLDVMGVVPLKGQAFLPLVPEPRRLPVGPLLRALATCHALSRLQDTPVGDPMDLKMVESTGWVLEEEPAADSAFGTQVLAVMRPPLWEPQLQAMEEPPVPVSVLHRFPFSSALQRMSVVVAWPGATQPEAYVKGSPELVAGLCNPETVPTDFAQMLQSYTAAGYRVVALASKPLPTVPSLEAAQQLTRDTVEGDLSLLGLLVMRNLLKPQTTPVIQALRRTRIRAVMVTGDNLQTAVTVARGCGMVAPQEHLIIVHATHPERGQPASLEFLPMESPTAVNGVKDPDQAASYTVEPDPRSRHLALSGPTFGIIVKHFPKLLPKVLVQGTVFARMAPEQKTELVCELQKLQYCVGMCGDGANDCGALKAADVGISLSQAEASVVSPFTSSMASIECVPMVIREGRCSLDTSFSVFKYMALYSLTQFISVLILYTINTNLGDLQFLAIDLVITTTVAVLMSRTGPALVLGRVRPPGALLSVPVLSSLLLQMVLVTGVQLGGYFLTLAQPWFVPLNRTVAAPDNLPNYENTVVFSLSSFQYLILAAAVSKGAPFRRPLYTNVPFLVALALLSSVLVGLVLVPGLLQGPLALRNITDTGFKLLLLGLVTLNFVGAFMLESVLDQCLPACLRRLRPKRASKKRFKQLERELAEQPWPPLPAGPLR

SEQ ID NO: 12549 - protein, 1193 aa, Homo sapiens
  VARIANT (1)...(1193): Xaa = Any Amino Acid
MSADSSPLVGSTPTGYGTLTIGTSIDPLSSSVSSVRLSGYCGSPWRVIGYHVVVWMMAGIPLLLFRWKPLWGVRLRLRPCNLAHAETLVIEIRDKEDSSWQLFTVQVQTEAIGEGSLEPSPQSQAEDGRSQAAVGAVPEGAWKDTAQLHKSEEAKRVLRYYLFQGQRYIWIETQQAFYQVSLLDHGRSCDDVHRSRHGLSLQDQMVRKAIYGPNVISIPVKSYPQLLVDEALNPYYGFQAFSIALWLADHYYWYALCIFLISSISICLSLYKTRKQSQTLRDMVKLSMRVCVCRPGGEEEWVDSSELVPGDCLVLPQEGGLMPCDAALVAGECMVNESSLTGESIPVLKTALPEGLGPYCAETHRRHTLFCGTLILQARAYVGPHVLAVVTRTGFCTAKGGLVSSILHPRPINFKFYKHSMKFVAALSVLALLGTIYSIFILYRNRVPLNEIVIRALDLVTVVVPPALPAAMTVCTLYAQSRLRRQGIFCIHPLRINLGGKLQLVCFDKTGTLTEDGLDVMGVVPLKGQAFLPLVPEPRRLPVGPLLRALATCHALSRLQDTPVGDPMDLKMVESTGWVLEEEPAADSAFGTQVLAVMRPPLWEPQLQAMEEPPVPVSVLHRFPFSSALQRMSVVVAWPGATQPEAYVKGSPELVAGLCNPETVPTDFAQMLQSYTAAGYRVVALASKPLPTVPSLEAAQQLTRDTVEGDLSLLGLLVMRNLLKPQTTPVIQALRRTRIRAVMVTGDNLQTAVTVARGCGMVAPQEHLIIVHATHPERGQPASLEFLPMESPTAVNGVKDPDQAASYTVEPDPRSRHLALSGPTFGIIVKHFPKLLPKVLVQGTVFARMAPEQKTELVCELQKLQYCVGMCGDGANDCGALKAADVGISLSQAEASVVSPFTSSMASIECVPMVIREGRCSLDTSFSVFKYMALYSLTQFISVLILYTINTNLGDLQFLAIDLVITTTVAVLMSRTGPALVLGRVRPPGALLSVPVLSSLLLQMVLVTGVQLGGYFLTLAQPWFVPLNRTVAAPDNLPNYENTVVFSLSSFQYLILAAAVSKGAPFRRPLYTNERARPVPPRLPAPPPAQAGLQEALQAAGTRAGRAALAAAARRPPEVVQAHGHPRHWNSLPLSHQLDPSPATPPPPPPTSLRLATVYTPPPRPPPPWGSVDYCPLPWTIPRRGGSPQLPSX

SEQ ID NO: 12550 - protein, 665 aa, Homo sapiens
MLRERTVRLQYGSRVEAVYVLGTYLWTDVYSAAPAGAQTFSLKHSEHVWVEVVRDGEAEEVATNGKQRWLLSPSTTLRVTMSQASTEASSDKVTVNYYDEEGSIPIDQAGLFLTAIEISLDVDADRDGVVEKNNPKKASWTWGPEGQGAILLVNCDRETPWLPKEDCRDEKVYSKEDLKDMSQMILRTKGPDRLPAGYEIVLYISMSDSDKVGVFYVENPFFGQRYIHILGRRKLYHVVKYTGGSAELLFFVEGLCFPDEGFSGLVSIHVSLLEYMAQDIPLTPIFTDTVIFRIAPWIMTPNILPPVSVFVCCMKDNYLFLKEVKNLVEKTNCELKVCFQYLNRGDRWIQDEIEFGYIEAPHKGFPVVLDSPRDGNLKDFPVKELLGPDFGYVTREPLFESVTSLDSFGNLEVSPPVTVNGKTYPLGRILIGSSFPLSGGRRMTKVVRDFLKAQQVQAPVELYSDWLTVGHVDEFMSFVPIPGTKKFLLLMASTSACYKLFREKQKDGHGEAIMFKGLGGMSSKRITINKILSNESLVQENLYFQRCLDWNRDILKKELGLTEQDIIDLPALFKMDEDHRARAFFPNMVNMIVLDKDLGIPKPFGPQVEEECCLEMHVRGLLEPLGLECTFIDDISAYHKFLGEVHCGTNVRRKPFTFKWWHMVP

SEQ ID NO: 12551 - protein, 665 aa, Homo sapiens; identical to SEQ ID NO: 12550

SEQ ID NO: 12552 - protein, 190 aa, Homo sapiens [sequence omitted]

SEQ ID NO: 12553 - protein, 2146 aa, Homo sapiens
AISNSSRGPSRSAILDRCSQAPRWTCYDQEGFLEVENASLFLQKQGSRVVVKKARKYLHSWMKIDVNKEGKLVNESLCLQKAGLGAEVSVRSTRNTAPPQILTTFNAVPDGLVFLIRNTTEAFIRNAAENYSQNSSERQHPNLHMTGITDTSWVLSTTQPFSSTTEETGLAEPERCNFTLAESKASSHSVSIQWRILGSPCNFSLIYSSDTLGAALCPTFRIDNTTYGCNLQDLQAGTIYNFRIISLDEERTVVLQTDPLPPARFGVSKEKTTSTSLHVWWTPSSGKVTSYEVQLFDENNQKIQGVQIQESTSWNEYTFFNLTAGSKYNIAITAVSGGKRSFSVYTNGSTVPSPVKDIGISTKANSLLISWSHGSGNVERYRLMLMDKGILVHGGVVDKHATSYAFHGLTPGYLYNLTVMTEAAGLQNYRWKLVRTAPMEVSNLKVTNDGSLTSLKVKWQRPPGNVDSYNITLSHKGTIKESRVLAPWITETHFKELVPGRLYQVTVSCVSGELSAQKMAVGRTFPDKVANLEANNNGRMRSLVVSWSPPAGDWEQYRILLFNDSVVLLNITVGKEETQYVMDDTGLVPGRQYEVEVIVESGNLKNSERCQGRTVPLAVLQLRVKHANETSLSIMWQTPVAEWEKYIISLADRDLLLIHKSLSKDAKEFTFTDLVPGRKYMATVTSISGDLKNSSSVKGRTVPAQVTDLHVANQGMTSSLFTNWTQAQGDVEFYQVLLIHENVVIKNESISSETSRYSFHSLKSGSLYSVVVTTVSGGISSRQVVVEGRTVPSSVSGVTVNNSGRNDYLSVSWLLAPGDVDNYEVTLSHDGKVVQSLVIAKSVRECSFSSLTPGRLYTVTITTRSGKYENHSFSQERTVPDKVQGVSVSNSARSDYLRVSWVHATGDFDHYEVTIKNKNNFIQTKSIPKSENECVFVQLVPGRLYSVTVTTKSGQYEANEQGNGRTIPEPVKDLTLRNRSTEDLHVTWSGANGDVDQYEIQLLFNDMKVFPPFHLVNTATEYRFTSLTPGRQYKILVLTISGDVQQSAFIEGFTVPSAVKNIHISPNGATDSLTVNWTPGGGDVDSYTVSAFRHSQKVDSQTIPKHVFEHTFHRLEAGEQYQIMIASVSGSLKNQINVVGRTVPASVQGVIADNAYSSYSLIVSWQKAAGVAERYDILLLTENGILLRNTSEPATTKQHKFEDLTPGKKYKIQILTVSGGLFSKEAQTEGRTVPAAVTDLRITENSTRHLSFRWTASEGELSWYNIFLYNPDGNLQERAQVDPLVQSFSFQNLLQGRMYKMVIVTHSGELSNESFIFGRTVPASVSHLRGSNRNTTDSLWFNWSPASGDFDFYELILYNPNGTKKENWKDKDLTEWRFQGLVPGRKYVLWVVTHSGDLSNKVTAESRTAPSPPSLMSFADIANTSLAITWKGPPDWTDYNDFELQWLPRDALTVFNPYNNRKSEGRIVYGLRPGRSYQFNVKTVSGDSWKTYSKPIFGSVRTKPDKIQNLHCRPQNSTAIACSWIPPDSDFDGYSIECRKMDTQEVEFSRKLEKEKSLLNIMMLVPHKRYLVSIKVQSAGMTSEVVEDSTITMIDRPPPPPPHIRVNEKDVLISKSSINFTVNCSWFSDTNGAVKYFTVVVREADGSDELKPEQQHPLPSYLEYRHNASIRVYQTNYFASKCAENPNSNSKSFNIKLGAEMESLGGKCDPTQQKFCDGPLKPHTAYRISIRAFTQLFDEDLKEFTKPLYSDTFFSLPITTESEPLFGAIEGVSAGLFLIGMLVAVVALLICRQKVSHGRERPSARLSIRRDRPLSVHLNLGQKGNRKTSCPIKINQFEGHFMKLQADSNYLLSKEYEELKDVGRNQSCDIALLPENRGKNRYNNILPYDATRVKLSNVDDDPCSDYINASYIPGNNFRREYIVTQGPLPGTKDDFWKMVWEQNVHNIVMVTQCVEKGRVKCDHYWPADQDSLYYGDLILQMLSESVLPEWTIREFKICGEEQLDAHRLIRHFHYTVWPDHGVPETTQSLIQFVRTVRDYINRSPGAGPTVVHCSAGVGRTGTFIALDRILQQLDSKDSVDIYGAVHDLRLHRVHMVQTECQYVYLHQCVRDVLRARKLRSEQENPLFPIYENVNPEYHRDPVYSRH

SEQ ID NO: 12554 - protein, 1997 aa, Homo sapiens
MLSHGAGLALWITLSLLQTGLAEPERCNFTLAESKASSHSVSIQWRILGSPCNFSLIYSSDTLGAALCPTFRIDNTTYGCNLQDLQAGTIYNFRIISLDEERTVVLQTDPLPPARFGVSKEKTTSTSLHVWWTPSSGKVTSYEVQLFDENNQKIQGVQIQESTSWNEYTFFNLTAGSKYNIAITAVSGGKRSFSVYTNGSTVPSPVKDIGISTKANSLLISWSHGSGNVERYRLMLMDKGILVHGGVVDKHATSYAFHGLTPGYLYNLTVMTEAAGLQNYRWKLVRTAPMEVSNLKVTNDGSLTSLKVKWQRPPGNVDSYNITLSHKGTIKESRVLAPWITETHFKELVPGRLYQVTVSCVSGELSAQKMAVGRTFPDKVANLEANNNGRMRSLVVSWSPPAGDWEQYRILLFNDSVVLLNITVGKEETQYVMDDTGLVPGRQYEVEVIVESGNLKNSERCQGRTVPLAVLQLRVKHANETSLSIMWQTPVAEWEKYIISLADRDLLLIHKSLSKDAKEFTFTDLVPGRKYMATVTSISGDLKNSSSVKGRTVPAQVTDLHVANQGMTSSLFTNWTQAQGDVEFYQVLLIHENVVIKNESISSETSRYSFHSLKSGSLYSVVVTTVSGGISSRQVVVEGRTVPSSVSGVTVNNSGRNDYLSVSWLLAPGDVDNYEVTLSHDGKVVQSLVIAKSVRECSFSSLTPGRLYTVTITTRSGKYENHSFSQERTVPDKVQGVSVSNSARSDYLRVSWVHATGDFDHYEVTIKNKNNFIQTKSIPKSENECVFVQLVPGRLYSVTVTTKSGQYEANEQGNGRTIPEPVKDLTLRNRSTEDLHVTWSGANGDVDQYEIQLLFNDMKVFPPFHLVNTATEYRFTSLTPGRQYKILVLTISGDVQQSAFIEGFTVPSAVKNIHISPNGATDSLTVNWTPGGGDVDSYTVSAFRHSQKVDSQTIPKHVFEHTFHRLEAGEQYQIMIASVSGSLKNQINVVGRTVPASVQGVIADNAYSSYSLIVSWQKAAGVAERYDILLLTENGILLRNTSEPATTKQHKFEDLTPGKKYKIQILTVSGGLFSKEAQTEGRTVPAAVTDLRITENSTRHLSFRWTASEGELSWYNIFLYNPDGNLQERAQVDPLVQSFSFQNLLQGRMYKMVIVTHSGELSNESFIFGRTVPASVSHLRGSNRNTTDSLWFNWSPASGDFDFYELILYNPNGTKKENWKDKDLTEWRFQGLVPGRKYVLWVVTHSGDLSNKVTAESRTAPSPPSLMSFADIANTSLAITWKGPPDWTDYNDFELQWLPRDALTVFNPYNNRKSEGRIVYGLRPGRSYQFNVKTVSGDSWKTYSKPIFGSVRTKPDKIQNLHCRPQNSTAIACSWIPPDSDFDGYSIECRKMDTQEVEFSRKLEKEKSLLNIMMLVPHKRYLVSIKVQSAGMTSEVVEDSTITMIDRPPPPPPHIRVNEKDVLISKSSINFTVNCSWFSDTNGAVKYFTVVVREADGSDELKPEQQHPLPSYLEYRHNASIRVYQTNYFASKCAENPNSNSKSFNIKLGAEMESLGGKCDPTQQKFCDGPLKPHTAYRISIRAFTQLFDEDLKEFTKPLYSDTFFSLPITTESEPLFGAIEGVSAGLFLIGMLVAVVALLICRQKVSHGRERPSARLSIRRDRPLSVHLNLGQKGNRKTSCPIKINQFEGHFMKLQADSNYLLSKEYEELKDVGRNQSCDIALLPENRGKNRYNNILPYDATRVKLSNVDDDPCSDYINASYIPGNNFRREYIVTQGPLPGTKDDFWKMVWEQNVHNIVMVTQCVEKGRVKCDHYWPADQDSLYYGDLILQMLSESVLPEWTIREFKICGEEQLDAHRLIRHFHYTVWPDHGVPETTQSLIQFVRTVRDYINRSPGAGPTVVHCSAGVGRTGTFIALDRILQQLDSKDSVDIYGAVHDLRLHRVHMVQTECQYVYLHQCVRDVLRARKLRSEQENPLFPIYENVNPEYHRDPVYSRH

SEQ ID NO: 12555 - protein, 454 aa, Homo sapiens
MVHKHGLEFYGYIKLINFIRLKNPTVEYMNSIYNPVPWEKEEYLKPVLEDDLLLQFDVEDLYEPVSVPFSYPNGLSENTSVVEKLKHMEARALSAEAALARAREDLQKMKQFAQDFVMHTDVRTCSSSTSVIADLQEDEDGVYFSSYGHYGIHEEMLKDKIRTESYRDFIYQNPHIFKDKVVLDVGCGTGILSMFAAKAGAKKVLGVDQSEILYQAMDIIRLNKLEDTITLIKGKIEEVHLPVEKVDVIISEWMGYFLLFESMLDSVLYAKNKYLAKGGSVYPDICTISLVAVSDVNKHADRIAFWDDVYGFKMSCMKKAVIPEAVVEVLDPKTLISEPCGIKHIDCHTTSISDLEFSSDFTLKITRTSMCTAIAGYFDIYFEKNCHNRVVFSTGPQSTKTHWKQTVFLLEKPFSVKAGEALKGKVTVHKNKKDPRSLTVTLTLNNSTQTYGLQ

SEQ ID NO: 12556 - protein, 564 aa, Homo sapiens
MKEVLSEGRGRTGRRRAHRHLLLEPPGRTGVRGRSDCCVCVLGGRGAVENEEDLPELSDSGDEAAWEDEDDADLPHGKQQTPCLFCNRLFTSAEETFSHCKSEHQFNIDSMVHKHGLEFYGYIKLINFIRLKNPTVEYMNSIYNPVPWEKEEYLKPVLEDDLLLQFDVEDLYEPVSVPFSYPNGLSENTSVVEKLKHMEARALSAEAALARAREDLQKMKQFAQDFVMHTDVRTCSSSTSVIADLQEDEDGVYFSSYGHYGIHEEMLKDKIRTESYRDFIYQNPHIFKDKVVLDVGCGTGILSMFAAKAGAKKVLGVDQSEILYQAMDIIRLNKLEDTITLIKGKIEEVHLPVEKVDVIISEWMGYFLLFESMLDSVLYAKNKYLAKGGSVYPDICTISLVAVSDVNKHADRIAFWDDVYGFKMSCMKKAVIPEAVVEVLDPKTLISEPCGIKHIDCHTTSISDLEFSSDFTLKITRTSMCTAIAGYFDIYFEKNCHNRVVFSTGPQSTKTHWKQTVFLLEKPFSVKAGEALKGKVTVHKNKKDPRSLTVTLTLNNSTQTYGLQ

SEQ ID NO: 12557 - protein, 531 aa, Homo sapiens
MCSLASGATGGRGAVENEEDLPELSDSGDEAAWEDEDDADLPHGKQQTPCLFCNRLFTSAEETFSHCKSEHQFNIDSMVHKHGLEFYGYIKLINFIRLKNPTVEYMNSIYNPVPWEKEEYLKPVLEDDLLLQFDVEDLYEPVSVPFSYPNGLSENTSVVEKLKHMEARALSAEAALARAREDLQKMKQFAQDFVMHTDVRTCSSSTSVIADLQEDEDGVYFSSYGHYGIHEEMLKDKIRTESYRDFIYQNPHIFKDKVVLDVGCGTGILSMFAAKAGAKKVLGVDQSEILYQAMDIIRLNKLEDTITLIKGKIEEVHLPVEKVDVIISEWMGYFLLFESMLDSVLYAKNKYLAKGGSVYPDICTISLVAVSDVNKHADRIAFWDDVYGFKMSCMKKAVIPEAVVEVLDPKTLISEPCGIKHIDCHTTSISDLEFSSDFTLKITRTSMCTAIAGYFDIYFEKNCHNRVVFSTGPQSTKTHWKQTVFLLEKPFSVKAGEALKGKVTVHKNKKDPRSLTVTLTLNNSTQTYGLQ

SEQ ID NO: 12558 - protein, 581 aa, Homo sapiens
MAASGRGLCKAVAASPFPAWRRDNTEARGGLKPEYDAVVIGAGHNGLVAAAYLQRLGVNTAVFERRHVIGGAAVTEEIIPGFKFSRASYLLSLLRPQIYTDLELKKHGLRLHLRNPYSFTPMLEEGAGSKVPRCLLLGTDMAENQKQIAQFSQKDAQVFPKYEEFMHRLALAIDPLLDAAPVDMAAFQHGSLLQRMRSLSTLKPLLKAGRILGAQLPRYYEVLTAPITKVLDQWFESEPLKATLATDAVIGAMTSPHTPGSGYVLLHHVMGGLEGMQGAWGYVQGGMGALSDAIASSATTHGASIFTEKTVAKVQVNSEGCVQGVVLEDGTEVRSKMVLSNTSPQITFLKLTPQEWLPEEFLERISQLDTRSPVTKINVAVDRLPSFLAAPNAPRGQPLPHHQCSIHLNCEDTLLLHQAFEDAMDGLPSHRPVIELCIPSSLDPTLAPPGCHVVSLFTQYMPYTLAGGKAWDEQERDAYADRVFDCIEVYAPGFKDSVVGRDILTPPDLERIFGLPGGNIFHCAMSLDQLYFARPVPLHSGYRCPLQGLYLCGSGAHPGGGVMGAAGRNAAHVAFRDLKSM

SEQ ID NO: 12559 - protein, 581 aa, Homo sapiens; identical to SEQ ID NO: 12558

SEQ ID NO: 12560 - protein, 756 aa, Homo sapiens
MAWSPPATLFLFLLLLGQPPPSRPQSLGTTKLRLVGPESKPEEGRLEVLHQGQWGTVCDDNFAIQEATVACRQLGFEAALTWAHSAKYGQGEGPIWLDNVRCVGTESSLDQCGSNGWGVSDCSHSEDVGVICHPRRHRGYLSETVSNALGPQGRRLEEVRLKPILASAKQHSPVTEGAVEVKYEGHWRQVCDQGWTMNNSRVVCGMLGFPSEVPVDSHYYRKVWDLKMRDPKSRLKSLTNKNSFWIHQVTCLGTEPHMANCQVQVAPARGKLRPACPGGMHAVVSCVAGPHFRPPKTKPQRKGSWAEEPRVRLRSGAQVGEGRVEVLMNRQWGTVCDHRWNLISASVVCRQLGFGSAREALFGARLGQGLGPIHLSEVRCRGYERTLSDCPALEGSQNGCQHENDAAVRCNVPNMGFQNQVRLAGGRIPEEGLLEVQVEVNGVPRWGSVCSENWGLTEAMVACRQLGLGFAIHAYKETWFWSGTPRAQEVVMSGVRCSGTELALQQCQRHGPVHCSHGGGRFLAGVSCMDSAPDLVMNAQLVQETAYLEDRPLSQLYCAHEENCLSKSADHMDWPYGYRRLLRFSTQIYNLGRTDFRPKTGRDSWVWHQCHRHYHSIEVFTHYDLLTLNGSKVAEGHKASFCLEDTNCPTGLQRRYACANFGEQGVTVGCWDTYRHDIDCQWVDITDVGPGNYIFQVIVNPHYEVAESDFSNNMLQCRCKYDGHRVWLHNCHTGNSYPANAELSLEQEQRLRNNLI

SEQ ID NO: 12561 - protein, 756 aa, Homo sapiens; identical to SEQ ID NO: 12560

SEQ ID NO: 12562 - protein, 146 aa, Homo sapiens
MTLTKGSFTYSSGEEYRGEWKEGRRHGFGQLMFADGGTYLGHFENGLFNGFGVLTFSDGSRYEGEFAQGKFNGVGVFIRYDNMTFEGEFKNGRVDGFGLLTFPDGSHGIPRNEGLFENNKLLRREKCSAIVQRAQSASKSARNLTA

SEQ ID NO: 12563 - protein, 146 aa, Homo sapiens; identical to SEQ ID NO: 12562

SEQ ID NO: 12564 - protein, 327 aa, Homo sapiens [sequence omitted]

SEQ ID NO: 12565 - protein, 164 aa, Homo sapiens
MLGPQVWSSVRQGLSRSLSRNVGVWASGEGKKVDIAGIYPPVTTPFTATAEVDYGKLEENLHKLGTFPFRGAVGGVCALANVLGAQVCQLERLCCTGQWEDAQKLQHRLIEPNAAVTRRFGIPGLKKIMDWFGYYGGPCRAPLQELSPAEEEALRMDFTSNGWL

SEQ ID NO: 12566 - protein, 164 aa, Homo sapiens; identical to SEQ ID NO: 12565

SEQ ID NO: 12567 - protein, 318 aa, Homo sapiens
MSAHNRGTELDLSWISKIQVNHPAVLRRAEQIQARRTVKKEWQAAWLLKAVTFIDLTTLSGDDTSSNIQRLCYKAKYPIREDLLKALNMHDKGITTAAVCVYPARVCDAVKALKAAGCNIPVASVAAGFPAGQTHLKTRLEEIRLAVEDGATEIDVVINRSLVLTGQWEALYDEIRQFRKACGEAHLKTILATGELGTLTNVYKASMIAMMAGSDFIKTSTGKETVNATFPVAIVMLRAIRDFFWKTGNKIGFKPAGGIRSAKDSLAWLSLVKEELGDEWLKPELFRIGASTLLSDIERQIYHHVTGRYAAYHDLPMS

SEQ ID NO: 12568 - protein, 256 aa, Homo sapiens
LDLQNTSESPGSSEACGTNPGSQNREKGVAGITTAAVCVYPARVCDAVKALKAAGCNIPVASVAAGFPAGQTHLKTRLEEIRLAVEDGATEIDVVINRSLVLTGQWEALYDEIRQFRKACGEAHLKTILATGELGTLTNVYKASMIAMMAGSDFIKTSTGKETVNATFPVAIVMLRAIRDFFWKTGNKIGFKPAGGIRSAKDSLAWLSLVKEELGDEWLKPELFRIGASTLLSDIERQIYHHVTGRYAAYHDLPMS

SEQ ID NO: 12569 - protein, 230 aa, Homo sapiens
MHDKGITTAAVCVYPARVCDAVKALKAAGCNIPVASVAAGFPAGQTHLKTRLEEIRLAVEDGATEIDVVINRSLVLTGQWEALYDEIRQFRKACGEAHLKTILATGELGTLTNVYKASMIAMMAGSDFIKTSTGKETVNATFPVAIVMLRAIRDFFWKTGNKIGFKPAGGIRSAKDSLAWLSLVKEELGDEWLKPELFRIGASTLLSDIERQIYHHVTGRYAAYHDLPMS

SEQ ID NO: 12570 - protein, 1051 aa, Homo sapiens
MLYKDFFKGKTVFNHWLPGMCYSNITFQLVSEATFNKSTLVEYSGVSHEPKQHRTAPYPPQNISVRIVNLNKNNWEEQSGNFPEESFMRSQDTIGKEKLFHFTEETPEIPSGNISSGWPDFNSSDYETTSQPYWWDSASAAPESEDEFVSVLPMEYENNSTLSETEKSTSGSFSFFPVQMILTWLPPKPPTAFDGFHIHIEREENFTEYLMVDEEAHEFVAELKEPGKYKLSVTTFSSSGSCETRKSQSAKSLSFYISPSGEWIEELTEKPQHVSVHVLSSTTALMSWTSSQENYNSTIVSVVSLTCQKQKESQRLEKQYCTQVNSSKPIIENLVPGAQYQVVIYLRKGPLIGPPSDPVTFAIVPTGIKDLMLYPLGPTAVVLSWTRPYLGVFRKYVVEMFYFNPATMTSEWTTYYEIAATVSLTASVRIANLLPAWYYNFRVTMVTWGDPELSCCDSSTISFITAPVAPEITSVEYFNSLLYISWTYGDDTTDLSHSRMLHWMVVAEGKKKIKKSVTRNVMTAILSLPPGDIYNLSVTACTERGSNTSMLRLVKLEPAPPKSLFAVNKTQTSVTLLWVEEGVADFFEVFCQQVGSSQKTKLQEPVAVSSHVVTISSLLPATAYNCSVTSFSHDSPSVPTFIAVSTMVTEMNPNVVVISVLAILSTLLIGLLLVTLIILRKKHLQMARECGAGTFVNFASLERDGKLPYNWRRSIFAFLTLLPSCLWTDYLLAFYINPWSKNGLKKRKLTNPVQLDDFDAYIKDMAKDSDYKFSLQFEELKLIGLDIPHFAADLPLNRCKNRYTNILPYDFSRVRLVSMNEEEGADYINANYIPGYNSPQEYIATQGPLPETRNDFWKMVLQQKSQIIVMLTQCNEKRRVKCDHYWPFTEEPIAYGDITVEMISEEEQDDWACRHFRINYADEMQDVMHFNYTAWPDHGVPTANAAESILQFVHMVRQQATKSKGPMIIHCSAGVGRTGTFIALDRLLQHIRDHEFVDILGLVSEMRSYRMSMVQTEEQYIFIHQCVQLMWMKKKQQFCISDVIYENVSKS

SEQ ID NO: 12571 - protein, 972 aa, Homo sapiens
MLYKDFFKGKTVFNHWLPGMCYSNITFQLVSEATFNKSTLVEYSGVSHEPKQHRTAPYPPQNISVRIVNLNKNNWEEQSGNFPEESFMRSQDTIGKEKLFHFTEETPEIPSGNISSGWPDFNSSDYETTSQPYWWDSASAAPESEDEFVSVLPMEYENNSTLSETEKSTSGSFSFFPVQMILTWLPPKPPTAFDGFHIHIEREENFTEYLMVDEEAHEFVAELKEPGKYKLSVTTFSSSGSCETRKSQSAKSLSFYISPSGEWIEELTEKPQHVSVHVLSSTTALMSWTSSQENYNSTIVSVVSLTCQKQKESQRLEKQYCTQVNSSKPIIENLVPGAQYQVVIYLRKGPLIGPPSDPVTFAIVPTGIKDLMLYPLGPTAVVLSWTRPYLGVFRKYVVEMFYFNPATMTSEWTTYYEIAATVSLTASVRIANLLPAWYYNFRVTMVTWGDPELSCCDSSTISFITAPVAPEITSVEYFNSLLYISWTYGDDTTDLSHSRMLHWMVVAEGKKKIKKSVTRNVMTAILSLPPGDIYNLSVTACTERGSNTSMLRLVKLEPAPPKSLFAVNKTQTSVTLLWVEEGVADFFEVFCQQVGSSQKTKLQEPVAVSSHVVTISSLLPATAYNCSVTSFSHDSPSVPTFIAVSTMVTEMNPNVVVISVLAILSTLLIGLLLVTLIILRKKHLQMARECGAGTFVNFASLERDGKLPYNWRRSIFAFLTLLPSCLWTDYLLAFYINPWSKNGLKKRKLTNPVQLDDFDAYIKDMAKDSDYKFSLQFEELKLIGLDIPHFAADLPLNRCKNRYTNILPYDFSRVRLVSMNEEEGADYINANYIPGYNSPQEYIATQGPLPETRNDFWKMVLQQKSQIIVMLTQCNEKRRVKCDHYWPFTEEPIAYGDITVEMISEEEQDDWACRHFRINYADEMQDVMHFNYTAWPDHGVPTANAAESILQFVHMVRQQATKSKGPMIIHCR

SEQ ID NO: 12572 - protein, 1216 aa, Homo sapiens
MGHLPTGIHGARRLLPLLWLFVLFKNATAFHVTVQDDNNIVVSLEASDVISPASVYVVKITGESKNYFFEFEEFNSTLPPPVIFKASYHGLYYIITLVVVNGNVVTKPSRSITVLTKPLPVTSVSIYDYKPSPETGVLFEIHYPEKYNVFTRVNISYWEGKDFRTMLYKDFFKGKTVFNHWLPGMCYSNITFQLVSEATFNKSTLVEYSGVSHEPKQHRTAPYPPQNISVRIVNLNKNNWEEQSGNFPEESFMRSQDTIGKEKLFHFTEETPEIPSGNISSGWPDFNSSDYETTSQPYWWDSASAAPESEDEFVSVLPMEYENNSTLSETEKSTSGSFSFFPVQMILTWLPPKPPTAFDGFHIHIEREENFTEYLMVDEEAHEFVAELKEPGKYKLSVTTFSSSGSCETRKSQSAKSLSFYISPSGEWIEELTEKPQHVSVHVLSSTTALMSWTSSQENYNSTIVSVVSLTCQKQKESQRLEKQYCTQVNSSKPIIENLVPGAQYQVVIYLRKGPLIGPPSDPVTFAIVPTGIKDLMLYPLGPTAVVLSWTRPYLGVFRKYVVEMFYFNPATMTSEWTTYYEIAATVSLTASVRIANLLPAWYYNFRVTMVTWGDPELSCCDSSTISFITAPVAPEITSVEYFNSLLYISWTYGDDTTDLSHSRMLHWMVVAEGKKKIKKSVTRNVMTAILSLPPGDIYNLSVTACTERGSNTSMLRLVKLEPAPPKSLFAVNKTQTSVTLLWVEEGVADFFEVFCQQVGSSQKTKLQEPVAVSSHVVTISSLLPATAYNCSVTSFSHDSPSVPTFIAVSTMVTEMNPNVVVISVLAILSTLLIGLLLVTLIILRKKHLQMARECGAGTFVNFASLERDGKLPYNWRRSIFAFLTLLPSCLWTDYLLAFYINPWSKNGLKKRKLTNPVQLDDFDAYIKDMAKDSDYKFSLQFEELKLIGLDIPHFAADLPLNRCKNRYTNILPYDFSRVRLVSMNEEEGADYINANYIPGYNSPQEYIATQGPLPETRNDFWKMVLQQKSQIIVMLTQCNEKRRVKCDHYWPFTEEPIAYGDITVEMISEEEQDDWACRHFRINYADEMQDVMHFNYTAWPDHGVPTANAAESILQFVHMVRQQATKSKGPMIIHCSAGVGRTGTFIALDRLLQHIRDHEFVDILGLVSEMRSYRMSMVQTEEQYIFIHQCVQLMWMKKKQQFCISDVIYENVSKS

SEQ ID NO: 12573 - protein, 1137 aa, Homo sapiens
MGHLPTGIHGARRLLPLLWLFVLFKNATAFHVTVQDDNNIVVSLEASDVISPASVYVVKITGESKNYFFEFEEFNSTLPPPVIFKASYHGLYYIITLVVVNGNVVTKPSRSITVLTKPLPVTSVSIYDYKPSPETGVLFEIHYPEKYNVFTRVNISYWEGKDFRTMLYKDFFKGKTVFNHWLPGMCYSNITFQLVSEATFNKSTLVEYSGVSHEPKQHRTAPYPPQNISVRIVNLNKNNWEEQSGNFPEESFMRSQDTIGKEKLFHFTEETPEIPSGNISSGWPDFNSSDYETTSQPYWWDSASAAPESEDEFVSVLPMEYENNSTLSETEKSTSGSFSFFPVQMILTWLPPKPPTAFDGFHIHIEREENFTEYLMVDEEAHEFVAELKEPGKYKLSVTTFSSSGSCETRKSQSAKSLSFYISPSGEWIEELTEKPQHVSVHVLSSTTALMSWTSSQENYNSTIVSVVSLTCQKQKESQRLEKQYCTQVNSSKPIIENLVPGAQYQVVIYLRKGPLIGPPSDPVTFAIVPTGIKDLMLYPLGPTAVVLSWTRPYLGVFRKYVVEMFYFNPATMTSEWTTYYEIAATVSLTASVRIANLLPAWYYNFRVTMVTWGDPELSCCDSSTISFITAPVAPEITSVEYFNSLLYISWTYGDDTTDLSHSRMLHWMVVAEGKKKIKKSVTRNVMTAILSLPPGDIYNLSVTACTERGSNTSMLRLVKLEPAPPKSLFAVNKTQTSVTLLWVEEGVADFFEVFCQQVGSSQKTKLQEPVAVSSHVVTISSLLPATAYNCSVTSFSHDSPSVPTFIAVSTMVTEMNPNVVVISVLAILSTLLIGLLLVTLIILRKKHLQMARECGAGTFVNFASLERDGKLPYNWRRSIFAFLTLLPSCLWTDYLLAFYINPWSKNGLKKRKLTNPVQLDDFDAYIKDMAKDSDYKFSLQFEELKLIGLDIPHFAADLPLNRCKNRYTNILPYDFSRVRLVSMNEEEGADYINANYIPGYNSPQEYIATQGPLPETRNDFWKMVLQQKSQIIVMLTQCNEKRRVKCDHYWPFTEEPIAYGDITVEMISEEEQDDWACRHFRINYADEMQDVMHFNYTAWPDHGVPTANAAESILQFVHMVRQQATKSKGPMIIHCR

SEQ ID NO: 12574 - protein, 46 aa, Homo sapiens
MRSYRMSMVQTEEQYIFIHQCVQLMWMKKKQQFCISDVIYENVSKS

SEQ ID NO: 12575 - protein, 46 aa, Homo sapiens; identical to SEQ ID NO: 12574

SEQ ID NO: 12576 - protein, 405 aa, Homo sapiens
MVTEMNPNVVVISVLAILSTLLIGLLLVTLIILRKKHLQMARECGAGTFVNFASLERDGKLPYNWRRSIFAFLTLLPSCLWTDYLLAFYINPWSKNGLKKRKLTNPVQLDDFDAYIKDMAKDSDYKFSLQFEELKLIGLDIPHFAADLPLNRCKNRYTNILPYDFSRVRLVSMNEEEGADYINANYIPGYNSPQEYIATQGPLPETRNDFWKMVLQQKSQIIVMLTQCNEKRRVKCDHYWPFTEEPIAYGDITVEMISEEEQDDWACRHFRINYADEMQDVMHFNYTAWPDHGVPTANAAESILQFVHMVRQQATKSKGPMIIHCSAGVGRTGTFIALDRLLQHIRDHEFVDILGLVSEMRSYRMSMVQTEEQYIFIHQCVQLMWMKKKQQFCISDVIYENVSKS

SEQ ID NO: 12577 - protein, 1023 aa, Homo sapiens
MLYKDFFKGKTVFNHWLPGMCYSNITFQLVSEATFNKSTLVEYSGVSHEPKQHRTAPYPPQNISVRIVNLNKNNWEEQSGNFPEESFMRSQDTIGKEKLFHFTEETPEIPSGNISSGWPDFNSSDYETTSQPYWWDSASAAPESEDEFVSVLPMEYENNSTLSETEKSTSGSFSFFPVQMILTWLPPKPPTAFDGFHIHIEREENFTEYLMVDEEAHEFVAELKEPGKYKLSVTTFSSSGSCETRKSQSAKSLSFYISPSGEWIEELTEKPQHVSVHVLSSTTALMSWTSSQENYNSTIVSVVSLTCQKQKESQRLEKQYCTQVNSSKPIIENLVPGAQYQVVIYLRKGPLIGPPSDPVTFAIVPTGIKDLMLYPLGPTAVVLSWTRPYLGVFRKYVVEMFYFNPATMTSEWTTYYEIAATVSLTASVRIANLLPAWYYNFRVTMVTWGDPELSCCDSSTISFITAPVAPEITSVEYFNSLLYISWTYGDDTTDLSHSRMLHWMVVAEGKKKIKKSVTRNVMTAILSLPPGDIYNLSVTACTERGSNTSMLRLVKLEPAPPKSLFAVNKTQTSVTLLWVEEGVADFFEVFCQQVGSSQKTKLQEPVAVSSHVVTISSLLPATAYNCSVTSFSHDSPSVPTFIAVSTMVTEMNPNVVVISVLAILSTLLIGLLLVTLIILRKKHLQMARECGAGTFVNFASLERDGKLPYNWSKNGLKKRKLTNPVQLDDFDAYIKDMAKDSDYKFSLQFEELKLIGLDIPHFAADLPLNRCKNRYTNILPYDFSRVRLVSMNEEEGADYINANYIPGYNSPQEYIATQGPLPETRNDFWKMVLQQKSQIIVMLTQCNEKRRVKCDHYWPFTEEPIAYGDITVEMISEEEQDDWACRHFRINYADEMQDVMHFNYTAWPDHGVPTANAAESILQFVHMVRQQATKSKGPMIIHCSAGVGRTGTFIALDRLLQHIRDHEFVDILGLVSEMRSYRMSMVQTEEQYIFIHQCVQLMWMKKKQQFCISDVIYENVSKS

SEQ ID NO: 12578 - protein, 1188 aa, Homo sapiens
MGHLPTGIHGARRLLPLLWLFVLFKNATAFHVTVQDDNNIVVSLEASDVISPASVYVVKITGESKNYFFEFEEFNSTLPPPVIFKASYHGLYYIITLVVVNGNVVTKPSRSITVLTKPLPVTSVSIYDYKPSPETGVLFEIHYPEKYNVFTRVNISYWEGKDFRTMLYKDFFKGKTVFNHWLPGMCYSNITFQLVSEATFNKSTLVEYSGVSHEPKQHRTAPYPPQNISVRIVNLNKNNWEEQSGNFPEESFMRSQDTIGKEKLFHFTEETPEIPSGNISSGWPDFNSSDYETTSQPYWWDSASAAPESEDEFVSVLPMEYENNSTLSETEKSTSGSFSFFPVQMILTWLPPKPPTAFDGFHIHIEREENFTEYLMVDEEAHEFVAELKEPGKYKLSVTTFSSSGSCETRKSQSAKSLSFYISPSGEWIEELTEKPQHVSVHVLSSTTALMSWTSSQENYNSTIVSVVSLTCQKQKESQRLEKQYCTQVNSSKPIIENLVPGAQYQVVIYLRKGPLIGPPSDPVTFAIVPTGIKDLMLYPLGPTAVVLSWTRPYLGVFRKYVVEMFYFNPATMTSEWTTYYEIAATVSLTASVRIANLLPAWYYNFRVTMVTWGDPELSCCDSSTISFITAPVAPEITSVEYFNSLLYISWTYGDDTTDLSHSRMLHWMVVAEGKKKIKKSVTRNVMTAILSLPPGDIYNLSVTACTERGSNTSMLRLVKLEPAPPKSLFAVNKTQTSVTLLWVEEGVADFFEVFCQQVGSSQKTKLQEPVAVSSHVVTISSLLPATAYNCSVTSFSHDSPSVPTFIAVSTMVTEMNPNVVVISVLAILSTLLIGLLLVTLIILRKKHLQMARECGAGTFVNFASLERDGKLPYNWSKNGLKKRKLTNPVQLDDFDAYIKDMAKDSDYKFSLQFEELKLIGLDIPHFAADLPLNRCKNRYTNILPYDFSRVRLVSMNEEEGADYINANYIPGYNSPQEYIATQGPLPETRNDFWKMVLQQKSQIIVMLTQCNEKRRVKCDHYWPFTEEPIAYGDITVEMISEEEQDDWACRHFRINYADEMQDVMHFNYTAWPDHGVPTANAAESILQFVHMVRQQATKSKGPMIIHCSAGVGRTGTFIALDRLLQHIRDHEFVDILGLVSEMRSYRMSMVQTEEQYIFIHQCVQLMWMKKKQQFCISDVIYENVSKS

SEQ ID NO: 12579 - protein, 106 aa, Homo sapiens
MVDLTQVMDDEVFMAFASYATIILSKMMLMSTATAFYRLTRKVFANPEDCVAFGKGENAKKYLRTDDRVERVRSHCKAVTISIFERQSQNGATNEVKSMLYRVQQL

SEQ ID NO: 12580 - protein, 155 aa, Homo sapiens
MVDLTQVMDDEVFMAFASYATIILSKMMLMSTATAFYRLTRKVFANPEDCVAFGKGENAKKYLRTDDRVERVRRAHLNDLENIIPFLGIGLLYSLSGPDPSTAILHFRLFVGARIYHTIAYLTPLPQPNRALSFFVGYGVTLSMAYRLLKSKLYL

SEQ ID NO: 12581 - protein, 155 aa, Homo sapiens; identical to SEQ ID NO: 12580

SEQ ID NO: 12582 - protein, 155 aa, Homo sapiens; identical to SEQ ID NO: 12580

SEQ ID NO: 12583 - protein, 124 aa, Homo sapiens
MVDLTQVMDDEVFMAFASYATIILSKMMLMSTATAFYRLTRKVFANPEDCVAFGKGENAKKYLRTDDRVERVRRAQEILGPERQIQKNLHVNETGVEMRMAGNAWKQTCNCLMAWSSKSQSRLA

SEQ ID NO: 12584 - protein, 169 aa, Homo sapiens [sequence omitted]

SEQ ID NO: 12585 - protein, 87 aa, Homo sapiens
MVDLTQVMDDEVFMAFASYATIILSKMMLMSTATAFYRLTRKVFANPEDCVAFGKGENAKKYLRTDDRVERVRRIKQTLSIYLASSI

SEQ ID NO: 12586 - protein, 402 aa, Homo sapiens
MVHIESRKSRRRSSEVEIFVDCECGKTEFNELIQLLKFQTTIVTLNPPENIWTEEEGKELEDVPWFPRKISELDKCSHRVLMYGSELDADHPGFKDNVYRQRRKYFVDVAMGYKYGQPIPRVEYTEEETKTWGVVFRELSKLYPTHACREYLKNFPLLTKYCGYREDNVPQLEDVSMFLKERSGFTVRPVAGYLSPRDFLAGLAYRVFHCTQYIRHGSDPLYTPEPDTCHELLGHVPLLADPKFAQFSQEIGLASLGASDEDVQKLATCYFFTIEFGLCKQEGQLRAYGAGLLSSIGELKHALSDKACVKAFDPKTTCLQECLITTFQEAYFVSESFEEAKEKMRDFAKSITRPFSVYFNPYTQSIEILKDTRSIENVVQDLRSDLNTVCDALNKMNQYLGI

SEQ ID NO: 12587 - protein, 427 aa, Homo sapiens
MAPKKRPETQKTSEIVLRPRNKRSRSPLELEPEAKKLCAKGSGPSRRCDSDCLWVGLAGPQILPPCRSIVRTLHQHKLGRASWPSVQQGLQQSFLHTLDSYRILQKAAPFDRRATSLAWHPTHPSTVAVGSKGGDIMLWNFGIKDKPTFIKGIGAGGSITGLKFNPLNTNQFYASSMEGTTRLQDFKGNILRVFASSDTINIWFCSLDVSASSRMVVTGDNVGNVILLNMDGKELWNLRMHKKKVTHVALNPCCDWFLATASVDQTVKIWDLRQVRGKASFLYSLPHRHPVNAACFSPDGARLLTTDQKSEIRVYSASQWDCPLGLIPHPHRHFQHLTPIKAAWHPRYNLIVVGRYPDPNFKSCTPYELRTIDVFDGNSGKMMCQLYDPESSGISSLNEFNPMGDTLASAMGYHILIWSQEEARTRK

SEQ ID NO: 12588 - protein, 238 aa, Homo sapiens
MAPKKRPETQKTSEIVLRPRNKRSRSPLELEPEAKKLCAKGSGPSRRCDSDCLWVGLAGPQILPPCRSIVRTLHQHKLGRASWPSVQQGLQQSFLHTLDSYRILQKAAPFDRRATSLAWHPTHPSTVAVGSKGGDIMLWNFGIKDKPTFIKGAAWHPRYNLIVVGRYPDPNFKSCTPYELRTIDVFDGNSGKMMCQLYDPESSGISSLNEFNPMGDTLASAMGYHILIWSQEEARTRK

SEQ ID NO: 12589 - protein, 270 aa, Homo sapiens
MKQGFLSGNSAEKPFVRLERKICLFCLAGPSRRCDSDCLWVGLAGPQILPPCRSIVRTLHQHKLGRASWPSVQQGLQQSFLHTLDSYRILQKAAPFDRRATSLAWHPTHPSTVAVGSKGGDIMLWNFGIKDKPTFIKGIGAGGSITGLKFNPLNTNQFYASSMEGTTRLQDFKGNILRVFASSDTINIWFCSLDVSASSRMVVTGDNVGNVILLNMDGKELWNLRMHKKKVTHVALNPCCDWFLATASVDQTVKIWDLRQLVSVPMEPGS

SEQ ID NO: 12590 - protein, 264 aa, Homo sapiens
MAAAAVARLWWRGILGASALTRGTGRPSVLLLPVRRESAGADTRPTVRPRNDVAHKQLSAFGEYVAEILPKYVQQVQVSCFNELEVCIHPDGVIPVLTFLRDHTNAQFKSLVDLTAVDVPTRQNRFEIVYNLLSLRFNSRIRVKTYTDELTPIESAVSVFKAANWYEREIWDMFGVFFANHPDLRRILTDYGFEGHPFRKDFPLSGYVELRYDDEVKRVVAEPVELAQEFRKFDLNSPWEAFPVYRQPPESLKLEAGDKKPDAK

SEQ ID NO: 12591 - protein, 121 aa, Homo sapiens
MAAAAVARLWWRGILGASALTRGTGRPSVLLLPVRRESAGADTRPTVRPRNDVAHKQLSAFGEYVAEILPKYVQQVQVILTNVIWVWVKKEPCSQGMWEWADLFQRNYRFLHPKLGLFSQH

SEQ ID NO: 12592 - protein, 205 aa, Homo sapiens
MTGLALLYSGVFVAFWACALAVGVCYTIFDLGFRFDVAWFLTETSPFMWSNLGIGLAISLSVVGAAWGIYITGSSIIGGGVKAPRIKTKNLVSIIFCEAVAIYGIIMAIVISNMAEPFSATDPKAIGHRNYHAGYSMFGAGLTVGLSNLFCGVCVGIVGSGAALADAQNPSLFVKILIVEIFGSAIGLFGVIVAILQTSRVKMGD

SEQ ID NO: 12593 - protein, 158 aa, Homo sapiens
MWSNLGIGLAISLSVVGAAWGIYITGSSIIGGGVKAPRIKTKNLVSIIFCEAVAIYGIIMAIVISNMAEPFSATDPKAIGHRNYHAGYSMFGAGLTVGLSNLFCGVCVGIVGSGAALADAQNPSLFVKILIVEIFGSAIGLFGVIVAILQTSRVKMGD

SEQ ID NO: 12594 - protein, 306 aa, Homo sapiens
MPSTQLLAAAAAAATAPGPTPPPLAPGSLRSPVPCPVPRLPRCHPVLTRHLVLRVQRENPGVLMGGRYTPPDCTPAQTVAVIIPFRHREHHLRYWLHYLHPILRRQRLRYGVYVINQHGEDTFNRAKLLNVGFLEALKEDAAYDCFIFSDVDLVPMDDRNLYRCGDQPRHFAIAMDKFGFRLPYAGYFGGVSGLSKAQFLRINGFPNEYWGWGGEDDDIFNRISLTGMKISRPDIRIGRYRMIKHDRDKHNEPNPQRFTKIQNTKLTMKRDGIGSVRYQVLEVSRQPLFTNITVDIGRPPSWPPRG

SEQ ID NO: 12595 - protein, 372 aa, Homo sapiens
MSRLLGGTLERVCKAVLLLCLLHFLVAVILYFDVYAQHLAFFSRFSARGPAHALHPAASSSSSSSNCSRPNATASSSGLPEVPSALPGPTAPTLPPCPDSPPGLVGRLLIEFTSPMPLERVQRENPGVLMGGRYTPPDCTPAQTVAVIIPFRHREHHLRYWLHYLHPILRRQRLRYGVYVINQHGEDTFNRAKLLNVGFLEALKEDAAYDCFIFSDVDLVPMDDRNLYRCGDQPRHFAIAMDKFGFRLPYAGYFGGVSGLSKAQFLRINGFPNEYWGWGGEDDDIFNRISLTGMKISRPDIRIGRYRMIKHDRDKHNEPNPQRFTKIQNTKLTMKRDGIGSVRYQVLEVSRQPLFTNITVDIGRPPSWPPRG

SEQ ID NO: 12596 - protein, 372 aa, Homo sapiens; identical to SEQ ID NO: 12595

SEQ ID NO: 12597 - protein, 372 aa, Homo sapiens; identical to SEQ ID NO: 12595

SEQ ID NO: 12598 - protein, 372 aa, Homo sapiens; identical to SEQ ID NO: 12595

SEQ ID NO: 12599 - protein, 306 aa, Homo sapiens; identical to SEQ ID NO: 12594

SEQ ID NO: 12600 - protein, 375 aa, Homo sapiens
MGLLVFVRNLLLALCLFLVLGFLYYSAWKLHLLQWEEDSNSVVLSFDSAGQTLGSEYDRLGFLLNLDSKLPAELATKYANFSEGACKPGYASALMTAIFPRFSKPAPMFLDDSFRKWARIREFVPPFGIKGQDNLIKAILSVTKEYRLTPALDSLRCRRCIIVGNGGVLANKSLGSRIDDYDIVVRLNSAPVKGFEKDVGSKTTLRITYPEGAMQRPEQYERDSLFVLAGFKWQDFKWLKYIVYKERVSASDGFWKSVATRVPKEPPEIRILNPYFIQEAAFTLIGLPFNNGLMGRGNIPTLGSVAVTMALHGCDEVAVAGFGYDMSTPNAPLHYYETVRMAAIKESWTHNIQREKEFLRKLVKARVITDLSSGI

SEQ ID NO: 12601 - protein, 268 aa, Homo sapiens
MFLDDSFRKWARIREFVPPFGIKGQDNLIKAILSVTKEYRLTPALDSLRCRRCIIVGNGGVLANKSLGSRIDDYDIVVRLNSAPVKGFEKDVGSKTTLRITYPEGAMQRPEQYERDSLFVLAGFKWQDFKWLKYIVYKERVSASDGFWKSVATRVPKEPPEIRILNPYFIQEAAFTLIGLPFNNGLMGRGNIPTLGSVAVTMALHGCDEVAVAGFGYDMSTPNAPLHYYETVRMAAIKESWTHNIQREKEFLRKLVKARVITDLSSGI

SEQ ID NO: 12602 - protein, 375 aa, Homo sapiens; identical to SEQ ID NO: 12600

SEQ ID NO: 12603 - protein, 375 aa, Homo sapiens; identical to SEQ ID NO: 12600

SEQ ID NO: 12604 - protein, 261 aa, Homo sapiens [sequence omitted]

SEQ ID NO: 12605 - protein, 1907 aa, Homo sapiens
MAPEPAPGRTMVPLVPALVMLGLVAGAHGDSKPVFIKVPEDQTGLSGGVASFVCQATGEPKPRITWMKKGKKVSSQRFEVIEFDDGAGSVLRIQPLRVQRDEAIYECTATNSLGEINTSAKLSVLEEEQLPPGFPSIDMGPQLKVVEKARTATMLCAAGGNPDPEISWFKDFLPVDPATSNGRIKQLRSGALQIESSEESDQGKYECVATNSAGTRYSAPANLYVRVRRVAPRFSIPPSSQEVMPGGSVNLTCVAVGAPMPYVKWMMGAEELTKEDEMPVGRNVLELSNVVRSANYTCVAISSLGMIEATAQVTVKALPKPPIDLVVTETTATSVTLTWDSGNSEPVTYYGIQYRAAGTEGPFQEVDGVATTRYSIGGLSPFSEYAFRVLAVNSIGRGPPSEAVRARTGEQAPSSPPRRVQARMLSASTMLVQWEPPEEPNGLVRGYRVYYTPDSRRPPNAWHKHNTDAGLLTTVGSLLPGITYSLRVLAFTAVGDGPPSPTIQVKTQQGVPAQPADFQAEVESDTRIQLSWLLPPQERIIMYELVYWAAEDEDQQHKVTFDPTSSYTLEDLKPDTLYRFQLAARSDMGVGVFTPTIEARTAQSTPSAPPQKVMCVSMGSTTVRVSWVPPPADSRNGVITQYSVAYEAVDGEDRGRHVVDGISREHSSWDLVGLEKWTEYRVWVRAHTDVGPGPESSPVLVRTDEDVPSGPPRKVEVEPLNSTAVHVYWKLPVPSKQHGQIRGYQVTYVRLENGEPRGLPIIQDVMLAEAQWRPEESEDYETTISGLTPETTYSVTVAAYTTKGDGARSKPKIVTTTGAVPGRPTMMISTTAMNTALLQWHPPKELPGELLGYRLQYCRADEARPNTIDFGKDDQHFTVTGLHKGTTYIFRLAAKNRAGLGEEFEKEIRTPEDLPSGFPQNLHVTGLTTSTTELAWDPPVLAERNGRIISYTVVFRDINSQQELQNITTDTRFTLTGLKPDTTYDIKVRAWTSKGSGPLSPSIQSRTMPVEQVFAKNFRVAAAMKTSVLLSWEVPDSYKSAVPFKILYNGQSVEVDGHSMRKLIADLQPNTEYSFVLMNRGSSAGGLQHLVSIRTAPDLLPHKPLPASAYIEDGRFDLSMPHVQDPSLVRWFYIVVVPIDRVGGSMLTPRWSTPEELELDELLEAIEQGGEEQRRRRRQAERLKPYVAAQLDVLPETFTLGDKKNYRGFYNRPLSPDLSYQCFVLASLKEPMDQKRYASSPYSDEIVVQVTPAQQQEEPEMLWVTGPVLAVILIILIVIAILLFKRKRTHSPSSKDEQSIGLKDSLLAHSSDPVEMRRLNYQTPGMRDHPPIPITDLADNIERLKANDGLKFSQEYESIDPGQQFTWENSNLEVNKPKNRYANVIAYDHSRVILTSIDGVPGSDYINANYIDGYRKQNAYIATQGPLPETMGDFWRMVWEQRTATVVMMTRLEEKSRVKCDQYWPARGTETCGLIQVTLLDTVELATYTVRTFALHKSGSSEKRELRQFQFMAWPDHGVPEYPTPILAFLRRVKACNPLDAGPMVVHCSAGVGRTGCFIVIDAMLERMKHEKTVDIYGHVTCMRSQRNYMVQTEDQYVFIHEALLEAATCGHTEVPARNLYAHIQKLGQVPPGESVTAMELEFKLLASSKAHTSRFISANLPCNKFKNRLVNIMPYELTRVCLQPIRGVEGSDYINASFLDGYRQQKAYIATQGPLAESTEDFWRMLWEHNSTIIVMLTKLREMGREKCHQYWPAERSARYQYFVVDPMAEYNMPQYILREFKVTDARDGQSRTIRQFQFTDWPEQGVPKTGEGFIDFIGQVHKTKEQFGQDGPITVHCSAGVGRTGVFITLSIVLERMRYEGVVDMFQTVKTLRTQRPAMVQTEDQYQLCYRAALEYLGSFDHYAT

SEQ ID NO: 12606 - protein, 1898 aa, Homo sapiens
MAPEPAPGRTMVPLVPALVMLGLVAGAHGDSKPVFIKVPEDQTGLSGGVASFVCQATGEPKPRITWMKKGKKVSSQRFEVIEFDDGAGSVLRIQPLRVQRDEAIYECTATNSLGEINTSAKLSVLEEEQLPPGFPSIDMGPQLKVVEKARTATMLCAAGGNPDPEISWFKDFLPVDPATSNGRIKQLRSGALQIESSEESDQGKYECVATNSAGTRYSAPANLYVRVRRVAPRFSIPPSSQEVMPGGSVNLTCVAVGAPMPYVKWMMGAEELTKEDEMPVGRNVLELSNVVRSANYTCVAISSLGMIEATAQVTVKALPKPPIDLVVTETTATSVTLTWDSGNSEPVTYYGIQYRAAGTEGPFQEVDGVATTRYSIGGLSPFSEYAFRVLAVNSIGRGPPSEAVRARTGEQAPSSPPRRVQARMLSASTMLVQWEPPEEPNGLVRGYRVYYTPDSRRPPNAWHKHNTDAGLLTTVGSLLPGITYSLRVLAFTAVGDGPPSPTIQVKTQQGVPAQPADFQAEVESDTRIQLSWLLPPQERIIMYELVYWAAEDEDQQHKVTFDPTSSYTLEDLKPDTLYRFQLAARSDMGVGVFTPTIEARTAQSTPSAPPQKVMCVSMGSTTVRVSWVPPPADSRNGVITQYSVAYEAVDGEDRGRHVVDGISREHSSWDLVGLEKWTEYRVWVRAHTDVGPGPESSPVLVRTDEDVPSGPPRKVEVEPLNSTAVHVYWKLPVPSKQHGQIRGYQVTYVRLENGEPRGLPIIQDVMLAEAQETTISGLTPETTYSVTVAAYTTKGDGARSKPKIVTTTGAVPGRPTMMISTTAMNTALLQWHPPKELPGELLGYRLQYCRADEARPNTIDFGKDDQHFTVTGLHKGTTYIFRLAAKNRAGLGEEFEKEIRTPEDLPSGFPQNLHVTGLTTSTTELAWDPPVLAERNGRIISYTVVFRDINSQQELQNITTDTRFTLTGLKPDTTYDIKVRAWTSKGSGPLSPSIQSRTMPVEQVFAKNFRVAAAMKTSVLLSWEVPDSYKSAVPFKILYNGQSVEVDGHSMRKLIADLQPNTEYSFVLMNRGSSAGGLQHLVSIRTAPDLLPHKPLPASAYIEDGRFDLSMPHVQDPSLVRWFYIVVVPIDRVGGSMLTPRWSTPEELELDELLEAIEQGGEEQRRRRRQAERLKPYVAAQLDVLPETFTLGDKKNYRGFYNRPLSPDLSYQCFVLASLKEPMDQKRYASSPYSDEIVVQVTPAQQQEEPEMLWVTGPVLAVILIILIVIAILLFKRKRTHSPSSKDEQSIGLKDSLLAHSSDPVEMRRLNYQTPGMRDHPPIPITDLADNIERLKANDGLKFSQEYESIDPGQQFTWENSNLEVNKPKNRYANVIAYDHSRVILTSIDGVPGSDYINANYIDGYRKQNAYIATQGPLPETMGDFWRMVWEQRTATVVMMTRLEEKSRVKCDQYWPARGTETCGLIQVTLLDTVELATYTVRTFALHKSGSSEKRELRQFQFMAWPDHGVPEYPTPILAFLRRVKACNPLDAGPMVVHCSAGVGRTGCFIVIDAMLERMKHEKTVDIYGHVTCMRSQRNYMVQTEDQYVFIHEALLEAATCGHTEVPARNLYAHIQKLGQVPPGESVTAMELEFKLLASSKAHTSRFISANLPCNKFKNRLVNIMPYELTRVCLQPIRGVEGSDYINASFLDGYRQQKAYIATQGPLAESTEDFWRMLWEHNSTIIVMLTKLREMGREKCHQYWPAERSARYQYFVVDPMAEYNMPQYILREFKVTDARDGQSRTIRQFQFTDWPEQGVPKTGEGFIDFIGQVHKTKEQFGQDGPITVHCSAGVGRTGVFITLSIVLERMRYEGVVDMFQTVKTLRTQRPAMVQTEDQYQLCYRAALEYLGSFDHYAT

SEQ ID NO: 12607 - protein, 1907 aa, Homo sapiens; identical to SEQ ID NO: 12605

SEQ ID NO: 12608 - protein, 1898 aa, Homo sapiens; identical to SEQ ID NO: 12606

SEQ ID NO: 12609 - protein, 198 aa, Homo sapiens [sequence omitted]

SEQ ID NO: 12610 - protein, 415 aa, Homo sapiens
MASRWWRWRRGCSWKPAARSPGPGSPGRAGPLGPSAAAEVRAQVHRRKGLDLSQIPYINLVKHLTSACPNVCRISRFHHTTPDSKTHSGEKYTDPFKLGWRDLKGLYEDIRKELLISTSELKEMSEYYFDGKGKAFRPIIVALMARACNIHHNNSRHVQASQRAIALIAEMIHTASLVHDDVIDDASSRRGKHTVNKIWGEKKAVLAGDLILSAASIALARIGNTTVISILTQVIEDLVRGEFLQLGSKENENERFAHYLEKTFKKTASLIANSCKAVSVLGCPDPVVHEIAYQYGKNVGIAFQLIDDVLDFTSCSDQMGKPTSADLKLGLATGPVLFACQQFPEMNAMIMRRFSLPGDVDRARQYVLQSDGVQQTTYLAQQYCHEAIREISKLRPSPERDALIQLSEIVLTRDK

SEQ ID NO: 12611 - protein, 788 aa, Homo sapiens [sequence omitted]

SEQ ID NO: 12612 - protein, 786 aa, Homo sapiens
MSFSRALLWARLPAGRQAGHRAAICSALRPHFGPFPGVLGQVSVLATASSSASGGSKIPNTSLFVPLTVKPQGPSADGDVGAELTRPLDKNEVKKVLDKFYKRKEIQKLGADYGLDARLFHQAFISFRNYIMQSHSLDVDIHIVLNDICFGAAHADDLFPFFLRHAKQIFPVLDCKDDLRKISDLRIPPNWYPDARAMQRKIIFHSGPTNSGKTYHAIQKYFSAKSGVYCGPLKLLAHEIFEKSNAAGVPCDLVTGEERVTVQPNGKQASHVSCTVEMCSVTTPYEVAVIDEIQMIRDPARGWAWTRALLGLCAEEVHLCGEPAAIDLVMELMYTTGEEVEVRDYKRLTPISVLDHALESLDNLRPGDCIVCFSKNDIYSVSRQIEIRGLESAVIYGSLPPGTKLAQAKKFNDPNDPCKILVATDAIGMGLNLSIRRIIFYSLIKPSINEKGERELEPITTSQALQIAGRAGRFSSRFKEGEVTTMNHEDLSLLKEILKRPVDPIRAAGLHPTAEQIEMFAYHLPDATLSNLIDIFVDFSQVDGQYFVCNMDDFKFSAELIQHIPLSLRVRYVFCTAPINKKQPFVCSSLLQFARQYSRNEPLTFAWLRRYIKWPLLPPKNIKDLMDLEAVHDVLDLYLWLSYRFMDMFPDASLIRDLQKELDGIIQDGVHNITKLIKMSETHKLLNLEGFPSGSQSRLSGTLKSQARRTRGTKALGSKATEPPSPDAGELSLASRLVQQGLLTPDMLKQLEKEWMTQQTEHNKEKTESGTHPKGTRRKKKEPDSD

SEQ ID NO: 12613 - protein, 917 aa, Homo sapiens
MFAVHLMAFYFSKLKEDQIKKVDRFLYHMRLSDDTLLDIMRRFRAEMEKGLAKDTNPTAAVKMLPTFVRAIPDGSENGEFLSLDLGGSKFRVLKVQVAEEGKRHVQMESQFYPTPNEIIRGNGTELFEYVADCLADFMKTKDLKHKKLPLGLTFSFPCRQTKLEEGVLLSWTKKFKARGVQDTDVVSRLTKAMRRHKDMDVDILALVNDTVGTMMTCAYDDPYCEVGVIIGTGTNACYMEDMSNIDLVEGDEGRMCINTEWGAFGDDGALEDIRTEFDRELDLGSLNPGKQLFEKMISGLYLGELVRLILLKMAKAGLLFGGEKSSALHTKGKIETRHVAAMEKYKEGLANTREILVDLGLEPSEADCIAVQHVCTIVSFRSANLCAAALAAILTRLRENKKVERLRTTVGMDGTLYKIHPQYPKRLHKVVRKLVPSCDVRFLLSESGSTKGAAMVTAVASRVQAQRKQIDRVLALFQLTREQLVDVQAKMRAELEYGLKKKSHGLATVRMLPTYVCGLPDGTEKGKFLALDLGGTNFRVLLVKIRSGRRSVRMYNKIFAIPLEIMQGTGEELFDHIVQCIADFLDYMGLKGASLPLGFTFSFPCRQMSIDKGTLIGWTKGFKATDCEGEDVVDMLREAIKRRNEFDLDIVAVVNDTVGTMMTCGYEDPNCEIGLIAGTGSNMCYMEDMRNIEMVEGGEGKMCINTEWGGFGDNGCIDDIRTRYDTEVDEGSLNPGKQRYEKMTSGMYLGEIVRQILIDLTKQGLLFRGQISERLRTRGIFETKFLSQIESDRLALLQVRRILQQLGLDSTCEDSIVVKEVCGAVSRRAAQLCGAGLAAIVEKRREDQGLEHLRITVGVDGTLYKLHPHFSRILQETVKELAPRCDVTFMLSEDGSGKGAALITAVAKRLQQAQKEN

SEQ ID NO: 12614 - protein, 538 aa, Homo sapiens
MDVDILALVNDTVGTMMTCAYDDPYCEVGVIIGTGTNACYMEDMSNIDLVEGDEGRMCINTEWGAFGDDGALEDIRTEFDRELDLGSLNPGKQLFEKMISGLYLGELVRLILLKMAKAGLLFGGEKSSALHTKGKIETRHVAAMEKYKEGLANTREILVDLGLEPSEADCIAVQHVCTIVSFRSANLCAAALAAILTRLRENKKVERLRTTVGMDGTLYKIHPQYPKRLHKVVRKLVPSCDVRFLLSESGSTKGAAMVTAVASRVQAQRKQIDRVLALFQLTREQLVDVQAKMRAELEYGLKKKSHGLATVRMLPTYVCGLPDGTEKGKFLALDLGGTNFRVLLVKIRSGRRSVRMYNKIFAIPLEIMQGTGEELFDHIVQCIADFLDYMGLKGASLPLGFTFSFPCRQMSIDKGTLIGWTKGFKATDCEGEDVVDMLREAIKRRNEFDLDIVAVVNDTVGTMMTCGYEDPNCEIGLIAGTGSNMCYMEDMRNIEMVEGGEGKMGICFSFCLWFVLQVLIVVLRIVRYRKSSKLIKKF

SEQ ID NO: 12615 - protein, 736 aa, Homo sapiens [sequence omitted]

SEQ ID NO: 12616 - protein, 65 aa, Homo sapiens
MDPLTTVREQCEQLEKCVKARERLELYDEHVSSRSHTEEDCTEELFDFLHAKDHCVAHKLFNNLK

SEQ ID NO: 12617 - protein, 91 aa, Homo sapiens
MGLEDEQKMLTESGDPEEEEEEEEELVDPLTTVREQCEQLEKCVKARERLELYDEHVSSRSHTEEDCTEELFDFLHAKDHCVAHKLFNNLK

SEQ ID NO: 12618 - protein, 352 aa, Homo sapiens
MLRLLASGCARGPGPGVGARPAAGLFHPGRRQSRQASDAPRNQPPSPEFVARPVGVCSMMRLPVQTSPEGLDAAFIGVPLDTGTSNRPGARFGPRRIREESVMLGTVNPSTGALPFQSLMVADLGDVNVNLYNLQDSCRRIQEAYEKIVAAGCIPLTLGGDHTITYPILQAMAKKHGPVGLLHVDAHTDTTDKALGEKLYHGAPFRRCVDEGLLDCKRVVQIGIRGSSTTLDPYRYNRSQGFRVVLAEDCWMKSLVPLMGEVRQQMGGKPIYISFDIDALDPAYAPGTGTPEIAGLTPSQALEIIRGCQGLNVMGCDLVEVSPPYDLSGNTALLAANLLFEMLCALPKVTTV

SEQ ID NO: 12619 - protein, 352 aa, Homo sapiens; identical to SEQ ID NO: 12618

SEQ ID NO: 12620 - protein, 352 aa, Homo sapiens; identical to SEQ ID NO: 12618

SEQ ID NO: 12621 - protein, 412 aa, Homo sapiens
MILYRLKERFQLSLRQDKEKNQEIHLSPITLQPALSEAKTVHSMVQPEQAPKVLNVVVDPQGRGAPEIKATTATSVCPSPFKMKPIGLQERRGSNVSLTLDMSSLGNIEPFVSIPTPREKVAMEYLQSASRILTRSQLRDVVASSHLLQSEFMEIPMNFVDPKEIDIPRHGTKNRYKTILPNPLSRVCLRPKNVTDSLSTYINANYIRGYSGKEKAFIATQGPMINTVDDFWQMVWQEDSPVIVMITKLKEKNEKCVLYWPEKRGIYGKVEVLVISVNECDNYTIRNLVLKQGSHTQHVKHYWYTSWPDHKTPDSAQPLLQLMLDVEEDRLASQGRGPVVVHCSAGIGRTGCFIATSIGCQQLKEEGVVDALSIVCQLRMDRGGMVQTSEQYEFVHHALCLYESRLSAETVQ

SEQ ID NO: 12622 - protein, 657 aa, Homo sapiens
MRRAVCFPALCLLLNLHAAGCFSGNNDHFLAINQKKSGKPVFIYKHSQDIEKSLDIAPQKIYRHSYHSSSEAQVSKRHQIVNSAFPRPAYDPSLNLLAMDGQDLEVENLPIPAANVIVVTLQMDVNKLNITLLRIFRQGVAAALGLLPQQVHINRLIGKKNSIELFVSPINRKTGISDALPSEEVLRSLNINVLHQSLSQFGITEVSPEKNVLQGQHEADKIWSKEGFYAVVIFLSIFVIIVTCLMILYRLKERFQLSLRQDKEKNQEIHLSPITLQPALSEAKTVHSMVQPEQAPKVLNVVVDPQGRGAPEIKATTATSVCPSPFKMKPIGLQERRGSNVSLTLDMSSLGNIEPFVSIPTPREKVAMEYLQSASRILTRSQLRDVVASSHLLQSEFMEIPMNFVDPKEIDIPRHGTKNRYKTILPNPLSRVCLRPKNVTDSLSTYINANYIRGYSGKEKAFIATQGPMINTVDDFWQMVWQEDSPVIVMITKLKEKNEKCVLYWPEKRGIYGKVEVLVISVNECDNYTIRNLVLKQGSHTQHVKHYWYTSWPDHKTPDSAQPLLQLMLDVEEDRLASQGRGPVVVHCSAGIGRTGCFIATSIGCQQLKEEGVVDALSIVCQLRMDRGGMVQTSEQYEFVHHALCLYESRLSAETVQ

SEQ ID NO: 12623 - protein, 268 aa, Homo sapiens
MAVFADLDLRAGSDLKALRGLVETAAHLGYSVVAINHIVDFKEKKQEIEKPVAVSELFTTLPIVQGKSRPIKILTRLTIIVSDPSHCNVLRATSSRARLYDVVAVFPKTEKLFHIACTHLDVDLVCITVTEKLPFYFKRPPINVAIDRGLAFELVYSPAIKDSTMRRYTISSALNLMQICKGKNVIISSAAERPLEIRGPYDVANLGLLFGLSESDAKAAVSTNCRAALLHGETRKTAFGIISTVKKPRPSEGDEDCLPASKKAKCEG

SEQ ID NO: 12624 - protein, 262 aa, Homo sapiens
MGKDRKKFKLEALDADDLPQEEFDPGQDPYQHPPQDSSGQHVDVSPTSQRLQLLEAFDKWDSKDLEDLQILIKVKGKCTTDHISAAGPWLKFCGHLDNISNNLLTGAINIENSQANSVCSAVTQEFGPVPDTARYYKKHGIRWVVIGDENSSREHAVLEPPHLWGRAIITKSFARIHKTNPKKQGLLPLTFADPGDYNKVHPVDKLTIQGLKDFAPDKPLKCIIKHPNGTQETILLNHTFNEMRIKWFCAGSALNRMKELQQ

SEQ ID NO: 12625 - protein, 343 aa, Homo sapiens
MSVLRRMMRVSNRSLLAFIFFFSLSSSCLYFIYVAPGIDYPEGNNSSDYLVQTTTYLPENFTYSPYLPCPEKLPYMRGFLNVNVSEVSFDEIHQLFSKDLDIEPGGHWRPKDCKPRWKVAVLIPFRNRHEHLPIFFLHLIPMLQKQRLEFAFYVIEQTGTQPFNRAMLFNVGFKEAMKDSVWDCVIFHDVDHLPENDRNYYGCGEMPRHFAAKLDKYMYILPYKEFFGGVSGLTVEQFRKINGFPNAFWGWGGEDDDLWNRVHYAGYNVTRPEGDLGKYKSIPHHHRGEVQFLGRYKLLRYSKERQYIDGLNNLIYRPKILVDRLYTNISVNLMPELAPIEDY

SEQ ID NO: 12626 - protein, 382 aa, Homo sapiens
MSVLRRMMRVSNRSLLAFIFFFSLSSSCLYFIYVAPGIANTYLFMVQARGIMLRENVKTIGHMIRLYTNKNSTLNGTDYPEGNNSSDYLVQTTTYLPENFTYSPYLPCPEKLPYMRGFLNVNVSEVSFDEIHQLFSKDLDIEPGGHWRPKDCKPRWKVAVLIPFRNRHEHLPIFFLHLIPMLQKQRLEFAFYVIEQTGTQPFNRAMLFNVGFKEAMKDSVWDCVIFHDVDHLPENDRNYYGCGEMPRHFAAKLDKYMYILPYKEFFGGVSGLTVEQFRKINGFPNAFWGWGGEDDDLWNRVHYAGYNVTRPEGDLGKYKSIPHHHRGEVQFLGRYKLLRYSKERQYIDGLNNLIYRPKILVDRLYTNISVNLMPELAPIEDY

SEQ ID NO: 12627 - protein, 381 aa, Homo sapiens
MPFSNSHNALKLRFPAEDEFPDLSAHNNHMAKVLTPELYAELRAKSTPSGFTLDDVIQTGVDNPGHPYIMTVGCVAGDEESYEVFKDLFDPIIEDRHGGYKPSDEHKTDLNPDNLQGGDDLDPNYVLSSRVRTGRSIRGFCLPPHCSRGERRAIEKLAVEALSSLDGDLAGRYYALKSMTEAEQQQLIDDHFLFDKPVSPLLLASGMARDWPDARGIWHNDNKTFLVWVNEEDHLRVISMQKGGNMKEVFTRFCTGLTQIETLFKSKDYEFMWNPHLGYILTCPSNLGTGLRAGVHIKLPNLGKHEKFSEVLKRLRLQKRGTGGVDTAAVGGVFDVSNADRLGFSEVELVQMVVDGVKLLIEMEQRLEQGQAIDDLMPAQK

SEQ ID NO: 12628 - protein, 405 aa, Homo sapiens
MPFSNSHNALKLRFPAEDEFPDLSAHNNHMAKVLTPELYAELRAKSTPSGFTLDDVIQTGVDNPGHPYIMTVGCVAGDEESYEVFKDLFDPIIEDRHGGYKPSDEHKTDLNPDNLQVRGCGRAGRAGPGSSGAHSRLASQGGDDLDPNYVLSSRVRTGRSIRGFCLPPHCSRGERRAIEKLAVEALSSLDGDLAGRYYALKSMTEAEQQQLIDDHFLFDKPVSPLLLASGMARDWPDARGIWHNDNKTFLVWVNEEDHLRVISMQKGGNMKEVFTRFCTGLTQIETLFKSKDYEFMWNPHLGYILTCPSNLGTGLRAGVHIKLPNLGKHEKFSEVLKRLRLQKRGTGGVDTAAVGGVFDVSNADRLGFSEVELVQMVVDGVKLLIEMEQRLEQGQAIDDLMPAQK

SEQ ID NO: 12629 - protein, 381 aa, Homo sapiens; identical to SEQ ID NO: 12627

SEQ ID NO: 12630 - protein, 381 aa, Homo sapiens [sequence omitted]

SEQ ID NO: 12631 - protein, 381 aa, Homo sapiens; identical to SEQ ID NO: 12627

SEQ ID NO: 12632 - protein, 56 aa, Homo sapiens
MENKTFLEKLKFGIGDGNLQYYLYNWRCPGTDSEKGSGNFVNANGKLLPDVCRRPP

SEQ ID NO: 12633 - protein, 498 aa, Homo sapiens
MAEDSESAASQQSLELDDQDTCGIDGDNEEETEHAKGSPGGYLGAKKKKKKQKRKKEKPNSGGTKSDSASDSQEIKIQQPSKNPSVPMQKLQDIQRAMELLSACQGPARNIDEAAKHRYQFWDTQPVPKLDEVITSHGAIEPDKDNVRQEPYSLPQGFMWDTLDLSDAEVLKELYTLLNENYVEDDDNMFRFDYSPEFLLWALRPPGWLLQWHCGVRVSSNKKLVGFISAIPANIRIYDSVKKMVEINFLCVHKKLRSKRVAPVLIREITRRVNLEGIFQAVYTAGVVLPKPIATCRYWHRSLNPRKLVEVKFSHLSRNMTLQRTMKLYRLPDVTKTSGLRPMEPKDIKSVRELINTYLKQFHLAPVMDEEEVAHWFLPREHIIDTFVVESPNGKLTDFLSFYTLPSTVMHHPAHKSLKAAYSFYNIHTETPLLDLMSDALILAKSKGFDVFNALDLMENKTFLEKLKFGIGDGNLQYYLYNWRCPGTDSEKVGLVLQ

SEQ ID NO: 12634 - protein, 498 aa, Homo sapiens; identical to SEQ ID NO: 12633

SEQ ID NO: 12635 - protein, 676 aa, Homo sapiens
  VARIANT (1)...(676): Xaa = Any Amino Acid
MALFTPWKLSSQKLGFFLVTFGFIWGMMLLHFTIQQRTQPESSSMLREQILDLSKRYIKALAEENRNVVDGPYAGVMTAYDLKKTLAVLLDNILQRIGKLESKVDNLVVNGTGTNSTNSTTAVPSLVALEKINVADIINGAQEKCVLPPMDGYPHCEGKIKWMKDMWRSDPCYADYGVDGSTCSFFIYLSEVENWCPHLPWRAKNPYEEADHNSLAEIRTDFNILYSMMKKHEEFRWMRLRIRRMADAWIQAIKSLAEKQNLEKRKRKKVLVHLGLLTKESGFKIAETAFSGGPLGELVQWSDLITSLYLLGHDIRISASLAELKEIMKKVVGNRSGCPTVGDRIVELIYIDIVGLAQFKKTLGPSWVHYQCMLRVLDSFGTEPEFNHANYAQSKGHKTPWGKWNLNPQQFYTMFPHTPDNSFLGFVVEQHLNSSDIHHINEIKRQNQSLVYGKVDSFWKNKKIYLDIIHTYMEVHATVYGSSTKNIPSYVKNHGILSGRDLQFLLRETKLFVGLGFPYEGPAPLEAIANGCAFLNPKFNPPKSSKNTDFFIGKPTLRELTSQHPYAEVFIGRPHVWTVDLNNQEEVEDAVKAILNQKIEPYMPYEFTCEGMLQRINAFIEKQDFCHGQVMWPPLSALQVKLAEPGQSCKQVCQESQLICEPSFFQHLNKDKDMLX

SEQ ID NO: 12636 - protein, 741 aa, Homo sapiens
MALFTPWKLSSQKLGFFLVTFGFIWGMMLLHFTIQQRTQPESSSMLREQILDLSKRYIKALAEENRNVVDGPYAGVMTAYDLKKTLAVLLDNILQRIGKLESKVDNLVVNGTGTNSTNSTTAVPSLVALEKINVADIINGAQEKCVLPPMDGYPHCEGKIKWMKDMWRSDPCYADYGVDGSTCSFFIYLSEVENWCPHLPWRAKNPYEEADHNSLAEIRTDFNILYSMMKKHEEFRWMRLRIRRMADAWIQAIKSLAEKQNLEKRKRKKVLVHLGLLTKESGFKIAETAFSGGPLGELVQWSDLITSLYLLGHDIRISASLAELKEIMKKVVGNRSGCPTVGDRIVELIYIDIVGLAQFKKTLGPSWVHYQCMLRVLDSFGTEPEFNHANYAQSKGHKTPWGKWNLNPQQFYTMFPHTPDNSFLGFVVEQHLNSSDIHHINEIKRQNQSLVYGKVDSFWKNKKIYLDIIHTYMEVHATVYGSSTKNIPSYVKNHGILSGRDLQFLLRETKLFVGLGFPYEGPAPLEAIANGCAFLNPKFNPPKSSKNTDFFIGKPTLRELTSQHPYAEVFIGRPHVWTVDLNNQEEVEDAVKAILNQKIEPYMPYEFTCEGMLQRINAFIEKQDFCHGQVMWPPLSALQVKLAEPGQSCKQVCQESQLICEPSFFQHLNKDKDMLKYKVTCQSSELAKDILVPSFDPKNKHCVFQGDLLLFSCAGAHPRHQRVCPCRDFIKGQVALCKDCL

SEQ ID NO: 12637 - protein, 741 aa, Homo sapiens; identical to SEQ ID NO: 12636

SEQ ID NO: 12638 - protein, 1511 aa, Homo sapiens [sequence omitted]

SEQ ID NO: 12639 - protein, 1522 aa, Homo sapiens [sequence omitted]

SEQ ID NO: 12640 - protein, 1012 aa, Homo sapiens
MRWGLRPRGPGAAALATARSLWGTPRLPCSPGWQGATKRLLVRSVSGASNHQPNSNSGRYRDTVLLPQTSFPMKLLGRQQPDTELEIQQKCGFSELYSWQRERKVKTEFCLHDGPPYANGDPHVGHALNKILKDIANRFHMMNGSKIHFVPGWDCHGLPIEIKVLSELGREAQNLSAMEIRKKARSFAKAAIEKQKSAFIRWGIMADWNNCYYTFDGKYEAKQLRTFYQMYDKGLVYRSYKPVFWSPSSRTALAEAELEYNPEHVSRSIYVKFPLLKPSPKLASLIDGSSPVSILVWTTQPWTIPANEAVCYMPESKYAVVKCSKSGDLYVLAADKVASVASTLETTFETISTLSGVDLENGTCSHPLIPDKASPLLPANHVTMAKGTGLVHTAPAHGMEDYGVASQHNLPMDCLVDEDGVFTDVAGPELQNKAVLEEGTDVVIKMLQTAKNLLKEEKLVHSYPYDWRTKKPVVIRASKQWFINITDIKTAAKELLKKVKFIPGSALNGMVEMMDRRPYWCISRQRVWGVPIPVFHHKTKDEYLINSQTTEHIVKLVEQHGSDIWWTLPPEQLLPKEVLSEVGGPDALEYVPGQDILDIWFDSGTSWSYVLPGPDQRADLYLEGKDQLGGWFQSSLLTSVAARKRAPYKTVIVHGFTLGEKGEKMSKSLGNVIHPDVVVNGGQDQSKEPPYGADVLRWWVADSNVFTEVAIGPSVLNAARDDISKLRNTLRFLLGNVADFNPETDSIPVNDMYVIDQYMLHLLQDLANKITELYKQYDFGKVVRLLRTFYTRELSNFYFSIIKDRLYCEKENDPKRRSCQTALVEILDVIVRSFAPILPHLAEEVFQHIPYIKEPKSVFRTGWISTSSIWKKPGLEEAVESACAMRDSFLGSIPGKNAAEYKVITVIEPGLLFEIIEMLQSEETSSTSQLNELMMASESTLLAQEPREMTADVIELKGKFLINLEGGDIREESSYKVIVMPTTKEKCPRCWKYTAESSDTLCPRCAEVVSGK

SEQ ID NO: 12641 - protein, 1393 aa, Homo sapiens
MACSIVQFCYFQDLQAARDFLFPHLREEILSGALRRDPSKSTDWEDDGWGAWEENEPQEPEEEGNTCKTQKTSWLQDCVLSLSPTNDLMVIAREQKAVFLVPKWKYSDKGKEEMQFAVGWSGSLNVEEGECVTSALCIPLASQKRSSTGRPDWTCIVVGFTSGYVRFYTENGVLLLAQLLNEDPVLQLKCRTYEIPRHPGVTEQNEELSILYPAAIVTIDGFSLFQSLRACRNQVAKAAASGNENIQPPPLAYKKWGLQDIDTIIDHASVGIMTLSPFDQMKTASNIGGFNAAIKNSPPAMSQYITVGSNPFTGFFYALEGSTQPLLSHVALAVASKLTSALFNAASGWLGWKSKHEEEAVQKQKPKVEPATPLAVRFGLPDSRRHGESICLSPCNTLAAVTDDFGRVILLDVARGIAIRMWKGYRDAQIGWIQTVEDLHERVPEKADFSPFGNSQGPSRVAQFLVIYAPRRGILEVWSTQQGPRVGAFNVGKHCRLLYPGYKIMGLNNVTSQSWQPQTYQICLVDPVSGSVKTVNVPFHLALSDKKSERAKDMHLVKKLAALLKTKSPNLDLVETEIKELILDIKYPATKKQALESILASERLPFSCLRNITQTLMDTLKSQELESVDEGLLQFCANKLKLLQLYESVSQLNSLDFHLDTPFSDNDLALLLRLDEKELLKLQALLEKYKQENTRTNVRFSDDKDGVLPVKTFLEYLEYEKDVLNIKKISEEEYVALGSFFFWKCLHGESSTEDMCHTLESAGLSPQLLLSLLLSVWLSKEKDILDKPQSICCLHTMLSLLSKMKVAIDETWDSQSVSPWWQQMRTACIQSENNGAALLSAHVGHSVAAQISNNMTEKKFSQTVLGADSEALTDSWEALSLDTEYWKLLLKQLEDCLILQTLLHSKGNTQTSKVSSLQAEPLPRLSVKKLLEGGKGGIADSVAKWIFKQDFSPEVLKLANEERDAENPDEPKEGVNRSFLEVSEMEMDLGAIPDLLHLAYEQFPCSLELDVLHAHCCWEYVVQWNKDPEEARFFVRSIEHLKQIFNAHVQNGIALMMWNTFLVKRFSAATYLMDKVGKSPKDRLCRRDVGMSDTAMTSFLGSCLDLLQILMEADVSRDEIQVPVLDTEDAWLSVEGPISIVELALEQKHIHYPLVEHHSILCSILYAVMRFSLKTVKPLSLFDSKGKNAFFKDLTSIQLLPSGEMDPNFISVRQQFLLKVVSAAVQAQHSATKVKDPTEEATPTPFGKDQDWPALAVDLAHHLQVSEDVVRRHYVGELYNYGVDHLGEEAILQVHDKEVLASQLLVLTGQRLAHALLHTQTKEGMELLARLPPTLCTWLKAMDPQDLQNTEVPIATTAKLVNKVIELLPEKHGQYGLALHLIEAVEAISLPSL

SEQ ID NO: 12642 - protein, 1393 aa, Homo sapiens; identical to SEQ ID NO: 12641

SEQ ID NO: 12643 - protein, 501 aa, Homo sapiens
MPSASASRKSQEKPREIMDAAEDYAKERYGISSMIQSQEKPDRVLVRVRDLTIQKADEVVWVRARVHTSRAKGKQCFLVLRQQQFNVQALVAVGDHASKQMVKFAANINKESIVDVEGVVRKVNQKIGSCTQQDVELHVQKIYVISLAEPRLPLQLDDAVRPEAEGEEEGRATVNQDTRLDNRVIDLRTSTSQAVFRLQSGICHLFRETLINKGFVEIQTPKIISAASEGGANVFTVSYFKNNAYLAQSPQLYKQMCICADFEKVFSIGPVFRAEDSNTHRHLTEFVGLDIEMAFNYHYHEVMEEIADTMVQIFKGLQERFQTEIQTVNKQFPCEPFKFLEPTLRLEYCEALAMLREAGVEMGDEDDLSTPNEKLLGHLVKEKYDTDFYILDKYPLAVRPFYTMPDPRNPKQSNSYDMFMRGEEILSGAQRIHDPQLLTERALHHGIDLEKIKAYIDSFRFGAPPHAGGGIGLERVTMLFLGLHNVRQTSMFPRDPKRLTP

SEQ ID NO: 12644 - protein, 468 aa, Homo sapiens
MIQSQEKPDRVLVRVRDLTIQKADEVVWVRARVHTSRAKGKQCFLVLRQQQFNVQALVAVGDHASKQMVKFAANINKESIVDVEGVVRKVNQKIGSCTQQDVELHVQKIYVISLAEPRLPLQLDDAVRPEAEGEEEGRATVNQDTRLDNRVIDLRTSTSQAVFRLQSGICHLFRETLINKGFVEIQTPKIISAASEGGANVFTVSYFKNNAYLAQSPQLYKQMCICADFEKVFSIGPVFRAEDSNTHRHLTEFVGLDIEMAFNYHYHEVMEEIADTMVQIFKGLQERFQTEIQTVNKQFPCEPFKFLEPTLRLEYCEALAMLREAGVEMGDEDDLSTPNEKLLGHLVKEKYDTDFYILDKYPLAVRPFYTMPDPRNPKQSNSYDMFMRGEEILSGAQRIHDPQLLTERALHHGIDLEKIKAYIDSFRFGAPPHAGGGIGLERVTMLFLGLHNVRQTSMFPRDPKRLTP

SEQ ID NO: 12645 - protein, 468 aa, Homo sapiens; identical to SEQ ID NO: 12644

SEQ ID NO: 12646 - protein, 501 aa, Homo sapiens; identical to SEQ ID NO: 12643

SEQ ID NO: 12647 - protein, 821 aa, Homo sapiens
MDLAAAAEPGAGSQHLEVRDEVAEKCQKLFLDFLEEFQSSDGEIKYLQLAEELIRPERNTLVVSFVDLEQFNQQLSTTIQEEFYRVYPYLCRALKTFVKDRKEIPLAKDFYVAFQDLPTRHKIRELTSSRIGLLTRISGQVVRTHPVHPELVSGTFLCLDCQTVIRDVEQQFKYTQPNICRNPVCANRRRFLLDTNKSRFVDFQKVRIQETQAELPRGSIPRSLEVILRAEAVESAQAGDKCDFTGTLIVVPDVSKLSTPGARAETNSRVSGVDGYETEGIRGLRALGVRDLSYRLVFLACCVAPTNPRFGGKELRDEEQTAESIKNQMTVKEWEKVFEMSQDKNLYHNLCTSLFPTIHGNDEVKRGVLLMLFGGVPKTTGEGTSLRGDINVCIVGDPSTAKSQFLKHVEEFSPRAVYTSGKASSAAGLTAAVVRDEESHEFVIEAGALMLADNGVCCIDEFDKMDVRDQVAIHEAMEQQTISITKAGVKATLNARTSILAAANPISGHYDRSKSLKQNINLSAPIMSRFDLFFILVDECNEVTDYAIARRIVDLHSRIEESIDRVYSLDDIRRYLLFARQFKPKISKESEDFIVEQYKHLRQRDGSGVTKSSWRITVRQLESMIRLSEAMARMHCCDEVQPKHVKEAFRLLNKSIIRVETPDVNLDQEEEIQMEVDEGAGGINGHADSPAPVNGINGYNEDINQESAPKASLRLGFSEYCRISNLIVLHLRKVEEEEDESALKRSELVNWYLKEIESEIDSEEELINKKRIIEKVIHRLTHYDHVLIELTQAGLKGSTEGSESYEEDPYLVVNPNYLLED

SEQ ID NO: 12648 - protein, 411 aa, Homo sapiens
MQCSWKAVLLLALASIAIQYTAIRTFTAKSFHTCPGLAEAGLAERLCEESPTFAYNLSRKTHILILATTRSGSSFVGQLFNQHLDVFYLFEPLYHVQNTLIPRFTQGKSPADRRVMLGASRDLLRSLYDCDLYFLENYIKPPPVNHTTDRIFRRGASRVLCSRPVCDPPGPADLVLEEGDCVRKCGLLNLTVAAEACRERSHVAIKTVRVPEVNDLRALVEDPRLNLKVIQLVRDPRGILASRSETFRDTYRLWRLWYGTGRKPYNLDVTQLTTVCEDFSNSVSTGLMRPPWLKGKYMLVRYEDLARNPMKKTEEIYGFLGIPLDSHVARWIQNNTRGDPTLGKHKYGTVRNSAATAEKWRFRLSYDIVAFAQNACQQVLAQLGYKIAASEEELKNPSVSLVEERDFRPFS

SEQ ID NO: 12649 - protein, 411 aa, Homo sapiens; identical to SEQ ID NO: 12648

SEQ ID NO: 12650 - protein, 593 aa, Homo sapiens
MAATVATAAAVAPAPAPGTDSASSVHWFRKGLRLHDNPALLAAVRGARCVRCVYILDPWFAASSSVGINRWRFLLQSLEDLDTSLRKLNSRLFVVRGQPADVFPRLFKEWGVTRLTFEYDSEPFGKERDAAIMKMAKEAGVEVVTENSHTLYDLDRIIELNGQKPPLTYKRFQAIISRMELPKKPVGLVTSQQMESCRAEIQENHDETYGVPSLEELGFPTEGLGPAVWQGGETEALARLDKHLERKAWVANYERPRMNANSLLASPTGLSPYLRFGCLSCRLFYYRLWDLYKKVKRNSTPPLSLFGQLLWREFFYTAATNNPRFDRMEGNPICIQIPWDRNPEALAKWAEGKTGFPWIDAIMTQLRQEGWIHHLARHAVACFLTRGDLWVSWESGVRVFDELLLDADFSVNAGSWMWLSCSAFFQQFFHCYCPVGFGRRTDPSGDYIRRYLPKLKAFPSRYIYEPWNAPESIQKAAKCIIGVDYPRPIVNHAETSRLNIERMKQIYQQLSRYRGLCLLASVPSCVEDLSHPVAEPSSSQAGSMSSAGPRPLPSGPASPKRKLEAAEEPPGEELSKRARVAELPTPELPSKDA

SEQ ID NO: 12651 - protein, 593 aa, Homo sapiens; identical to SEQ ID NO: 12650

SEQ ID NO: 12652 - protein, 573 aa, Homo sapiens
MVPAVRVSFYHADQLKPQVSWIPNKHYSGLYGLMKLVLPSALPAELARVIVLDTDVTFASDISELWALFAHFSDTQAIGLVENQSDWYLGNLWKNHRPWPALGRGFNTGVILLRLDRLRQAGWEQMWRLTARRELLSLPATSLADQDIFNAVIKEHPGLVQRLPCVWNVQLSDHTLAERCYSEASDLKVIHWNSPKKLRVKNKHVEFFRNFYLTFLEYDGNLLRRELFVCPSQPPPGAEQLQQALAQLDEEDPCFEFRQQQLTVHRVHVTFLPHEPPPPRPHDVTLVAQLSMDRLQMLEALCRHWPGPMSLALYLTDAEAQQFLHFVEASPVLAARQDVAYHVVYREGPLYPVNQLRNVALAQALTPYVFLSDIDFLPAYSLYDYLRASIEQLGLGSRRKAALVVPAFETLRYRFSFPHSKVELLALLDAGTLYTFRYHEWPRGHAPTDYARWREAQAPYRVQWAANYEPYVVVPRDCPRYDPRFVGFGWNKVAHIVELDAQEYELLVLPEAFTIHLPHAPSLDISRFRSSPTYRDCLQALKDEFHQDLSRHHGAAALKYLPALQQPQSPARG

SEQ ID NO: 12653 - protein, 201 aa, Homo sapiens; identical to SEQ ID NO: 10916

SEQ ID NO: 12654 - protein, 206 aa, Homo sapiens
MEPGEPLQRLVRRRPEPGGPRGGEARRADAGYEFDICFTSVQKRAIRTLWTVLDAIDQMWLPVVRTWRLNERHYGGLTGLNKAETAAKHGEAQVKIWRRSYDVPPPPMEPDHPFYSNISKDRRYADLTEDQLPSCESLKDTIGQECFLVCVLESLPALFHGSEMPLGPVQVYLSLISESCSSCLTLPHGSSVHLSITVLNPFSISV

SEQ ID NO: 12655 - protein, 132 aa, Homo sapiens
ARRATRRRSAAGRRYEDRRYADLTEDQLPSCESLKDTIARALPFWNEEIVPQIKEGKRVLIAAHGNSLRGIVKHLEGLSEEAIMELNLPTGIPIVYELDKNLKPIKPMQFLGDEETVRKAMEAVAAQGKAKK

SEQ ID NO: 12656 - protein, 236 aa, Homo sapiens
MEPGEPLQRLVRRRPEPGGPRGGEARRADAGYEFDICFTSVQKRAIRTLWTVLDAIDQMWLPVVRTWRLNERHYGGLTGLNKAETAAKHGEAQVKIWRRSYDVPPPPMEPDHPFYSNISKDRRYADLTEDQLPSCESLKDTIARALPFWNEEIVPQIKEGKRVLIAAHGNSLRGIVKHLEGLSEEAIMELNLPTGIPIVYELDKNLKPIKPMQFLGDEETVRKAMEAVAAQGKAKK

SEQ ID NO: 12657 - protein, 254 aa, Homo sapiens; identical to SEQ ID NO: 10914

SEQ ID NO: 12658 - protein, 254 aa, Homo sapiens; identical to SEQ ID NO: 10914

SEQ ID NO: 12659 - protein, 254 aa, Homo sapiens; identical to SEQ ID NO: 10914

SEQ ID NO: 12660 - protein, 651 aa, Homo sapiens
MMRLRGSGMLRDLLLRSPAGVSATLRRAQPLVTLCRRPRGGGRPAAGPAAAARLHPWWGGGGWPAEPLARGLSSSPSEILQELGKGSTHPQPGVSPPAAPAAPGPKDGPGETDAFGNSEGKELVASGENKIKQGLLPSLEDLLFYTIAEGQEKIPVHKFITALKSTGLRTSDPRLKECMDMLRLTLQTTSDGVMLDKDLFKKCVQSNIVLLTQAFRRKFVIPDFMSFTSHIDELYESAKKQSGGKVADYIPQLAKFSPDLWGVSVCTVDGQRHSTGDTKVPFCLQSCVKPLKYAIAVNDLGTEYVHRYVGKEPSGLRFNKLFLNEDDKPHNPMVNAGAIVVTSLIKQGVNNAVGFSNATFQSERESGDRNFAIGYYLKEKKCFPEGTDMVGILDFYFQLCSIEVTCESASVMAATLANGGFCPITGERVLSPEAVRNTLSLMHSCGMYDFSGQFAFHVGLPAKSGVAGGILLVVPNVMGMMCWSPPLDKMGNSVKGIHFCHDLVSLCNFHNYDNLRHFAKKLDPRREGGDQRVKSVINLLFAAYTGDVSALRRFALSAMDMEQRDYDSRTALHVAAAEGHVEVVKFLLEACKVNPFPKDRWNNTPMDEALHFGHHDVFKILQEYQVQYTPQGDSDNGKENQTVHKNLDGLL

SEQ ID NO: 12661 - protein, 598 aa, Homo sapiens
MMRLRGSGMLRDLLLRSPAGVSATLRRAQPLVTLCRRPRGGGRPAAGPAAAARLHPWWGGGGWPAEPLARGLSSSPSEILQELGKGSTHPQPGVSPPAAPAAPGPKDGPGETDAFGNSEGKELVASGENKIKQGLLPSLEDLLFYTIAEGQEKIPVHKFITALKSTGLRTSDPRLKECMDMLRLTLQTTSDGVMLDKDLFKKCVQSNIVLLTQAFRRKFVIPDFMSFTSHIDELYESAKKQSGGKVADYIPQLAKFSPDLWGVSVCTVDGQRHSTGDTKVPFCLQSCVKPLKYAIAVNDLGTEYVHRYVGKEPSGLRFNKLFLNEDDKPHNPMVNAGAIVVTSLIKQGVNNAEKFDYVMQFLNKMAGNEYVGFSNATFQSERESGDRNFAIGYYLKEKKCFPEGTDMVGILDFYFQLCSIEVTCESASVMAATLANGGFCPITGERVLSPEAVRNTLSLMHSCGMYDFSGQFAFHVGLPAKSGVAGGILLVVPNVMGMMCWSPPLDKMGNSVKGIHFCHDLVSLCNFHNYDNLRHFAKKLDPRREGGDQRHSFGPLDYESLQQELALKETVWKKVSPESNEDISTTVVYRMESLGEKS

SEQ ID NO: 12662 - protein, 669 aa, Homo sapiens
MMRLRGSGMLRDLLLRSPAGVSATLRRAQPLVTLCRRPRGGGRPAAGPAAAARLHPWWGGGGWPAEPLARGLSSSPSEILQELGKGSTHPQPGVSPPAAPAAPGPKDGPGETDAFGNSEGKELVASGENKIKQGLLPSLEDLLFYTIAEGQEKIPVHKFITALKSTGLRTSDPRLKECMDMLRLTLQTTSDGVMLDKDLFKKCVQSNIVLLTQAFRRKFVIPDFMSFTSHIDELYESAKKQSGGKVADYIPQLAKFSPDLWGVSVCTVDGQRHSTGDTKVPFCLQSCVKPLKYAIAVNDLGTEYVHRYVGKEPSGLRFNKLFLNEDDKPHNPMVNAGAIVVTSLIKQGVNNAEKFDYVMQFLNKMAGNEYVGFSNATFQSERESGDRNFAIGYYLKEKKCFPEGTDMVGILDFYFQLCSIEVTCESASVMAATLANGGFCPITGERVLSPEAVRNTLSLMHSCGMYDFSGQFAFHVGLPAKSGVAGGILLVVPNVMGMMCWSPPLDKMGNSVKGIHFCHDLVSLCNFHNYDNLRHFAKKLDPRREGGDQRVKSVINLLFAAYTGDVSALRRFALSAMDMEQRDYDSRTALHVAAAEGHVEVVKFLLEACKVNPFPKDRWNNTPMDEALHFGHHDVFKILQEYQVQYTPQGDSDNGKENQTVHKNLDGLL

SEQ ID NO: 12663 - protein, 330 aa, Homo sapiens
MSLIFLQQGVNNAEKFDYVMQFLNKMAGNEYVGFSNATFQSERESGDRNFAIGYYLKEKKCFPEGTDMVGILDFYFQLCSIEVTCESASVMAATLANGGFCPITGERVLSPEAVRNTLSLMHSCGMYDFSGQFAFHVGLPAKSGVAGGILLVVPNVMGMMCWSPPLDKMGNSVKGIHFCHDLVSLCNFHNYDNLRHFAKKLDPRREGGDQRVKSVINLLFAAYTGDVSALRRFALSAMDMEQRDYDSRTALHVAAAEGHVEVVKFLLEACKVNPFPKDRWNNTPMDEALHFGHHDVFKILQEYQVQYTPQGDSDNGKENQTVHKNLDGLL

SEQ ID NO: 12664 - protein, 1908 aa, Homo sapiens [sequence omitted]

SEQ ID NO: 12665 - protein, 1912 aa, Homo sapiens
MASGLGSPSPCSAGSEEEDMDALLNNSLPPPHPENEEDPEEDLSETETPKLKKKKKPKKPRDPKIPKSKRQKKERMLLCRQLGDSSGEGPEFVEEEEEVALRSDSEGSDYTPGKKKKKKLGPKKEKKSKSKRKEEEEEDDDDDDSKEPKSSAQLLEDWGMEDIDHVFSEEDYRTLTNYKAFSQFVRPLIAAKNPKIAVSKMMMVLGAKWREFSTNNPFKGSSGASVAAAAAAAVAVVESMVTATEVAPPPPPVEVPIRKAKTKEGKGPNARRKPKGSPRVPDAKKPKPKKVAPLKIKLGGFGSKRKRSSSEDDDLDVESDFDDASINSYSVSDGSTSRSSRSRKKLRTTKKKKKGEEEVTAVDGYETDHQDYCEVCQQGGEIILCDTCPRAYHMVCLDPDMEKAPEGKWSCPHCEKEGIQWEAKEDNSEGEEILEEVGGDLEEEDDHHMEFCRVCKDGGELLCCDTCPSSYHIHCLNPPLPEIPNGEWLCPRCTCPALKGKVQKILIWKWGQPPSPTPVPRPPDADPNTPSPKPLEGRPERQFFVKWQGMSYWHCSWVSELQLELHCQVMFRNYQRKNDMDEPPSGDFGGDEEKSRKRKNKDPKFAEMEERFYRYGIKPEWMMIHRILNHSVDKKGHVHYLIKWRDLPYDQASWESEDVEIQDYDLFKQSYWNHRELMRGEEGRPGKKLKKVKLRKLERPPETPTVDPTVKYERQPEYLDATGGTLHPYQMEGLNWLRFSWAQGTDTILADEMGLGKTVQTAVFLYSLYKEGHSKGPFLVSAPLSTIINWEREFEMWAPDMYVVTYVGDKDSRAIIRENEFSFEDNAIRGGKKASRMKKEASVKFHVLLTSYELITIDMAILGSIDWACLIVDEAHRLKNNQSKFFRVLNGYSLQHKLLLTGTPLQNNLEELFHLLNFLTPERFHNLEGFLEEFADIAKEDQIKKLHDMLGPHMLRRLKADVFKNMPSKTELIVRVELSPMQKKYYKYILTRNFEALNARGGGNQVSLLNVVMDLKKCCNHPYLFPVAAMEAPKMPNGMYDGSALIRASGKLLLLQKMLKNLKEGGHRVLIFSQMTKMLDLLEDFLEHEGYKYERIDGGITGNMRQEAIDRFNAPGAQQFCFLLSTRAGGLGINLATADTVIIYDSDWNPHNDIQAFSRAHRIGQNKKVMIYRFVTRASVEERITQVAKKKMMLTHLVVRPGLGSKTGSMSKQELDDILKFGTEELFKDEATDGGGDNKEGEDSSVIHYDDKAIERLLDRNQDETEDTELQGMNEYLSSFKVAQYVVREEEMGEEEEVEREIIKQEESVDPDYWEKLLRHHYEQQQEDLARNLGKGKRIRKQVNYNDGSQEDRDWQDDQSDNQSDYSVASEEGDEDFDERSEAPRRPSRKGLRNDKDKPLPPLLARVGGNIEVLGFNARQRKAFLNAIMRYGMPPQDAFTTQWLVRDLRGKSEKEFKAYVSLFMRHLCEPGADGAETFADGVPREGLSRQHVLTRIGVMSLIRKKVQEFEHVNGRWSMPELAEVEENKKMSQPGSPSPKTPTPSTPGDTQPNTPAPVPPAEDGIKIEENSLKEEESIEGEKEVKSTAPETAIECTQAPAPASEDEKVVVEPPEGEEKVEKAEVKERTEEPMETEPKGAADVEKVEEKSAIDLTPIVVEDKEEKKEEEEKKEVMLQNGETPKDLNDEKQKKNIKQRFMFNIADGGFTELHSLWQNEERAATVTKKTYEIWHRRHDYWLLAGIINHGYARWQDIQNDPRYAILNEPFKGEMNRGNFLEIKNKFLARRFKLLEQALVIEEQLRRAAYLNMSEDPSHPSMALNTRFAEVECLAESHQHLSKESMAGNKPANAVLHKVLKQLEELLSDMKADVTRLPATIARIPPVAVRLQMSERNILSRLANRAPEPTPQQVAQQQ

SEQ ID NO: 12666 - protein, 1912 aa, Homo sapiens; identical to SEQ ID NO: 12665

SEQ ID NO: 12667 - protein, 1911 aa, Homo sapiens [sequence omitted]

SEQ ID NO: 12668 - protein, 125 aa, Homo sapiens
ATVLRTPENLAGELFLVHPSLHLYLCPADNVKDWSKVVLAYEPVWAIGTGKTATPQQAQEVHEKLRGWLKSNVSDAVAQSTRIIYGGSVTGATCKELASQPDVDGFLVGGASLKPEFVDIINAKQ

SEQ ID NO: 12669 - protein, 286 aa, Homo sapiens
MAEDGEEAEFHFAALYISGQWPRLRADTDLQRLGSSAMAPSRKFFVGGNWKMNGRKQSLGELIGTLNAAKVPADTEVVCAPPTAYIDFARQKLDPKIAVAAQNCYKVTNGAFTGEISPGMIKDCGATWVVLGHSERRHVFGESDELIGQKVAHALAEGLGVIACIGEKLDEREAGITEKVVFEQTKVIADNVKDWSKVVLAYEPVWAIGTGKTATPQQAQEVHEKLRGWLKSNVSDAVAQSTRIIYGGSVTGATCKELASQPDVDGFLVGGASLKPEFVDIINAKQ

SEQ ID NO: 12670 - protein, 286 aa, Homo sapiens; identical to SEQ ID NO: 12669

SEQ ID NO: 12671 - protein, 434 aa, Homo sapiens
MSIEKIWAREILDSRGNPTVEVDLYTAKGLFRAAVPSGASTGIYEALELRDGDKQRYLGKGVLKAVDHINSTIAPALISSGLSVVEQEKLDNLMLELDGTENKSKFGANAILGVSLAVCKAGAAERELPLYRHIAQLAGNSDLILPVPAFNVINGGSHAGNKLAMQEFMILPVGAESFRDAMRLGAEVYHTLKGVIKDKYGKDATNVGDEGGFAPNILENSEALELVKEAIDKAGYTEKIVIGMDVAASEFYRDGKYDLDFKSPTDPSRYITGDQLGALYQDFVRDYPVVSIEDPFDQDDWAAWSKFTANVGIQIVGDDLTVTNPKRIERAVEEKACNCLLLKVNQIGSVTEAIQACKLAQENGWGVMVSHRSGETEDTFIADLVVGLCTGQIKTGAPCRSERLAKYNQLMRIEEELGDEARFAGHNFRNPSVL

SEQ ID NO: 12672 - protein, 434 aa, Homo sapiens; identical to SEQ ID NO: 12671

SEQ ID NO: 12673 - protein, 481 aa, Homo sapiens
MSGGQAETLLQAKGEPWTFLVRESLSQPGDFVLSVLSDQPKAGPGSPLRVTHIKVMCEGGRYTVGGLETFDSLTDLVEHFKKTGIEEASGAFVYLRQPYYATRVNAADIENRVLELNKKQESEDTAKAGFWEEFESLQKQEVKNLHQRLEGQRPENKGKNRYKNILPFDHSRVILQGRDSNIPGSDYINANYIKNQLLGPDENAKTYIASQGCLEATVNDFWQMAWQENSRVIVMTTREVEKGRNKCVPYWPEVGMQRAYGPYSVTNCGEHDTTEYKLRTLQVSPLDNGDLIREIWHYQYLSWPDHGVPSEPGGVLSFLDQINQRQESLPHAGPIIVHCSAGIGRTGTIIVIDMLMENISTKGLDCDIDIQKTIQMVRAQRSGMVQTEAQYKFIYVAIAQFIETTKKKLEVLQSQKGQESEYGNITYPPAMKNAHAKASRTSSKHKEDVYENLHTKNKREEKVKKQRSADKEKSKGSLKRK

SEQ ID NO: 12674 - protein, 595 aa, Homo sapiens
MVRWFHRDLSGLDAETLLKGRGVHGSFLARPSRKNQGDFSLSVRVGDQVTHIRIQNSGDFYDLYGGEKFATLTELVEYYTQQQGVLQDRDGTIIHLKYPLNCSDPTSERWYHGHMSGGQAETLLQAKGEPWTFLVRESLSQPGDFVLSVLSDQPKAGPGSPLRVTHIKVMCEGGRYTVGGLETFDSLTDLVEHFKKTGIEEASGAFVYLRQPYYATRVNAADIENRVLELNKKQESEDTAKAGFWEEFESLQKQEVKNLHQRLEGQRPENKGKNRYKNILPFDHSRVILQGRDSNIPGSDYINANYIKNQLLGPDENAKTYIASQGCLEATVNDFWQMAWQENSRVIVMTTREVEKGRNKCVPYWPEVGMQRAYGPYSVTNCGEHDTTEYKLRTLQVSPLDNGDLIREIWHYQYLSWPDHGVPSEPGGVLSFLDQINQRQESLPHAGPIIVHCSAGIGRTGTIIVIDMLMENISTKGLDCDIDIQKTIQMVRAQRSGMVQTEAQYKFIYVAIAQFIETTKKKLEVLQSQKGQESEYGNITYPPAMKNAHAKASRTSSKHKEDVYENLHTKNKREEKVKKQRSADKEKSKGSLKRK

SEQ ID NO: 12675 - protein, 309 aa, Homo sapiens
MAWQENSRVIVMTTREVEKGRVGRPPFPASAPVLVVMPLSRRAVRCQGRKGSQGLPLHSTLCAAIEVIPSVTQTGSSSFLSEISSMAPDLIREIWHYQYLSWPDHGVPSEPGGVLSFLDQINQRQESLPHAGPIIVHCSAGIGRTGTIIVIDMLMENISTKGLDCDIDIQKTIQMVRAQRSGMVQTEAQYKFIYVAIAQFIETTKKKLEVLQSQKGQESEYGNITYPPAMKNAHAKASRTSSKSLESSAGTVAASPVRRGGQRGLPVPGPPVLSPDLHQLPVLAPLHPAADTRRMCMRTCTLRTRGRRK

SEQ ID NO: 12676 - protein, 597 aa, Homo sapiens
MLSRGWFHRDLSGLDAETLLKGRGVHGSFLARPSRKNQGDFSLSVRVGDQVTHIRIQNSGDFYDLYGGEKFATLTELVEYYTQQQGVLQDRDGTIIHLKYPLNCSDPTSERWYHGHMSGGQAETLLQAKGEPWTFLVRESLSQPGDFVLSVLSDQPKAGPGSPLRVTHIKVMCEGGRYTVGGLETFDSLTDLVEHFKKTGIEEASGAFVYLRQPYYATRVNAADIENRVLELNKKQESEDTAKAGFWEEFESLQKQEVKNLHQRLEGQRPENKGKNRYKNILPFDHSRVILQGRDSNIPGSDYINANYIKNQLLGPDENAKTYIASQGCLEATVNDFWQMAWQENSRVIVMTTREVEKGRNKCVPYWPEVGMQRAYGPYSVTNCGEHDTTEYKLRTLQVSPLDNGDLIREIWHYQYLSWPDHGVPSEPGGVLSFLDQINQRQESLPHAGPIIVHCSAGIGRTGTIIVIDMLMENISTKGLDCDIDIQKTIQMVRAQRSGMVQTEAQYKFIYVAIAQFIETTKKKLEVLQSQKGQESEYGNITYPPAMKNAHAKASRTSSKHKEDVYENLHTKNKREEKVKKQRSADKEKSKGSLKRK

SEQ ID NO: 12677 - protein, 624 aa, Homo sapiens
MVRWFHRDLSGLDAETLLKGRGVHGSFLARPSRKNQGDFSLSVRVGDQVTHIRIQNSGDFYDLYGGEKFATLTELVEYYTQQQGVLQDRDGTIIHLKYPLNCSDPTSERWYHGHMSGGQAETLLQAKGEPWTFLVRESLSQPGDFVLSVLSDQPKAGPGSPLRVTHIKVMCEGGRYTVGGLETFDSLTDLVEHFKKTGIEEASGAFVYLRQPYYATRVNAADIENRVLELNKKQESEDTAKAGFWEEFESLQKQEVKNLHQRLEGQRPENKGKNRYKNILPFDHSRVILQGRDSNIPGSDYINANYIKNQLLGPDENAKTYIASQGCLEATVNDFWQMAWQENSRVIVMTTREVEKGRNKCVPYWPEVGMQRAYGPYSVTNCGEHDTTEYKLRTLQVSPLDNGDLIREIWHYQYLSWPDHGVPSEPGGVLSFLDQINQRQESLPHAGPIIVHCSAGIGRTGTIIVIDMLMENISTKGLDCDIDIQKTIQMVRAQRSGMVQTEAQYKFIYVAIAQFIETTKKKLEVLQSQKGQESEYGNITYPPAMKNAHAKASRTSSKSLESSAGTVAASPVRRGGQRGLPVPGPPVLSPDLHQLPVLAPLHPAADTRRMCMRTCTLRTRGRRK

SEQ ID NO: 12678 - protein, 626 aa, Homo sapiens [sequence omitted]

SEQ ID NO: 12679 - protein, 438 aa, Homo sapiens [sequence omitted]

SEQ ID NO: 12680 - protein, 263 aa, Homo sapiens
MGQTALAGGSSSTPTPQALYPDLSCPEGLEELLSAPPPDLGAQRRHGWNPKDCSENIEVKEGGLYFERRPVAQSTDGARGKRGYSRGLHAWEISWPLEQRGTHAVVGVATALAPLQTDHYAALLGSNSESWGWDIGRGKLYHQSKGPGAPQYPAGTQGEQLEVPERLLVVLDMEEGTLGYAIGGTYLGPAFRGLKGRTLYPAVSAVWGQCQVRIRYLGERRAEPHSLLHLSRLCVRHNLGDTRLGQVSALPLPPAMKRYLLYQ

SEQ ID NO: 12681 - protein, 263 aa, Homo sapiens; identical to SEQ ID NO: 12680

SEQ ID NO: 12682 - protein, 1041 aa, Homo sapiens
MATPAGLERWVQDELHSVLGLSERHVAQFLIGTAQRCTSAEEFVQRLRDTDTLDLSGPARDFALRLWNKVPRKAVVEKPARAAEREARALLEKNRSYRLLEDSEESSEETVSRAGSSLQKKRKKRKHLRKKREEEEEEEASEKGKKKTGGSKQQTEKPESEDEWERTERERLQDLEERDAFAERVRQRDKDRTRNVLERSDKKAYEEAQKRLKMAEEDRKAMVPELRKKSRREYLAKREREKLEDLEAELADEEFLFGDVELSRHERQELKYKRRVRDLAREYRAAGEQEKLEATNRYHMPKETRGQPARAVDLVEEESGAPGEEQRRWEEARLGAASLKFGARDAASQEPKYQLVLEEEETIEFVRATQLQGDEEPSAPPTSTQAQQKESIQAVRRSLPVFPFREELLAAIANHQVLIIEGETGSGKTTQIPQYLFEEGYTNKGMKIACTQPRRVAAMSVAARVAREMGVKLGNEVGYSIRFEDCTSERTVLRYMTDGMLLREFLSEPDLASYSVVMVDEAHERTLHTDILFGLIKDVARFRPELKVLVASATMDTARFSTFFDDAPVFRIPGRRFPVDIFYTKAPEADYLEACVVSVLQIHVTQPPGDILVFLTGQEEIEAACEMLQDRCRRLGSKIRELLVLPIYANLPSDMQARIFQPTPPGARKVVVATNIAETSLTIEGIIYVLDPGFCKQKSYNPRTGMESLTVTPCSKASANQRAGRAGRVAAGKCFRLYTAWAYQHELEETTVPEIQRTSLGNVVLLLKSLGIHDLMHFDFLDPPPYETLLLALEQLYALGALNHLGELTTSGRKMAELPVDPMLSKMILASEKYSCSEEILTVAAMLSVNNSIFYRPKDKVVHADNARVNFFLPGGDHLVLLNVYTQWAESGYSSQWCYENFVQFRSMRRARDVREQLEGLLERVEVGLSSCQGDYIRVRKAITAGYFYHTARLTRSGYRTVKQQQTVFIHPNSSLFEQQPRWLLYHELVLTTKEFMRQVLEIESSWLLEVAPHYYKAKELEDPHAKKMPKKIGKTREELG

SEQ ID NO: 12683 - protein, 1041 aa, Homo sapiens; identical to SEQ ID NO: 12682

SEQ ID NO: 12684 - protein, 1041 aa, Homo sapiens; identical to SEQ ID NO: 12682

SEQ ID NO: 12685 - protein, 560 aa, Homo sapiens
MESQPAQECLMQMFLPIEPACFVEWLGTSPSQLGVVMVDEAHERTLHTDILFGLIKDVARFRPELKVLVASATMDTARFSTFFDDAPVFRIPGRRFPVDIFYTKAPEADYLEACVVSVLQIHVTQPPGDILVFLTGQEEIEAACEMLQDRCRRLGSKIRELLVLPIYANLPSDMQARIFQPTPPGARKVVVATNIAETSLTIEGIIYVLDPGFCKQKSYNPRTGMESLTVTPCSKASANQRAGRAGRVAAGKCFRLYTAWAYQHELEETTVPEIQRTSLGNVVLLLKSLGIHDLMHFDFLDPPPYETLLLALEQLYALGALNHLGELTTSGRKMAELPVDPMLSKMILASEKYSCSEEILTVAAMLSVNNSIFYRPKDKVVHADNARVNFFLPGGDHLVLLNVYTQWAESGYSSQWCYENFVQFRSMRRARDVREQLEGLLERVEVGLSSCQGDYIRVRKAITAGYFYHTARLTRSGYRTVKQQQTVFIHPNSSLFEQQPRWLLYHELVLTTKEFMRQVLEIESSWLLEVAPHYYKAKELEDPHAKKMPKKIGKTREELG

SEQ ID NO: 12686 - protein, 386 aa, Homo sapiens
MSALEKSMHLGRLPSRPPLPGSGGSQSGAKMRMGPGRKRDFSPVPWSQYFESMEDVEVENETGKDTFRVYKSGSEGPVLLLLHGGGHSALSWAVFTAAIISRVQCRIVALDLRSHGETKVKNPEDLSAETMAKDVGNVVEAMYGDLPPPIMLIGHSMGGAIAVHTASSNLVPSLLGLCMIDVVEGTAMDALNSMQNFLRGRPKTFKSLENAIEWSVKSGQIRNLESARVSMVGQVKQCEGITSPEGSKSIVEGIIEEEEEDEEGSESISKRKKEDDMETKKDHPYTWRIELAKTEKYWDGWFRGLSNLFLSCPIPKLLLLAGVDRLDKDLTIGQMQGKFQMQVLPQCGHAVHEDAPDKVAEAVATFLIRHRFAEPIGGFQCVFPGC

SEQ ID NO: 12687 - protein, 477 aa, Homo sapiens
MLGVRCLLRSVRFCSSAPFPKHKPSAKLSVRDALGAQNASGERIKIQGWIRSVRSQKEVLFLHVNDGSSLESLQVVADSGLDSRELTFGSSVEVQGQLIKSPSKRQNVELKAEKIKVIGNCDAKDFPIKYKERHPLEYLRQYPHFRCRTNVLGSILRIRSEATAAIHSFFKDSGFVHIHTPIITSNDSEGAGELFQLEPSGKLKVPEENFFNVPAFLTVSGQLHLEVMSGAFTQVFTFGPTFRAENSQSRRHLAEFYMIEAEISFVDSLQDLMQVIEELFKATTMMVLSKCPEDVELCHKFIAPGQKDRLEHMLKNNFLIISYTEAVEILKQASQNFTFTPEWGADLRTEHEKYLVKHCGNIPVFVINYPLTLKPFYMRDNEDGPQHTVAAVDLLVPGVGELFGGGLREERYHFLEERLARSGLTEVYQWYLDLRRFGSVPHGGFGMGFERYLQCILGVDNIKDVIPFPRFPHSCLL

SEQ ID NO: 12688 - protein, 469 aa, Homo sapiens
MLGVRCLLRSVRFCSSAPFPKHKPSAKLSVRDALGAQNASGERIKIQGWIRSVRSQKEVLFLHVNDGSSLESLQVVADSGLDSRELTFGSSVEVQGQLIKSPSKRQNVELKAEKIKDFPIKYKERHPLEYLRQYPHFRCRTNVLGSILRIRSEATAAIHSFFKDSGFVHIHTPIITSNDSEGAGELFQLEPSGKLKVPEENFFNVPAFLTVSGQLHLEVMSGAFTQVFTFGPTFRAENSQSRRHLAEFYMIEAEISFVDSLQDLMQVIEELFKATTMMVLSKCPEDVELCHKFIAPGQKDRLEHMLKNNFLIISYTEAVEILKQASQNFTFTPEWGADLRTEHEKYLVKHCGNIPVFVINYPLTLKPFYMRDNEDGPQHTVAAVDLLVPGVGELFGGGLREERYHFLEERLARSGLTEVYQWYLDLRRFGSVPHGGFGMGFERYLQCILGVDNIKDVIPFPRFPHSCLL

SEQ ID NO: 12689 - protein, 250 aa, Homo sapiens
MSGAFTQVFTFGPTFRAENSQSRRHLAEFYMIEAEISFVDSLQDLMQVIEELFKATTMMVLSKCPEDVELCHKFIAPGQKDRLEHMLKNNFLIISYTEAVEILKQASQNFTFTPEWGADLRTEHEKYLVKHCGNIPVFVINYPLTLKPFYMRDNEDGPQHTVAAVDLLVPGVGELFGGGLREERYHFLEERLARSGLTEVYQWYLDLRRFGSVPHGGFGMGFERYLQCILGVDNIKDVIPFPRFPHSCLL

SEQ ID NO: 12690 - protein, 387 aa, Homo sapiens
MACTIQKAEALDGAHLMQILWYDEEESLYPAVWLRDNCPCSDCYLDSAKARKLLVEALDVNIGIKGLIFDRKKVYITWPDEHYSEFQADWLKKRCFSKQARAKLQRELFFPECQYWGSELQLPTLDFEDVLRYDEHAYKWLSTLKKVGIVRLTGASDKPGEVSKLGKRMGFLYLTFYGHTWQVQDKIDANNVAYTTGKLSFHTDYPALHHPPGVQLLHCIKQTVTGGDSEIVDGFNVCQKLKKNNPQAFQILSSTFVDFTDIGVDYCDFSVQSKHKIIELDDKGQVVRINFNNATRDTIFDVPVERVQPFYAALKEFVDLMNSKESKFTFKMNPGDVITFDNWRLLHGRRSYEAGTEISRHLEGAYADWDVVMSRLRILRQRVENGN

SEQ ID NO: 12691 - protein, 387 aa, Homo sapiens; identical to SEQ ID NO: 12690

SEQ ID NO: 12692 - protein, 387 aa, Homo sapiens; identical to SEQ ID NO: 12690

SEQ ID NO: 12693 - protein, 527 aa, Homo sapiens
MADSRDPASDQMQHWKEQRAAQKADVLTTGAGNPVGDKLNVITVGPRGPLLVQDVVFTDEMAHFDRERIPERVVHAKGAGAFGYFEVTHDITKYSKAKVFEHIGKKTPIAVRFSTVAGESGSADTVRDPRGFAVKFYTEDGNWDLVGNNTPIFFIRDPILFPSFIHSQKRNPQTHLKDPDMVWDFWSLRPESLHQVSFLFSDRGIPDGHRHMNGYGSHTFKLVNANGEAVYCKFHYKTDQGIKNLSVEDAARLSQEDPDYGIRDLFNAIATGKYPSWTFYIQVMTFNQAETFPFNPFDLTKVWPHKDYPLIPVGKLVLNRNPVNYFAEVEQIAFDPSNMPPGIEASPDKMLQGRLFAYPDTHRHRLGPNYLHIPVNCPYRARVANYQRDGPMCMQDNQGGAPNYYPNSFGAPEQQPSALEHSIQYSGEVRRFNTANDDNVTQVRAFYVNVLNEEQRKRLCENIAGHLKDAQIFIQKKAVKNFTEVHPDYGSHIQALLDKYNAEKPKNAIHTFVQSGSHLAAREKANL

SEQ ID NO: 12694 - protein, 527 aa, Homo sapiens; identical to SEQ ID NO: 12693

SEQ ID NO: 12695 - protein, 319 aa, Homo sapiens
MALQQAQMLLSMNSLEAVNAGVQQNNTESFAVALCHLAELHAEQGCFAAASEVLKHLKERFPPNSQHAQLWMLCDQKIQFDRAMNDGKYHLADSLVTGITALNSIEGVYRKAVVLQAQNQMSEAHKLLQKLLVHCQKLKNTEMVISVLLSVAELYWRSSSPTIALPMLLQALALSKEYRLQYLASETVLNLAFAQLILGIPEQALSLLHMAIEPILADGAILDKGRAMFLVAKCQVASAASYDQPKKAEALEAAIENLNEAKNYFAKVDCKERIRDVVYFQARLYHTLGKTQERNRCAMLFRQLHQELPSHGVPLINHL

SEQ ID NO: 12696 - protein, 755 aa, Homo sapiens
MASVHESLYFNPMMTNGVVHANVFGIKDWVTPYKIAVLVLLNEMSRTGEGAVSLMERRRLNQLLLPLLQGPDITLSKLYKLIEESCPQLANSVQIRIKLMAEGELKDMEQFFDDLSDSFSGTEPEVHKTSVVGLFLRHMILAYSKLSFSQVFKLYTALQQYFQNGEKKTVEDADMELTSRDEGERKMEKEELDVSVREEEVSCSGPLSQKQAEFFLSQQASLLKNDETKALTPASLQKELNNLLKFNPDFAEAHYLSYLNNLRVQDVFSSTHSLLHYFDRLILTGAESKSNGEEGYGRSLRYAALNLAALHCRFGHYQQAELALQEAIRIAQESNDHVCLQHCLSWLYVLGQKRSDSYVLLEHSVKKAVHFGLPYLASLGIQSLVQQRAFAGKTANKLMDALKDSDLLHWKHSLSELIDISIAQKTAIWRLYGRSTMALQQAQMLLSMNSLEAVNAGVQQNNTESFAVALCHLAELHAEQGCFAAASEVLKHLKERFPPNSQHAQLWMLCDQKIQFDRAMNDGKYHLADSLVTGITALNSIEGVYRKAVVLQAQNQMSEAHKLLQKLLVHCQKLKNTEMVISVLLSVAELYWRSSSPTIALPMLLQALALSKEYRLQYLASETVLNLAFAQLILGIPEQALSLLHMAIEPILADGAILDKGRAMFLVAKCQVASAASYDQPKKAEALEAAIENLNEAKNYFAKVDCKERIRDVVYFQARLYHTLGKTQERNRCAMLFRQLHQELPSHGVPLINHL

SEQ ID NO: 12697 - protein, 820 aa, Homo sapiens
MAGELADKKDRDASPSKEERKRSRTPDRERDRDRDRKSSPSKDRKRHRSRDRRRGGSRSRSRSRSKSAERERRHKERERDKERDRNKKDRDRDKDGHRRDKDRKRSSLSPGRGKDFKSRKDRDSKKDEEDEHGDKKPKAQPLSLEELLAKKKAEEEAEAKPKFLSKAEREAEALKRRQQEVEERQRMLEEERKKRKQFQDLGRKMLEDPQERERRERRERMERETNGNEDEEGRQKIREEKDKSKELHAIKERYLGGIKKRRRTRHLNDRKFVFEWDASEDTSIDYNPLYKERHQVQLLGRGFIAGIDLKQQKREQSRFYGDLMEKRRTLEEKEQEEARLRKLRKKEAKQRWDDRHWSQKKLDEMTDRDWRIFREDYSITTKGGKIPNPIRSWKDSSLPPHILEVIDKCGYKEPTPIQRQAIPIGLQNRDIIGVAETGSGKTAAFLIPLLVWITTLPKIDRIEESDQGPYAIILAPTRELAQQIEEETIKFGKPLGIRTVAVIGGISREDQGFRLRMGCEIVIATPGRLIDVLENRYLVLSRCTYVVLDEADRMIDMGFEPDVQKILEHMPVSNQKPDTDEAEDPEKMLANFESGKHKYRQTVMFTATMPPAVERLARSYLRRPAVVYIGSAGKPHERVEQKVFLMSESEKRKKLLAILEQGFDPPIIIFVNQKKGCDVLAKSLEKMGYNACTLHGGKGQEQREFALSNLKAGAKDILVATDVAGRGIDIQDVSMVVNYDMAKNIEDYIHRIGRTGRAGKSGVAITFLTKEDSAVFYELKQAILESPVSSCPPELANHPDAQHKPGTILTKKRREETIFA

SEQ ID NO: 12698 - protein, 820 aa, Homo sapiens; identical to SEQ ID NO: 12697

SEQ ID NO: 12699 - protein, 820 aa, Homo sapiens; identical to SEQ ID NO: 12697

SEQ ID NO: 12700 - protein, 324 aa, Homo sapiens
MVPREAPESAQCLCPSLTIPNAKDVLRKRHKRRSRQHQRFMARKALLQEQGLLSMPPEPGSSPLPTPFGAATATEAASSGKQCLRAGSGSAPCSRRPAPGKASGPLPSKCVAIDCEMVGTGPRGRVSELARCSIVSYHGDVLYDKYIRPEMPIADYRTRWSGITRQHMRKAVPFQVAQKEILKLLKGKVVVGHALHNDFQALKYVHPRSQTRDTTYVPNFLSEPGLHTRARVSLKDLALQLLHKKIQVGQHGHSSVEDATTAMELYRLVEVQWEQQEARSLWTCPEDREPDSSTDMEQYMEDQDFPSPPSTGLLSKSLRNKTVV

SEQ ID NO: 12701 - protein, 325 aa, Homo sapiens
MVPREAPESAQCLCPSLTIPNAKDVLRKRHKRRSRQHQRFMARKALLQEQGLLSMPPEPGSSPLPTPFGAATATEAASSGKQCLRAGSGSAPCSRRPAPGKASGPLPSKCVAIDCEMVGTGPRGRVSELARCSIVSYHGDVLYDKYIRPEMPIADYRTRWSGITRQHMRKAVPFQVAQKEILKLLKGKVVVGHALHNDFQALKYVHPRSQTRDTTYVPNFLSEPGLHTRARVSLKDLALQLLHKKIQVGQHGHSSVEDATTAMELYRLVEVQWEQQEARSLWTCPEDREPDSSTDMEQYMEDQYWPDDLAHGSRGGAREAQDRRN

SEQ ID NO: 12702 - protein, 325 aa, Homo sapiens; identical to SEQ ID NO: 12701

SEQ ID NO: 12703 - protein, 325 aa, Homo sapiens; identical to SEQ ID NO: 12701

SEQ ID NO: 12704 - protein, 381 aa, Homo sapiens
MIDTLRPVPFASEMAISKTVAWLNEQLELGNERLLLMDCRPQELYESSHIESAINVAIPGIMLRRLQKGNLPVRALFTRGEDRDRFTRRCGTDTVVLYDESSSDWNENTGGESVLGLLLKKLKDEGCRAFYLEGGFSKFQAEFSLHCETNLDGSCSSSSPPLPVLGLGGLRISSDSSSDIESDLDRDPNSATDSDGSPLSNSQPSFPVEILPFLYLGCAKDSTNLDVLEEFGIKYILNVTPNLPNLFENAGEFKYKQIPISDHWSQNLSQFFPEAISFIDEARGKNCGVLVHCLAGISRSVTVTVAYLMQKLNLSMNDAYDIVKMKKSNISPNFNFMGQLLDFERTLGLSSPCDNRVPAQQLYFTTPSNQNVYQVDSLQST

SEQ ID NO: 12705 - protein, 381 aa, Homo sapiens; identical to SEQ ID NO: 12704

SEQ ID NO: 12706 - protein, 235 aa, Homo sapiens
MIDTLRPVPFASEMAISKTVAWLNEQLELGNERLLLMDCRPQELYESSHIESAINVAIPGIMLRRLQKGNLPVRALFTRGEDRDRFTRRCGTDTVVLYDESSSDWNENTGGESVLGLLLKKLKDEGCRAFYLEDEARGKNCGVLVHCLAGISRSVTVTVAYLMQKLNLSMNDAYDIVKMKKSNISPNFNFMGQLLDFERTLGLSSPCDNRVPAQQLYFTTPSNQNVYQVDSLQST

SEQ ID NO: 12707 - protein, 356 aa, Homo sapiens
MHHQWLLLAACFWVIFMFMVASKFITLTFKDPDVYSAKQEFLFLTTMPEVRKLPEEKHIPEELKPTGKELPDSQLVQPLVYMERLELIRNVCRDDALKNLSHTPVSKFVLDRIFVCDKHKILFCQTPKVGNTQWKKVLIVLNGAFSSIEEIPENVVHDHEKNGLPRLSSFSDAEIQKRLKTYFKFFIVRDPFERLISAFKDKFVHNPRFEPWYRHEIAPGIIRKYRRNRTETRGIQFEDFVRYLGDPNHRWLDLQFGDHIIHWVTYVELCAPCEIMYSVIGHHETLEDDAPYILKEAGIDHLVSYPTIPPGITVYNRTKVEHYFLGISKRDIRRLYARFEGDFKLFGYQKPDFLLN

SEQ ID NO: 12708 - protein, 356 aa, Homo sapiens; identical to SEQ ID NO: 12707

SEQ ID NO: 12709 - protein, 356 aa, Homo sapiens; identical to SEQ ID NO: 12707

SEQ ID NO: 12710 - protein, 356 aa, Homo sapiens; identical to SEQ ID NO: 12707

SEQ ID NO: 12711 - protein, 454 aa, Homo sapiens
MSSGAPQKSSPMASGAEETPGFLDTLLQDFPALLNPEDPLPWKAPGTVLSQEEVEGELAELAMGFLGSRKAPPPLAAALAHEAVSQLLQTDLSEFRKLPREEEEEEEDDDEEEKAPVTLLDAQSLAQSFFNRLWEVAGQWQKQVPLAARASQRQWLVSIHAIRNTRRKMEDRHVSLPSFNQLFGLSDPVNRAYFAVFDGHGGVDAARYAAVHVHTNAARQPELPTDPEGALREAFRRTDQMFLRKAKRERLQSGTTGVCALIAGATLHVAWLGDSQVILVQQGQVVKLMEPHRPERQDEKARIEALGGFVSHMDCWRVNGTLAVSRAIGDVFQKPYVSGEADAASRALTGSEDYLLLACDGFFDVVPHQEVVGLVQSHLTRQQGSGLRVAEELVAAARERGSHDNITVMVVFLRDPQELLEGGNQGEGDPQAEGRRQDLPSSLPEPETQAPPRS

SEQ ID NO: 12712 - protein, 361 aa, Homo sapiens
MSSGAPQKSSPMASGAEETPGFLDTLLQDFPALLNPEDPLPWKAPGTVLSQEEVEGELAELAMGFLGSRKAPPPLAAALAHEAVSQLLQTDLSEFRKLPREEEEEEEDDDEEEKAPVTLLDAQSLAQSFFNRLWEVAGQWQKQVPLAARASQRQWLVSIHAIRNTRRKMEDRHVSLPSFNQLFGLSDPVNRAYFAVFDGHGGVDAARYAAVHVHTNAARQPELPTDPEGALREAFRRTDQMFLRKAKRERLQSGTTGVCALIAGATLHVAWLGDSQVILVQQGQVVKLMEPHRPERQDEKARIEALGGFVSHMDCWRVNGTLAVSRAIGESQRGRPKWEKVSRKPRPRVWPAAHQGFREAV

SEQ ID NO: 12713 - protein, 454 aa, Homo sapiens; identical to SEQ ID NO: 12711

SEQ ID NO: 12714 - protein, 761 aa, Homo sapiens
MASERGKVKHNWSSTSEGCPRKRSCLREPCDVAPSSRPAQRSASRSGGPSSPKRLKAQKEDDVACSRRLSWGSSRRRNNSSSSFSPHFLGPGVGGAASKGCLIRNTRGFLSSGGSPLRPANASLEEMASLEEEACSLKVDSKDSSHNSTNSEFAAEAEGQNDTIEEPNKVQKRKRDRLRDQGSTMIYLKAIQGILGKSMPKRKGEAATRAKPSAAEHPSHGEGPARSEGPAKTAEGAARSVTVTAAQKEKDATPEVSMEEDKTVPERSSFYDRRVVIDPQEKPSEEPLGDRRTVIDKCSPPLEFLDDSDSHLEIQKHKDREVVMEHPSSGSDWSDVEEISTVRFSQEEPVSLKPSAVPEPSSFTTDYVMYPPHLYSSPWCDYASYWTSSPKPSSYPSTGSSSNDAAQVGKSSRSRMSDYSPNSTGSVQNTSRDMEASEEGWSQNSRSFRFSRSSEEREVKEKRTFQEEMPPRPCGGHASSSLPKSHLEPSLEEGFIDTHCHLDMLYSKLSFQGTFTKFRKIYSSSFPKEFQGCISDFCDPRTLTDCLWEELLKEDLVWGAFGCHPHFARYYSESQERNLLQALRHPKAVAFGEMGLDYSYKCTTPVPEQHKVFERQLQLAVSLKKPLVIHCREADEDLLEIMKKFVPPDYKIHRHCFTGSYPVIEPLLKYFPNMSVGFTAVLTYSSAWEAREALRQIPLERIIVETDAPYFLPRQVPKSLCQYAHPGLALHTVREIARVKDQPLSLTLAALRENTSRLYSL

SEQ ID NO: 12715 - protein, 761 aa, Homo sapiens; identical to SEQ ID NO: 12714

SEQ ID NO: 12716 - protein, 761 aa, Homo sapiens; identical to SEQ ID NO: 12714

SEQ ID NO: 12717 - protein, 123 aa, Homo sapiens [sequence omitted]

SEQ ID NO: 12718 - protein, 625 aa, Homo sapiens
MAAPMTPAARPEDYEAALNAALADVPELARLLEIDPYLKPYAVDFQRRYKQFSQILKNIGENEGGIDKFSRGYESFGVHRCADGGLYCKEWAPGAEGVFLTGDFNGWNPFSYPYKKLDYGKWELYIPPKQNKSVLVPHGSKLKVVITSKSGEILYRISPWAKYVVREGDNVNYDWIHWDPEHSYEFKHSRPKKPRSLRIYESHVGISSHEGKVASYKHFTCNVLPRIKGLGYNCIQLMAIMEHAYYASFGYQITSFFAASSRYGTPEELQELVDTAHSMGIIVLLDVVHSHASKNSADGLNMFDGTDSCYFHSGPRGTHDLWDSRLFAYSSWEVLRFLLSNIRWWLEEYRFDGFRFDGVTSMLYHHHGVGQGFSGDYSEYFGLQVDEDALTYLMLANHLVHTLCPDSITIAEDVSGMPALCSPISQGGGGFDYRLAMAIPDKWIQLLKEFKDEDWNMGDIVYTLTNRRYLEKCIAYAESHDQALVGDKSLAFWLMDAEMYTNMSVLTPFTPVIDRGIQLHKMIRLITHGLGGEGYLNFMGNEFGHPEWLDFPRKGNNESYHYARRQFHLTDDDLLRYKFLNNFDRDMNRLEERYGWLAAPQLYIQNCARFRCSGIWRASETGPQH

SEQ ID NO: 12719 - protein, 702 aa, Homo sapiens
MAAPMTPAARPEDYEAALNAALADVPELARLLEIDPYLKPYAVDFQRRYKQFSQILKNIGENEGGIDKFSRGYESFGVHRCADGGLYCKEWAPGAEGVFLTGDFNGWNPFSYPYKKLDYGKWELYIPPKQNKSVLVPHGSKLKVVITSKSGEILYRISPWAKYVVREGDNVNYDWIHWDPEHSYEFKHSRPKKPRSLRIYESHVGISSHEGKVASYKHFTCNVLPRIKGLGYNCIQLMAIMEHAYYASFGYQITSFFAASSRYGTPEELQELVDTAHSMGIIVLLDVVHSHASKNSADGLNMFDGTDSCYFHSGPRGTHDLWDSRLFAYSSWEVLRFLLSNIRWWLEEYRFDGFRFDGVTSMLYHHHGVGQGFSGDYSEYFGLQVDEDALTYLMLANHLVHTLCPDSITIAEDVSGMPALCSPISQGGGGFDYRLAMAIPDKWIQLLKEFKDEDWNMGDIVYTLTNRRYLEKCIAYAESHDQALVGDKSLAFWLMDAEMYTNMSVLTPFTPVIDRGIQLHKMIRLITHGLGGEGYLNFMGNEFGHPEWLDFPRKGNNESYHYARRQFHLTDDDLLRYKFLNNFDRDMNRLEERYGWLAAPQAYVSEKHEGNKIIAFERAGLLFIFNFHPSKSYTDYRVGTALPGKFKIVLDSDAAEYGGHQRLDHSTDFFSEAFEHNGRPYSLLVYIPSRVALILQNVDLPN

SEQ ID NO: 12720 - protein, 465 aa, Homo sapiens
MAIMEHAYYASFGYQITSFFAASSRYGTPEELQELVDTAHSMGIIVLLDVVHSHASKNSADGLNMFDGTDSCYFHSGPRGTHDLWDSRLFAYSSWEVLRFLLSNIRWWLEEYRFDGFRFDGVTSMLYHHHGVGQGFSGDYSEYFGLQVDEDALTYLMLANHLVHTLCPDSITIAEDVSGMPALCSPISQGGGGFDYRLAMAIPDKWIQLLKEFKDEDWNMGDIVYTLTNRRYLEKCIAYAESHDQALVGDKSLAFWLMDAEMYTNMSVLTPFTPVIDRGIQLHKMIRLITHGLGGEGYLNFMGNEFGHPEWLDFPRKGNNESYHYARRQFHLTDDDLLRYKFLNNFDRDMNRLEERYGWLAAPQAYVSEKHEGNKIIAFERAGLLFIFNFHPSKSYTDYRVGTALPGKFKIVLDSDAAEYGGHQRLDHSTDFFSEAFEHNGRPYSLLVYIPSRVALILQNVDLPN

SEQ ID NO: 12721 - protein, 206 aa, Homo sapiens
MCLLAAYLQIPLPQVSLALHSWKSSGKFFTYEGLHIFYQDSVGVVGSLEIAVLLHSLPTSSYDWYKIWEGLTLRFHQVLVLDFLGFGFSDNPQPHHYSIFEQASIMEVLLWHLGLQNHRTNLLSHDYGDIVAQELLYQYKQNQSGRLTIKSIHLSNGGIFPETHRPLLLQKILKDGGVLSPILTWLMNFFVFSMSHPSLWAMYLAL

SEQ ID NO: 12722 - protein, 448 aa, Homo sapiens
MFDCMDVLSVSPGQILDFYTASPSSCMLQEKALKACFSGLTQTEWQHRHTAQSIETQSTSSEELVPSPPSPLPPPRVYKPCFVCQDKSSGYHYGVSACEGCKGFFRRSIQKNMIYTCHRDKNCVINKVTRNRCQYCRLQKCFEVGMSKESVRNDRNKKKKETSKQECTESYEMTAELDDLTEKIRKAHQETFPSLCQLGKYTTNSSADHRVRLDLGLWDKFSELATKCIIKIVEFAKRLPGFTGLTIADQITLLKAACLDILILRICTRYTPEQDTMTFSDGLTLNRTQMHNAGFGPLTDLVFTFANQLLPLEMDDTETGLLSAICLICGDRQDLEEPTKVDKLQEPLLEALKIYIRKRRPSKPHMFPKILMKITDLRSISAKGAERVITLKMEIPGSMPPLIQEMLENSEGHEPLTPSSSGNTAEHSPSISPSSVENSGVSQSPLVQ

SEQ ID NO: 12723 - protein, 336 aa, Homo sapiens
MIYTCHRDKNCVINKVTRNRCQYCRLQKCFEVGMSKESVRNDRNKKKKETSKQECTESYEMTAELDDLTEKIRKAHQETFPSLCQLGKYTTNSSADHRVRLDLGLWDKFSELATKCIIKIVEFAKRLPGFTGLTIADQITLLKAACLDILILRICTRYTPEQDTMTFSDGLTLNRTQMHNAGFGPLTDLVFTFANQLLPLEMDDTETGLLSAICLICGDRQDLEEPTKVDKLQEPLLEALKIYIRKRRPSKPHMFPKILMKITDLRSISAKGAERVITLKMEIPGSMPPLIQEMLENSEGHEPLTPSSSGNTAEHSPSISPSSVENSGVSQSPLVQ

SEQ ID NO: 12724 - protein, 147 aa, Homo sapiens
MALKRIHKELNDLARDPPAQCSAGPVGDDMFHWQATIMGPNDSPYQGGVFFLTIHFPTDYPFKPPKVAFTTRIYHPNINSNGSICLDILRSQWSPALTISKVLLSICSLLCDPNPDDPLVPEIARIYKTDREKYNRIAREWTQKYAM

SEQ ID NO: 12725 - protein, 118 aa, Homo sapiens
MFHWQATIMGPNDSPYQGGVFFLTIHFPTDYPFKPPKVAFTTRIYHPNINSNGSICLDILRSQWSPALTISKVLLSICSLLCDPNPDDPLVPEIARIYKTDREKYNRIAREWTQKYAM

SEQ ID NO: 12726 - protein, 118 aa, Homo sapiens; identical to SEQ ID NO: 12725

SEQ ID NO: 12727 - protein, 147 aa, Homo sapiens; identical to SEQ ID NO: 12724

SEQ ID NO: 12728 - protein, 399 aa, Homo sapiens
MGRKSLYLLIVGILIAYYIYTPLPDNVEEPWRMMWINAHLKTIQNLATFVELLGLHHFMDSFKVVGSFDEVPPTSDENVTVTETKFNNILVRVYVPKRKSEALRRGLFYIHGGGWCVGSAALSGYDLLSRWTADRLDAVVVSTNYRLAPKYHFPIQFEDVYNALRWFLRKKVLAKYGVNPERIGISGDSAGGNLAAAVTQQLLDDPDVKIKLKIQSLIYPALQPLDVDLPSYQENSNFLFLSKSLMVRFWSEYFTTDRSLEKAMLSRQHVPVESSHLFKFINWSSLLPERFIKGHVYNNPNYGSSELAKKYPGFLDVRAAPLLADDNKLRGLPLTYVITCQYDLLRDDGLMYVTRLRNTGVQVTHNHVEDGFHGAFSFLGLKISHRLINQYIEWLKENL

SEQ ID NO: 12729 - protein, 399 aa, Homo sapiens; identical to SEQ ID NO: 12728

SEQ ID NO: 12730 - protein, 1115 aa, Homo sapiens
MSWFSGLLVPKVDERKTAWGERNGQKRSRRRGTRAGGFCTPRYMSCLRDAEPPSPTPAGPPRCPWQDDAFIRRGGPGKGKELGLRAVALGFEDTEVTTTAGGTAEVAPDAVPRSGRSCWRRLVQVFQSKQFRSAKLERLYQRYFFQMNQSSLTLLMAVLVLLTAVLLAFHAAPARPQPAYVALLACAAALFVGLMVVCNRHSFRQDSMWVVSYVVLGILAAVQVGGALAADPRSPSAGLWCPVFFVYIAYTLLPIRMRAAVLSGLGLSTLHLILAWQLNRGDAFLWKQLGANVLLFLCTNVIGICTHYPAEVSQRQAFQETRGYIQARLHLQHENRQQERLLLSVLPQHVAMEMKEDINTKKEDMMFHKIYIQKHDNVSILFADIEGFTSLASQCTAQELVMTLNELFARFDKLAAENHCLRIKILGDCYYCVSGLPEARADHAHCCVEMGVDMIEAISLVREVTGVNVNMRVGIHSGRVHCGVLGLRKWQFDVWSNDVTLANHMEAGGRAGRIHITRATLQYLNGDYEVEPGRGGERNAYLKEQHIETFLILGASQKRKEEKAMLAKLQRTRANSMEGLMPRWVPDRAFSRTKDSKAFRQMGIDDSSKDNRGTQDALNPEDEVDEFLSRAIDARSIDQLRKDHVRRFLLTFQREDLEKKYSRKVDPRFGAYVACALLVFCFICFIQLLIFPHSTLMLGIYASIFLLLLITVLICAVYSCGSLFPKALQRLSRSIVRSRAHSTAVGIFSVLLVFTSAIANMYFIGNMLLSLLASSVFLHISSIGKLAMIFVLGLIYLVLLLLGPPATIFDNYDLLLGVHGLASSNETFDGLDCPAAGRVALKYMTPVILLVFALALYLHAQQVESTARLDFLWKLQATGEKEEMEELQAYNRRLLHNILPKDVAAHFLARERRNDELYYQSCECVAVMFASIANFSEFYVELEANNEGVECLRLLNEIIADFDEIISEERFRQLEKIKTIGSTYMAASGLNASTYDQVGRSHITALADYAMRLMEQMKHINEHSFNNFQMKIGLNMGPVVAGVIGARKPQYDIWGNTVNVSSRMDSTGVPDRIQVTTDLYQVLAAKGYQLECRGVVKVKGKGEMTTYFLNGGPSS

SEQ ID NO: 12731 - protein, 1168 aa, Homo sapiens
MSWFSGLLVPKVDERKTAWGERNGQKRSRRRGTRAGGFCTPRYMSCLRDAEPPSPTPAGPPRCPWQDDAFIRRGGPGKGKELGLRAVALGFEDTEVTTTAGGTAEVAPDAVPRSGRSCWRRLVQVFQSKQFRSAKLERLYQRYFFQMNQSSLTLLMAVLVLLTAVLLAFHAAPARPQPAYVALLACAAALFVGLMVVCNRHSFRQDSMWVVSYVVLGILAAVQVGGALAADPRSPSAGLWCPVFFVYIAYTLLPIRMRAAVLSGLGLSTLHLILAWQLNRGDAFLWKQLGANVLLFLCTNVIGICTHYPAEVSQRQAFQETRGYIQARLHLQHENRQQERLLLSVLPQHVAMEMKEDINTKKEDMMFHKIYIQKHDNVSILFADIEGFTSLASQCTAQELVMTLNELFARFDKLAAENHCLRIKILGDCYYCVSGLPEARADHAHCCVEMGVDMIEAISLVREVTGVNVNMRVGIHSGRVHCGVLGLRKWQFDVWSNDVTLANHMEAGGRAGRIHITRATLQYLNGDYEVEPGRGGERNAYLKEQHIETFLILGASQKRKEEKAMLAKLQRTRANSMEGLMPRWVPDRAFSRTKDSKAFRQMGIDDSSKDNRGTQDALNPEDEVDEFLSRAIDARSIDQLRKDHVRRFLLTFQREDLEKKYSRKVDPRFGAYVACALLVFCFICFIQLLIFPHSTLMLGIYASIFLLLLITVLICAVYSCGSLFPKALQRLSRSIVRSRAHSTAVGIFSVLLVFTSAIANMFTCNHTPIRSCAARMLNLTPADITACHLQQLNYSLGLDAPLCEGTMPTCSFPEYFIGNMLLSLLASSVFLHISSIGKLAMIFVLGLIYLVLLLLGPPATIFDNYDLLLGVHGLASSNETFDGLDCPAAGRVALKYMTPVILLVFALALYLHAQQVESTARLDFLWKLQATGEKEEMEELQAYNRRLLHNILPKDVAAHFLARERRNDELYYQSCECVAVMFASIANFSEFYVELEANNEGVECLRLLNEIIADFDEIISEERFRQLEKIKTIGSTYMAASGLNASTYDQVGRSHITALADYAMRLMEQMKHINEHSFNNFQMKIGLNMGPVVAGVIGARKPQYDIWGNTVNVSSRMDSTGVPDRIQVTTDLYQVLAAKGYQLECRGVVKVKGKGEMTTYFLNGGPSS

SEQ ID NO: 12732 - protein, 512 aa, Homo sapiens
MAAPMLRWGCRGRRWAFARVDGGSCHRRGAPTGSTSNQIRGESSVAQQPLHTAQKTRKGEHKWAAVVGLEIHAQISSNSKLFSGSQVRFSAPPNSLVSFFDASLPGTLPVLNRRCVEAAVMTGLALNCHINKKSLFDRKHYFYADLPAGYQITQQRLPIAVNGSLIYGVCAGKKQSQVIPKTVRIKQIQLEQDSGKSLHDNLRSQTLIDLNRAGVGLLEVVLEPDMSCGEEAATAVRELQLILQALGTSQANMAEGQLRVDANISVHHPGEPLGVRTEVKNLNSIRFLAKAIDYEIQRQINELENGGEILNETRSFHHKLGCTMSMRDKEGKQDYRFMPEPNLPPLVLYDATSLPAGADPQQVINIDQIRETLPELPSVTREKLVQQYGMLLEHSFTLLNEVGLLEFFQNVIKETRAEPKKVTSWVLNTFLGYLKQQNLAVSESPVTPSALAELLDLLDSRTISSSAAKQVMDVKNRNPRAINKLIGLVRKATQSRADPVMIKEILEKKLSL

SEQ ID NO: 12733 - protein, 478 aa, Homo sapiens [sequence omitted]

SEQ ID NO: 12734 - protein, 557 aa, Homo sapiens
MAAPMLRWGCRGRRWAFARVDGGSCHRRGAPTGSTSNQIRGESSVAQQPLHTAQKTRKGEHKWAAVVGLEIHAQISSNSKLFSGSQVRFSAPPNSLVSFFDASLPGTLPVLNRRCVEAAVMTGLALNCHINKKSLFDRKHYFYADLPAGYQITQQRLPIAVNGSLIYGVCAGKKQSQVIPKTVRIKQIQLEQDSGKSLHDNLRSQTLIDLNRAGVGLLEVVLEPDMSCGEEAATAVRELQLILQALGTSQANMAEGQLRVDANISVHHPGEPLGVRTEVKNLNSIRFLAKAIDYEIQRQINELENGGEILNETRSFHHKLGCTMSMRDKEGKQDYRFMPEPNLPPLVLYDATSLPAGADPQQVINIDQIRETLPELPSVTREKLVQQYGMLLEHSFTLLNEVGLLEFFQNVIKETRAEPKKVTSWVLNTFLGYLKQQNLAVSESPVTPSALAELLDLLDSRTISSSAAKQVFEELWKREGKTPGQIVSEKQLELMQDQGALEQLCHSVMEAHPQVVMDVKNRNPRAINKLIGLVRKATQSRADPVMIKEILEKKLSL

SEQ ID NO: 12735 - protein, 256 aa, Homo sapiens
MDVLFSFRDGDCSKGFFLVSLLVEIAAASAIKVIPTVFKAMQMQERDTLLKALLEIASCLEKALQVFHQIHDHVNPKAFFSVLRIYLSGWKGNPQLSDGLVYEGFWEDPKEFAGGSAGQSSVFQCFDVLLGIQQTAGGGHAAQFLQDMRRYMPPAHRNFLCSLESNPSVREFVLSKGDAGLREAYDACVKALVSLRSYHLQIVTKYILIPASQQPKENKTSEDPSKLEAKGTGGTDLMNFLKTVRSTTEKSLLKEG

SEQ ID NO: 12736 - protein, 258 aa, Homo sapiens [sequence omitted]

SEQ ID NO: 12737 - protein, 290 aa, Homo sapiens
MDIEAYFERIGYKNSRNKLDLETLTDILEHQIRAVPFENLNMHCGQAMELGLEAIFDHIVRRNRGGWCLQVNQLLYWALTTIGFQTTMLGGYFYIPPVNKYSTGMVHLLLQVTIDGRNYIVDAGSGSSSQMWQPLELISGKDQPQVPCIFCLTEERGIWYLDQIRREQYITNKEFLNSHLLPKKKHQKIYLFTLEPRTIEDFESMNTYLQTSPTSSFITTSFCSLQTPEGVYCLVGFILTYRKFNYKDNTDLVEFKTLTEEEVEEVLKNIFKISLGRNLVPKPGDGSLTI

SEQ ID NO: 12738 - protein, 160 aa, Homo sapiens
MWQPLELISGKDQPQVPCIFCLTEERGIWYLDQIRREQYITNKEFLNSHLLPKKKHQKIYLFTLEPRTIEDFESMNTYLQTSPTSSFITTSFCSLQTPEGVYCLVGFILTYRKFNYKDNTDLVEFKTLTEEEVEEVLKNIFKISLGRNLVPKPGDGSLTI

SEQ ID NO: 12739 - protein, 69 aa, Homo sapiens
MSVLTPLLLRGLTGSARRLPVPRAKIHSLPPEGKLGIMELAVGLTSCFVTFLLPAGWILSHLETYRRPE

SEQ ID NO: 12740 - protein, 993 aa, Homo sapiens [sequence omitted]

SEQ ID NO: 12741 - protein, 911 aa, Homo sapiens
MAASQTSQTVASHVPFADLCSTLERIQKSKGRAEKIRHFREFLDSWRKFHDALHKNHKDVTDSFYPAMRLILPQLERERMAYGIKETMLAKLYIELLNLPRDGKDALKLLNYRTPTGTHGDAGDFAMIAYFVLKPRCLQKGSLTIQQVNDLLDSIASNNSAKRKDLIKKSLLQLITQSSALEQKWLIRMIIKDLKLGVSQQTIFSVFHNDAAELHNVTTDLEKVCRQLHDPSVGLSDISITLFSAFKPMLAAIADIEHIEKDMKHQSFYIETKLDGERMQMHKDGDVYKYFSRNGYNYTDQFGASPTEGSLTPFIHNAFKADIQICILDGEMMAYNPNTQTFMQKGTKFDIKRMVEDSDLQTCYCVFDVLMVNNKKLGHETLRKRYEILSSIFTPIPGRIEIVQKTQAHTKNEVIDALNEAIDKREEGIMVKQPLSIYKPDKRGEGWLKIKPEYVSGLMDELDILIVGGYWGKGSRGGMMSHFLCAVAEKPPPGEKPSVFHTLSRVGSGCTMKELYDLGLKLAKYWKPFHRKAPPSSILCGTEKPEVYIEPCNSVIVQIKAAEIVPSDMYKTGCTLRFPRIEKIRDDKEWHECMTLDDLEQLRGKASGKLASKHLYIGGDDEPQEKKRKAAPKMKKVIGIIEHLKAPNLTNVNKISNIFEDVEFCVMSGTDSQPKPDLENRIAEFGGYIVQNPGPDTYCVIAGSENIRVKNIILSNKHDVVKPAWLLECFKTKSFVPWQPRFMIHMCPSTKEHFAREYDCYGDSYFIDTDLNQLKEVFSGIKNSNEQTPEEMASLIADLEYRYSWDCSPLSMFRRHTVYLDSYAVINDLSTKNEGTRLAIKALELRFHGAKVVSCLAEGVSHVIIGEDHSRVADFKAFRRTFKRKFKILKESWVTDSIDKCELQEENQYLI

SEQ ID NO: 12742 - protein, 911 aa, Homo sapiens; identical to SEQ ID NO: 12741

SEQ ID NO: 12743 - protein, 911 aa, Homo sapiens; identical to SEQ ID NO: 12741

SEQ ID NO: 12744 - protein, 246 aa, Homo sapiens
MELWPCLAAALLLLLLLVQLSRAAEFYAKVALYCALCFTVSAVASLVCLLRHGGRTVENMSIIGWFVRSFKYFYGLRFEVRDPRRLQEARPCVIVSNHQSILDMMGLMEVLPERCVQIAKRELLFLGPVGLIMYLGGVFFINRQRSSTAMTVMADLGERMVRENVPIVPVVYSSFSSFYNTKKKFFTSGTVTVQVLEAIPTSGLTAADVPALVDTCHRAMRTTFLHISKTPQENGATAGSGVQPAQ

SEQ ID NO: 12745 - protein, 278 aa, Homo sapiens
MELWPCLAAALLLLLLLVQLSRAAEFYAKVALYCALCFTVSAVASLVCLLRHGGRTVENMSIIGWFVRSFKYFYGLRFEVRDPRRLQEARPCVIVSNHQSILDMMGLMEVLPERCVQIAKRELLFLGPVGLIMYLGGVFFINRQRSSTAMTVMADLGERMVRENLKVWIYPEGTRNDNGDLLPFKKGAFYLAVQAQVPIVPVVYSSFSSFYNTKKKFFTSGTVTVQVLEAIPTSGLTAADVPALVDTCHRAMRTTFLHISKTPQENGATAGSGVQPAQ

SEQ ID NO: 12746 - protein, 278 aa, Homo sapiens; identical to SEQ ID NO: 12745

SEQ ID NO: 12747 - protein, 536 aa, Homo sapiens [sequence omitted]

SEQ ID NO: 12748 - protein, 537 aa, Homo sapiens
MSAPKLLSLGCIFFPLLLFQQARAQFPRQCATVEALRSGMCCPDLSPVSGPGTDRCGSSSGRGRCEAVTADSRPHSPQYPHDGRDDREVWPLRFFNRTCHCNGNFSGHNCGTCRPGWRGAACDQRVLIVRRNLLDLSKEEKNHFVRALDMAKRTTHPLFVIATRRSEEILGPDGNTPQFENISIYNYFVWTHYYSVKKTFLGVGQESFGEVDFSHEGPAFLTWHRYHLLRLEKDMQEMLQEPSFSLPYWNFATGKNVCDICTDDLMGSRSNFDSTLISPNSVFSQWRVVCDSLEDYDTLGTLCNSTEDGPIRRNPAGNVARPMVQRLPEPQDVAQCLEVGLFDTPPFYSNSTNSFRNTVEGYSDPTGKYDPAVRSLHNLAHLFLNGTGGQTHLSPNDPIFVLLHTFTDAVFDEWLRRYNADISTFPLENAPIGHNRQYNMVPFWPPVTNTEMFVTAPDNLGYTYEIQWPSREFSVPEIIAIAVVGALLLVALIFGTASYLIRARRSMDEANQPLLTDQYQCYAEEYEKLQNPNQSVV

SEQ ID NO: 12749 - protein, 298 aa, Homo sapiens
MSAPKLLSLGCIFFPLLLFQQARAQFPRQCATVEALRSGMCCPDLSPVSGPGTDRCGSSSGRGRCEAVTADSRPHSPQYPHDGRDDREVWPLRFFNRTCHCNGNFSGHNCGTCRPGWRGAACDQRVLIVRRNLLDLSKEEKNHFVRALDMAKRTTHPLFVIATRRSEEILGPDGNTPQFENISIYNYFVWTHYGHNRQYNMVPFWPPVTNTEMFVTAPDNLGYTYEIQWPSREFSVPEIIAIAVVGALLLVALIFGTASYLIRARRSMDEANQPLLTDQYQCYAEEYEKLQNPNQSVV

SEQ ID NO: 12750 - protein, 488 aa, Homo sapiens
MSAPKLLSLGCIFFPLLLFQQARAQFPRQCATVEALRSGMCCPDLSPVSGPGTDRCGSSSGRGRCEAVTADSRPHSPQYPHDGRDDREVWPLRFFNRTCHCNGNFSGHNCGTCRPGWRGAACDQRVLIVRRNLLDLSKEEKNHFVRALDMAKRTTHPLFVIATRRSEEILGPDGNTPQFENISIYNYFVWTHYYSVKKTFLGVGQESFGEVDFSHEGPAFLTWHRYHLLRLEKDMQEMLQEPSFSLPYWNFATGKNVCDICTDDLMGSRSNFDSTLISPNSVFSQWRVVCDSLEDYDTLGTLCNSTEDGPIRRNPAGNVARPMVQRLPEPQDVAQCLEVGLFDTPPFYSNSTNSFRNTVEGYSDPTGKYDPAVRSLHNLAHLFLNGTGGQTHLSPNDPIFVLLHTFTDAVFDEWLRRYNAGREFSVPEIIAIAVVGALLLVALIFGTASYLIRARRSMDEANQPLLTDQYQCYAEEYEKLQNPNQSVV

SEQ ID NO: 12751 - protein, 802 aa, Homo sapiens
MAAEALAAEAVASRLERQEEDIRWLWSEVERLRDEQLNAPYSCQAEGPCLTREVAQLRAENCDLRHRLCSLRLCLAEERSRQATLESAELEAAQEAGAQPPPSQSQDKDMKKKKMKESEADSEVKHQPIFIKERLKLFEILKKDHQLLLAIYGKKGDTSNIITVRVADGQTVQGEVWKTTPYQVAAEISQELAESTVIAKVNGELWDLDRPLEGDSSLELLTFDNEEAQAVYWHSSAHILGEAMELYYGGHLCYGPPIENGFYYDMFIEDRAVSSTELSALENICKAIIKEKQPFERLEVSKEILLEMFKYNKFKCRILNEKVNTATTTVYRCGPLIDLCKGPHVRHTGKIKTIKIFKNSSTYWEGNPEMETLQRIYGISFPDNKMMRDWEKFQEEAKNRDHRKIGKEQELFFFHDLSPGSCFFLPRGAFIYNTLTDFIREEYHKRDFTEVLSPNMYNSKLWEASGHWQHYSENMFTFEIEKDTFALKPMNCPGHCLMFAHRPRSWREMPIRFADFGVLHRNELSGTLSGLTRVRRFQQDDAHIFCTVEQIEEEIKGCLQFLQSVYSTFGFSFQLNLSTRPENFLGEIEMWNEAEKQLQNSLMDFGEPWKMNPGDGAFYGPKIDIKIKDAIGRYHQCATIQLDFQLPIRFNLTYVSKDGDDKKRPVIIHRAILGSVERMIAILSENYGGKWPFWLSPRQVMVIPVGPTCEKYALQVSSEFFEEGFMADVDLDHSCTLNKKIRNAQLAQYNFILVVGEKEKIDNAVNVRTRDNKIHGEILVTSAIDKLKNLRKTRTLNAEEAF

SEQ ID NO: 12752 - protein, 252 aa, Homo sapiens
MEAMWLLCVALAVLAWGFLWVWDSSERMKSREQGGRLGAESRTLLVIAHPDDEAMFFAPTVLGLARLRHWVYLLCFSAGNYYNQGETRKKELLQSCDVLGIPLSSVMIIDNRDFPDDPGMQWDTEHVARVLLQHIEVNGINLVVTFDAGGVSGHSNHIALYAAVRALHSEGKLPKGCSVLTLQSVNVLRKYISLLDLPLSLLHTQDVLFVLNSKEVAQAKKAMSCHRSQLLWFRRLYIIFSRYMRINSLSFL

SEQ ID NO: 12753 - protein, 1890 aa, Homo sapiens
MVHVARLLLLLLTFFLRTDAETPPRFTRTPVDQTGVSGGVASFICQATGDPRPKIVWNKKGKKVSNQRFEVIEFDDGSGSVLRIQPLRTPRDEAIYECVASNNVGEISVSTRLTVLREDQIPRGFPTIDMGPQLKVVERTRTATMLCAASGNPDPEITWFKDFLPVDTSNNNGRIKQLRSGALQIEQSEESDQGKYECVATNSAGTRYSAPANLYVRVRRVPPRFSIPPTNHEIMPGGSVNITCVAVGSPMPYVKWMLGAEDLTPEDDMPIGRNVLELNDVRQSANYTCVAMSTLGVIEAIAQITVKALPKPPGTPVVTESTATSITLTWDSGNPEPVSYYIIQHKPKNSEELYKEIDGVATTRYSVAGLSPYSDYEFRVVAVNNIGRGPPSEPVLTQTSEQAPSSAPRDVQARMLSSTTILVQWKEPEEPNGQIQGYRVYYTMDPTQHVNNWMKHNVADSQITTIGNLVPQKTYSVKVLAFTSIGDGPLSSDIQVITQTGVPGQPLNFKAEPESETSILLSWTPPRSDTIANYELVYKDGEHGEEQRITIEPGTSYRLQGLKPNSLYYFRLAARSPQGLGASTAEISARTMQSKPSAPPQDISCTSPSSTSILVSWQPPPVEKQNGIITEYSIKYTAVDGEDDKPHEILGIPSDTTKYLLEQLEKWTEYRITVTAHTDVGPGPESLSVLIRTNEDVPSGPPRKVEVEAVNSTSVKVSWRSPVPNKQHGQIRGYQVHYVRMENGEPKGQPMLKDVMLADAQDMIISGLQPETSYSLTVTAYTTKGDGARSKPKLVSTTGAVPGKPRLVINHTQMNTALIQWHPPVDTFGPLQGYRLKFGRKDMEPLTTLEFSEKEDHFTATDIHKGASYVFRLSARNKVGFGEEMVKEISIPEEVPTGFPQNLHSEGTTSTSVQLSWQPPVLAERNGIITKYTLLYRDINIPLLPMEQLIVPADTTMTLTGLKPDTTYDVKVRAHTSKGPGPYSPSVQFRTLPVDQVFAKNFHVKAVMKTSVLLSWEIPENYNSAMPFKILYDDGKMVEEVDGRATQKLIVNLKPEKSYSFVLTNRGNSAGGLQHRVTAKTAPDVLRTKPAFIGKTNLDGMITVQLPEVPANENIKGYYIIIVPLKKSRGKFIKPWESPDEMELDELLKEISRKRRSIRYGREVELKPYIAAHFDVLPTEFTLGDDKHYGGFTNKQLQSGQEYVFFVLAVMEHAESKMYATSPYSDPVVSMDLDPQPITDEEEGLIWVVGPVLAVVFIICIVIAILLYKRKRAESDSRKSSIPNNKEIPSHHPTDPVELRRLNFQTPGMASHPPIPILELADHIERLKANDNLKFSQEYESIDPGQQFTWEHSNLEVNKPKNRYANVIAYDHSRVLLSAIEGIPGSDYVNANYIDGYRKQNAYIATQGSLPETFGDFWRMIWEQRSATVVMMTKLEERSRVKCDQYWPSRGTETHGLVQVTLLDTVELATYCVRTFALYKNGSSEKREVRQFQFTAWPDHGVPEHPTPFLAFLRRVKTCNPPDAGPMVVHCSAGVGRTGCFIVIDAMLERIKHEKTVDIYGHVTLMRAQRNYMVQTEDQYIFIHDALLEAVTCGNTEVPARNLYAYIQKLTQIETGENVTGMELEFKRLASSKAHTSRFISANLPCNKFKNRLVNIMPYESTRVCLQPIRGVEGSDYINASFIDGYRQQKAYIATQGPLAETTEDFWRMLWEHNSTIVVMLTKLREMGREKCHQYWPAERSARYQYFVVDPMAEYNMPQYILREFKVTDARDGQSRTVRQFQFTDWPEQGVPKSGEGFIDFIGQVHKTKEQFGQDGPISVHCSAGVGRTGVFITLSIVLERMRYEGVVDIFQTVKMLRTQRPAMVQTEDQYQFSYRAALEYLGSFDHYAT

SEQ ID NO: 12754 - protein, 1254 aa, Homo sapiens
MPGGSVNITCVAVGSPMPYVKWMLGAEDLTPEDDMPIGRNVLELNDVRQSANYTCVAMSTLGVIEAIAQITVKALPKPPGTPVVTESTATSITLTWDSGNPEPVSYYIIQHKPKNSEELYKEIDGVATTRYSVAGLSPYSDYEFRVVAVNNIGRGPPSEPVLTQTSEQAPSSAPRDVQARMLSSTTILVQWKEPEEPNGQIQGYRVYYTMDPTQHVNNWMKHNVADSQITTIGNLVPQKTYSVKVLAFTSIGDGPLSSDIQVITQTGVPGQPLNFKAEPESETSILLSWTPPRSDTIANYELVYKDGEHGEEQRITIEPGTSYRLQGLKPNSLYYFRLAARSPQGLGASTAEISARTMQSMFAKNFHVKAVMKTSVLLSWEIPENYNSAMPFKILYDDGKMVEEVDGRATQKLIVNLKPEKSYSFVLTNRGNSAGGLQHRVTAKTAPDVLRTKPAFIGKTNLDGMITVQLPEVPANENIKGYYIIIVPLKKSRGKFIKPWESPDEMELDELLKEISRKRRSIRYGREVELKPYIAAHFDVLPTEFTLGDDKHYGGFTNKQLQSGQEYVFFVLAVMEHAESKMYATSPYSDPVVSMDLDPQPITDEEEGLIWVVGPVLAVVFIICIVIAILLYKRKRAESDSRKSSIPNNKEIPSHHPTDPVELRRLNFQTPGMASHPPIPILELADHIERLKANDNLKFSQEYESIDPGQQFTWEHSNLEVNKPKNRYANVIAYDHSRVLLSAIEGIPGSDYVNANYIDGYRKQNAYIATQGSLPETFGDFWRMIWEQRSATVVMMTKLEERSRVKCDQYWPSRGTETHGLVQVTLLDTVELATYCVRTFALYKNGSSEKREVRQFQFTAWPDHGVPEHPTPFLAFLRRVKTCNPPDAGPMVVHCSAGVGRTGCFIVIDAMLERIKHEKTVDIYGHVTLMRAQRNYMVQTEDQYIFIHDALLEAVTCGNTEVPARNLYAYIQKLTQIETGENVTGMELEFKRLASSKAHTSRFISANLPCNKFKNRLVNIMPYESTRVCLQPIRGVEGSDYINASFIDGYRQQKAYIATQGPLAETTEDFWRMLWEHNSTIVVMLTKLREMGREKCHQYWPAERSARYQYFVVDPMAEYNMPQYILREFKVTDARDGQSRTVRQFQFTDWPEQGVPKSGEGFIDFIGQVHKTKEQFGQDGPISVHCSAGVGRTGVFITLSIVLERMRYEGVVDIFQTVKMLRTQRPAMVQTEDQYQFSYRAALEYLGSFDHYAT

SEQ ID NO: 12755 - protein, 1770 aa, Homo sapiens
MGPQLKVVERTRTATMLCAASGNPDPEITWFKDFLPVDTSNNNGRIKQLRSGALQIEQSEESDQGKYECVATNSAGTRYSAPANLYVRVRRVPPRFSIPPTNHEIMPGGSVNITCVAVGSPMPYVKWMLGAEDLTPEDDMPIGRNVLELNDVRQSANYTCVAMSTLGVIEAIAQITVKALPKPPGTPVVTESTATSITLTWDSGNPEPVSYYIIQHKPKNSEELYKEIDGVATTRYSVAGLSPYSDYEFRVVAVNNIGRGPPSEPVLTQTSEQAPSSAPRDVQARMLSSTTILVQWKEPEEPNGQIQGYRVYYTMDPTQHVNNWMKHNVADSQITTIGNLVPQKTYSVKVLAFTSIGDGPLSSDIQVITQTGVPGQPLNFKAEPESETSILLSWTPPRSDTIANYELVYKDGEHGEEQRITIEPGTSYRLQGLKPNSLYYFRLAARSPQGLGASTAEISARTMQSKPSAPPQDISCTSPSSTSILVSWQPPPVEKQNGIITEYSIKYTAVDGEDDKPHEILGIPSDTTKYLLEQLEKWTEYRITVTAHTDVGPGPESLSVLIRTNEDVPSGPPRKVEVEAVNSTSVKVSWRSPVPNKQHGQIRGYQVHYVRMENGEPKGQPMLKDVMLADAQWEFDDTTEHDMIISGLQPETSYSLTVTAYTTKGDGARSKPKLVSTTGAVPGKPRLVINHTQMNTALIQWHPPVDTFGPLQGYRLKFGRKDMEPLTTLEFSEKEDHFTATDIHKGASYVFRLSARNKVGFGEEMVKEISIPEEVPTGFPQNLHSEGTTSTSVQLSWQPPVLAERNGIITKYTLLYRDINIPLLPMEQLIVPADTTMTLTGLKPDTTYDVKVRAHTSKGPGPYSPSVQFRTLPVDQVFAKNFHVKAVMKTSVLLSWEIPENYNSAMPFKILYDDGKMVEEVDGRATQKLIVNLKPEKSYSFVLTNRGNSAGGLQHRVTAKTAPDVLRTKPAFIGKTNLDGMITVQLPEVPANENIKGYYIIIVPLKKSRGKFIKPWESPDEMELDELLKEISRKRRSIRYGREVELKPYIAAHFDVLPTEFTLGDDKHYGGFTNKQLQSGQEYVFFVLAVMEHAESKMYATSPYSDPVVSMDLDPQPITDEEEGLIWVVGPVLAVVFIICIVIAILLYKRKRAESDSRKSSIPNNKEIPSHHPTDPVELRRLNFQTPGMASHPPIPILELADHIERLKANDNLKFSQEYESIDPGQQFTWEHSNLEVNKPKNRYANVIAYDHSRVLLSAIEGIPGSDYVNANYIDGYRKQNAYIATQGSLPETFGDFWRMIWEQRSATVVMMTKLEERSRVKCDQYWPSRGTETHGLVQVTLLDTVELATYCVRTFALYKNGSSEKREVRQFQFTAWPDHGVPEHPTPFLAFLRRVKTCNPPDAGPMVVHCSAGVGRTGCFIVIDAMLERIKHEKTVDIYGHVTLMRAQRNYMVQTEDQYIFIHDALLEAVTCGNTEVPARNLYAYIQKLTQIETGENVTGMELEFKRLASSKAHTSRFISANLPCNKFKNRLVNIMPYESTRVCLQPIRGVEGSDYINASFIDGYRQQKAYIATQGPLAETTEDFWRMLWEHNSTIVVMLTKLREMGREKCHQYWPAERSARYQYFVVDPMAEYNMPQYILREFKVTDARDGQSRTVRQFQFTDWPEQGVPKSGEGFIDFIGQVHKTKEQFGQDGPISVHCSAGVGRTGVFITLSIVLERMRYEGVVDIFQTVKMLRTQRPAMVQTEDQYQFSYRAALEYLGSFDHYAT

SEQ ID NO: 12756 - protein, 1656 aa, Homo sapiens
MPGGSVNITCVAVGSPMPYVKWMLGAEDLTPEDDMPIGRNVLELNDVRQSANYTCVAMSTLGVIEAIAQITVKALPKPPGTPVVTESTATSITLTWDSGNPEPVSYYIIQHKPKNSEELYKEIDGVATTRYSVAGLSPYSDYEFRVVAVNNIGRGPPSEPVLTQTSEQAPSSAPRDVQARMLSSTTILVQWKEPEEPNGQIQGYRVYYTMDPTQHVNNWMKHNVADSQITTIGNLVPQKTYSVKVLAFTSIGDGPLSSDIQVITQTGVPGQPLNFKAEPESETSILLSWTPPRSDTIANYELVYKDGEHGEEQRITIEPGTSYRLQGLKPNSLYYFRLAARSPQGLGASTAEISARTMQSKPSAPPQDISCTSPSSTSILVSWQPPPVEKQNGIITEYSIKYTAVDGEDDKPHEILGIPSDTTKYLLEQLEKWTEYRITVTAHTDVGPGPESLSVLIRTNEDVPSGPPRKVEVEAVNSTSVKVSWRSPVPNKQHGQIRGYQVHYVRMENGEPKGQPMLKDVMLADAQDMIISGLQPETSYSLTVTAYTTKGDGARSKPKLVSTTGAVPGKPRLVINHTQMNTALIQWHPPVDTFGPLQGYRLKFGRKDMEPLTTLEFSEKEDHFTATDIHKGASYVFRLSARNKVGFGEEMVKEISIPEEVPTGFPQNLHSEGTTSTSVQLSWQPPVLAERNGIITKYTLLYRDINIPLLPMEQLIVPADTTMTLTGLKPDTTYDVKVRAHTSKGPGPYSPSVQFRTLPVDQVFAKNFHVKAVMKTSVLLSWEIPENYNSAMPFKILYDDGKMVEEVDGRATQKLIVNLKPEKSYSFVLTNRGNSAGGLQHRVTAKTAPDVLRTKPAFIGKTNLDGMITVQLPEVPANENIKGYYIIIVPLKKSRGKFIKPWESPDEMELDELLKEISRKRRSIRYGREVELKPYIAAHFDVLPTEFTLGDDKHYGGFTNKQLQSGQEYVFFVLAVMEHAESKMYATSPYSDPVVSMDLDPQPITDEEEGLIWVVGPVLAVVFIICIVIAILLYKRKRAESDSRKSSIPNNKEIPSHHPTDPVELRRLNFQTPGMASHPPIPILELADHIERLKANDNLKFSQEYESIDPGQQFTWEHSNLEVNKPKNRYANVIAYDHSRVLLSAIEGIPGSDYVNANYIDGYRKQNAYIATQGSLPETFGDFWRMIWEQRSATVVMMTKLEERSRVKCDQYWPSRGTETHGLVQVTLLDTVELATYCVRTFALYKNGSSEKREVRQFQFTAWPDHGVPEHPTPFLAFLRRVKTCNPPDAGPMVVHCSAGVGRTGCFIVIDAMLERIKHEKTVDIYGHVTLMRAQRNYMVQTEDQYIFIHDALLEAVTCGNTEVPARNLYAYIQKLTQIETGENVTGMELEFKRLASSKAHTSRFISANLPCNKFKNRLVNIMPYESTRVCLQPIRGVEGSDYINASFIDGYRQQKAYIATQGPLAETTEDFWRMLWEHNSTIVVMLTKLREMGREKCHQYWPAERSARYQYFVVDPMAEYNMPQYILREFKVTDARDGQSRTVRQFQFTDWPEQGVPKSGEGFIDFIGQVHKTKEQFGQDGPISVHCSAGVGRTGVFITLSIVLERMRYEGVVDIFQTVKMLRTQRPAMVQTEDQYQFSYRAALEYLGSFDHYAT

SEQ ID NO: 12757 - protein, 141 aa, Homo sapiens [sequence omitted]

SEQ ID NO: 12758 - protein, 1488 aa, Homo sapiens [sequence omitted]

SEQ ID NO: 12759 - protein, 1665 aa, Homo sapiens
MPGGSVNITCVAVGSPMPYVKWMLGAEDLTPEDDMPIGRNVLELNDVRQSANYTCVAMSTLGVIEAIAQITVKALPKPPGTPVVTESTATSITLTWDSGNPEPVSYYIIQHKPKNSEELYKEIDGVATTRYSVAGLSPYSDYEFRVVAVNNIGRGPPSEPVLTQTSEQAPSSAPRDVQARMLSSTTILVQWKEPEEPNGQIQGYRVYYTMDPTQHVNNWMKHNVADSQITTIGNLVPQKTYSVKVLAFTSIGDGPLSSDIQVITQTGVPGQPLNFKAEPESETSILLSWTPPRSDTIANYELVYKDGEHGEEQRITIEPGTSYRLQGLKPNSLYYFRLAARSPQGLGASTAEISARTMQSKPSAPPQDISCTSPSSTSILVSWQPPPVEKQNGIITEYSIKYTAVDGEDDKPHEILGIPSDTTKYLLEQLEKWTEYRITVTAHTDVGPGPESLSVLIRTNEDVPSGPPRKVEVEAVNSTSVKVSWRSPVPNKQHGQIRGYQVHYVRMENGEPKGQPMLKDVMLADAQWEFDDTTEHDMIISGLQPETSYSLTVTAYTTKGDGARSKPKLVSTTGAVPGKPRLVINHTQMNTALIQWHPPVDTFGPLQGYRLKFGRKDMEPLTTLEFSEKEDHFTATDIHKGASYVFRLSARNKVGFGEEMVKEISIPEEVPTGFPQNLHSEGTTSTSVQLSWQPPVLAERNGIITKYTLLYRDINIPLLPMEQLIVPADTTMTLTGLKPDTTYDVKVRAHTSKGPGPYSPSVQFRTLPVDQVFAKNFHVKAVMKTSVLLSWEIPENYNSAMPFKILYDDGKMVEEVDGRATQKLIVNLKPEKSYSFVLTNRGNSAGGLQHRVTAKTAPDVLRTKPAFIGKTNLDGMITVQLPEVPANENIKGYYIIIVPLKKSRGKFIKPWESPDEMELDELLKEISRKRRSIRYGREVELKPYIAAHFDVLPTEFTLGDDKHYGGFTNKQLQSGQEYVFFVLAVMEHAESKMYATSPYSDPVVSMDLDPQPITDEEEGLIWVVGPVLAVVFIICIVIAILLYKRKRAESDSRKSSIPNNKEIPSHHPTDPVELRRLNFQTPGMASHPPIPILELADHIERLKANDNLKFSQEYESIDPGQQFTWEHSNLEVNKPKNRYANVIAYDHSRVLLSAIEGIPGSDYVNANYIDGYRKQNAYIATQGSLPETFGDFWRMIWEQRSATVVMMTKLEERSRVKCDQYWPSRGTETHGLVQVTLLDTVELATYCVRTFALYKNGSSEKREVRQFQFTAWPDHGVPEHPTPFLAFLRRVKTCNPPDAGPMVVHCSAGVGRTGCFIVIDAMLERIKHEKTVDIYGHVTLMRAQRNYMVQTEDQYIFIHDALLEAVTCGNTEVPARNLYAYIQKLTQIETGENVTGMELEFKRLASSKAHTSRFISANLPCNKFKNRLVNIMPYESTRVCLQPIRGVEGSDYINASFIDGYRQQKAYIATQGPLAETTEDFWRMLWEHNSTIVVMLTKLREMGREKCHQYWPAERSARYQYFVVDPMAEYNMPQYILREFKVTDARDGQSRTVRQFQFTDWPEQGVPKSGEGFIDFIGQVHKTKEQFGQDGPISVHCSAGVGRTGVFITLSIVLERMRYEGVVDIFQTVKMLRTQRPAMVQTEDQYQFSYRAALEYLGSFDHYAT

SEQ ID NO: 12760 - protein, 1665 aa, Homo sapiens; identical to SEQ ID NO: 12759

SEQ ID NO: 12761 - protein, 1899 aa, Homo sapiens
MVHVARLLLLLLTFFLRTDAETPPRFTRTPVDQTGVSGGVASFICQATGDPRPKIVWNKKGKKVSNQRFEVIEFDDGSGSVLRIQPLRTPRDEAIYECVASNNVGEISVSTRLTVLREDQIPRGFPTIDMGPQLKVVERTRTATMLCAASGNPDPEITWFKDFLPVDTSNNNGRIKQLRSGALQIEQSEESDQGKYECVATNSAGTRYSAPANLYVRVRRVPPRFSIPPTNHEIMPGGSVNITCVAVGSPMPYVKWMLGAEDLTPEDDMPIGRNVLELNDVRQSANYTCVAMSTLGVIEAIAQITVKALPKPPGTPVVTESTATSITLTWDSGNPEPVSYYIIQHKPKNSEELYKEIDGVATTRYSVAGLSPYSDYEFRVVAVNNIGRGPPSEPVLTQTSEQAPSSAPRDVQARMLSSTTILVQWKEPEEPNGQIQGYRVYYTMDPTQHVNNWMKHNVADSQITTIGNLVPQKTYSVKVLAFTSIGDGPLSSDIQVITQTGVPGQPLNFKAEPESETSILLSWTPPRSDTIANYELVYKDGEHGEEQRITIEPGTSYRLQGLKPNSLYYFRLAARSPQGLGASTAEISARTMQSKPSAPPQDISCTSPSSTSILVSWQPPPVEKQNGIITEYSIKYTAVDGEDDKPHEILGIPSDTTKYLLEQLEKWTEYRITVTAHTDVGPGPESLSVLIRTNEDVPSGPPRKVEVEAVNSTSVKVSWRSPVPNKQHGQIRGYQVHYVRMENGEPKGQPMLKDVMLADAQWEFDDTTEHDMIISGLQPETSYSLTVTAYTTKGDGARSKPKLVSTTGAVPGKPRLVINHTQMNTALIQWHPPVDTFGPLQGYRLKFGRKDMEPLTTLEFSEKEDHFTATDIHKGASYVFRLSARNKVGFGEEMVKEISIPEEVPTGFPQNLHSEGTTSTSVQLSWQPPVLAERNGIITKYTLLYRDINIPLLPMEQLIVPADTTMTLTGLKPDTTYDVKVRAHTSKGPGPYSPSVQFRTLPVDQVFAKNFHVKAVMKTSVLLSWEIPENYNSAMPFKILYDDGKMVEEVDGRATQKLIVNLKPEKSYSFVLTNRGNSAGGLQHRVTAKTAPDVLRTKPAFIGKTNLDGMITVQLPEVPANENIKGYYIIIVPLKKSRGKFIKPWESPDEMELDELLKEISRKRRSIRYGREVELKPYIAAHFDVLPTEFTLGDDKHYGGFTNKQLQSGQEYVFFVLAVMEHAESKMYATSPYSDPVVSMDLDPQPITDEEEGLIWVVGPVLAVVFIICIVIAILLYKRKRAESDSRKSSIPNNKEIPSHHPTDPVELRRLNFQTPGMASHPPIPILELADHIERLKANDNLKFSQEYESIDPGQQFTWEHSNLEVNKPKNRYANVIAYDHSRVLLSAIEGIPGSDYVNANYIDGYRKQNAYIATQGSLPETFGDFWRMIWEQRSATVVMMTKLEERSRVKCDQYWPSRGTETHGLVQVTLLDTVELATYCVRTFALYKNGSSEKREVRQFQFTAWPDHGVPEHPTPFLAFLRRVKTCNPPDAGPMVVHCSAGVGRTGCFIVIDAMLERIKHEKTVDIYGHVTLMRAQRNYMVQTEDQYIFIHDALLEAVTCGNTEVPARNLYAYIQKLTQIETGENVTGMELEFKRLASSKAHTSRFISANLPCNKFKNRLVNIMPYESTRVCLQPIRGVEGSDYINASFIDGYRQQKAYIATQGPLAETTEDFWRMLWEHNSTIVVMLTKLREMGREKCHQYWPAERSARYQYFVVDPMAEYNMPQYILREFKVTDARDGQSRTVRQFQFTDWPEQGVPKSGEGFIDFIGQVHKTKEQFGQDGPISVHCSAGVGRTGVFITLSIVLERMRYEGVVDIFQTVKMLRTQRPAMVQTEDQYQFSYRAALEYLGSFDHYAT

SEQ ID NO: 12762 - protein, 302 aa, Homo sapiens
MALHDMEDFTFDGTKRLSVNYVKGILQPTDTCDIWDKIWNFQAKPDDLLISTYPKAGTTWTQEIVELIQNEGDVEKSKRAPTHQRFPFLEMKIPSLGSGLEQAHAMPSPRILKTHLPFHLLPPSLLEKNCKIIYVARNPKDNMVSYYHFQRMNKALPAPGTWEEYFETFLAGKVCWGSWHEHVKGWWEAKDKHRILYLFYEDMKKNPKHEIQKLAEFIGKKLDDKVLDKIVHYTSFDVMKQNPMANYSSIPAEIMDHSISPFMRKGAVGDWKKHFTVAQNERFDEDYKKKMTDTRLTFHFQF

SEQ ID NO: 12763 - protein, 102 aa, Homo sapiens
MALHDMEDFTFDGTKRLSVNYVKGILQPTDTCDIWDKIWNFQAKPDDLLISTYPKAGTTWTQEIVELIQNEGDVEKSKRAPTHQRFPFLEMKIPSLGSGEYK

SEQ ID NO: 12764 - protein, 354 aa, Homo sapiens
MEKFKAAMLLGSVGDALGYRNVCKENSTVGMKIQEELQRSGGLDHLVLSPGEWPVSDNTIMHIATAEALTTDYWCLDDLYREMVRCYVEIVEKLPERRPDPATIEGCAQLKPNNYLLAWHTPFNEKGSGFGAATKAMCIGLRYWKPERLETLIEVSVECGRMTHNHPTGFLGSLCTALFVSFAAQGKPLVQWGRDMLRAVPLAEEYCRKTIRHTAEYQEHWFYFEAKWQFYLEERKISKDSENKAIFPDNYDAEEREKTYRKWSSEGRGGRRGHDAPMIAYDALLAAGNSWTELCHRAMFHGGESAATGTIAGCLFGLLYGLDLVPKGLYQDLEDKEKLEDLGAALYRLSTEEK

SEQ ID NO: 12765 - protein, 272 aa, Homo sapiens
MVRCYVEIVEKLPERRPDPATIEGCAQLKPNNYLLAWHTPFNEKGSGFGAATKAMCIGLRYWKPERLETLIEVSVECGRMTHNHPTGFLGSLCTALFVSFAAQGKPLVQWGRDMLRAVPLAEEYCRKTIRHTAEYQEHWFYFEAKWQFYLEERKISKDSENKAIFPDNYDAEEREKTYRKWSSEGRGGRRGHDAPMIAYDALLAAGNSWTELCHRAMFHGGESAATGTIAGCLFGLLYGLDLVPKGLYQDLEDKEKLEDLGAALYRLSTEEK

SEQ ID NO: 12766 - protein, 272 aa, Homo sapiens; identical to SEQ ID NO: 12765

SEQ ID NO: 12767 - protein, 622 aa, Homo sapiens [sequence omitted]

SEQ ID NO: 12768 - protein, 624 aa, Homo sapiens
MVNNYSLEEVTHEEAVAILKNTSEVVYLKVGKPTTIYMTDPYGPPDITHSYSPPMENHLLSGNNGTLEYKTSLPPISPGRYSPIPKHMLVDDDYTRPPEPVYSTVNKLCDKPASPRHYSPVECDKSFLLSAPYSHYHLGLLPDSEMTSHSQHSTATRQPSMTLQRAVSLEGEPRKVVLHKGSTGLGFNIVGGEDGEGIFVSFILAGGPADLSGELQRGDQILSVNGIDLRGASHEQAAAALKGAGQTVTIIAQYQPEDYARFEAKIHDLREQMMNHSMSSGSGSLRTNQKRSLYVRAMFDYDKSKDSGLPSQGLSFKYGDILHVINASDDEWWQARRVMLEGDSEEMGVIPSKRRVERKERARLKTVKFNAKPGVIDSKGSFNDKRKKSFIFSRKFPFYKNKEQSEQETSDPERGQEDLILSYEPVTRQEINYTRPVIILGPMKDRINDDLISEFPDKFGSCVPHTTRPKRDYEVDGRDYHFVISREQMEKDIQEHKFIEAGQYNDNLYGTSVQSVRFVAERGKHCILDVSGNAIKRLQVAQLYPIAIFIKPRSLEPLMEMNKRLTEEQAKKTYDRAIKLEQEFGEYFTAIVQGDTLEDIYNQCKLVIEEQSGPFIWIPSKEKL

SEQ ID NO: 12769 - protein, 483 aa, Homo sapiens
MTKMDIRGAVDAAVPTNIIAAKAAEVRANKVNWQSYLQGQMISAEDCEFIQRFEMKRSPEEKQEMLQTEGSQCAKTFINLMTHICKEQTVQYILTMVDDMLQENHQRVSIFFDYARCSKNTAWPYFLPMLNRQDPFTVHMAARIIAKLAAWGKELMEGSDLNYYFNWIKTQLSSQKLRGSGVAVETGTVSSSDSSQYVQCVAGCLQLMLRVNEYRFAWVEADGVNCIMGVLSNKCGFQLQYQMIFSIWLLAFSPQMCEHLRRYNIIPVLSDILQESVKEKVTRIILAAFRNFLEKSTERETRQEYALAMIQCKVLKQLENLEQQKYDDEDISEDIKFLLEKLGESVQDLSSFDEYSSELKSGRLEWSPVHKSEKFWRENAVRLNEKNYELLKILTKLLEVSDDPQVLAVAAHDVGEYVRHYPRGKRVIEQLGGKQLVMNHMHHEDQQVRYNALLAVQKLMVHNWEYLGKQLQSEQPQTAAARS

SEQ ID NO: 12770 - protein, 465 aa, Homo sapiens
MTKMDIRGAVDAAVPTNIIAAKAAEVRANKVNWQSYLQGQMISAEDCEFIQRFEMKRSPEEKQEMLQTEGSQCAKTFINLMTHICKEQTVQYILTMVDDMLQENHQRVSIFFDYARCSKNTAWPYFLPMLNRQDPFTVHMAARIIAKLAAWGKELMEGSDLNYYFNWIKTQLSSQSSQYVQCVAGCLQLMLRVNEYRFAWVEADGVNCIMGVLSNKCGFQLQYQMIFSIWLLAFSPQMCEHLRRYNIIPVLSDILQESVKEKVTRIILAAFRNFLEKSTERETRQEYALAMIQCKVLKQLENLEQQKYDDEDISEDIKFLLEKLGESVQDLSSFDEYSSELKSGRLEWSPVHKSEKFWRENAVRLNEKNYELLKILTKLLEVSDDPQVLAVAAHDVGEYVRHYPRGKRVIEQLGGKQLVMNHMHHEDQQVRYNALLAVQKLMVHNWEYLGKQLQSEQPQTAAARS

SEQ ID NO: 12771 - protein, 483 aa, Homo sapiens; identical to SEQ ID NO: 12769

SEQ ID NO: 12772 - protein, 483 aa, Homo sapiens; identical to SEQ ID NO: 12769

SEQ ID NO: 12773 - protein, 412 aa, Homo sapiens
MAAALLARASGPARRALCPRAWRQLHTIYQSVELPETHQMLLQTCRDFAEKELFPIAAQVDKEHLFPAAQVKKMGGLGLLAMDVPEELGGAGLDYLAYAIAMEEISRGCASTGVIMSVNNSLYLGPILKFGSKEQKQAWVTPFTSGDKIGCFALSEPGNGSDAGAASTTARAEGDSWVLNGTKAWITNAWEASAAVVFASTDRALQNKGISAFLVPMPTPGLTLGKKEDKLGIRGSSTANLIFEDCRIPKDSILGEPGMGFKIAMQTLDMGRIGIASQALGIAQTALDCAVNYAENRMAFGAPLTKLQVIQFKLADMALALESARLLTWRAAMLKDNKKPFIKEAAMAKLAASEAATAISHQAIQILGGMGYVTEMPAERHYRDARITEIYEGTSEIQRLVIAGHLLRSYRS

SEQ ID NO: 12774 - protein, 514 aa, Homo sapiens
MALMQELYSTPASRLDSFVAQWLQPHREWKEEVLDAVRTVEEFLRQEHFQGKRGLDQDVRVLKVVKVGSFGNGTVLRSTREVELVAFLSCFHSFQEAAKHHKDVLRLIWKTMWQSQDLLDLGLEDLRMEQRVPDALVFTIQTRGTAEPITVTIVPAYRALGPSLPNSQPPPEVYVSLIKACGGPGNFCPSFSELQRNFVKHRPTKLKSLLRLVKHWYQQYVKARSPRANLPPLYALELLTIYAWEMGTEEDENFMLDEGFTTVMDLLLEYEVICIYWTKYYTLHNAIIEDCVRKQLKKERPIILDPADPTLNVAEGYRWDIVAQRASQCLKQDCCYDNRENPISSWNVKRARDIHLTVEQRGYPDFNLIVNPYEPIRKVKEKIRRTRGYSGLQRLSFQVPGSERQLLSSRCSLAKYGIFSHTHIYLLETIPSEIQVFVKNPDGGSYAYAINPNSFILGLKQQIEDQQGLPKKQQQLEFQGQVLQDWLGLGIYGIQDSDTLILSKKKGEALFPAS

SEQ ID NO: 12775 - protein, 175 aa, Homo sapiens [sequence omitted]

SEQ ID NO: 12776 - protein, 269 aa, Homo sapiens
MGTEEDENFMLDEGFTTVMDLLLEYEVICIYWTKYYTLHNAIIEDCVRKQLKKERPIILDPADPTLNVAEGYRWDIVAQRASQCLKQDCCYDNRENPISSWNVKRARDIHLTVEQRGYPDFNLIVNPYEPIRKVKEKIRRTRGYSGLQRLSFQVPGSERQLLSSRCSLAKYGIFSHTHIYLLETIPSEIQVFVKNPDGGSYAYAINPNSFILGLKQQIEDQQGLPKKQQQLEFQGQVLQDWLGLGIYGIQDSDTLILSKKKGEALFPAS

SEQ ID NO: 12777 - protein, 255 aa, Homo sapiens
MALMQELYSTPASRLDSFVAQWLQPHREWKEEVLDAVRTVEEFLRQEHFQGKRGLDQDVRVLKVVKVGSFGNGTVLRSTREVELVAFLSCFHSFQEAAKHHKDVLRLIWKTMWQSQDLLDLGLEDLRMEQRVPDALVFTIQTRGTAEPITVTIVPAYRALGPSLPNSQPPPEVYVSLIKACGGPGNFCPSFSELQRNFVKHRPTKLKSLLRLVKHWYQQAHHPGSGRPHPQRGRRVQMGHRCSEGLPVPETGLLL

SEQ ID NO: 12778 - protein, 771 aa, Homo sapiens
MRVTAFLDIPGQDNLPPLTRLEKYAFSENTFNRQIIARGLLDIFRDFGNNEEDFLTVMEIVVRLSEDAEPTVRTELMEQIPPIAIFLQENRSNFPVVLSEYLIPIVVRYLTDPNNQIICKMASMLSKSTVERLLLPRFCELCGDRKLFQVRKVCAANFGDICHAVGQEATEKFLIPKFFELCSDAVWGMRKACAECFTAVSHSSSPGVRRTQLFPLFIRLVSDPCRWVHQAAFQSLGPFTSTFANPSRAGLYLREDGALSIWPLTQDLDSGFASGSPAPSSGGNTSPASKDLELLLSEAGPQEDDCSRPGVVHNSCVARSEIQKVLGSLQEHLMNDPDVQAQVQVLSAALRAAQLDCVNEAESKPTAGLKEVSISHPSSASDNQIALAASSSQDELFVARILQSPDPGGPRNGTSDHLETDQRQDPTPLEENKSKLQDVIPQPLLDQYVSMTDPARAQTVDTDIAKHCAYSLPGVALTLGRQNWHCLKDTYETLASDVQWKVRRALAFSIHELAVILGDQLTAADLVPIFNGFLKDLDEVRIGVLRHLYDFLKLLHEDKRRDYLYQLQEFVVTDNSRNWRFRYELAEQLILILELYSPNDVYDYLMHIALKLCADQVSEVRWISFKLVVAILQKFYSNSESALGLNFINELIIRFRHCSKWVGRQAFAFICQAVVSKECVPVDQFMEHLLPSLLSLASDPVPNVRVLLAKALRQMLLEKAYFRNAGNPHLEVIEETILALQSDRDQDVSFFAALEPKRRNIIDTAVLEKQN

SEQ ID NO: 12779 - protein, 308 aa, Homo sapiens
MRVTAFLDIPGQDNLPPLTRLEKYAFSENTFNRQIIARGLLDIFRDFGNNEEDFLTVMEIVVRLSEDAEPTVRTELMEQIPPIAIFLQENRSNFPVVLSEYLIPIVVRYLTDPNNQEVLLILLEQDLIFQHDVENKVCPILLQLSAPDSDDEYKAEAVCAANFGDICHAVGQEATEKFLIPKFFELCSDAVWGMRKACAECFTAVSHSSSPGVRRTQLFPLFIRLVSDPCRWVHQAAFQSLGPFTSTFANPSRAGLYLREDGALSIWPLTQDLDSGFASGSPAPSSGGNTSPARYALARVTTRTLDVP

SEQ ID NO: 12780 - protein, 386 aa, Homo sapiens [sequence omitted]

SEQ ID NO: 12781 - protein, 776 aa, Homo sapiens
MRVTAFLDIPGQDNLPPLTRLEKYAFSENTFNRQIIARGLLDIFRDFGNNEEDFLTVMEIVVRLSEDAEPTVRTELMEQIPPIAIFLQENRSNFPVVLSEYLIPIVVRYLTDPNNQEVLLILLEQDLIFQHDVENKVCPILLQLSAPDSDDEYKAEAVCAANFGDICHAVGQEATEKFLIPKFFELCSDAVWGMRKACAECFTAVSHSSSPGVRRTQLFPLFIRLVSDPCRWVHQAAFQSLGPFTSTFANPSRAGLYLREDGALSIWPLTQDLDSGFASGSPAPSSGGNTSPASKDLELLLSEAGPQEDDCSRPGVVHNSCVARSEIQKVLGSLQEHLMNDPDVQAQVQVLSAALRAAQLDCVNEAESKPTAGLKEVSISHPSSASDNQIALAASSSQDELFVARILQSPDPGGPRNGTSDHLETDQRQDPTPLEENKSKLQDVIPQPLLDQYVSMTDPARAQTVDTDIAKHCAYSLPGVALTLGRQNWHCLKDTYETLASDVQWKVRRALAFSIHELAVILGDQLTAADLVPIFNGFLKDLDEVRIGVLRHLYDFLKLLHEDKRRDYLYQLQEFVVTDNSRNWRFRYELAEQLILILELYSPNDVYDYLMHIALKLCADQVSEVRWISFKLVVAILQKFYSNSESALGLNFINELIIRFRHCSKWVGRQAFAFICQAVVSKECVPVDQFMEHLLPSLLSLASDPVPNVRVLLAKALRQMLLEKAYFRNAGNPHLEVIEETILALQSDRDQDVSFFAALEPKRRNIIDTAVLEKQN

SEQ ID NO: 12782 - protein, 581 aa, Homo sapiens
MSLVCALLNTCQAHRVHDDKPNIVLIMVDDLGIGDLGCYGNDTMRTPHIDRLAREGVRLTQHISAASLCSPSRSAFLTGRYPIRSGMVSSGNRRVIQNLAVPAGLPLNETTLAALLKKQGYSTGLIGKWHQGLNCDSRSDQCHHPYNYGFDYYYGMPFTLVDSCWPDPSRNTELAFESQLWLCVQLVAIAILTLTFGKLSGWVSVPWLLIFSMILFIFLLGYAWFSSHTSPLYWDCLLMRGHEITEQPMKAERAGSIMVKEAISFLERHSKETFLLFFSFLHVHTPLPTTDDFTGTSKHGLYGDNVEEMDSMVGKILDAIDDFGLRNNTLVYFTSDHGGHLEARRGHAQLGGWNGIYKGGKGMGGWEGGIRVPGIVRWPGKVPAGRLIKEPTSLMDILPTVASVSGGSLPQDRVIDGRDLMPLLQGNVRHSEHEFLFHYCGSYLHAVRWIPKDDSGSVWKAHYVTPVFQPPASGGCYVTSLCRCFGEQVTYHNPPLLFDLSRDPSESTPLTPATEPLHDFVIKKVANALKEHQETIVPVTYQLSELNQGRTWLKPCCGVFPFCLCDKEEEVSQPRGPNEKR

SEQ ID NO: 12783 - protein, 590 aa, Homo sapiens
MRPRRPLVFMSLVCALLNTCQAHRVHDDKPNIVLIMVDDLGIGDLGCYGNDTMRTPHIDRLAREGVRLTQHISAASLCSPSRSAFLTGRYPIRSGMVSSGNRRVIQNLAVPAGLPLNETTLAALLKKQGYSTGLIGKWHQGLNCDSRSDQCHHPYNYGFDYYYGMPFTLVDSCWPDPSRNTELAFESQLWLCVQLVAIAILTLTFGKLSGWVSVPWLLIFSMILFIFLLGYAWFSSHTSPLYWDCLLMRGHEITEQPMKAERAGSIMVKEAISFLERHSKETFLLFFSFLHVHTPLPTTDDFTGTSKHGLYGDNVEEMDSMVGKILDAIDDFGLRNNTLVYFTSDHGGHLEARRGHAQLGGWNGIYKGGKGMGGWEGGIRVPGIVRWPGKVPAGRLIKEPTSLMDILPTVASVSGGSLPQDRVIDGRDLMPLLQGNVRHSEHEFLFHYCGSYLHAVRWIPKDDSGSVWKAHYVTPVFQPPASGGCYVTSLCRCFGEQVTYHNPPLLFDLSRDPSESTPLTPATEPLHDFVIKKVANALKEHQETIVPVTYQLSELNQGRTWLKPCCGVFPFCLCDKEEEVSQPRGPNEKR

SEQ ID NO: 12784 - protein, 581 aa, Homo sapiens; identical to SEQ ID NO: 12782

SEQ ID NO: 12785 - protein, 461 aa, Homo sapiens
MRPADLPPRPMEESPASSSAPTETEEPGSSAEVMEEVTTCSFNSPLFRQEDDRGITYRIPALLYIPPTHTFLAFAEKRSTRRDEDALHLVLRRGLRIGQLVQWGPLKPLMEATLPGHRTMNPCPVWEQKSGCVFLFFICVRGHVTERQQIVSGRNAARLCFIYSQDAGCSWSEVRDLTEEVIGSELKHWATFAVGPGHGIQLQSGRLVIPAYTYYIPSWFFCFQLPCKTRPHSLMIYSDDLGVTWHHGRLIRPMVTVECEVAEVTGRAGHPVLYCSARTPNRCRAEALSTDHGEGFQRLALSRQLCEPPHGCQGSVVSFRPLEIPHRCQDSSSKDAPTIQQSSPGSSLRLEEEAGTPSESWLLYSHPTSRKQRVDLGIYLNQTPLEAACWSRPWILHCGPCGYSDLAALEEEGLFGCLFECGTKQECEQIAFRLFTHREILSHLQGDCTSPGRNPSQFKSN

SEQ ID NO: 12786 - protein, 461 aa, Homo sapiens; identical to SEQ ID NO: 12785

SEQ ID NO: 12787 - protein, 203 aa, Homo sapiens
MRQPAVRLVRLGRVPYAELLGLQDRWLRRLQAEPGIEAPSGTEAGALLLCEPAGPVYTAGLRGGLTPEETARLRALGAEVRVTGRGGLATFHGPGQLLCHPKQNLKTGDLIQFSHRPERDTKARRVEGVRCGRHITSHGLALNCSTDLTWFEHIVPCGLVGSGVTSLSKELQRHVTVEEVMPPFLVAFKEIYKCTLISEDSPN

SEQ ID NO: 12788 - protein, 371 aa, Homo sapiens [sequence omitted]

SEQ ID NO: 12789 - protein, 200 aa, Homo sapiens
PQRGEELPRSAAATLRPCPGEGGGLRGQLAADCLGLASELRAPGSPELHGAARRGAIVYVFLGRQTNRGLVFAGRAQCWWLQVAAAAAAAAAAASAVSAAGAKRRDTRAGRPPRQRGIGHVSAHLGRTSVEPEGRFAGTIQTAILILGVTVPGRLSGGSASVHSLGSVCECVCVCAVSGSPLPPVFPSSDALGMRIRGWK

SEQ ID NO: 12790 - protein, 328 aa, Homo sapiens
MEIVWEVLFLLQANFIVCISAQQNSPKIHEGWWAYKEVVQGSFVPVPSFWGLVNSAWNLCSVGKRQSPVNIETSHMIFDPFLTPLRINTGGRKVSGTMYNTGRHVSLRLDKEHLVNISGGPMTYSHRLEEIRLHFGSEDSQGSEHLLNGQAFSGEVQLIHYNHELYTNVTEAAKSPNGLVVVSIFIKVSDSSNPFLNRMLNRDTITRITYKNDAYLLQGLNIEELYPETSSFITYDGSMTIPPCYETASWIIMNKPVYITRMQMHSLRLLSQNQPSQIFLSMSDNFRPVQPLNNRCIRTNINFSLQGKDCPNNRAQKLQYRVNEWLLK

SEQ ID NO: 12791 - protein, 170 aa, Homo sapiens
MGTKAGSRRSAGSEKCPPKPSLHPNPRKASRNRRAVGTGLRPGRGGPDTLCKSARRTPEAALPPLPAEPAPPRPRELAAPARRRWRGACACWWTWTASWPTSRPASCGASAAASLRSRTCRWSNAAASWPASSTAPCGPTWRIKWPVCTKPRAFSWTWSPSREPWTLCGR

SEQ ID NO: 12792 - protein, 235 aa, Homo sapiens
MQISPADSGSSAPSASGRARAPQTPRARSSGPAAMARSVRVLVDMDGVLADFEAGLLRGFRRRFPEEPHVPLEQRRGFLAREQYRALRPDLADKVASVYEAPGFFLDLEPIPGALDAVREMNDLPDTQVFICTSPLLKYHHCVGEKYRWVEQHLGPQFVERIILTRDKTVVLGDLLIDDKDTVRGQEETPSWEHILFTCCHNRHLVLPPTRRRLLSWSDNWREILDSKRGAAQRE

SEQ ID NO: 12793 - protein, 151 aa, Homo sapiens
MQISPADSGSSAPSASGRARAPQTPRARSSGPAAMARSVRVLVDMDGVLADFEAGLLRGFRRRFPEEPHVPLEQRRGFLAREQYRALRPDLADKVASVYEAPGFFLDLEPIPGALDAVREMNDLPDPLLKYHHCVGEKVWLPRPYSARGAA

SEQ ID NO: 12794 - protein, 142 aa, Homo sapiens
MGTKAGSRRSAGSEKCPPKPSLHPNPRKASRNRRAVGTGLRPGRGGPDTLCKSARRTPEAALPPLPAEPAPPRPRELAAPARRRWRGACACWWTWTASWPTSRPASCGASAAASLRSRTCRWSNAAASWPASSTAPCGPTWR

SEQ ID NO: 12795 - protein, 1127 aa, Homo sapiens
MAECGRGGAAGGALPTSPGPALGAKGALKAGVGEGGGGGGRLGHGRARYDSGGVSNGDCSLGVSGDEARASPTRGPRGVALAPTPSAVVCTLPRESKPGGLPRRSSIIKDGTKQKRERKKTVSFSSMPTEKKISSASDCINSMVEGSELKKVRSNSRIYHRYFLLDADMQSLRWEPSKKDSEKAKIDIKSIKEVRTGKNTDIFRSNGISDQISEDCAFSVIYGENYESLDLVANSADVANIWVTGLRYLISYGKHTLDMLESSQDNMRTSWVSQMFSEIDVDNLGHITLCNAVQCIRNLNPGLKTSKIELKFKELHKSKDKAGTEVTKEEFIEVFHELCTRPEIYFLLVQFSSNKEFLDTKDLMMFLEAEQGVAHINEEISLEIIHKYEPSKEGQEKGWLSIDGFTNYLMSPDCYIFDPEHKKVCQDMKQPLSHYFINSSHNTYLIEDQFRGPSDITGYIRALKMGCRSVELDVWDGPDNEPVIYTGHTMTSQIVFRSVIDIINKYAFFASEYPLILCLENHCSIKQQKVMVQHMKKLLGDKLYTTSPNVEESYLPSPDVLKGKILIKAKKLSSNCSGVEGDVTDEDEGAEMSQRMGKENMEQPNNVPVKRFQLCKELSELVSICKSVQFKEFQVSFQVQKYWEVCSFNEVLASKYANENPGDFVNYNKRFLARVFPSPMRIDSSNMNPQDFWKCGCQIVAMNFQTPGLMMDLNIGWFRQNGNCGYVLRPAIMREEVSFFSANTKDSVPGVSPQLLHIKIISGQNFPKPKGSGAKGDVVDPYVYVEIHGIPADCAEQRTKTVHQNGDAPIFDESFEFQINLPELAMVRFVVLDDDYIGDEFIGQYTIPFECLQTGYRHVPLQSLTGEVLAHASLFVHVAITNRRGGGKPHKRGLSVRKGKKSREYASLRTLWIKTVDEVFKNAQPPIRDATDLRENMQNAVVSFKELCGLSSVANLMQCMLAVSPRFLGPDNTPLVVLNLSEQYPTMELQGIVPEVLKKIVTTYDMMIQSLKALIENADAVYEKIVHCQKAAMEFHEHLHSIGTKEGLKERKLQKAVESFTWNITILKGQADLLKYAKNETLENLKQIHFAAVSCGLNKPGTENADVQKPRRSLEVIPEKANDETGE

SEQ ID NO: 12796 - protein, 1015 aa, Homo sapiens
MAECGRGGAAGGALPTSPGPALGAKGALKAGVGEGGGGGGRLGHGRARYDSGGVSNGDCSLGVSGDEARASPTRGPRGVALAPTPSAVVCTLPRESKPGGLPRRSSIIKDGTKQKRERKKTVSFSSMPTEKKISSASDCINSMVEGSELKKVRSNSRIYHRYFLLDADMQSLRWEPSKKDSEKAKIDIKSIKEVRTGKNTDIFRSNGISDQISEDCAFSVIYGENYESLDLVANSADVANIWVTGLRYLISYGKHTLDMLESSQDNMRTSWVSQMFSEIDVDNLGHITLCNAVQCIRNLNPGLKTSKIELKFKELHKSKDKAGTEVTKEEFIEVFHELCTRPEIYFLLVQFSSNKEFLDTKDLMMFLEAEQGVAHINEEISLEIIHKYEPSKEGQEKGWLSIDGFTNYLMSPDCYIFDPEHKKVCQDMKQPLSHYFINSSHNTYLIEDQFRGPSDITGYIRALKMGCRSVELDVWDGPDNEPVIYTGHTMTSQIVFRSVIDIINKYAFFASEYPLILCLENHCSIKQQKVMVQHMKKLLGDKLYTTSPNVEESYLPSPDVLKGKILIKAKKLSSNCSGVEGDVTDEDEGAEMSQRMGKENMEQPNNVPVKRFQLCKELSELVSICKSVQFKEFQVSFQVQKYWEVCSFNEVLASKYANENPGDFVNYNKRFLARVFPSPMRIDSSNMNPQDFWKCGCQIVAMNFQTPGLMMDLNIGWFRQNGNCGYVLRPAIMREEVSFFSANTKDSVPGVSPQLLHIKIISGQNFPKPKGSGAKGDVVDPYVYVEIHGIPADCAEQRTKTVHQNGDAPIFDESFEFQINLPELAMVRFVVLDDDYIGDEFIGQYTIPFECLQTGYRHVPLQSLTGEVLAHASLFVHVAITNRRGGGKPHKRGLSVRKGKKSREYASLRTLWIKTVDEVFKNAQPPIRDATDLRENMQNAVVSFKELCGLSSVANLMQCMLAVSPRFLGPDNTPLVVLNLSEQYPTMELQGIVPEVLKKIVTTYDMVSCPLSVYI

SEQ ID NO: 12797 - protein, 530 aa, Homo sapiens
MSRSPQRALPPGALPRLLQAAPAAAPRALLPQWPRRPGRRWPASPLGMKVFRRKALVLCAGYALLLVLTMLNLLDYKWHKEPLQQCNPDGPLGAAAGAAGGSWGRPGPPPAGPPRAHARLDLRTPYRPPAAAVGAAPAAAAGMAGVAAPPGNGTRGTGGVGDKRQLVYVFTTWRSGSSFFGELFNQNPEVFFLYEPVWHVWQKLYPGDAVSLQGAARDMLSALYRCDLSVFQLYSPAGSGGRNLTTLGIFGAATNKVVCSSPLCPAYRKEVVGLVDDRVCKKCPPQRLARFEEECRKYRTLVIKGVRVFDVAVLAPLLRDPALDLKVIHLVRDPRAVASSRIRSRHGLIRESLQVVRSRDPRAHRMPFLEAAGHKLGAKKEGVGGPADYHALGAMEVICNSMAKTLQTALQPPDWLQGHYLVVRYEDLVGDPVKTLRRVYDFVGLLVSPEMEQFALNMTSGSGSSSKPFVVSARNATQAANAWRTALTFQQIKQVEEFCYQPMAVLGYERVNSPEEVKDLSKTLLRKPRL

SEQ ID NO: 12798 - protein, 530 aa, Homo sapiens; identical to SEQ ID NO: 12797

SEQ ID NO: 12799 - protein, 530 aa, Homo sapiens; identical to SEQ ID NO: 12797

SEQ ID NO: 12800 - protein, 1423 aa, Homo sapiens
MNGHSDEESVRNSSGESSQSDDDSGSASGSGSGSSSGSSSDGSSSQSGSSDSDSGSESGSQSESESDTSRENKVQAKPPKVDGAEFWKSSPSILAVQRSAILKKQQQQQQQQQHQASSNSGSEEDSSSSEDSDDSSSEVKRKKHKDEDWQMSGSGSPSQSGSDSESEEEREKSSCDETESDYEPKNKVKSRKPQNRSKSKNGKKILGQKKRQIDSSEEDDDEEDYDNDKRSSRRQATVNVSYKEDEEMKTDSDDLLEVCGEDVPQPEEEEFETIERFMDCRIGRKGATGATTTIYAVEADGDPNAGFEKNKEPGEIQYLIKWKGWSHIHNTWETEETLKQQNVRGMKKLDNYKKKDQETKRWLKNASPEDVEYYNCQQELTDDLHKQYQIVERIIAHSNQKSAAGYPDYYCKWQGLPYSECSWEDGALISKKFQACIDEYFSRNQSKTTPFKDCKVLKQRPRFVALKKQPSYIGGHEGLELRDYQLNGLNWLAHSWCKGNSCILADEMGLGKTIQTISFLNYLFHEHQLYGPFLLVVPLSTLTSWQREIQTWASQMNAVVYLGDINSRNMIRTHEWTHHQTKRLKFNILLTTYEILLKDKAFLGGLNWAFIGVDEAHRLKNDDSLLYKTLIDFKSNHRLLITGTPLQNSLKELWSLLHFIMPEKFSSWEDFEEEHGKGREYGYASLHKELEPFLLRRVKKDVEKSLPAKVEQILRMEMSALQKQYYKWILTRNYKALSKGSKGSTSGFLNIMMELKKCCNHCYLIKPPDNNEFYNKQEALQHLIRSSGKLILLDKLLIRLRERGNRVLIFSQMVRMLDILAEYLKYRQFPFQRLDGSIKGELRKQALDHFNAEGSEDFCFLLSTRAGGLGINLASADTVVIFDSDWNPQNDLQAQARAHRIGQKKQVNIYRLVTKGSVEEDILERAKKKMVLDHLVIQRMDTTGKTVLHTGSAPSSSTPFNKEELSAILKFGAEELFKEPEGEEQEPQEMDIDEILKRAETHENEPGPLTVGDELLSQFKVANFSNMDEDDIELEPERNSKNWEEIIPEDQRRRLEEEERQKELEEIYMLPRMRNCAKQISFNGSEGRRSRSRRYSGSDSDSISEGKRPKKRGRPRTIPRENIKGFSDAEIRRFIKSYKKFGGPLERLDAIARDAELVDKSETDLRRLGELVHNGCIKALKDSSSGTERTGGRLGKVKGPTFRISGVQVNAKLVISHEEELIPLHKSIPSDPEERKQYTIPCHTKAAHFDIDWGKEDDSNLLIGIYEYGYGSWEMIKMDPDLSLTHKILPDDPDKKPQAKQLQTRADYLIKLLSRDLAKKEALSGAGSSKRRKARAKKNKAMKSIKVKEEIKSDSSPLPSEKSDEDDDKLSESKSDGRERSKKSSVSDAPVHITASGEPVPISEESEELDQKTFSIKPVDFCI

SEQ ID NO: 12801 - protein, 1710 aa, Homo sapiens
MNGHSDEESVRNSSGESSQSDDDSGSASGSGSGSSSGSSSDGSSSQSGSSDSDSGSESGSQSESESDTSRENKVQAKPPKVDGAEFWKSSPSILAVQRSAILKKQQQQQQQQQHQASSNSGSEEDSSSSEDSDDSSSEVKRKKHKDEDWQMSGSGSPSQSGSDSESEEEREKSSCDETESDYEPKNKVKSRKPQNRSKSKNGKKILGQKKRQIDSSEEDDDEEDYDNDKRSSRRQATVNVSYKEDEEMKTDSDDLLEVCGEDVPQPEEEEFETIERFMDCRIGRKGATGATTTIYAVEADGDPNAGFEKNKEPGEIQYLIKWKGWSHIHNTWETEETLKQQNVRGMKKLDNYKKKDQETKRWLKNASPEDVEYYNCQQELTDDLHKQYQIVERIIAHSNQKSAAGYPDYYCKWQGLPYSECSWEDGALISKKFQACIDEYFSRNQSKTTPFKDCKVLKQRPRFVALKKQPSYIGGHEGLELRDYQLNGLNWLAHSWCKGNSCILADEMGLGKTIQTISFLNYLFHEHQLYGPFLLVVPLSTLTSWQREIQTWASQMNAVVYLGDINSRNMIRTHEWTHHQTKRLKFNILLTTYEILLKDKAFLGGLNWAFIGVDEAHRLKNDDSLLYKTLIDFKSNHRLLITGTPLQNSLKELWSLLHFIMPEKFSSWEDFEEEHGKGREYGYASLHKELEPFLLRRVKKDVEKSLPAKVEQILRMEMSALQKQYYKWILTRNYKALSKGSKGSTSGFLNIMMELKKCCNHCYLIKPPDNNEFYNKQEALQHLIRSSGKLILLDKLLIRLRERGNRVLIFSQMVRMLDILAEYLKYRQFPFQRLDGSIKGELRKQALDHFNAEGSEDFCFLLSTRAGGLGINLASADTVVIFDSDWNPQNDLQAQARAHRIGQKKQVNIYRLVTKGSVEEDILERAKKKMVLDHLVIQRMDTTGKTVLHTGSAPSSSTPFNKEELSAILKFGAEELFKEPEGEEQEPQEMDIDEILKRAETHENEPGPLTVGDELLSQFKVANFSNMDEDDIELEPERNSKNWEEIIPEDQRRRLEEEERQKELEEIYMLPRMRNCAKQISFNGSEGRRSRSRRYSGSDSDSISEGKRPKKRGRPRTIPRENIKGFSDAEIRRFIKSYKKFGGPLERLDAIARDAELVDKSETDLRRLGELVHNGCIKALKDSSSGTERTGGRLGKVKGPTFRISGVQVNAKLVISHEEELIPLHKSIPSDPEERKQYTIPCHTKAAHFDIDWGKEDDSNLLIGIYEYGYGSWEMIKMDPDLSLTHKILPDDPDKKPQAKQLQTRADYLIKLLSRDLAKKEALSGAGSSKRRKARAKKNKAMKSIKVKEEIKSDSSPLPSEKSDEDDDKLSESKSDGRERSKKSSVSDAPVHITASGEPVPISEESEELDQKTFSICKERMRPVKAALKQLDRPEKGLSEREQLEHTRQCLIKIGDHITECLKEYTNPEQIKQWRKNLWIFVSKFTEFDARKLHKLYKHAIKKRQESQQNSDQNSNLNPHVIRNPDVERLKENTNHDDSSRDSYSSDRHLTQYHDHHKDRHQGDSYKKSDSRKRPYSSFSNGKDHRDWDHYKQDSRYYSDREKHRKLDDHRSRDHRSNLEGSLKDRSHSDHRSHSDHRLHSDHRSSSEYTHHKSSRDYRYHSDWQMDHRASSSGPRSPLDQRSPYGSRSPFEHSVEHKSTPEHTWSSRKT

SEQ ID NO: 12802 - protein, 1442 aa, Homo sapiens
MPEQERQITAREGASRKILSKLSLPTRAWEPAMKKSFAFDNVGYEGGLDGLGPSSQVATSTVRILGMTCQSCVKSIEDRISNLKGIISMKVSLEQGSATVKYVPSVVCLQQVCHQIGDMGFEASIAEGKAASWPSRSLPAQEAVVKLRVEGMTCQSCVSSIEGKVRKLQGVVRVKVSLSNQEAVITYQPYLIQPEDLRDHVNDMGFEAAIKSKVAPLSLGPIDIERLQSTNPKRPLSSANQNFNNSETLGHQGSHVVTLQLRIDGMHCKSCVLNIEENIGQLLGVQSIQVSLENKTAQVKYDPSCTSPVALQRAIEALPPGNFKVSLPDGAEGSGTDHRSSSSHSPGSPPRNQVQGTCSTTLIAIAGMTCASCVHSIEGMISQLEGVQQISVSLAEGTATVLYNPSVISPEELRAAIEDMGFEASVVSESCSTNPLGNHSAGNSMVQTTDGTPTSVQEVAPHTGRLPANHAPDILAKSPQSTRAVAPQKCFLQIKGMTCASCVSNIERNLQKEAGVLSVLVALMAGKAEIKYDPEVIQPLEIAQFIQDLGFEAAVMEDYAGSDGNIELTITGMTCASCVHNIESKLTRTNGITYASVALATSKALVKFDPEIIGPRDIIKIIEEIGFHASLAQRNPNAHHLDHKMEIKQWKKSFLCSLVFGIPVMALMIYMLIPSNEPHQSMVLDHNIIPGLSILNLIFFILCTFVQLLGGWYFYVQAYKSLRHRSANMDVLIVLATSIAYVYSLVILVVAVAEKAERSPVTFFDTPPMLFVFIALGRWLEHLAKSKTSEALAKLMSLQATEATVVTLGEDNLIIREEQVPMELVQRGDIVKVVPGGKFPVDGKVLEGNTMADESLITGEAMPVTKKPGSTVIAGSINAHGSVLIKATHVGNDTTLAQIVKLVEEAQMSKAPIQQLADRFSGYFVPFIIIMSTLTLVVWIVIGFIDFGVVQRYFPNPNKHISQTEVIIRFAFQTSITVLCIACPCSLGLATPTAVMVGTGVAAQNGILIKGGKPLEMAHKIKTVMFDKTGTITHGVPRVMRVLLLGDVATLPLRKVLAVVGTAEASSEHPLGVAVTKYCKEELGTETLGYCTDFQAVPGCGIGCKVSNVEGILAHSERPLSAPASHLNEAGSLPAEKDAVPQTFSVLIGNREWLRRNGLTISSDVSDAMTDHEMKGQTAILVAIDGVLCGMIAIADAVKQEAALAVHTLQSMGVDVVLITGDNRKTARAIATQVGINKVFAEVLPSHKVAKVQELQNKGKKVAMVGDGVNDSPALAQADMGVAIGTGTDVAIEAADVVLIRNDLLDVVASIHLSKRTVRRIRINLVLALIYNLVGIPIAAGVFMPIGIVLQPWMGSAAMAASSVSVVLSSLQLKCYKKPDLERYEAQAHGHMKPLTASQNFVSEQEQCQEVWRKRVISAFLKSPAMPASLLCSVLSWLCRCP

SEQ ID NO: 12803 - protein, 1374 aa, Homo sapiens
MPEQERQITAREGASRKILSKLSLPTRAWEPAMKKSFAFDNVGYEGGLDGLGPSSQVATSTVRILGMTCQSCVKSIEDRISNLKGIISMKVSLEQGSATVKYVPSVVCLQQVCHQIGDMGFEASIAEGKAASWPSRSLPAQEAVVKLRVEGMTCQSCVSSIEGKVRKLQGVVRVKVSLSNQEAVITYQPYLIQPEDLRDHVNDMGFEAAIKSKVAPLSLGPIDIERLQSTNPKRPLSSANQNFNNSETLGHQGSHVVTLQLRIDGMHCKSCVLNIEENIGQLLGVQSIQVSLENKTAQVKYDPSCTSPVALQRAIEALPPGNFKVSLPDGAEGSGTDHRSSSSHSPGSPPRNQVQGTCSTTLIAIAGMTCASCVHSIEGMISQLEGVQQISVSLAEGTATVLYNPSVISPEELRAAIEDMGFEASVVSESCSTNPLGNHSAGNSMVQTTDGTPTSVQEVAPHTGRLPANHAPDILAKSPQSTRAVAPQKCFLQIKGMTCASCVSNIERNLQKEAGVLSVLVALMAGKAEIKYDPEVIQPLEIAQFIQDLGFEAAVMEDYAGSDGNIELTITGMTCASCVHNIESKLTRTNGITYASVALATSKALVKFDPEIIGPRDIIKIIEEIGFHASLAQRNPNAHHLDHKMEIKQWKKSFLCSLVFGIPVMALMIYMLIPSNEPHQSMVLDHNIIPGLSILNLIFFILCTFVQLLGGWYFYVQAYKSLRHRSANMDVLIVLATSIAYVYSLVILVVAVAEKAERSPVTFFDTPPMLFVFIALGRWLEHLAKSKTSEALAKLMSLQATEATVVTLGEDNLIIREEQVPMELVQRGDIVKVVPGGKFPVDGKVLEGNTMADESLITGEAMPVTKKPGSTVIAGSINAHGSVLIKATHVGNDTTLAQIVKLVEEAQMSKAPIQQLADRFSGYFVPFIIIMSTLTLVVWIVIGFIDFGVVQRYFPNPNKHISQTEVIIRFAFQTSITVLCIACPCSLGLATPTAVMVGTGVAAQNGILIKGGKPLEMAHKIKTVMFDKTGTITHGVPRVMRVLLLGDVATLPLRKVLAVVGTAEASSEHPLGVAVTKYCKEELGTETLGYCTDFQAVPGCGIGCKVSNVEGILAHSERPLSAPASHLNEAGSLPAEKDAVPQTFSVLIGNREWLRRNGLTISSDVSDAMTDHEMKGQTAILVAIDGVLCGMIAIADAVKQEAALAVHTLQSMGVDVVLITGDNRKTARAIATQVGINKVFAEVLPSHKVAKVQELQNKGKKVAMVGDGVNDSPALAQADMGVAIGTGTDVAIEAADVVLIRNDLLDVVASIHLSKRTVRRIRINLVLALIYNLVGIPIAAGVFMPIGIVLQPWMGSAAMAASSVSVVLSSLQLK

SEQ ID NO: 12804 - protein, 1258 aa, Homo sapiens
MPEQERQITAREGASRKILSKLSLPTRAWEPAMKKSFAFDNVGYEGGLDGLGPSSQVATSTVRILGMTCQSCVKSIEDRISNLKGIISMKVSLEQGSATVKYVPSVVCLQQVCHQIGDMGFEASIAEGKAASWPSRSLPAQEAVVKLRVEGMTCQSCVSSIEGKVRKLQGVVRVKVSLSNQEAVITYQPYLIQPEDLRDHVNDMGFEAAIKSKVAPLSLGPIDIERLQSTNPKRPLSSANQNFNNSETLGHQGSHVVTLQLRIDGMHCKSCVLNIEENIGQLLGVQSIQVSLENKTAQVKYDPSCTSPVALQRAIEALPPGNFKVSLPDGAEGSGTDHRSSSSHSPGSPPRNQVQGTCSTTLIAIAGMTCASCVHSIEGMISQLEGVQQISVSLAEGTATVLYNPSVISPEELRAAIEDMGFEASVVSESCSTNPLGNHSAGNSMVQTTDGTPTSVQEVAPHTGRLPANHAPDILAKSPQSTRAVAPQKCFLQIKGMTCASCVSNIERNLQKEAGVLSVLVALMAGKAEIKYDPEVIQPLEIAQFIQDLGFEAAVMEDYAGSDGNIELTITGMTCASCVHNIESKLTRTNGITYASVALATSKALVKFDPEIIGPRDIIKIIESKTSEALAKLMSLQATEATVVTLGEDNLIIREEQVPMELVQRGDIVKVVPGGKFPVDGKVLEGNTMADESLITGEAMPVTKKPGSTVIAGSINAHGSVLIKATHVGNDTTLAQIVKLVEEAQMSKNPNKHISQTEVIIRFAFQTSITVLCIACPCSLGLATPTAVMVGTGVAAQNGILIKGGKPLEMAHKIKTVMFDKTGTITHGVPRVMRVLLLGDVATLPLRKVLAVVGTAEASSEHPLGVAVTKYCKEELGTETLGYCTDFQAVPGCGIGCKVSNVEGILAHSERPLSAPASHLNEAGSLPAEKDAVPQTFSVLIGNREWLRRNGLTISSDVSDAMTDHEMKGQTAILVAIDGVLCGMIAIADAVKQEAALAVHTLQSMGVDVVLITGDNRKTARAIATQVGINKVFAEVLPSHKVAKVQELQNKGKKVAMVGDGVNDSPALAQADMGVAIGTGTDVAIEAADVVLIRNDLLDVVASIHLSKRTVRRIRINLVLALIYNLVGIPIAAGVFMPIGIVLQPWMGSAAMAASSVSVVLSSLQLKCYKKPDLERYEAQAHGHMKPLTASQVSVHIGMDDRWRDSPRATPWDQVSYVSQVSLSSLTSDKPSRHSAAADDDGDKWSLLLNGRDEEQYI

SEQ ID NO: 12805 - protein, 1465 aa, Homo sapiens
MPEQERQITAREGASRKILSKLSLPTRAWEPAMKKSFAFDNVGYEGGLDGLGPSSQVATSTVRILGMTCQSCVKSIEDRISNLKGIISMKVSLEQGSATVKYVPSVVCLQQVCHQIGDMGFEASIAEGKAASWPSRSLPAQEAVVKLRVEGMTCQSCVSSIEGKVRKLQGVVRVKVSLSNQEAVITYQPYLIQPEDLRDHVNDMGFEAAIKSKVAPLSLGPIDIERLQSTNPKRPLSSANQNFNNSETLGHQGSHVVTLQLRIDGMHCKSCVLNIEENIGQLLGVQSIQVSLENKTAQVKYDPSCTSPVALQRAIEALPPGNFKVSLPDGAEGSGTDHRSSSSHSPGSPPRNQVQGTCSTTLIAIAGMTCASCVHSIEGMISQLEGVQQISVSLAEGTATVLYNPSVISPEELRAAIEDMGFEASVVSESCSTNPLGNHSAGNSMVQTTDGTPTSVQEVAPHTGRLPANHAPDILAKSPQSTRAVAPQKCFLQIKGMTCASCVSNIERNLQKEAGVLSVLVALMAGKAEIKYDPEVIQPLEIAQFIQDLGFEAAVMEDYAGSDGNIELTITGMTCASCVHNIESKLTRTNGITYASVALATSKALVKFDPEIIGPRDIIKIIEEIGFHASLAQRNPNAHHLDHKMEIKQWKKSFLCSLVFGIPVMALMIYMLIPSNEPHQSMVLDHNIIPGLSILNLIFFILCTFVQLLGGWYFYVQAYKSLRHRSANMDVLIVLATSIAYVYSLVILVVAVAEKAERSPVTFFDTPPMLFVFIALGRWLEHLAKSKTSEALAKLMSLQATEATVVTLGEDNLIIREEQVPMELVQRGDIVKVVPGGKFPVDGKVLEGNTMADESLITGEAMPVTKKPGSTVIAGSINAHGSVLIKATHVGNDTTLAQIVKLVEEAQMSKAPIQQLADRFSGYFVPFIIIMSTLTLVVWIVIGFIDFGVVQRYFPNPNKHISQTEVIIRFAFQTSITVLCIACPCSLGLATPTAVMVGTGVAAQNGILIKGGKPLEMAHKIKTVMFDKTGTITHGVPRVMRVLLLGDVATLPLRKVLAVVGTAEASSEHPLGVAVTKYCKEELGTETLGYCTDFQAVPGCGIGCKVSNVEGILAHSERPLSAPASHLNEAGSLPAEKDAVPQTFSVLIGNREWLRRNGLTISSDVSDAMTDHEMKGQTAILVAIDGVLCGMIAIADAVKQEAALAVHTLQSMGVDVVLITGDNRKTARAIATQVGINKVFAEVLPSHKVAKVQELQNKGKKVAMVGDGVNDSPALAQADMGVAIGTGTDVAIEAADVVLIRNDLLDVVASIHLSKRTVRRIRINLVLALIYNLVGIPIAAGVFMPIGIVLQPWMGSAAMAASSVSVVLSSLQLKCYKKPDLERYEAQAHGHMKPLTASQVSVHIGMDDRWRDSPRATPWDQVSYVSQVSLSSLTSDKPSRHSAAADDDGDKWSLLLNGRDEEQYI

SEQ ID NO: 12806 - protein, 1465 aa, Homo sapiens; identical to SEQ ID NO: 12805

SEQ ID NO: 12807 - protein, 617 aa, Homo sapiens [sequence omitted]

SEQ ID NO: 12808 - protein, 617 aa, Homo sapiens [sequence omitted]

SEQ ID NO: 12809 - protein, 333 aa, Homo sapiens
MPLGLGRRKKAPPLVENEEAEPGRGGLGVGEPGPLGGGGSGGPQMGLPPPPPALRPRLVFHTQLAHGSPTGRIEGFTNVKELYGKIAEAFRLPTAEVMFCTLNTHKVDMDKLLGGQIGLEDFIFAHVKGQRKEVEVFKSEDALGLTITDNGAGYAFIKRIKEGSVIDHIHLISVGDMIEAINGQSLLGCRHYEVARLLKELPRGRTFTLKLTEPRKAFDMISQRSAGGRPGSGPQLGTGRGTLRLRSRGPATVEDLPSAFEEKAIEKVDDLLESYMGIRDTELAATMVELGKDKRNPDELAEALDERLGDFAFPDEFVFDVWGAIGDAKVGRY

SEQ ID NO: 12810 - protein, 333 aa, Homo sapiens; identical to SEQ ID NO: 12809

SEQ ID NO: 12811 - protein, 333 aa, Homo sapiens; identical to SEQ ID NO: 12809

SEQ ID NO: 12812 - protein, 339 aa, Homo sapiens [sequence omitted]

SEQ ID NO: 12813 - protein, 422 aa, Homo sapiens
MCAPPRGAPPEHPAPTGLCRSSCAELQARVMAALRQPQVAELLAEARRAFREEFGAEPELAVSAPGRVNLIGEHTDYNQGLVLPMALELMTVLVGSPRKDGLVSLLTTSEGADEPQRLQFPLPTAQRSLEPGTPRWANYVKGVIQYYPAAPLPGFSAVVVSSVPLGGGLSSSASLEVATYTFLQQLCPDSGTIAARAQVCQQAEHSFAGMPCGIMDQFISLMGQKGHALLIDCRSLETSLVPLSDPKLAVLITNSNVRHSLASSEYPVRRRQCEEVARALGKESLREVQLEELEAARDLVSKEGFRRARHVVGEIRRTAQAAAALRRGDYRAFGRLMVESHRSLRDDYEVSCPELDQLVEAALAVPGVYGSRMTGGGFGGCTVTLLEASAAPHAMRHIQEHYGGTATFYLSQAADGAKVLCL

SEQ ID NO: 12814 - protein, 1042 aa, Homo sapiens
MHQLFQKTPEIYSVELSGTKDIVKTDKGDGKEKYRGLKNNCLELKKKNHKEEFQKELHLDDHKLSNRELEEKYGTDIIMGLSSTRAAELLARDGPNSLTPPKQTPEIVKFLKQMVGGFSILLWVGAFLCWIAYGIQYSSDKSASLNNVYLGCVLGLVVILTGIFAYYQEAKSTNIMSSFNKMIPQQALVIRDSEKKTIPSEQLVVGDIVEVKGGDQIPADIRVLSSQGCRVDNSSLTGESEPQPRSSEFTHENPLETKNICFYSTTCLEGTVTGMVINTGDRTIIGHIASLASGVGNEKTPIAIEIEHFVHIVAGVAVSIGILFFIIAVSLKYQVLDSIIFLIGIIVANVPEGLLATVTVTLSLTAKRMAKKNCLVKNLEAVETLGSTSIICSDKTGTLTQNRMTVAHLWFDNQIFVADTSEDHSNQVFDQSSRTWASLSKIITLCNRAEFKPGQENVPIMKKAVIGDASETALLKFSEVILGDVMEIRKRNRKVAEIPFNSTNKFQLSIHEMDDPHGKRFLMVMKGAPERILEKCSTIMINGEEHPLDKSTAKTFHTAYMELGGLGERVLGFCHLYLPADEFPETYSFDIDAMNFPTSNLCFVGLLSMIDPPRSTVPDAVTKCRSAGIKVIMVTGDHPITAKAIAKSVGIISANSETVEDIAHRLNIAVEQVNKRDAKAAVVTGMELKDMSSEQLDEILANYQEIVFARTSPQQKLIIVEGCQRQDAVVAVTGDGVNDSPALKKADIGIAMGIAGSDAAKNAADMVLLDDNFASIVTGVEEGRLIFDNLKKTIAYSLTKNIAELCPFLIYIIVGLPLPIGTITILFIDLGTDIIPSIALAYEKAESDIMNRKPRHKNKDRLVNQPLAVYSYLHIGLMQALGAFLVYFTVYAQEGFLPRTLINLRVEWEKDYVNDLKDSYGQEWTRYQREYLEWTGYTAFFVGILVQQIADLIIRKTRRNSIFQQGLFRNKVIWVGITSQIIIGLILSYGLGSVTALSFTMLRAQYWFVAVPHAILIWVYDEVRKLFIRLYPGSWWDKNMYY

SEQ ID NO: 12815 - protein, 292 aa, Homo sapiens
MHQLFQKTPEIYSVELSGTKDIVKTDKGDGKEKYRGLKNNCLELKKKNHKEEFQKELHLDDHKLSNRELEEKYGTDIIMGLSSTRAAELLARDGPNSLTPPKQTPEIVKFLKQMVGGFSILLWVGAFLCWIAYGIQYSSDKSASLNNVYLGCVLGLVVILTGIFAYYQEAKSTNIMSSFNKMIPQQALVIRDSEKKTIPSEQLVVGDIVEVKGGDQIPADIRVLSSQGCRTRYQREYLEWTGYTAFFVGILVQQIADLIIRKTRRNSIFQQGLFRYCLCPASWGSPGPAVQG

SEQ ID NO: 12816 - protein, 471 aa, Homo sapiens
MAAMETETAPLTLESLPTDPLLLILSFLDYRDLINCCYVSRRLSQLSSHDPLWRRHCKKYWLISEEEKTQKNQCWKSLFIDTYSDVGRYIDHYAAIKKAWDDLKKYLEPRCPRMVLSLKEGAREEDLDAVEAQIGCKLPDDYRCSYRIHNGQKLVVPGLLGSMALSNHYRSEDLLDVDTAAGGFQQRQGLKYCLPLTFCIHTGLSQYIAVEAAEGRNKNEVFYQCPDQMARNPAAIDMFIIGATFTDWFTSYVKNVVSGGFPIIRDQIFRYVHDPECVATTGDITVSVSTSFLPELSSVHPPHYFFTYRIRIEMSKDALPEKACQLDSRYWRITNAKGDVEEVQGPGVVGEFPIISPGRVYEYTSCTTFSTTSGYMEGYYTFHFLYFKDKIFNVAIPRFHMACPTFRVSIARLEMGPDEYEEMEEEEEEEEEEDEDDDSADMDESDEDDEEERRRRVFDVPIRRRRCSRLF

SEQ ID NO: 12817 - protein, 471 aa, Homo sapiens; identical to SEQ ID NO: 12816

SEQ ID NO: 12818 - protein, 415 aa, Homo sapiens
MAAMETETAPLTLESLPTDPLLLILSFLDYRDLINCCYVSRRLSQLSSHDPLWRRHCKKYWLISEEEKTQKNQCWKSLFIDTYSDVGRYIDHYAAIKKAWDDLKKYLEPRCPRMVLSLKEGAREEDLDAVEAQIGCKLPDDYRCSYRIHNGQKLVVPGLLGSMALSNHYRSEDLLDVDTAAGGFQQRQGLKYCLPLTFCIHTGLSQYIAVEAAEGRNKNEVFYQCPDQMARNPAAIDMFIIGATFTDWFTSYVKNVVSGGFPIIRDQIFRYVHDPECVATTGDITVSVSTSFLPELSSVHPPHYFFTYRIRIEMSKDALPEKACQLDSRYWRITNAKGDVEEVQGPGVVGEFPIISPGRVYEYTSCTTFSTTSGYMEGYYTFHFLYFKDKIFNVAIPRFHMACPTFRVSIARLVS

SEQ ID NO: 12819 - protein, 946 aa, Homo sapiens
MGSDRYLHSQVTDNSHIKALTGIFYVTGYSAIVMTSRLRALGGRINNIRTSELPKEKTRSEVICSIHFLDGVVQTFKVTKQDTGQVLLDMVHNHLGVTEKEYFGLQHDDDSVDSPRWLEASKAIRKQLKGGFPCTLHFRVRFFIPDPNTLQQEQTRHLYFLQLKMDICEGRLTCPLNSAVVLASYAVQSHFGDYNSSIHHPGYLSDSHFIPDQNEDFLTKVESLHEQHSGLKQSEAESCYINIARTLDFYGVELHSGRDLHNLDLMIGIASAGVAVYRKYICTSFYPWVNILKISFKRKKFFIHQRQKQAESREHIVAFNMLNYRSCKNLWKSCVEHHTFFQAKKLLPQEKNVLSQYWTMGSRNTKKSVNNQYCKKVIGGMVWNPAMRRSLSVEHLETKSLPSRSPPITPNWRSPRLRHEIRKPRHSSADNLANEMTYITETEDVFYTYKGSLAPQDSDSEVSQNRSPHQESLSENNPAQSYLTQKSSSSVSPSSNAPGSCSPDGVDQQLLDDFHRVTKGGSTEDASQYYCDKNDNGDSYLVLIRITPDEDGKFGFNLKGGVDQKMPLVVSRINPESPADTCIPKLNEGDQIVLINGRDISEHTHDQVVMFIKASRESHSRELALVIRRRAVRSFADFKSEDELNQLFPEAIFPMCPEGGDTLEGSMAQLKKGLESGTVLIQFEQLYRKKPGLAITFAKLPQNLDKNRYKDVLPYDTTRVLLQGNEDYINASYVNMEIPAANLVNKYIATQGPLPHTCAQFWQVVWDQKLSLIVMLTTLTERGRTKCHQYWPDPPDVMNHGGFHIQCQSEDCTIAYVSREMLVTNTQTGEEHTVTHLQYVAWPDHGVPDDSSDFLEFVNYVRSLRVDSEPVLVHCSAGIGRTGVLVTMETAMCLTERNLPIYPLDIVRKMRDQRAMMVQTSSQYKFVCEAILRVYEEGLVQMLDPS

SEQ ID NO: 12820 - protein, 211 aa, Homo sapiens
MEIPAANLVNKYIATQGPLPHTCAQFWQVVWDQKLSLIVMLTTLTERGRTKCHQYWPDPPDVMNHGGFHIQCQSEDCTIAYVSREMLVTNTQTGEEHTVTHLQYVAWPDHGVPDDSSDFLEFVNYVRSLRVDSEPVLVHCSAGIGRTGVLVTMETAMCLTERNLPIYPLDIVRKMRDQRAMMVQTSSQYKFVCEAILRVYEEGLVQMLDPS

SEQ ID NO: 12821 - protein, 913 aa, Homo sapiens
MTSRLRALGGRINNIRTSELPKEKTRSEVICSIHFLDGVVQTFKVTKQDTGQVLLDMVHNHLGVTEKEYFGLQHDDDSVDSPRWLEASKAIRKQLKGGFPCTLHFRVRFFIPDPNTLQQEQTRHLYFLQLKMDICEGRLTCPLNSAVVLASYAVQSHFGDYNSSIHHPGYLSDSHFIPDQNEDFLTKVESLHEQHSGLKQSEAESCYINIARTLDFYGVELHSGRDLHNLDLMIGIASAGVAVYRKYICTSFYPWVNILKISFKRKKFFIHQRQKQAESREHIVAFNMLNYRSCKNLWKSCVEHHTFFQAKKLLPQEKNVLSQYWTMGSRNTKKSVNNQYCKKVIGGMVWNPAMRRSLSVEHLETKSLPSRSPPITPNWRSPRLRHEIRKPRHSSADNLANEMTYITETEDVFYTYKGSLAPQDSDSEVSQNRSPHQESLSENNPAQSYLTQKSSSSVSPSSNAPGSCSPDGVDQQLLDDFHRVTKGGSTEDASQYYCDKNDNGDSYLVLIRITPDEDGKFGFNLKGGVDQKMPLVVSRINPESPADTCIPKLNEGDQIVLINGRDISEHTHDQVVMFIKASRESHSRELALVIRRRAVRSFADFKSEDELNQLFPEAIFPMCPEGGDTLEGSMAQLKKGLESGTVLIQFEQLYRKKPGLAITFAKLPQNLDKNRYKDVLPYDTTRVLLQGNEDYINASYVNMEIPAANLVNKYIATQGPLPHTCAQFWQVVWDQKLSLIVMLTTLTERGRTKCHQYWPDPPDVMNHGGFHIQCQSEDCTIAYVSREMLVTNTQTGEEHTVTHLQYVAWPDHGVPDDSSDFLEFVNYVRSLRVDSEPVLVHCSAGIGRTGVLVTMETAMCLTERNLPIYPLDIVRKMRDQRAMMVQTSSQYKFVCEAILRVYEEGLVQMLDPS

SEQ ID NO: 12822 - protein, 913 aa, Homo sapiens; identical to SEQ ID NO: 12821

SEQ ID NO: 12823 - protein, 913 aa, Homo sapiens; identical to SEQ ID NO: 12821

SEQ ID NO: 12824 - protein, 325 aa, Homo sapiens
MQLQFRSWMLAALTLLVVFLIFADISEIEEEIGNSGGRGTIRSAVNSLHSKSNRAEVVINGSSSPAVVDRSNESIKHNIQPASSKWRHNQTLSLRIRKQILKFLDAEKDISVLKGTLKPGDIIHYIFDRDSTMNVSQNLYELLPRTSPLKNKHFGTCAIVGNSGVLLNSGCGQEIDAHSFVIRCNLAPVQEYARDVGLKTDLVTMNPSVIQRAFEDLVNATWREKLLQRLHSLNGSILWIPAFMARGGKERVEWVNELILKHHVNVRTAYPSLRLLHAVRGYWLTNKVHIKRPTTGLLMYTLATRFCKQIYLEAFLTTRTVLGTE

SEQ ID NO: 12825 - protein, 375 aa, Homo sapiens
MQLQFRSWMLAALTLLVVFLIFADISEIEEEIGNSGGRGTIRSAVNSLHSKSNRAEVVINGSSSPAVVDRSNESIKHNIQPASSKWRHNQTLSLRIRKQILKFLDAEKDISVLKGTLKPGDIIHYIFDRDSTMNVSQNLYELLPRTSPLKNKHFGTCAIVGNSGVLLNSGCGQEIDAHSFVIRCNLAPVQEYARDVGLKTDLVTMNPSVIQRAFEDLVNATWREKLLQRLHSLNGSILWIPAFMARGGKERVEWVNELILKHHVNVRTAYPSLRLLHAVRGYWLTNKVHIKRPTTGLLMYTLATRFCKQIYLYGFWPFPLDQNQNPVKYHYYDSLKYGYTSQASPHTMPLEFKALKSLHEQGALKLTVGQCDGAT

SEQ ID NO: 12826 - protein, 394 aa, Homo sapiens
MALLDLALEGMAVFGFVLFLVLWLMHFMAIIYTRLHLNKKATDKQPYSKLPGVSLLKPLKGVDPNLINNLETFFELDYPKYEVLLCVQDHDDPAIDVCKKLLGKYPNVDARLFIGGKKVGINPKINNLMPGYEVAKYDLIWICDSGIRVIPDTLTDMVNQMTEKVGLVHGLPYVADRQGFAATLEQVYFGTSHPRYYISANVTGFKCVTGMSCLMRKDVLDQAGGLIAFAQYIAEDYFMAKAIADRGWRFAMSTQVAMQNSGSYSISQFQSRMIRWTKLRINMLPATIICEPISECFVASLIIGWAAHHVFRWDIMVFFMCHCLAWFIFDYIQLRGVQGGTLCFSKLDYAVAWFIRESMTIYIFLSALWDPTISWRTGRYRLRCGGTAEEILDV

SEQ ID NO: 12827 - protein, 394 aa, Homo sapiens; identical to SEQ ID NO: 12826

SEQ ID NO: 12828 - protein, 1176 aa, Homo sapiens
MGDMANNSVAYSGVKNSLKEANHDGDFGITLAELRALMELRSTDALRKIQESYGDVYGICTKLKTSPNEGLSGNPADLERREAVFGKNFIPPKKPKTFLQLVWEALQDVTLIILEIAAIVSLGLSFYQPPEGDNALCGEVSVGEEEGEGETGWIEGAAILLSVVCVVLVTAFNDWSKEKQFRGLQSRIEQEQKFTVIRGGQVIQIPVADITVGDIAQVKYGDLLPADGILIQGNDLKIDESSLTGESDHVKKSLDKDPLLLSGTHVMEGSGRMVVTAVGVNSQTGIIFTLLGAGGEEEEKKDEKKKEKKNKKQDGAIENRNKAKAQDGAAMEMQPLKSEEGGDGDEKDKKKANLPKKEKSVLQGKLTKLAVQIGKAGLLMSAITVIILVLYFVIDTFWVQKRPWLAECTPIYIQYFVKFFIIGVTVLVVAVPEGLPLAVTISLAYSVKKMMKDNNLVRHLDACETMGNATAICSDKTGTLTMNRMTVVQAYINEKHYKKVPEPEAIPPNILSYLVTGISVNCAYTSKILPPEKEGGLPRHVGNKTECALLGLLLDLKRDYQDVRNEIPEEALYKVYTFNSVRKSMSTVLKNSDGSYRIFSKGASEIILKKCFKILSANGEAKVFRPRDRDDIVKTVIEPMASEGLRTICLAFRDFPAGEPEPEWDNENDIVTGLTCIAVVGIEDPVRPEVPDAIKKCQRAGITVRMVTGDNINTARAIATKCGILHPGEDFLCLEGKDFNRRIRNEKGEIEQERIDKIWPKLRVLARSSPTDKHTLVKGIIDSTVSDQRQVVAVTGDGTNDGPALKKADVGFAMGIAGTDVAKEASDIILTDDNFTSIVKAVMWGRNVYDSISKFLQFQLTVNVVAVIVAFTGACITQDSPLKAVQMLWVNLIMDTLASLALATEPPTESLLLRKPYGRNKPLISRTMMKNILGHAFYQLVVVFTLLFAGEKFFDIDSGRNAPLHAPPSEHYTIVFNTFVLMQLFNEINARKIHGERNVFEGIFNNAIFCTIVLGTFVVQIIIVQFGGKPFSCSELSIEQWLWSIFLGMGTLLWGQLISTIPTSRLKFLKEAGHGTQKEEIPEEELAEDVEEIDHAERELRRGQILWFRGLNRIQTQMDVVNAFQSGSSIQGALRRQPSIASQHHDVTNISTPTHVVFSSSTASTTVGYSSGECIS

SEQ ID NO: 12829 - protein, 1220 aa, Homo sapiens
MGDMANNSVAYSGVKNSLKEANHDGDFGITLAELRALMELRSTDALRKIQESYGDVYGICTKLKTSPNEGLSGNPADLERREAVFGKNFIPPKKPKTFLQLVWEALQDVTLIILEIAAIVSLGLSFYQPPEGDNALCGEVSVGEEEGEGETGWIEGAAILLSVVCVVLVTAFNDWSKEKQFRGLQSRIEQEQKFTVIRGGQVIQIPVADITVGDIAQVKYGDLLPADGILIQGNDLKIDESSLTGESDHVKKSLDKDPLLLSGTHVMEGSGRMVVTAVGVNSQTGIIFTLLGAGGEEEEKKDEKKKEKKNKKQDGAIENRNKAKAQDGAAMEMQPLKSEEGGDGDEKDKKKANLPKKEKSVLQGKLTKLAVQIGKAGLLMSAITVIILVLYFVIDTFWVQKRPWLAECTPIYIQYFVKFFIIGVTVLVVAVPEGLPLAVTISLAYSVKKMMKDNNLVRHLDACETMGNATAICSDKTGTLTMNRMTVVQAYINEKHYKKVPEPEAIPPNILSYLVTGISVNCAYTSKILPPEKEGGLPRHVGNKTECALLGLLLDLKRDYQDVRNEIPEEALYKVYTFNSVRKSMSTVLKNSDGSYRIFSKGASEIILKKCFKILSANGEAKVFRPRDRDDIVKTVIEPMASEGLRTICLAFRDFPAGEPEPEWDNENDIVTGLTCIAVVGIEDPVRPEVPDAIKKCQRAGITVRMVTGDNINTARAIATKCGILHPGEDFLCLEGKDFNRRIRNEKGEIEQERIDKIWPKLRVLARSSPTDKHTLVKGIIDSTVSDQRQVVAVTGDGTNDGPALKKADVGFAMGIAGTDVAKEASDIILTDDNFTSIVKAVMWGRNVYDSISKFLQFQLTVNVVAVIVAFTGACITQDSPLKAVQMLWVNLIMDTLASLALATEPPTESLLLRKPYGRNKPLISRTMMKNILGHAFYQLVVVFTLLFAGEKFFDIDSGRNAPLHAPPSEHYTIVFNTFVLMQLFNEINARKIHGERNVFEGIFNNAIFCTIVLGTFVVQIIIVQFGGKPFSCSELSIEQWLWSIFLGMGTLLWGQLISTIPTSRLKFLKEAGHGTQKEEIPEEELAEDVEEIDHAERELRRGQILWFRGLNRIQTQIRVVNAFRSSLYEGLEKPESRSSIHNFMTHPEFRIEDSEPHIPLIDDTDAEDDAPTKRNSSPPPSPNKNNNAVDSGIHLTIEMNKSATSSSPGSPLHSLETSL

SEQ ID NO: 12830 - protein, 1258 aa, Homo sapiens
MGDMANNSVAYSGVKNSLKEANHDGDFGITLAELRALMELRSTDALRKIQESYGDVYGICTKLKTSPNEGLSGNPADLERREAVFGKNFIPPKKPKTFLQLVWEALQDVTLIILEIAAIVSLGLSFYQPPEGDNALCGEVSVGEEEGEGETGWIEGAAILLSVVCVVLVTAFNDWSKEKQFRGLQSRIEQEQKFTVIRGGQVIQIPVADITVGDIAQVKYGDLLPADGILIQGNDLKIDESSLTGESDHVKKSLDKDPLLLSGTHVMEGSGRMVVTAVGVNSQTGIIFTLLGAGGEEEEKKDEKKKEKKNKKQDGAIENRNKAKAQDGAAMEMQPLKSEEGGDGDEKDKKKANLPKKEKSVLQGKLTKLAVQIGKAGLLMSAITVIILVLYFVIDTFWVQKRPWLAECTPIYIQYFVKFFIIGVTVLVVAVPEGLPLAVTISLAYSVKKMMKDNNLVRHLDACETMGNATAICSDKTGTLTMNRMTVVQAYINEKHYKKVPEPEAIPPNILSYLVTGISVNCAYTSKILPPEKEGGLPRHVGNKTECALLGLLLDLKRDYQDVRNEIPEEALYKVYTFNSVRKSMSTVLKNSDGSYRIFSKGASEIILKKCFKILSANGEAKVFRPRDRDDIVKTVIEPMASEGLRTICLAFRDFPAGEPEPEWDNENDIVTGLTCIAVVGIEDPVRPEVPDAIKKCQRAGITVRMVTGDNINTARAIATKCGILHPGEDFLCLEGKDFNRRIRNEKGEIEQERIDKIWPKLRVLARSSPTDKHTLVKGIIDSTVSDQRQVVAVTGDGTNDGPALKKADVGFAMGIAGTDVAKEASDIILTDDNFTSIVKAVMWGRNVYDSISKFLQFQLTVNVVAVIVAFTGACITQDSPLKAVQMLWVNLIMDTLASLALATEPPTESLLLRKPYGRNKPLISRTMMKNILGHAFYQLVVVFTLLFAGEKFFDIDSGRNAPLHAPPSEHYTIVFNTFVLMQLFNEINARKIHGERNVFEGIFNNAIFCTIVLGTFVVQIIIVQFGGKPFSCSELSIEQWLWSIFLGMGTLLWGQLISTIPTSRLKFLKEAGHGTQKEEIPEEELAEDVEEIDHAERELRRGQILWFRGLNRIQTQMDVVNAFQSGSSIQGALRRQPSIASQHHDVTNISTPTHIRVVNAFRSSLYEGLEKPESRSSIHNFMTHPEFRIEDSEPHIPLIDDTDAEDDAPTKRNSSPPPSPNKNNNAVDSGIHLTIEMNKSATSSSPGSPLHSLETSL

SEQ ID NO: 12831 - protein, 1249 aa, Homo sapiens
MGDMANNSVAYSGVKNSLKEANHDGDFGITLAELRALMELRSTDALRKIQESYGDVYGICTKLKTSPNEGLSGNPADLERREAVFGKNFIPPKKPKTFLQLVWEALQDVTLIILEIAAIVSLGLSFYQPPEGDNALCGEVSVGEEEGEGETGWIEGAAILLSVVCVVLVTAFNDWSKEKQFRGLQSRIEQEQKFTVIRGGQVIQIPVADITVGDIAQVKYGDLLPADGILIQGNDLKIDESSLTGESDHVKKSLDKDPLLLSGTHVMEGSGRMVVTAVGVNSQTGIIFTLLGAGGEEEEKKDEKKKEKKNKKQDGAIENRNKAKAQDGAAMEMQPLKSEEGGDGDEKDKKKANLPKKEKSVLQGKLTKLAVQIGKAGLLMSAITVIILVLYFVIDTFWVQKRPWLAECTPIYIQYFVKFFIIGVTVLVVAVPEGLPLAVTISLAYSVKKMMKDNNLVRHLDACETMGNATAICSDKTGTLTMNRMTVVQAYINEKHYKKVPEPEAIPPNILSYLVTGISVNCAYTSKILPPEKEGGLPRHVGNKTECALLGLLLDLKRDYQDVRNEIPEEALYKVYTFNSVRKSMSTVLKNSDGSYRIFSKGASEIILKKCFKILSANGEAKVFRPRDRDDIVKTVIEPMASEGLRTICLAFRDFPAGEPEPEWDNENDIVTGLTCIAVVGIEDPVRPEVPDAIKKCQRAGITVRMVTGDNINTARAIATKCGILHPGEDFLCLEGKDFNRRIRNEKGEIEQERIDKIWPKLRVLARSSPTDKHTLVKGIIDSTVSDQRQVVAVTGDGTNDGPALKKADVGFAMGIAGTDVAKEASDIILTDDNFTSIVKAVMWGRNVYDSISKFLQFQLTVNVVAVIVAFTGACITQDSPLKAVQMLWVNLIMDTLASLALATEPPTESLLLRKPYGRNKPLISRTMMKNILGHAFYQLVVVFTLLFAGEKFFDIDSGRNAPLHAPPSEHYTIVFNTFVLMQLFNEINARKIHGERNVFEGIFNNAIFCTIVLGTFVVQIIIVQFGGKPFSCSELSIEQWLWSIFLGMGTLLWGQLISTIPTSRLKFLKEAGHGTQKEEIPEEELAEDVEEIDHAERELRRGQILWFRGLNRIQTQMDVVNAFQSGSSIQGALRRQPSIASQHHDIRVVNAFRSSLYEGLEKPESRSSIHNFMTHPEFRIEDSEPHIPLIDDTDAEDDAPTKRNSSPPPSPNKNNNAVDSGIHLTIEMNKSATSSSPGSPLHSLETSL

SEQ ID NO: 12832 - protein, 1220 aa, Homo sapiens; identical to SEQ ID NO: 12829

SEQ ID NO: 12833 - protein, 1135 aa, Homo sapiens
MGDMANNSVAYSGVKNSLKEANHDGDFGITLAELRALMELRSTDALRKIQESYGDVYGICTKLKTSPNEGLSGNPADLERREAVFGKNFIPPKKPKTFLQLVWEALQDVTLIILEIAAIVSLGLSFYQPPEGDNALCGEVSVGEEEGEGETGWIEGAAILLSVVCVVLVTAFNDWSKEKQFRGLQSRIEQEQKFTVIRGGQVIQIPVADITVGDIAQVKYGDLLPADGILIQGNDLKIDESSLTGESDHVKKSLDKDPLLLSGTHVMEGSGRMVVTAVGVNSQTGIIFTLLGAGGEEEEKKDEKKKEKKNKKQDGAIENRNKAKAQDGAAMEMQPLKSEEGGDGDEKDKKKANLPKKEKSVLQGKLTKLAVQIGKAGLLMSAITVIILVLYFVIDTFWVQKRPWLAECTPIYIQYFVKFFIIGVTVLVVAVPEGLPLAVTISLAYSVKKMMKDNNLVRHLDACETMGNATAICSDKTGTLTMNRMTVVQAYINEKHYKKVPEPEAIPPNILSYLVTGISVNCAYTSKILPPEKEGGLPRHVGNKTECALLGLLLDLKRDYQDVRNEIPEEALYKVYTFNSVRKSMSTVLKNSDGSYRIFSKGASEIILKKCFKILSANGEAKVFRPRDRDDIVKTVIEPMASEGLRTICLAFRDFPAGEPEPEWDNENDIVTGLTCIAVVGIEDPVRPEVPDAIKKCQRAGITVRMVTGDNINTARAIATKCGILHPGEDFLCLEGKDFNRRIRNEKGEIEQERIDKIWPKLRVLARSSPTDKHTLVKGIIDSTVSDQRQVVAVTGDGTNDGPALKKADVGFAMGIAGTDVAKEASDIILTDDNFTSIVKAVMWGRNVYDSISKFLQFQLTVNVVAVIVAFTGACITQDSPLKAVQMLWVNLIMDTLASLALATEPPTESLLLRKPYGRNKPLISRTMMKNILGHAFYQLVVVFTLLFAGEKFFDIDSGRNAPLHAPPSEHYTIVFNTFVLMQLFNEINARKIHGERNVFEGIFNNAIFCTIVLGTFVVQLISTIPTSRLKFLKEAGHGTQKEEIPEEELAEDVEEIDHAERELRRGQILWFRGLNRIQTQMDVVNAFQSGSSIQGALRRQPSIASQHHDVTNISTPTHVVFSSSTASTTVGFEW

SEQ ID NO: 12834 - protein, 614 aa, Homo sapiens
MSGYSSDRDRGRDRGFGAPRFGGSRAGPLSGKKFGNPGEKLVKKKWNLDELPKFEKNFYQEHPDLARRTAQEVETYRRSKEITVRGHNCPKPVLNFYEANFPANVMDVIARQNFTEPTAIQAQGWPVALSGLDMVGVAQTGSGKTLSYLLPAIVHINHQPFLERGDGPICLVLAPTRELAQQVQQVAAEYCRACRLKSTCIYGGAPKGPQIRDLERGVEICIATPGRLIDFLECGKTNLRRTTYLVLDEADRMLDMGFEPQIRKIVDQIRPDRQTLMWSATWPKEVRQLAEDFLKDYIHINIGALELSANHNILQIVDVCHDVEKDEKLIRLMEEIMSEKENKTIVFVETKRRCDELTRKMRRDGWPAMGIHGDKSQQERDWVLNEFKHGKAPILIATDVASRGLDVEDVKFVINYDYPNSSEDYIHRIGRTARSTKTGTAYTFFTPNNIKQVSDLISVLREANQAINPKLLQLVEDRGSGRSRGRGGMKDDRRDRYSAGKRGGFNTFRDRENYDRGYSSLLKRDFGAKTQNGVYSAANYTNGSFGSNFVSAGIQTSFRTGNPTGTYQNGYDSTQQYGSNVPNMHNGMNQQAYAYPATAAAPMIGYPMPTGYSQ

SEQ ID NO: 12835 - protein, 614 aa, Homo sapiens; identical to SEQ ID NO: 12834

SEQ ID NO: 12836 - protein, 75 aa, Homo sapiens
MAHAHIQGGRRAKSRFVVCIMSGARSKLALFLCGLAIMLTALHFHRLQALGPSFCLKGRSPLLWHQIPPWELWKK

SEQ ID NO: 12837 - protein, 543 aa, Homo sapiens
MAHAHIQGGRRAKSRFVVCIMSGARSKLALFLCGCYVVALGAHTGEESVADHHEAEYYVAAVYEHPSILSLNPLALISRQEALELMNQNLDIYEQQVMTAAQKDVQIIVFPEDGIHGFNFTRTSIYPFLDFMPSPQVVRWNPCLEPHRFNDTEVLQRLSCMAIRGDMFLVANLGTKEPCHSSDPRCPKDGRYQFNTNVVFSNNGTLVDRYRKHNLYFEAAFDVPLKVDLITFDTPFAGRFGIFTCFDILFFDPAIRVLRDYKVKHVVYPTAWMNQLPLLAAIEIQKAFAVAFGINVLAANVHHPVLGMTGSGIHTPLESFWYHDMENPKSHLIIAQVAKNPVGLIGAENATGETDPSHSKFLKILSGDPYCEKDAQEVHCDEATKWNVNAPPTFHSEMMYDNFTLVPVWGKEGYLHVCSNGLCCYLLYERPTLSKELYALGVFDGLHTVHGTYYIQVCALVRCGGLGFDTCGQEITEATGIFEFHLWGNFSTSYIFPLFLTSGMTLEVPDQLGWENDHYFLRKSRLSSGLVTAALYGRLYERD

SEQ ID NO: 12838 - protein, 159 aa, Homo sapiens
MSGARSKLALFLCGCYVVALGAHTGEESVADHHEAEYYVAAVYEHPSILSLNPLALISRQEALELMNQNLDIYEQQVMTAAQKDVQIIVFPEDGIHGFNFTRTSIYPFLDFMPSPQVVRWNPCLEPHRFNDTEVIPAFFLSRLRVHRGDLSQGPEAVTC

SEQ ID NO: 12839 - protein, 172 aa, Homo sapiens [sequence omitted]

SEQ ID NO: 12840 - protein, 364 aa, Homo sapiens
MAHRFPALTQEQKKELSEIAQSIVANGKGILAADESVGTMGNRLQRIKVENTEENRRQFREILFSVDSSINQSIGGVILFHETLYQKDSQGKLFRNILKEKGIVVGIKLDQGGAPLAGTNKETTIQGLDGLSERCAQYKKDGVDFGKWRAVLRIADQCPSSLAIQENANALARYASICQQNGLVPIVEPEVIPDGDHDLEHCQYVTEKVLAAVYKALNDHHVYLEGTLLKPNMVTAGHACTKKYTPEQVAMATVTALHRTVPAAVPGICFLSGGMSEEDATLNLNAINLCPLPKPWKLSFSYGRALQASALAAWGGKAANKEATQEAFMKRAMANCQAAKGQYVHTGSSGAASTQSLFTACYTY

SEQ ID NO: 12841 - protein, 364 aa, Homo sapiens; identical to SEQ ID NO: 12840

SEQ ID NO: 12842 - protein, 529 aa, Homo sapiens
MKPHLKQWRQRMLFGIFAWGLLFLLIFIYFTDSNPAEPVPSSLSFLETRRLLPVQGKQRAIMGAAHEPSPPGGLDARQALPRAHPAGSFHAGPGDLQKWAQSQDGFEHKEFFSSQVGRKSQSAFYPEDDDYFFAAGQPGWHSHTQGTLGFPSPGEPGPREGAFPAAQVQRRRVKKRHRRQRRSHVLEEGDDGDRLYSSMSRAFLYRLWKGNVSSKMLNPRLQKAMKDYLTANKHGVRFRGKREAGLSRAQLLCQLRSRARVRTLDGTEAPFSALGWRRLVPAVPLSQLHPRGLRSCAVVMSAGAILNSSLGEEIDSHDAVLRFNSAPTRGYEKDVGNKTTIRIINSQILTNPSHHFIDSSLYKDVILVAWDPAPYSANLNLWYKKPDYNLFTPYIQHRQRNPNQPFYILHPKFIWQLWDIIQENTKEKIQPNPPSSGFIGILIMMSMCREVHVYEYIPSVRQTELCHYHELYYDAACTLGAYHPLLYEKLLVQRLNMGTQGDLHRKGKVVLPGFQAVHCPAPSPVIPHS

SEQ ID NO: 12843 - protein, 275 aa, Homo sapiens
MGWEKPPPVQEESIPIALSGRHILARAKHGTGKSRTYLIPLLERRDLKKHNIQAVVLVPTRELALQVSQICVQVRKHMGGAKVMATTGGTNLRDDIIRLDDTMHVVIATPRRILDVTKKRVARAVAKVDHVQMIVLHEQADKLLSQDFVQIMEDIIIVLPKNRKILLHSATFPFSVQKFMNSHLQKPYEINLMEELTLKGVTQYYACITELQKVHCLNALFSRLQINQSIIFCNSSQQVELLAKTSQLGYSCFYIHAKMRQEHQNRVFHDFRNGL

SEQ ID NO: 12844 - protein, 179 aa, Homo sapiens
MKGYEVATIDEACQEDNIFVTTTGCVNIILGWHFKQMKDDAIICNTGHFDMEIDVKWLNKNTVERVNIKPQVDWYQLKNAHHIILLAEGQLVNLGCAMGHLSFLISNSFTNQVMAQTELQTHPDKYQVMVLFLPKKLNEAMAEAHLGKLNVKLTKLTELQAHYLYLSRDGPFKPDHYHY

SEQ ID NO: 12845 - protein, 253 aa, Homo sapiens
MIGVHKLHKMMANGILKVPAINVNNSVTKSKFDNLSGCQESLIDSIKWATDVMIASKAHVIIIKIDPINILQAAMKGYEVATIDEACQEDNIFVTTTGCVNIILGWHFKQMKDDAIICNTGHFDMEIDVKWLNKNTVERVNIKPQVDWYQLKNAHHIILLAEGQLVNLGCAMGHLSFLISNSFTNQVMAQTELQTHPDKYQVMVLFLPKKLNEAMAEAHLGKLNVKLTKLTELQAHYLYLSRDGPFKPDHYHY

SEQ ID NO: 12846 - protein, 649 aa, Homo sapiens
MSLAFKIFFPQTLRALSRKELCLFRKHHWRDVRQFSQWSETDLLHGHPLFLRRKPVLSFQGSHLRSRATYLVFLPGLHVGLCSGPCEMAEQRFCVDYAKRGTAGCKKCKEKIVKGVCRIGKVVPNPFSESGGDMKEWYHIKCMFEKLERARATTKKIEDLTELEGWEELEDNEKEQITQHIADLSSKAAGTPKKKAVVQAKLTTTGQVTSPVKGASFVTSTNPRKFSGFSAKPNNSGEAPSSPTPKRSLSSSKCDPRHKDCLLREFRKLCAMVADNPSYNTKTQIIQDFLRKGSAGDGFHGDVYLTVKLLLPGVIKTVYNLNDKQIVKLFSRIFNCNPDDMARDLEQGDVSETIRVFFEQSKSFPPAAKSLLTIQEVDEFLLRLSKLTKEDEQQQALQDIASRCTANDLKCIIRLIKHDLKMNSGAKHVLDALDPNAYEAFKASRNLQDVVERVLHNAQEVEKEPGQRRALSVQASLMTPVQPMLAEACKSVEYAMKKCPNGMFSEIKYDGERVQVHKNGDHFSYFSRSLKPVLPHKVAHFKDYIPQAFPGGHSMILDSEVLLIDNKTGKPLPFGTLGVHKKAAFQDANVCLFVFDCIYFNDVSLMDRPLCERRKFLHDNMVEIPNRIMFSEMKRVTHLSCPSESFGLG

SEQ ID NO: 12847 - protein, 1009 aa, Homo sapiens
MSLAFKIFFPQTLRALSRKELCLFRKHHWRDVRQFSQWSETDLLHGHPLFLRRKPVLSFQGSHLRSRATYLVFLPGLHVGLCSGPCEMAEQRFCVDYAKRGTAGCKKCKEKIVKGVCRIGKVVPNPFSESGGDMKEWYHIKCMFEKLERARATTKKIEDLTELEGWEELEDNEKEQITQHIADLSSKAAGTPKKKAVVQAKLTTTGQVTSPVKGASFVTSTNPRKFSGFSAKPNNSGEAPSSPTPKRSLSSSKCDPRHKDCLLREFRKLCAMVADNPSYNTKTQIIQDFLRKGSAGDGFHGDVYLTVKLLLPGVIKTVYNLNDKQIVKLFSRIFNCNPDDMARDLEQGDVSETIRVFFEQSKSFPPAAKSLLTIQEVDEFLLRLSKLTKEDEQQQALQDIASRCTANDLKCIIRLIKHDLKMNSGAKHVLDALDPNAYEAFKASRNLQDVVERVLHNAQEVEKEPGQRRALSVQASLMTPVQPMLAEACKSVEYAMKKCPNGMFSEIKYDGERVQVHKNGDHFSYFSRSLKPVLPHKVAHFKDYIPQAFPGGHSMILDSEVLLIDNKTGKPLPFGTLGVHKKAAFQDANVCLFVFDCIYFNDVSLMDRPLCERRKFLHDNMVEIPNRIMFSEMKRVTKALDLADMITRVIQEGLEGLVLKDVKGTYEPGKRHWLKVKKDYLNEGAMADTADLVVLGAFYGQGSKGGMMSIFLMGCYDPGSQKWCTVTKCAGGHDDATLARLQNELDMVKISKDPSKIPSWLKVNKIYYPDFIVPDPKKAAVWEITGAEFSKSEAHTADGISIRFPRCTRIRDDKDWKSATNLPQLKELYQLSKEKADFTVVAGDEGSSTTGGSSEENKGPSGSAVSRKAPSKPSASTKKAEGKLSNSNSKDGNMQTAKPSAMKVGEKLATKSSPVKVGEKRKAADETLCQTKVLLDIFTGVRLYLPPSTPDFSRLRRYFVAFDGDLVQEFDMTSATHVLGSRDKNPAAQQVSPEWIWACIRKRRLVAPC

SEQ ID NO: 12848 - protein, 949 aa, Homo sapiens
MSLAFKIFFPQTLRALSRKELCLFRKHHWRDVRQFSQWSETDLLHGHPLFLRRKPVLSFQGSHLRSRATYLVFLPGLHVGLCSGPCEMAEQRFCVDYAKRGTAGCKKCKEKIVKGVCRIGKVVPNPFSESGGDMKEWYHIKCMFEKLERARATTKKIEDLTELEGWEELEDNEKEQITQHIADLSSKAAGTPKKKAVVQAKLTTTGQVTSPVKGASFVTSTNPRKFSGFSAKPNNSGEAPSSPTPKRSLSSSKCDPRHKDCLLREFRKLCAMVADNPSYNTKTQIIQDFLRKGSAGDGFHGDVYLTVKLLLPGVIKTVYNLNDKQIVKLFSRIFNCNPDDMARDLEQGDVSETIRVFFEQSKSFPPAAKSLLTIQEVDEFLLRLSKLTKEDEQQQALQDIASRCTANDLKCIIRLIKHDLKMNSGAKHVLDALDPNAYEAFKASRNLQDVVERVLHNAQEVEKEPGQRRALSVQASLMTPVQPMLAEACKSVEYAMKKCPNGMFSEIKYDGERVQVHKNGDHFSYFSRSLKPVLPHKVAHFKDYIPQAFPGGHSMILDSEVLLIDNKTGKPLPFGTLGVHKKAAFQDANVCLFVFDCIYFNDVSLMDRPLCERRKFLHDNMVEIPNRIMFSEMKRVTKALDLADMITRVIQEGLEGLVLKDVKGTYEPGKRHWLKVKKDYLNEGAMADTADLVVLGAFYGQGSKGGMMSIFLMGCYDPGSQKWCTVTKCAGGHDDATLARLQNELDMVKISKDPSKIPSWLKVNKIYYPDFIVPDPKKAAVWEITGAEFSKSEAHTADGISIRFPRCTRIRDDKDWKSATNLPQLKELYQLSKEKADFTVVAGDEGSSTTGGSSEENKGPSGSAVSRKAPSKPSASTKKAEGKLSNSNSKDGNMQTAKPSAMKVGEKLATKSSPVKVGEKRKAADETLCQTKRRPASEQRGRTVPAGRR

SEQ ID NO: 12849 - protein, 545 aa, Homo sapiens
MLPLSLQTVFSLYFWVNWRRASTLFTCLQPCLPVANIGPTRILPNLYLGCQRDVLNKELMQQNGIGYVLNASNTCPKPDFIPESHFLRVPVNDSFCEKILPWLDKSVDFIEKAKASNGCVLVHCLAGISRSATIAIAYIMKRMDMSLDEAYRFVKEKRPTISPNFNFLGQLLDYEKKIKNQTGASGPKSKLKLLHLEKPNEPVPAVSEGGQKSETPLSPPCADSATSEAAGQRPVHPASVPSVPSVQPSLLEDSPLVQALSGLHLSADRLEDSNKLKRSFSLDIKSVSYSASMAASLHGFSSSEDALEYYKPSTTLDGTNKLCQFSPVQELSEQTPETSPDKEEASIPKKLQTARPSDSQSKRLHSVRTSSSGTAQRSLLSPLHRSGSVEDNYHTSFLFGLSTSQQHLTKSAGLGLKGWHSDILAPQTSTPSLTSSWYFATESSHFYSASAIYGGSASYSAYSCSQLPTCGDQVYSVRRRQKPSDRADSRRSWHEESPFEKQFKRRSCQMEFGESIMSENRSREELGKVGSQSSFSGSMEIIEVS

SEQ ID NO: 12850 - protein, 665 aa, Homo sapiens
MAHEMIGTQIVTERLVALLESGTEKVLLIDSRPFVEYNTSHILEAININCSKLMKRRLQQDKVLITELIQHSAKHKVDIDCSQKVVVYDQSSQDVASLSSDCFLTVLLGKLEKSFNSVHLLAGGFAEFSRCFPGLCEGKSTLVPTCISQPCLPVANIGPTRILPNLYLGCQRDVLNKELMQQNGIGYVLNASNTCPKPDFIPESHFLRVPVNDSFCEKILPWLDKSVDFIEKAKASNGCVLVHCLAGISRSATIAIAYIMKRMDMSLDEAYRFVKEKRPTISPNFNFLGQLLDYEKKIKNQTGASGPKSKLKLLHLEKPNEPVPAVSEGGQKSETPLSPPCADSATSEAAGQRPVHPASVPSVPSVQPSLLEDSPLVQALSGLHLSADRLEDSNKLKRSFSLDIKSVSYSASMAASLHGFSSSEDALEYYKPSTTLDGTNKLCQFSPVQELSEQTPETSPDKEEASIPKKLQTARPSDSQSKRLHSVRTSSSGTAQRSLLSPLHRSGSVEDNYHTSFLFGLSTSQQHLTKSAGLGLKGWHSDILAPQTSTPSLTSSWYFATESSHFYSASAIYGGSASYSAYSCSQLPTCGDQVYSVRRRQKPSDRADSRRSWHEESPFEKQFKRRSCQMEFGESIMSENRSREELGKVGSQSSFSGSMEIIEVS

SEQ ID NO: 12851 - protein, 143 aa, Homo sapiens
MAHEMIGTQIVTERLVALLESGTEKVLLIDSRPFVEYNTSHILEAININCSKLMKRRLQQDKVLITELIQHSAKHKVDIDCSQKVVVYDQSSQDVASLSSDCFLTVLLGKLEKSFNSVHLLAGADAAEWDWLCVKCQQYLSKA

SEQ ID NO: 12852 - protein, 392 aa, Homo sapiens
MAAPEEHDSPTEASQPIVEEEETKTFKDLGVTDVLCEACDQLGWTKPTKIQIEAIPLALQAVIVGGIDSMSQSLALAKKPHIIIATPGRLIDHLENTKGFNLRALKYLVMDEADRILNMDFETEVDKILKVIPRDRKTFLFSATMTKKVQKLQRAALKNPVKCAVSSKYQTVEKLQQYYIFIPSKFKDTYLVYILNELAGNSFMIFCSTCNNTQRTALLLRNLGFTAIPLHGQMSQSKRLGSLNKFKAKARSILLATDVASRGLDIPHVDVVVNFDIPTHSKDYIHRVGRTARAGRSGKAITFVTQYDVELFQRIEHLIGKKLPGFPTQDDEVMMLTERVAEAQRFARMELREHGEKKKRSREDAGDNDDTEGAIGVRNKVAGGKMKKRKGR

SEQ ID NO: 12853 - protein, 406 aa, Homo sapiens
MAAPEEHDSPTEASQPIVEEEETKTFKDLGVTDVLCEACDQLGWTKPTKIQIEAIPLALQGRDIIGLAETGSGKTGAFALPILNALLETPQRLFALVLTPTRELAFQISEQFEALGSSIGVQSAVIVGGIDSMSQSLALAKKPHIIIATPGRLIDHLENTKGFNLRALKYLVMDEADRILNMDFETEVDKILKVIPRDRKTFLFSATMTKKVQKLQRAALKNPVKCAVSSKYQTVEKLQQYYIFIPSKFKSKRLGSLNKFKAKARSILLATDVASRGLDIPHVDVVVNFDIPTHSKDYIHRVGRTARAGRSGKAITFVTQYDVELFQRIEHLIGKKLPGFPTQDDEVMMLTERVAEAQRFARMELREHGEKKKRSREDAGDNDDTEGAIGVRNKVAGGKMKKRKGR

SEQ ID NO: 12854 - protein, 455 aa, Homo sapiens
MAAPEEHDSPTEASQPIVEEEETKTFKDLGVTDVLCEACDQLGWTKPTKIQIEAIPLALQGRDIIGLAETGSGKTGAFALPILNALLETPQRLFALVLTPTRELAFQISEQFEALGSSIGVQSAVIVGGIDSMSQSLALAKKPHIIIATPGRLIDHLENTKGFNLRALKYLVMDEADRILNMDFETEVDKILKVIPRDRKTFLFSATMTKKVQKLQRAALKNPVKCAVSSKYQTVEKLQQYYIFIPSKFKDTYLVYILNELAGNSFMIFCSTCNNTQRTALLLRNLGFTAIPLHGQMSQSKRLGSLNKFKAKARSILLATDVASRGLDIPHVDVVVNFDIPTHSKDYIHRVGRTARAGRSGKAITFVTQYDVELFQRIEHLIGKKLPGFPTQDDEVMMLTERVAEAQRFARMELREHGEKKKRSREDAGDNDDTEGAIGVRNKVAGGKMKKRKGR

SEQ ID NO: 12855 - protein, 675 aa, Homo sapiens
MKIPLTATICLPGSSPPGLCIFAKVSDVKRLEMDDIADRMRMDAGEVTLVNHNSVFKTHLLPQTGFPEDQLSLSDQQILSSRQGHLDRSFTCSTRSAAYNPSYYSDNPSSDSFLGSGDLRTFGQSANGQWRNSTPSSSSSLQKSRNSRSLYLETRKTSSGLSNSFAGKSNHHCHVSAYEKSFPIKPVPSPSWSGSCRRSLLSPKKTQRRHVSTAEETVQEEEREIYRQLLQMVTGKQFTIAKPTTHFPLHLSRCLSSSKNTLKDSLFKNGNSCASQIIGSDTSSSGSASILTNQEQLSHSVYSLSSYTPDVAFGSKDSGTLHHPHHHHSVPHQPDNLAASNTQSEGSDSVILLKVKDSQTPTPSSTFFQAELWIKELTSVYDSRARERLRQIEEQKALALQLQNQRLQEREHSVHDSVELHLRVPLEKEIPVTVVQETQKKGHKLTDSEDEFPEITEEMEKEIKNVFRNGNQDEVLSEAFRLTITRKDIQTLNHLNWLNDEIINFYMNMLMERSKEKGLPSVHAFNTFFFTKLKTAGYQAVKRWTKKVDVFSVDILLVPIHLGVHWCLAVVDFRKKNITYYDSMGGINNEACRILLQYLKQESIDKKRKEFDTNGWQLFSKKSQIPQQMNGSDCGMFACKYADCITKDRPINFTQQHMPYFRKRMVWEILHRKLL

SEQ ID NO: 12856 - protein, 676 aa, Homo sapiens
MKIPLTATICLPGSSPPGLCIFAKVSDVKRLEMDDIADRMRMDAGEVTLVNHNSVFKTHLLPQTGFPEDQLSLSDQQILSSRQGHLDRSFTCSTRSAAYNPSYYSDNPSSDSFLGSGDLRTFGQSANGQWRNSTPSSSSSLQKSRNSRSLYLETRKTSSGLSNSFAGKSNHHCHVSAYEKSFPIKPVPSPSWSGSCRRSLLSPKKTQRRHVSTAEETVQEEEREIYRQLLQMVTGKQFTIAKPTTHFPLHLSRCLSSSKNTLKDSLFKNGNSCASQIIGSDTSSSGSASILTNQEQLSHSVYSLSSYTPDVAFGSKDSGTLHHPHHHHSVPHQPDNLAASNTQSEGSDSVILLKVKDSQTPTPSSTFFQAELWIKELTSVYDSRARERLRQIEEQKALALQLQNQRLQEREHSVHDSVELHLRVPLEKEIPVTVVQETQKKGHKLTDSEDEFPEITEEMEKEIKNVFRNGNQDEVLSEAFRLTITRKDIQTLNHLNWLNDEIINFYMNMLMERSKEKGLPSVHAFNTFFFTKLKTAGYQAVKRWTKKVDVFSVDILLVPIHLGVHWCLAVVDFRKKNITYYDSMGGINNEACRILLQYLKQESIDKKRKEFDTNGWQLFSKKSQEIPQQMNGSDCGMFACKYADCITKDRPINFTQQHMPYFRKRMVWEILHRKLL

SEQ ID NO: 12857 - protein, 952 aa, Homo sapiens
MDLRVGQRPPVEPPPEPTLLALQRPQRLHHHLFLAGLQQQRSVEPMRLSMDTPMPELQVGPQEQELRQLLHKDKSKRSAVASSVVKQKLAEVILKKQQAALERTVHPNSPGIPYRTLEPLETEGATRSMLSSFLPPVPSLPSDPPEHFPLRKTVSEPNLKLRYKPKKSLERRKNPLLRKESAPPSLRRRPAETLGDSSPSSSSTPASGCSSPNDSEHGPNPILGSEALLGQRLRLQETSVAPFALPTVSLLPAITLGLPAPARADSDRRTHPTLGPRGPILGSPHTPLFLPHGLEPEAGGTLPSRLQPILLLDPSGSHAPLLTVPGLGPLPFHFAQSLMTTERLSGSGLHWPLSRTRSEPLPPSATAPPPPGPMQPRLEQLKTHVQVIKRSAKPSEKPRLRQIPSAEDLETDGGGPGQVVDDGLEHRELGHGQPEARGPAPLQQHPQVLLWEQQRLAGRLPRGSTGDTVLLPLAQGGHRPLSRAQSSPAAPASLSAPEPASQARVLSSSETPARTLPFTTGLIYDSVMLKHQCSCGDNSRHPEHAGRIQSIWSRLQERGLRSQCECLRGRKASLEELQSVHSERHVLLYGTNPLSRLKLDNGKLAGLLAQRMFVMLPCGGVGVDTDTIWNELHSSNAARWAAGSVTDLAFKVASRELKNGFAVVRPPGHHADHSTAMGFCFFNSVAIACRQLQQQSKASKILIVDWDVHHGNGTQQTFYQDPSVLYISLHRHDDGNFFPGSGAVDEVGAGSGEGFNVNVAWAGGLDPPMGDPEYLAAFRIVVMPIAREFSPDLVLVSAGFDAAEGHPAPLGGYHVSAKCFGYMTQQLMNLAGGAVVLALEGGHDLTAICDASEACVAALLGNRVDPLSEEGWKQKPNLNAIRSLEAVIRVHSKYWGCMQRLASCPDSWVPRVPGADKEEVEAVTALASLSVGILAEDRPSEQLVEEEEPMNL

SEQ ID NO: 12858 - protein, 398 aa, Homo sapiens
MLKHQCSCGDNSRHPEHAGRIQSIWSRLQERGLRSQCECLRGRKASLEELQSVHSERHVLLYGTNPLSRLKLDNGKLAGLLAQRMFVMLPCGGVGVDTDTIWNELHSSNAARWAAGSVTDLAFKVASRELKNGFAVVRPPGHHADHSTAMGFCFFNSVAIACRQLQQQSKASKILIVDWDVHHGNGTQQTFYQDPSVLYISLHRHDDGNFFPGSGAVDEVGAGSGEGFNVNVAWAGGLDPPMGDPEYLAAFRIVVMPIAREFSPDLVLVSAGFDAAEGHPAPLGGYHVSAKCFGYMTQQLMNLAGGAVVLALEGGHDLTAICDASEACVAALLGNRVDPLSEEGWKQKPNLNAIRSLEAVIRVHSKCGDGTLAELRLKDLGGTLPHRGQILGLPVPAR

SEQ ID NO: 12859 - protein, 974 aa, Homo sapiens
MHSPGAGCPRPCADTPGPQPQPMDLRVGQRPPVEPPPEPTLLALQRPQRLHHHLFLAGLQQQRSVEPMRLSMDTPMPELQVGPQEQELRQLLHKDKSKRSAVASSVVKQKLAEVILKKQQAALERTVHPNSPGIPYRTLEPLETEGATRSMLSSFLPPVPSLPSDPPEHFPLRKTVSEPNLKLRYKPKKSLERRKNPLLRKESAPPSLRRRPAETLGDSSPSSSSTPASGCSSPNDSEHGPNPILGSEALLGQRLRLQETSVAPFALPTVSLLPAITLGLPAPARADSDRRTHPTLGPRGPILGSPHTPLFLPHGLEPEAGGTLPSRLQPILLLDPSGSHAPLLTVPGLGPLPFHFAQSLMTTERLSGSGLHWPLSRTRSEPLPPSATAPPPPGPMQPRLEQLKTHVQVIKRSAKPSEKPRLRQIPSAEDLETDGGGPGQVVDDGLEHRELGHGQPEARGPAPLQQHPQVLLWEQQRLAGRLPRGSTGDTVLLPLAQGGHRPLSRAQSSPAAPASLSAPEPASQARVLSSSETPARTLPFTTGLIYDSVMLKHQCSCGDNSRHPEHAGRIQSIWSRLQERGLRSQCECLRGRKASLEELQSVHSERHVLLYGTNPLSRLKLDNGKLAGLLAQRMFVMLPCGGVGVDTDTIWNELHSSNAARWAAGSVTDLAFKVASRELKNGFAVVRPPGHHADHSTAMGFCFFNSVAIACRQLQQQSKASKILIVDWDVHHGNGTQQTFYQDPSVLYISLHRHDDGNFFPGSGAVDEVGAGSGEGFNVNVAWAGGLDPPMGDPEYLAAFRIVVMPIAREFSPDLVLVSAGFDAAEGHPAPLGGYHVSAKCFGYMTQQLMNLAGGAVVLALEGGHDLTAICDASEACVAALLGNRVDPLSEEGWKQKPNLNAIRSLEAVIRVHSKYWGCMQRLASCPDSWVPRVPGADKEEVEAVTALASLSVGILAEDRPSEQLVEEEEPMNL

SEQ ID NO: 12860 - protein, 700 aa, Homo sapiens
MTASTAPIPSWADSDRRTHPTLGPRGPILGSPHTPLFLPHGLEPEAGGTLPSRLQPILLLDPSGSHAPLLTVPGLGPLPFHFAQSLMTTERLSGSGLHWPLSRTRSEPLPPSATAPPPPGPMQPRLEQLKTHVQVIKRSAKPSEKPRLRQIPSAEDLETDGGGPGQVVDDGLEHRELGHGQPEARGPAPLQQHPQVLLWEQQRLAGRLPRGSTGDTVLLPLAQGGHRPLSRAQSSPAAPASLSAPEPASQARVLSSSETPARTLPFTTGLIYDSVMLKHQCSCGDNSRHPEHAGRIQSIWSRLQERGLRSQCECLRGRKASLEELQSVHSERHVLLYGTNPLSRLKLDNGKLAGLLAQRMFVMLPCGGVGVDTDTIWNELHSSNAARWAAGSVTDLAFKVASRELKNGFAVVRPPGHHADHSTAMGFCFFNSVAIACRQLQQQSKASKILIVDWDVHHGNGTQQTFYQDPSVLYISLHRHDDGNFFPGSGAVDEVGAGSGEGFNVNVAWAGGLDPPMGDPEYLAAFRIVVMPIAREFSPDLVLVSAGFDAAEGHPAPLGGYHVSAKCFGYMTQQLMNLAGGAVVLALEGGHDLTAICDASEACVAALLGNRVDPLSEEGWKQKPNLNAIRSLEAVIRVHSKYWGCMQRLASCPDSWVPRVPGADKEEVEAVTALASLSVGILAEDRPSEQLVEEEEPMNL

SEQ ID NO: 12861 - protein, 480 aa, Homo sapiens
MQACVGVRGVYPPGSMWVPAVAVLACSLQPRPWGVRTPWVPALTLAPAGLIYDSVMLKHQCSCGDNSRHPEHAGRIQSIWSRLQERGLRSQCECLRGRKASLEELQSVHSERHVLLYGTNPLSRLKLDNGKLAGLLAQRMFVMLPCGGVGVDTDTIWNELHSSNAARWAAGSVTDLAFKVASRELKNGFAVVRPPGHHADHSTAMGFCFFNSVAIACRQLQQQSKASKILIVDWDVHHGNGTQQTFYQDPSVLYISLHRHDDGNFFPGSGAVDEVGAGSGEGFNVNVAWAGGLDPPMGDPEYLAAFRIVVMPIAREFSPDLVLVSAGFDAAEGHPAPLGGYHVSAKCFGYMTQQLMNLAGGAVVLALEGGHDLTAICDASEACVAALLGNRVDPLSEEGWKQKPNLNAIRSLEAVIRVHSKYWGCMQRLASCPDSWVPRVPGADKEEVEAVTALASLSVGILAEDRPSEQLVEEEEPMNL

SEQ ID NO: 12862 - protein, 915 aa, Homo sapiens
MDLRVGQRPPVEPPPEPTLLALQRPQRLHHHLFLAGLQQQRSVEPMRLSMDTPMPELQVGPQEQELRQLLHKDKSKRSAVASSVVKQKLAEVILKKQQAALERTVHPNSPGIPYRTLEPLETEGATRSMLSSFLPPVPSLPSDPPEHFPLRKTVSEPNLKLRYKPKKSLERRKNPLLRKESAPPSLRRRPAETLGDSSPSSSSTPASGCSSPNDSEHGPNPILGSEADSDRRTHPTLGPRGPILGSPHTPLFLPHGLEPEAGGTLPSRLQPILLLDPSGSHAPLLTVPGLGPLPFHFAQSLMTTERLSGSGLHWPLSRTRSEPLPPSATAPPPPGPMQPRLEQLKTHVQVIKRSAKPSEKPRLRQIPSAEDLETDGGGPGQVVDDGLEHRELGHGQPEARGPAPLQQHPQVLLWEQQRLAGRLPRGSTGDTVLLPLAQGGHRPLSRAQSSPAAPASLSAPEPASQARVLSSSETPARTLPFTTGLIYDSVMLKHQCSCGDNSRHPEHAGRIQSIWSRLQERGLRSQCECLRGRKASLEELQSVHSERHVLLYGTNPLSRLKLDNGKLAGLLAQRMFVMLPCGGVGVDTDTIWNELHSSNAARWAAGSVTDLAFKVASRELKNGFAVVRPPGHHADHSTAMGFCFFNSVAIACRQLQQQSKASKILIVDWDVHHGNGTQQTFYQDPSVLYISLHRHDDGNFFPGSGAVDEVGAGSGEGFNVNVAWAGGLDPPMGDPEYLAAFRIVVMPIAREFSPDLVLVSAGFDAAEGHPAPLGGYHVSAKCFGYMTQQLMNLAGGAVVLALEGGHDLTAICDASEACVAALLGNRVDPLSEEGWKQKPNLNAIRSLEAVIRVHSKYWGCMQRLASCPDSWVPRVPGADKEEVEAVTALASLSVGILAEDRPSEQLVEEEEPMNL

SEQ ID NO: 12863 - protein, 239 aa, Homo sapiens
MPTATGLTLLTSASSAISDPGGEVSAPWGGLRTWTQPLRCWERLLPPPGDPRTVAENTQQDECGLPGSCPARPLSRKPECGREGILPCCSSSAWPEGSFRPFQMNLFSFLSFFFLFFFFLRWSLTLSPRLECSSAISAHCNLRLPGSSNSPALASQVAGITGICHHARQIFVFLVETGFCHVGQAGLELLISGDSPASAFQSAGIIGVSHRARPGSVFLARSEESLYLRPGQQSQEVKV

SEQ ID NO: 12864 - protein, 780 aa, Homo sapiens
MTHEEHHAAKTLGIGKAIAVLTSGGDAQGMNAAVRAVVRVGIFTGARVFFVHEGYQGLVDGGDHIKEATWESVSMMLQLGGTVIGSARCKDFREREGRLRAAYNLVKRGITNLCVIGGDGSLTGADTFRSEWSDLLSDLQKAGKITDEEATKSSYLNIVGLVGSIDNDFCGTDMTIGTDSALHRIMEIVDAITTTAQSHQRTFVLEVMGRHCGYLALVTSLSCGADWVFIPECPPDDDWEEHLCRRLSETRTRGSRLNIIIVAEGAIDKNGKPITSEDIKNLVVKRLGYDTRVTVLGHVQRGGTPSAFDRILGSRMGVEAVMALLEGTPDTPACVVSLSGNQAVRLPLMECVQVTKDVTKAMDEKKFDEALKLRGRSFMNNWEVYKLLAHVRPPVSKSGSHTVAVMNVGAPAAGMNAAVRSTVRIGLIQGNRVLVVHDGFEGLAKGQIEEAGWSYVGGWTGQGGSKLGTKRTLPKKSFEQISANITKFNIQGLVIIGGFEAYTGGLELMEGRKQFDELCIPFVVIPATVSNNVPGSDFSVGADTALNTICTTCDRIKQSAAGTKRRVFIIETMGGYCGYLATMAGLAAGADAAYIFEEPFTIRDLQANVEHLVQKMKTTVKRGLVLRNEKCNENYTTDFIFNLYSEEGKGIFDSRKNVLGHMQQGGSPTPFDRNFATKMGAKAMNWMSGKIKESYRNGRIFANTPDSGCVLGMRKRALVFQPVAELKDQTDFEHRIPKEQWWLKLRPILKILAKYEIDLDTSDHAHLEHITRKRSGEAAV

SEQ ID NO: 12865 - protein, 780 aa, Homo sapiens; identical to SEQ ID NO: 12864

SEQ ID NO: 12866 - protein, 749 aa, Homo sapiens
MTHEEHHAAKTLGIGKAIAVLTSGGDAQGMNAAVRAVVRVGIFTGARVFFVHEGYQGLVDGGDHIKEATWESVSMMLQLGGTVIGSARCKDFREREGRLRAAYNLVKRGITNLCVIGGDGSLTGADTFRSEWSDLLSDLQKAGKITDEEATKSSYLNIVGLVGSIDNDFCGTDMTIGTDSALHRIMEIVDAITTTAQSHQRTFVLEVMGRHCGYLALVTSLSCGADWVFIPECPPDDDWEEHLCRRLSETRTRGSRLNIIIVAEGAIDKNGKPITSEDIKNGSRMGVEAVMALLEGTPDTPACVVSLSGNQAVRLPLMECVQVTKDVTKAMDEKKFDEALKLRGRSFMNNWEVYKLLAHVRPPVSKSGSHTVAVMNVGAPAAGMNAAVRSTVRIGLIQGNRVLVVHDGFEGLAKGQIEEAGWSYVGGWTGQGGSKLGTKRTLPKKSFEQISANITKFNIQGLVIIGGFEAYTGGLELMEGRKQFDELCIPFVVIPATVSNNVPGSDFSVGADTALNTICTTCDRIKQSAAGTKRRVFIIETMGGYCGYLATMAGLAAGADAAYIFEEPFTIRDLQANVEHLVQKMKTTVKRGLVLRNEKCNENYTTDFIFNLYSEEGKGIFDSRKNVLGHMQQGGSPTPFDRNFATKMGAKAMNWMSGKIKESYRNGRIFANTPDSGCVLGMRKRALVFQPVAELKDQTDFEHRIPKEQWWLKLRPILKILAKYEIDLDTSDHAHLEHITRKRSGEAAV

SEQ ID NO: 12867 - protein, 780 aa, Homo sapiens; identical to SEQ ID NO: 12864

SEQ ID NO: 12868 - protein, 780 aa, Homo sapiens; identical to SEQ ID NO: 12864

SEQ ID NO: 12869 - protein, 305 aa, Homo sapiens
MSRELAPLLLLLLSIHSALAMRICSFNVRSFGESKQEDKNAMDVIVKVIKRCDIILVMEIKDSNNRICPILMEKLNRNSRRGITYNYVISSRLGRNTYKEQYAFLYKEKLVSVKRSYHYHDYQDGDADVFSREPFVVWFQSPHTAVKDFVIIPLHTTPETSVKEIDELVEVYTDVKHRWKAENFIFMGDFNAGCSYVPKKAWKNIRLRTDPRFVWLIGDQEDTTVKKSTNCAYDRIVLRGQEIVSSVVPKSNSVFDFQKAYKLTEEEALDVSDHFPVEFKLQSSRAFTNSKKSVTLRKKTKSKRS

SEQ ID NO: 12870 - protein, 305 aa, Homo sapiens; identical to SEQ ID NO: 12869

SEQ ID NO: 12871 - protein, 305 aa, Homo sapiens; identical to SEQ ID NO: 12869

SEQ ID NO: 12872 - protein, 305 aa, Homo sapiens; identical to SEQ ID NO: 12869

SEQ ID NO: 12873 - protein, 341 aa, Homo sapiens
MAAVSGLVRRPLREVTVRDAINQGMDEELERDEKVFLLGEEVAQYDGAYKVSRGLWKKYGDKRIIDTPISEMGFAGIAVGAAMAGLRPICEFMTFNFSMQAIDQVINSAAKTYYMSGGLQPVPIVFRGPNGASAGVAAQHSQCFAAWYGHCPGLKVVSPWNSEDAKGLIKSAIRDNNPVVVLENELMYGVPFEFPPEAQSKDFLIPIGKAKIERQGTHITVVSHSRPVGHCLEAAAVLSKEGVECEVINMRTIRPMDMETIEASVMKTNHLVTVEGGWPQFGVGAEICARIMEGPAFNFLDAPAVRVTGADVPMPYAKILEDNSIPQVKDIIFAIKKTLNI

SEQ ID NO: 12874 - protein, 359 aa, Homo sapiens
MAAVSGLVRRPLREVSGLLKRRFHWTAPAALQVTVRDAINQGMDEELERDEKVFLLGEEVAQYDGAYKVSRGLWKKYGDKRIIDTPISEMGFAGIAVGAAMAGLRPICEFMTFNFSMQAIDQVINSAAKTYYMSGGLQPVPIVFRGPNGASAGVAAQHSQCFAAWYGHCPGLKVVSPWNSEDAKGLIKSAIRDNNPVVVLENELMYGVPFEFPPEAQSKDFLIPIGKAKIERQGTHITVVSHSRPVGHCLEAAAVLSKEGVECEVINMRTIRPMDMETIEASVMKTNHLVTVEGGWPQFGVGAEICARIMEGPAFNFLDAPAVRVTGADVPMPYAKILEDNSIPQVKDIIFAIKKTLNI

SEQ ID NO: 12875 - protein, 337 aa, Homo sapiens
MDLDVVNMFVIAGGTLAIPILAFVASFLLWPSALIRIYYWYWRRTLGMQVRYVHHEDYQFCYSFRGRPGHKPSILMLHGFSAHKDMWLSVVKFLPKNLHLVCVDMPGHEGTTRSSLDDLSIDGQVKRIHQFVECLKLNKKPFHLVGTSMGGQVAGVYAAYYPSDVSSLCLVCPAGLQYSTDNQFVQRLKELQGSAAVEKIPLIPSTPEEMSEMLQLCSYVRFKVPQQILQGLVDVRIPHNNFYRKLFLEIVSEKSRYSLHQNMDKIKVPTQIIWGKQDQVLDVSGADMLAKSIANCQVELLENCGHSVVMERPRKTAKLIIDFLASVHNTDNNKKLD

SEQ ID NO: 12876 - protein, 320 aa, Homo sapiens
  VARIANT (1)...(320): Xaa = Any Amino Acid
MDLDVVNMFVIAGGTLAIPILAFVASFLLWPSALIRIYYWYWRRTLGMQVRYVHHEDYQFCYSFRGRPGHKPSILMLHGFSAHKDMWLSVVKFLPKNLHLVCVDMPGHEGTTRSSLDDLSIDGQVKRIHQFVECLKLNKKPFHLVGTSMGGQVAGVYAAYYPSDVSSLCLVCPAGLQYSTDNQFVQRLKELQGSAAVEKIPLIPSTPEEMSEMLQLCSYVRFKVPQQILQGLVDVRIPHNNFYRKLFLEIVSEKSRYSLHQNMDKIKVPTQIIWGKQDQVCNTSPRQHVGQVNCQLPGGASGKLWALSSDGKTQEDSQAX

SEQ ID NO: 12877 - protein, 337 aa, Homo sapiens; identical to SEQ ID NO: 12875

SEQ ID NO: 12878 - protein, 337 aa, Homo sapiens; identical to SEQ ID NO: 12875

SEQ ID NO: 12879 - protein, 143 aa, Homo sapiens [sequence omitted]

SEQ ID NO: 12880 - protein, 337 aa, Homo sapiens; identical to SEQ ID NO: 12875

SEQ ID NO: 12881 - protein, 555 aa, Homo sapiens [sequence omitted]

SEQ ID NO: 12882 - protein, 397 aa, Homo sapiens
MSWLFPLTKSASSSAAGSPGGLTSLQQQKQRLIESLRNSHSSIAEIQKDVEYRLPFTINNLTININILLPPQFPQEKPVISVYPPIRHHLMDKQGVYVTSPLVNNFTMHSDLGKIIQSLLDEFWKNPPVLAPTSTAFPYLYSNPSGMSPYASQGFPFLPPYPPQEANRSITSLSVADTVSSSTTSHTTAKPAAPSFGVLSNLPLPIPTVDASIPTSQNGFGYKMPDVPDAFPELSELSVSQLTDMNEQEEVLLEQFLTLPQLKQIITDKDDLVKSIEELARKNLLLEPSLEAKRQTVLDKYELLTQMKSTFEKKMQRQHELSESCSASALQARLKVAAHEAEEESDNIAEDFLEGKMEIDDFLSSFMEKRTICHCRRAKEEKLQQAIAMHSQFHAPL

SEQ ID NO: 12883 - protein, 619 aa, Homo sapiens [sequence omitted]

SEQ ID NO: 12884 - protein, 619 aa, Homo sapiens [sequence omitted]

SEQ ID NO: 12885 - protein, 307 aa, Homo sapiens
MAVLAGNSGETCYSKYGAMALKSRACHEMALRIVLHSLDLRANCYQRFVVPLLSISADFYVRVFVRVFTGQAKVKASASKQALVFQCVGCGAFHLQRLGKASGVPSGRAKFSAACGPPVTPECEHCGQRHQLGGPMWAEPIHDLDFVGRVLEAVSANPGRFHTSERIRGVLSVITEELPDVPLYYTLDQLSSTIHCNTPSLLQLRSALLHADFRVSLSHACKNAVKTDAPASALWDIMRCWEKECPVKRERLSETSPAFRILSVEPRLQANFTIREDANPSSRQRGLKRFQANPEANWGPRPRARPG

SEQ ID NO: 12886 - protein, 136 aa, Homo sapiens
MLMYQHQRVSERFDVIDLDPYGSPATFLDAAVQAVSEGGLLCVTCTDMAVLAGNSGETCYSKYGAMALKSRACHEMALRIVLHSLDLRANCYQRFVVPLLSISADFYVRVFVRVFTGQAKVKASARSARGQRAVVD

SEQ ID NO: 12887 - protein, 659 aa, Homo sapiens
MQGSSLWLSLTFRSARVLSRARFFEWQSPGLPNTAAMENGTGPYGEERPREVQETTVTEGAAKIAFPSANEVFYNPVQEFNRDLTCAVITEFARIQLGAKGIQIKVPGEKDTQKVVVDLSEQEEEKVELKESENLASGDQPRTAAVGEICEEGLHVLEGLAASGLRSIRFALEVPGLRSVVANDASTRAVDLIRRNVQLNDVAHLVQPSQADARMLMYQHQRVSERFDVIDLDPYGSPATFLDAAVQAVSEGGLLCVTCTDMAVLAGNSGETCYSKYGAMALKSRACHEMALRIVLHSLDLRANCYQRFVVPLLSISADFYVRVFVRVFTGQAKVKASASKQALVFQCVGCGAFHLQRLGKASGVPSGRAKFSAACGPPVTPECEHCGQRHQLGGPMWAEPIHDLDFVGRVLEAVSANPGRFHTSERIRGVLSVITEELPDVPLYYTLDQLSSTIHCNTPSLLQLRSALLHADFRVSLSHACKNAVKTDAPASALWDIMRCWEKECPVKRERLSETSPAFRILSVEPRLQANFTIREDANPSSRQRGLKRFQANPEANWGPRPRARPGGKAADEAMEERRRLLQNKRKEPPEDVAQRAARLKTFPCKRFKEGTCQRGDQCCYSHSPPTPRVSADAAPDCPETSNQTPPGPGAAAGPGID

SEQ ID NO: 12888 - protein, 630 aa, Homo sapiens
MQGSSLWLSLTFRSARVLSRARFFEWQSPGLPNTAAMENGTGPYGEERPREVQETTVTEGAAKIAFPSANEVFYNPVQEFNRDLTCAVITEFARIQLGAKGIQIKVPGEKDTQKVVVDLSEQEEEKVELKESENLASGDQPRTAAVGEICEEGLHVLEGLAASGLRSIRFALEVPGLRSVVANDASTRAVDLIRRNVQLNDVAHLVQPSQADARMLMYQHQRVSERFDVIDLDPYGSPATFLDAAVQAVSEGGLLCVTCTDMAVLAGNSGETCYSKYGAMALKSRACHEMALRIVLHSLDLRANCYQRFVVPLLSISADFYVRVFVRVFTGQAKVKASARAKFSAACGPPVTPECEHCGQRHQLGGPMWAEPIHDLDFVGRVLEAVSANPGRFHTSERIRGVLSVITEELPDVPLYYTLDQLSSTIHCNTPSLLQLRSALLHADFRVSLSHACKNAVKTDAPASALWDIMRCWEKECPVKRERLSETSPAFRILSVEPRLQANFTIREDANPSSRQRGLKRFQANPEANWGPRPRARPGGKAADEAMEERRRLLQNKRKEPPEDVAQRAARLKTFPCKRFKEGTCQRGDQCCYSHSPPTPRVSADAAPDCPETSNQTPPGPGAAAGPGID

SEQ ID NO: 12889 - protein, 661 aa, Homo sapiens
MQGSSLWLSLTFRSARVLSRARFFEWQSPGLPNTAAMENGTGPYGEERPREVQETTVTEGAAKIAFPSANEVFYNPVQEFNRDLTCAVITEFARIQLGAKGIQIKVPGEKDTQKVVVDLSEQEEEKVELKESENLASGDQPRTAAVGEICEEGLHVLEGLAASGLRSIRFALEVPGLRSVVANDASTRAVDLIRRNVQLNDVAHLVQPSQADARMLMYQHQRVSERFDVIDLDPYGSPATFLDAAVQAVSEGGLLCVTCTDMAVLAGNSGETCYSKYGAMALKSRACHEMALRIVLHSLDLRANCYQRFVVPLLSISADFYVRVFVRVFTGQAKVKASASKQALVFQCVGCGAFHLQRLGKASGVPSGRAKFSAACGPPVTPECEHCGQRHQLGGPMWAEPIHDLDFVGRVLEAVSANPGRFHTSERIRGVLSVITEELPDVPLYYTLDQLSSTIHCNTPSLLQLRSALLHADFRVSLSHACKNAVKTDAPASALWDIMRCWVREKECPVKRERLSETSPAFRILSVEPRLQANFTIREDANPSSRQRGLKRFQANPEANWGPRPRARPGGKAADEAMEERRRLLQNKRKEPPEDVAQRAARLKTFPCKRFKEGTCQRGDQCCYSHSPPTPRVSADAAPDCPETSNQTPPGPGAAAGPGID

SEQ ID NO: 12890 - protein, 148 aa, Homo sapiens
MKLLVLAVLLTVAAADSGISPRAVWQFRKMIKCVIPGSDPFLEYNNYGCYCGLGGSGTPVDELDKCCQTHDNCYDQAKKLDSCKFLLDNPYTHTYSYSCSGSAITCSSKNKECEAFICNCDRNAAICFSKAPYNKAHKNLDTKKYCQS

SEQ ID NO: 12891 - protein, 327 aa, Homo sapiens
MAAPGSCALWSYCGRGWSRAMRGCQLLGLRSSWPGDLLSARLLSQEKRAAETHFGFETVSEEEKGGKVYQVFESVAKKYDVMNDMMSLGIHRVWKDLLLWKMHPLPGTQLLDVAGGTGDIAFRFLNYVQSQHQRKQKRQLRAQQNLSWEEIAKEYQNEEDSLGGSRVVVCDINKEMLKVGKQKALAQGYRAGLAWVLGDAEELPFDDDKFDIYTIAFGIRNVTHIDQALQEAHRVLKPGGRFLCLEFSQVNNPLISRLYDLYSFQVIPVLGEVIAGDWKSYQYLVESIRRFPSQEEFKDMIEDAGFHKVTYESLTSGIVAIHSGFKL

SEQ ID NO: 12892 - protein, 145 aa, Homo sapiens
MRFAKKHNKKGLKKMQANSARATSARADAIKALVKPKEVKPEIPKGVSRKLDPLAYIAHPQAWEMCSFLHCQGAQAMSVKGQGQRSNQGPGCSSSLGSQRCPDTYEGFRVDISVCQCEDRRTALLCVFLPCQSIRCLKVWLRSMM

SEQ ID NO: 12893 - protein, 604 aa, Homo sapiens
MGAALGTGTRLAPWPGRACGALPRWTPTAPAQGCHSKPGPARPVPLKKRGYDVTRNPHLNKGMAFTLEERLQLGIHGLIPPCFLSQDVQLLRIMRYYERQQSDLDKYIILMTLQDRNEKLFYRVLTSDVEKFMPIVYTPTVGLACQHYGLTFRRPRGLFITIHDKGHLATMLNSWPEDNIKAVVVTDGERILGLGDLGCYGMGIPVGKLALYTACGGVNPQQCLPVLLDVGTNNEELLRDPLYIGLKHQRVHGKAYDDLLDEFMQAVTDKFGINCLIQFEDFANANAFRLLNKYRNKYCMFNDDIQGTASVAVAGILAALRITKNKLSNHVFVFQGAGEAAMGIAHLLVMALEKEGVPKAEATRKIWMVDSKGLIVKGRSHLNHEKEMFAQDHPEVNSLEEVVRLVKPTAIIGVAAIAGAFTEQILRDMASFHERPIIFALSNPTSKAECTAEKCYRVTEGRGIFASGSPFKSVTLEDGKTFIPGQGNNAYVFPGVALGVIAGGIRHIPDEIFLLTAEQIAQEVSEQHLSQGRLYPPLSTIRDVSLRIAIKVLDYAYKHNLASYYPEPKDKEAFVRSLVYTPDYDSFTLDSYTWPKEAMNVQTV

SEQ ID NO: 12894 - protein, 335 aa, Homo sapiens [sequence omitted]

SEQ ID NO: 12895 - protein, 156 aa, Homo sapiens
MGAALGTGTRLAPWPGRACGALPRWTPTAPAQGCHSKPGPARPVPLKKRGYDVTRNPHLNKGMAFTLEERLQLGIHGLIPPCFLSQDVQLLRIMRYYERQQSDLDKYIILMTLQDRNEKLFYRVLTSDVEKFMPIVYTPTVGLACQHYGLTFRRPR

SEQ ID NO: 12896 - protein, 606 aa, Homo sapiens [sequence omitted]

SEQ ID NO: 12897 - protein, 197 aa, Homo sapiens [sequence omitted]

SEQ ID NO: 12898 - protein, 604 aa, Homo sapiens; identical to SEQ ID NO: 12893

SEQ ID NO: 12899 - protein, 1008 aa, Homo sapiens
MSYDYHQNWGRDGGPRSSGGGYGGGPAGGHGGNRGSGGGGGGGGGGRGGRGRHPGHLKGREIGMWYAKKQGQKNKEAERQERAVVHMDERREEQIVQLLNSVQAKNDKESEAQISWFAPEDHGYGTEVSTKNTPCSENKLDIQEKKLINQEKKMFRIRNRSYIDRDSEYLLQENEPDGTLDQKLLEDLQKKKNDLRYIEMQHFREKLPSYGMQKELVNLIDNHQVTVISGETGCGKTTQVTQFILDNYIERGKGSACRIVCTQPRRISAISVAERVAAERAESCGSGNSTGYQIRLQSRLPRKQGSILYCTTGIILQWLQSDPYLSSVSHIVLDEIHERNLQSDVLMTVVKDLLNFRSDLKVILMSATLNAEKFSEYFGNCPMIHIPGFTFPVVEYLLEDVIEKIRYVPEQKEHRSQFKRGFMQGHVNRQEKEEKEAIYKERWPDYVRELRRRYSASTVDVIEMMEDDKVDLNLIVALIRYIVLEEEDGAILVFLPGWDNISTLHDLLMSQVMFKSDKFLIIPLHSLMPTVNQTQVFKRTPPGVRKIVIATNIAETSITIDDVVYVIDGGKIKETHFDTQNNISTMSAEWVSKANAKQRKGRAGRVQPGHCYHLYNGLRASLLDDYQLPEILRTPLEELCLQIKILRLGGIAYFLSRLMDPPSNEAVLLSIRHLMELNALDKQEELTPLGVHLARLPVEPHIGKMILFGALFCCLDPVLTIAASLSFKDPFVIPLGKEKIADARRKELAKDTRSDHLTVVNAFEGWEEARRRGFRYEKDYCWEYFLSSNTLQMLHNMKGQFAEHLLGAGFVSSRNPKDPESNINSDNEKIIKAVICAGLYPKVAKIRLNLGKKRKMVKVYTKTDGLVAVHPKSVNVEQTDFHYNWLIYHLKMRTSSIYLYDCTEVSPYCLLFFGGDISIQKDNDQETIAVDEWIVFQSPARIAHLVKELRKELDILLQEKIESPHPVDWNDTKSRDCAVLSAIIDLIKTQEKATPRNFPPRFQDGYYS

SEQ ID NO: 12900 - protein, 952 aa, Homo sapiens [sequence omitted]

SEQ ID NO: 12901 - protein, 952 aa, Homo sapiens [sequence omitted]

SEQ ID NO: 12902 - protein, 1572 aa, Homo sapiens
MSTPTDPGAMPHPGPSPGPGPSPGPILGPSPGPGPSPGSVHSMMGPSPGPPSVSHPMPTMGSTDFPQEGMHQMHKPIDGIHDKGIVEDIHCGSMKGTGMRPPHPGMGPPQSPMDQHSQGYMSPHPSPLGAPEHVSSPMSGGGPTPPQMPPSQPGALIPGDPQAMSQPNRGPSPFSPVQLHQLRAQILAYKMLARGQPLPETLQLAVQGKRTLPGLQQQQQQQQQQQQQQQQQQQQQQQPQQQPPQPQTQQQQQPALVNYNRPSGPGPELSGPSTPQKLPVPAPGGRPSPAPPAAAQPPAAAVPGPSVPQPAPGQPSPVLQLQQKQSRISPIQKPQGLDPVEILQEREYRLQARIAHRIQELENLPGSLPPDLRTKATVELKALRLLNFQRQLRQEVVACMRRDTTLETALNSKAYKRSKRQTLREARMTEKLEKQQKIEQERKRRQKHQEYLNSILQHAKDFKEYHRSVAGKIQKLSKAVATWHANTEREQKKETERIEKERMRRLMAEDEEGYRKLIDQKKDRRLAYLLQQTDEYVANLTNLVWEHKQAQAAKEKKKRRRRKKKAEENAEGGESALGPDGEPIDESSQMSDLPVKVTHTETGKVLFGPEAPKASQLDAWLEMNPGYEVAPRSDSEESDSDYEEEDEEEESSRQETEEKILLDPNSEEVSEKDAKQIIETAKQDVDDEYSMQYSARGSQSYYTVAHAISERVEKQSALLINGTLKHYQLQGLEWMVSLYNNNLNGILADEMGLGKTIQTIALITYLMEHKRLNGPYLIIVPLSTLSNWTYEFDKWAPSVVKISYKGTPAMRRSLVPQLRSGKFNVLLTTYEYIIKDKHILAKIRWKYMIVDEGHRMKNHHCKLTQVLNTHYVAPRRILLTGTPLQNKLPELWALLNFLLPTIFKSCSTFEQWFNAPFAMTGERVDLNEEETILIIRRLHKVLRPFLLRRLKKEVESQLPEKVEYVIKCDMSALQKILYRHMQAKGILLTDGSEKDKKGKGGAKTLMNTIMQLRKICNHPYMFQHIEESFAEHLGYSNGVINGAELYRASGKFELLDRILPKLRATNHRVLLFCQMTSLMTIMEDYFAFRNFLYLRLDGTTKSEDRAALLKKFNEPGSQYFIFLLSTRAGGLGLNLQAADTVVIFDSDWNPHQDLQAQDRAHRIGQQNEVRVLRLCTVNSVEEKILAAAKYKLNVDQKVIQAGMFDQKSSSHERRAFLQAILEHEEENEEEDEVPDDETLNQMIARREEEFDLFMRMDMDRRREDARNPKRKPRLMEEDELPSWIIKDDAEVERLTCEEEEEKIFGRGSRQRRDVDYSDALTEKQWLRAIEDGNLEEMEEEVRLKKRKRRRNVDKDPAKEDVEKAKKRRGRPPAEKLSPNPPKLTKQMNAIIDTVINYKDSSGRQLSEVFIQLPSRKELPEYYELIRKPVDFKKIKERIRNHKYRSLGDLEKDVMLLCHNAQTFNLEGSQIYEDSIVLQSVFKSARQKIAKEEESEDESNEEEEEEDEEESESEAKSVKVKIKLNKKDDKGRDKGKGKKRPNRGKAKPVVSDFDSDEEQDEREQSEGSGTDDE

SEQ ID NO: 12903 - protein, 1572 aa, Homo sapiens; identical to SEQ ID NO: 12902

SEQ ID NO: 12904 - protein, 1572 aa, Homo sapiens; identical to SEQ ID NO: 12902

SEQ ID NO: 12905 - protein, 294 aa, Homo sapiens
MKRLAARCFAGLLILSPLTVISDSRPADSGKAIEDGNLEEMEEEVRLKKRKRRRNVDKDPAKEDVEKAKKRRGRPPAEKLSPNPPKLTKQMNAIIDTVINYKDRCNVEKVPSNSQLEIEGNSSGRQLSEVFIQLPSRKELPEYYELIRKPVDFKKIKERIRNHKYRSLGDLEKDVMLLCHNAQTFNLEGSQIYEDSIVLQSVFKSARQKIAKEEESEDESNEEEEEEDEEESESEAKSVKVKIKLNKKDDKGRDKGKGKKRPNRGKAKPVVSDFDSDEEQDEREQSEGSGTDDE

SEQ ID NO: 12906 - protein, 1590 aa, Homo sapiens
MSTPTDPGAMPHPGPSPGPGPSPGPILGPSPGPGPSPGSVHSMMGPSPGPPSVSHPMPTMGSTDFPQEGMHQMHKPIDGIHDKGIVEDIHCGSMKGTGMRPPHPGMGPPQSPMDQHSQGYMSPHPSPLGAPEHVSSPMSGGGPTPPQMPPSQPGALIPGDPQAMSQPNRGPSPFSPVQLHQLRAQILAYKMLARGQPLPETLQLAVQGKRTLPGLQQQQQQQQQQQQQQQQQQQQQQQPQQQPPQPQTQQQQQPALVNYNRPSGPGPELSGPSTPQKLPVPAPGGRPSPAPPAAAQPPAAAVPGPSVPQPAPGQPSPVLQLQQKQSRISPIQKPQGLDPVEILQEREYRLQARIAHRIQELENLPGSLPPDLRTKATVELKALRLLNFQRQLRQEVVACMRRDTTLETALNSKAYKRSKRQTLREARMTEKLEKQQKIEQERKRRQKHQEYLNSILQHAKDFKEYHRSVAGKIQKLSKAVATWHANTEREQKKETERIEKERMRRLMAEDEEGYRKLIDQKKDRRLAYLLQQTDEYVANLTNLVWEHKQAQAAKEKKKRRRRKKKAEENAEGGESALGPDGEPIDESSQMSDLPVKVTHTETGKVLFGPEAPKASQLDAWLEMNPGYEVAPRSDSEESDSDYEEEDEEEESSRQETEEKILLDPNSEEVSEKDAKQIIETAKQDVDDEYSMQYSARGSQSYYTVAHAISERVEKQSALLINGTLKHYQLQGLEWMVSLYNNNLNGILADEMGLGKTIQTIALITYLMEHKRLNGPYLIIVPLSTLSNWTYEFDKWAPSVVKISYKGTPAMRRSLVPQLRSGKFNVLLTTYEYIIKDKHILAKIRWKYMIVDEGHRMKNHHCKLTQVLNTHYVAPRRILLTGTPLQNKLPELWALLNFLLPTIFKSCSTFEQWFNAPFAMTGERVDLNEEETILIIRRLHKVLRPFLLRRLKKEVESQLPEKVEYVIKCDMSALQKILYRHMQAKGILLTDGSEKDKKGKGGAKTLMNTIMQLRKICNHPYMFQHIEESFAEHLGYSNGVINGAELYRASGKFELLDRILPKLRATNHRVLLFCQMTSLMTIMEDYFAFRNFLYLRLDGTTKSEDRAALLKKFNEPGSQYFIFLLSTRAGGLGLNLQAADTVVIFDSDWNPHQDLQAQDRAHRIGQQNEVRVLRLCTVNSVEEKILAAAKYKLNVDQKVIQAGMFDQKSSSHERRAFLQAILEHEEENEEEDEVPDDETLNQMIARREEEFDLFMRMDMDRRREDARNPKRKPRLMEEDELPSWIIKDDAEVERLTCEEEEEKIFGRGSRQRRDVDYSDALTEKQWLRAIEDGNLEEMEEEVRLKKRKRRRNVDKDPAKEDVEKAKKRRGRPPAEKLSPNPPKLTKQMNAIIDTVINYKDRCNVEKVPSNSQLEIEGNSSGRQLSEVFIQLPSRKELPEYYELIRKPVDFKKIKERIRNHKYRSLGDLEKDVMLLCHNAQTFNLEGSQIYEDSIVLQSVFKSARQKIAKEEESEDESNEEEEEEDEEESESEAKSVKVKIKLNKKDDKGRDKGKGKKRPNRGKAKPVVSDFDSDEEQDEREQSEGSGTDDE

SEQ ID NO: 12907 - protein, 1572 aa, Homo sapiens; identical to SEQ ID NO: 12902

SEQ ID NO: 12908 - protein, 1590 aa, Homo sapiens; identical to SEQ ID NO: 12906

SEQ ID NO: 12909 - protein, 172 aa, Homo sapiens
  VARIANT (1)...(172): Xaa = Any Amino Acid
MSVMQSGTQMIKLKRGTKGLVRLFYLDEHRTRLRWRPSRKSEKAKILIDSIYKVTEGRQSEIFHRQAEGNFDPSCCFTIYHGNHMESLDLITSNPEEARTWITGLKYLMAGISDEDSLAKRQRTHDQWVKQTFEEADKNGDGLLNIEEIHQLMHKLNVNLPRRKVRQMFQVX

SEQ ID NO: 12910 - protein, 918 aa, Homo sapiens
MSVMQSGTQMIKLKRGTKGLVRLFYLDEHRTRLRWRPSRKSEKAKILIDSIYKVTEGRQSEIFHRQAEGNFDPSCCFTIYHGNHMESLDLITSNPEEARTWITGLKYLDENQGTLTFEEFCVFYKMMSLRRDLYLLLLSYSDKKDHLTVEELAQFLKVEQKMNNVTTDYCLDIIKKFEVSEENKVKNVLGIEGFTNFMRSPACDIFNPLHHEVYQDMDQPLCNYYIASSHNTYLTGDQLLSQSKVDMYARVLQEGCRCVEVDCWDGPDGEPVVHHGYTLTSKILFRDVVETINKHAFVKNEFPVILSIENHCSIQQQRKIAQYLKGIFGDKLDLSSVDTGECKQLPSPQSLKGKILVKGKKLPYHLGDDAEEGEVSDEDSADEIEDECKFKLHYSNGTTEHQVESFIRKKLESLLKESQIRDKEDPDSFTVRALLKATHEGLNAHLKQSPDVKESGKKSHGRSLMTNFGKHKKTTKSRSKSYSTDDEEDTQQSTGKEGGQLYRLGRRRKTMKLCRELSDLVVYTNSVAAQDIVDDGTTGNVLSFSETRAHQVVQQKSEQFMIYNQKQLTRIYPSAYRIDSSNFNPLPYWNAGCQLVALNYQSEGRMMQLNRAKFKANGNCGYVLKPQQMCKGTFNPFSGDPLPANPKKQLILKVISGQQLPKPPDSMFGDRGEIIDPFVEVEIIGLPVDCCKDQTRVVDDNGFNPVWEETLTFTVHMPEIALVRFLVWDHDPIGRDFVGQRTVTFSSLVPGYRHVYLEGLTEASIFVHITINEIYGKWSPLILNPSYTILHFLGATKNRQLQGLKGLFNKNPRHSSSENNSHYVRKRSIGDRILRRTASAPAKGRKKSKMGFQEMVEIKDSVSEATRDQDGVLRRTTRSLQARPVSMPVDRNLLGALSLPVSETAKDIEGKENSLVQI

SEQ ID NO: 12911 - protein, 977 aa, Homo sapiens
  VARIANT (1)...(977): Xaa = Any Amino Acid
MMSLRRDLYLLLLSYSDKKDHLTVEELAQFLKVEQKMNNVTTDYCLDIIKKFEVSEENKVKNVLGIEGFTNFMRSPACDIFNPLHHEVYQDMDQPLCNYYIASSHNTYLTGDQLLSQSKVDMYARVLQEGCRCVEVDCWDGPDGEPVVHHGYTLTSKILFRDVVETINKHAFVKNEFPVILSIENHCSIQQQRKIAQYLKGIFGDKLDLSSVDTGECKQLPSPQSLKGKILVKGKKLPYHLGDDAEEGEVSDEDSADEIEDECKFKLHYSNGTTEHQVESFIRKKLESLLKESQIRDKEDPDSFTVRALLKATHEGLNAHLKQSPDVKESGKKSHGRSLMTNFGKHKKTTKSRSKSYSTDDEEDTQQSTGKEGGQLYRLGRRRKTMKLCRELSDLVVYTNSVAAQDIVDDGTTGNVLSFSETRAHQVVQQKSEQFMIYNQKQLTRIYPSAYRIDSSNFNPLPYWNAGCQLVALNYQSEGRMMQLNRAKFKANGNCGYVLKPQQMCKGTFNPFSGDPLPANPKKQLILKVISGQQLPKPPDSMFGDRGEIIDPFVEVEIIGLPVDCCKDQTRVVDDNGFNPVWEETLTFTVHMPEIALVRFLVWDHDPIGRDFVGQRTVTFSSLVPGYRHVYLEGLTEASIFVHITINEIYGKNRQLQGLKGLFNKNPRHSSSENNSHYVRKRSIGDRILRRTASAPAKGRKKSKMGFQEMVEIKDSVSEATRDQDGVLRRTTRSLQARPVSMPVDRNLLGALSLPVSETAKDIEGKENSLAEDKDGRRKGKASIKDPHFLNFNKKLSSSSSALLHKDTSQGDTIVSTAHMSVTGEQLGMSSPRGGRTTSNATSNCQENPCPSKSLSPKQHLAPDPVVNPTQDLHGVKIKEKGNPEDFVEGKSILSGSVLSHSNLEIKNLEGNRGKGRAATSFSLSDVSMLCSDIPDLHSTAILQESVISHLIDNVTLTNENEPGSSISALIGQFDEX

SEQ ID NO: 12912 - protein, 793 aa, Homo sapiens
MMSLRRDLYLLLLSYSDKKDHLTVEELAQFLKVEQKMNNVTTDYCLDIIKKFEVSEENKVKNVLGIEGFTNFMRSPACDIFNPLHHEVYQDMDQPLCNYYIASSHNTYLTGDQLLSQSKVDMYARVLQEGCRCVEVDCWDGPDGEPVVHHGYTLTSKILFRDVVETINKHAFVKNEFPVILSIENHCSIQQQRKIAQYLKGIFGDKLDLSSVDTGECKQLPSPQSLKGKILVKGKKLPYHLGDDAEEGEVSDEDSADEIEDECKFKLHYSNGTTEHQVESFIRKKLESLLKESQIRDKEDPDSFTVRALLKATHEGLNAHLKQSPDVKESGKKSHGRSLMTNFGKHKKTTKSRSKSYSTDDEEDTQQSTGKEGGQLYRLGRRRKTMKLCRELSDLVVYTNSVAAQDIVDDGTTGNVLSFSETRAHQVVQQKSEQFMIYNQKQLTRIYPSAYRIDSSNFNPLPYWNAGCQLVALNYQSEGRMMQLNRAKFKANGNCGYVLKPQQMCKGTFNPFSGDPLPANPKKQLILKVISGQQLPKPPDSMFGDRGEIIDPFVEVEIIGLPVDCCKDQTRVVDDNGFNPVWEETLTFTVHMPEIALVRFLVWDHDPIGRDFVGQRTVTFSSLVPGYRHVYLEGLTEASIFVHITINEIYGKWSPLILNPSYTILHFLGATKNRQLQGLKGLFNKNPRHSSSENNSHYVRKRSIGDRILRRTASAPAKGRKKSKMGFQEMVEIKDSVSEATRDQDGVLRRTTRSLQARPVSMPVDRNLLGALSLPVSETAKDIEGKENSLVQI

SEQ ID NO: 12913 - protein, 368 aa, Homo sapiens
MRLLSRKNSSQARDIFAAVTQVLGRSPVDFWGAELLAGQAEGAFGWITVNYGLGTLVKYSFTGEWIQPPEEMLVGALDMGGASTQITFVPGGPILDKSTQADFRLYGSDYSVYTHSYLCFGRDQMLSRLLVGLVQSRPAALLRHPCYLSGYQTTLALGPLYESPCVHATPPLSLPQNLTVEGTGNPGACVSAIRELFNFSSCQGQEDCAFDGVYQPPLRGQFYAFSNFYYTFHFLNLTSRQPLSTVNATIWEFCQRPWKLVEASYPGQDRWLRDYCASGLYILTLLHEGYGFSEETWPSLEFRKQAGGVDIGWTLGYMLNLTGMIPADAPAQWRAESYGVWVAKVVFMVLALVAVVGAALVQLFWLQD

SEQ ID NO: 12914 - protein, 617 aa, Homo sapiens
MPALSRWASLPGPSMREAAFMYSTAVAIFLVILVAALQGSAPRESPLPYHIPLDPEGSLELSWNVSYTQEAIHFQLLVRRLKAGVLFGMSDRGELENADLVVLWTDGDTAYFADAWSDQKGQIHLDPQQDYQLLQVQRTPEGLTLLFKRPFGTCDPKDYLIEDGTVHLVYGILEEPFRSLEAINGSGLQMGLQRVQLLKPNIPEPELPSDACTMEVQAPNIQIPSQETTYWCYIKELPKGFSRHHIIKYEPIVTKGNEALVHHMEVFQCAPEMDSVPHFSGPCDSKMKPDRLNYCRHVLAAWALGAKAFYYPEEAGLAFGGPGSSRYLRLEVHYHNPLVIEGRNDSSGIRLYYTAKLRRFNAGIMELGLVYTPVMAIPPRETAFILTGYCTDKCTQLALPPSGIHIFASQLHTHLTGRKVVTVLVRDGREWEIVNQDNHYSPHFQEIRMLKKVVSVHPGDVLITSCTYNTEDRELATVGGFGILEEMCVNYVHYYPQTQLELCKSAVDAGFLQKYFHLINRFNNEDVCTCPQASVSQQFTSVPWNSFNRDVLKALYSFAPISMHCNKSSAVRFQGEWNLQPLPKVISTLEEPTPQCPTSQGRSPAGPTVVSIGGGKG

SEQ ID NO: 12915 - protein, 274 aa, Homo sapiens
MSNLSEAVQDADLLVFVIPHQFIHRICDEITGRVPKKALGITLIKGIDEGPEGLKLISDIIREKMGIDISVLMGANIANEVAAEKFCETTIGSKVMENGLLFKELLQTPNFRITVVDDADTVELCGALKNIVAVGAGFCDGLRCGDNTKAAVIRLGLMEMIAFARIFCKGQVSTATFLESCGVADLITTCYGGRNRRVAEAFARTGKTIEELEKEMLNGQKLQGPQTSAEVYRILKQKGLLDKFPLFTAVYQICYESRPVQEMLSCLQSHPEHT

SEQ ID NO: 12916 - protein, 351 aa, Homo sapiens
MAAAPLKVCIVGSGNWGSAVAKIIGNNVKKLQKFASTVKMWVFEETVNGRKLTDIINNDHENVKYLPGHKLPENVVAMSNLSEAVQDADLLVFVIPHQFIHRICDEITGRVPKKALGITLIKGIDEGPEGLKLISDIIREKMGIDISVLMGANIANEVAAEKFCETTIGSKVMENGLLFKELLQTPNFRITVVDDADTVELCGALKNIVAVGAGFCDGLRCGDNTKAAVIRLGLMEMIAFARIFCKGQVSTATFLESCGVADLITTCYGGRNRRVAEAFARTGKTIEELEKEMLNGQKLQGPQTSAEVYRILKQKGLLDKFPLFTAVYQICYESRPVQEMLSCLQSHPEHT

SEQ ID NO: 12917 - protein, 826 aa, Homo sapiens
MAEPSAPESKHKSSLNSSPWSGLMALGNSRHGHHGPGAQCAHKAAGGAAPPKPAPAGLSGGLSQPAGWQSLLSFTILFLAWLAGFSSRLFAVIRFESIIHEFDPWFNYRSTHHLASHGFYEFLNWFDERAWYPLGRIVGGTVYPGLMITAGLIHWILNTLNITVHIRDVCVFLAPTFSGLTSISTFLLTRELWNQGAGLLAACFIAIVPGYISRSVAGSFDNEGIAIFALQFTYYLWVKSVKTGSVFWTMCCCLSYFYMVSAWGGYVFIINLIPLHVFVLLLMQRYSKRVYIAYSTFYIVGLILSMQIPFVGFQPIRTSEHMAAAGVFALLQAYAFLQYLRDRLTKQEFQTLFFLGVSLAAGAVFLSVIYLTYTGYIAPWSGRFYSLWDTGYAKIHIPIIASVSEHQPTTWVSFFFDLHILVCTFPAGLWFCIKNINDERVFVALYAISAVYFAGVMVRLMLTLTPVVCMLSAIAFSNVFEHYLGDDMKRENPPVEDSSDEDDKRNQGNLYDKAGKVRKHATEQEKTEEGLGPNIKSIVTMLMLMLLMMFAVHCTWVTSNAYSSPSVVLASYNHDGTRNILDDFREAYFWLRQNTDEHARVMSWWDYGYQIAGMANRTTLVDNNTWNNSHIALVGKAMSSNETAAYKIMRTLDVDYVLVIFGGVIGYSGDDINKFLWMVRIAEGEHPKDIRESDYFTPQGEFRVDKAGSPTLLNCLMYKMSYYRFGEMQLDFRTPPGFDRTRNAEIGNKDIKFKHLEEAFTSEHWLVRIYKVKAPDNRETLDHKPRVTNIFPKQKYLSKKTTKRKRGYIKNKLVFKKGKKISKKTV

SEQ ID NO: 12918 - protein, 512 aa, Homo sapiens
MATANGAVENGQPDRKPPALPRPIRNLEVKFTKIFINNEWHESKSGKKFATCNPSTREQICEVEEGDKPDVDKAVEAAQVAFQRGSPWRRLDALSRGRLLHQLADLVERDRATLAALETMDTGKPFLHAFFIDLEGCIRTLRYFAGWADKIQGKTIPTDDNVVCFTRHEPIGVCGAITPWNFPLLMLVWKLAPALCCGNTMVLKPAEQTPLTALYLGSLIKEAGFPPGVVNIVPGFGPTVGAAISSHPQINKIAFTGSTEVGKLVKEAASRSNLKRVTLELGGKNPCIVCADADLDLAVECAHQGVFFNQGQCCTAASRVFVEEQVYSEFVRRSVEYAKKRPVGDPFDVKTEQGPQIDQKQFDKILELIESGKKEGAKLECGGSAMEDKGLFIKPTVFSEVTDNMRIAKEEIFGPVQPILKFKSIEEVIKRANSTDYGLTAAVFTKNLDKALKLASALESGTVWINCYNALYAQAPFGGFKMSGNGRELGEYALAEYTEVKTVTIKLGDKNP

SEQ ID NO: 12919 - protein, 512 aa, Homo sapiens; identical to SEQ ID NO: 12918

SEQ ID NO: 12920 - protein, 690 aa, Homo sapiens
MFCTKLKDLKITGECPFSLLAPGQVPNESSEEAAGSSESCKATVPICQDIPEKNIQESLPQRKTSRSRVYLHTLAESICKLIFPEFERLNVALQRTLAKHKIKESRKSLEREDFEKTIAEQAVAAGVPVEVIKESLGEEVFKICYEEDENILGVVGGTLKDFLNSFSTLLKQSSHCQEAGKRGRLEDASILCLDKEDDFLHVYYFFPKRTTSLILPGIIKAAAHVLYETEVEVSLMPPCFHNDCSEFVNQPYLLYSVHMKSTKPSLSPSKPQSSLVIPTSLFCKTFPFHFMFDKDMTILQFGNGIRRLMNRRDFQGKPNFEEYFEILTPKINQTFSGIMTMLNMQFVVRVRRWDNSVKKSSRVMDLKGQMIYIVESSAILFLGSPCVDRLEDFTGRGLYLSDIPIHNALRDVVLIGEQARAQDGLKKRLGKLKATLEQAHQALEEEKKKTVDLLCSIFPCEVAQQLWQGQVVQAKKFSNVTMLFSDIVGFTAICSQCSPLQVITMLNALYTRFDQQCGELDVYKVETIGDAYCVAGGLHKESDTHAVQIALMALKMMELSDEVMSPHGEPIKMRIGLHSGSVFAGVVGVKMPRYCLFGNNVTLANKFESCSVPRKINVSPTTYRLLKDCPGFVFTPRSREELPPNFPSEIPGICHFLDAYQQGTNSKPCFQKKDVEDGNANFLGKASGID

SEQ ID NO: 12921 - protein, 690 aa, Homo sapiens; identical to SEQ ID NO: 12920

SEQ ID NO: 12922 - protein, 619 aa, Homo sapiens
MYGFVNHALELLVIRNYGPEVWEDIKKEAQLDEEGQFLVRIIYDDSKTYDLVAAASKVLNLNAGEILQMFGKMFFVFCQESGYDTILRVLGSNVREFLQNLDALHDHLATIYPGMRAPSFRCTDAEKGKGLILHYYSEREGLQDIVIGIIKTVAQQIHGTEIDMKVIQQRNEECDHTQFLIEEKESKEEDFYEDLDRFEENGTQESRISPYTFCKAFPFHIIFDRDLVVTQCGNAIYRVLPQLQPGNCSLLSVFSLVRPHIDISFHGILSHINTVFVLRSKEGLLDVEKLECEDELTGTEISCLRLKGQMIYLPEADSILFLCSPSVMNLDDLTRRGLYLSDIPLHDATRDLVLLGEQFREEYKLTQELEILTDRLQLTLRALEDEKKKTDTLLYSVLPPSVANELRHKRPVPAKRYDNVTILFSGIVGFNAFCSKHASGEGAMKIVNLLNDLYTRFDTLTDSRKNPFVYKVETVGDKYMTVSGLPEPCIHHARSICHLALDMMEIAGQVQVDGESVQITIGIHTGEVVTGVIGQRMPRYCLFGNTVNLTSRTETTGEKGKINVSEYTYRCLMSPENSDPQFHLEHRGPVSMKGKKEPMQVWFLSRKNTGTEETKQDDD

SEQ ID NO: 12923 - protein, 619 aa, Homo sapiens [sequence omitted]

SEQ ID NO: 12924 - protein, 245 aa, Homo sapiens
MADESETAVKPPAPPLPQMMEGNGNGHEHCSDCENEEDNSYNRGYWHRSLNPRKLIEVKFSHLSRNMTMQRTMKLYRLPETPKTAGLRPMETKDIPVVHQLLTRYLKQFHLTPVMSQEEVEHWFYPQENIIDTFVVENANGEVTDFLSFYTLPSTIMNHPTHKSLKAAYSFYNVHTQTPLLDLMSDALVLAKMKGFDVFNALDLMENKTFLEKLKFGIGDGNLQYYLYNWKCPSMGAEKVGLVLQ

SEQ ID NO: 12925 - protein, 250 aa, Homo sapiens
MADESETAVKPPAPPLPQMMEGNGNGHEHCSDCENEEDNSYNRGGLSPANDTGAKKKKKKQKKKKEKGSETDSAQDQPVKMNSLPAERIQEIQKAIELFSVGQGPAKTMEEASKRSYQFWDTQPVPKLGEVVNTHGPVEPDKDNIRQEPYTLPQGFTWDALDLGDRGVLKELYTLLNENYVEDDDNMFRFDYSPEFLLWALRPPGWLPQWHCGVRVVSSRKLVGFISAIPANIHIYDTEKKMVEINFLCV

SEQ ID NO: 12926 - protein, 416 aa, Homo sapiens
MNSLPAERIQEIQKAIELFSVGQGPAKTMEEASKRSYQFWDTQPVPKLGEVVNTHGPVEPDKDNIRQEPYTLPQGFTWDALDLGDRGVLKELYTLLNENYVEDDDNMFRFDYSPEFLLWALRPPGWLPQWHCGVRVVSSRKLVGFISAIPANIHIYDTEKKMVEINFLCVHKKLRSKRVAPVLIREITRRVHLEGIFQAVYTAGVVLPKPVGTCRYWHRSLNPRKLIEVKFSHLSRNMTMQRTMKLYRLPETPKTAGLRPMETKDIPVVHQLLTRYLKQFHLTPVMSQEEVEHWFYPQENIIDTFVVENANGEVTDFLSFYTLPSTIMNHPTHKSLKAAYSFYNVHTQTPLLDLMSDALVLAKMKGFDVFNALDLMENKTFLEKLKFGIGDGNLQYYLYNWKCPSMGAEKVGLVLQ

SEQ ID NO: 12927 - protein, 496 aa, Homo sapiens
MADESETAVKPPAPPLPQMMEGNGNGHEHCSDCENEEDNSYNRGGLSPANDTGAKKKKKKQKKKKEKGSETDSAQDQPVKMNSLPAERIQEIQKAIELFSVGQGPAKTMEEASKRSYQFWDTQPVPKLGEVVNTHGPVEPDKDNIRQEPYTLPQGFTWDALDLGDRGVLKELYTLLNENYVEDDDNMFRFDYSPEFLLWALRPPGWLPQWHCGVRVVSSRKLVGFISAIPANIHIYDTEKKMVEINFLCVHKKLRSKRVAPVLIREITRRVHLEGIFQAVYTAGVVLPKPVGTCRYWHRSLNPRKLIEVKFSHLSRNMTMQRTMKLYRLPEASAAPGAGLRPMETKDIPVVHQLLTRYLKQFHLTPVMSQEEVEHWFYPQENIIDTFVVENANGEVTDFLSFYTLPSTIMNHPTHKSLKAAYSFYNVHTQTPLLDLMSDALVLAKMKGFDVFNALDLMENKTFLEKLKFGIGDGNLQYYLYNWKCPSMGAEKVGDT

SEQ ID NO: 12928 - protein, 496 aa, Homo sapiens
MADESETAVKPPAPPLPQMMEGNGNGHEHCSDCENEEDNSYNRGGLSPANDTGAKKKKKKQKKKKEKGSETDSAQDQPVKMNSLPAERIQEIQKAIELFSVGQGPAKTMEEASKRSYQFWDTQPVPKLGEVVNTHGPVEPDKDNIRQEPYTLPQGFTWDALDLGDRGVLKELYTLLNENYVEDDDNMFRFDYSPEFLLWALRPPGWLPQWHCGVRVVSSRKLVGFISAIPANIHIYDTEKKMVEINFLCVHKKLRSKRVAPVLIREITRRVHLEGIFQAVYTAGVVLPKPVGTCRYWHRSLNPRKLIEVKFSHLSRNMTMQRTMKLYRLPETPKTAGLRPMETKDIPVVHQLLTRYLKQFHLTPVMSQEEVEHWFYPQENIIDTFVVENANGEVTDFLSFYTLPSTIMNHPTHKSLKAAYSFYNVHTQTPLLDLMSDALVLAKMKGFDVFNALDLMENKTFLEKLKFGIGDGNLQYYLYNWKCPSMGAEKVGLVLQ

SEQ ID NO: 12929 - protein, 528 aa, Homo sapiens
MGLTEDEDVRAMLRGSRLRKIRSRTWHKERLYRLQEDGLSVWFQRRIPRAPSQHIFFVQHIEAVREGHQSEGLRRFGGAFAPARCLTIAFKGRRKNLDLAAPTAEEAQRWVRGLTKLRARLDAMSQRERLDHWIHSYLHRADSNQDSKMSFKEIKSLLRMVNVDMNDMYAYLLFKECDHSNNDRLEGAEIEEFLRRLLKRPELEEIFHQYSGEDRVLSAPELLEFLEDQGEEGATLARAQQLIQTYELNETAKQHELMTLDGFMMYLLSPEGAALDNTHTCVFQDMNQPLAHYFISSSHNTYLTDSQIGGPSSTEAYVRAFAQGCRCVELDCWEGPGGEPVIYHGHTLTSKILFRDVVQAVRDHAFTLSPYPVILSLENHCGLEQQAAMARHLCTILGDMLVTQALDSPNPEELPSPEQLKGRVLVKGKKLPAARSEDGRALSDREEEEEDDEEEEEEVEAAAQRRLAKQISPELSALAVYCHATRLRPCTLPPTPHNPARSAPSASAKPRNSFGRQGTALSGTMPAS

SEQ ID NO: 12930 - protein, 521 aa, Homo sapiens [sequence omitted]

SEQ ID NO: 12931 - protein, 528 aa, Homo sapiens; identical to SEQ ID NO: 12929

SEQ ID NO: 12932 - protein, 531 aa, Homo sapiens [sequence omitted]

SEQ ID NO: 12933 - protein, 531 aa, Homo sapiens [sequence omitted]

SEQ ID NO: 12934 - protein, 528 aa, Homo sapiens; identical to SEQ ID NO: 12929

SEQ ID NO: 12935 - protein, 465 aa, Homo sapiens
MEEVVLKATDVNEKVCEWRPPEQLKQLLDLEMRDSGEPPHKLLELCRDVIHYSVKTNHPRFFNQLYAGLDYYSLVARFMTEALNPSVYTYEVSPVFLLVEEAVLKKMIEFIGWKEGDGIFNPGGSVSNMYAMNLARYKYCPDIKEKGLSGSPRLILFTSAECHYSMKKAASFLGIGTENVCFVETDGRGKMIPEELEKQVWQARKEGAAPFLVCATSGTTVLGAFDPLDEIADICERHSLWLHVDASWGGSALMSRKHRKLLHGIHRADSVAWNPHKMLMAGIQCCALLVKDKSDLLKKCYSAKASYLFQQDKFYDVSYDTGDKSIQCSRRPDAFKFWMTWKALGTLGLEERVNRALALSRYLVDEIKKREGFKLLMEPEYANICFWYIPPSLREMEEGPEFWAKLNLVAPAIKERMMKKGSLMLGYQPHRGKVNFFRQVVISPQVSREDMDFLLDEIDLLGKDM

SEQ ID NO: 12936 - protein, 412 aa, Homo sapiens
MGLHLRPYRVGLLPDGLLFLLLLLMLLADPALPAGRHPPVVLVPGDLGNQLEAKLDKPTVVHYLCSKKTESYFTIWLNLELLLPVIIDCWIDNIRLVYNKTSRATQFPDGVDVRVPGFGKTFSLEFLDPSKSSVGSYFHTMVESLVGWGYTRGEDVRGAPYDWRRAPNENGPYFLALREMIEEMYQLYGGPVVLVAHSMGNMYTLYFLQRQPQAWKDKYIRAFVSLGAPWGGVAKTLRVLASGDNNRIPVIGPLKIREQQRSAVSTSWLLPYNYTWSPEKVFVQTPTINYTLRDYRKFFQDIGFEDGWLMRQDTEGLVEATMPPGVQLHCLYGTGVPTPDSFYYESFPDRDPKICFGDGDGTVNLKSALQCQAWQSRQEHQVLLQELPGSEHIEMLANATTLAYLKRVLLGP

SEQ ID NO: 12937 - protein, 339 aa, Homo sapiens
MAAAVAAAPGALGSLHAGGARLVAACSAWLCPGLRLPGSLAGRRAGPAIWAQGWVPAAGGPAPKRGYSSEMKTEDELRVRHLEEENRGIVVLGINRAYGKNSLSKNLIKMLSKAVDALKSDKKVRTIIIRSEVPGIFCAGADLKERAKMSSSEVGPFVSKIRAVINDIANLPVPTIAAIDGLALGGGLELALACDIRVAASSAKMGLVETKLAIIPGGGGTQRLPRAIGMSLAKELIFSARVLDGKEAKAVGLISHVLEQNQEGDAAYRKALDLAREFLPQGPVAMRVAKLAINQGMEVDLVTGLAIEEACYAQTIPTKDRLEGLLAFKEKRPPRYKGE

SEQ ID NO: 12938 - protein, 310 aa, Homo sapiens
MAAAVAAAPGALGSLHAGGARLVAACSAWLCPGLRLPGSLAGRRAGPAIWAQGWVPAAGGPAPKRGYSSEMKTEDELRVRHLEEENRGIVVLGINRAYGKNSLSKNLIKMLSKAVDALKSDKKVRTIIIRSEVPGIFCAANLPVPTIAAIDGLALGGGLELALACDIRVAASSAKMGLVETKLAIIPGGGGTQRLPRAIGMSLAKELIFSARVLDGKEAKAVGLISHVLEQNQEGDAAYRKALDLAREFLPQGPVAMRVAKLAINQGMEVDLVTGLAIEEACYAQTIPTKDRLEGLLAFKEKRPPRYKGE

SEQ ID NO: 12939 - protein, 215 aa, Homo sapiens [sequence omitted]

SEQ ID NO: 12940 - protein, 347 aa, Homo sapiens
MADAPAEQPGGSRSQNLEPGAGLWAGLSGAPDADASCVPEAPAGPGAMAAVAALQLGLRAAGLGRAPASAAWRSVLRVSPRPGVAWRPSRCGSSAAEASATKAEDDSFLQWVLLLIPVTAFGLGTWQVQRRKWKLNLIAELESRVLAEPVPLPADPMELKNLEYRPVKVRGCFDHSKELYMMPRTMVDPVREAREGGLISSSTQSGAYVVTPFHCTDLGVTILVNRGFVPRKKVNPETRQKGQIEGEVDLIGMVRLTETRQPFVPENNPERNHWHYRDLEAMARITGAEPIFIDANFQSTVPGGPIGGQTRVTLRNEHLQYIVTWYGLSAATSYLWFKKFLRGTPGV

SEQ ID NO: 12941 - protein, 256 aa, Homo sapiens
MSELPGDVRAFLREHPSLRLQTDARKVRCILTGHELPCRLPELQVYTRGKKYQRLVRASPAFDYAEFEPHIVPSTKNPHQLFCKLTLRHINKCPEHVLRHTQGRRYQRALCKYEECQKQGVEYVPACLVHRRRRREDQMDGDGPRPREAFWEPTSSDEGGAASDDSMTDLYPPELFTRKDLGSTEDGDGTDDFLTDKEDEKAKPPREKATDEGRRETTVYRGLVQKRGKKQLGSLKKKFKSHHRKPKSFSSCKQPG

SEQ ID NO: 12942 - protein, 256 aa, Homo sapiens; identical to SEQ ID NO: 12941

SEQ ID NO: 12943 - protein, 256 aa, Homo sapiens; identical to SEQ ID NO: 12941

SEQ ID NO: 12944 - protein, 422 aa, Homo sapiens
MGKAKVPASKRAPSSPVAKPGPVKTLTRKKNKKKKRFWKSKAREVSKKPASGPGAVVRPPKAPEDFSQNWKALQEWLLKQKSQAPEKPLVISQMGSKKKPKIIQQNKKETSPQVKGEEMPAGKDQEASRGSVPSGSKMDRRAPVPRTKASGTEHNKKGTKERTNGDIVPERGDIEHKKRKAKEAAPAPPTEEDIWFDDVDPADIEAAIGPEAAKIARKQLGQSEGSVSLSLVKEQAFGGLTRALALDCEMVGVGPKGEESMAARVSIVNQYGKCVYDKYVKPTEPVTDYRTAVSGIRPENLKQGEELEVVQKEVAEMLKGRILVGHALHNDLKVLFLDHPKKKIRDTQKYKPFKSQVKSGRPSLRLLSEKILGLQVQQAEHCSIQDAQAAMRLYVMVKKEWESMARDRRPLLTAPDHCSDDA

SEQ ID NO: 12945 - protein, 391 aa, Homo sapiens
MAEVLRTLAGKPKCHALRPMILFLIMLVLVLFGYGVLSPRSLMPGSLERGFCMAVREPDHLQRVSLPRMVYPQPKVLTPCRKDVLVVTPWLAPIVWEGTFNIDILNEQFRLQNTTIGLTVFAIKKYVAFLKLFLETAEKHFMVGHRVHYYVFTDQPAAVPRVTLGTGRQLSVLEVRAYKRWQDVSMRRMEMISDFCERRFLSEVDYLVCVDVDMEFRDHVGVEILTPLFGTLHPGFYGSSREAFTYERRPQSQAYIPKDEGDFYYLGGFFGGSVQEVQRLTRACHQAMMVDQANGIEAVWHDESHLNKYLLRHKPTKVLSPEYLWDQQLLGWPAVLRKLRFTAVPKNHQAVPEPVSGCQGLWEGCRQPRPPPALGFSRTGKLCFLCPSCCE

SEQ ID NO: 12946 - protein, 391 aa, Homo sapiens; identical to SEQ ID NO: 12945

SEQ ID NO: 12947 - protein, 485 aa, Homo sapiens
MRSRVAVRACHKVCRCLLSGFGGRVDAGQPELLTERSSPKGGHVKSHAELEGNGEHPEAPGSGEGSEALLEICQRRHFLSGSKQQLSRDSLLSGCHPGFGPLGVELRKNLAAEWWTSVVVFREQVFPVDALHHKPGPLLPGDSAFRLVSAETLREILQDKELSKEQLVAFLENVLKTSGKLRENLLHGALEHYVNCLDLVNKRLPYGLAQIGVCFHPVFDTKQIRNGVKSIGEKTEASLVWFTPPRTSNQWLDFWLRHRLQWWRKFAMSPSNFSSSDCQDEEGRKGNKLYYNFPWGKELIETLWNLGDHELLHMYPGNVSKLHGRDGRKNVVPCVLSVNGDLDRGMLAYLYDSFQLTENSFTRKKNLHRKVLKLHPCLAPIKVALDVGRGPTLELRQVCQGLFNELLENGISVWPGYLETMQSSLEQLYSKYDEMSILFTVLVTETTLENGLIHLRSRDTTMKEMMHISKLKDFLIKYISSAKNV

SEQ ID NO: 12948 - protein, 748 aa, Homo sapiens
MSNPGGRRNGPVKLRLTVLCAKNLVKKDFFRLPDPFAKVVVDGSGQCHSTDTVKNTLDPKWNQHYDLYIGKSDSVTISVWNHKKIHKKQGAGFLGCVRLLSNAINRLKDTGYQRLDLCKLGPNDNDTVRGQIVVSLQSRDRIGTGGQVVDCSRLFDNDLPDGWEERRTASGRIQYLNHITRTTQWERPTRPASEYSSPGRPLSCFVDENTPISGTNGATCGQSSDPRLAERRVRSQRHRNYMSRTHLHTPPDLPEGYEQRTTQQGQVYFLHTQTGVSTWHDPRVPRDLSNINCEELGPLPPGWEIRNTATGRVYFVDHNNRTTQFTDPRLSANLHLVLNRQNQLKDQQQQQVVSLCPDDTECLTVPRYKRDLVQKLKILRQELSQQQPQAGHCRIEVSREEIFEESYRQVMKMRPKDLWKRLMIKFRGEEGLDYGGVAREWLYLLSHEMLNPYYGLFQYSRDDIYTLQINPDSAVNPEHLSYFHFVGRIMGMAVFHGHYIDGGFTLPFYKQLLGKSITLDDMELVDPDLHNSLVWILENDITGVLDHTFCVEHNAYGEIIQHELKPNGKSIPVNEENKKEYVRLYVNWRFLRGIEAQFLALQKGFNEVIPQHLLKTFDEKELELIICGLGKIDVNDWKVNTRLKHCTPDSNIVKWFWKAVEFFDEERRARLLQFVTGSSRVPLQGFKALQGAAGPRLFTIHQIDACTNNLPKAHTCFNRIDIPPYESYEKLYEKLLTAIEETCGFAVE

SEQ ID NO: 12949 - protein, 198 aa, Homo sapiens
MSSRGHSTLPRTLMAPRMISEGDIGGIAQITSSLFLGRGSVASNRHLLQARGITCIVNATIEIPNFNWPQFEYVKVPLADMPHAPIGLYFDTVADKIHSVSRKHGATLVHCAAGVSRSATLCIAYLMKFHNVCLLEAYNWVKARRPVIRPNVGFWRQLIDYERQLFGKSTVKMVQTPYGIVPDVYEKESRHLMPYWGI

SEQ ID NO: 12950 - protein, 198 aa, Homo sapiens; identical to SEQ ID NO: 12949

SEQ ID NO: 12951 - protein, 443 aa, Homo sapiens
MDRLGSFSNDPSDKPPCRGCSSYLMEPYIKCAECGPPPFFLCLQCFTRGFEYKKHQSDHTYEIMTSDFPVLDPSWTAQEEMALLEAVMDCGFGNWQDVANQMCTKTKEECEKHYMKHFINNPLFASTLLNLKQAEEAKTADTAIPFHSTDDPPRPTFDSLLSRDMAGYMPARADFIEEFDNYAEWDLRDIDFVEDDSDILHALKMAVVDIYHSRLKERQRRKKIIRDHGLINLRKFQLMERRYPKEVQDLYETMRRFARIVGPVEHDKFIESHALEFELRREIKRLQEYRTAGITNFCSARTYDHLKKTREEERLKRTMLSEVLQYIQDSSACQQWLRRQADIDSGLSPSIPMASNSGRRSAPPLNLTGLPGTEKLNEKEKELCQMVRLVPGAYLEYKSALLNECNKQGGLRLAQARALIKIDVNKTRKIYDFLIREGYITKG

SEQ ID NO: 12952 - protein, 443 aa, Homo sapiens; identical to SEQ ID NO: 12951

SEQ ID NO: 12953 - protein, 443 aa, Homo sapiens; identical to SEQ ID NO: 12951

SEQ ID NO: 12954 - protein, 461 aa, Homo sapiens
MDRLGSFSNDPSDKPPCRGCSSYLMEPYIKCAECGPPPFFLCLQCFTRGFEYKKHQSDHTYEIMTSDFPVLDPSWTAQEEMALLEAVMDCGFGNWQDVANQMCTKTKEECEKHYMKHFINNPLFASTLLNLKQAEEAKTADTAIPFHSTDDPPRPTFDSLLSRDMAGYMPARADFIEEFDNYAEWDLRDIDFVEDDSDILHALKMAVVDIYHSRLKERQRRKKIIRDHGLINLRKFQLMERRYPKEVQDLYETMRRFARIVGPVEHDKFIESHALEFELRREIKRLQEYRTAGITNFCSARTYDHLKKTREEERLKRTMLSEVLQYIQDSSACQQWLRRQADIDSGLSPSIPMASNSGRRSAPPLNLTGLPGTEKLNEKEKELCQMVRLVPGAYLEYKSALLNECNKQGGLRLAQARALIKIDVNKTRKIYDFLIREGYITKELIKMFCYLICGCVKYSGN

SEQ ID NO: 12955 - protein, 599 aa, Homo sapiens
MDVHDLFRRLGAGAKFDTRRFSADAARFQIGKRKYDFDSSEVLQGLDFFGNKKSVPGVCGASQTHQKPQNGEKKEESLTERKREQSKKKRKTMTSEIASQEEGATIQWMSSVEAKIEDKKVQRESKLTSGKLENLRKEKINFLRNKHKIHVQGTDLPDPIATFQQLDQEYKINSRLLQNILDAGFQMPTPIQMQAIPVMLHGRELLASAPTGSGKTLAFSIPILMQLKQPANKGFRALIISPTRELASQIHRELIKISEGTGFRIHMIHKAAVAAKKFGPKSSKKFDILVTTPNRLIYLLKQDPPGIDLASVEWLVVDESDKLFEDGKTGFRDQLASIFLACTSHKVRRAMFSATFAYDVEQWCKLNLDNVISVSIGARNSAVETVEQELLFVGSETGKLLAVRELVKKGFNPPVLVFVQSIERAKELFHELIYEGINVDVIHAERTQQQRDNTVHSFRAGKIWVLICTALLARGIDFKGVNLVINYDFPTSSVEYIHRIGRTGRAGNKGKAITFFTEDDKPLLRSVANVIQQAGCPVPEYIKGFQKLLSKQKKKMIKKPLERESISTTPKCFLEKAKDKQKKVTGQNSKKKVALEDKS

SEQ ID NO: 12956 - protein, 381 aa, Homo sapiens [sequence omitted]

SEQ ID NO: 12957 - protein, 416 aa, Homo sapiens
MSSNCTSTTAVAVAPLSASKTKTKKKHFVCQKVKLFRASEPILSVLMWGVNHTINELSNVPVPVMLMPDDFKAYSKIKVDNHLFNKENLPSRFKFKEYCPMVFRNLRERFGIDDQDYQNSVTRSAPINSDSQGRCGTRFLTTYDRRFVIKTVSSEDVAEMHNILKKYHQFIVECHGNTLLPQFLGMYRLTVDGVETYMVVTRNVFSHRLTVHRKYDLKGSTVAREASDKEKAKDLPTFKDNDFLNEGQKLHVGEESKKNFLEKLKRDVEFLAQLKIMDYSLLVGIHDVDRAEQEEMEVEERAEDEECENDGVGGNLLCSYGTPPDSPGNLLSFPRFFGPGEFDPSVDVYAMKSHESSPKKEVYFMAIIDILTPYDTKKKAAHAAKTVKHGAGAEISTVNPEQYSKRFNEFMSNILT

SEQ ID NO: 12958 - protein, 437 aa, Homo sapiens
MTTSTLQKAIDLVTKATEEDKAKNYEEALRLYQHAVEYFLHAIKYEAHSDKAKESIRAKCVQYLDRAEKLKDYLRSKEKHGKKPVKENQSEGKGSDSDSEGDNPEKKKLQEQLMGAVVMEKPNIRWNDVAGLEGAKEALKEAVILPIKFPHLFTGKRTPWRGILLFGPPGTGKSYLAKAVATEANNSTFFSVSSSDLMSKWLGESEKLVKNLFELARQHKPSIIFIDEVDSLCGSRNENESEAARRIKTEFLVQMQGVGNNNDGTLVLGATNIPWVLDSAIRRRFEKRIYIPLPEEAARAQMFRLHLGSTPHNLTDANIHELARKTEGYSGADISIIVRDSLMQPVRKVQSATHFKKVCGPSRTNPSMMIDDLLTPCSPGDPGAMEMTWMDVPGDKLLEPVVCMSDMLRSLATTRPTVNADDLLKVKKFSEDFGQES

SEQ ID NO: 12959 - protein, 364 aa, Homo sapiens
MTTSTLQKAIDLVTKATEEDKAKNYEEALRLYQHAVEYFLHAIKYEAHSDKAKESIRAKCVQYLDRAEKLKDYLRSKEKHGKKPVKENQSEGKGSDSDSEGDNPEKKKLQEQLMGAVVMEKPNIRWNDVAGLEGAKEALKEAVILPIKFPHLFTGKRTPWRGILLFGPPGTGKSYLAKAVATEANNSTFFSVSSSDLMSKWLGESEKLVKNLFELARQHKPSIIFIDEVDSLCGSRNENESEAARRIKTEFLVQMQGVGNNNDGTLVLGATNIPWVLDSAIRRRFEKRIYIPLPEEAARAQMFRLHLGSTPHNLTDANIHELARKTEGYSGADISIIVRDSLMQPVRKVQSATHFKKVSARGHC

SEQ ID NO: 12960 - protein, 437 aa, Homo sapiens; identical to SEQ ID NO: 12958

SEQ ID NO: 12961 - protein, 281 aa, Homo sapiens
MPVQLTTALRVVGTSLFALAVLGGILAAYVTGYQFIHTEKHYLSFGLYGAILGLHLLIQSLFAFLEHRRMRRAGQALKLPSPRRGSVALCIAAYQEDPDYLRKCLRSAQRISFPDLKVVMVVDGNRQEDAYMLDIFHEVLGGTEQAGFFVWRSNFHEAGEGETEASLQEGMDRVRDVVRASTFSCIMQKWGGKREVMYTAFKALGDSVDYIQVCDSDTVLDPACTIEMLRVLEEDPQVGGVGGDVQPPGKGMAVEDDQVQAAQVRATEAWSVHQRHVSREQ

SEQ ID NO: 12962 - protein, 553 aa, Homo sapiens
MPVQLTTALRVVGTSLFALAVLGGILAAYVTGYQFIHTEKHYLSFGLYGAILGLHLLIQSLFAFLEHRRMRRAGQALKLPSPRRGSVALCIAAYQEDPDYLRKCLRSAQRISFPDLKVVMVVDGNRQEDAYMLDIFHEVLGGTEQAGFFVWRSNFHEAGEGETEASLQEGMDRVRDVVRASTFSCIMQKWGGKREVMYTAFKALGDSVDYIQVCDSDTVLDPACTIEMLRVLEEDPQVGGVGGDVQILNKYDSWISFLSSVRYWMAFNVERACQSYFGCVQCISGPLGMYRNSLLQQFLEDWYHQKFLGSKCSFGDDRHLTNRVLSLGYRTKYTARSKCLTETPTKYLRWLNQQTRWSKSYFREWLYNSLWFHKHHLWMTYESVVTGFFPFFLIATVIQLFYRGRIWNILLFLLTVQLVGIIKATYACFLRGNAEMIFMSLYSLLYMSSLLPAKIFAIATINKSGWGTSGRKTIVVNFIGLIPVSIWVAVLLGGLAYTAYCQDLFSETELAFLVSGAILYGCYWVALLMLYLAIIARRCGKKPEQYSLAFAEV

SEQ ID NO: 12963 - protein, 274 aa, Homo sapiens
MVGRRALIVLAHSERTSFNYAMKEAAAAALKKKGWEVVESDLYAMNFNPIISRKDITGKLKDPANFQYPAESVLAYKEGHLSPDIVAEQKKLEAADLVIFQFPLQWFGVPAILKGWFERVFIGEFAYTYAAMYDKGPFRSKKAVLSITTGGSGSMYSLQGIHGDMNVILWPIQSGILHFCGFQVLEPQLTYSIGHTPADARIQILEGWKKRLENIWDETPLYFAPSSLFDLNFQAGFLMKKEVQDEEKNKKFGLSVGHHLGKSIPTDNQIKARK

SEQ ID NO: 12964 - protein, 253 aa, Homo sapiens
MKEAAAAALKKKGWEVVESDLYAMNFNPIISRKDITGKLKDPANFQYPAESVLAYKEGHLSPDIVAEQKKLEAADLVIFQFPLQWFGVPAILKGWFERVFIGEFAYTYAAMYDKGPFRSKKAVLSITTGGSGSMYSLQGIHGDMNVILWPIQSGILHFCGFQVLEPQLTYSIGHTPADARIQILEGWKKRLENIWDETPLYFAPSSLFDLNFQAGFLMKKEVQDEEKNKKFGLSVGHHLGKSIPTDNQIKARK

SEQ ID NO: 12965 - protein, 150 aa, Homo sapiens
MSGSMATAEASGSDGKGQEVETSVTYYRLEEVAKRNSLKELWLVIHGRVYDVTRFLNEHPGGEEVLLEQAGVDASESFEDVGHSSDAREMLKQYYIGDIHPSDLKPESGSKDPSKNDTCKSCWAYWILPIIGAVLLGFLYRYYTSESKSS

SEQ ID NO: 12966 - protein, 150 aa, Homo sapiens; identical to SEQ ID NO: 12965

SEQ ID NO: 12967 - protein, 152 aa, Homo sapiens
MSVSQDSRDHGPDGMEPGDVIESNWNEVDDSFDDMNLSESLLHGMYIYSSEKPSVIQQKVDWLTAKMHARDFTVSAMHGDMDQKERDVIRRSFILALAEQNYIHRISRGRWFDLKDADINMVTEEDKRTLRDIRTFYNTSIEEMPLDVADLI

SEQ ID NO: 12968 - protein, 248 aa, Homo sapiens
MELQYPPPPPSPRICRERSGGDNASMPVLSEDSGLHETLALLTSQLRPDSNHKEEMGFLRDVFSEKSLSYLMKIHEKLRYYERQSPTPVLHSAVALAEDVMEELQAASVHSDERELLQLLSTPHLRAVLMVHDTVAQKNFDPVLPPLPDNIDEDFDEESVKIVRLVKNKEPLGATIRRDEHSGAVVVARIMRGGAADRSGLVHVGDGSKEGSINQRPAPNQAGKRQRKPKWVVQMTQEKSKEGSPLGP

SEQ ID NO: 12969 - protein, 610 aa, Homo sapiens
MELQYPPPPPSPRICRERSGGDNASMPVLSEDSGLHETLALLTSQLRPDSNHKEEMGFLRDVFSEKSLSYLMKIHEKLRYYERQSPTPVLHSAVALAEDVMEELQAASVHSDERELLQLLSTPHLRAVLMVHDTVAQKNFDPVLPPLPDNIDEDFDEESVKIVRLVKNKEPLGATIRRDEHSGAVVVARIMRGGAADRSGLVHVGDELREVNGIAVLHKRPDEISQILAQSQGSITLKIIPATQEEDRLKESKVFMRALFHYNPREDRAIPCQEAGLPFQRRQVLEVVSQDDPTWWQAKRVGDTNLRAGLIPSKGFQERRLSYRRAAGTLPSPQSLRKPPYDQPCDKETCDCEGYLKGHYVAGLRRSFRLGCRERLGGSQEGKMSSGAESPELLTYEEVARYQHQPGERPRLVVLIGSLGARLHELKQKVVAENPQHFGVAVPHTTRPRKSHEKEGVEYHFVSKQAFEADLHHNKFLEHGEYKENLYGTSLEAIQAVMAKNKVCLVDVEPEALKQLRTSEFKPYIIFVKPAIQEKRKTPPMSPACEDTAAPFDEQQQEMAASAAFIDRHYGHLVDAVLVKEDLQGAYSQLKVVLEKLSKDTHWVPVSWVR

SEQ ID NO: 12970 - protein, 610 aa, Homo sapiens; identical to SEQ ID NO: 12969

SEQ ID NO: 12971 - protein, 585 aa, Homo sapiens
MPVLSEDSGLHETLALLTSQLRPDSNHKEEMGFLRDVFSEKSLSYLMKIHEKLRYYERQSPTPVLHSAVALAEDVMEELQAASVHSDERELLQLLSTPHLRAVLMVHDTVAQKNFDPVLPPLPDNIDEDFDEESVKIVRLVKNKEPLGATIRRDEHSGAVVVARIMRGGAADRSGLVHVGDELREVNGIAVLHKRPDEISQILAQSQGSITLKIIPATQEEDRLKESKVFMRALFHYNPREDRAIPCQEAGLPFQRRQVLEVVSQDDPTWWQAKRVGDTNLRAGLIPSKGFQERRLSYRRAAGTLPSPQSLRKPPYDQPCDKETCDCEGYLKGHYVAGLRRSFRLGCRERLGGSQEGKMSSGAESPELLTYEEVARYQHQPGERPRLVVLIGSLGARLHELKQKVVAENPQHFGVAVPHTTRPRKSHEKEGVEYHFVSKQAFEADLHHNKFLEHGEYKENLYGTSLEAIQAVMAKNKVCLVDVEPEALKQLRTSEFKPYIIFVKPAIQEKRKTPPMSPACEDTAAPFDEQQQEMAASAAFIDRHYGHLVDAVLVKEDLQGAYSQLKVVLEKLSKDTHWVPVSWVR

SEQ ID NO: 12972 - protein, 1055 aa, Homo sapiens
MSRATSVGDQLEAPARTIYLNQPHLNKFRDNQISTAKYSVLTFLPRFLYEQIRRAANAFFLFIALLQQIPDVSPTGRYTTLVPLIIILTIAGIKEIVEDFKRHKADNAVNKKKTIGRRNGFSCIKLSRKAEESYLRNTQWVFGIVVYTGHDTKLMQNSTKAPLKRSNVEKVTNVQILVLFGILLVMALVSSAGALYWNRSHGEKNWYIKKMDTTSDNFGYNLLTFIILYNNLIPISLLVTLEVVKYTQALFINWDTDMYYIGNDTPAMARTSNLNEELGQVKYLFSDKTGTLTCNIMNFKKCSIAGVTYGTWVKQKHREAEAEGQVEARGEVQACGEAEARGQMEACGQGRGSWGGRVCGAPCIQEFLTLLAVCHTVVPEKDGDNIIYQASSPDEAALVKGAKKLGFVFTARTPFSVIIEAMGQEQTFGILNVLEFSSDRKRMSVIVRTPSGRLRLYCKGADNVIFERLSKDSKYMEETLCHLEYFATEGLRTLCVAYADLSENEYEEWLKVYQEASTILKDRAQRLEECYEIIEKNLLLLGATAIEDRLQAGVPETIATLLKAEIKIWVLTGDKQETAINIGYSCRLVSQNMALILLKEDSLDATRAAITQHCTDLGNLLGKENDVALIIDGHTLKYALSFEVRRSFLDLALSCKAVICCRVSPLQKSEIVDVVKKRVKAITLAIGDGANDVGMIQTAHVGVGISGNEGMQATNNSDYAIAQFSYLEKLLLVHGAWSYNRVTKCILYCFYKNVVLYIIELWFAFVNGFSGQILFERWCIGLYNVIFTALPPFTLGIFERSCTQESMLRFPQLYKITQNGEGFNTKVFWGHCINALVHSLILFWFPMKALEHDTVLTSGHATDYLFVGNIVYTYVVVTVCLKAGLETTAWTKFSHLAVWGSMLTWLVFFGIYSTIWPTIPIAPDMRGQATMVLSSAHFWLGLFLVPTACLIEDVAWRAAKHTCKKTLLEEVQELETKSRVLGKAVLRDSNGKRLNERDRLIKRLGRKTPPTLFRGSSLQQGVPHGYAFSQEEHGAVSQEEVIRAYDTTKKKSRKK

SEQ ID NO: 12973 - protein, 99 aa, Homo sapiens
MAGHTTQCMAADGQPTQTRAFPCSTADSDTDAKNSFFHRPSRSVKKEKVLPFSRPINVLWLLNYSSTLQCTGFPPGVNTNGGHLLVFLEVLGEFSDLWL

SEQ ID NO: 12974 - protein, 613 aa, Homo sapiens
MSVIVRTPSGRLRLYCKGADNVIFERLSKDSKYMEETLCHLEYFATEGLRTLCVAYADLSENEYEEWLKVYQEASTILKDRAQRLEECYEIIEKNLLLLGATAIEDRLQAGVPETIATLLKAEIKIWVLTGDKQETAINIGYSCRLVSQNMALILLKEDSLDATRAAITQHCTDLGNLLGKENDVALIIDGHTLKYALSFEVRRSFLDLALSCKAVICCRVSPLQKSEIVDVVKKRVKAITLAIGDGANDVGMIQTAHVGVGISGNEGMQATNNSDYAIAQFSYLEKLLLVHGAWSYNRVTKCILYCFYKNVVLYIIELWFAFVNGFSGQILFERWCIGLYNVIFTALPPFTLGIFERSCTQESMLRFPQLYKITQNGEGFNTKVFWGHCINALVHSLILFWFPMKALEHDTVLTSGHATDYLFVGNIVYTYVVVTVCLKAGLETTAWTKFSHLAVWGSMLTWLVFFGIYSTIWPTIPIAPDMRGQATMVLSSAHFWLGLFLVPTACLIEDVAWRAAKHTCKKTLLEEVQELETKSRVLGKAVLRDSNGKRLNERDRLIKRLGRKTPPTLFRGSSLQQGVPHGYAFSQEEHGAVSQEEVIRAYDTTKKKSRKK

SEQ ID NO: 12975 - protein, 1141 aa, Homo sapiens
MSRATSVGDQLEAPARTIYLNQPHLNKFRDNQISTAKYSVLTFLPRFLYEQIRRAANAFFLFIALLQQIPDVSPTGRYTTLVPLIIILTIAGIKEIVEDFKRHKADNAVNKKKTIVLRNGMWHTIMWKEVAVGDIVKVVNGQYLPADVVLLSSSEPQAMCYVETANLDGETNLKIRQGLSHTADMQTREVLMKLSGTIECEGPNRHLYDFTGNLNLDGKSLVALGPDQILLRGTQLRNTQWVFGIVVYTGHDTKLMQNSTKAPLKRSNVEKVTNVQILVLFGILLVMALVSSAGALYWNRSHGEKNWYIKKMDTTSDNFGYNLLTFIILYNNLIPISLLVTLEVVKYTQALFINWDTDMYYIGNDTPAMARTSNLNEELGQVKYLFSDKTGTLTCNIMNFKKCSIAGVTYGHFPELAREPSSDDFCDSCDFDDPRLLKNIEDRHPTAPCIQEFLTLLAVCHTVVPEKDGDNIIYQASSPDEAALVKGAKKLGFVFTARTPFSVIIEAMGQEQTFGILNVLEFSSDRKRMSVIVRTPSGRLRLYCKGADNVIFERLSKDSKYMEETLCHLEYFATEGLRTLCVAYADLSENEYEEWLKVYQEASTILKDRAQRLEECYEIIEKNLLLLGATAIEDRLQAGVPETIATLLKAEIKIWVLTGDKQETAINIGYSCRLVSQNMALILLKEDSLDATRAAITQHCTDLGNLLGKENDVALIIDGHTLKYALSFEVRRSFLDLALSCKAVICCRVSPLQKSEIVDVVKKRVKAITLAIGDGANDVGMIQTAHVGVGISGNEGMQATNNSDYAIAQFSYLEKLLLVHGAWSYNRVTKCILYCFYKNVVLYIIELWFAFVNGFSGQILFERWCIGLYNVIFTALPPFTLGIFERSCTQESMLRFPQLYKITQNGEGFNTKVFWGHCINALVHSLILFWFPMKALEHDTVLTSGHATDYLFVGNIVYTYVVVTVCLKAGLETTAWTKFSHLAVWGSMLTWLVFFGIYSTIWPTIPIAPDMRGQATMVLSSAHFWLGLFLVPTACLIEDVAWRAAKHTCKKTLLEEVQELETKSRVLGKAVLRDSNGKRLNERDRLIKRLGRKTPPTLFRGSSLQQGVPHGYAFSQEEHGAVSQEEVIRAYDTTKKKSRKK

SEQ ID NO: 12976 - protein, 581 aa, Homo sapiens
MLHHIYFYPSLTLLLCCVILDDKVCLFPLASSPARRTVPANGKWKTFAEGLRSASEETPAANIETIINILLGFLGTKPCCKGYESLFGRDEEFTSITDSIIFLCTYSTAKYSVLTFLPRFLYEQIRRAANAFFLFIALLQQIPDVSPTGRYTTLVPLIIILTIAGIKEIVEDFKRHKADNAVNKKKTIVLRNGMWHTIMWKEVAVGDIVKVVNGQYLPADVVLLSSSEPQAMCYVETANLDGETNLKIRQGLSHTADMQTREVLMKLSGTIECEGPNRHLYDFTGNLNLDGKSLVALGPDQILLRGTQLRNTQWVFGIVVYTGHDTKLMQNSTKAPLKRSNVEKVTNVQILVLFGILLVMALVSSAGALYWNRSHGEKNWYIKKMDTTSDNFGYNLLTFIILYNNLIPISLLVTLEVVKYTQALFINWDTDMYYIGNDTPAMARTSNLNEELGQFCDHSVFRFSGSHFPELAREPSSDDFCRMPPPCSDSCDFDDPRLLKNIEDRHPTAPCIQEFLTLLAVCHTVVPEKDGDNIIYQASSPVICQCFTNSHLTDEAALVKGAKKLGFVFTARTPFSVIIEA

SEQ ID NO: 12977 - protein, 1141 aa, Homo sapiens; identical to SEQ ID NO: 12975

SEQ ID NO: 12978 - protein, 470 aa, Homo sapiens
MFIDENSSNLPYSSNNRGFVPVRAIALEQANRPHLPCSLGSHLHKEDSIVGRCSKRYPVGPFIHVCFMSSTYLITLTEQYVLEWRSRWARHLGGTADAEENRPLPCRNQSFQEDRPGNGDFWAWAEYSDGKRVEEGEVKLAEGKEGLTEMGEASEDPARKETTLEVVFRIELKLAEGSPDAREFAVQVLSGEKQSSGNVAYTKPLGRQYTYSPGDGVVGGGRNFPNSPQDHEGFSSHVGFYHLGPLVTESGLDLVPLWEDGHRRKRKSIAPCGSSGHTRAFLTFLSPEPQDLACTCHCALEAESLSSKWMAGGSWVEFLVTPLAQVSSVYKSTIEIQPLFDNQAGFLLIFAFWERQLLDVHRLYFKPLESSLDLLEIQIPEWQAQVSPLQKSEIVDVVKKRVKAITLAIGDGANDVGMIQTAHVGVGISGNEGMQATNNSDYAIAQVLGHPLARCLRSGRSSDLQLSPSL

SEQ ID NO: 12979 - protein, 390 aa, Homo sapiens
MGQRLSGGRSCLDVPGRLLPQPPPPPPPVRRKLALLFAMLCVWLYMFLYSCAGSCAAAPGLLLLGSGSRAAHDPPALATAPDGTPPRLPFRAPPATPLASGKEMAEGAASPEEQSPEVPDSPSPISSFFSGSGSKQLPQAIIIGVKKGGTRALLEFLRVHPDVRAVGAEPHFFDRSYDKGLAWYRDLMPRTLDGQITMEKTPSYFVTREAPARISAMSKDTKLIVVVRDPVTRAISDYTQTLSKRPDIPTFESLTFKNRTAGLIDTSWSAIQIGIYAKHLEHWLRHFPIRQMLFVSGERLISDPAGELGRVQDFLGLKRIITDKHFYFNKTKGFPCLKKAEGSSRPHCLGKTKGRTHPEIDREVVRRLREFYRPFNLKFYQMTGHDFGWD

SEQ ID NO: 12980 - protein, 390 aa, Homo sapiens; identical to SEQ ID NO: 12979

SEQ ID NO: 12981 - protein, 276 aa, Homo sapiens
MTSFRLALIQLQISSIKSDNVTRACSFIREAATQGAKIVSLPECFNSPYGAKYFPEYAEKIPGESTQKLSEVAKECSIYLIGGSIPEEDAGKLYNTCAVFGPDGTLLAKYRKIHLFDIDVPGKITFQESKTLSPGDSFSTFDTPYCRVGLGICYDMRFAELAQIYAQRGCQLLVYPGAFNLTTGPAHWELLQRSRAVDNQVYVATASPARDDKASYVAWGHSTVVNPWGEVLAKAGTEEAIVYSDIDLKKLAEIRQQIPVFRQKRSDLYAVEMKKP

SEQ ID NO: 12982 - protein, 276 aa, Homo sapiens; identical to SEQ ID NO: 12981

SEQ ID NO: 12983 - protein, 290 aa, Homo sapiens [sequence omitted]

SEQ ID NO: 12984 - protein, 546 aa, Homo sapiens
MNCCIGLGEKARGSHRASYPSLSALFTEASILGFGSFAVKAQVGNQQLGGPEWIRFSLTPRPLNCSLSLTPRGQRWVRVGCYISVETLWIRFVGTEDAWVRGTGCTRLLEAPHRGATGRGSRGGGGVACPRPSRLFFASAGVRGVALAARAMPGRSCVALVLLAAAVSCAVAQHAPPWTEDCRKSTYPPSGPTYRGAVPWYTINLDLPPYKRWHELMLDKAPMLKVIVNSLKNMINTFVPSGKVMQVVDEKLPGLLGNFPGPFEEEMKGIAAVTDIPLGEIISFNIFYELFTICTSIVAEDKKGHLIHGRNMDFGVFLGWNINNDTWVITEQLKPLTVNLDFQRNNKTVFKASSFAGYVGMLTGFKPGLFSLTLNERFSINGGYLGILEWILGKKDAMWIGFLTRTVLENSTSYEEAKNLLTKTKILAPAYFILGGNQSGEGCVITRDRKESLDVYELDAKQGRWYVVQTNYDRWKHPFFLDDRRTPAKMCLNRTSQENISFETMYDVLSTKPVLNKLTVYTTLIDVTKGQFETYLRDCPDPCIGW

SEQ ID NO: 12985 - protein, 395 aa, Homo sapiens
MPGRSCVALVLLAAAVSCAVAQHAPPWTEDCRKSTYPPSGPTYRGAVPWYTINLDLPPYKRWHELMLDKAPMLKVIVNSLKNMINTFVPSGKVMQVVDEKLPGLLGNFPGPFEEEMKGIAAVTDIPLGEIISFNIFYELFTICTSIVAEDKKGHLIHGRNMDFGVFLGWNINNDTWVITEQLKPLTVNLDFQRNNKTVFKASSFAGYVGMLTGFKPGLFSLTLNERFSINGGYLGILEWILGKKDAMWIGFLTRTVLENSTSYEEAKNLLTKTKILAPAYFILGGNQSGEGCVITRDRKESLDVYELDAKQGRWYVVQTNYDRWKHPFFLDDRRTPAKMCLNRTSQENISFETMYDVLSTKPVLNKLTVYTTLIDVTKGQFETYLRDCPDPCIGW

SEQ ID NO: 12986 - protein, 395 aa, Homo sapiens; identical to SEQ ID NO: 12985

SEQ ID NO: 12987 - protein, 546 aa, Homo sapiens; identical to SEQ ID NO: 12984

SEQ ID NO: 12988 - protein, 390 aa, Homo sapiens [sequence omitted]

SEQ ID NO: 12989 - protein, 357 aa, Homo sapiens
MNCCIGLGEKARGSHRASYPSLSALFTEASILGFGSFAVKAQVGNQQLGGPEWIRFSLTPRPLNCSLSLTPRGQRWVRVGCYISVETLWIRFVGTEDAWVRGTGCTRLLEAPHRGATGRGSRGGGGVACPRPSRLFFASAGVRGVALAARAMPGRSCVALVLLAAAVSCAVAQHAPPWTEDCRKSTYPPSGPTWNINNDTWVITEQLKPLTVNLDFQRNNKTVFKASSFAGYVGMLTGFKPGLFSLTLNERFSINGGYLGILEWILGKKDAMWIGFLTRTVLENSTRLDAKQGRWYVVQTNYDRWKHPFFLDDRRTPAKMCLNRTSQELTVYTTLIDVTKGQFETYLRDCPDPCIGW

SEQ ID NO: 12990 - protein, 301 aa, Homo sapiens
MAMLVLVPGRVMRPLGGQLWRFLPRGLEFWGPAEGTARVLLRQFCARQAEAWRASGRPGYCLGTRPLSTARPPPPWSQKGPGDSTRPSKPGPVSWKSLAITFAIGGALLAGMKHVKKEKAEKLEKERQRHIGKPLLGGPFSLTTHTGERKTDKDYLGQWLLIYFGFTHCPDVCPEELEKMIQVVDEIDSITTLPDLTPLFISIDPERDTKEAIANYVKEFSPKLVGLTGTREEVDQVARAYRVYYSPGPKDEDEDYIVDHTIIMYLIGPDGEFLDYFGQNKRKGEIAASIATHMRPYRKKS

SEQ ID NO: 12991 - protein, 306 aa, Homo sapiens
MREGLGAACEAAGPRLCRLLCRILRPKPDCCPRRASPVTQDDLQYHNLSKQQNESPQPLVETGKKSPESLVKLDATPLSSPRHVRIKNWGSGMTFQDTLHHKAKGILTCRSKSCLGSIMTPKSLTRGPRDKPTPPDELLPQAIEFVNQYYGSFKEAHRHHSISNALENDYMKMAITSKTLKELDVNVKNNPFLHMHVLTTMCVGGVGVMVIITVVMLRAKIEEHLARVEAVTKEIETTGTYQLTGDELIFATKQAWRNAPRCIGRIQWSNLQVNFLRLERERAGGGQALSRWLGTATQSCAQASWD

SEQ ID NO: 12992 - protein, 974 aa, Homo sapiens [sequence omitted]

SEQ ID NO: 12993 - protein, 997 aa, Homo sapiens [sequence omitted]

SEQ ID NO: 12994 - protein, 459 aa, Homo sapiens
MSNCLQNFLKITSTRLLCSRLCQQLRSKRKFFGTVPISRLHRRVVITGIGLVTPLGVGTHLVWDRLIGGESGIVSLVGEEYKSIPCSVAAYVPRGSDEGQFNEQNFVSKSDIKSMSSPTIMAIGAAELAMKDSGWHPQSEADQVATGVAIGMGMIPLEVVSETALNFQTKGYNKVSPFFVPKILVNMAAGQVSIRYKLKGPNHAVSTACTTGAHAVGDSFRFIAHGDADVMVAGGTDSCISPLSLAGFSRARALSTNSDPKLACRPFHPKRDGFVMGEGAAVLVLEEYEHAVQRRARIYAEVLGYGLSGDAGHITAPDPEGEGALRCMAAALKDAGVQPEEISYINAHATSTPLGDAAENKAIKHLFKDHAYALAVSSTKGATGHLLGAAGAVEAAFTTLACYYQKLPPTLNLDCSEPEFDLNYVPLKAQEWKTEKRFIGLTNSFGFGGTNATLCIAGL

SEQ ID NO: 12995 - protein, 184 aa, Homo sapiens
MGEGAAVLVLEEYEHAVQRRARIYAEVLGYGLSGDAGHITAPDPEGEGALRCMAAALKDAGVQPEEISYINAHATSTPLGDAAENKAIKHLFKDHAYALAVSSTKGATGHLLGAAGAVEAAFTTLACYYQKLPPTLNLDCSEPEFDLNYVPLKAQEWKTEKRFIGLTNSFGFGGTNATLCIAGL

SEQ ID NO: 12996 - protein, 459 aa, Homo sapiens; identical to SEQ ID NO: 12994

SEQ ID NO: 12997 - protein, 171 aa, Homo sapiens
MGFEEGETHLIFPKKASVEQLQKIRDLIAIERSSRLDGSNKSHKVKSSQQPAASTQLPTTPSSNPSGLNQHTRNRQGQSSDPPSASTVAADSAILEVLQSNIQHVLVYENPALQEKALACIPVQELKRKSQEKLSRARKLDKDIITLRNFWKQDVDGVASGPIVLHCAAEL

SEQ ID NO: 12998 - protein, 333 aa, Homo sapiens
MLTTSSGAGQRGRTAGTGVGGPRHLVRPGTGASGLSFRGQRRPDRPGPGAGSAPNVRARRPGASGPGQVPPPLEKRKFLCSCDLAPAVRVLRVNWSPGSGAGRRRGRKACFRHCRSSRRLTASDIGTQRNPNDEKYRSIRIGNTAFSTRLLPVRGAVECLFEMGFEEGETHLIFPKKASVEQLQKIRDLIAIERSSRLDGSNKSHKVKSSQQPAASTQLPTTPSSNPSGLNQHTRNRQGQSSDPPSASTVAADSAILEVLQSNIQHVLVYENPALQEKALACIPVQELKRKSQEKLSRARKLDKDIITLRNFWKQDVDGVASGPIVLHCAAEL

SEQ ID NO: 12999 - protein, 129 aa, Homo sapiens
MLTTSSGAGQRGRTAGTGVGGPRHLVRPGTGASGLSFRGQRRPDRPGPGAGSAPNVRARRPGASGPGQVPPPLEKRKFLCSCDLAPAVRVLRVNWSPGSGAGRRRGRKACFRHCRSSRRLTASDIGTQR

SEQ ID NO: 13000 - protein, 654 aa, Homo sapiens [sequence omitted]

SEQ ID NO: 13001 - protein, 636 aa, Homo sapiens
MAAAALGSSSGSASPAVAELCQNTPETFLEASKLLLTYADNILRNPNDEKYRSIRIGNTAFSTRLLPVRGAVECLFEMGFEEGETHLIFPKKASVEQLQKIRDLIAIERSSRLDGSNKSHKVKSSQQPAASTQLPTTPSSNPSGLNQHTRNRQGQSSDPPSASTVAADSAILEVLQSNIQHVLVYENPALQEKALACIPVQELKRKSQEKLSRARKLDKGINISDEDFLLLELLHWFKEEFFHWVNNVLCSKCGGQTRSRDRSLLPSDDELKWGAKEVEDHYCDACQFSNRFPRYNNPEKLLETRCGRCGEWANCFTLCCRAVGFEARYVWDYTELQRTLSLKLTTLKEIGKTFLRISKRQKLIQVVDVTWRYSCKHEEVIARRTKVKEALLRDTINGLNKQRQLFLSENRRKELLQRIIVELVEFISPKTPKPGELGGRISGSVAWRVARGEMGLQRKETLFIPCENEKISKQLHLCYNIVKDRYVRVSNNNQTISGWENGVWKMESIFRKVETDWHMVYLARKEGSSFAYISWKFECGSVGLKVDSISIRTSSQTFQTGTVEWKLRSDTAQVELTGDNSLHSYADFSGATEVILEAELSRGDGDVAWQHTQLFRQSLNDHEENCLEIIIKFSDL

SEQ ID NO: 13002 - protein, 654 aa, Homo sapiens [sequence omitted]

SEQ ID NO: 13003 - protein, 684 aa, Homo sapiens
MLTTSSGAGQRGRTAGTGVGGPRHLVRPGTGASGLSFRGQRRPDRPGPGAGSAPNVRARRPGASGPGQVPPPLEKRKFLCSCDLAPAVRVLRVNWSPGSGAGRRRGRKACFRHCRSSRRLTASDIGTQRNPNDEKYRSIRIGNTAFSTRLLPVRGAVECLFEMGFEEGETHLIFPKKASVEQLQKIRDLIAIERSSRLDGSNKSHKVKSSQQPAASTQLPTTPSSNPSGLNQHTRNRQGQSSDPPSASTVAADSAILEVLQSNIQHVLVYENPALQEKALACIPVQELKRKSQEKLSRARKLDKGINISDEDFLLLELLHWFKEEFFHWVNNVLCSKCGGQTRSRDRSLLPSDDELKWGAKEVEDHYCDACQFSNRFPRYNNPEKLLETRCGRCGEWANCFTLCCRAVGFEARYVWDYTDHVWTEVYSPSQQRWLHCDACEDVCDKPLLYEIGWGKKLSYVIAFSKDEVVDVTWRYSCKHEEVIARRTKVKEALLRDTINGLNKQRKETLFIPCENEKISKQLHLCYNIVKDRYVRVSNNNQTISGWENGVWKMESIFRKVETDWHMVYLARKEGSSFAYISWKFECGSVGLKVDSISIRTSSQTFQTGTVEWKLRSDTAQVELTGDNSLHSYADFSGATEVILEAELSRGDGDVAWQHTQLFRQSLNDHEENCLEIIIKFSDL

SEQ ID NO: 13004 - protein, 1643 aa, Homo sapiens [sequence omitted]

SEQ ID NO: 13005 - protein, 1626 aa, Homo sapiens [sequence omitted]

SEQ ID NO: 13006 - protein, 1621 aa, Homo sapiens
MAKSGGCGAGAGVGGGNGALTWVNNAAKKEESETANKNDSSKKLSVERVYQKKTQLEHILLRPDTYIGSVEPLTQFMWVYDEDVGMNCREVTFVPGLYKIFDEILVNAADNKQRDKNMTCIKVSIDPESNIISIWNNGKGIPVVEHKVEKVYVPALIFGQLLTSSNYDDDEKKVTGGRNGYGAKLCNIFSTKFTVETACKEYKHSFKQTWMNNMMKTSEAKIKHFDGEDYTCITFQPDLSKFKMEKLDKDIVALMTRRAYDLAGSCRGVKVMFNGKKLPVNGFRSYVDLYVKDKLDETGVALKVIHELANERWDVCLTLSEKGFQQISFVNSIATTKGGRHVDYVVDQVVGKLIEVVKKKNKAGVSVKPFQVKNHIWVFINCLIENPTFDSQTKENMTLQPKSFGSKCQLSEKFFKAASNCGIVESILNWVKFKAQTQLNKKCSSVKYSKIKGIPKLDDANDAGGKHSLECTLILTEGDSAKSLAVSGLGVIGRDRYGVFPLRGKILNVREASHKQIMENAEINNIIKIVGLQYKKSYDDAESLKTLRYGKIMIMTDQDQDGSHIKGLLINFIHHNWPSLLKHGFLEEFITPIVKASKNKQELSFYSIPEFDEWKKHIENQKAWKIKYYKGLGTSTAKEAKEYFADMERHRILFRYAGPEDDAAITLAFSKKKIDDRKEWLTNFMEDRRQRRLHGLPEQFLYGTATKHLTYNDFINKELILFSNSDNERSIPSLVDGFKPGQRKVLFTCFKRNDKREVKVAQLAGSVAEMSAYHHGEQALMMTIVNLAQNFVGSNNINLLQPIGQFGTRLHGGKDAASPRYIFTMLSTLARLLFPAVDDNLLKFLYDDNQRVEPEWYIPIIPMVLINGAEGIGTGWACKLPNYDAREIVNNVRRMLDGLDPHPMLPNYKNFKGTIQELGQNQYAVSGEIFVVDRNTVEITELPVRTWTQVYKEQVLEPMLNGTDKTPALISDYKEYHTDTTVKFVVKMTEEKLAQAEAAGLHKVFKLQTTLTCNSMVLFDHMGCLKKYETVQDILKEFFDLRLSYYGLRKEWLVGMLGAESTKLNNQARFILEKIQGKITIENRSKKDLIQMLVQRGYESDPVKAWKEAQEKAAEEDETQNQHDDSSSDSGTPSGPDFNYILNMSLWSLTKEKVEELIKQRDAKGREVNDLKRKSPSDLWKEDLAAFVEELDKVESQEREDVLAGMSGKAIKGKVGKPKVKKLQLEETMPSPYGRRIIPEITAMKADASKKLLKKKKGDLDTAAVKVEFDEEFSGAPVEGAGEEALTPSVPINKGPKPKREKKEPGTRVRKTPTSSGKPSAKKVKKRNPWSDDESKSESDLEETEPVVIPRDSLLRRAAAERPKYTFDFSEEEDDDADDDDDDNNDLEELKVKASPITNDGEDEFVPSDGLDKDEYTFSPGKSKATPEKSLHDKKSQDFGNLFSFPSYSQKSEDDSAKFDSNEEDSASVFSPSFGLKQTDKVPSKTVAAKKGKPSSDTVPKPKRAPKQKKVVEAVNSDSDSEFGIPKKTTTPKGKGRGAKKRKASGSENEGDYNPGRKTSKTTSKKPKKTSFDQDSDVDIFPSDFPTEPPSLPRTGRARKEVKYFAESDEEEDDVDFAMFN

SEQ ID NO: 13007 - protein, 219 aa, Homo sapiens
MGLEKLHPFDAGKWGKVINFLKEEKLLSDSMLVEAREASEEDLLVVHTRRYLNELKGNGHERDFMDDKRVYIMDVYNRHIYPGDRFAKQAIRRKVELEWGTEDDEYLDKVERNIKKSLQEHLPDVVVYNAGTDILEGDRLGGLSISPAGIVKRDELVFRMVRGRRVPILMVTSGGYQKRTARIIADSILNLFGLGLIGPESPSVSAQNSDTPLLPPAVP

SEQ ID NO: 13008 - protein, 225 aa, Homo sapiens
MLHTTQLYQHVPETRWPIVYSPRYNITFMGLEKLHPFDAGKWGKVINFLKEEKLLSDSMLVEAREASEEDLLVVHTRRYLNELKGVASTTAPATVAGASVPMRTSRSPSSFCLSVWRASPGLPSLILMPIRAMGMSETSWTTSVCTSWMSTTATSTQGTALPSRPSGGRWSWSGAQRMMSTWIRWRGTSRNPSRSTCPTWWYTMQAPTSSRGTALGGCPSAQRAS

SEQ ID NO: 13009 - protein, 165 aa, Homo sapiens
MGLEKLHPFDAGKWGKVINFLKEEKLLSDSMLVEAREASEEDLLVVHTRRYLNELKWSFAVATITEIPPVIFLPNFLVQRKVLRPLRTQTGGTIMAGKLAVERGWAINVGGGFHHCSSDRGGGFCAYADITLAIKFLFERVEGISRATIIDLDAHQVSALQGLDS

SEQ ID NO: 13010 - protein, 347 aa, Homo sapiens
MLHTTQLYQHVPETRWPIVYSPRYNITFMGLEKLHPFDAGKWGKVINFLKEEKLLSDSMLVEAREASEEDLLVVHTRRYLNELKWSFAVATITEIPPVIFLPNFLVQRKVLRPLRTQTGGTIMAGKLAVERGWAINVGGGFHHCSSDRGGGFCAYADITLAIKFLFERVEGISRATIIDLDAHQGNGHERDFMDDKRVYIMDVYNRHIYPGDRFAKQAIRRKVELEWGTEDDEYLDKVERNIKKSLQEHLPDVVVYNAGTDILEGDRLGGLSISPAGIVKRDELVFRMVRGRRVPILMVTSGGYQKRTARIIADSILNLFGLGLIGPESPSVSAQNSDTPLLPPAVP

SEQ ID NO: 13011 - protein, 264 aa, Homo sapiens [sequence omitted]

SEQ ID NO: 13012 - protein, 118 aa, Homo sapiens
MGLEKLHPFDAGKWGKVINFLKEEKLLSDSMLVEAREASEEDLLVVHTRRYLNELKRPSGGRWSWSGAQRMMSTWIRWRGTSRNPSRSTCPTWWYTMQAPTSSRGTALGGCPSAQRAS

SEQ ID NO: 13013 - protein, 181 aa, Homo sapiens
MGGPGPGPCEDPAGAGGAGAGGSEPLVTVTVQCAFTVALRARRGADLSSLRALLGQALPHQAQLGQLSYLAPGEDGHWVPIPEEESLQRAWQDAAACPRGLQLQCRGAGGRPVLYQVVAQHSYSAQGPEDLGFRQGDTVDVLCEGRVGMALPRQHRGARGVGGLELGLCCEQTWHPEATPG

SEQ ID NO: 13014 - protein, 196 aa, Homo sapiens
MGGPGPGPCEDPAGAGGAGAGGSEPLVTVTVQCAFTVALRARRGADLSSLRALLGQALPHQAQLGQLSYLAPGEDGHWVPIPEEESLQRAWQDAAACPRGLQLQCRGAGGRPVLYQVVAQHSYSAQGPEDLGFRQGDTVDVLCEEPDVPLAVDQAWLEGHCDGRIGIFPKCFVVPAGPRMSGAPGRLPRSQQGDQP

SEQ ID NO: 13015 - protein, 189 aa, Homo sapiens
MGGPGPGPCEDPAGAGGAGAGGSEPLVTVTVQCAFTVALRARRGADLSSLRALLGQALPHQAQLGQLSYLAPGEDGHWVPIPEEESLQRAWQDAAACPRGLQLQCRGAGGRPVLYQVVAQHSYSAQGPEDLGFRQGDTVDVLCEVDQAWLEGHCDGRIGIFPKCFVVPAGPRMSGAPGRLPRSQQGDQP

SEQ ID NO: 13016 - protein, 525 aa, Homo sapiens
MGWLFLKVLLAGVSFSGFLYPLVDFCISGKTRGQKPNFVIILADDMGWGDLGANWAETKDTANLDKMASEGMRFVDFHAAASTCSPSRASLLTGRLGLRNGVTRNFAVTSVGGLPLNETTLAEVLQQAGYVTGIIGKWHLGHHGSYHPNFRGFDYYFGIPYSHDMGCTDTPGYNHPPCPACPQGDGPSRNLQRDCYTDVALPLYENLNIVEQPVNLSSLAQKYAEKATQFIQRASTSGRPFLLYVALAHMHVPLPVTQLPAAPRGRSLYGAGLWEMDSLVGQIKDKVDHTVKENTFLWFTGDNGPWAQKCELAGSVGPFTGFWQTRQGGSPAKQTTWEGGHRVPALAYWPGRVPVNVTSTALLSVLDIFPTVVALAQASLPQGRRFDGVDVSEVLFGRSQPGHRVLFHPNSGAAGEFGALQTVRLERYKAFYITGGARACDGSTGPELQHKFPLIFNLEDDTAEAVPLERGGAEYQAVLPEVRKVLADVLQDIANDNISSADYTQDPSVTPCCNPYQIACRCQAA

SEQ ID NO: 13017 - protein, 525 aa, Homo sapiens; identical to SEQ ID NO: 13016

SEQ ID NO: 13018 - protein, 525 aa, Homo sapiens; identical to SEQ ID NO: 13016

SEQ ID NO: 13019 - protein, 364 aa, Homo sapiens
MNVYHFKKGTEICNYSYSSNILSIRLNRQRLLVCLEESIYIHNIKDMKLLKTLLDIPANPTGLCALSINHSNSYLAYPGSLTSGEIVLYDGNSLKTVCTIAAHEGTLAAITFNASGSKLASASEKGTVIRVFSVPDGQKLYEFRRGMKRYVTISSLVFSMDSQFLCASSNTETVHIFKLEQVTNSRPEEPSTWSGYMGKMFMAATNYLPTQVSDMMHQDRAFATARLNFSGQRNICTLSTIQKLPRLLVASSSGHLYMYNLDPQDGGECVLIKTHSLLGSGTTEENKENDLRPSLPQSYAATVARPSASSASTVPGYSEDGGALRGEVIPEHEFATGPVCLDDENEFPPIILCRGNQKGKTKQS

SEQ ID NO: 13020 - protein, 446 aa, Homo sapiens
MEAEAADAPPGGVESALSCFSFNQDCTSLAIGTKAGYKLFSLSSVEQLDQVHGSNEIPDVYIVERLFSSSLVVVVSHTKPRQMNVYHFKKGTEICNYSYSSNILSIRLNRQRLLVCLEESIYIHNIKDMKLLKTLLDIPANPTGLCALSINHSNSYLAYPGSLTSGEIVLYDGNSLKTVCTIAAHEGTLAAITFNASGSKLASASEKGTVIRVFSVPDGQKLYEFRRGMKRYVTISSLVFSMDSQFLCASSNTETVHIFKLEQVTNSRPEEPSTWSGYMGKMFMAATNYLPTQVSDMMHQDRAFATARLNFSGQRNICTLSTIQKLPRLLVASSSGHLYMYNLDPQDGGECVLIKTHSLLGSGTTEENKENDLRPSLPQSYAATVARPSASSASTVPGYSEDGGALRGEVIPEHEFATGPVCLDDENEFPPIILCRGNQKGKTKQS

SEQ ID NO: 13021 - protein, 163 aa, Homo sapiens
MADEEKLPPGWEKRMSRSSGRVYYFNHITNASQWERPSGNSSSGGKNGQGEPARVRCSHLLVKHSQSRRPSSWRQEKITRTKEEALELINGYIQKIKSGEEDFESLASQFSDCSSAKARGDLGAFSRGQMQKPFEDASFALRTGEMSGPVFTDSGIHIILRTE

SEQ ID NO: 13022 - protein, 163 aa, Homo sapiens; identical to SEQ ID NO: 13021

SEQ ID NO: 13023 - protein, 1678 aa, Homo sapiens
MAGSVPSFCTGYRLSPFGTSPPPPRPDWGGRRRLRSSPLPIGFRAKSRGACAAAAASAEASEMPARTAPARVPTLAVPAISLPDDVRRRLKDLERDSLTEKECVKEKLNLLHEFLQTEIKNQLCDLETKLRKEELSEEGYLAKVKSLLNKDLSLENGAHAYNREVNGRLENGNQARSEARRVGMADANSPPKPLSKPRTPRRSKSDGEAKPEPSPSPRITRKSTRQTTITSHFAKGPAKRKPQEESERAKSDESIKEEDKDQDEKRRRVTSRERVARPLPAEEPERAKSGTRTEKEEERDEKEEKRLRSQTKEPTPKQKLKEEPDREARAGVQADEDEDGDEKDEKKHRSQPKDLAAKRRPEEKEPEKVNPQISDEKDEDEKEEKRRKTTPKEPTEKKMARAKTVMNSKTHPPKCIQCGQYLDDPDLKYGQHPPDAVDEPQMLTNEKLSIFDANESGFESYEALPQHKLTCFSVYCKHGHLCPIDTGLIEKNIELFFSGSAKPIYDDDPSLEGGVNGKNLGPINEWWITGFDGGEKALIGFSTSFAEYILMDPSPEYAPIFGLMQEKIYISKIVVEFLQSNSDSTYEDLINKIETTVPPSGLNLNRFTEDSLLRHAQFVVEQVESYDEAGDSDEQPIFLTPCMRDLIKLAGVTLGQRRAQARRQTIRHSTREKDRGPTKATTTKLVYQIFDTFFAEQIEKDDREDKENAFKRRRCGVCEVCQQPECGKCKACKDMVKFGGSGRSKQACQERRCPNMAMKEADDDEEVDDNIPEMPSPKKMHQGKKKKQNKNRISWVGEAVKTDGKKSYYKKVCIDAETLEVGDCVSVIPDDSSKPLYLARVTALWEDSSNGQMFHAHWFCAGTDTVLGATSDPLELFLVDECEDMQLSYIHSKVKVIYKAPSENWAMEGGMDPESLLEGDDGKTYFYQLWYDQDYARFESPPKTQPTEDNKFKFCVSCARLAEMRQKEIPRVLEQLEDLDSRVLYYSATKNGILYRVGDGVYLPPEAFTFNIKLSSPVKRPRKEPVDEDLYPEHYRKYSDYIKGSNLDAPEPYRIGRIKEIFCPKKSNGRPNETDIKIRVNKFYRPENTHKSTPASYHADINLLYWSDEEAVVDFKAVQGRCTVEYGEDLPECVQVYSMGGPNRFYFLEAYNAKSKSFEDPPNHARSPGNKGKGKGKGKGKPKSQACEPSEPEIEIKLPKLRTLDVFSGCGGLSEGFHQAGISDTLWAIEMWDPAAQAFRLNNPGSTVFTEDCNILLKLVMAGETTNSRGQRLPQKGDVEMLCGGPPCQGFSGMNRFNSRTYSKFKNSLVVSFLSYCDYYRPRFFLLENVRNFVSFKRSMVLKLTLRCLVRMGYQCTFGVLQAGQYGVAQTRRRAIILAAAPGEKLPLFPEPLHVFAPRACQLSVVVDDKKFVSNITRLSSGPFRTITVRDTMSDLPEVRNGASALEISYNGEPQSWFQRQLRGAQYQPILRDHICKDMSALVAARMRHIPLAPGSDWRDLPNIEVRLSDGTMARKLRYTHHDRKNGRSSSGALRGVCSCVEAGKACDPAARQFNTLIPWCLPHTGNRHNHWAGLYGRLEWDGFFSTTVTNPEPMGKQGRVLHPEQHRVVSVRECARSQGFPDTYRLFGNILDKHRQVGNAVPPPLAKAIGLEIKLCMLAKARESASAKIKEEEAAKD

SEQ ID NO: 13024 - protein, 1678 aa, Homo sapiens; identical to SEQ ID NO: 13023

SEQ ID NO: 13025 - protein, 331 aa, Homo sapiens [sequence omitted]

SEQ ID NO: 13026 - protein, 825 aa, Homo sapiens
MRSGAAPRARPRPPALALPPTGPESLTHFPFSDEDTRRHPPGRSVSFEAENGPTPSPGRSPLDSQASPGLVLHAGAATSQRRESFLYRSDSDYDMSPKTMSRNSSVTSEAHAEDLIVTPFAQVLASLRSVRSNFSLLTNVPVPSNKRSPLGGPTPVCKATLSEETCQQLARETLEELDWCLEQLETMQTYRSVSEMASHKFKRMLNRELTHLSEMSRSGNQVSEYISTTFLDKQNEVEIPSPTMKEREKQQAPRPRPSQPPPPPVPHLQPMSQITGLKKLMHSNSLNNSNIPRFGVKTDQEELLAQELENLNKWGLNIFCVSDYAGGRSLTCIMYMIFQERDLLKKFRIPVDTMVTYMLTLEDHYHADVAYHNSLHAADVLQSTHVLLATPALDAVFTDLEILAALFAAAIHDVDHPGVSNQFLINTNSELALMYNDESVLENHHLAVGFKLLQEDNCDIFQNLSKRQRQSLRKMVIDMVLATDMSKHMTLLADLKTMVETKKVTSSGVLLLDNYSDRIQVLRNMVHCADLSNPTKPLELYRQWTDRIMAEFFQQGDRERERGMEISPMCDKHTASVEKSQVGFIDYIVHPLWETWADLVHPDAQEILDTLEDNRDWYYSAIRQSPSPPPEEESRGPGHPPLPDKFQFELTLEEEEEEEISMAQIPCTAQEALTAQGLSGVEEALDATIAWEASPAQESLEVMAQEASLEAELEAVYLTQQAQSTGSAPVAPDEFSSREEFVVAVSHSSPSALALQSPLLPAWRTLSVSEHAPGLPGLPSTAAEVEAQREHQAAKRACSACAGTFGEDTSALPAPGGGGSGGDPT

SEQ ID NO: 13027 - protein, 860 aa, Homo sapiens
MARPRGLGRIPELQLVAFPVAVAAEDEAFLPEPLAPRAPRRPRSPPSSPVFFASPSPTFRRRLRLLRSCQDLGRQAWAGAGFEAENGPTPSPGRSPLDSQASPGLVLHAGAATSQRRESFLYRSDSDYDMSPKTMSRNSSVTSEAHAEDLIVTPFAQVLASLRSVRSNFSLLTNVPVPSNKRSPLGGPTPVCKATLSEETCQQLARETLEELDWCLEQLETMQTYRSVSEMASHKFKRMLNRELTHLSEMSRSGNQVSEYISTTFLDKQNEVEIPSPTMKEREKQQAPRPRPSQPPPPPVPHLQPMSQITGLKKLMHSNSLNNSNIPRFGVKTDQEELLAQELENLNKWGLNIFCVSDYAGGRSLTCIMYMIFQERDLLKKFRIPVDTMVTYMLTLEDHYHADVAYHNSLHAADVLQSTHVLLATPALDAVFTDLEILAALFAAAIHDVDHPGVSNQFLINTNSELALMYNDESVLENHHLAVGFKLLQEDNCDIFQNLSKRQRQSLRKMVIDMVLATDMSKHMTLLADLKTMVETKKVTSSGVLLLDNYSDRIQVLRNMVHCADLSNPTKPLELYRQWTDRIMAEFFQQGDRERERGMEISPMCDKHTASVEKSQVGFIDYIVHPLWETWADLVHPDAQEILDTLEDNRDWYYSAIRQSPSPPPEEESRGPGHPPLPDKFQFELTLEEEEEEEISMAQIPCTAQEALTAQGLSGVEEALDATIAWEASPAQESLEVMAQEASLEAELEAVYLTQQAQSTGSAPVAPDEFSSREEFVVAVSHSSPSALALQSPLLPAWRTLSVSEHAPGLPGLPSTAAEVEAQREHQAAKRACSACAGTFGEDTSALPAPGGGGSGGDPT

SEQ ID NO: 13028 - protein, 886 aa, Homo sapiens
MEPPTVPSERSLSLSLPGPREGQATLKPPPQHLWRQPRTPIRIQQRGYSDSAERAERERQPHRPIERADAMDTSDRPGLRTTRMSWPSSFHGTGTGSGGAGGGSSRRFEAENGPTPSPGRSPLDSQASPGLVLHAGAATSQRRESFLYRSDSDYDMSPKTMSRNSSVTSEAHAEDLIVTPFAQVLASLRSVRSNFSLLTNVPVPSNKRSPLGGPTPVCKATLSEETCQQLARETLEELDWCLEQLETMQTYRSVSEMASHKFKRMLNRELTHLSEMSRSGNQVSEYISTTFLDKQNEVEIPSPTMKEREKQQAPRPRPSQPPPPPVPHLQPMSQITGLKKLMHSNSLNNSNIPRFGVKTDQEELLAQELENLNKWGLNIFCVSDYAGGRSLTCIMYMIFQERDLLKKFRIPVDTMVTYMLTLEDHYHADVAYHNSLHAADVLQSTHVLLATPALDAVFTDLEILAALFAAAIHDVDHPGVSNQFLINTNSELALMYNDESVLENHHLAVGFKLLQEDNCDIFQNLSKRQRQSLRKMVIDMVLATDMSKHMTLLADLKTMVETKKVTSSGVLLLDNYSDRIQVLRNMVHCADLSNPTKPLELYRQWTDRIMAEFFQQGDRERERGMEISPMCDKHTASVEKSQVGFIDYIVHPLWETWADLVHPDAQEILDTLEDNRDWYYSAIRQSPSPPPEEESRGPGHPPLPDKFQFELTLEEEEEEEISMAQIPCTAQEALTAQGLSGVEEALDATIAWEASPAQESLEVMAQEASLEAELEAVYLTQQAQSTGSAPVAPDEFSSREEFVVAVSHSSPSALALQSPLLPAWRTLSVSEHAPGLPGLPSTAAEVEAQREHQAAKRACSACAGTFGEDTSALPAPGGGGSGGDPT

SEQ ID NO: 13029 - protein, 731 aa, Homo sapiens
MSPKTMSRNSSVTSEAHAEDLIVTPFAQVLASLRSVRSNFSLLTNVPVPSNKRSPLGGPTPVCKATLSEETCQQLARETLEELDWCLEQLETMQTYRSVSEMASHKFKRMLNRELTHLSEMSRSGNQVSEYISTTFLDKQNEVEIPSPTMKEREKQQAPRPRPSQPPPPPVPHLQPMSQITGLKKLMHSNSLNNSNIPRFGVKTDQEELLAQELENLNKWGLNIFCVSDYAGGRSLTCIMYMIFQERDLLKKFRIPVDTMVTYMLTLEDHYHADVAYHNSLHAADVLQSTHVLLATPALDAVFTDLEILAALFAAAIHDVDHPGVSNQFLINTNSELALMYNDESVLENHHLAVGFKLLQEDNCDIFQNLSKRQRQSLRKMVIDMVLATDMSKHMTLLADLKTMVETKKVTSSGVLLLDNYSDRIQVLRNMVHCADLSNPTKPLELYRQWTDRIMAEFFQQGDRERERGMEISPMCDKHTASVEKSQVGFIDYIVHPLWETWADLVHPDAQEILDTLEDNRDWYYSAIRQSPSPPPEEESRGPGHPPLPDKFQFELTLEEEEEEEISMAQIPCTAQEALTAQGLSGVEEALDATIAWEASPAQESLEVMAQEASLEAELEAVYLTQQAQSTGSAPVAPDEFSSREEFVVAVSHSSPSALALQSPLLPAWRTLSVSEHAPGLPGLPSTAAEVEAQREHQAAKRACSACAGTFGEDTSALPAPGGGGSGGDPT

SEQ ID NO: 13030 - protein, 647 aa, Homo sapiens
MPLVDFFCETCSKPWLVGWWDQFKRMLNRELTHLSEMSRSGNQVSEYISTTFLDKQNEVEIPSPTMKEREKQQAPRPRPSQPPPPPVPHLQPMSQITGLKKLMHSNSLNNSNIPRFGVKTDQEELLAQELENLNKWGLNIFCVSDYAGGRSLTCIMYMIFQERDLLKKFRIPVDTMVTYMLTLEDHYHADVAYHNSLHAADVLQSTHVLLATPALDAVFTDLEILAALFAAAIHDVDHPGVSNQFLINTNSELALMYNDESVLENHHLAVGFKLLQEDNCDIFQNLSKRQRQSLRKMVIDMVLATDMSKHMTLLADLKTMVETKKVTSSGVLLLDNYSDRIQVLRNMVHCADLSNPTKPLELYRQWTDRIMAEFFQQGDRERERGMEISPMCDKHTASVEKSQVGFIDYIVHPLWETWADLVHPDAQEILDTLEDNRDWYYSAIRQSPSPPPEEESRGPGHPPLPDKFQFELTLEEEEEEEISMAQIPCTAQEALTAQGLSGVEEALDATIAWEASPAQESLEVMAQEASLEAELEAVYLTQQAQSTGSAPVAPDEFSSREEFVVAVSHSSPSALALQSPLLPAWRTLSVSEHAPGLPGLPSTAAEVEAQREHQAAKRACSACAGTFGEDTSALPAPGGGGSGGDPT

SEQ ID NO: 13031 - protein, 1173 aa, Homo sapiens
MAVAVAMAGALIGSEPGPAEELAKLEYLSLVSKVCTELDNHLGINDKDLAEFVISLAEKNTTFDTFKASLVKNGAEFTDSLISNLLRLIQTMRPPAKPSTSKDPVVKPKTEKEKLKELFPVLCQPDNPSVRTMLDEDDVKVAVDVLKELEALMPSAAGQEKQRDAEHRDRTKKKKRSRSRDRNRDRDRDRERNRDRDHKRRHRSRSRSRSRTRERNKVKSRYRSRSRSQSPPKDRKDRDKYGERNLDRWRDKHVDRPPPEEPTIGDIYNGKVTSIMQFGCFVQLEGLRKRWEGLVHISELRREGRVANVADVVSKGQRVKVKVLSFTGTKTSLSMKDVDQETGEDLNPNRRRNLVGETNEETSMRNPDRPTHLSLVSAPEVEDDSLERKRLTRISDPEKWEIKQMIAANVLSKEEFPDFDEETGILPKVDDEEDEDLEIELVEEEPPFLRGHTKQSMDMSPIKIVKNPDGSLSQAAMMQSALAKERRELKQAQREAEMDSIPMGLNKHWVDPLPDAEGRQIAANMRGIGMMPNDIPEWKKHAFGGNKASYGKKTQMSILEQRESLPIYKLKEQLVQAVHDNQILIVIGETGSGKTTQITQYLAEAGYTSRGKIGCTQPRRVAAMSVAKRVSEEFGCCLGQEVGYTIRFEDCTSPETVIKYMTDGMLLRECLIDPDLTQYAIIMLDEAHERTIHTDVLFGLLKKTVQKRQDMKLIVTSATLDAVKFSQYFYEAPIFTIPGRTYPVEILYTKEPETDYLDASLITVMQIHLTEPPGDILVFLTGQEEIDTACEILYERMKSLGPDVPELIILPVYSALPSEMQTRIFDPAPPGSRKAQAKQRAGRAGRTGPGKCYRLYTERAYRDEMLTTNVPEIQRTNLASTVLSLKAMGINDLLSFDFMDAPPMETLITAMEQLYTLGALDDEGLLTRLGRRMAEFPLEPMLCKMLIMSVHLGCSEEMLTIVSMLSVQNVFYRPKDKQALADQKKAKFHQTEGDHLTLLAVYNSWKNNKFSNPWCYENFIQARSLRRAQDIRKQMLGIMDRHKLDVVSCGKSTVRVQKAICSGFFRNAAKKDPQEGYRTLIDQQVVYIHPSSALFNRQPEWVVYHELVLTTKEYMREVTTIDPRWLVEFAPAFFKVSDPTKLSKQKKQQRLEPLYNRYEEPNAWRISRAFRRR

SEQ ID NO: 13032 - protein, 1220 aa, Homo sapiens [sequence omitted]

SEQ ID NO: 13033 - protein, 1220 aa, Homo sapiens [sequence omitted]

SEQ ID NO: 13034 - protein, 51 aa, Homo sapiens
MVAYWRQAGLSYIRYSQICAKAVRDALKTEFKANAEKTSGSNVKIVKVKKE

SEQ ID NO: 13035 - protein, 51 aa, Homo sapiens; identical to SEQ ID NO: 13034

SEQ ID NO: 13036 - protein, 51 aa, Homo sapiens; identical to SEQ ID NO: 13034

SEQ ID NO: 13037 - protein, 123 aa, Homo sapiens [sequence omitted]

SEQ ID NO: 13038 - protein, 63 aa, Homo sapiens [sequence omitted]

SEQ ID NO: 13039 - protein, 127 aa, Homo sapiens
MPGLMGMQELYSASRPLKGACIADCLQITVETAILIETLFSLGVQEQWSSCSIFSTQEHAVAVFAEAGMPVFTWKGKMKEGYPWCIEQTLYFKDGPLNMILDDGGDLTNLIHTKYVPTAHVGHLRHL

SEQ ID NO: 13040 - protein, 411 aa, Homo sapiens
MATTATMATSGSARKRLLKEEDMTKVEFETSEEVDVTPTFDTMGLREDLLRGIYAYGFEKPSAIQQRAIKQIIKGRDVIAQSQSGTGKTATFSISVLQCLDIQVRETQALILAPTRELAVQIQKGLLALGDYMNVQCHACIGGTNVGEDIRKLDYGQHVVAGTPGRVFDMIRRRSLRTRAIKMLVLDEADEMLNKGFKEQIYDVYRYLPPATQVVLISATLPHEILEMTNKFMTDPIRILVKRDELTLEGIKQFFVAVEREEWKFDTLCDLYDTLTITQAVIFCNTKRKVDWLTEKMREANFTVSSMHGDMPQKERESIMKEFRSGASRVLISTDVWARGLDVPQVSLIINYDLPNNRELYIHRIGRSGRYGRKGVAINFVKNDDIRILRDIEQYYSTQIDEMPMNVADLI

SEQ ID NO: 13041 - protein, 411 aa, Homo sapiens; identical to SEQ ID NO: 13040

SEQ ID NO: 13042 - protein, 502 aa, Homo sapiens [sequence omitted]

SEQ ID NO: 13043 - protein, 401 aa, Homo sapiens
MPVQLSEHPEWNESMHSLRISVGGLPVLASMTKAADPRFRPRWKVILTFFVGAAILWLLCSHRPAPGRPPTHNAHNWRLGQAPANWYNDTYPLSPPQRTPAGIRYRIAVIADLDTESRAQEENTWFSYLKKGYLTLSDSGDKVAVEWDKDHGVLESHLAEKGRGMELSDLIVFNGKLYSVDDRTGVVYQIEGSKAVPWVILSDGDGTVEKGFKAEWLAVKDERLYVGGLGKEWTTTTGDVVNENPEWVKVVGYKGSVDHENWVSNYNALRAAAGIQPPGYLIHESACWSDTLQRWFFLPRRASQERYSEKDDERKGANLLLSASPDFGDIAVSHVGAVVPTHGFSSFKFIPNTDDQIIVALKSEEDSGRVASYIMAFTLDGRFLLPETKIGSVKYEGIEFI

SEQ ID NO: 13044 - protein, 1254 aa, Homo sapiens [sequence omitted]

SEQ ID NO: 13045 - protein, 1192 aa, Homo sapiens [sequence omitted]

SEQ ID NO: 13046 - protein, 1205 aa, Homo sapiens [sequence omitted]

SEQ ID NO: 13047 - protein, 966 aa, Homo sapiens [sequence omitted]

SEQ ID NO: 13048 - protein, 1062 aa, Homo sapiens [sequence omitted]

SEQ ID NO: 13049 - protein, 1168 aa, Homo sapiens [sequence omitted]

SEQ ID NO: 13050 - protein, 1239 aa, Homo sapiens
MSRLLWRKVAGATVGPGPVPAPGRWVSSSVPASDPSDGQRRRQQQQQQQQQQQQQPQQPQVLSSEGGQLRHNPLDIQMLSRGLHEQIFGQGGEMPGEAAVRRSVEHLQKHGLWGQPAVPLPDVELRLPPLYGDNLDQHFRLLAQKQSLPYLEAANLLLQAQLPPKPPAWAWAEGWTRYGPEGEAVPVAIPEERALVFDVEVCLAEGTCPTLAVAISPSAWYSWCSQRLVEERYSWTSQLSPADLIPLEVPTGASSPTQRDWQEQLVVGHNVSFDRAHIREQYLIQGSRMRFLDTMSMHMAISGLSSFQRSLWIAAKQGKHKVQPPTKQGQKSQRKARRGPAISSWDWLDISSVNSLAEVHRLYVGGPPLEKEPRELFVKGTMKDIRENFQDLMQYCAQDVWATHEVFQQQLPLFLERCPHPVTLAGMLEMGVSYLPVNQNWERYLAEAQGTYEELQREMKKSLMDLANDACQLLSGERYKEDPWLWDLEWDLQEFKQKKAKKVKKEPATASKLPIEGAGAPGDPMDQEDLGPCSEEEEFQQDVMARACLQKLKGTTELLPKRPQHLPGHPGWYRKLCPRLDDPAWTPGPSLLSLQMRVTPKLMALTWDGFPLHYSERHGWGYLVPGRRDNLAKLPTGTTLESAGVVCPYRAIESLYRKHCLEQGKQQLMPQEAGLAEEFLLTDNSAIWQTVEELDYLEVEAEAKMENLRAAVPGQPLALTARGGPKDTQPSYHHGNGPYNDVDIPGCWFFKLPHKDGNSCNVGSPFAKDFLPKMEDGTLQAGPGGASGPRALEINKMISFWRNAHKRISSQMVVWLPRSALPRAVIRHPDYDEEGLYGAILPQVVTAGTITRRAVEPTWLTASNARPDRVGSELKAMVQAPPGYTLVGADVDSQELWIAAVLGDAHFAGMHGCTAFGWMTLQGRKSRGTDLHSKTATTVGISREHAKIFNYGRIYGAGQPFAERLLMQFNHRLTQQEAAEKAQQMYAATKGLRWYRLSDEGEWLVRELNLPVDRTEGGWISLQDLRKVQRETARKSQWKKWEVVAERAWKGGTESEMFNKLESIATSDIPRTPVLGCCISRALEPSAVQEEFMTSRVNWVVQSSAVDYLHLMLVAMKWLFEEFAIDGRFCISIHDEVRYLVREEDRYRAALALQITNLLTRCMFAYKLGLNDLPQSVAFFSAVDIDRCLRKEVTMDCKTPSNPTGMERRYGIPQGEALDIYQIIELTKGSLEKRSQPGP

SEQ ID NO: 13051 - protein, 1239 aa, Homo sapiens; identical to SEQ ID NO: 13050

SEQ ID NO: 13052 - protein, 325 aa, Homo sapiens
MVSPATRKSLPKVKAMDFITSTAILPLLFGCLGVFGLFRLLQWVRGKAYLRNAVVVITGATSGLGKECAKVFYAAGAKLVLCGRNGGALEELIRELTASHATKVQTHKPYLVTFDLTDSGAIVAAAAEILQCFGYVDILVNNAGISYRGTIMDTTVDVDKRVMETNYFGPVALTKALLPSMIKRRQGHIVAISSIQGKMSIPFRSAYAASKHATQAFFDCLRAEMEQYEIEVTVISPGYIHTNLSVNAITADGSRYGVMDTTTAQGRSPVEVAQDVLAAVGKKKKDVILADLLPSLAVYLRTLAPGLFFSLMASRARKERKSKNS

SEQ ID NO: 13053 - protein, 331 aa, Homo sapiens [sequence omitted]

SEQ ID NO: 13054 - protein, 310 aa, Homo sapiens
MDFITSTAILPLLFGCLGVFGLFRLLQWVRGKAYLRNAVVVITGATSGLGKECAKVFYAAGAKLVLCGRNGGALEELIRELTASHATKVQTHKPYLVTFDLTDSGAIVAAAAEILQCFGYVDILVNNAGISYRGTIMDTTVDVDKRVMETNYFGPVALTKALLPSMIKRRQGHIVAISSIQGKMSIPFRSAYAASKHATQAFFDCLRAEMEQYEIEVTVISPGYIHTNLSVNAITADGSRYGVMDTTTAQGRSPVEVAQDVLAAVGKKKKDVILADLLPSLAVYLRTLAPGLFFSLMASRARKERKSKNS

SEQ ID NO: 13055 - protein, 2004 aa, Homo sapiens
MVKLANPLYTEWILEAIKKVKKQKQRPSEERICNAVSSSHGLDRKTVLEQLELSVKDGTILKVSNKGLNSYKDPDNPGRIALPKPRNHGKLDNKQNVDWNKLIKRAVEGLAESGGSTLKSIERFLKGQKDVSALFGGSAASGFHQQLRLAIKRAIGHGRLLKDGPLYRLNTKATNVDGKESCESLSCLPPVSLLPHEKDKPVAEPIPICSFCLGTKEQNREKKPEELISCADCGNSGHPSCLKFSPELTVRVKALRWQCIECKTCSSCRDQGKNADNMLFCDSCDRGFHMECCDPPLTRMPKGMWICQICRPRKKGRKLLQKKAAQIKRRYTNPIGRPKNRLKKQNTVSKGPFSKVRTGPGRGRKRKITLSSQSASSSSEEGYLERIDGLDFCRDSNVSLKFNKKTKGLIDGLTKFFTPSPDGRKARGEVVDYSEQYRIRKRGNRKSSTSDWPTDNQDGWDGKQENEERLFGSQEIMTEKDMELFRDIQEQALQKVGVTGPPDPQVRCPSVIEFGKYEIHTWYSSPYPQEYSRLPKLYLCEFCLKYMKSRTILQQHMKKCGWFHPPANEIYRKNNISVFEVDGNVSTIYCQNLCLLAKLFLDHKTLYYDVEPFLFYVLTQNDVKGCHLVGYFSKEKHCQQKYNVSCIMILPQYQRKGYGRFLIDFSYLLSKREGQAGSPEKPLSDLGRLSYMAYWKSVILECLYHQNDKQISIKKLSKLTGICPQDITSTLHHLRMLDFRSDQFVIIRREKLIQDHMAKLQLNLRPVDVDPECLRWTPVIVSNSVVSEEEEEEAEEGENEEPQCQERELEISVGKSVSHENKEQDSYSVESEKKPEVMAPVSSTRLSKQVLPHDSLPANSQPSRRGRWGRKNRKTQERFGDKDSKLLLEETSSAPQEQYGECGEKSEATQEQYTESEEQLVASEEQPSQDGKPDLPKRRLSEGVEPWRGQLKKSPEALKCRLTEGSERLPRRYSEGDRAVLRGFSESSEEEEEPESPRSSSPPILTKPTLKRKKPFLHRRRRVRKRKHHNSSVVTETISETTEVLDEPFEDSDSERPMPRLEPTFEIDEEEEEEDENELFPREYFRRLSSQDVLRCQSSSKRKSKDEEEDEESDDADDTPILKPVSLLRKRDVKNSPLEPDTSTPLKKKKGWPKGKSRKPIHWKKRPGRKPGFKLSREIMPVSTQACVIEPIVSIPKAGRKPKIQESEETVEPKEDMPLPEERKEEEEMQAEAEEAEEGEEEDAASSEVPAASPADSSNSPETETKEPEVEEEEEKPRVSEEQRQSEEEQQELEEPEPEEEEDAAAETAQNDDHDADDEDDGHLESTKKKELEEQPTREDVKEEPGVQESFLDANMQKSREKIKDKEETELDSEEEQPSHDTSVVSEQMAGSEDDHEEDSHTKEELIELKEEEEIPHSELDLETVQAVQSLTQEESSEHEGAYQDCEETLAACQTLQSYTQADEDPQMSMVEDCHASEHNSPISSVQSHPSQSVRSVSSPNVPALESGYTQISPEQGSLSAPSMQNMETSPMMDVPSVSDHSQQVVDSGFSDLGSIESTTENYENPSSYDSTMGGSICGNSSSQSSCSYGGLSSSSSLTQSSCVVTQQMASMGSSCSMMQQSSVQPAANCSIKSPQSCVVERPPSNQQQQPPPPPPQQPQPPPPQPQPAPQPPPPQQQPQQQPQPQPQQPPPPPPPQQQPPLSQCSMNNSFTPAPMIMEIPESGSTGNISIYERIPGDFGAGSYSQPSATFSLAKLQQLTNTIMDPHAMPYSHSPAVTSYATSVSLSNTGLAQLAPSHPLAGTPQAQATMTPPPNLASTTMNLTSPLLQCNMSATNIGIPHTQRLQGQMPVKGHISIRSKSAPLPSAAAHQQQLYGRSPSAVAMQAGPRALAVQRGMNMGVNLMPTPAYNVNSMNMNTLNAMNSYRMTQPMMNSSYHSNPAYMNQTAQYPMQMQMGMMGSQAYTQQPMQPNPHGNMMYTGPSHHSYMNAAGVPKQSLNGPYMRR

SEQ ID NO: 13056 - protein, 1357 aa, Homo sapiens
MILPQYQRKGYGRFLIDFSYLLSKREGQAGSPEKPLSDLGRLSYMAYWKSVILECLYHQNDKQISIKKLSKLTGICPQDITSTLHHLRMLDFRSDQFVIIRREKLIQDHMAKLQLNLRPVDVDPECLRWTPVIVSNSVVSEEEEEEAEEGENEEPQCQERELEISVGKSVSHENKEQDSYSVESEKKPEVMAPVSSTRLSKQVLPHDSLPANSQPSRRGRWGRKNRKTQERFGDKDSKLLLEETSSAPQEQYGECGEKSEATQEQYTESEEQLVASEEQPSQDGKPDLPKRRLSEGVEPWRGQLKKSPEALKCRLTEGSERLPRRYSEGDRAVLRGFSESSEEEEEPESPRSSSPPILTKPTLKRKKPFLHRRRRVRKRKHHNSSVVTETISETTEVLDEPFEDSDSERPMPRLEPTFEIDEEEEEEDENELFPREYFRRLSSQDVLRCQSSSKRKSKDEEEDEESDDADDTPILKPVSLLRKRDVKNSPLEPDTSTPLKKKKGWPKGKSRKPIHWKKRPGRKPGFKLSREIMPVSTQACVIEPIVSIPKAGRKPKIQESEETVEPKEDMPLPEERKEEEEMQAEAEEAEEGEEEDAASSEVPAASPADSSNSPETETKEPEVEEEEEKPRVSEEQRQSEEEQQELEEPEPEEEEDAAAETAQNDDHDADDEDDGHLESTKKKELEEQPTREDVKEEPGVQESFLDANMQKSREKIKDKEETELDSEEEQPSHDTSVVSEQMAGSEDDHEEDSHTKEELIELKEEEEIPHSELDLETVQAVQSLTQEESSEHEGAYQDCEETLAACQTLQSYTQADEDPQMSMVEDCHASEHNSPISSVQSHPSQSVRSVSSPNVPALESGYTQISPEQGSLSAPSMQNMETSPMMDVPSVSDHSQQVVDSGFSDLGSIESTTENYENPSSYDSTMGGSICGNSSSQSSCSYGGLSSSSSLTQSSCVVTQQMASMGSSCSMMQQSSVQPAANCSIKSPQSCVVERPPSNQQQQPPPPPPQQPQPPPPQPQPAPQPPPPQQQPQQQPQPQPQQPPPPPPPQQQPPLSQCSMNNSFTPAPMIMEIPESGSTGNISIYERIPGDFGAGSYSQPSATFSLAKLQQLTNTIMDPHAMPYSHSPAVTSYATSVSLSNTGLAQLAPSHPLAGTPQAQATMTPPPNLASTTMNLTSPLLQCNMSATNIGIPHTQRLQGQMPVKGHISIRSKSAPLPSAAAHQQQLYGRSPSAVAMQAGPRALAVQRGMNMGVNLMPTPAYNVNSMNMNTLNAMNSYRMTQPMMNSSYHSNPAYMNQTAQYPMQMQMGMMGSQAYTQQPMQPNPHGNMMYTGPSHHSYMNAAGVPKQSLNGPYMRR

SEQ ID NO: 13057 - protein, 1516 aa, Homo sapiens [sequence omitted]

SEQ ID NO: 13058 - protein, 276 aa, Homo sapiens
MNSKRMLLLVLFAFSLMLVERYFRNHQVEELRLSDWFHPRKRPDVITKTDWLAPVLWEGTFDRRVLEKHYRRRNITVGLAVFATGRFAEEYLRPFLHSANKHFMTGYRVIFYIMVDAFFKLPDIEPSPLRTFKAFKVGTERWWLDGPLVHVKSLGEHIASHIQDEVDFLFSMAANQVFQNEFGVETLGPLVAQLHAWWYFRNTKNFPYERRPTSAACIPFGQGDFYYGNLMVGGTPHNILDFIKEYLNGVIHDIKNGLNSTYEKHLNKYFYLNKPT

SEQ ID NO: 13059 - protein, 310 aa, Homo sapiens
MVRTKTWTLKKHFVGYPTNSDFELKTSELPPLKNGEVLLEALFLTVDPYMRVVESKNVALPKGTIVLASPGWTTHSISDGKDLEKLLTEWPDTIPLSLALGTVGMPGLTAYFGLLEICGVKGGETVMVNAAAGAVGSVVGQIAKLKGCKVVGAVGSDEKVAYLQKLGFDVVFNYKTVESLEETLKKASPDGYDCYFDNVGGEFSNTVIGQMKKFGRIAICGAISTYNRTGPLPPGPPPEIVIYQELRMEAFVVYRWQGDARQKALKDLLKWVLEGKIQYKEYIIEGFENMPAAFMGMLKGDNLGKTIVKA

SEQ ID NO: 13060 - protein, 281 aa, Homo sapiens
MVRTKTWTLKKHFVGYPTNSDFELKTSELPPLKNGEVLLEALFLTVDPYMRVVESKNVALPKGTIVLASPGWTTHSISDGKDLEKLLTEWPDTIPLSLALGTVGMPGLTAYFGLLEICGVKGGETVMVNAAAGAVGSVVGQIAKLKGCKVVGAVGSDEKVAYLQKLGFDVVFNYKTVESLEETLKKASPDGYDCYFDNVGGEFSNTVIGQMKKFGRIAICGAISTYNRTGPLPPGPPPEIVIYQELRMEAFVVYRWQGDARQKALKDLLKWVLELPYFVID

SEQ ID NO: 13061 - protein, 329 aa, Homo sapiens
MVRTKTWTLKKHFVGYPTNSDFELKTSELPPLKNGEVLLEALFLTVDPYMRVAAKRLKEGDTMMGQQVAKVVESKNVALPKGTIVLASPGWTTHSISDGKDLEKLLTEWPDTIPLSLALGTVGMPGLTAYFGLLEICGVKGGETVMVNAAAGAVGSVVGQIAKLKGCKVVGAVGSDEKVAYLQKLGFDVVFNYKTVESLEETLKKASPDGYDCYFDNVGGEFSNTVIGQMKKFGRIAICGAISTYNRTGPLPPGPPPEIVIYQELRMEAFVVYRWQGDARQKALKDLLKWVLEGKIQYKEYIIEGFENMPAAFMGMLKGDNLGKTIVKA

SEQ ID NO: 13062 - protein, 105 aa, Homo sapiens
MVKQIESKTAFQEALDAAGDKLVVVDFSATWCGPCKMIKPFFHSLSEKYSNVIFLEVDVDDCQDVASECEVKCMPTFQFFKKGQKVGEFSGANKEKLEATINELV

SEQ ID NO: 13063 - protein, 85 aa, Homo sapiens
MVKQIESKTAFQEALDAAGDKLVVVDFSATWCGPCKMIKPFFHDVASECEVKCMPTFQFFKKGQKVGEFSGANKEKLEATINELV

SEQ ID NO: 13064 - protein, 345 aa, Homo sapiens
MLPNTGRLAGCTVFITGASRGIGKAIALKAAKDGANIVIAAKTAQPHPKLLGTIYTAAEEIEAVGGKALPCIVDVRDEQQISAAVEKAIKKFGAYTIAKYGMSMYVLGMAEEFKGEIAVNALWPKTAIHTAAMDMLGGPGIESQCRKVDIIADAAYSIFQKPKSFTGNFVIDENILKEEGIENFDVYAIKPGHPLQPDFFLDEYPEAVSKKVESTGAVPEFKEEKLQLQPKPRSGAVEETFRIVKDSLSDDVVKATQAIYLFELSGEDGGTWFLDLKSKGGNVGYGEPSDQADVVMSMTTDDFVKMFSGKLKPTMAFMSGKLKIKGNMALAIKLEKLMNQMNARL

SEQ ID NO: 13065 - protein, 345 aa, Homo sapiens; identical to SEQ ID NO: 13064

SEQ ID NO: 13066 - protein, 319 aa, Homo sapiens
MLPNTGRLAGCTVFITGASRGIGKAIALKAAKDGANIVIAAKTAQPHPKLLGTIYTAAEEIEAVGGKALPCIVDVRDEQQISAAVEKAIKKFGAYTIAKYGMSMYVLGMAEEFKGEIAVNALWPKTAIHTAAMDMLGGPGIESQCRKVDIIADAAYSIFQKPKSFTGNFVIDENILKEEGIENFDVYAIKPGHPLQPDFFLDEYPEAVSKKVESTGAVPEFKEEKLQLQPKPRSGAVEETFRIVKDSLSDDVVKATQAIYLFELSVSADNSTCSLTEEIKRFLLRSRQVDAVSVKIKKNKVHSSRIILWLSQREGRETS

SEQ ID NO: 13067 - protein, 623 aa, Homo sapiens
MTAQSRSPTTPTFPGPSQRTPLTPCPVQTPRLGKALIHCWTDPGQPLGEQQRVRRQRTETSEPTMRLHRLRARLSAVACGLLLLLVRGQGQDSASPIRTTHTGQVLGSLVHVKGANAGVQTFLGIPFAKPPLGPLRFAPPEPPESWSGVRDGTTHPAMCLQDLTAVESEFLSQFNMTFPSDSMSEDCLYLSIYTPAHSHEGSNLPVMVWIHGGALVFGMASLYDGSMLAALENVVVVIIQYRLGVLGFFSTGDKHATGNWGYLDQVAALRWVQQNIAHFGGNPDRVTIFGESAGGTSVSSLVVSPISQGLFHGAIMESGVALLPGLIASSADVISTVVANLSACDQVDSEALVGCLRGKSKEEILAINKPFKMIPGVVDGVFLPRHPQELLASADFQPVPSIVGVNNNEFGWLIPKVMRIYDTQKEMDREASQAALQKMLTLLMLPPTFGDLLREEYIGDNGDPQTLQAQFQEMMADSMFVIPALQVAHFQCSRAPVYFYEFQHQPSWLKNIRPPHMKADHGDELPFVFRSFFGGNYIKFTEEEEQLSRKMMKYWANFARNGNPNGEGLPHWPLFDQEEQYLQLNLQPAVGRALKAHRLQFWKKALPQKIQELEEPEERHTEL

SEQ ID NO: 13068 - protein, 607 aa, Homo sapiens
MTAQSRSPTTPTFPGPSQRTPLTPCPVQTPRLGKALIHCWTDPGQPLGEQQRVRRQRTETSEPTMRLHRLRARLSAVACGLLLLLVRGQGQDSASPIRTTHTGQVLGSLVHVKGANAGVQTFLGIPFAKPPLGPLRFAPPEPPESWSGVRDGTTHPAMCLQDLTAVESEFLSQFNMTFPSDSMSEDCLYLSIYTPAHSHEGSNLPVMVWIHGGALVFGMASLYDGSMLAALENVVVVIIQYRLGVLGFFSTGDKHATGNWGYLDQVAALRWVQQNIAHFGGNPDRVTIFGESAGGTSVSSLVVSPISQGLFHGAIMESGVALLPGLIASSADVISTVVANLSACDQVDSEALVGCLRGKSKEEILAINKPFKMIPGVVDGVFLPRHPQELLASADFQPVPSIVGVNNNEFGWLIPKVMRIYDTQKEMDREASQAALQKMLTLLMLPPTFGDLLREEYIGDNGDPQTLQAQFQEMMADSMFVIPALQVAHFQCSRAPVYFYEFQHQPSWLKNIRPPHMKADHVKFTEEEEQLSRKMMKYWANFARNGNPNGEGLPHWPLFDQEEQYLQLNLQPAVGRALKAHRLQFWKKALPQKIQELEEPEERHTEL

SEQ ID NO: 13069 - protein, 623 aa, Homo sapiens; identical to SEQ ID NO: 13067

SEQ ID NO: 13070 - protein, 163 aa, Homo sapiens
MVGGGGVGGGLLENANPLIYQRSGERPVTAGEEDEQVPDSIDAREIFDLIRSINDPEHPLTLEELNVVEQVRVQVSDPESTVAVAFTPTIPHCSMATLIGLSIKVKLLRSLPQRFKMDVHITPGTHASEHAVNKQLADKERVAAALENTHLLEVVNQCLSARS

SEQ ID NO: 13071 - protein, 566 aa, Homo sapiens
MLDLEVVPERSLGNEQWEFTLGMPLAQAVAILQKHCRIIKNVQVLYSEQSPLSHDLILNLTQDGIKLMFDAFNQRLKVIEVCDLTKVKLKYCGVHFNSQAIAPTIEQIDQSFGATHPGGKPSPSDSSGHQWQFIAINLPGSAIPPHFLESGSHRIVGLVLGCEGNILPLVFNLVGQFRNKPQGRCCQSLLPARLVYVSHFRCQSTMLFSSPPPPTVYNSAEQLFHLNFRGLSFSFQLDSWTEAPKYEPNFAHGLASLQIPHGATVKRMYIYSGNSLQDTKAPMMPLSCFLGNVYAESVDVLRDGTGPAGLRLRLLAAGCGPGLLADAKMRVFERSVYFGDSCQDVLSMLGSPHKVFYKSEDKMKIHSPSPHKQVPSKCNDYFFNYFTLGVDILFDANTHKVKKFVLHTNYPGHYNFNIYHRCEFKIPLAIKKENADGQTETCTTYSKWDNIQELLGHPVEKPVVLHRSSSPNNTNPFGSTFCFGLQRMIFEVMQNNHIASVTLYGPPRYSSVHLWPAGASRGHRLQREAQSLSLDSWTQELSTNKEAGEVNPCPMHIGKTWGSFCD

SEQ ID NO: 13072 - protein, 422 aa, Homo sapiens
MLDLEVVPERSLGNEQWEFTLGMPLAQAVAILQKHCRIIKNVQVLYSEQSPLSHDLILNLTQDGIKLMFDAFNQRLKVIEVCDLTKVKLKYCGVHFNSQAIAPTIEQIDQSFGATHPGVYNSAEQLFHLNFRGLSFSFQLDSWTEAPKYEPNFAHGLASLQIPHGATVKRMYIYSGNSLQDTKAPMMPLSCFLGNVYAESVDVLRDGTGPAGLRLRLLAAGCGPGLLADAKMRVFERSVYFGDSCQDVLSMLGSPHKVFYKSEDKMKIHSPSPHKQVPSKCNDYFFNYFTLGVDILFDANTHKVKKFVLHTNYPGHYNFNIYHRCEFKIPLAIKKENADGQTETCTTYSKWDNIQELLGHPVEKPVVLHRSSSPNNTNPFGSTFCFGLQRMIFEVMQNNHIASVTLYGPPRPGSHLRTAELP

SEQ ID NO: 13073 - protein, 469 aa, Homo sapiens
MLDLEVVPERSLGNEQWEFTLGMPLAQAVAILQKHCRIIKNVQVLYSEQSPLSHDLILNLTQDGIKLMFDAFNQRLKVIEVCDLTKVKLKYCGVHFNSQAIAPTIEQIDQSFGATHPGVYNSAEQLFHLNFRGLSFSFQLDSWTEAPKYEPNFAHGLASLQIPHGATVKRMYIYSGNSLQDTKAPMMPLSCFLGNVYAESVDVLRDGTGPAGLRLRLLAAGCGPGLLADAKMRVFERSVYFGDSCQDVLSMLGSPHKVFYKSEDKMKIHSPSPHKQVPSKCNDYFFNYFTLGVDILFDANTHKVKKFVLHTNYPGHYNFNIYHRCEFKIPLAIKKENADGQTETCTTYSKWDNIQELLGHPVEKPVVLHRSSSPNNTNPFGSTFCFGLQRMIFEVMQNNHIASVTLYGPPRYSSVHLWPAGASRGHRLQREAQSLSLDSWTQELSTNKEAGEVNPCPMHIGKTWGSFCD

SEQ ID NO: 13074 - protein, 422 aa, Homo sapiens; identical to SEQ ID NO: 13072

SEQ ID NO: 13075 - protein, 422 aa, Homo sapiens; identical to SEQ ID NO: 13072

SEQ ID NO: 13076 - protein, 120 aa, Homo sapiens [sequence omitted]

SEQ ID NO: 13077 - protein, 309 aa, Homo sapiens [sequence omitted]

SEQ ID NO: 13078 - protein, 325 aa, Homo sapiens
MAVGNNTQRSYSIIPCFIFVELVIMAGTVLLAYYFECTDTFQVHIQGFFCQDGDLMKPYPGTEEESFITPLVLYCVLAATPTAIIFIGEISMYFIKSTRESLIAQEKTILTGECCYLNPLLRRIIRFTGVFAFGLFATDIFVNAGQVVTGHLTPYFLTVCKPNYTSADCQAHHQFINNGNICTGDLEVIEKARRSFPSKHAALSIYSALYATMYITSTIKTKSSRLAKPVLCLGTLCTAFLTGLNRVSEYRNHCSDVIAGFILGTAVALFLGMCVVHNFKGTQGSPSKPKPEDPRGVPLMAFPRIESPLETLSAQNHSASMTEVT

SEQ ID NO: 13079 - protein, 325 aa, Homo sapiens; identical to SEQ ID NO: 13078

SEQ ID NO: 13080 - protein, 325 aa, Homo sapiens; identical to SEQ ID NO: 13078

SEQ ID NO: 13081 - protein, 161 aa, Homo sapiens
MEYTGSKYIGEYVDGRMEGKAKYILPTETIYVGEMKDGMFHGEGTLYFPSGSQYDAIWENGLAIKGTYTFSDGLHYDEKNWHYCDGYDRRFYTEILNGLKPAGMAQLTNMDPPRKIPKGYYDCGDGFYNPVTRVVKDYRNRFLRNADDDEHEWITRTCRKG

SEQ ID NO: 13082 - protein, 150 aa, Homo sapiens
MSSSRMEGKAKYILPTETIYVGEMKDGMFHGEGTLYFPSGSQYDAIWENGLAIKGTYTFSDGLHYDEKNWHYCDGYDRRFYTEILNGLKPAGMAQLTNMDPPRKIPKGYYDCGDGFYNPVTRVVKDYRNRFLRNADDDEHEWITRTCRKG

SEQ ID NO: 13083 - protein, 445 aa, Homo sapiens
MIREKAAPVSLDSSHQLVLKVQGLKLKEACGVLHKGLKVLAFQQPGSVAVGLSGIMAAQKDLWDAIVIGAGIQGCFTAYHLAKHRKRILLLEQFFLPHSRGSSHGQSRIIRKAYLEDFYTRMMHECYQIWAQLEHEAGTQLHRQTGLLLLGMKENQELKTIQANLSRQRVEHQCLSSEELKQRFPNIRLPRGEVGLLDNSGGVIYAYKALRALQDAIRQLGGIVRDGEKVVEINPGLLVTVKTTSRSYQAKSLVITAGPWTNQLLRPLGIEMPLQTLRINVCYWREMVPGSYGVSQAFPCFLWLGLCPHHIYGLPTGEYPGLMKVSYHHGNHADPEERDCPTARTDIGDVQILSSFVRDHLPDLKPEPAVIESCMYTNTPDEQFILDRHPKYDNIVIGAGFSGHGFKLAPVVGKILYELSMKLTPSYDLAPFRISRFPSLGKAHL

SEQ ID NO: 13084 - protein, 390 aa, Homo sapiens
MAAQKDLWDAIVIGAGIQGCFTAYHLAKHRKRILLLEQFFLPHSRGSSHGQSRIIRKAYLEDFYTRMMHECYQIWAQLEHEAGTQLHRQTGLLLLGMKENQELKTIQANLSRQRVEHQCLSSEELKQRFPNIRLPRGEVGLLDNSGGVIYAYKALRALQDAIRQLGGIVRDGEKVVEINPGLLVTVKTTSRSYQAKSLVITAGPWTNQLLRPLGIEMPLQTLRINVCYWREMVPGSYGVSQAFPCFLWLGLCPHHIYGLPTGEYPGLMKVSYHHGNHADPEERDCPTARTDIGDVQILSSFVRDHLPDLKPEPAVIESCMYTNTPDEQFILDRHPKYDNIVIGAGFSGHGFKLAPVVGKILYELSMKLTPSYDLAPFRISRFPSLGKAHL

SEQ ID NO: 13085 - protein, 490 aa, Homo sapiens
MNLAEICDNAKKGREYALLGNYDSSMVYYQGVMQQIQRHCQSVRDPAIKGKWQQVRQELLEEYEQVKSIVSTLESFKIDKPPDFPVSCQDEPFRDPAVWPPPVPAEHRAPPQIRRPNREVRPLRKEMAGVGARGPVGRAHPISKSEKPSTSRDKDYRARGRDDKGRKNMQDGASDGEMPKFDGAGYDKDLVEALERDIVSRNPSIHWDDIADLEEAKKLLREAVVLPMWMPDFFKGIRRPWKGVLMVGPPGTGKTMLAKAVATECGTTFFNVSSSTLTSKYRGESEKLVRLLFEMARFYAPTTIFIDEIDSICSRRGTSDEHEASRRVKSELLIQMDGVGGALENDDPSKMVMVLAATNFPWDIDEALRRRLEKRIYIPLPTAKGRAELLKINLREVELDPDIQLEDIAEKIEGYSGADITNVCRDASLMAMRRRINGLSPEEIRALSKEELQMPVTKGDFELALKKIAKSVSAADLEKYEKWMVEFGSA

SEQ ID NO: 13086 - protein, 339 aa, Homo sapiens
MPLCPLAHAMQPQSVLHSGYFHPLLRAWQTATTTLNASNLIYPIFVTDVPDDIQPITSLPGVARYGVKRLEEMLRPLVEEGLRCVLIFGVPSRVPKDERGSAADSEESPAIEAIHLLRKTFPNLLVACDVCLCPYTSHGHCGLLSENGAFRAEESRQRLAEVALAYAKAGCQVVAPSDMMDGRVEAIKEALMAHGLGNRVSVMSYSAKFASCFYGPFRDAAKSSPAFGDRRCYQLPPGARGLALRAVDRDVREGADMLMVKPGMPYLDIVREVKDKHPDLPLAVYHVSGEFAMLWHGAQAGAFDLKAAVLEAMTAFRRAGADIIITYYTPQLLQWLKEE

SEQ ID NO: 13087 - protein, 339 aa, Homo sapiens; identical to SEQ ID NO: 13086

SEQ ID NO: 13088 - protein, 339 aa, Homo sapiens; identical to SEQ ID NO: 13086

SEQ ID NO: 13089 - protein, 747 aa, Homo sapiens
MWGFLKRPVVVTADINLSLVALTGMGLLSRLWRLTYPRAVVFDEVYYGQYISFYMKQIFFLDDSGPPFGHMVLALGGYLGGFDGNFLWNRIGAEYSSNVPVWSLRLLPALAGALSVPMAYQIVLELHFSHCAAMGAALLMLIENALITQSRLMLLESVLIFFNLLAVLSYLKFFNCQKHSPFSLSWWFWLTLTGVACSCAVGIKYMGVFTYVLVLGVAAVHAWHLLGDQTLSNVGADVQCCMRPACMGQMRMSQGVCVFCHLLARAVALLVIPVVLYLLFFYVHLILVFRSGPHDQIMSSAFQASLEGGLARITQGQPLEVAFGSQVTLRNVFGKPVPCWLHSHQDTYPMIYENGRGSSHQQQVTCYPFKDVNNWWIVKDPRRHQLVVSSPPRPVRHGDMVQLVHGMTTRSLNTHDVAAPLSPHSQEVSCYIDYNISMPAQNLWRLEIVNRGSDTDVWKTILSEVRFVHVNTSAVLKLSGAHLPDWGYRQLEIVGEKLSRGYHGSTVWNVEEHRYGASQEQRERERELHSPAQVDVSRNLSFMARFSELQWRMLALRSDDSEHKYSSSPLEWVTLDTNIAYWLHPRTSAQIHLLGNIVIWVSGSLALAIYALLSLWYLLRRRRNVHDLPQDAWLRWVLAGALCAGGWAVNYLPFFLMEKTLFLYHYLPALTFQILLLPVVLQHISDHLCRSQLQRSIFSALVVAWYSSACHVSNTLRPLTYGDKSLSPHELKALRWKDSWDILIRKH

SEQ ID NO: 13090 - protein, 747 aa, Homo sapiens; identical to SEQ ID NO: 13089

SEQ ID NO: 13091 - protein, 747 aa, Homo sapiens; identical to SEQ ID NO: 13089

SEQ ID NO: 13092 - protein, 725 aa, Homo sapiens
MWGFLKRPVVVTADINLSLVALTGMGLLSRLWRLTYPRAVVFDEVYYGQYISFYMKQIFFLDDSGPPFGHMVLALGGYLGGFDGNFLWNRIGAEYSSNVPVWSLRLLPALAGALSVPMAYQIVLELHFSHCAAMGAALLMLIENALITQSRLMLLESVLIFFNLLAVLSYLKFFNCQKHSPFSLSWWFWLTLTGVACSCAVGIKYMGVFTYVLVLGVAAVHAWHLLGDQTLSNVCVFCHLLARAVALLVIPVVLYLLFFYVHLILVFRSGPHDQIMSSAFQASLEGGLARITQGQPLEVAFGSQVTLRNVFGKPVPCWLHSHQDTYPMIYENGRGSSHQQQVTCYPFKDVNNWWIVKDPRRHQLVVSSPPRPVRHGDMVQLVHGMTTRSLNTHDVAAPLSPHSQEVSCYIDYNISMPAQNLWRLEIVNRGSDTDVWKTILSEVRFVHVNTSAVLKLSGAHLPDWGYRQLEIVGEKLSRGYHGSTVWNVEEHRYGASQEQRERERELHSPAQVDVSRNLSFMARFSELQWRMLALRSDDSEHKYSSSPLEWVTLDTNIAYWLHPRTSAQIHLLGNIVIWVSGSLALAIYALLSLWYLLRRRRNVHDLPQDAWLRWVLAGALCAGGWAVNYLPFFLMEKTLFLYHYLPALTFQILLLPVVLQHISDHLCRSQLQRSIFSALVVAWYSSACHVSNTLRPLTYGDKSLSPHELKALRWKDSWDILIRKH

SEQ ID NO: 13093 - protein, 450 aa, Homo sapiens
MSSAFQASLEGGLARITQGQPLEVAFGSQVTLRNVFGKPVPCWLHSHQDTYPMIYENGRGSSHQQQVTCYPFKDVNNWWIVKDPRRHQLVVSSPPRPVRHGDMVQLVHGMTTRSLNTHDVAAPLSPHSQEVSCYIDYNISMPAQNLWRLEIVNRGSDTDVWKTILSEVRFVHVNTSAVLKLSGAHLPDWGYRQLEIVGEKLSRGYHGSTVWNVEEHRYGASQEQRERERELHSPAQVDVSRNLSFMARFSELQWRMLALRSDDSEHKYSSSPLEWVTLDTNIAYWLHPRTSAQIHLLGNIVIWVSGSLALAIYALLSLWYLLRRRRNVHDLPQDAWLRWVLAGALCAGGWAVNYLPFFLMEKTLFLYHYLPALTFQILLLPVVLQHISDHLCRSQLQRSIFSALVVAWYSSACHVSNTLRPLTYGDKSLSPHELKALRWKDSWDILIRKH

SEQ ID NO: 13094 - protein, 747 aa, Homo sapiens; identical to SEQ ID NO: 13089

SEQ ID NO: 13095 - protein, 693 aa, Homo sapiens
MKQIFFLDDSGPPFGHMVLALGGYLGGFDGNFLWNRIGAEYSSNVPVWSLRLLPALAGALSVPMAYQIVLELHFSHCAAMGAALLMLIENALITQSRLMLLESVLIFFNLLAVLSYLKFFNCQKHSPFSLSWWFWLTLTGVACSCAVGIKYMGVFTYVLVLGVAAVHAWHLLGDQTLSNVGADVQCCMRPACMGQMRMSQGVCVFCHLLARAVALLVIPVVLYLLFFYVHLILVFRSGPHDQIMSSAFQASLEGGLARITQGQPLEVAFGSQVTLRNVFGKPVPCWLHSHQDTYPMIYENGRGSSHQQQVTCYPFKDVNNWWIVKDPRRHQLVVSSPPRPVRHGDMVQLVHGMTTRSLNTHDVAAPLSPHSQEVSCYIDYNISMPAQNLWRLEIVNRGSDTDVWKTILSEVRFVHVNTSAVLKLSGAHLPDWGYRQLEIVGEKLSRGYHGSTVWNVEEHRYGASQEQRERERELHSPAQVDVSRNLSFMARFSELQWRMLALRSDDSEHKYSSSPLEWVTLDTNIAYWLHPRTSAQIHLLGNIVIWVSGSLALAIYALLSLWYLLRRRRNVHDLPQDAWLRWVLAGALCAGGWAVNYLPFFLMEKTLFLYHYLPALTFQILLLPVVLQHISDHLCRSQLQRSIFSALVVAWYSSACHVSNTLRPLTYGDKSLSPHELKALRWKDSWDILIRKH

SEQ ID NO: 13096 - protein, 348 aa, Homo sapiens
MVQLVHGMTTRSLNTHDVAAPLSPHSQEVSCYIDYNISMPAQNLWRLEIVNRGSDTDVWKTILSEVRFVHVNTSAVLKLSGAHLPDWGYRQLEIVGEKLSRGYHGSTVWNVEEHRYGASQEQRERERELHSPAQVDVSRNLSFMARFSELQWRMLALRSDDSEHKYSSSPLEWVTLDTNIAYWLHPRTSAQIHLLGNIVIWVSGSLALAIYALLSLWYLLRRRRNVHDLPQDAWLRWVLAGALCAGGWAVNYLPFFLMEKTLFLYHYLPALTFQILLLPVVLQHISDHLCRSQLQRSIFSALVVAWYSSACHVSNTLRPLTYGDKSLSPHELKALRWKDSWDILIRKH

SEQ ID NO: 13097 - protein, 277 aa, Homo sapiens
MASAGGEDCESPAPEADRPHQRPFLIGVSGGTASGKSTVCEKIMELLGQNEVEQRQRKVVILSQDRFYKVLTAEQKAKALKGQYNFDHPDAFDNDLMHRTLKNIVEGKTVEVPTYDFVTHSRLPETTVVYPADVVLFEGILVFYSQEIRDMFHLRLFVDTDSDVRLSRRVLRDVRRGRDLEQILTQYTTFVKPAFEEFCLPTKKYADVIIPRGVDNMVAINLIVQHIQDILNGDICKWHRGGSNGRSYKRTFSEPGDHPGMLTSGKRSHLESSSRPH

SEQ ID NO: 13098 - protein, 219 aa, Homo sapiens
MASAGGEDCESPAPEADRPHQRPFLIGVSGGTASGKSTVCEKIMELLGQNEVEQRQRKVVILSQDRFYKVLTAEQKAKALKGQYNFDHPDAFDNDLMHRTLKNIVEGKTVEVPTYDFVTHSRLPETTVVYPADVVLFEGILVFYSQEIRDMFHLRLFVDTDSDVRLSRRVLRDVRRGRDLEQILTQYTTFVKPAFEEFCLPLHFLPHFLDHGLSHLADD

SEQ ID NO: 13099 - protein, 201 aa, Homo sapiens
MASAGGEDCESPAPEADRPHQRPFLIGVSGGTASGKSTVCEKIMELLGQNEVEQRQRKVVILSQDRFYKVLTAEQKAKALKGQYNFDHPDAFDNDLMHRTLKNIVEGKTVEVPTYDFVTHSRLPETTVVYPADVVLFEGILVFYSQEIRDMFHLRLFVDTDSDVRLSRRDKEVCRCDHPARSGQYGCHQPDRAAHPGHSEW

SEQ ID NO: 13100 - protein, 540 aa, Homo sapiens
MSSAAENGEAAPGKQNEEKTYKKTASSAIKGAIQLGIGYTVGNLTSKPERDVLMQDFYVVESVFLPSEGSNLTPAHHYPDFRFKTYAPLAFRYFRELFGIKPDDYLYSICSEPLIELSNPGASGSLFFVTSDDEFIIKTVQHKEAEFLQKLLPGYYMNLNQNPRTLLPKFYGLYCMQSGGINIRIVVMNNVLPRSMRMHFTYDLKGSTYKRRASRKEREKSNPTFKDLDFLQDMHEGLYFDTETYNALMKTLQRDCRVLESFKIMDYSLLLGIHFLDHSLKEKEEETPQNVPDAKRTGMQKVLYSTAMESIQGPGKSGDGIITENPDTMGGIPAKSHRGEKLLLFMGIIDILQSYRLMKKLEHSWKALVYDGDTVSVHRPSFYADRFLKFMNSRVFKKIQALKASPSKKRCNSIAALKATSQEIVSSISQEWKDEKRDLLTEGQSFSSLDEEALGSRHRPDLVPSTPSLFEAASLATTISSSSLYVNEHYPHDRPTLYSNSKGLPSSSTFTLEEGTIYLTAEPNTLEVQDDNASVLDVYL

SEQ ID NO: 13101 - protein, 276 aa, Homo sapiens
MDYSLLLGIHFLDHSLKEKEEETPQNVPDAKRTGMQKVLYSTAMESIQGPGKSGDGIITENPDTMGGIPAKSHRGEKLLLFMGIIDILQSYRLMKKLEHSWKALVYDGDTVSVHRPSFYADRFLKFMNSRVFKKIQALKASPSKKRCNSIAALKATSQEIVSSISQEWKDEKRDLLTEGQSFSSLDEEALGSRHRPDLVPSTPSLFEAASLATTISSSSLYVNEHYPHDRPTLYSNSKGLPSSSTFTLEEGTIYLTAEPNTLEVQDDNASVLDVYL

SEQ ID NO: 13102 - protein, 207 aa, Homo sapiens
MFSGKSTELMRRVRRFQIAQYKCLVIKYAKDTRYSSSFCTHDRNTMEALPACLLRDVAQEALGVAVIGIDEGQFFPDIVEFCEAMANAGKTVIVAALDGTFQRKPFGAILNLVPLAESVVKLTAVCMECFREAAYTKRLGTEKEVEVIGGADKYHSVCRLCYFKKASGQPAGPDNKENCPVPGKPGEAVAARKLFAPQQILQCSPAN

SEQ ID NO: 13103 - protein, 181 aa, Homo sapiens
MPKTLATAAASAHMTGQNTMEALPACLLRDVAQEALGVAVIGIDEGQFFPDIVEFCEAMANAGKTVIVAALDGTFQRKPFGAILNLVPLAESVVKLTAVCMECFREAAYTKRLGTEKEVEVIGGADKYHSVCRLCYFKKASGQPAGPDNKENCPVPGKPGEAVAARKLFAPQQILQCSPAN

SEQ ID NO: 13104 - protein, 276 aa, Homo sapiens
MAAGPARDWPARRGLKRSAREPGAYCGTALESTRVRELPGGAMSCINLPTVLPGSPSKTRGQIQVILGPMFSGKSTELMRRVRRFQIAQYKCLVIKYAKDTRYSSSFCTHDRNTMEALPACLLRDVAQEALGVAVIGIDEGQFFPDIVEFCEAMANAGKTVIVAALDGTFQRKPFGAILNLVPLAESVVKLTAVCMECFREAAYTKRLGTEKEVEVIGGADKYHSVCRLCYFKKASGQPAGPDNKENCPVPGKPGEAVAARKLFAPQQILQCSPAN

SEQ ID NO: 13105 - protein, 276 aa, Homo sapiens; identical to SEQ ID NO: 13104

SEQ ID NO: 13106 - protein, 865 aa, Homo sapiens [sequence omitted]

SEQ ID NO: 13107 - protein, 615 aa, Homo sapiens
MAVYVGMLRLGRLCAGSSGVLGARAALSRSWQEARLQGVRFLSSREVDRMVSTPIGGLSYVQGCTKKHLNSKTVGQCLETTAQRVPEREALVVLHEDVRLTFAQLKEEVDKAASGLLSIGLCKGDRLGMWGPNSYAWVLMQLATAQAGIILVSVNPAYQAMELEYVLKKVGCKALVFPKQFKTQQYYNVLKQICPEVENAQPGALKSQRLPDLTTVISVDAPLPGTLLLDEVVAAGSTRQHLDQLQYNQQFLSCHDPINIQFTSGTTGSPKGATLSHYNIVNNSNILGERLKLHEKTPEQLRMILPNPLYHCLGSVAGTMMCLMYGATLILASPIFNGKKALEAISRERGTFLYGTPTMFVDILNQPDFSSYDISTMCGGVIAGSPAPPELIRAIINKINMKDLVVAYGTTENSPVTFAHFPEDTVEQKAESVGRIMPHTEARIMNMEAGTLAKLNTPGELCIRGYCVMLGYWGEPQKTEEAVDQDKWYWTGDVATMNEQGFCKIVGRSKDMIIRGGENIYPAELEDFFHTHPKVQEVQVVGVKDDRMGEEICACIRLKDGEETTVEEIKAFCKGKISHFKIPKYIVFVTNYPLTISGKIQKFKLREQMERHLNL

SEQ ID NO: 13108 - protein, 305 aa, Homo sapiens
MAPLDLDKYVEIARLCKYLPENDLKRLCDYVCDLLLEESNVQPVSTPVTVCGDIHGQFYDLCELFRTGGQVPDTNYIFMGDFVDRGYYSLETFTYLLALKAKWPDRITLLRGNHESRQITQVYGFYDECQTKYGNANAWRYCTKVFDMLTVAALIDEQILCVHGGLSPDIKTLDQIRTIERNQEIPHKGAFCDLVWSDPEDVDTWAISPRGAGWLFGAKVTNEFVHINNLKLICRAHQLVHEGYKFMFDEKLVTVWSAPNYCYRCGNIASIMVFKDVNTREPKLFRAVPDSERVIPPRTTTPYFL

SEQ ID NO: 13109 - protein, 305 aa, Homo sapiens; identical to SEQ ID NO: 13108

SEQ ID NO: 13110 - protein, 768 aa, Homo sapiens
MKKQFNRMRQLANQTVGRAEKTEVLSEDLLQVEKRLELVKQVSHSTHKKLTACLQGQQGAEADKRSKKLPLTTLAQCLMEGSAILGDDTLLGKMLKLCGETEDKLAQELIHFELQVERDVIEPLFLLAEVEIPNIQKQRKHLAKLVLDMDSSRTRWQQTSKSSGLSSSLQPAGAKADALREEMEEAANRVEICRDQLSADMYSFVAKEIDYANYFQTLIEVQAEYHRKSLTLLQAVLPQIKAQQEAWVEKPSFGKPLEEHLTISGREIAFPIEACVTMLLECGMQEEGLFRVAPSASKLKKLKAALDCCVVDVQEYSADPHAIAGALKSYLRELPEPLMTFELYDEWIQASNVQEQDKKLQALWNACEKLPKANHNNIRYLIKFLSKLSEYQDVNKMTPSNMAIVLGPNLLWPQAEGNITEMMTTVSLQIVGIIEPIIQHADWFFPGEIEFNITGNYGSPVHVNHNANYSSMPSPDMDPADRRQPEQARRPLSVATDNMMLEFYKKDGMGVRVMDTNWVARRGSSAGRKVSCAPPSMQPPAPPAELAAPLPSPLPEQPLDSPAAPALSPSGLGLQPGPERTSTTKSKELSPGSAQKGSPGSSQGTACAGTQPGAQPGAQPGASPSPSQPPADQSPHTLRKVSKKLAPIPPKVPFGQPGAMADQSAGQPSPVSLSPTPPSTPSPYGLSYPQGYSLASGQLSPAAAPPLASPSVFTSTLSKSRPTPKPRQRPTLPPPQPPTVNLSASSPQSTEAPMLDGMSPGESMSTAV

SEQ ID NO: 13111 - protein, 818 aa, Homo sapiens [sequence omitted]

SEQ ID NO: 13112 - protein, 727 aa, Homo sapiens [sequence omitted]

SEQ ID NO: 13113 - protein, 826 aa, Homo sapiens
MWALCSLLRSAAGRTMSQGRTISQAPARRERPRKDPLRHLRTREKRGPSGCSGGPNTVYLQVVAAGSRDSGAALYVFSEFNRYLFNCGEGVQRLMQEHKLKVARLDNIFLTRMHWSNVGGLSGMILTLKETGLPKCVLSGPPQLEKYLEAIKIFSGPLKGIELAVRPHSAPEYEDETMTVYQIPIHSEQRRGKHQPWQSPERPLSRLSPERSSDSESNENEPHLPHGVSQRRGVRDSSLVVAFICKLHLKRGNFLVLKAKEMGLPVGTAAIAPIIAAVKDGKSITHEGREILAEELCTPPDPGAAFVVVECPDESFIQPICENATFQRYQGKADAPVALVVHMAPASVLVDSRYQQWMERFGPDTQHLVLNENCASVHNLRSHKIQTQLNLIHPDIFPLLTSFRCKKEGPTLSVPMVQGECLLKYQLRPRREWQRDAIITCNPEEFIVEALQLPNFQQSVQEYRRSAQDGPAPAEKRSQYPEIIFLGTGSAIPMKIRNVSATLVNISPDTSLLLDCGEGTFGQLCRHYGDQVDRVLGTLAAVFVSHLHADHHTGLPSILLQRERALASLGKPLHPLLVVAPNQLKAWLQQYHNQCQEVLHHISMIPAKCLQEGAEISSPAVERLISSLLRTCDLEEFQTCLVRHCKHAFGCALVHTSGWKVVYSGDTMPCEALVRMGKDATLLIHEATLEDGLEEEAVEKTHSTTSQAISVGMRMNAEFIMLNHFSQRYAKVPLFSPNFSEKVGVAFDHMKVCFGDFPTMPKLIPPLKALFAGDIEEMEERREKRELRQVRAALLSRELAGGLEDGEPQQKRAHTEEPQAKKVRAQ

SEQ ID NO: 13114 - protein, 1186 aa, Homo sapiens
MGVQGLWKLLECSGRQVSPEALEGKILAVDISIWLNQALKGVRDRHGNSIENPHLLTLFHRLCKLLFFRIRPIFVFDGDAPLLKKQTLVKRRQRKDLASSDSRKTTEKLLKTFLKRQAIKTAFRSKRDEALPSLTQVRRENDLYVLPPLQEEEKHSSEEEDEKEWQERMNQKQALQEEFFHNPQAIDIESEDFSSLPPEVKHEILTDMKEFTKRRRTLFEAMPEESDDFSQYQLKGLLKKNYLNQHIEHVQKEMNQQHSGHIRRQYEDEGGFLKEVESRRVVSEDTSHYILIKGIQAKTVAEVDSESLPSSSKMHGMSFDVKSSPCEKLKTEKEPDATPPSPRTLLAMQAALLGSSSEEELESENRRQARGRNAPAAVDEGSISPRTLSAIKRALDDDEDVKVCAGDDVQTGGPGAEEMRINSSTENSDEGLKVRDGKGIPFTATLASSSVNSAEEHVASTNEGREPTDSVPKEQMSLVHVGTEAFPISDESMIKDRKDRLPLESAVVRHSDAPGLPNGRELTPASPTCTNSVSKNETHAEVLEQQNELCPYESKFDSSLLSSDDETKCKPNSASEVIGPVSLQETSSIVSVPSEAVDNVENVVSFNAKEHENFLETIQEQQTTESAGQDLISIPKAVEPMEIDSEESESDGSFIEVQSVISDEELQAEFPETSKPPSEQGEEELVGTREGEAPAESESLLRDNSERDDVDGEPQEAEKDAEDSLHEWQDINLEELETLESNLLAQQNSLKAQKQQQERIAATVTGQMFLESQELLRLFGIPYIQAPMEAEAQCAILDLTDQTSGTITDDSDIWLFGARHVYRNFFNKNKFVEYYQYVDFHNQLGLDRNKLINLAYLLGSDYTEGIPTVGCVTAMEILNEFPGHGLEPLLKFSEWWHEAQKNPKIRPNPHDTKVKKKLRTLQLTPGFPNPAVAEAYLKPVVDDSKGSFLWGKPDLDKIREFCQRYFGWNRTKTDESLFPVLKQLDAQQTQLRIDSFFRLAQQEKEDAKRIKSQRLNRAVTCMLRKEKEAAASEIEAVSVAMEKEFELLDKAKRKTQKRGITNTLEESSSLKRKRLSDSKRKNTCGGFLGETCLSESSDGSSSEHAESSSLMNVQRRTAAKEPKTSASDSQNSVKEAPVKNGGATTSSSSDSDDDGGKEKMVLVTARSVFGKKRRKLRRARGRKRKT

SEQ ID NO: 13115 - protein, 67 aa, Homo sapiens
MGVQGLWKLLECSGRQVSPEALEGKILAVETSQWPYHLLPFLLSCCTGFLEIGTVSVLFMAELFGVY

SEQ ID NO: 13116 - protein, 491 aa, Homo sapiens
MASRCWRWWGWSAWPRTRLPPAGSTPSFCHHFSTQEKTPQICVVGSGPAGFYTAQHLLKHPQAHVDIYEKQPVPFGLVRFGVAPDHPEVKNVINTFTQTAHSGRCAFWGNVEVGRDVTVPELREAYHAVVLSYGAEDHRALEIPGEELPGVCSARAFVGWYNGLPENQELEPDLSCDTAVILGQGNVALDVARILLTPPEHLERTDITKAALGVLRQSRVKTVWLVGRRGPLQVAFTIKELREMIQLPGARPILDPVDFLGLQDKIKEVPRPRKRLTELLLRTATEKPGPAEAARQASASRAWGLRFFRSPQQVLPSPDGRRAAGVRLAVTRLEGVDEATRAVPTGDMEDLPCGLVLSSIGYKSRPVDPSVPFDSKLGVIPNVEGRVMDVPGLYCSGWVKRGPTGVIATTMTDSFLTGQMLLQDLKAGLLPSGPRPGYAAIQALLSSRGVRPVSFSDWEKLDAEEVARGQGTGKPREKLVDPQEMLRLLGH

SEQ ID NO: 13117 - protein, 497 aa, Homo sapiens
MASRCWRWWGWSAWPRTRLPPAGSTPSFCHHFSTQEKTPQICVVGSGPAGFYTAQHLLKHPQAHVDIYEKQPVPFGLVRFGVAPDHPEVKNVINTFTQTAHSGRCAFWGNVEVGRDVTVPELREAYHAVVLSYGAEDHRALEIPGEELPGVCSARAFVGWYNGLPENQELEPDLSCDTAVILGQGNVALDVARILLTPPEHLEALLLCQRTDITKAALGVLRQSRVKTVWLVGRRGPLQVAFTIKELREMIQLPGARPILDPVDFLGLQDKIKEVPRPRKRLTELLLRTATEKPGPAEAARQASASRAWGLRFFRSPQQVLPSPDGRRAAGVRLAVTRLEGVDEATRAVPTGDMEDLPCGLVLSSIGYKSRPVDPSVPFDSKLGVIPNVEGRVMDVPGLYCSGWVKRGPTGVIATTMTDSFLTGQMLLQDLKAGLLPSGPRPGYAAIQALLSSRGVRPVSFSDWEKLDAEEVARGQGTGKPREKLVDPQEMLRLLGH

SEQ ID NO: 13118 - protein, 161 aa, Homo sapiens
MAGRKLALKTIDWVAFAEIIPQNQKAIASSLKSWNETLTSRLAALPENPPAIDWAYYKANVAKAGLVDDFEKKFNALKVPVPEDKYTAQVDAEEKEDVKSCAEWVSLSKARIVEYEKEMEKMKNLIPFDQMTIEDLNEAFPETKLDKKKYPYWPHQPIENL

SEQ ID NO: 13119 - protein, 161 aa, Homo sapiens; identical to SEQ ID NO: 13118

SEQ ID NO: 13120 - protein, 137 aa, Homo sapiens
MAGRKLALKTIDWVAFAEIIPQNQKAIASSLKSWNETLTSRLAALPENPPAIDWAYYKANVAKAGLVDDFEKKVKSCAEWVSLSKARIVEYEKEMEKMKNLIPFDQMTIEDLNEAFPETKLDKKKYPYWPHQPIENL

SEQ ID NO: 13121 - protein, 118 aa, Homo sapiens
MASQSQGIQQLLQAEKRAAEKVSEARKRKNRRLKQAKEEAQAEIEQYRLQREKEFKAKEAAALGSRGSCSTEVEKETQEKMTILQTYFRQNRDEVLDNLLAFVCDIRPEIHENYRING

SEQ ID NO: 13122 - protein, 118 aa, Homo sapiens; identical to SEQ ID NO: 13121

SEQ ID NO: 13123 - protein, 359 aa, Homo sapiens
MPLELELCPGRWVGGQHPCFIIAEIGQNHQGDLDVAKRMIRMAKECGADCAKFQKSELEFKFNRKALERPYTSKHSWGKTYGEHKRHLEFSHDQYRELQRYAEEVGIFFTASGMDEMAVEFLHELNVPFFKVGSGDTNNFPYLEKTAKKGRPMVISSGMQSMDTMKQVYQIVKPLNPNFCFLQCTSAYPLQPEDVNLRVISEYQKLFPDIPIGYSGHETGIAISVAAVALGAKVLERHITLDKTWKGSDHSASLEPGELAELVRSVRLVERALGSPTKQLLPCEMACNEKLGKSVVAKVKIPEGTILTMDMLTVKVGEPKGYPPEDIFNLVGKKVLVTVEEDDTIMEELVDNHGKKIKS

SEQ ID NO: 13124 - protein, 160 aa, Homo sapiens
MPLELELCPGRWVGGQHPCFIIAEIGQNHQGDLDVAKRMIRMAKECGADCAKFQKSELEFKFNRKALERPYTSKHSWGKTYGEHKRHLEFSHDQYRELQRYAEEVGIFFTASGMDEMAVEFLHELNVPFFKVGSGDTNNFPYLEKTAKKGRPMVISSGMQ

SEQ ID NO: 13125 - protein, 274 aa, Homo sapiens
MPLELELCPGRWVGGQHPCFIIAEIGQNHQGDLDVAKRMIRMAKECGADCAKFQKSELEFKFNRKALERPYTSKHSWGKTYGEHKRHLEFSHDQYRELQRYAEEVGIFFTASGMDEEYQKLFPDIPIGYSGHETGIAISVAAVALGAKVLERHITLDKTWKGSDHSASLEPGELAELVRSVRLVERALGSPTKQLLPCEMACNEKLGKSVVAKVKIPEGTILTMDMLTVKVGEPKGYPPEDIFNLVGKKVLVTVEEDDTIMEELVDNHGKKIKS

SEQ ID NO: 13126 - protein, 179 aa, Homo sapiens
MPLELELCPGRWVGGQHPCFIIAEIGQNHQGDLDVAKRMIRMAKECGADCAKFQKSELEFKFNRKALERPYTSKHSWGKTYGEHKRHLEFSHDQYRELQRYAEEVGIFFTASGMDEMAVEFLHELNVPFFKVGSGDTNNFPYLEKTAKKGEASETQRRTVLCPGTARSGSSTPHIHSHS

SEQ ID NO: 13127 - protein, 1647 aa, Homo sapiens
MSTPDPPLGGTPRPGPSPGPGPSPGAMLGPSPGPSPGSAHSMMGPSPGPPSAGHPIPTQGPGGYPQDNMHQMHKPMESMHEKGMSDDPRYNQMKGMGMRSGGHAGMGPPPSPMDQHSQGYPSPLGGSEHASSPVPASGPSSGPQMSSGPGGAPLDGADPQALGQQNRGPTPFNQNQLHQLRAQIMAYKMLARGQPLPDHLQMAVQGKRPMPGMQQQMPTLPPPSVSATGPGPGPGPGPGPGPGPAPPNYSRPHGMGGPNMPPPGPSGVPPGMPGQPPGGPPKPWPEGPMANAAAPTSTPQKLIPPQPTGRPSPAPPAVPPAASPVMPPQTQSPGQPAQPAPMVPLHQKQSRITPIQKPRGLDPVEILQEREYRLQARIAHRIQELENLPGSLAGDLRTKATIELKALRLLNFQRQLRQEVVVCMRRDTALETALNAKAYKRSKRQSLREARITEKLEKQQKIEQERKRRQKHQEYLNSILQHAKDFKEYHRSVTGKIQKLTKAVATYHANTEREQKKENERIEKERMRRLMAEDEEGYRKLIDQKKDKRLAYLLQQTDEYVANLTELVRQHKAAQVAKEKKKKKKKKKAENAEGQTPAIGPDGEPLDETSQMSDLPVKVIHVESGKILTGTDAPKAGQLEAWLEMNPGYEVAPRSDSEESGSEEEEEEEEEEQPQAAQPPTLPVEEKKKIPDPDSDDVSEVDARHIIENAKQDVDDEYGVSQALARGLQSYYAVAHAVTERVDKQSALMVNGVLKQYQIKGLEWLVSLYNNNLNGILADEMGLGKTIQTIALITYLMEHKRINGPFLIIVPLSTLSNWAYEFDKWAPSVVKVSYKGSPAARRAFVPQLRSGKFNVLLTTYEYIIKDKHILAKIRWKYMIVDEGHRMKNHHCKLTQVLNTHYVAPRRLLLTGTPLQNKLPELWALLNFLLPTIFKSCSTFEQWFNAPFAMTGEKVDLNEEETILIIRRLHKVLRPFLLRRLKKEVEAQLPEKVEYVIKCDMSALQRVLYRHMQAKGVLLTDGSEKDKKGKGGTKTLMNTIMQLRKICNHPYMFQHIEESFSEHLGFTGGIVQGLDLYRASGKFELLDRILPKLRATNHKVLLFCQMTSLMTIMEDYFAYRGFKYLRLDGTTKAEDRGMLLKTFNEPGSEYFIFLLSTRAGGLGLNLQSADTVIIFDSDWNPHQDLQAQDRAHRIGQQNEVRVLRLCTVNSVEEKILAAAKYKLNVDQKVIQAGMFDQKSSSHERRAFLQAILEHEEQDESRHCSTGSGSASFAHTAPPPAGVNPDLEEPPLKEEDEVPDDETVNQMIARHEEEFDLFMRMDLDRRREEARNPKRKPRLMEEDELPSWIIKDDAEVERLTCEEEEEKMFGRGSRHRKEVDYSDSLTEKQWLKAIEEGTLEEIEEEVRQKKSSRKRKRDSDAGSSTPTTSTRSRDKDDESKKQKKRGRPPAEKLSPNPPNLTKKMKKIVDAVIKYKDSSSGRQLSEVFIQLPSRKELPEYYELIRKPVDFKKIKERIRNHKYRSLNDLEKDVMLLCQNAQTFNLEGSLIYEDSIVLQSVFTSVRQKIEKEDDSEGEESEEEEEGEEEGSESESRSVKVKIKLGRKEKAQDRLKGGRRRPSRGSRAKPVVSDDDSEEEQEEDRSGSGSEED

SEQ ID NO: 13128 - protein, 1086 aa, Homo sapiens [sequence omitted]

SEQ ID NO: 13129 - protein, 1679 aa, Homo sapiens
MSTPDPPLGGTPRPGPSPGPGPSPGAMLGPSPGPSPGSAHSMMGPSPGPPSAGHPIPTQGPGGYPQDNMHQMHKPMESMHEKGMSDDPRYNQMKGMGMRSGGHAGMGPPPSPMDQHSQGYPSPLGGSEHASSPVPASGPSSGPQMSSGPGGAPLDGADPQALGQQNRGPTPFNQNQLHQLRAQIMAYKMLARGQPLPDHLQMAVQGKRPMPGMQQQMPTLPPPSVSATGPGPGPGPGPGPGPGPAPPNYSRPHGMGGPNMPPPGPSGVPPGMPGQPPGGPPKPWPEGPMANAAAPTSTPQKLIPPQPTGRPSPAPPAVPPAASPVMPPQTQSPGQPAQPAPMVPLHQKQSRITPIQKPRGLDPVEILQEREYRLQARIAHRIQELENLPGSLAGDLRTKATIELKALRLLNFQRQLRQEVVVCMRRDTALETALNAKAYKRSKRQSLREARITEKLEKQQKIEQERKRRQKHQEYLNSILQHAKDFKEYHRSVTGKIQKLTKAVATYHANTEREQKKENERIEKERMRRLMAEDEEGYRKLIDQKKDKRLAYLLQQTDEYVANLTELVRQHKAAQVAKEKKKKKKKKKAENAEGQTPAIGPDGEPLDETSQMSDLPVKVIHVESGKILTGTDAPKAGQLEAWLEMNPGYEVAPRSDSEESGSEEEEEEEEEEQPQAAQPPTLPVEEKKKIPDPDSDDVSEVDARHIIENAKQDVDDEYGVSQALARGLQSYYAVAHAVTERVDKQSALMVNGVLKQYQIKGLEWLVSLYNNNLNGILADEMGLGKTIQTIALITYLMEHKRINGPFLIIVPLSTLSNWAYEFDKWAPSVVKVSYKGSPAARRAFVPQLRSGKFNVLLTTYEYIIKDKHILAKIRWKYMIVDEGHRMKNHHCKLTQVLNTHYVAPRRLLLTGTPLQNKLPELWALLNFLLPTIFKSCSTFEQWFNAPFAMTGEKVDLNEEETILIIRRLHKVLRPFLLRRLKKEVEAQLPEKVEYVIKCDMSALQRVLYRHMQAKGVLLTDGSEKDKKGKGGTKTLMNTIMQLRKICNHPYMFQHIEESFSEHLGFTGGIVQGLDLYRASGKFELLDRILPKLRATNHKVLLFCQMTSLMTIMEDYFAYRGFKYLRLDGTTKAEDRGMLLKTFNEPGSEYFIFLLSTRAGGLGLNLQSADTVIIFDSDWNPHQDLQAQDRAHRIGQQNEVRVLRLCTVNSVEEKILAAAKYKLNVDQKVIQAGMFDQKSSSHERRAFLQAILEHEEQDESRHCSTGSGSASFAHTAPPPAGVNPDLEEPPLKEEDEVPDDETVNQMIARHEEEFDLFMRMDLDRRREEARNPKRKPRLMEEDELPSWIIKDDAEVERLTCEEEEEKMFGRGSRHRKEVDYSDSLTEKQWLKKITGKDIHDTASSVARGLQFQRGLQFCTRASKAIEEGTLEEIEEEVRQKKSSRKRKRDSDAGSSTPTTSTRSRDKDDESKKQKKRGRPPAEKLSPNPPNLTKKMKKIVDAVIKYKDSSSGRQLSEVFIQLPSRKELPEYYELIRKPVDFKKIKERIRNHKYRSLNDLEKDVMLLCQNAQTFNLEGSLIYEDSIVLQSVFTSVRQKIEKEDDSEGEESEEEEEGEEEGSESESRSVKVKIKLGRKEKAQDRLKGGRRRPSRGSRAKPVVSDDDSEEEQEEDRSGSGSEED

SEQ ID NO: 13130 - protein, 1647 aa, Homo sapiens; identical to SEQ ID NO: 13127

SEQ ID NO: 13131 - protein, 1647 aa, Homo sapiens; identical to SEQ ID NO: 13127

SEQ ID NO: 13132 - protein, 1274 aa, Homo sapiens [sequence omitted]

SEQ ID NO: 13133 - protein, 1614 aa, Homo sapiens
MSTPDPPLGGTPRPGPSPGPGPSPGAMLGPSPGPSPGSAHSMMGPSPGPPSAGHPIPTQGPGGYPQDNMHQMHKPMESMHEKGMSDDPRYNQMKGMGMRSGGHAGMGPPPSPMDQHSQGYPSPLGGSEHASSPVPASGPSSGPQMSSGPGGAPLDGADPQALGQQNRGPTPFNQNQLHQLRAQIMAYKMLARGQPLPDHLQMAVQGKRPMPGMQQQMPTLPPPSVSATGPGPGPGPGPGPGPGPAPPNYSRPHGMGGPNMPPPGPSGVPPGMPGQPPGGPPKPWPEGPMANAAAPTSTPQKLIPPQPTGRPSPAPPAVPPAASPVMPPQTQSPGQPAQPAPMVPLHQKQSRITPIQKPRGLDPVEILQEREYRLQARIAHRIQELENLPGSLAGDLRTKATIELKALRLLNFQRQLRQEVVVCMRRDTALETALNAKAYKRSKRQSLREARITEKLEKQQKIEQERKRRQKHQEYLNSILQHAKDFKEYHRSVTGKIQKLTKAVATYHANTEREQKKENERIEKERMRRLMAEDEEGYRKLIDQKKDKRLAYLLQQTDEYVANLTELVRQHKAAQVAKEKKKKKKKKKAENAEGQTPAIGPDGEPLDETSQMSDLPVKVIHVESGKILTGTDAPKAGQLEAWLEMNPGYEVAPRSDSEESGSEEEEEEEEEEQPQAAQPPTLPVEEKKKIPDPDSDDVSEVDARHIIENAKQDVDDEYGVSQALARGLQSYYAVAHAVTERVDKQSALMVNGVLKQYQIKGLEWLVSLYNNNLNGILADEMGLGKTIQTIALITYLMEHKRINGPFLIIVPLSTLSNWAYEFDKWAPSVVKVSYKGSPAARRAFVPQLRSGKFNVLLTTYEYIIKDKHILAKIRWKYMIVDEGHRMKNHHCKLTQVLNTHYVAPRRLLLTGTPLQNKLPELWALLNFLLPTIFKSCSTFEQWFNAPFAMTGEKVDLNEEETILIIRRLHKVLRPFLLRRLKKEVEAQLPEKVEYVIKCDMSALQRVLYRHMQAKGVLLTDGSEKDKKGKGGTKTLMNTIMQLRKICNHPYMFQHIEESFSEHLGFTGGIVQGLDLYRASGKFELLDRILPKLRATNHKVLLFCQMTSLMTIMEDYFAYRGFKYLRLDGTTKAEDRGMLLKTFNEPGSEYFIFLLSTRAGGLGLNLQSADTVIIFDSDWNPHQDLQAQDRAHRIGQQNEVRVLRLCTVNSVEEKILAAAKYKLNVDQKVIQAGMFDQKSSSHERRAFLQAILEHEEQDEEEDEVPDDETVNQMIARHEEEFDLFMRMDLDRRREEARNPKRKPRLMEEDELPSWIIKDDAEVERLTCEEEEEKMFGRGSRHRKEVDYSDSLTEKQWLKAIEEGTLEEIEEEVRQKKSSRKRKRDSDAGSSTPTTSTRSRDKDDESKKQKKRGRPPAEKLSPNPPNLTKKMKKIVDAVIKYKDSSSGRQLSEVFIQLPSRKELPEYYELIRKPVDFKKIKERIRNHKYRSLNDLEKDVMLLCQNAQTFNLEGSLIYEDSIVLQSVFTSVRQKIEKEDDSEGEESEEEEEGEEEGSESESRSVKVKIKLGRKEKAQDRLKGGRRRPSRGSRAKPVVSDDDSEEEQEEDRSGSGSEED

SEQ ID NO: 13134 - protein, 1275 aa, Homo sapiens [sequence omitted]

SEQ ID NO: 13135 - protein, 325 aa, Homo sapiens
MDMWTALLILQALLLPSLADGATPALRFVAVGDWGGVPNAPFHTAREMANAKEIARTVQILGADFILSLGDNFYFTGVQDINDKRFQETFEDVFSDRSLRKVPWYVLAGNHDHLGNVSAQIAYSKISKRWNFPSPFYRLHFKIPQTNVSVAIFMLDTVTLCGNSDDFLSQQPERPRDVKLARTQLSWLKKQLAAAREDYVLVAGHYPVWSIAEHGPTHCLVKQLRPLLATYGVTAYLCGHDHNLQYLQDENGVGYVLSGAGNFMDPSKRHQRKVPNGYLRFHYGTEDSLGGFAYVEISSKEMTVTYIEASGKSLFKTRLPRRARP

SEQ ID NO: 13136 - protein, 325 aa, Homo sapiens; identical to SEQ ID NO: 13135

SEQ ID NO: 13137 - protein, 325 aa, Homo sapiens; identical to SEQ ID NO: 13135

SEQ ID NO: 13138 - protein, 325 aa, Homo sapiens; identical to SEQ ID NO: 13135

SEQ ID NO: 13139 - protein, 608 aa, Homo sapiens
MAAAAAAVGPGAGGAGSAVPGGAGPCATVSVFPGARLLTIGDANGEIQRHAEQQALRLEVRAGPDSAGIALYSHEDVCVFKCSVSRETECSRVGKQSFIITLGCNSVLIQFATPNDFCSFYNILKTCRGHTLERSVFSERTEESSAVQYFQFYGYLSQQQNMMQDYVRTGTYQRAILQNHTDFKDKIVLDVGCGSGILSFFAAQAGARKIYAVEASTMAQHAEVLVKSNNLTDRIVVIPGKVEEVSLPEQVDIIISEPMGYMLFNERMLESYLHAKKYLKPSGNMFPTIGDVHLAPFTDEQLYMEQFTKANFWYQPSFHGVDLSALRGAAVDEYFRQPVVDTFDIRILMAKSVKYTVNFLEAKEGDLHRIEIPFKFHMLHSGLVHGLAFWFDVAFIGSIMTVWLSTAPTEPLTHWYQVRCLFQSPLFAKAGDTLSGTCLLIANKRQSYDISIVAQVDQTGSKSSNLLDLKNPFFRYTGTTPSPPPGSHYTSPSENMWNTGSTYNLSSGMAVAGMPTAYDLSSVIASGSSVGHNNLIPLANTGIVNHTHSRMGSIMSTGIVQGSSGAQGSGGGSTSAHYAVNSQFTMGGPAISMASPMSIPTNTMHYGS

SEQ ID NO: 13140 - protein, 343 aa, Homo sapiens
MAGGRPHLKRSFSIIPCFVFVESVLLGIVILLAYRLEFTDTFPVHTQGFFCYDSTYAKPYPGPEAASRVPPALVYALVTAGPTLTILLGELARAFFPAPPSAVPVIGESTIVSGACCRFSPPVRRLVRFLGVYSFGLFTTTIFANAGQVVTGNPTPHFLSVCRPNYTALGCLPPSPDRPGPDRFVTDQGACAGSPSLVAAARRAFPCKDAALCAYAVTYTAMYVTLVFRVKGSRLVKPSLCLALLCPAFLVGVVRVAEYRNHWSDVLAGFLTGAAIATFLVTCVVHNFQSRPPSGRRLSPWEDLGQAPTMDSPLEKNPRSAGRIRHRHGSPHPSRRTAPAVAT

SEQ ID NO: 13141 - protein, 343 aa, Homo sapiens; identical to SEQ ID NO: 13140

SEQ ID NO: 13142 - protein, 343 aa, Homo sapiens; identical to SEQ ID NO: 13140

SEQ ID NO: 13143 - protein, 262 aa, Homo sapiens
MALKQISSNKCFGGLQKVFEHDSVELNCKMKFAVYLPPKAETGKCPALYWLSGLTCTEQNFISKSGYHQSASEHGLVVIAPDTSPRGCNIKGEDESWDFGTGAGFYVDATEDPWKTNYRMYSYVTEELPQLINANFPVDPQRMSIFGHSMGGHGALICALKNPGKYKSVSAFAPICNPVLCPWGKKAFSGYLGTDQSKWKAYDATHLVKSYPGSQLDILIDQGKDDQFLLDGQLLPDNFIAACTEKKIPVVFRLQEASIRKL

SEQ ID NO: 13144 - protein, 282 aa, Homo sapiens
MALKQISSNKCFGGLQKVFEHDSVELNCKMKFAVYLPPKAETGKCPALYWLSGLTCTEQNFISKSGYHQSASEHGLVVIAPDTSPRGCNIKGEDESWDFGTGAGFYVDATEDPWKTNYRMYSYVTEELPQLINANFPVDPQRMSIFGHSMGGHGALICALKNPGKYKSVSAFAPICNPVLCPWGKKAFSGYLGTDQSKWKAYDATHLVKSYPGSQLDILIDQGKDDQFLLDGQLLPDNFIAACTEKKIPVVFRLQEGYDHSYYFIATFITDHIRHHAKYLNA

SEQ ID NO: 13145 - protein, 259 aa, Homo sapiens [sequence omitted]

SEQ ID NO: 13146 - protein, 332 aa, Homo sapiens
MNGWGGCGAHGPGRLGGQLPPPQRTGRGGGRAVEKRAARRAGHWADRGGSMSGADRSPNAGAAPDSAPGQAAVASAYQRFEPRAYLRNNYAPPRGDLCNPNGVGPWKLRCLAQTFATGEVSGRTLIDIGSGPTVYQLLSACSHFEDITMTDFLEVNRQELGRWLQEEPGAFNWSMYSQHACLIEGKGECWQDKERQLRARVKRVLPIDVHQPQPLGAGSPAPLPADALVSAFCLEAVSPDLASFQRALDHITTLLRPGGHLLLIGALEESWYLAGEARLTVVPVSEEEVREALVRSGYKVRDLRTYIMPAHLQTGVDDVKGVFFAWAQKVGL

SEQ ID NO: 13147 - protein, 252 aa, Homo sapiens
MLGGVPTLCGTGNETWTLLALGQAIARRLKPFGVQRFLYTGRQPRPEEAAEFQAEFVSTPELAAQSDFIVVACSLTPATEGLCNKDFFQKMKETAVFINISRYPRATLPSKPGEEPSPLLPSGDFLPRGLLVRPQAELAGFHKPNNQLRNSWEYTRPPYREEEPSEWAWPVCFSAVAPTRRGLAHSSVASGSVPREPLQAHYPPPQRAGLEDLKGPLEAASHTAEPGFVWLWFSDTLNLMLLGGQTLKLTWS

SEQ ID NO: 13148 - protein, 221 aa, Homo sapiens
MRPVRLMKVFVTRRIPAEGRVALARAADGGWTSWKPLWLCGYGLTQSTVGIIGLGRIGQAIARRLKPFGVQRFLYTGRQPRPEEAAEFQAEFVSTPELAAQSDFIVVACSLTPATEGLCNKDFFQKMKETAVFINISRGDVVNQDDLYQALASGKIAAAGLDVTSPEPLPTNHPLLTLKNCVILPHIGSATHRTRNTMSLLAANNLLAGLRGEPMPSELKL

SEQ ID NO: 13149 - protein, 248 aa, Homo sapiens
MSVGIDHLALDEIKKRGIRVGYTPDVLTDTTAELAVSLLLTTCRRLPEAIEEVKNGGWTSWKPLWLCGYGLTQSTVGIIGLGRIGQAIARRLKPFGVQRFLYTGRQPRPEEAAEFQAEFVSTPELAAQSDFIVVACSLTPATEGLCNKDFFQKMKETAVFINISRGDVVNQDDLYQALASGKIAAAGLDVTSPEPLPTNHPLLTLKNCVILPHIGSATHRTRNTMSLLAANNLLAGLRGEPMPSELKL

SEQ ID NO: 13150 - protein, 328 aa, Homo sapiens
MRPVRLMKVFVTRRIPAEGRVALARAADCEVEQWDSDEPIPAKELERGVAGAHGLLCLLSDHVDKRILDAAGANLKVISTMSVGIDHLALDEIKKRGIRVGYTPDVLTDTTAELAVSLLLTTCRRLPEAIEEVKNGGWTSWKPLWLCGYGLTQSTVGIIGLGRIGQAIARRLKPFGVQRFLYTGRQPRPEEAAEFQAEFVSTPELAAQSDFIVVACSLTPATEGLCNKDFFQKMKETAVFINISRGDVVNQDDLYQALASGKIAAAGLDVTSPEPLPTNHPLLTLKNCVILPHIGSATHRTRNTMSLLAANNLLAGLRGEPMPSELKL

SEQ ID NO: 13151 - protein, 284 aa, Homo sapiens
MQSPVDVIRSPTMAGGLFAVSKKYFEYLGSYDTGMEVWGGENLEFSFRIWQCGGVLETHPCSHVGHVFPKQAPYSRNKALANSVRAAEVWMDEFKELYYHRNPRARLEPFGDVTERKQLRDKLQCKDFKWFLETVYPELHVPEDRPGFFGMLQNKGLTDYCFDYNPPDENQIVGHQVILYLCHGMGQNQFFEYTSQKEIRYNTHQPEGCIAVEAGMDTLIMHLCEETAPENQKFILQEDGSLFHEQSKKCVQAARKESSDSFVPLLRDCTNSDHQKWFFKERML

SEQ ID NO: 13152 - protein, 284 aa, Homo sapiens; identical to SEQ ID NO: 13151

SEQ ID NO: 13153 - protein, 517 aa, Homo sapiens
MPRPPVPANALGARGEAVRLQLQGEELRLQEESVRLHQINIYLSDRISLHRRLPERWNPLCKEKKYDYDNLPRTSVIIAFYNEAWSTLLRTVYSVLETSPDILLEEVILVDDYSDREHLKERLANELSGLPKVRLIRANKREGLVRARLLGASAARGDVLTFLDCHCECHEGWLEPLLQRIHEEESAVVCPVIDVIDWNTFEYLGNSGEPQIGGFDWRLVFTWHTVPERERIRMQSPVDVIRSPTMAGGLFAVSKKYFEYLGSYDTGMEVWGGENLEFSFRIWQCGGVLETHPCSHVGHVFPKQAPYSRNKALANSVRAAEVWMDEFKELYYHRNPRARLEPFGDVTERKQLRDKLQCKDFKWFLETVYPELHVPEDRPGFFGMLQNKGLTDYCFDYNPPDENQIVGHQVILYLCHGMGQNQFFEYTSQKEIRYNTHQPEGCIAVEAGMDTLIMHLCEETAPENQKFILQEDGSLFHEQSKKCVQAARKESSDSFVPLLRDCTNSDHQKWFFKERML

SEQ ID NO: 13154 - protein, 416 aa, Homo sapiens
MAEEQGRERDSVPKPSVLFLHPDLGVGGAERLVLDAALALQARGCSVKIWTAHYDPGHCFAESRELPVRCAGDWLPRGLGWGGRGAAVCAYVRMVFLALYVLFLADEEFDVVVCDQVSACIPVFRLARRRKKILFYCHFPDLLLTKRDSFLKRLYRAPIDWIEEYTTGMADCILVNSQFTAAVFKETFKSLSHIDPDVLYPSLNVTSFDSVVPEKLDDLVPKGKKFLLLSINRYERKKNLTLALEALVQLRGRLTSQDWERVHLIVAGGYDERVLENVEHYQELKKMVQQSDLGQYVTFLRSFSDKQKISLLHSCTCVLYTPSNEHFGIVPLEAMYMQCPVIAVNSGGPLESIDHSVTGFLCEPDPVHFSEAIEKFIREPSLKATMGLAGRARVKEKFSPEAFTEQLYRYVTKLLV

SEQ ID NO: 13155 - protein, 313 aa, Homo sapiens
MPLLKLVHGSPLVFGEKFKLFTLVSACIPVFRLARRRKKILFYCHFPDLLLTKRDSFLKRLYRAPIDWIEEYTTGMADCILVNSQFTAAVFKETFKSLSHIDPDVLYPSLNVTSFDSVVPEKLDDLVPKGKKFLLLSINRYERKKNLTLALEALVQLRGRLTSQDWERVHLIVAGGYDERVLENVEHYQELKKMVQQSDLGQYVTFLRSFSDKQKISLLHSCTCVLYTPSNEHFGIVPLEAMYMQCPVIAVNSGGPLESIDHSVTGFLCEPDPVREPSLKATMGLAGRARVKEKFSPEAFTEQLYRYVTKLLV

SEQ ID NO: 13156 - protein, 416 aa, Homo sapiens; identical to SEQ ID NO: 13154

SEQ ID NO: 13157 - protein, 889 aa, Homo sapiens
MSNPFAHLAEPLDPVQPGKKFFNLNKLEDSRYGRLPFSIRVLLEAAIRNCDEFLVKKQDIENILHWNVTQHKNIEVPFKPARVILQDFTGVPAVVDFAAMRDAVKKLGGDPEKINPVCPADLVIDHSIQVDFNRRADSLQKNQDLEFERNRERFEFLKWGSQAFHNMRIIPPGSGIIHQVNLEYLARVVFDQDGYYYPDSLVGTDSHTTMIDGLGILGWGVGGIEAEAVMLGQPISMVLPQVIGYRLMGKPHPLVTSTDIVLTITKHLRQVGVVGKFVEFFGPGVAQLSIADRATIANMCPEYGATAAFFPVDEVSITYLVQTGRDEEKLKYIKKYLQAVGMFRDFNDPSQDPDFTQVVELDLKTVVPCCSGPKRPQDKVAVSDMKKDFESCLGAKQGFKGFQVAPEHHNDHKTFIYDNTEFTLAHGSVVIAAITSCTNTSNPSVMLGAGLLAKKAVDAGLNVMPYIKTSLSPGSGVVTYYLQESGVMPYLSQLGFDVVGYGCMTCIGNSGPLPEPVVEAITQGDLVAVGVLSGNRNFEGRVHPNTRANYLASPPLVIAYAIAGTIRIDFEKEPLGVNAKGQQVFLKDIWPTRDEIQAVERQYVIPGMFKEVYQKIETVNESWNALATPSDKLFFWNSKSTYIKSPPFFENLTLDLQPPKSIVDAYVLLNLGDSVTTDHISPAGNIARNSPAARYLTNRGLTPREFNSYGSRRGNDAVMARGTFANIRLLNRFLNKQAPQTIHLPSGEILDVFDAAERYQQAGLPLIVLAGKEYGAGSSRDWAAKGPFLLGIKAVLAESYERIHRSNLVGMGVIPLEYLPGENADALGLTGQERYTIIIPENLKPQMKVQVKLDTGKTFQAVMRFDTDVELTYFLNGGILNYMIRKMAK

SEQ ID NO: 13158 - protein, 889 aa, Homo sapiens; identical to SEQ ID NO: 13157

SEQ ID NO: 13159 - protein, 158 aa, Homo sapiens
MEVMDVFSTDDLTGFLQTKAQQGWLVAGTVGCPSTEDPQSSEIPIMSCLEFLWERPTLLVLGNEGSGLSQEVQASCQLLLTILPRRQLPPGLESLNVSVAAGILLHSICSQRKGFPTEGERRQLLQDPQEPSARSEGLSMAQHPGLSSGPEKERQNEG

SEQ ID NO: 13160 - protein, 353 aa, Homo sapiens
MALLSTVRGATWGRLVTRHFSHAARHGERPGGEELSRLLLDDLVPTSRLELLFGMTPCLLALQAARRSVARLLLQAGKAGLQGKRAELLRMAEARDIPVLRPRRQKLDTMCRYQVHQGVCMEVSPLRPRPWREAGEASPGDDPQQLWLVLDGIQDPRNFGAVLRSAHFLGVDKVITSRRNSCPLTPVVSKSSAGAMEVMDVFSTDDLTGFLQTKAQQGWLVAGTVGCPSTEDPQSSEIPIMSCLEFLWERPTLLVLGNEGSGLSQEVQASCQLLLTILPRRQLPPGLESLNVSVAAGILLHSICSQRKGFPTEGERRQLLQDPQEPSARSEGLSMAQHPGLSSGPEKERQNEG

SEQ ID NO: 13161 - protein, 2343 aa, Homo sapiens
MDEPSPLAQPLELNQHSRFIIGSVSEDNSEDEISNLVKLDLLEEKEGSLSPASVGSDTLSDLGISSLQDGLALHIRSSMSGLHLVKQGRDRKKIDSQRDFTVASPAEFVTRFGGNKVIEKVLIANNGIAAVKCMRSIRRWSYEMFRNERAIRFVVMVTPEDLKANAEYIKMADHYVPVPGGPNNNNYANVELILDIAKRIPVQAVWAGWGHASENPKLPELLLKNGIAFMGPPSQAMWALGDKIASSIVAQTAGIPTLPWSGSGLRVDWQENDFSKRILNVPQELYEKGYVKDVDDGLQAAEEVGYPVMIKASEGGGGKGIRKVNNADDFPNLFRQVQAEVPGSPIFVMRLAKQSRHLEVQILADQYGNAISLFGRDCSVQRRHQKIIEEAPATIATPAVFEHMEQCAVKLAKMVGYVSAGTVEYLYSQDGSFYFLELNPRLQVEHPCTEMVADVNLPAAQLQIAMGIPLYRIKDIRMMYGVSPWGDSPIDFEDSAHVPCPRGHVIAARITSENPDEGFKPSSGTVQELNFRSNKNVWGYFSVAAAGGLHEFADSQFGHCFSWGENREEAISNMVVALKELSIRGDFRTTVEYLIKLLETESFQMNRIDTGWLDRLIAEKVQAERPDTMLGVVCGALHVADVSLRNSVSNFLHSLERGQVLPAHTLLNTVDVELIYEGVKYVLKVTRQSPNSYVVIMNGSCVEVDVHRLSDGGLLLSYDGSSYTTYMKEEVDRYRITIGNKTCVFEKENDPSVMRSPSAGKLIQYIVEDGGHVFAGQCYAEIEVMKMVMTLTAVESGCIHYVKRPGAALDPGCVLAKMQLDNPSKVQQAELHTGSLPRIQSTALRGEKLHRVFHYVLDNLVNVMNGYCLPDPFFSSKVKDWVERLMKTLRDPSLPLLELQDIMTSVSGRIPPNVEKSIKKEMAQYASNITSVLCQFPSQQIANILDSHAATLNRKSEREVFFMNTQSIVQLVQRYRSGIRGHMKAVVMDLLRQYLRVETQFQNGHYDKCVFALREENKSDMNTVLNYIFSHAQVTKKNLLVTMLIDQLCGRDPTLTDELLNILTELTQLSKTTNAKVALRARQVLIASHLPSYELRHNQVESIFLSAIDMYGHQFCIENLQKLILSETSIFDVLPNFFYHSNQVVRMAALEVYVRRAYIAYELNSVQHRQLKDNTCVVEFQFMLPTSHPNRGNIPTLNRMSFSSNLNHYGMTHVASVSDVLLDNSFTPPCQRMGGMVSFRTFEDFVRIFDEVMGCFSDSPPQSPTFPEAGHTSLYDEDKVPRDEPIHILNVAIKTDCDIEDDRLAAMFREFTQQNKATLVDHGIRRLTFLVAQKDFRKQVNYEVDRRFHREFPKFFTFRARDKFEEDRIYRHLEPALAFQLELNRMRNFDLTAIPCANHKMHLYLGAAKVEVGTEVTDYRFFVRAIIRHSDLVTKEASFEYLQNEGERLLLEAMDELEVAFNNTNVRTDCNHIFLNFVPTVIMDPSKIEESVRSMVMRYGSRLWKLRVLQAELKINIRLTPTGKAIPIRLFLTNESGYYLDISLYKEVTDSRTAQIMFQAYGDKQGPLHGMLINTPYVTKDLLQSKRFQAQSLGTTYIYDIPEMFRQSLIKLWESMSTQAFLPSPPLPSDMLTYTELVLDDQGQLVHMNRLPGGNEATWKMTFKSPEYPEGRDIIVIGNDITYRIGSFGPQEDLLFLRASELARAEGIPRIYVSANSGARIGLAEEIRHMFHVAWVDPEDPYKGYRYLYLTPQDYKRVSALNSVHCEHVEDEGESRYKITDIIGKEEGIGPENLRGSGMIAGESSLAYNEIITISLVTCRAIGIGAYLVRLGQRTIQVENSHLILTGAGALNKVLGREVYTSNNQLGGIQIMHNNGVTHCTVCDDFEGVFTVLHWLSYMPKSVHSSVPLLNSKDPIDRIIEFVPTKTPYDPRWMLAGRPHPTQKGQWLSGFFDYGSFSEIMQPWAQTVVVGRARLGGIPVGVVAVETRTVELSIPADPANLDSEAKIIQQAGQVWFPDSAFKTYQAIKDFNREGLPLMVFANWRGFSGGMKDMYDQVLKFGAYIVDGLRECCQPVLVYIPPQAELRGGSWVVIDSSINPRHMEMYADRESRGSVLEPEGTVEIKFRRKDLVKTMRRVDPVYIHLAERLGTPELSTAERKELENKLKEREEFLIPIYHQVAVQFADLHDTPGRMQEKGVISDILDWKTSRTFFYWRLRRLLLEDLVKKKIHNANPELTDGQIQAMLRRWFVEVEGTVKAYVWDNNKDLAEWLEKQLTEEDGVHSVIEENIKCISRDYVLKQIRSLVQANPEVAMDSIIHMTQHISPTQRAEVIRILSTMDSPST

SEQ ID NO: 13162 - protein, 2346 aa, Homo sapiens
MDEPSPLAQPLELNQHSRFIIGSVSEDNSEDEISNLVKLDLLEEKEGSLSPASVGSDTLSDLGISSLQDGLALHIRSSMSGLHLVKQGRDRKKIDSQRDFTVASPAEFVTRFGGNKVIEKVLIANNGIAAVKCMRSIRRWSYEMFRNERAIRFVVMVTPEDLKANAEYIKMADHYVPVPGGPNNNNYANVELILDIAKRIPVQAVWAGWGHASENPKLPELLLKNGIAFMGPPSQAMWALGDKIASSIVAQTAGIPTLPWSGSGLRVDWQENDFSKRILNVPQELYEKGYVKDVDDGLQAAEEVGYPVMIKASEGGGGKGIRKVNNADDFPNLFRQVQAEVPGSPIFVMRLAKQSRHLEVQILADQYGNAISLFGRDCSVQRRHQKIIEEAPATIATPAVFEHMEQCAVKLAKMVGYVSAGTVEYLYSQDGSFYFLELNPRLQVEHPCTEMVADVNLPAAQLQIAMGIPLYRIKDIRMMYGVSPWGDSPIDFEDSAHVPCPRGHVIAARITSENPDEGFKPSSGTVQELNFRSNKNVWGYFSVAAAGGLHEFADSQFGHCFSWGENREEAISNMVVALKELSIRGDFRTTVEYLIKLLETESFQMNRIDTGWLDRLIAEKVQAERPDTMLGVVCGALHVADVSLRNSVSNFLHSLERGQVLPAHTLLNTVDVELIYEGVKYVLKVTRQSPNSYVVIMNGSCVEVDVHRLSDGGLLLSYDGSSYTTYMKEEVDRYRITIGNKTCVFEKENDPSVMRSPSAGKLIQYIVEDGGHVFAGQCYAEIEVMKMVMTLTAVESGCIHYVKRPGAALDPGCVLAKMQLDNPSKVQQAELHTGSLPRIQSTALRGEKLHRVFHYVLDNLVNVMNGYCLPDPFFSSKVKDWVERLMKTLRDPSLPLLELQDIMTSVSGRIPPNVEKSIKKEMAQYASNITSVLCQFPSQQIANILDSHAATLNRKSEREVFFMNTQSIVQLVQRYRSGIRGHMKAVVMDLLRQYLRVETQFQNGHYDKCVFALREENKSDMNTVLNYIFSHAQVTKKNLLVTMLIDQLCGRDPTLTDELLNILTELTQLSKTTNAKVALRARQVLIASHLPSYELRHNQVESIFLSAIDMYGHQFCIENLQKLILSETSIFDVLPNFFYHSNQVVRMAALEVYVRRAYIAYELNSVQHRQLKDNTCVVEFQFMLPTSHPNRGNIPTLNRMSFSSNLNHYGMTHVASVSDVLLDNSFTPPCQRMGGMVSFRTFEDFVRIFDEVMGCFSDSPPQSPTFPEAGHTSLYDEDKVPRDEPIHILNVAIKTDCDIEDDRLAAMFREFTQQNKATLVDHGIRRLTFLVAQKDFRKQVNYEVDRRFHREFPKFFTFRARDKFEEDRIYRHLEPALAFQLELNRMRNFDLTAIPCANHKMHLYLGAAKVEVGTEVTDYRFFVRAIIRHSDLVTKEASFEYLQNEGERLLLEAMDELEVAFNNTNVRTDCNHIFLNFVPTVIMDPSKIEESVRSMVMRYGSRLWKLRVLQAELKINIRLTPTGKAIPIRLFLTNESGYYLDISLYKEVTDSRTAQIMFQAYGDKQGPLHGMLINTPYVTKDLLQSKRFQAQSLGTTYIYDIPEMFRQSLIKLWESMSTQAFLPSPPLPSDMLTYTELVLDDQGQLVHMNRLPGGNEIGMVAWKMTFKSPEYPEGRDIIVIGNDITYRIGSFGPQEDLLFLRASELARAEGIPRIYVSANSGARIGLAEEIRHMFHVAWVDPEDPYKGYRYLYLTPQDYKRVSALNSVHCEHVEDEGESRYKITDIIGKEEGIGPENLRGSGMIAGESSLAYNEIITISLVTCRAIGIGAYLVRLGQRTIQVENSHLILTGAGALNKVLGREVYTSNNQLGGIQIMHNNGVTHCTVCDDFEGVFTVLHWLSYMPKSVHSSVPLLNSKDPIDRIIEFVPTKTPYDPRWMLAGRPHPTQKGQWLSGFFDYGSFSEIMQPWAQTVVVGRARLGGIPVGVVAVETRTVELSIPADPANLDSEAKIIQQAGQVWFPDSAFKTYQAIKDFNREGLPLMVFANWRGFSGGMKDMYDQVLKFGAYIVDGLRECCQPVLVYIPPQAELRGGSWVVIDSSINPRHMEMYADRESRGSVLEPEGTVEIKFRRKDLVKTMRRVDPVYIHLAERLGTPELSTAERKELENKLKEREEFLIPIYHQVAVQFADLHDTPGRMQEKGVISDILDWKTSRTFFYWRLRRLLLEDLVKKKIHNANPELTDGQIQAMLRRWFVEVEGTVKAYVWDNNKDLAEWLEKQLTEEDGVHSVIEENIKCISRDYVLKQIRSLVQANPEVAMDSIIHMTQHISPTQRAEVIRILSTMDSPST

SEQ ID NO: 13163 - protein, 112 aa, Homo sapiens
MDEPSPLAQPLELNQHSRFIIGSVSEDNSEDEISNLVKLDLLEEKEGSLSPASVGSDTLSDLGISSLQDGLALHISSWIKRSGSVVLGSHCSSESPRGALGDKPHPQRFRFI

SEQ ID NO: 13164 - protein, 2346 aa, Homo sapiens; identical to SEQ ID NO: 13162

SEQ ID NO: 13165 - protein, 2263 aa, Homo sapiens
MDEPSPLAQPLELNQHSRFIIGSVSEDNSEDEISNLVKLDLLEEKEGSLSPASVGSDTLSDLGISSLQDGLALHIRSSMSGLHLVKQGRDRKKIDSQRDFTVASPAEFVTRFGGNKVIEKVLIANNGIAAVKCMRSIRRWSYEMFRNERAIRFVVMVTPEDLKANAEYIKMADHYVPVPGGPNNNNYANVELILDIAKRIPVQAVWAGWGHASENPKLPELLLKNGIAFMGPPSQAMWALGDKIASSIVAQTAGIPTLPWSGSGLRVDWQENDFSKRILNVPQELYEKGYVKDVDDGLQAAEEVGYPVMIKASEGGGGKGIRKVNNADDFPNLFRQVQAEVPGSPIFVMRLAKQSRHLEVQILADQYGNAISLFGRDCSVQRRHQKIIEEAPATIATPAVFEHMEQCAVKLAKMVGYVSAGTVEYLYSQDGSFYFLELNPRLQVEHPCTEMVADVNLPAAQLQIAMGIPLYRIKDIRMMYGVSPWGDSPIDFEDSAHVPCPRGHVIAARITSENPDEGFKPSSGTVQELNFRSNKNVWGYFSVAAAGGLHEFADSQFGHCFSWGENREEAISNMVVALKELSIRGDFRTTVEYLIKLLETESFQMNRIDTGWLDRLIAEKVQAERPDTMLGVVCGALHVADVSLRNSVSNFLHSLERGQVLPAHTLLNTVDVELIYEGVKYVLKVTRQSPNSYVVIMNGSCVEVDVHRLSDGGLLLSYDGSSYTTYMKEEVDRYRITIGNKTCVFEKENDPSVMRSPSAGKLIQYIVEDGGHVFAGQCYAEIEVMKMVMTLTAVESGCIHYVKRPGAALDPGCVLAKMQLDNPSKVQQAELHTGSLPRIQSTALRGEKLHRVFHYVLDNLVNVMNGYCLPDPFFSSKVKDWVERLMKTLRDPSLPLLELQDIMTSVSGRIPPNVEKSIKKEMAQYASNITSVLCQFPSQQIANILDSHAATLNRKSEREVFFMNTQSIVQLVQRYRSGIRGHMKAVVMDLLRQYLRVETQFQNGHYDKCVFALREENKSDMNTVLNYIFSHAQVTKKNLLVTMLIDQLCGRDPTLTDELLNILTELTQLSKTTNAKVALRARQLLPARPDSQLTASHAVPRTSSFAMVLIASHLPSYELRHNQVESIFLSAIDMYGHQFCIENLQKLILSETSIFDVLPNFFYHSNQVVRMAALEVYVRRAYIAYELNSVQHRQLKDNTCVVEFQFMLPTSHPNRMSFSSNLNHYGMTHVASVSDVLLDNSFTPPCQRMGGMVSFRTFEDFVRIFDEVMGCFSDSPPQSPTFPEAGHTSLYDEDKVPRDEPIHILNVAIKTDCDIEDDRLAAMFREFTQQNKATLVDHGIRRLTFLVAQKREFPKFFTFRARDKFEEDRIYRHLEPALAFQLELNRMRNFDLTAIPCANHKMHLYLGAAKVEVGTEVTDYRFFVRAIIRHSDLVTKEASFEYLQNEGERLLLEAMDELEVAFNNTNVRTDCNHIFLNFVPTVIMDPSKIEESVRSMVMRYGSRLWKLRVLQAELKINIRLTPTGKAIPIRLFLTNESGYYLDISLYKEVTDSRTAQIMFQAYGDKQGPLHGMLINTPYVTKDLLQSKRFQAQSLGTTYIYDIPEMFRQSLIKLWESMSTQAFLPSPPLPSDMLTYTELVLDDQGQLVHMNRLPGGNEATWKMTFKSPEYPEGRDIIVIGNDITYRIGSFGPQEDLLFLRASELARAEGIPRIYVSANSGARIGLAEEIRHMFHVAWVDPEDPYKGYRYLYLTPQDYKRVSALNSVHCEHVEDEGESRYKITDIIGKEEGIGPENLRGSGMIAGESSLAYNEIITISLVTCRAIGIGAYLVRLGQRTIQVENSHLILTGAGALNKVLGREVYTSNNQLGGIQIMHNNGVTHCTVCDDFEGVFTVLHWLSYMPKSVHSSVPLLNSKDPIDRIIEFVPTKTPYDPRWMLAGRPHPTQKGQWLSGFFDYGSFSEIMQPWAQTVVVGRARLGGIPVGVVAVETRTVELSIPADPANLDSEAKIIQQAGQVWFPDSAFKTYQAIKDFNREGLPLMVFANWRGFSGGMKDMYDQVLKFGAYIVDGLRECCQPVLVYIPPQAELRGGSWVVIDSSINPRHMEMYADRESRGSVLEPEGTVEIKFRRKDLVKTMRRVDPVYIHLAERLGTPELSTAERKELENKLKEREEFLIPIYHQVAVQFADLHDTPGRMQEKGVISDILDWKTSRTFFYWRLRRLLLEDLVKKKIHNANPELTDGQIQAMLRRWFVEVEGTVKVGLGQ

SEQ ID NO: 13166 - protein, 1667 aa, Homo sapiens
MDEPSPLAQPLELNQHSRFIIGSVSEDNSEDEISNLVKLDLLEEKEGSLSPASVGSDTLSDLGISSLQDGLALHIRSSMSGLHLVKQGRDRKKIDSQRDFTVASPAEFVTRFGGNKVIEKVLIANNGIAAVKCMRSIRRWSYEMFRNERAIRFVVMVTPEDLKANAEYIKMADHYVPVPGGPNNNNYANVELILDIAKRIPVQAVWAGWGHASENPKLPELLLKNGIAFMGPPSQAMWALGDKIASSIVAQTAGIPTLPWSGSGLRVDWQENDFSKRILNVPQELYEKGYVKDVDDGLQVAEEVGYPVMIKASEGGGGKGIRKVNNADDFPNLFRQVQAEVPGSPIFVMRLAKQSRHLEVQILADQYGNAISLFGRDCSVQRRHQKIIEEAPATIATPAVFEHMEQCAVKLAKMVGYVSAGTVEYLYSQDGSFYFLELNPRLQVEHPCTEMVADVNLPAAQLQIAMGIPLYRIKDIRMMYGVSPWGDSPIDFEDSAHVPCPRGHVIAARITSENPDEGFKPSSGTVQELNFRSNKNVWGYFSVAAAGGLHEFADSQFGHCFSWGENREEAISNMVVALKELSIRGDFRTTVEYLIKLLETESFQMNRIDTGWLDRLIAEKVQAERPDTMLGVVCGALHVADVSLRNSVSNFLHSLERGQVLPAHTLLNTVDVELIYEGVKYVLKVTRQSPNSYVVIMNGSCVEVDVHRLSDGGLLLSYDGSSYTTYMKEEVDRYRITIGNKTCVFEKENDPSVMRSPSAGKLIQYIVEDGGHVFAGQCYAEIEVMKMVMTLTAVESGCIHYVKRPGAALDPGCVLAKMQLDNPSKVQQAELHTGSLPRIQSTALRGEKLHRVFHYVLDNLVNVMNGYCLPDPFFSSKVKDWVERLMKTLRDPSLPLLELQDIMTSVSGRIPPNVEKSIKKEMAQYASNITSVLCQFPSQQIANILDSHAATLNRKSEREVFFMNTQSIVQLVQRYRSGIRGHMKAVVMDLLRQYLRVETQFQNGHYDKCVFALREENKSDMNTVLNYIFSHAQVTKKNLLVTMLIDQLCGRDPTLTDELLNILTELTQLSKTTNAKVALRARQVLIASHLPSYELRHNQVESIFLSAIDMYGHQFCIENLQKLILSETSIFDVLPNFFYHSNQVVRMAALEVYVRRAYIAYELNSVQHRQLKDNTCVVEFQFMLPTSHPNRGNIPTLNRMSFSSNLNHYGMTHVASVSDVLLDNSFTPPCQRMGGMVSFRTFEDFVRIFDEVMGCFSDSPPQSPTFPEAGHTSLYDEDKVPRDEPIHILNVAIKTDCDIEDDRLAAMFREFTQQNKATLVDHGIRRLTFLVAQKDFRKQVNYEVDRRFHREFPKFFTFRARDKFEEDRIYRHLEPALAFQLELNRMRNFDLTAIPCANHKMHLYLGAAKVEVGTEVTDYRFFVRAIIRHSDLVTKEASFEYLQNEGERLLLEAMDELEVAFNNTNVRTDCNHIFLNFVPTVIMDPSKIEESVRSMVMRYGSRLWKLRVLQAELKINIRLTPTGKAIPIRLFLTNESGYYLDISLYKEVTDSRTAQIMFQAYGDKQGPLHGMLINTPYVTKDLLQSKRFQAQSLGTTYIYDIPEMFRQSLIKLWESMSTQAFLPSPPLPSDMLTYTELVLDDQGQLVHMNRLPGGNEANWHGSLENDL

SEQ ID NO: 13167 - protein, 133 aa, Homo sapiens
MTGYTPDEKLRLQQLRELRRRWLKDQELSPREPVLPPQKMGPMEKFWNKFLENKSPWRKMVHGVYKKSIFVFTHVLVPVWIIHYYMKYHVSEKPYGIVEKKSRIFPVSLNTSDFSFVYCFSLSFSSLSKQLLD

SEQ ID NO: 13168 - protein, 128 aa, Homo sapiens
MTGYTPDEKLRLQQLRELRRRWLKDQELSPREPVLPPQKMGPMEKFWNKFLENKSPWRKMVHGVYKKSIFVFTHVLVPVWIIHYYMKYHVSEKPYGIVEKKSRIFPGDTILETGEVIPPMKEFPDQHH

SEQ ID NO: 13169 - protein, 169 aa, Homo sapiens
MVNELYPYIVEFEEEAKNPGLETHRKRKRSGNSDSIERDAAQEAEAGTGLEPGSNSGQCSVPLKKGKDAPIKKESLGHWSQGLKISMQDPKMQVYKDEQVVVIKDKYPKARYHWLVLPWTSISSLKAVAREHLELLKHMHTVGEKVIVDFAGSSKLRFRLGYHAIPSMR

SEQ ID NO: 13170 - protein, 179 aa, Homo sapiens
MKTDGRCQELEPPIPDAMSSKGSVVLAYSGSPDTSCILVWLKEQGYDIIAYLANTGQKEDFEEAWKKALKLGTKKVFIEDASREFVEEFIWPAIQSSALYENRYLLGTSLARPGIAGKQVEIAKQEEAKYVFHGTTGKGNDQVRFELTCYLLAPQIKVTAPWRMPEFYNRFKGCNDLMK

SEQ ID NO: 13171 - protein, 185 aa, Homo sapiens
MSGSFELSVQDLNDLLSDGSGCYSLPSQPCNEVTPRIYVGNASVAQDIPKLQKLGITHVLNAAEGRSFMHVNTNANFYKDSGITYLGIKANDTQEFNLSAYFERAADFIDQALAQKNGRVLVHCREGYSRSPTLVIAYLMMRQKMDVKSALSIVRQNREIGPNDGFLAQLCQLNDRLAKEGKLKP

SEQ ID NO: 13172 - protein, 185 aa, Homo sapiens; identical to SEQ ID NO: 13171

SEQ ID NO: 13173 - protein, 552 aa, Homo sapiens
MPVAATNSETAMQQVLDNLGSLPSATGAAELDLIFLRGIMESPIVRSLAKAHERLEETKLEAVRDNNLELVQEILRDLAQLAEQSSTAAELAHILQEPHFQSLLETHDSVASKTYETPPPSPGLDPTFSNQPVPPDAVRMVGIRKTAGEHLGVTFRVEGGELVIARILHGGMVAQQGLLHVGDIIKEVNGQPVGSDPRALQELLRNASGSVILKILPSYQEPHLPRQVFVKCHFDYDPARDSLIPCKEAGLRFNAGDLLQIVNQDDANWWQACHVEGGSAGLIPSQLLEEKRKAFVKRDLELTPNSGTLCGSLSGKKKKRMMYLTTKNAEFDRHELLIYEEVARMPPFRRKTLVLIGAQGVGRRSLKNKLIMWDPDRYGTTVPYTSRRPKDSEREGQGYSFVSRGEMEADVRAGRYLEHGEYEGNLYGTRIDSIRGVVAAGKVCVLDVNPQAVKVLRTAEFVPYVVFIEAPDFETLRAMNRAALESGISTKQLTEADLRRTVEESSRIQRGYGHYFDLCLVNSNLERTFRELQTAMEKLRTEPQWVPVSWVY

SEQ ID NO: 13174 - protein, 552 aa, Homo sapiens; identical to SEQ ID NO: 13173

SEQ ID NO: 13175 - protein, 576 aa, Homo sapiens
MPVAATNSETAMQQVLDNLGSLPSATGAAELDLIFLRGIMESPIVRSLAKVIMVLWFMQQNVFVPMKYMLKYFGAHERLEETKLEAVRDNNLELVQEILRDLAQLAEQSSTAAELAHILQEPHFQSLLETHDSVASKTYETPPPSPGLDPTFSNQPVPPDAVRMVGIRKTAGEHLGVTFRVEGGELVIARILHGGMVAQQGLLHVGDIIKEVNGQPVGSDPRALQELLRNASGSVILKILPSYQEPHLPRQVFVKCHFDYDPARDSLIPCKEAGLRFNAGDLLQIVNQDDANWWQACHVEGGSAGLIPSQLLEEKRKAFVKRDLELTPNSGTLCGSLSGKKKKRMMYLTTKNAEFDRHELLIYEEVARMPPFRRKTLVLIGAQGVGRRSLKNKLIMWDPDRYGTTVPYTSRRPKDSEREGQGYSFVSRGEMEADVRAGRYLEHGEYEGNLYGTRIDSIRGVVAAGKVCVLDVNPQAVKVLRTAEFVPYVVFIEAPDFETLRAMNRAALESGISTKQLTEADLRRTVEESSRIQRGYGHYFDLCLVNSNLERTFRELQTAMEKLRTEPQWVPVSWVY

SEQ ID NO: 13176 - protein, 346 aa, Homo sapiens
MESTLGAGIVIAEALQNQLAWLENVWLWITFLGDPKILFLFYFPAAYYASRRVGIAVLWISLITEWLNLIFKWFLFGDRPFWWVHESGYYSQAPAQVHQFPSSCETGPGSPSGHCMITGAALWPIMTALSSQVATRARSRWVRVMPSLAYCTFLLAVGLSRIFILAHFPHQVLAGLITGAVLGWLMTPRVPMERELSFYGLTALALMLGTSLIYWTLFTLGLDLSWSISLAFKWCERPEWIHVDSRPFASLSRDSGAALGLGIALHSPCYAQVRRAQLGNGQKIACLVLAMGLLGPLDWLGHPPQISLFYIFNFLKYTLWPCLVLALVPWAVHMFSAQEAPPIHSS

SEQ ID NO: 13177 - protein, 309 aa, Homo sapiens
MEQLLRAELRTATLRAFGGPGAGCISEGRAYDTDAGPVFVKVNRRTQARQMFEGEVASLEALRSTGLVRVPRPMKVIDLPGGGAAFVMEHLKMKSLSSQASKLGEQMADLHLYNQKLREKLKEEENTVGRRGEGAEPQYVDKFGFHTVTCCGFIPQVNEWQDDWPTFFARHRLQAQLDLIEKDYADREARELWSRLQVKIPDLFCGLEIVPALLHGDLWSGNVAEDDVGPIIYDPASFYGHSEFELAIALMFGGFPRSFFTAYHRKIPKAPGFDQRLLLYQLFNYLNHWNHFGREYRSPSLGTMRRLLK

SEQ ID NO: 13178 - protein, 455 aa, Homo sapiens
MTSARTGLRCAPARVHACVPTCMHAWARVGIPVSQVPFPGHPGISSPTPGRGPDLRPLRGRDTGSLQGAQAPARPRRAARTPGCFPRIPGAGSAKPDERGERAASPPEAAPPAARGHAPRAPAPPRPAAPQPTGASERAESRAPHSMEQLLRAELRTATLRAFGGPGAGCISEGRAYDTDAGPVFVKVNRRTQARQMFEGEVASLEALRSTGLVRVPRPMKVIDLPGGGAAFVMEHLKMKSLSSQASKLGEQMADLHLYNQKLREKLKEEENTVGRRGEGAEPQYVDKFGFHTVTCCGFIPQVNEWQDDWPTFFARHRLQAQLDLIEKDYADREARELWSRLQVKIPDLFCGLEIVPALLHGDLWSGNVAEDDVGPIIYDPASFYGHSEFELAIALMFGGFPRSFFTAYHRKIPKAPGFDQRLLLYQLFNYLNHWNHFGREYRSPSLGTMRRLLK

SEQ ID NO: 13179 - protein, 455 aa, Homo sapiens; identical to SEQ ID NO: 13178

SEQ ID NO: 13180 - protein, 459 aa, Homo sapiens
MTSARTGLRCAPARVHACVPTCMHAWARVGIPVSQVPFPGHPGISSPTLGRRPGRGPDLRPLRGRDTGSLQGAQAPARPRRAARTPGCFPRIPGAGSAKPDERGERAASPPEAAPPAARGHAPRAPAPPRPAAPQPTGASERAESRAPHSMEQLLRAELRTATLRAFGGPGAGCISEGRAYDTDAGPVFVKVNRRTQARQMFEGEVASLEALRSTGLVRVPRPMKVIDLPGGGAAFVMEHLKMKSLSSQASKLGEQMADLHLYNQKLREKLKEEENTVGRRGEGAEPQYVDKFGFHTVTCCGFIPQVNEWQDDWPTFFARHRLQAQLDLIEKDYADREARELWSRLQVKIPDLFCGLEIVPALLHGDLWSGNVAEDDVGPIIYDPASFYGHSEFELAIALMFGGFPRSFFTAYHRKIPKAPGFDQRLLLYQLFNYLNHWNHFGREYRSPSLGTMRRLLK

SEQ ID NO: 13181 - protein, 82 aa, Homo sapiens
MFFNIAINGEPLGRISFELFANKIPKTAENFHALSTGEKGFGYKGSCFHRIIPEFMCQGGDFTCHNGTGASTGRNLMSRTSP

SEQ ID NO: 13182 - protein, 297 aa, Homo sapiens [sequence omitted]

SEQ ID NO: 13183 - protein, 437 aa, Homo sapiens [sequence omitted]

SEQ ID NO: 13184 - protein, 180 aa, Homo sapiens
MSSGRGAWGRGCSSVELITPTVELRWPEMPAHSLVMSSPALPAFLLCSTLLVIKMYVVAIITGQVRLRKKAFANPEDALRHGGPQYCRSDPDVERCLRAHRNDMETIYPFLFLGFVYSFLGPNPFVAWMHFLVFLVGRVAHTVAYLGKLRAPIRSVTYTLAQLPCASMALQILWEAARHL

SEQ ID NO: 13185 - protein, 180 aa, Homo sapiens; identical to SEQ ID NO: 13184

SEQ ID NO: 13186 - protein, 181 aa, Homo sapiens
MSSGRGAWGRGCSSVELITPTVELRWPEMPAHSLVMSSPALPAFLLCSTLLVIKMYVVAIITGQVRLRKKAFANPEDALRHGGPQYCRSDPDVERCLRQAHRNDMETIYPFLFLGFVYSFLGPNPFVAWMHFLVFLVGRVAHTVAYLGKLRAPIRSVTYTLAQLPCASMALQILWEAARHL

SEQ ID NO: 13187 - protein, 136 aa, Homo sapiens [sequence omitted]

SEQ ID NO: 13188 - protein, 136 aa, Homo sapiens [sequence omitted]

SEQ ID NO: 13189 - protein, 508 aa, Homo sapiens
MELEVRRVRQAFLSGRSRPLRFRLQQLEALRRMVQEREKDILTAIAADLCKSEFNVYSQEVITVLGEIDFMLENLPEWVTAKPVKKNVLTMLDEAYIQPQPLGVVLIIGAWNYPFVLTIQPLIGAIAAGNAVIIKPSELSENTAKILAKLLPQYLDQDLYIVINGGVEETTELLKQRFDHIFYTGNTAVGKIVMEAAAKHLTPVTLELGGKSPCYIDKDCDLDIVCRRITWGKYMNCGQTCIAPDYILCEASLQNQIVWKIKETVKEFYGENIKESPDYERIINLRHFKRILSLLEGQKIAFGGETDEATRYIAPTVLTDVDPKTKVMQEEIFGPILPIVPVKNVDEAINFINEREKPLALYVFSHNHKLIKRMIDETSSGGVTGNDVIMHFTLNSFPFGGVGSSGMGAYHGKHSFDTFSHQRPCLLKSLKREGANKLRYPPNSQSKVDWGKFFLLKRFNKEKLGLLLLTFLGIVAAVLVKKYQAVLRRKALLIFLVVHRLRWSSKQR

SEQ ID NO: 13190 - protein, 485 aa, Homo sapiens
MELEVRRVRQAFLSGRSRPLRFRLQQLEALRRMVQEREKDILTAIAADLCKSEFNVYSQEVITVLGEIDFMLENLPEWVTAKPVKKNVLTMLDEAYIQPQPLGVVLIIGAWNYPFVLTIQPLIGAIAAGNAVIIKPSELSENTAKILAKLLPQYLDQDLYIVINGGVEETTELLKQRFDHIFYTGNTAVGKIVMEAAAKHLTPVTLELGGKSPCYIDKDCDLDIVCRRITWGKYMNCGQTCIAPDYILCEASLQNQIVWKIKETVKEFYGENIKESPDYERIINLRHFKRILSLLEGQKIAFGGETDEATRYIAPTVLTDVDPKTKVMQEEIFGPILPIVPVKNVDEAINFINEREKPLALYVFSHNHKLIKRMIDETSSGGVTGNDVIMHFTLNSFPFGGVGSSGMGAYHGKHSFDTFSHQRPCLLKSLKREGANKLRYPPNSQSKVDWGKFFLLKRFNKEKLGLLLLTFLGIVAAVLVKAEYY

SEQ ID NO: 13191 - protein, 453 aa, Homo sapiens [sequence omitted]

SEQ ID NO: 13192 - protein, 423 aa, Homo sapiens
MPAQKGREPSRGTAEEESILMRKQAQRVEMTCPRLQASGGLNPGSENWKTKKVLMFCVTPPELETKMNITKGGLVLFSANSNSSCMELSKKIAERLGVEMGKVQVYQEPNRETRVQIQESVRGKDVFIIQTVSKDVNTTIMELLIMVYACKTSCAKSIIGVIPYFPYSKQCKMRKRGSIVSKLLASMMCKAGLTHLITMDLHQKEIQGFFNIPVDNLRASPFLLQYIQEEIPDYRNAVIVAKSPASAKRAQSFAERLRLGIAVIHGEAQDAESDLVDGRHSPPMVRSVAAIHPSLEIPMLIPKEKPPITVVGDVGGRIAIIVDDIIDDVDSFLAAAETLKERGAYKIFVMATHGLLSSDAPRRIEESAIDEVVVTNTIPHEVQKLQCPKIKTVDISMILSEAIRRIHNGESMSYLFRNIGLDD

SEQ ID NO: 13193 - protein, 369 aa, Homo sapiens
MFCVTPPELETKMNITKGGLVLFSANSNSSCMELSKKIAERLGVEMGKVQVYQEPNRETRVQIQESVRGKDVFIIQTVSKDVNTTIMELLIMVYACKTSCAKSIIGVIPYFPYSKQCKMRKRGSIVSKLLASMMCKAGLTHLITMDLHQKEIQGFFNIPVDNLRASPFLLQYIQEEIPDYRNAVIVAKSPASAKRAQSFAERLRLGIAVIHGEAQDAESDLVDGRHSPPMVRSVAAIHPSLEIPMLIPKEKPPITVVGDVGGRIAIIVDDIIDDVDSFLAAAETLKERGAYKIFVMATHGLLSSDAPRRIEESAIDEVVVTNTIPHEVQKLQCPKIKTVDISMILSEAIRRIHNGESMSYLFRNIGLDD

SEQ ID NO: 13194 - protein, 369 aa, Homo sapiens; identical to SEQ ID NO: 13193

SEQ ID NO: 13195 - protein, 369 aa, Homo sapiens; identical to SEQ ID NO: 13193

SEQ ID NO: 13196 - protein, 369 aa, Homo sapiens; identical to SEQ ID NO: 13193

SEQ ID NO: 13197 - protein, 324 aa, Homo sapiens
MGKVQVYQEPNRETRVQIQESVRGKDVFIIQTVSKDVNTTIMELLIMVYACKTSCAKSIIGVIPYFPYSKQCKMRKRGSIVSKLLASMMCKAGLTHLITMDLHQKEIQGFFNIPVDNLRASPFLLQYIQEEIPDYRNAVIVAKSPASAKRAQSFAERLRLGIAVIHGEAQDAESDLVDGRHSPPMVRSVAAIHPSLEIPMLIPKEKPPITVVGDVGGRIAIIVDDIIDDVDSFLAAAETLKERGAYKIFVMATHGLLSSDAPRRIEESAIDEVVVTNTIPHEVQKLQCPKIKTVDISMILSEAIRRIHNGESMSYLFRNIGLDD

SEQ ID NO: 13198 - protein, 369 aa, Homo sapiens; identical to SEQ ID NO: 13193

SEQ ID NO: 13199 - protein, 369 aa, Homo sapiens; identical to SEQ ID NO: 13193

SEQ ID NO: 13200 - protein, 332 aa, Homo sapiens
MVAGESGLGKSTLVNSLFLTDLYRDRKLLGAEERIMQTVEITKHAVDIEEKGVRLRLTIVDTPGFGDAVNNTECWKPVAEYIDQQFEQYFRDESGLNRKNIQDNRVHCCLYFISPFGHGLRPLDVEFMKALHQRVNIVPILAKADTLTPPEVDHKKRKIREEIEHFGIKIYQFPDCDSDEDEDFKLQDQALKESIPFAVIGSNTVVEARGRRVRGRLYPWGIVEVENPGHCDFVKLRTMLVRTHMQDLKDVTRETHYENYRAQCIQSMTRLVVKERNRKYDQKPGQSWQGEIPSLALGETKPYFCSSIGPGLNLSGCWGPPRLINPFLPLAN

SEQ ID NO: 13201 - protein, 478 aa, Homo sapiens
MDRSLGWQGNSVPEDRTEAGIKRFLEDTTDDGELSKFVKDFSGNASCHPPEAKTWASRPQVPEPRPQAPDLYDDDLEFRPPSRPQSSDNQQYFCAPAPLSPSARPRSPWGKLDPYDSSEDDKEYVGFATLPNQVHRKSVKKGFDFTLMVAGESGLGKSTLVNSLFLTDLYRDRKLLGAEERIMQTVEITKHAVDIEEKGVRLRLTIVDTPGFGDAVNNTECWKPVAEYIDQQFEQYFRDESGLNRKNIQDNRVHCCLYFISPFGHGLRPLDVEFMKALHQRVNIVPILAKADTLTPPEVDHKKRKIREEIEHFGIKIYQFPDCDSDEDEDFKLQDQALKESIPFAVIGSNTVVEARGRRVRGRLYPWGIVEVENPGHCDFVKLRTMLVRTHMQDLKDVTRETHYENYRAQCIQSMTRLVVKERNRNKLTRESGTDFPIPAVPPGTDPETEKLIREKDEELRRMQEMLHKIQKQMKENY

SEQ ID NO: 13202 - protein, 459 aa, Homo sapiens
MIKRFLEDTTDDGELSKFVKDFSGNASCHPPEAKTWASRPQVPEPRPQAPDLYDDDLEFRPPSRPQSSDNQQYFCAPAPLSPSARPRSPWGKLDPYDSSEDDKEYVGFATLPNQVHRKSVKKGFDFTLMVAGESGLGKSTLVNSLFLTDLYRDRKLLGAEERIMQTVEITKHAVDIEEKGVRLRLTIVDTPGFGDAVNNTECWKPVAEYIDQQFEQYFRDESGLNRKNIQDNRVHCCLYFISPFGHGLRPLDVEFMKALHQRVNIVPILAKADTLTPPEVDHKKRKIREEIEHFGIKIYQFPDCDSDEDEDFKLQDQALKESIPFAVIGSNTVVEARGRRVRGRLYPWGIVEVENPGHCDFVKLRTMLVRTHMQDLKDVTRETHYENYRAQCIQSMTRLVVKERNRNKLTRESGTDFPIPAVPPGTDPETEKLIREKDEELRRMQEMLHKIQKQMKENY

SEQ ID NO: 13203 - protein, 274 aa, Homo sapiens
MIKRFLEDTTDDGELSKFVKDFSGNASCHPPEAKTWASRPQVPEPRPQAPDLYDDDLEFRPPSRPQSSDNQQYFCAPAPLSPSARPRSPWGKLDPYDSSEDDKEYVGFATLPNQVHRKSVKKGFDFTLMVAGESGLGKSTLVNSLFLTDLYRDRKLLGAEERIMQTVEITKHAVDIEEKGVRLRLTIVDTPGFGDAVNNTECWKPVAEYIDQQFEQYFRDESGLNRKNIQDNRVHCCLYFISPFGHGYGPSLRLLAPPGAVKGTGQEHQGQGCH

SEQ ID NO: 13204 - protein, 212 aa, Homo sapiens
MKALHQRVNIVPILAKADTLTPPEVDHKKRKIREEIEHFGIKIYQFPDCDSDEDEDFKLQDQALKESIPFAVIGSNTVVEARGRRVRGRLYPWGIVEVENPGHCDFVKLRTMLVRTHMQDLKDVTRETHYENYRAQCIQSMTRLVVKERNRNKLTRESGTDFPIPAVPPGTDPETEKLIREKDEELRRMQEMLLPLRLTSLLTAQRLRGNKV

SEQ ID NO: 13205 - protein, 212 aa, Homo sapiens; identical to SEQ ID NO: 13204

SEQ ID NO: 13206 - protein, 483 aa, Homo sapiens
MGPVPTSFGKRRGGPQTLPASPGGMIKRFLEDTTDDGELSKFVKDFSGNASCHPPEAKTWASRPQVPEPRPQAPDLYDDDLEFRPPSRPQSSDNQQYFCAPAPLSPSARPRSPWGKLDPYDSSEDDKEYVGFATLPNQVHRKSVKKGFDFTLMVAGESGLGKSTLVNSLFLTDLYRDRKLLGAEERIMQTVEITKHAVDIEEKGVRLRLTIVDTPGFGDAVNNTECWKPVAEYIDQQFEQYFRDESGLNRKNIQDNRVHCCLYFISPFGHGLRPLDVEFMKALHQRVNIVPILAKADTLTPPEVDHKKRKIREEIEHFGIKIYQFPDCDSDEDEDFKLQDQALKESIPFAVIGSNTVVEARGRRVRGRLYPWGIVEVENPGHCDFVKLRTMLVRTHMQDLKDVTRETHYENYRAQCIQSMTRLVVKERNRNKLTRESGTDFPIPAVPPGTDPETEKLIREKDEELRRMQEMLHKIQKQMKENY

SEQ ID NO: 13207 - protein, 792 aa, Homo sapiens
MGVPFFSSLRCMVDLGPCWAGGLTAEMKLLLALAGLLAILATPQPSEGAAPAVLGEVDTSLVLSSMEEAKQLVDKAYKERRERWGTRHCPALGKDVPGLSEKQQAAGSLKVGEGDYGDPCGLPFCLSVPVIKQRLRSGSASPMELLSYFKQPVAATRTAVRAADYLHVALDLLERKLRSLWRRPFNVTDVLTPAQLNVLSKSSGCAYQDVGVTCPEQDKYRTITGMCNNRRSPTLGASNRAFVRWLPAEYEDGFSLPYGWTPGVKRNGFPVALARAVSNEIVRFPTDQLTPDQERSLMFMQWGQLLDHDLDFTPEPAARASFVTGVNCETSCVQQPPCFPLKIPPNDPRIKNQADCIPFFRSCPACPGSNITIRNQINALTSFVDASMVYGSEEPLARNLRNMSNQLGLLAVNQRFQDNGRALLPFDNLHDDPCLLTNRSARIPCFLAGDTRSSEMPELTSMHTLLLREHNRLATELKSLNPRWDGERLYQEARKIVGAMVQIITYRDYLPLVLGPTAMRKYLPTYRSYNDSVDPRIANVFTNAFRYGHTLIQPFMFRLDNRYQPMEPNPRVPLSRVFFASWRVVLEGGIDPILRGLMATPAKLNRQNQIAVDEIRERLFEQVMRIGLDLPALNMQRSRDHGLPGYNAWRRFCGLPQPETVGQLGTVLRNLKLARKLMEQYGTPNNIDIWMGGVSEPLKRKGRVGPLLACIIGTQFRKLRDGDRFWWENEGVFSMQQRQALAQISLPRIICDNTGITTVSKNNIFMSNSYPRDFVNCSTLPALNLASWREAS

SEQ ID NO: 13208 - protein, 777 aa, Homo sapiens
MGVPFFSSLRCMVDLGPCWAGGLTAEMKLLLALAGLLAILATPQPSEGAAPAVLGEVDTSLVLSSMEEAKQLVDKAYKERRESIKQRLRSGSASPMELLSYFKQPVAATRTAVRAADYLHVALDLLERKLRSLWRRPFNVTDVLTPAQLNVLSKSSGCAYQDVGVTCPEQDKYRTITGMCNNRCGWLGVAAGTGLREASRTPQASRCQRPVLPCRRSPTLGASNRAFVRWLPAEYEDGFSLPYGWTPGVKRNGFPVALARAVSNEIVRFPTDQLTPDQERSLMFMQWGQLLDHDLDFTPEPAARASFVTGVNCETSCVQQPPCFPLKIPPNDPRIKNQADCIPFFRSCPACPGSNITIRNQINALTSFVDASMVYGSEEPLARNLRNMSNQLGLLAVNQRFQDNGRALLPFDNLHDDPCLLTNRSARIPCFLAGDTRSSEMPELTSMHTLLLREHNRLATELKSLNPRWDGERLYQEARKIVGAMVQIITYRDYLPLVLGPTAMRKYLPTYRSYNDSVDPRIANVFTNAFRYGHTLIQPFMFRLDNRYQPMEPNPRVPLSRVFFASWRVVLEGGIDPILRGLMATPAKLNRQNQIAVDEIRERLFEQVMRIGLDLPALNMQRSRDHGLPGYNAWRRFCGLPQPETVGQLGTVLRNLKLARKLMEQYGTPNNIDIWMGGVSEPLKRKGRVGPLLACIIGTQFRKLRDGDRFWWENEGVFSMQQRQALAQISLPRIICDNTGITTVSKNNIFMSNSYPRDFVNCSTLPALNLASWREAS

SEQ ID NO: 13209 - protein, 677 aa, Homo sapiens
MGVPFFSSLRCMVDLGPCWAGGLTAEMKLLLALAGLLAILATPQPSEGAAPAVLGEVDTSLVLSSMEEAKQLVDKAYKERRESIKQRLRSGSASPMELLSYFKQPVAATRTAVRAADYLHVALDLLERKLRSLWRRPFNVTDVLTPAQLNVLSKSSGCAYQDVGVTCPEQDKYRTITGMCNNRRSPTLGASNRAFVRWLPAEYEDGFSLPYGWTPGVKRNGFPVALARAVSNEIVRFPTDQLTPDQERSLMFMQWGQLLDHDLDFTPEPAARASFVTGVNCETSCVQQPPCFPLKIPPNDPRIKNQADCIPFFRSCPACPGSNITIRNQINALTSFVDASMVYGSEEPLARNLRNMSNQLGLLAVNQRFQDNGRALLPFDNLHDDPCLLTNRSARIPCFLAGDTRSSEMPELTSMHTLLLREHNRLATELKSLNPRWDGERLYQEARKIVGAMVQIITYRDYLPLVLGPTAMRKYLPTYRSYNDSVDPRIANVFTNAFRYGHTLIQPFMFRLDNRYQPMEPNPRVPLSRVFFASWRVVLEGGIDPILRGLMATPAKLNRQNQIAVDEIRERLFEQVMRIGLDLPALNMQRSRDHGLPGYNAWRRFCGLPQPETVGQLGTVLRNLKLARKLMEQYGTPNNIDIWMGGVSEPLKRKGRVGPLLACIIGTQFRKLRDGDR

SEQ ID NO: 13210 - protein, 745 aa, Homo sapiens
MGVPFFSSLRCMVDLGPCWAGGLTAEMKLLLALAGLLAILATPQPSEGAAPAVLGEVDTSLVLSSMEEAKQLVDKAYKERRESIKQRLRSGSASPMELLSYFKQPVAATRTAVRAADYLHVALDLLERKLRSLWRRPFNVTDVLTPAQLNVLSKSSGCAYQDVGVTCPEQDKYRTITGMCNNRRSPTLGASNRAFVRWLPAEYEDGFSLPYGWTPGVKRNGFPVALARAVSNEIVRFPTDQLTPDQERSLMFMQWGQLLDHDLDFTPEPAARASFVTGVNCETSCVQQPPCFPLKIPPNDPRIKNQADCIPFFRSCPACPGSNITIRNQINALTSFVDASMVYGSEEPLARNLRNMSNQLGLLAVNQRFQDNGRALLPFDNLHDDPCLLTNRSARIPCFLAGDTRSSEMPELTSMHTLLLREHNRLATELKSLNPRWDGERLYQEARKIVGAMVQIITYRDYLPLVLGPTAMRKYLPTYRSYNDSVDPRIANVFTNAFRYGHTLIQPFMFRLDNRYQPMEPNPRVPLSRVFFASWRVVLEGGIDPILRGLMATPAKLNRQNQIAVDEIRERLFEQVMRIGLDLPALNMQRSRDHGLPGYNAWRRFCGLPQPETVGQLGTVLRNLKLARKLMEQYGTPNNIDIWMGGVSEPLKRKGRVGPLLACIIGTQFRKLRDGDRFWWENEGVFSMQQRQALAQISLPRIICDNTGITTVSKNNIFMSNSYPRDFVNCSTLPALNLASWREAS

SEQ ID NO: 13211 - protein, 715 aa, Homo sapiens
MHLLPALAGVLATLVLAQPCEGTDPASPGAVETSVLRDCIAEAKLLVDAAYNWTQKSIKQRLRSGSASPMDLLSYFKQPVAATRTVVRAADYMHVALGLLEEKLQPQRSGPFNVTDVLTEPQLRLLSQASGCALRDQAERCSDKYRTITGRCNNKRRPLLGASNQALARWLPAEYEDGLSLPFGWTPSRRRNGFLLPLVRAVSNQIVRFPNERLTSDRGRALMFMQWGQFIDHDLDFSPESPARVAFTAGVDCERTCAQLPPCFPIKIPPNDPRIKNQRDCIPFFRSAPSCPQNKNRVRNQINALTSFVDASMVYGSEVSLSLRLRNRTNYLGLLAINQRFQDNGRALLPFDNLHDDPCLLTNRSARIPCFLAGDTRSTETPKLAAMHTLFMREHNRLATELRRLNPRWNGDKLYNEARKIMGAMVQIITYRDFLPLVLGKARARRTLGHYRGYCSNVDPRVANVFTLAFRFGHTMLQPFMFRLDSQYRASAPNSHVPLSSAFFASWRIVYEGGIDPILRGLMATPAKLNRQDAMLVDELRDRLFRQVRRIGLDLAALNMQRSRDHGLPGYNAWRRFCGLSQPRNLAQLSRVLKNQDLARKFLNLYGTPDNIDIWIGAIAEPLLPGARVGPLLACLFENQFRRARDGDRFWWQKRGVFTKRQRKALSRISLSRIICDNTGITTVSRDIFRANIYPRGFVNCSRIPRLNLSAWRGT

SEQ ID NO: 13212 - protein, 715 aa, Homo sapiens; identical to SEQ ID NO: 13211

SEQ ID NO: 13213 - protein, 659 aa, Homo sapiens
MHLLPALAGVLATLVLAQPCEGTDPASPGAVETSVLRDCIAEAKLLVDAAYNWTQKSIKQRLRSGSASPMDLLSYFKQPVAATRTVVRAADYMHVALGLLEEKLQPQRSGPFNVTDVLTEPQLRLLSQASGCALRDQAERCSDKYRTITGRCNNKRRPLLGASNQALARWLPAEYEDGLSLPFGWTPSRRRNGFLLPLVRAVSNQIVRFPNERLTSDRGRALMFMQWGQFIDHDLDFSPESPARVAFTAGVDCERTCAQLPPCFPIKIPPNDPRIKNQRDCIPFFRSAPSCPQNKNRVRNQINALTSFVDASMVYGSEVSLSLRLRNRTNYLGLLAINQRFQDNGRALLPFDNLHDDPCLLTNRSARIPCFLAGDTRSTETPKLAAMHTLFMREHNRLATELRRLNPRWNGDKLYNEARKIMGAMVQIITYRDFLPLVLGKARARRTLGHYRGYCSNVDPRVANVFTLAFRFGHTMLQPFMFRLDSQYRASAPNSHVPLSSAFFASWRIVYEGDQVFQGANGGGIDPILRGLMATPAKLNRQDAMLVDELRDRLFRQVRRIGLDLAALNMQRSRDHGLPGYNAWRRFCGLSQPRNLAQLSRVLKNQDLARKFLNLYGTPDNIDIWIGAIAEPLLPGARVGPLLACLFENQFRRARDGDR

SEQ ID NO: 13214 - protein, 1195 aa, Homo sapiens
MGEEGPPSLEYIQAKDLFPPKELVKEEENLQVPFTVLQGEGVEFLGRAADALIAISNYRLHIKFKDSVINVPLRMIDSVESRDMFQLHISCKDSKVVRCHFSTFKQCQEWLSRLSRATARPAKPEDLFAFAYHAWCLGLTEEDQHTHLCQPGEHIRCRQEAELARMGFDLQNVWRVSHINSNYKLCPSYPQKLLVPVWITDKELENVASFRSWKRIPVVVYRHLRNGAAIARCSQPEISWWGWRNADDEYLVTSIAKACALDPGTRATGGSLSTGNNDTSEACDADFDSSLTACSGVESTAAPQKLLILDARSYTAAVANRAKGGGCECEEYYPNCEVVFMGMANIHAIRNSFQYLRAVCSQMPDPSNWLSALESTKWLQHLSVMLKAAVLVANTVDREGRPVLVHCSDGWDRTPQIVALAKILLDPYYRTLEGFQVLVESDWLDFGHKFGDRCGHQENVEDQNEQCPVFLQWLDSVHQLLKQFPCLFEFNEAFLVKLVQHTYSCLYGTFLANNPCEREKRNIYKRTCSVWALLRAGNKNFHNFLYTPSSDMVLHPVCHVRALHLWTAVYLPASSPCTLGEENMDLYLSPVAQSQEFSGRSLDRLPKTRSMDDLLSACDTSSPLTRTSSDPNLNNHCQEVRVGLEPWHSNPEGSETSFVDSGVGGPQQTVGEVGLPPPLPSSQKDYLSNKPFKSHKSCSPSYKLLNTAVPREMKSNTSDPEIKVLEETKGPAPDPSAQDELGRTLDGIGEPPEHCPETEAVSALSKVISNKCDGVCNFPESSQNSPTGTPQQAQPDSMLGVPSKCVLDHSLSTVCNPPSAACQTPLDPSTDFLNQDPSGSVASISHQEQLSSVPDLTHGEEDIGKRGNNRNGQLLENPRFGKMPLELVRKPISQSQISEFSFLGSNWDSFQGMVTSFPSGEATPRRLLSYGCCSKRPNSKQMRATGPCFGGQWAQREGVKSPVCSSHSNGHCTGPGGKNQMWLSSHPKQVSSTKPVPLNCPSPVPPLYLDDDGLPFPTDVIQHRLRQIEAGYKQEVEQLRRQVRELQMRLDIRHCCAPPAEPPMDYEDDFTCLKESDGSDTEDFGSDHSEDCLSEASWEPVDKKETEVTRWVPDHMASHCYNCDCEFWLAKRRHHCRNCGNVFCAGCCHLKLPIPDQQLYDPVLVCNSCYEHIQVSRARELMSQQLKKPIATASS

SEQ ID NO: 13215 - protein, 1195 aa, Homo sapiens; identical to SEQ ID NO: 13214

SEQ ID NO: 13216 - protein, 1121 aa, Homo sapiens
MIDSVESRDMFQLHISCKDSKVVRCHFSTFKQCQEWLSRLSRATARPAKPEDLFAFAYHAWCLGLTEEDQHTHLCQPGEHIRCRQEAELARMGFDLQNVWRVSHINSNYKLCPSYPQKLLVPVWITDKELENVASFRSWKRIPVVVYRHLRNGAAIARCSQPEISWWGWRNADDEYLVTSIAKACALDPGTRATGGSLSTGNNDTSEACDADFDSSLTACSGVESTAAPQKLLILDARSYTAAVANRAKGGGCECEEYYPNCEVVFMGMANIHAIRNSFQYLRAVCSQMPDPSNWLSALESTKWLQHLSVMLKAAVLVANTVDREGRPVLVHCSDGWDRTPQIVALAKILLDPYYRTLEGFQVLVESDWLDFGHKFGDRCGHQENVEDQNEQCPVFLQWLDSVHQLLKQFPCLFEFNEAFLVKLVQHTYSCLYGTFLANNPCEREKRNIYKRTCSVWALLRAGNKNFHNFLYTPSSDMVLHPVCHVRALHLWTAVYLPASSPCTLGEENMDLYLSPVAQSQEFSGRSLDRLPKTRSMDDLLSACDTSSPLTRTSSDPNLNNHCQEVRVGLEPWHSNPEGSETSFVDSGVGGPQQTVGEVGLPPPLPSSQKDYLSNKPFKSHKSCSPSYKLLNTAVPREMKSNTSDPEIKVLEETKGPAPDPSAQDELGRTLDGIGEPPEHCPETEAVSALSKVISNKCDGVCNFPESSQNSPTGTPQQAQPDSMLGVPSKCVLDHSLSTVCNPPSAACQTPLDPSTDFLNQDPSGSVASISHQEQLSSVPDLTHGEEDIGKRGNNRNGQLLENPRFGKMPLELVRKPISQSQISEFSFLGSNWDSFQGMVTSFPSGEATPRRLLSYGCCSKRPNSKQMRATGPCFGGQWAQREGVKSPVCSSHSNGHCTGPGGKNQMWLSSHPKQVSSTKPVPLNCPSPVPPLYLDDDGLPFPTDVIQHRLRQIEAGYKQEVEQLRRQVRELQMRLDIRHCCAPPAEPPMDYEDDFTCLKESDGSDTEDFGSDHSEDCLSEASWEPVDKKETEVTRWVPDHMASHCYNCDCEFWLAKRRHHCRNCGNVFCAGCCHLKLPIPDQQLYDPVLVCNSCYEHIQVSRARELMSQQLKKPIATASS

SEQ ID NO: 13217 - protein, 137 aa, Homo sapiens
MAASMFYGRLVAVATLRNHRPRTAQRAAAQVLGSSGLFNNHGLQVQQQQQRNLSLHEYMSMELLQEAGVSVPKGYVAKSPDEAYAIAKKLGTEERNNMCRINCNYEYFWQVLWDQNSQVIRSRFKRCRDKGTGFSWW

SEQ ID NO: 13218 - protein, 463 aa, Homo sapiens [sequence omitted]

SEQ ID NO: 13219 - protein, 463 aa, Homo sapiens [sequence omitted]

SEQ ID NO: 13220 - protein, 51 aa, Homo sapiens
MVAYWRQAGLSYIRYSQICAKVVRDALKTEFKANAKKTSGNSVKIVKVKKE

SEQ ID NO: 13221 - protein, 356 aa, Homo sapiens
MNAARTGYRVFSANSTAACTELAKRITERLGAELGKSVVYQETNGETRVEIKESVRGQDIFIIQTIPRDVNTAVMELLIMAYALKTACARNIIGVIPYFPYSKQSKMRKRGSIVCKLLASMLAKAGLTHIITMDLHQKEIQGFFSFPVDNLRASPFLLQYIQEEIPNYRNAVIVAKSPDAAKRAQSYAERLRLGLAVIHGEAQCTELDMDDGRHSPPMVKNATVHPGLELPLMMAKEKPPITVVGDVGGRIAIIVDDIIDDVESFVAAAEILKERGAYKIYVMATHGILSAEAPRLIEESSVDEVVVTNTVPHEVQKLQCPKIKTVDISLILSEAIRRIHNGESMAYLFRNITVDD

SEQ ID NO: 13222 - protein, 356 aa, Homo sapiens; identical to SEQ ID NO: 13221

SEQ ID NO: 13223 - protein, 207 aa, Homo sapiens
MSTQSTHPLKPEAPRLPPGIPESPSCQRRHTLPASEFRCLTPEDAVSAFEIEREAFISVLGVCPLYLDEIRHFLTLCPELSLGWFEEGCLVAFIIGSLWDKERLMQESLTLHRSGGHIAHLHVLAVHRAFRQQGRGPILLWRYLHHLGSQPAVRRAALMCEDALVPFYERFSFHAVGPCAITVGSLTFMELHCSLRGHPFLRRNSGC

SEQ ID NO: 13224 - protein, 790 aa, Homo sapiens
MITVNPDGKIMVRRCLVTLRPFRLFVLGIGFFTLCFLMTSLGGQFSARRLGDSPFTIRTEVMGGPESRGVLRKMSDLLELMVKRMDALARLENSSELHRAGGDLHFPADRMPPGAGLMERIQAIAQNVSDIAVKVDQILRHSLLLHSKVSEGRRDQCEAPSDPKFPDCSGKVEWMRARWTSDPCYAFFGVDGTECSFLIYLSEVEWFCPPLPWRNQTAAQRAPKPLPKVQAVFRSNLSHLLDLMGSGKESLIFMKKRTKRLTAQWALAAQRLAQKLGATQRDQKQILVHIGFLTEESGDVFSPRVLKGGPLGEMVQWADILTALYVLGHGLRVTVSLKELQSNLGVPPGRGSCPLTMPLPFDLIYTDYHGLQQMKRHMGLSFKKYRCRIRVIDTFGTEPAYNHEEYATLHGYRTNWGYWNLNPKQFMTMFPHTPDNSFMGFVSEELNETEKRLIKGGKASNMAVVYGKEASIWKGKEKFLGILNKYMEIHGTVYYESQRPPEVPAFVKNHGLLPQPEFQQLLRKAKLFIGFGFPYEGPAPLEAIANGCIFLQSRFSPPHSSLNHEFFRGKPTSREVFSQHPYAENFIGKPHVWTVDYNNSEEFEAAIKAIMRTQVDPYLPYEYTCEGMLERIHAYIQHQDFCRAPDPALPEAHAPQSPFVLAPNATHLEWARNTSLAPGAWPPAHALRAWLAVPGRACTDTCLDHGLICEPSFFPFLNSQDAFLKLQVPCDSTESEMNHLYPAFAQPGQECYLQKEPLLFSCAGSNTKYRRLCPCRDFRKGQVALCQGCL

SEQ ID NO: 13225 - protein, 792 aa, Homo sapiens [sequence omitted]

SEQ ID NO: 13226 - protein, 472 aa, Homo sapiens
MITVNPDGKIMVRRCLVTLRPFRLFVLGIGFFTLCFLMTSLGGQFSARRLGDSPFTIRTEVMGGPESRGVLRKMSDLLELMVKRMDALARLENSSELHRAGGDLHFPADRMPPGAGLMERIQAIAQNVSDIAVKVDQILRHSLLLHSKVSEGRRDQCEAPSDPKFPDCSGKVEWMRARWTSDPCYAFFGVDGTECSFLIYLSEVEWFCPPLPWRNQTAAQRAPKPLPKVQAVFRSNLSHLLDLMGSGKESLIFMKKRTKRLTAQWALAAQRLAQKLGATQRDQKQILVHIGFLTEESGDVFSPRVLKGGPLGEMVQWADILTALYVLGHGLRVTVSLKELQSNLGVPPGRGSCPLTMPLPFDLIYTDYHGLQQMKRHMGLSFKKYRCRIRVIDTFGTEPAYNHEEYATLHGYRTNWGYWNLNPKQFMTMFREGEVPGHPEQIHGDPWHRVLREPAAPRGASLCEEPRPLTAA

SEQ ID NO: 13227 - protein, 384 aa, Homo sapiens
MDPAGGPRGVLPRPCRVLVLLNPRGGKGKALQLFRSHVQPLLAEAEISFTLMLTERRNHARELVRSEELGRWDALVVMSGDGLMHEVVNGLMERPDWETAIQKPLCSLPAGSGNALAASLNHYAGYEQVTNEDLLTNCTLLLCRRLLSPMNLLSLHTASGLRLFSVLSLAWGFIADVDLESEKYRRLGEMRFTLGTFLRLAALRTYRGRLAYLPVGRVGSKTPASPVVVQQGPVDAHLVPLEEPVPSHWTVVPDEDFVLVLALLHSHLGSEMFAAPMGRCAAGVMHLFYVRAGVSRAMLLRLFLAMEKGRHMEYECPYLVYVPVVAFRLEPKDGKGVFAVDGELMVSEAVQGQVHPNYFWMVSGCVEPPPSWKPQQMPPPEEPL

SEQ ID NO: 13228 - protein, 398 aa, Homo sapiens
MDPVVGCGRGLFGFVFSAGGPRGVLPRPCRVLVLLNPRGGKGKALQLFRSHVQPLLAEAEISFTLMLTERRNHARELVRSEELGRWDALVVMSGDGLMHEVVNGLMERPDWETAIQKPLCSLPAGSGNALAASLNHYAGYEQVTNEDLLTNCTLLLCRRLLSPMNLLSLHTASGLRLFSVLSLAWGFIADVDLESEKYRRLGEMRFTLGTFLRLAALRTYRGRLAYLPVGRVGSKTPASPVVVQQGPVDAHLVPLEEPVPSHWTVVPDEDFVLVLALLHSHLGSEMFAAPMGRCAAGVMHLFYVRAGVSRAMLLRLFLAMEKGRHMEYECPYLVYVPVVAFRLEPKDGKGVFAVDGELMVSEAVQGQVHPNYFWMVSGCVEPPPSWKPQQMPPPEEPL

SEQ ID NO: 13229 - protein, 384 aa, Homo sapiens; identical to SEQ ID NO: 13227

SEQ ID NO: 13230 - protein, 117 aa, Homo sapiens
MLIGLLLAGQHSSSTTSAWMDFFLARDKTLQEKCYLEQKTVCGENLPPLTYDQLKDLNLLDRCIKETLRLRPPIMIMMRMARTPQTVVGYTIPPGHQDNPASGEKFAYVPFGAGCHR

SEQ ID NO: 13231 - protein, 145 aa, Homo sapiens
MLIGLLLAGQHSSSTTSAWMDFFLARDKTLQEKCYLEQKTVCGENLPPLTYDQLKDLNLLDRCIKETLRLRPPIMIMMRMARTPQTVVGYTIPPGHQVCVSPTVNQRPKDSWVERLDFNPDCYLQDNPASGEKFAYVPFGAGCHR

SEQ ID NO: 13232 - protein, 657 aa, Homo sapiens
MHHGALSEALLGDIMGFNVMNVSVKDVRWGSVAVDSKNDPRMKAVGLTAQFAELKVKIYCHFGNKLEDGPKFLKSGDAAIVDIVPGKPMCAESFSDHPLLSCFAVGDVRQTVAVGVIKAVDKKAAGAGKTPNPTASEFIPKGGSTSRLSNVSQSNMSAFSQVFSHPSMGSPATAGLAPVGNFRKLRRDVYGAERDVAAAAGLETCQTCSLKPIIAPLRNIFTSSSGMSLSAGSSPLHSPKITPHTSPAPRRRSHTPNPASYMVPSSASTSVNNPVSQTPSSGQVIQKETVGGTTYFYTDTTPAPLTGMVFPNYHIYPPTAPHVAYMQPKANAPSFFMADELRQELINRHLITMAQIDQADMPEPLPPPNRIQKSSNFGYITSCYKAVNSKDDLPYCLRRIHALVFAYDFHAGGETMMSRHFNDPNADAYFTKRKWGQHEGPLPRQHAGLLPESLIWAYIVQLSSALRTIHTAGLACRVMDPTKILITGKTRLRVNCVGVFDVLTFDNSQNNNPLALMAQYQQADLISLGKVVLALACNSLAGIQRENLQKAMELVTINYSSDLKNLILYLLTDQNRMRSVNDIMPMIGARFYTQLDAAQMRNDVIEEDLAKLDAGVPEKISLISRDEKSVLVVTYSDLKRCFENTFQELIAAANGQL

SEQ ID NO: 13233 - protein, 427 aa, Homo sapiens
MAQIDQADMPAVPTEVDSYHSLFPLEPLPPPNRIQKSSNFGYITSCYKAVNSKDDLPYCLRRIHGFRLVNTKCMVLVDMWKKIQHSNIVTLREVFTTKAFAEPSLVFAYDFHAGGETMMSRHFNDPNADAYFTKRKWGQHEGPLPRQHAGLLPESLIWAYIVQLSSALRTIHTAGLACRVMDPTKILITGKTRLRVNCVGVFDVLTFDNSQNNNPLALMAQYQQADLISLGKVVLALACNSLAGIQRENLQKAMELVTINYSSDLKNLILYLLTDQNRMRSVNDIMPMIGARFYTQLDAAQMRNDVIEEDLAKEVQNGRLFRLLAKLGTINERPEFQKDPTWSETGDRYLLKLFRDHLFHQVTEAGAPWIDLSHIISCLNKLDAGVPEKISLISRDEKSVLVVTYSDLKRCFENTFQELIAAANGQL

SEQ ID NO: 13234 - protein, 599 aa, Homo sapiens [sequence omitted]

SEQ ID NO: 13235 - protein, 562 aa, Homo sapiens [sequence omitted]

SEQ ID NO: 13236 - protein, 83 aa, Homo sapiens
MEQWVLVEMVQALYEAPDYHLILEGILILWIIRLLFSKTYKLQERSDLTVKEKEELIEEWQPEPLVPPVPKDHPALNYNIVLG

SEQ ID NO: 13237 - protein, 1266 aa, Homo sapiens [sequence omitted]

SEQ ID NO: 13238 - protein, 1268 aa, Homo sapiens
MLQQVPENINFPAEEEKILEFWTEFNCFQECLKQSKHKPKFTFYDGPPFATGLPHYGHILAGTIKDIVTRYAHQSGFHVDRRFGWDCHGLPVEYEIDKTLGIRGPEDVAKMGITEYNNQCRAIVMRYSAEWKSTVSRLGRWIDFDNDYKTLYPQFMESVWWVFKQLYDKGLVYRGVKVMPFSTACNTPLSNFESHQNYKDVQDPSVFVTFPLEEDETVSLVAWTTTPWTLPSNLAVCVNPEMQYVKIKDVARGRLLILMEARLSALYKLESDYEILERFPGAYLKGKKYRPLFDYFLKCKENGAFTVLVDNYVKEEEGTGVVHQAPYFGAEDYRVCMDFNIIRKDSLPVCPVDASGCFTTEVTDFAGQYVKDADKSIIRTLKEQGRLLVATTFTHSYPFCWRSDTPLIYKAVPSWFVRVENMVDQLLRNNDLCYWVPELVREKRFGNWLKDARDWTISRNRYWGTPIPLWVSDDFEEVVCIGSVAELEELSGAKISDLHRESVDHLTIPSRCGKGSLHRISEVFDCWFESGSMPYAQVHYPFENKREFEDAFPADFIAEGIDQTRGWFYTLLVLATALFGQPPFKNVIVNGLVLASDGQKMSKRKKNYPDPVSIIQKYGADALRLYLINSPVVRAENLRFKEEGVRDVLKDVLLPWYNAYRFLIQNVLRLQKEEEIEFLYNENTVRESPNITDRWILSFMQSLIGFFETEMAAYRLYTVVPRLVKFVDILTNWYVRMNRRRLKGENGMEDCVMALETLFSVLLSLCRLMAPYTPFLTELMYQNLKVLIDPVSVQDKDTLSIHYLMLPRVREELIDKKTESAVSQMQSVIELGRVIRDRKTIPIKYPLKEIVVIHQDPEALKDIKSLEKYIIEELNVRKVTLSTDKNKYGIRLRAEPDHMVLGKRLKGAFKAVMTSIKQLSSEELEQFQKTGTIVVEGHELHDEDIRLMYTFDQATGGTAQFEAHSDAQALVLLDVTPDQSMVDEGMAREVINRIQKLRKKCNLVPTDEITVYYKAKSEGTYLNSVIESHTEFIFTTIKAPLKPYPVSPSDKVLIQEKTQLKGSELEITLTRGSSLPGPACAYVNLNICANGSEQGGVLLLENPKGDNRLDLLKLKSVVTSIFGVKNTELAVFHDETEIQNQTDLLSLSGKTLCVTAGSAPSLINSSSTLLCQYINLQLLNAKPQECLMGTVGTLLLENPLGQNGLTHQGLLYEAAKVFGLRSRKLKLFLNETQTQGKEIVDQITEDIPVKTLNMKTVYVSVLPTTADF

SEQ ID NO: 13239 - protein, 1262 aa, Homo sapiens
MLQQVPENINFPAEEEKILEFWTEFNCFQECLKQSKHKPKFTFYDGPPFATGLPHYGHILAGTIKDIVTRYAHQSGFHVDRRFGWDCHGLPVEYEIDKTLGIRGPEDVAKMGITEYNNQCRAIVMRYSAEWKSTVSRLGRWIDFDNDYKTLYPQFMESVWWVFKQLYDKGLVYRGVKVMPFSTACNTPLSNFESHQNYKDVQDPSVFVTFPLEEDETVSLVAWTTTPWTLPSNLAVCVNPEMQYVKIKDVARGRLLILMEARLSALYKLESDYEILERFPGAYLKGKKYRPLFDYFLKCKENGAFTVLVDNYVKEEEGTGVVHQAPYFGAEDYRVCMDFNIIRKDSLPVCPVDASGCFTTEVTDFAGQYVKDADKSIIRTLKEQGRLLVATTFTHSYPFCWRSDTPLIYKAVPSWFVRVENMVDQLLRNNDLCYWVPELVREKRFGNWLKDARDWTISRNRYWGTPIPLWVSDDFEEVVCIGSVAELEELSGAKISDLHRESVDHLTIPSRCGKGSLHRISEVFDCWFESGSMPYAQVHYPFENKREFEDAFPADFIAEGIDQTRGWFYTLLVLATALFGQPPFKNVIVNGLVLASDGQKMSKRKKNYPDPVSIIQKYGADALRLYLINSPVVRAENLRFKEEGVRDVLKDVLLPWYNAYRFLIQNVLRLQKEEEIEFLYNENTVRESPNITDRWILSFMQSLIGFFETEMAAYRLYTVVPRLVKFVDILTNWYVRMNRRRLKGENGMEDCVMALETLFSVLLSLCRLMAPYTPFLTELMYQNLKVLIDPVSVQDKDTLSIHYLMLPRVREELIDKKTESAVSQMQSVIELGRVIRDRKTIPIKYPLKEIVVIHQDPEALKDIKSLEKYIIEELNVRKVTLSTDKNKYGIRLRAEPDHMVLGKRLKGAFKAVMTSIKQLSSEELEQFQKTGTIVVEGHELHDEDIRLMYTFDQATGGTAQFEAHSDAQALVLLDVTPDQSMVDEGMAREVINRIQKLRKKCNLVPTDEITVYYKAKSEGTYLNSVIESHTEFIFTTIKAPLKPYPVSPSDKVLIQEKTQLKGSELEITLTRGSSLPGPACAYVNLNICANGSEQGGVLLLENPKGDNRLDLLKLKSVVTSIFGVKNTELAVFHDETEIQNQTDLLSLSGKTLCVTAGSAPSLINSSSTLLCQYINLQLLNAKPQECLMGTVGTLLLENPLGQNGLTHQGLLYEAAKVFGLRSRKLKLFLNETQTQEITEDIPVKTLNMKTVYVSVLPTTADF

SEQ ID NO: 13240 - protein, 370 aa, Homo sapiens
MGTPASPALPPATAARARVVHCTVKTDSRRRELTPPIPDAMSSKGSVVLAYSGGLDTSCILVWLKEQGYDVIAYLANIGQKEDFEEARKKALKLGAKKVIAPWRMPEFYNRFKGRNDLMEYAKQHGIPIPVTPKNPWSMDENLMHISYEAGILENPKNQAPPGLYTKTQDPAKAPNTPDILEIEFKKGVPVKVTNVKDGTTHQTSLELFMYLNEVAGKHGVGRIDIVENRFIGMKSRGIYETPAGTILYHAHLDIEAFTMDREVRKIKQGLGLKFAELVYTGFWHSPECEFVRHCIAKSQERVEGKVQVSVLKGQVYILGRESPLSLYNEELVSMNVQGDYEPTDATGFININSLRLKEYHRLQSKVTAK

SEQ ID NO: 13241 - protein, 452 aa, Homo sapiens
MGTPASPALPPATAARARVVHCTVKTDSRRRELTPPIPDAMSSKGSVVLAYSGGLDTSCILVWLKEQGYDVIAYLANIGQKEDFEEARKKALKLGAKKVFIEDVSREFVEEFIWPAIQSSALYEDRYLLGTSLARPCIARKQVEIAQREGAKYVSHGATGKGNDQVRFELSCYSLAPQIKVIAPWRMPEFYNRFKGRNDLMEYAKQHGIPIPVTPKNPWSMDENLMHISYEAGILENPKNQAPPGLYTKTQDPAKAPNTPDILEIEFKKGVPVKVTNVKDGTTHQTSLELFMYLNEVAGKHGVGRIDIVENRFIGMKSRGIYETPAGTILYHAHLDIEAFTMDREVRKIKQGLGLKFAELVYTGFWHSPECEFVRHCIAKSQERVEGKVQVSVLKGQVYILGRESPLSLYNEELVSMNVQGDYEPTDATGFININSLRLKEYHRLQSKVTAK

SEQ ID NO: 13242 - protein, 412 aa, Homo sapiens
MSSKGSVVLAYSGGLDTSCILVWLKEQGYDVIAYLANIGQKEDFEEARKKALKLGAKKVFIEDVSREFVEEFIWPAIQSSALYEDRYLLGTSLARPCIARKQVEIAQREGAKYVSHGATGKGNDQVRFELSCYSLAPQIKVIAPWRMPEFYNRFKGRNDLMEYAKQHGIPIPVTPKNPWSMDENLMHISYEAGILENPKNQAPPGLYTKTQDPAKAPNTPDILEIEFKKGVPVKVTNVKDGTTHQTSLELFMYLNEVAGKHGVGRIDIVENRFIGMKSRGIYETPAGTILYHAHLDIEAFTMDREVRKIKQGLGLKFAELVYTGFWHSPECEFVRHCIAKSQERVEGKVQVSVLKGQVYILGRESPLSLYNEELVSMNVQGDYEPTDATGFININSLRLKEYHRLQSKVTAK

SEQ ID NO: 13243 - protein, 450 aa, Homo sapiens
MLEDQVQEMPLPDQPRTAVSIPRPQCGLWGCVQSVRDAMSSKGSVVLAYSGGLDTSCILVWLKEQGYDVIAYLANIGQKEDFEEARKKALKLGAKKVFIEDVSREFVEEFIWPAIQSSALYEDRYLLGTSLARPCIARKQVEIAQREGAKYVSHGATGKGNDQVRFELSCYSLAPQIKVIAPWRMPEFYNRFKGRNDLMEYAKQHGIPIPVTPKNPWSMDENLMHISYEAGILENPKNQAPPGLYTKTQDPAKAPNTPDILEIEFKKGVPVKVTNVKDGTTHQTSLELFMYLNEVAGKHGVGRIDIVENRFIGMKSRGIYETPAGTILYHAHLDIEAFTMDREVRKIKQGLGLKFAELVYTGFWHSPECEFVRHCIAKSQERVEGKVQVSVLKGQVYILGRESPLSLYNEELVSMNVQGDYEPTDATGFININSLRLKEYHRLQSKVTAK

SEQ ID NO: 13244 - protein, 412 aa, Homo sapiens; identical to SEQ ID NO: 13242

SEQ ID NO: 13245 - protein, 393 aa, Homo sapiens
MSSKGSVVLAYSGGLDTSCILVWLKEQGYDVIAYLANIGQKEDFEEARKKALKLGAKKVFIEDVSREFVEEFIWPAIQSSALYEDRYLLGTSLARPCIARKQVEIAQREGAKYVSHGATGKVIAPWRMPEFYNRFKGRNDLMEYAKQHGIPIPVTPKNPWSMDENLMHISYEAGILENPKNQAPPGLYTKTQDPAKAPNTPDILEIEFKKGVPVKVTNVKDGTTHQTSLELFMYLNEVAGKHGVGRIDIVENRFIGMKSRGIYETPAGTILYHAHLDIEAFTMDREVRKIKQGLGLKFAELVYTGFWHSPECEFVRHCIAKSQERVEGKVQVSVLKGQVYILGRESPLSLYNEELVSMNVQGDYEPTDATGFININSLRLKEYHRLQSKVTAK

SEQ ID NO: 13246 - protein, 883 aa, Homo sapiens
MSPVLHFYVRPSGHEGAASGHTRRKLQGKLPELQGVETELCYNVNWTAEALPSAEETKKLMWLFGCPLLLDDVARESWLLPGSNDLLLEVGPRLNFSTPTSTNIVSVCRATGLGPVDRVETTRRYRLSFAHPPSAEVEAIALATLHDRMTEQHFPHPIQSFSPESMPEPLNGPINILGEGRLALEKANQELGLALDSWDLDFYTKRFQELQRNPSTVEAFDLAQSNSEHSRHWFFKGQLHVDGQKLVHSLFESIMSTQESSNPNNVLKFCDNSSAIQGKEVRFLRPEDPTRPSRFQQQQGLRHVVFTAETHNFPTGVCPFSGATTGTGGRIRDVQCTGRGAHVVAGTAGYCFGNLHIPGYNLPWEDLSFQYPGNFARPLEVAIEASNGASDYGNKFGEPVLAGFARSLGLQLPDGQRREWIKPIMFSGGIGSMEADHISKEAPEPGMEVVKVGGPVYRIGVGGGAASSVQVQGDNTSDLDFGAVQRGDPEMEQKMNRVIRACVEAPKGNPICSLHDQGAGGNGNVLKELSDPAGAIIYTSRFQLGDPTLNALEIWGAEYQESNALLLRSPNRDFLTHVSARERCPACFVGTITGDRRIVLVDDRECPVRRNGQGDAPPTPPPTPVDLELEWVLGKMPRKEFFLQRKPPMLQPLALPPGLSVHQALERVLRLPAVASKRYLTNKVDRSVGGLVAQQQCVGPLQTPLADVAVVALSHEELIGAATALGEQPVKSLLDPKVAARLAVAEALTNLVFALVTDLRDVKCSGNWMWAAKLPGEGAALADACEAMVAVMAALGVAVDGGKDSLSMAARVGTETVRAPGSLVISASRVAGTTDTCHHVWLIFIFLFILFYFIIFERESLSPKLECSGAIIFIFLVETVSPC

SEQ ID NO: 13247 - protein, 1338 aa, Homo sapiens
MSPVLHFYVRPSGHEGAASGHTRRKLQGKLPELQGVETELCYNVNWTAEALPSAEETKKLMWLFGCPLLLDDVARESWLLPGSNDLLLEVGPRLNFSTPTSTNIVSVCRATGLGPVDRVETTRRYRLSFAHPPSAEVEAIALATLHDRMTEQHFPHPIQSFSPESMPEPLNGPINILGEGRLALEKANQELGLALDSWDLDFYTKRFQELQRNPSTVEAFDLAQSNSEHSRHWFFKGQLHVDGQKLVHSLFESIMSTQESSNPNNVLKFCDNSSAIQGKEVRFLRPEDPTRPSRFQQQQGLRHVVFTAETHNFPTGVCPFSGATTGTGGRIRDVQCTGRGAHVVAGTAGYCFGNLHIPGYNLPWEDLSFQYPGNFARPLEVAIEASNGASDYGNKFGEPVLAGFARSLGLQLPDGQRREWIKPIMFSGGIGSMEADHISKEAPEPGMEVVKVGGPVYRIGVGGGAASSVQVQGDNTSDLDFGAVQRGDPEMEQKMNRVIRACVEAPKGNPICSLHDQGAGGNGNVLKELSDPAGAIIYTSRFQLGDPTLNALEIWGAEYQESNALLLRSPNRDFLTHVSARERCPACFVGTITGDRRIVLVDDRECPVRRNGQGDAPPTPPPTPVDLELEWVLGKMPRKEFFLQRKPPMLQPLALPPGLSVHQALERVLRLPAVASKRYLTNKVDRSVGGLVAQQQCVGPLQTPLADVAVVALSHEELIGAATALGEQPVKSLLDPKVAARLAVAEALTNLVFALVTDLRDVKCSGNWMWAAKLPGEGAALADACEAMVAVMAALGVAVDGGKDSLSMAARVGTETVRAPGSLVISAYAVCPDITATVTPDLKHPEGRGHLLYVALSPGQHRLGGTALAQCFSQLGEHPPDLDLPENLVRAFSITQGLLKDRLLCSGHDVSDGGLVTCLLEMAFAGNCGLQVDVPVPRVDVLSVLFAEEPGLVLEVQEPDLAQVLKRYRDAGLHCLELGHTGEAGPHAMVRVSVNGAVVLEEPVGELRALWEETSFQLDRLQAEPRCVAEEERGLRERMGPSYCLPPTFPKASVPREPGGPSPRVAILREEGSNGDREMADAFHLAGFEVWDVTMQDLCSGAIGLDTFRGVAFVGGFSYADVLGSAKGWAAAVTFHPRAGAELRRFRKRPDTFSLGVCNGCQLLALLGWVGGDPNEDAAEMGPDSQPARPGLLLRHNLSGRYESRWASVRVGPGPALMLRGMEGAVLPVWSAHGEGYVAFSSPELQAQIEARGLAPLHWADDDGNPTEQYPLNPNGSPGGVAGICSCDGRHLAVMPHPERAVRPWQWAWRPPPFDTLTTSPWLQLFINARNWTLEGSC

SEQ ID NO: 13248 - protein, 867 aa, Homo sapiens
MGRNRSWGTLGSGRTSTPGHQSGPLTRRRAVSQLYRRYLLFSISASDPSLRSGTQAPDIHLGEPARGTGCVRGKQTSIRVQDCGRREEARAASRELRREKAQEHPRESWAHPQPYPAPQPLALRPETQPCPACRSSPPGRLLLRPALPGHPFLLPIMAVYRLCVTTGPYLRAGTLDNISVTLVGTCGESPKQRLDRMGRDFAPGSVQKYKVRCTAELGELLLLRVHKERYAFFRKDSWYCSRICVTEPDGSVSHFPCYQWIEGYCTVELRPGTARTICQDSLPLLLDHRTRELRARQECYRWKIYAPGFPCMVDVNSFQEMESDKKFALTKTTTCVDQGDSSGNRYLPGFPMKIDIPSLMYMEPNVRYSATKTISLLFNAIPASLGMKLRGLLDRKGSWKKLDDMQNIFWCHKTFTTKYVTEHWCEDHFFGYQYLNGVNPVMLHCISSLPSKLPVTNDMVAPLLGQDTCLQTELERGNIFLADYWILAEAPTHCLNGRQQYVAAPLCLLWLSPQGALVPLAIQLSQTPGPDSPIFLPTDSEWDWLLAKTWVRNSEFLVHENNTHFLCTHLLCEAFAMATLRQLPLCHPIYKLLLPHTRYTLQVNTIARATLLNPEGLVDQVTSIGRQGLIYLMSTGLAHFTYTNFCLPDSLRARGVLAIPNYHYRDDGLKIWAAIESFVSEIVGYYYPSDASVQQDSELQAWTGEIFAQAFLGRESSGFPSRLCTPGEMVKFLTAIIFNCSAQHAAVNSGQHDFGAWMPNAPSSMRQPPPQTKGTTTLKTYLDTLPEVNISCNNLLLFWLVSQEPKDQRPLGTYPDEHFTEEAPRRSIAAFQSRLAQISRDIQERNQGLALPYTYLDPPLIENSVSI

SEQ ID NO: 13249 - protein, 843 aa, Homo sapiens
MPRGAFRPCLPALYFAFLTCPTPEQRMSGTQAPDIHLGEPARGTGCVRGKQTSIRVQDCGRREEARAASRELRREKAQEHPRESWAHPQPYPAPQPLALRPETQPCPACRSSPPGRLLLRPALPGHPFLLPIMAVYRLCVTTGPYLRAGTLDNISVTLVGTCGESPKQRLDRMGRDFAPGSVQKYKVRCTAELGELLLLRVHKERYAFFRKDSWYCSRICVTEPDGSVSHFPCYQWIEGYCTVELRPGTARTICQDSLPLLLDHRTRELRARQECYRWKIYAPGFPCMVDVNSFQEMESDKKFALTKTTTCVDQGDSSGNRYLPGFPMKIDIPSLMYMEPNVRYSATKTISLLFNAIPASLGMKLRGLLDRKGSWKKLDDMQNIFWCHKTFTTKYVTEHWCEDHFFGYQYLNGVNPVMLHCISSLPSKLPVTNDMVAPLLGQDTCLQTELERGNIFLADYWILAEAPTHCLNGRQQYVAAPLCLLWLSPQGALVPLAIQLSQTPGPDSPIFLPTDSEWDWLLAKTWVRNSEFLVHENNTHFLCTHLLCEAFAMATLRQLPLCHPIYKLLLPHTRYTLQVNTIARATLLNPEGLVDQVTSIGRQGLIYLMSTGLAHFTYTNFCLPDSLRARGVLAIPNYHYRDDGLKIWAAIESFVSEIVGYYYPSDASVQQDSELQAWTGEIFAQAFLGRESSGFPSRLCTPGEMVKFLTAIIFNCSAQHAAVNSGQHDFGAWMPNAPSSMRQPPPQTKGTTTLKTYLDTLPEVNISCNNLLLFWLVSQEPKDQRPLGTYPDEHFTEEAPRRSIAAFQSRLAQISRDIQERNQGLALPYTYLDPPLIENSVSI

SEQ ID NO: 13250 - protein, 753 aa, Homo sapiens
METYGYLQRESCFQGPHELYFKNLSKRNKQIMEKNGNNRKLRVCVATCNRADYSKLAPIMFGIKTEPEFFELDVVVLGSHLIDDYGNTYRMIEQDDFDINTRLHTIVRGEDEAAMVESVGLALVKLPDVLNRLKPDIMIVHGDRFDALALATSAALMNIRILHIEGGEVSGTIDDSIRHAITKLAHYHVCCTRSAEQHLISMCEDHDRILLAGCPSYDKLLSAKNKDYMSIIRMWLGDDVKSKDYIVALQHPVTTDIKHSIKMFELTLDALISFNKRTLVLFPNIDAGSKEMVRVMRKKGIEHHPNFRAVKHVPFDQFIQLVAHAGCMIGNSSCGVREVGAFGTPVINLGTRQIGRETGENVLHVRDADTQDKILQALHLQFGKQYPCSKIYGDGNAVPRILKFLKSIDLQEPLQKKFCFPPVKENISQDIDHILETLSALAVDLGGTNLRVAIVSMKGEIVKKYTQFNPKTYEERINLILQMCVEAAAEAVKLNCRILGVGISTGGRVNPREGIVLHSTKLIQEWNSVDLRTPLSDTLHLPVWVDNDGNCAALAERKFGQGKGLENFVTLITGTGIGGGIIHQHELIHGSSFCAAELGHLVVSLDGPDCSCGSHGCIEAYASGMALQREAKKLHDEDLLLVEGMSVPKDEAVGALHLIQAAKLGNAKAQSILRTAGTALGLGVVNILHTMNPSLVILSGVLASHYIHIVKDVIRQQALSSVQDVDVVVSDLVDPALLGAASMVLDYTTRRIY

SEQ ID NO: 13251 - protein, 722 aa, Homo sapiens
MEKNGNNRKLRVCVATCNRADYSKLAPIMFGIKTEPEFFELDVVVLGSHLIDDYGNTYRMIEQDDFDINTRLHTIVRGEDEAAMVESVGLALVKLPDVLNRLKPDIMIVHGDRFDALALATSAALMNIRILHIEGGEVSGTIDDSIRHAITKLAHYHVCCTRSAEQHLISMCEDHDRILLAGCPSYDKLLSAKNKDYMSIIRMWLGDDVKSKDYIVALQHPVTTDIKHSIKMFELTLDALISFNKRTLVLFPNIDAGSKEMVRVMRKKGIEHHPNFRAVKHVPFDQFIQLVAHAGCMIGNSSCGVREVGAFGTPVINLGTRQIGRETGENVLHVRDADTQDKILQALHLQFGKQYPCSKIYGDGNAVPRILKFLKSIDLQEPLQKKFCFPPVKENISQDIDHILETLSALAVDLGGTNLRVAIVSMKGEIVKKYTQFNPKTYEERINLILQMCVEAAAEAVKLNCRILGVGISTGGRVNPREGIVLHSTKLIQEWNSVDLRTPLSDTLHLPVWVDNDGNCAALAERKFGQGKGLENFVTLITGTGIGGGIIHQHELIHGSSFCAAELGHLVVSLDGPDCSCGSHGCIEAYASGMALQREAKKLHDEDLLLVEGMSVPKDEAVGALHLIQAAKLGNAKAQSILRTAGTALGLGVVNILHTMNPSLVILSGVLASHYIHIVKDVIRQQALSSVQDVDVVVSDLVDPALLGAASMVLDYTTRRIY

SEQ ID NO: 13252 - protein, 722 aa, Homo sapiens; identical to SEQ ID NO: 13251

SEQ ID NO: 13253 - protein, 753 aa, Homo sapiens; identical to SEQ ID NO: 13250

SEQ ID NO: 13254 - protein, 722 aa, Homo sapiens; identical to SEQ ID NO: 13251

SEQ ID NO: 13255 - protein, 163 aa, Homo sapiens
MAAAVVLAAGLRAARRAVAATGVRGGQVRGAAGVTDGNEVAKAQQATPGGAAPTIFSRILDKSLPADILYEDQQCLVFRDVAPQAPVHFLVIPKKPIPRISQAEEEDQQLLGHLLLVAKQTAKAEGLGDGYRLVINDGKLGAQSVYHLHIHVLGGRQLQWPPG

SEQ ID NO: 13256 - protein, 1047 aa, Homo sapiens
MALPSLLLLVAALAGGVRPPGARNLTLAVVLPEHNLSYAWAWPRVGPAVALAVEALGRALPVDLRFVSSELEGACSEYLAPLSAVDLKLYHDPDLLLGPGCVYPAASVARFASHWRLPLLTAGAVASGFSAKNDHYRTLVRTGPSAPKLGEFVVTLHGHFNWTARAALLYLDARTDDRPHYFTIEGVFEALQGSNLSVQHQVYAREPGGPEQATHFIRANGRIVYICGPLEMLHEILLQAQRENLTNGDYVFFYLDVFGESLRAGPTRATGRPWQDNRTREQAQALREAFQTVLVITYREPPNPEYQEFQNRLLIRAREDFGVELGPSLMNLIAGCFYDGILLYAEVLNETIQEGGTREDGLRIVEKMQGRRYHGVTGLVVMDKNNDRETDFVLWAMGDLDSGDFQPAAHYSGAEKQIWWTGRPIPWVKGAPPSDNPPCAFDLDDPSCDKTPLSTLAIVALGTGITFIMFGVSSFLIFRKLMLEKELASMLWRIRWEELQFGNSERYHKGAGSRLTLSLRGSSYGSLMTAHGKYQIFANTGHFKGNVVAIKHVNKKRIELTRQVLFELKHMRDVQFNHLTRFIGACIDPPNICIVTEYCPRGSLQDILENDSINLDWMFRYSLINDLVKGMAFLHNSIISSHGSLKSSNCVVDSRFVLKITDYGLASFRSTAEPDDSHALYAKKLWTAPELLSGNPLPTTGMQKADVYSFGIILQEIALRSGPFYLEGLDLSPKEIVQKVRNGQRPYFRPSIDRTQLNEELVLLMERCWAQDPAERPDFGQIKGFIRRFNKEGGTSILDNLLLRMEQYANNLEKLVEERTQAYLEEKRKAEALLYQILPHSVAEQLKRGETVQAEAFDSVTIYFSDIVGFTALSAESTPMQVVTLLNDLYTCFDAIIDNFDVYKVETIGDAYMVVSGLPGRNGQRHAPEIARMALALLDAVSSFRIRHRPHDQLRLRIGVHTGPVCAGVVGLKMPRYCLFGDTVNTASRMESNGQALKIHVSSTTKDALDELGCFQLELRGDVEMKGKGKMRTYWLLGERKGPPGLL

SEQ ID NO: 13257 - protein, 995 aa, Homo sapiens
MALPSLLLLVAALAGGVRPPGARNLTLAVVLPEHNLSYAWAWPRVGPAVALAVEALGRALPVDLRFVSSELEGACSEYLAPLSAVDLKLYHDPDLLLGPGCVYPAASVARFASHWRLPLLTAGAVASGFSAKNDHYRTLVRTGPSAPKLGEFVVTLHGHFNWTARAALLYLDARTDDRPHYFTIEGVFEALQGSNLSVQHQVYAREPGGPEQATHFIRANGRIVYICGPLEMLHEILLQAQRENLTNGDYVFFYLDVFGESLRAGPTRATGRPWQDNRTREQAQALREAFQTVLVITYREPPNPEYQEFQNRLLIRAREDFGVELGPSLMNLIAGCFYDGILLYAEVLNETIQEGGTREDGLRIVEKMQGRRYHGVTGLVVMDKNNDRETDFVLWAMGDLDSGDFQPAAHYSGAEKQIWWTGRPIPWVKGAPPSDNPPCAFDLDDPSCDKTPLSTLAIVALGTGITFIMFGVSSFLIFRKLMLEKELASMLWRIRWEELQFGNSERYHKGAGSRLTLSLRGSSYGSLMTAHGKYQIFANTGHFKGNVVAIKHVNKKRIELTRQVLFELKHMRDVQFNHLTRFIGACIDPPNICIVTEYCPRGSLQDILENDSINLDWMFRYSLINDLVKGMAFLHNSIISSHGSLKSSNCVVDSRFVLKITDYGLASFRSTAEPDDSHALYAKKLWTAPELLSGNPLPTTGMQKADVYSFGIILQEIALRSGPFYLEGLDLSPKEIVQKVRNGQRPYFRPSIDRTQLNEELVLLMERCWAQDPAERPDFGQIKGFIRRFNKEGGTSILDNLLLRMEQYANNLEKLVEERTQAYLEEKRKAEALLYQILPHSVAEQLKRGETVQAEAFDSVTIYFSDIVGFTALSAESTPMQVVTLLNDLYTCFDAIIDNFDVYKVETIGDAYMVVSGLPGRNGQRHAPEIARMALALLDAVSSFRIRHRPHDQLRLRIGVHTGKADSHSSPSLHLSQTLPTCFFSKGQSVLGLLA

SEQ ID NO: 13258 - protein, 1047 aa, Homo sapiens; identical to SEQ ID NO: 13256

SEQ ID NO: 13259 - protein, 995 aa, Homo sapiens; identical to SEQ ID NO: 13257

SEQ ID NO: 13260 - protein, 236 aa, Homo sapiens [sequence omitted]

SEQ ID NO: 13261 - protein, 199 aa, Homo sapiens
MTRLLGYVDPLDPSFVAAVITITFNPLYWNVVARWEHKTRKLSRAFGSPYLACYSLSVTILLLNFLRSHCFTQAMLSQPRMESLDTPAAYSLGLALLGLGVVLVLSSFFALGFAGTFLGDYFGILKEARVTVFPFNILDNPMYWGSTANYLGWAIMHASPTGLLLTVLVALTYIMALLYEEPFTAEIYRQKASGSHKRS

SEQ ID NO: 13262 - protein, 228 aa, Homo sapiens
MIRLGGWCARRLCSAAVPAGRRGAAGGLGLAGGRALRVLVDMDGVLADFEGGFLRKFRARFPDQPFIALEDRRGFWVSEQYGRLRPGLSEKAISIWESKNFFFELEPLPGAVEAVKEMASLQNTDVFICTSPIKMFKYCPYEKYAWVEKYFGPDFLEQIVLTRDKTVVSADLLIDDRPDITGAEPTPSWEHVLFTACHNQHLQLQPPRRRLHSWADDWKAILDSKRPC

SEQ ID NO: 13263 - protein, 822 aa, Homo sapiens
MNTADQARVGPADDGPAPSGEEEGEGGGEAGGKEPAADAAPGPSAAFRLMVTRREPAVKLQYAVSGLEPLAWSEDHRVSVSTARSIAVLELICDVHNPGQDLVIHRTSVPAPLNSCLLKVGSKTEVAECKEKFAASKDPTVSQTFMLDRVFNPEGKALPPMRGFKYTSWSPMGCDANGRCLLAALTMDNRLTIQANLNRLQWVQLVDLTEIYGERLYETSYRLSKNEAPEGNLGDFAEFQRRHSMQTPVRMEWSGICTTQQVKHNNECRDVGSVLLAVLFENGNIAVWQFQLPFVGKESISSCNTIESGITSPSVLFWWEYEHNNRKMSGLIVGSAFGPIKILPVNLKAVKGYFTLRQPVILWKEMDQLPVHSIKCVPLYHPYQKCSCSLVVAARGSYVFWCLLLISKAGLNVHNSHVTGLHSLPIVSMTADKQNGTVYTCSSDGKVRQLIPIFTDVALKFEHQLIKLSDVFGSVRTHGIAVSPCGAYLAIITTEGMINGLHPVNKNYQVQFVTLKTFEEAAAQLLESSVQNLFKQVDLIDLVRWKILKDKHIPQFLQEALEKKIESSGVTYFWRFKLFLLRILYQSMQKTPSEALWKPTHEDSKILLVDSPGMGNADDEQQEEGTSSKQVVKQGLQERSKEGDVEEPTDDSLPTTGDAGGREPMEEKLLEIQGKIEAVEMHLTREHMKRVLGEVYLHTWITENTSIPTRGLCNFLMSDEEYDDRTARVLIGHISKKMNKQTFPEHCSLCKEILPFTDRKQAVCSNGHIWLRCFLTYQSCQSLIYRRCLLHDSIARHPAPEDPDWIKRLLQSPCPFCDSPVF

SEQ ID NO: 13264 - protein, 347 aa, Homo sapiens
MHRRRLALGLGFCLLAGTSLSVLWVYLENWLPVSYVPYYLPCPEIFNMKLHYKREKPLQPVVWSQYPQPKLLEHRPTQLLTLTPWLAPIVSEGTFNPELLQHIYQPLNLTIGVTVFAVGKYTHFIQSFLESAEEFFMRGYRVHYYIFTDNPAAVPGVPLGPHRLLSSIPIQGHSHWEETSMRRMETISQHIAKRAHREVDYLFCLDVDMVFRNPWGPETLGDLVAAIHPSYYAVPRQQFPYERRRVSTAFVADSEGDFYYGGAVFGGQVARVYEFTRGCHMAILADKANGIMAAWREESHLNRHFISNKPSKVLSPEYLWDDRKPQPPSLKLIRFSTLDKDISCLRS

SEQ ID NO: 13265 - protein, 353 aa, Homo sapiens
MHRRRLALGLGFCLLAGTSLSVLWVYLENWLPVSYVPYYLPCPEILPMMMALSCLCHQQHEAALQEGEATPARGMVTVPSAQAAGAQAHTAADTHTLVGAHRLRGNLQPRASAAHLPATEPDHWGHGVCRGESFLESAEEFFMRGYRVHYYIFTDNPAAVPGVPLGPHRLLSSIPIQGHSHWEETSMRRMETISQHIAKRAHREVDYLFCLDVDMVFRNPWGPETLGDLVAAIHPSYYAVPRQQFPYERRRVSTAFVADSEGDFYYGGAVFGGQVARVYEFTRGCHMAILADKANGIMAAWREESHLNRHFISNKPSKVLSPEYLWDDRKPQPPSLKLIRFSTLDKDISCLRS

SEQ ID NO: 13266 - protein, 319 aa, Homo sapiens
MAPDLASQRHSESFPSVNSRPNVILPGREGRREGLPPGGGTRGSLVPTRPVPPSPAPLGTSPYSWSRSGPGRGGGAGSSRVPRGVPGPAVCAPGSLLHHASPTQTMAAADGSLFDNPRTFSRRPPAQASRQAKATKRKYQASSEAPPAKRRNETSFLPAKKTSVKETQRTFKGNAQKMFSPKKHSVSTSDRNQEERQCIKTSSLFKNNPDIPELHRPVVKQVQEKVFTSAAFHELGLHPHLISTINTVLKMSSMTSVQKQSIPVLLEGRDALVRSQTGSGKTLAYCIPVVQSLQAMESKIQVLLLSTFYEEEQRLRKVK

SEQ ID NO: 13267 - protein, 851 aa, Homo sapiens [sequence omitted]

SEQ ID NO: 13268 - protein, 755 aa, Homo sapiens [sequence omitted]

SEQ ID NO: 13269 - protein, 256 aa, Homo sapiens
MAPDLASQRHSESFPSVNSRPNVILPGREGRREGLPPGGGTRGSLVPTRPVPPSPAPLGTSPYSWSRSGPGRGGGAGSSRVPRGVPGPAVCAPGSLLHHASPTQTMAAADGSLFDNPRTFSRRPPAQASRQAKATKRKYQASSEAPPAKRRNETSFLPAKKTSVKETQRTFKGNAQKMFSPKKHSVSTSDRNQEERQCIKTSSLFKNNPDIPELHRPVVKQVQEKVFTSAAFHELGLHPHLISTINTVLKMSSMTR

SEQ ID NO: 13270 - protein, 1535 aa, Homo sapiens
MGHSKQIRILLLNEMEKLEKTLFRLEQGYELQFRLGPTLQGKAVTVYTNYPFPGETFNREKFRSLDWENPTEREDDSDKYCKLNLQQSGSFQYYFLQGNEKSGGGYIVVDPILRVGADNHVLPLDCVTLQTFLAKCLGPFDEWESRLRVAKESGYNMIHFTPLQTLGLSRSCYSLANQLELNPDFSRPNRKYTWNDVGQLVEKLKKEWNVICITDVVYNHTAANSKWIQEHPECAYNLVNSPHLKPAWVLDRALWRFSCDVAEGKYKEKGIPALIENDHHMNSIRKIIWEDIFPKLKLWEFFQVDVNKAVEQFRRLLTQENRRVTKSDPNQHLTIIQDPEYRRFGCTVDMNIALTTFIPHDKGPAAIEECCNWFHKRMEELNSEKHRLINYHQEQAVNCLLGNVFYERLAGHGPKLGPVTRKHPLVTRYFTFPFEEIDFSMEESMIHLPNKACFLMAHNGWVMGDDPLRNFAEPGSEVYLRRELICWGDSVKLRYGNKPEDCPYLWAHMKKYTEITATYFQGVRLDNCHSTPLHVAEYMLDAARNLQPNLYVVAELFTGSEDLDNVFVTRLGISSLIREAMSAYNSHEEGRLVYRYGGEPVGSFVQPCLRPLMPAIAHALFMDITHDNECPIVHRSAYDALPSTTIVSMACCASGSTRGYDELVPHQISVVSEERFYTKWNPEALPSNTGEVNFQSGIIAARCAISKLHQELGAKVVLSASQVYVDQVDEDIVAVTRHSPSIHQSVVAVSRTAFRNPKTSFYSKEVPQMCIPGKIEEVVLEARTIERNTKPYRKDENSINGTPDITVEIREHIQLNESKIVKQAGVATKGPNEYIQEIEFENLSPGSVIIFRVSLDPHAQVAVGILRNHLTQFSPHFKSGSLAVDNADPILKIPFASLASRLTLAELNQILYRCESEEKEDGGGCYDIPNWSALKYAGLQGLMSVLAEIRPKNDLGHPFCNNLRSGDWMIDYVSNRLISRSGTIAEVGKWLQAMFFYLKQIPRYLIPCYFDAILIGAYTTLLDTAWKQMSSFVQNGSTFVKHLSLGSVQLCGVGKFPSLPILSPALMDVPYRLNEITKEKEQCCVSLAAGLPHFSSGIFRCWGRDTFIALRGILLITGRYVEARNIILAFAGTLRHGLIPNLLGEGIYARYNCRDAVWWWLQCIQDYCKMVPNGLDILKCPVSRMYPTDDSAPLPAGTLDQPLFEVIQEAMQKHMQGIQFRERNAGPQIDRNMKDEGFNITAGVDEETGFVYGGNRFNCGTWMDKMGESDRARNRGIPATPRDGSAVEIVGLSKSAVRWLLELSKKNIFPYHEVTVKRHGKAIKVSYDEWNRKIQDNFEKLFHVSEDPSDLNEKHPNLVHKRGIYKDSYGASSPWCDYQLRPNFTIAMVVAPELFTTEKAWKALEIAEKKLLGPLGMKTLDPDDMVYCGIYDNALDNDNYNLAKGFNYHQGPEWLWPIGYFLRAKLYFSRLMGPETTAKTIVLVKNVLSRHYVHLERSPWKGLPELTNENAQYCPFSCETQAWSIATILETLYDL

SEQ ID NO: 13271 - protein, 1532 aa, Homo sapiens
MGHSKQIRILLLNEMEKLEKTLFRLEQGYELQFRLGPTLQGKAVTVYTNYPFPGETFNREKFRSLDWENPTEREDDSDKYCKLNLQQSGSFQYYFLQGNEKSGGGYIVVDPILRVGADNHVLPLDCVTLQTFLAKCLGPFDEWESRLRVAKESGYNMIHFTPLQTLGLSRSCYSLANQLELNPDFSRPNRKYTWNDVGQLVEKLKKEWNVICITDVVYNHTAANSKWIQEHPECAYNLVNSPHLKPAWVLDRALWRFSCDVAEGKYKEKGIPALIENDHHMNSIRKIIWEDIFPKLKLWEFFQVDVNKAVEQFRRLLTQENRRVTKSDPNQHLTIIQDPEYRRFGCTVDMNIALTTFIPHDKGPAAIEECCNWFHKRMEELNSEKHRLINYHQEQAVNCLLGNVFYERLAGHGPKLGPVTRKHPLVTRYFTFPFEEIDFSMEESMIHLPNKACFLMAHNGWVMGDDPLRNFAEPGSEVYLRRELICWGDSVKLRYGNKPEDCPYLWAHMKKYTEITATYFQGVRLDNCHSTPLHVAEYMLDAARNLQPNLYVVAELFTGSEDLDNVFVTRLGISSLIREAMSAYNSHEEGRLVYRYGGEPVGSFVQPCLRPLMPAIAHALFMDITHDNECPIVHRSAYDALPSTTIVSMACCASGSTRGYDELVPHQISVVSEERFYTKWNPEALPSNTGEVNFQSGIIAARCAISKLHQELGAKGFIQVYVDQVDEDIVAVTRHSPSIHQSVVAVSRTAFRNPKTSFYSKEVPQMCIPGKIEEVVLEARTIERNTKPYRKDENSINGTPDITVEIREHIQLNESKIVKQAGVATKGPNEYIQEIEFENLSPGSVIIFRVSLDPHAQVAVGILRNHLTQFSPHFKSGSLAVDNADPILKIPFASLASRLTLAELNQILYRCESEEKEDGGGCYDIPNWSALKYAGLQGLMSVLAEIRPKNDLGHPFCNNLRSGDWMIDYVSNRLISRSGTIAEVGKWLQAMFFYLKQIPRYLIPCYFDAILIGAYTTLLDTAWKQMSSFVQNGSTFVKHLSLGSVQLCGVGKFPSLPILSPALMDVPYRLNEITKEKEQCCVSLAAGLPHFSSGIFRCWGRDTFIALRGILLITGRYVEARNIILAFAGTLRHGLIPNLLGEGIYARYNCRDAVWWWLQCIQDYCKMVPNGLDILKCPVSRMYPTDDSAPLPAGTLDQPLFEVIQEAMQKHMQGIQFRERNAGPQIDRNMKDEGFNITAGVDEETGFVYGGNRFNCGTWMDKMGESDRARNRGIPATPRDGSAVEIVGLSKSAVRWLLELSKKNIFPYHEVTVKRHGKAIKVSYDEWNRKIQDNFEKLFHVSEDPSDLNEKHPNLVHKRGIYKDSYGASSPWCDYQLRPNFTIAMVVAPELFTTEKAWKALEIAEKKLLGPLGMKTLDPDDMVYCGIYDNALDNDNYNLAKGFNYHQGPEWLWPIGYFLRAKLYFSRLMGPETTAKTIVLVKNVLSRHYVHLERSPWKGLPELTNENAQYCPFSCETQAWSIATILETLYDL

SEQ ID NO: 13272 - protein, 1515 aa, Homo sapiens
MSLLTCAFYLGYELQFRLGPTLQGKAVTVYTNYPFPGETFNREKFRSLDWENPTEREDDSDKYCKLNLQQSGSFQYYFLQGNEKSGGGYIVVDPILRVGADNHVLPLDCVTLQTFLAKCLGPFDEWESRLRVAKESGYNMIHFTPLQTLGLSRSCYSLANQLELNPDFSRPNRKYTWNDVGQLVEKLKKEWNVICITDVVYNHTAANSKWIQEHPECAYNLVNSPHLKPAWVLDRALWRFSCDVAEGKYKEKGIPALIENDHHMNSIRKIIWEDIFPKLKLWEFFQVDVNKAVEQFRRLLTQENRRVTKSDPNQHLTIIQDPEYRRFGCTVDMNIALTTFIPHDKGPAAIEECCNWFHKRMEELNSEKHRLINYHQEQAVNCLLGNVFYERLAGHGPKLGPVTRKHPLVTRYFTFPFEEIDFSMEESMIHLPNKACFLMAHNGWVMGDDPLRNFAEPGSEVYLRRELICWGDSVKLRYGNKPEDCPYLWAHMKKYTEITATYFQGVRLDNCHSTPLHVAEYMLDAARNLQPNLYVVAELFTGSEDLDNVFVTRLGISSLIREAMSAYNSHEEGRLVYRYGGEPVGSFVQPCLRPLMPAIAHALFMDITHDNECPIVHRSAYDALPSTTIVSMACCASGSTRGYDELVPHQISVVSEERFYTKWNPEALPSNTGEVNFQSGIIAARCAISKLHQELGAKGFIQVYVDQVDEDIVAVTRHSPSIHQSVVAVSRTAFRNPKTSFYSKEVPQMCIPGKIEEVVLEARTIERNTKPYRKDENSINGTPDITVEIREHIQLNESKIVKQAGVATKGPNEYIQEIEFENLSPGSVIIFRVSLDPHAQVAVGILRNHLTQFSPHFKSGSLAVDNADPILKIPFASLASRLTLAELNQILYRCESEEKEDGGGCYDIPNWSALKYAGLQGLMSVLAEIRPKNDLGHPFCNNLRSGDWMIDYVSNRLISRSGTIAEVGKWLQAMFFYLKQIPRYLIPCYFDAILIGAYTTLLDTAWKQMSSFVQNGSTFVKHLSLGSVQLCGVGKFPSLPILSPALMDVPYRLNEITKEKEQCCVSLAAGLPHFSSGIFRCWGRDTFIALRGILLITGRYVEARNIILAFAGTLRHGLIPNLLGEGIYARYNCRDAVWWWLQCIQDYCKMVPNGLDILKCPVSRMYPTDDSAPLPAGTLDQPLFEVIQEAMQKHMQGIQFRERNAGPQIDRNMKDEGFNITAGVDEETGFVYGGNRFNCGTWMDKMGESDRARNRGIPATPRDGSAVEIVGLSKSAVRWLLELSKKNIFPYHEVTVKRHGKAIKVSYDEWNRKIQDNFEKLFHVSEDPSDLNEKHPNLVHKRGIYKDSYGASSPWCDYQLRPNFTIAMVVAPELFTTEKAWKALEIAEKKLLGPLGMKTLDPDDMVYCGIYDNALDNDNYNLAKGFNYHQGPEWLWPIGYFLRAKLYFSRLMGPETTAKTIVLVKNVLSRHYVHLERSPWKGLPELTNENAQYCPFSCETQAWSIATILETLYDL

SEQ ID NO: 13273 - protein, 1532 aa, Homo sapiens; identical to SEQ ID NO: 13271

SEQ ID NO: 13274 - protein, 1532 aa, Homo sapiens; identical to SEQ ID NO: 13271

SEQ ID NO: 13275 - protein, 1516 aa, Homo sapiens
MAPILSINLFIGYELQFRLGPTLQGKAVTVYTNYPFPGETFNREKFRSLDWENPTEREDDSDKYCKLNLQQSGSFQYYFLQGNEKSGGGYIVVDPILRVGADNHVLPLDCVTLQTFLAKCLGPFDEWESRLRVAKESGYNMIHFTPLQTLGLSRSCYSLANQLELNPDFSRPNRKYTWNDVGQLVEKLKKEWNVICITDVVYNHTAANSKWIQEHPECAYNLVNSPHLKPAWVLDRALWRFSCDVAEGKYKEKGIPALIENDHHMNSIRKIIWEDIFPKLKLWEFFQVDVNKAVEQFRRLLTQENRRVTKSDPNQHLTIIQDPEYRRFGCTVDMNIALTTFIPHDKGPAAIEECCNWFHKRMEELNSEKHRLINYHQEQAVNCLLGNVFYERLAGHGPKLGPVTRKHPLVTRYFTFPFEEIDFSMEESMIHLPNKACFLMAHNGWVMGDDPLRNFAEPGSEVYLRRELICWGDSVKLRYGNKPEDCPYLWAHMKKYTEITATYFQGVRLDNCHSTPLHVAEYMLDAARNLQPNLYVVAELFTGSEDLDNVFVTRLGISSLIREAMSAYNSHEEGRLVYRYGGEPVGSFVQPCLRPLMPAIAHALFMDITHDNECPIVHRSAYDALPSTTIVSMACCASGSTRGYDELVPHQISVVSEERFYTKWNPEALPSNTGEVNFQSGIIAARCAISKLHQELGAKGFIQVYVDQVDEDIVAVTRHSPSIHQSVVAVSRTAFRNPKTSFYSKEVPQMCIPGKIEEVVLEARTIERNTKPYRKDENSINGTPDITVEIREHIQLNESKIVKQAGVATKGPNEYIQEIEFENLSPGSVIIFRVSLDPHAQVAVGILRNHLTQFSPHFKSGSLAVDNADPILKIPFASLASRLTLAELNQILYRCESEEKEDGGGCYDIPNWSALKYAGLQGLMSVLAEIRPKNDLGHPFCNNLRSGDWMIDYVSNRLISRSGTIAEVGKWLQAMFFYLKQIPRYLIPCYFDAILIGAYTTLLDTAWKQMSSFVQNGSTFVKHLSLGSVQLCGVGKFPSLPILSPALMDVPYRLNEITKEKEQCCVSLAAGLPHFSSGIFRCWGRDTFIALRGILLITGRYVEARNIILAFAGTLRHGLIPNLLGEGIYARYNCRDAVWWWLQCIQDYCKMVPNGLDILKCPVSRMYPTDDSAPLPAGTLDQPLFEVIQEAMQKHMQGIQFRERNAGPQIDRNMKDEGFNITAGVDEETGFVYGGNRFNCGTWMDKMGESDRARNRGIPATPRDGSAVEIVGLSKSAVRWLLELSKKNIFPYHEVTVKRHGKAIKVSYDEWNRKIQDNFEKLFHVSEDPSDLNEKHPNLVHKRGIYKDSYGASSPWCDYQLRPNFTIAMVVAPELFTTEKAWKALEIAEKKLLGPLGMKTLDPDDMVYCGIYDNALDNDNYNLAKGFNYHQGPEWLWPIGYFLRAKLYFSRLMGPETTAKTIVLVKNVLSRHYVHLERSPWKGLPELTNENAQYCPFSCETQAWSIATILETLYDL

SEQ ID NO: 13276 - protein, 1518 aa, Homo sapiens
MSLLTCAFYLGYELQFRLGPTLQGKAVTVYTNYPFPGETFNREKFRSLDWENPTEREDDSDKYCKLNLQQSGSFQYYFLQGNEKSGGGYIVVDPILRVGADNHVLPLDCVTLQTFLAKCLGPFDEWESRLRVAKESGYNMIHFTPLQTLGLSRSCYSLANQLELNPDFSRPNRKYTWNDVGQLVEKLKKEWNVICITDVVYNHTAANSKWIQEHPECAYNLVNSPHLKPAWVLDRALWRFSCDVAEGKYKEKGIPALIENDHHMNSIRKIIWEDIFPKLKLWEFFQVDVNKAVEQFRRLLTQENRRVTKSDPNQHLTIIQDPEYRRFGCTVDMNIALTTFIPHDKGPAAIEECCNWFHKRMEELNSEKHRLINYHQEQAVNCLLGNVFYERLAGHGPKLGPVTRKHPLVTRYFTFPFEEIDFSMEESMIHLPNKACFLMAHNGWVMGDDPLRNFAEPGSEVYLRRELICWGDSVKLRYGNKPEDCPYLWAHMKKYTEITATYFQGVRLDNCHSTPLHVAEYMLDAARNLQPNLYVVAELFTGSEDLDNVFVTRLGISSLIREAMSAYNSHEEGRLVYRYGGEPVGSFVQPCLRPLMPAIAHALFMDITHDNECPIVHRSAYDALPSTTIVSMACCASGSTRGYDELVPHQISVVSEERFYTKWNPEALPSNTGEVNFQSGIIAARCAISKLHQELGAKVVLSASQVYVDQVDEDIVAVTRHSPSIHQSVVAVSRTAFRNPKTSFYSKEVPQMCIPGKIEEVVLEARTIERNTKPYRKDENSINGTPDITVEIREHIQLNESKIVKQAGVATKGPNEYIQEIEFENLSPGSVIIFRVSLDPHAQVAVGILRNHLTQFSPHFKSGSLAVDNADPILKIPFASLASRLTLAELNQILYRCESEEKEDGGGCYDIPNWSALKYAGLQGLMSVLAEIRPKNDLGHPFCNNLRSGDWMIDYVSNRLISRSGTIAEVGKWLQAMFFYLKQIPRYLIPCYFDAILIGAYTTLLDTAWKQMSSFVQNGSTFVKHLSLGSVQLCGVGKFPSLPILSPALMDVPYRLNEITKEKEQCCVSLAAGLPHFSSGIFRCWGRDTFIALRGILLITGRYVEARNIILAFAGTLRHGLIPNLLGEGIYARYNCRDAVWWWLQCIQDYCKMVPNGLDILKCPVSRMYPTDDSAPLPAGTLDQPLFEVIQEAMQKHMQGIQFRERNAGPQIDRNMKDEGFNITAGVDEETGFVYGGNRFNCGTWMDKMGESDRARNRGIPATPRDGSAVEIVGLSKSAVRWLLELSKKNIFPYHEVTVKRHGKAIKVSYDEWNRKIQDNFEKLFHVSEDPSDLNEKHPNLVHKRGIYKDSYGASSPWCDYQLRPNFTIAMVVAPELFTTEKAWKALEIAEKKLLGPLGMKTLDPDDMVYCGIYDNALDNDNYNLAKGFNYHQGPEWLWPIGYFLRAKLYFSRLMGPETTAKTIVLVKNVLSRHYVHLERSPWKGLPELTNENAQYCPFSCETQAWSIATILETLYDL

SEQ ID NO: 13277 - protein, 1532 aa, Homo sapiens; identical to SEQ ID NO: 13271

SEQ ID NO: 13278 - protein, 253 aa, Homo sapiens
MLDQPLPAEQCTQEDVSSEDEDEEMPEDTEDLDHYEMKEEEPAEGKKSEDDGIGKENLAILEKIKKNQRQDYLNGAVSGSVQATDRLMKELRDIYRSQSFKGGNYAVELVNDSLYDWNVKLLKVDQDSALHNDLQILKEKEGADFILLNFSFKDNFPFDPPFVRVVSPVLSGGYVLGGGAICMELLTKQGWSSAYSIESVIMQISATLVKGKARVQFGANKSQYSLTRAQQSYKSLVQIHEKNGWYTPPKEDG

SEQ ID NO: 13279 - protein, 217 aa, Homo sapiens
MKEEEPAEGKKSEDDGIGKENLAILEKIKKNQRQDYLNGAVSGSVQATDRLMKELRDIYRSQSFKGGNYAVELVNDSLYDWNVKLLKVDQDSALHNDLQILKEKEGADFILLNFSFKDNFPFDPPFVRVVSPVLSGGYVLGGGAICMELLTKQGWSSAYSIESVIMQISATLVKGKARVQFGANKSQYSLTRAQQSYKSLVQIHEKNGWYTPPKEDG

SEQ ID NO: 13280 - protein, 270 aa, Homo sapiens [sequence omitted]

SEQ ID NO: 13281 - protein, 338 aa, Homo sapiens [sequence omitted]

SEQ ID NO: 13282 - protein, 115 aa, Homo sapiens
MLQKPKSVKLRALRSPRKFGVAGRSCQEVLRKGCLRFQLPERGSRLCLYEDGTELTEDYFPSVPDNAELVLLTLGQAWQGCEWQGLWRCERHQALPQCISRATGGAHPGRPAAAV

SEQ ID NO: 13283 - protein, 103 aa, Homo sapiens
MLQKPKSVKLRALRSPRKFGVAGRSCQEVLRKGCLRFQLPERGSRLCLYEDGTELTEDYFPSVPDNAELVLLTLGQAWQGWFRHVSQDSLTLLGSSCPPALVS

SEQ ID NO: 13284 - protein, 116 aa, Homo sapiens
MLQKPKSVKLRALRSPRKFGVAGRSCQEVLRKGCLRFQLPERGSRLCLYEDGTELTEDYFPSVPDNAELVLLTLGQAWQGSVGVRARTKTRDTSSLSPGDCQALGNGGRCGQRLFL

SEQ ID NO: 13285 - protein, 338 aa, Homo sapiens [sequence omitted]

SEQ ID NO: 13286 - protein, 484 aa, Homo sapiens
MGVPRTPSRTVLFERERTGLTYRVPSLLPVPPGPTLLAFVEQRLSPDDSHAHRLVLRRGTLAGGSVRWGALHVLGTAALAEHRSMNPCPVHDAGTGTVFLFFIAVLGHTPEAVQIATGRNAARLCCVASRDAGLSWGSARDLTEEAIGGAVQDWATFAVGPGHGVQLPSGRLLVPAYTYRVDRRECFGKICRTSPHSFAFYSDDHGRTWRCGGLVPNLRSGECQLAAVDGGQAGSFLYCNARSPLGSRVQALSTDEGTSFLPAERVASLPETAWGCQGSIVGFPAPAPNRPRDDSWSVGPGSPLQPPLLGPGVHEPPEEAAVDPRGGQVPGGPFSRLQPRGDGPRQPGPRPGVSGDVGSWTLALPMPFAAPPQSPTWLLYSHPVGRRARLHMGIRLSQSPLDPRSWTEPWVIYEGPSGYSDLASIGPAPEGGLVFACLYESGARTSYDEISFCTFSLREVLENVPASPKPPNLGDKPRGCCWPS

SEQ ID NO: 13287 - protein, 496 aa, Homo sapiens
MMSSAAFPRWLSMGVPRTPSRTVLFERERTGLTYRVPSLLPVPPGPTLLAFVEQRLSPDDSHAHRLVLRRGTLAGGSVRWGALHVLGTAALAEHRSMNPCPVHDAGTGTVFLFFIAVLGHTPEAVQIATGRNAARLCCVASRDAGLSWGSARDLTEEAIGGAVQDWATFAVGPGHGVQLPSGRLLVPAYTYRVDRRECFGKICRTSPHSFAFYSDDHGRTWRCGGLVPNLRSGECQLAAVDGGQAGSFLYCNARSPLGSRVQALSTDEGTSFLPAERVASLPETAWGCQGSIVGFPAPAPNRPRDDSWSVGPGSPLQPPLLGPGVHEPPEEAAVDPRGGQVPGGPFSRLQPRGDGPRQPGPRPGVSGDVGSWTLALPMPFAAPPQSPTWLLYSHPVGRRARLHMGIRLSQSPLDPRSWTEPWVIYEGPSGYSDLASIGPAPEGGLVFACLYESGARTSYDEISFCTFSLREVLENVPASPKPPNLGDKPRGCCWPS

SEQ ID NO: 13288 - protein, 510 aa, Homo sapiens
MAAGPHSALELLIPVGASQVRALQQSMGVPRTPSRTVLFERERTGLTYRVPSLLPVPPGPTLLAFVEQRLSPDDSHAHRLVLRRGTLAGGSVRWGALHVLGTAALAEHRSMNPCPVHDAGTGTVFLFFIAVLGHTPEAVQIATGRNAARLCCVASRDAGLSWGSARDLTEEAIGGAVQDWATFAVGPGHGVQLPSGRLLVPAYTYRVDRRECFGKICRTSPHSFAFYSDDHGRTWRCGGLVPNLRSGECQLAAVDGGQAGSFLYCNARSPLGSRVQALSTDEGTSFLPAERVASLPETAWGCQGSIVGFPAPAPNRPRDDSWSVGPGSPLQPPLLGPGVHEPPEEAAVDPRGGQVPGGPFSRLQPRGDGPRQPGPRPGVSGDVGSWTLALPMPFAAPPQSPTWLLYSHPVGRRARLHMGIRLSQSPLDPRSWTEPWVIYEGPSGYSDLASIGPAPEGGLVFACLYESGARTSYDEISFCTFSLREVLENVPASPKPPNLGDKPRGCCWPS

SEQ ID NO: 13289 - protein, 94 aa, Homo sapiens
MIITCVFICSLLHSGCSWSQGLRIIFSDASRLIFRLSSSSGVRATLRLYAESYERDPSGHDQEPQAVLSPLIAIALKISQIHERTGRRGPTVIT

SEQ ID NO: 13290 - protein, 477 aa, Homo sapiens [sequence omitted]

SEQ ID NO: 13291 - protein, 457 aa, Homo sapiens
MSGTRASNDRPPGAGGVKRGRLQQEAAATGSRVTVVLGAQWGDEGKGKVVDLLATDADIISRCQGGNNAGHTVVVDGKEYDFHLLPSGIINTKAVSFIGNGVVIHLPGLFEEAEKNEKKGLKDWEKRLIISDRAHLVFDFHQAVDGLQEVQRQAQEGKNIGTTKKGIGPTYSSKAARTGLRICDLLSDFDEFSSRFKNLAHQHQSMFPTLEIDIEGQLKRLKGFAERIRPMVRDGVYFMYEALHGPPKKILVEGANAALLDIDFGTYPFVTSSNCTVGGVCTGLGIPPQNIGDVYGVVKAYTTRVGIGAFPTEQINEIGGLLQTRGHEWGVTTGRKRRCGWLDLMILRYAHMVNGFTALALTKLDILDVLGEVKVGVSYKLNGKRIPYFPANQEMLQKVEVEYETLPGWKADTTGARRWEDLPPQAQNYIRFVENHVGVAVKWVGVGKSRESMIQLF

SEQ ID NO: 13292 - protein, 220 aa, Homo sapiens
MLGEILSAFEFMDAVCMQLVGRHLHLASPVQESPFYVLIETSGSNAGHDAEKLGHFLEHALGSGLVTDGTMATDQRKVKMLWALRERITEALSRDGYVYKYDLSLPVERLYDIVTDLRARLGPHAKHVVGYGHLGDGNLHLNVTAEAFSPSLLAALEPHVYEWTAGQQGSVSAEHGVGFRKRDVLGYSKPPGALQLMQQLKALLDPKGILNPYKTLPSQA

SEQ ID NO: 13293 - protein, 320 aa, Homo sapiens
MLPRRPLAWPAWLLRGAPGAAGSWGRPVGPLARRGCCSAPGTPEVPLTRERYPVRRLPFSTVSKQDLAAFERIVPGGVVTDPEALQAPNVDWLRTLRGCSKVLLRPRTSEEVSHILRHCHERNLAVNPQGGNTGMVGGSVPVFDEIILSTARMNRVLSFHSVSGILVCQAGCVLEELSRYVEERDFIMPLDLGAKGSCHIGGNVATNAGGLRFLRYGSLHGTVLGLEVVLADGTVLDCLTSLRKDNTGYDLKQLFIGSEGTLGIITTVSILCPPKPRAVNVAFLDAVGPEGKDHRGAEPGWLRVQVRPLPPCGAALRHRD

SEQ ID NO: 13294 - protein, 270 aa, Homo sapiens
GSQGPRGQVSGRRPEGALGPEGKQPLRWGHRESLGLWTWEDSSATSRTFHCPHPWLGEVSWPGCQGGSQGLWPSLQGSQGWAFGCWKWLLGLGHPWRLRSKNTQYLRGLLPRLAAHGTRPSLCHWKPGPALTCPDQGLCAGTWVTSPFPTRNFAALEVLREEEFSPLKNAEPADRDSPRTARQALLTQHYRWALRAGARFLDAHGAWLPELPSLPPNGDPPAICEISPLVSYSGEVRAAHPYLGLFWCQVWNTIWGEVAARVETAQLYLG

SEQ ID NO: 13295 - protein, 537 aa, Homo sapiens
MASEQDVRARLQRAGQEHLLRFWAELAPEPRAALLAELALLEPEALREHCRRAAEACARPHGPPPDLAARLRPLPPERVGRASRSDPETRRRWEEEGFRQISLNKVAVLLLAGGQGTRLGVTYPKGMYRVGLPSRKTLYQLQAERIRRVEQLAGPGVLAAGSPRLPCRYVMTSEFTLGPTAEFFREHNFFHLDPANVVMFEQRLLPAVTFDGKVILERKDKVAMAPDGNGGLYCALEDHKILEDMERRGVEFVHVYCVDNILVRLADPVFIGFCVLQGADCGAKVVEKAYPEEPVGVVCQVDGVPQVVEYSEISPETAQLRASDGSLLYNAGNICNHFFTRGFLKAVTREFEPLLKPHVAVKKVPYVDEEGNLVKPLKPNGIKMEKFVFDVFRFAKNFAALEVLREEEFSPLKNAEPADRDSPRTARQALLTQHYRWALRAGARFLDAHGAWLPELPSLLSGLGVLGEGSGQVLQGDIDKWTFPSLPPNGDPPAICEISPLVSYSGEGLEVYLQGREFQSPLILDEDQAREPQLQES

SEQ ID NO: 13296 - protein, 677 aa, Homo sapiens
MPGFLVRILPLLLVLLLLGPTRGLRNATQRMFEIDYSRDSFLKDGQPFRYISGSIHYSRVPRFYWKDRLLKMKMAGLNAIQTYVPWNFHEPWPGQYQFSEDHDVEYFLRLAHELGLLVILRPGPYICAEWEMGGLPAWLLEKESILLRSSDPDYLAAVDKWLGVLLPKMKPLLYQNGGPVITVQVENEYGSYFACDFDYLRFLQKRFRHHLGDDVVLFTTDGAHKTFLKCGALQGLYTTVDFGTGSNITDAFLSQRKCEPKGPLINSEFYTGWLDHWGQPHSTIKTEAVASSLYDILARGASVNLYMFIGGTNFAYWNGANSPYAAQPTSYDYDAPLSEAGDLTEKYFALRNIIQKFEKVPEGPIPPSTPKFAYGKVTLEKLKTVGAALDILCPSGPIKSLYPLTFIQVKQHYGFVLYRTTLPQDCSNPAPLSSPLNGVHDRAYVAVDGIPQGVLERNNVITLNITGKAGATLDLLVENMGRVNYGAYINDFKGLVSNLTLSSNILTDWTIFPLDTEDAVRSHLGGWGHRDSGHHDEAWAHNSSNYTLPAFYMGNFSIPSGIPDLPQDTFIQFPGWTKGQVWINGFNLGRYWPARGPQLTLFVPQHILMTSAPNTITVLELEWAPCSSDDPELCAVTFVDRPVIGSSVTYDHPSKPVEKRLMPPPPQKNKDSWLDHV

SEQ ID NO: 13297 - protein, 500 aa, Homo sapiens
MPGFLVRILPLLLVLLLLGPTRGLRNATQRMFEIDYSRDSFLKDGQPFRYISGSIHYSRVPRFYWKDRLLKMKMAGLNAIQTYVPWNFHEPWPGQYQFSEDHDVEYFLRLAHELGLLVILRPGPYICAEWEMGGLPAWLLEKESILLRSSDPDYLAAVDKWLGVLLPKMKPLLYQNGGPVITVQVENEYGSYFACDFDYLRFLQKRFRHHLGDDVVLFTTDGAHKTFLKCGALQGLYTTVDFGTGSNITDAFLSQRKCEPKGPLINSEFYTGWLDHWGQPHSTIKTEAVASSLYDILARGASVNLYMFIGGTNFAYWNGANSPYAAQPTSYDYDAPLSEAGDLTEKYFALRNIIQKFEKVPEGPIPPSTPKFAYGKVTLEKLKTVGAALDILCPSGPIKSLYPLTFIQVKQHYGFVLYRTTLPQDCSNPAPLSSPLNGVHDRAYVAVDGIPQGVLERNNVITLNITGKAGATLDLLVENMGRVNYGAYINDFKVGQTTLS

SEQ ID NO: 13298 - protein, 369 aa, Homo sapiens
MPGFLVRILPLLLVLLLLGPTRGLRNATQRMFEIDYSRDSFLKDGQPFRYISGSIHYSRVPRFYWKDRLLKMKMAGLNAIQTLPGSCGQVVGSPSAQDEASPLSEWRASYNSAGSNITDAFLSQRKCEPKGPLINSEFYTGWLDHWGQPHSTIKTEAVASSLYDILARGASVNLYMFIGGTNFAYWNGANSPYAAQPTSYDYDAPLSEAGDLTEKYFALRNIIQKFEKVPEGPIPPSTPKFAYGKVTLEKLKTVGAALDILCPSGPIKSLYPLTFIQVKQHYGFVLYRTTLPQDCSNPAPLSSPLNGVHDRAYVAVDGIPQGVLERNNVITLNITGKAGATLDLLVENMGRVNYGAYINDFKVGQTTLS

SEQ ID NO: 13299 - protein, 189 aa, Homo sapiens
MPNTVSDFWEMVWQEEVSLIVMLTQLREGKEKCVHYWPTEEETYGPFQIRIQDMKECPEYTVRQLTIQYQEERRSVKHILFSAWPDHQTPESAGPLLRLVAEVEESPETAAHPGPIVVHCSAGIGRTGCFIATRIGCQQLKARGEVDILGIVCQLRLDRGGMIQTAEQYQFLHHTLALYAGQLPEEPSP

SEQ ID NO: 13300 - protein, 399 aa, Homo sapiens
MGASFWPIRQAREQQRRALSFRQTSWLSEPPLGPAPHLSMVQAHGGRSRAQPLTLSLGAAMTQPPPEKTPAKKHVRLQERRGSNVALMLDVRSLGAVEPICSVNTPREVTLHFLRTAGHPLTRWALQRQPPSPKQLEEEFLKIPSNFVSPEDLDIPGHASKDRYKTILPNPQSRVCLGRAQSQEDGDYINANYIRGYDGKEKVYIATQGPMPNTVSDFWEMVWQEEVSLIVMLTQLREGKEKCVHYWPTEEETYGPFQIRIQDMKECPEYTVRQLTIQYQEERRSVKHILFSAWPDHQTPESAGPLLRLVAEVEESPETAAHPGPIVVHCSAGIGRTGCFIATRIGCQQLKARGEVDILGIVCQLRLDRGGMIQTAEQYQFLHHTLALYAGQLPEEPSP

SEQ ID NO: 13301 - protein, 360 aa, Homo sapiens
MVQAHGGRSRAQPLTLSLGAAMTQPPPEKTPAKKHVRLQERRGSNVALMLDVRSLGAVEPICSVNTPREVTLHFLRTAGHPLTRWALQRQPPSPKQLEEEFLKIPSNFVSPEDLDIPGHASKDRYKTILPNPQSRVCLGRAQSQEDGDYINANYIRGYDGKEKVYIATQGPMPNTVSDFWEMVWQEEVSLIVMLTQLREGKEKCVHYWPTEEETYGPFQIRIQDMKECPEYTVRQLTIQYQEERRSVKHILFSAWPDHQTPESAGPLLRLVAEVEESPETAAHPGPIVVHCSAGIGRTGCFIATRIGCQQLKARGEVDILGIVCQLRLDRGGMIQTAEQYQFLHHTLALYAGQLPEEPSP

SEQ ID NO: 13302 - protein, 360 aa, Homo sapiens; identical to SEQ ID NO: 13301

SEQ ID NO: 13303 - protein, 399 aa, Homo sapiens; identical to SEQ ID NO: 13300

SEQ ID NO: 13304 - protein, 121 aa, Homo sapiens
  VARIANT (1)...(121): Xaa = Any Amino Acid
MPNTVSDFWEMVWQEEVSLIVMLTQLREGKEKCVHYWPTEEETYGPFQIRIQDMKECPEYTVRQLTIQYQEERRSVKHILFSAWPDHQTPESAGPLLRLVAEVEESPETAAHPGPIVVHCX

SEQ ID NO: 13305 - protein, 364 aa, Homo sapiens
MPHSYPALSAEQKKELSDIALRIVAPGKGILAADESVGSMAKRLSQIGVENTEENRRLYRQVLFSADDRVKKCIGGVIFFHETLYQKDDNGVPFVRTIQDKGIVVGIKVDKGVVPLAGTDGETTTQGLDGLSERCAQYKKDGADFAKWRCVLKISERTPSALAILENANVLARYASICQQNGIVPIVEPEILPDGDHDLKRCQYVTEKVLAAVYKALSDHHVYLEGTLLKPNMVTPGHACPIKYTPEEIAMATVTALRRTVPPAVPGVTFLSGGQSEEEASFNLNAINRCPLPRPWALTFSYGRALQASALNAWRGQRDNAGAATEEFIKRAEVNGLAAQGKYEGSGEDGGAAAQSLYIANHAY

SEQ ID NO: 13306 - protein, 364 aa, Homo sapiens; identical to SEQ ID NO: 13305

SEQ ID NO: 13307 - protein, 482 aa, Homo sapiens
MAAVRMLRTWSRNAGKLICVRYFQTCGNVHVLKPNYVCFFGYPSFKYSHPHHFLKTTAALRGQVVQFKLSDIGEGIREVTVKEWYVKEGDTVSQFDSICEVQSDKASVTITSRYDGVIKKLYYNLDDIAYVGKPLVDIETEALKDSEEDVVETPAVSHDEHTHQEIKGRKTLATPAVRRLAMENNIKLSEVVGSGKDGRILKEDILNYLEKQTGAILPPSPKVEIMPPPPKPKDMTVPILVSKPPVFTGKDKTEPIKGFQKAMVKTMSAALKIPHFGYCDEIDLTELVKLREELKPIAFARGIKLSFMPFFLKAASLGLLQFPILNASVDENCQNITYKASHNIGIAMDTEQGLIVPNVKNVQICSIFDIATELNRLQKLGSVGQLSTTDLTGGTFTLSNIGSIGGTFAKPVIMPPEVAIGALGSIKAIPRFNQKGEVYKAQIMNVSWSADHRVIDGATMSRFSNLWKSYLENPAFMLLDLK

SEQ ID NO: 13308 - protein, 321 aa, Homo sapiens
MGTALVYHEDMTATRLLWDDPECEIERPERLTAALDRLRQRGLEQRCLRLSAREASEEELGLVHRPPGHHGQRAAANGFCVFNNVAIAAAHAKQKHGLHRILVVDWDVHHGQGIQYLFEDDPSVLYFSWHRYEHGRFWPFLRESDADAVGRGQGLGFTVNLPWNQVGMGNADYVAAFLHLLLPLAFEVTARRAPPGQPGGRGTLCLECASEGRRRVMSCPTPVWLGKVLRRGWDGPGSPSPGLQPLSVDPPHSGLACSLTLSWCWSRQDLTQPSGTLRGKCRPRQSASPTSHSCCRCWPAAGSVPCWRAATTWSHWRSQCA

SEQ ID NO: 13309 - protein, 598 aa, Homo sapiens [sequence omitted]

SEQ ID NO: 13310 - protein, 429 aa, Homo sapiens
MPSRNTGYTGSSSWTGMCTMARGSSISLRMTPASFTSPGTAMSMGASGLSCESQMQTQWGGDRASASLSTCPGTRGKCRPRQSASPTSHSCCRCWPAAGSVPCWSALESIQSARAAQAPHWKSLQQQDVTAVPMSPSSHSPEGRPPPLLPGGPVCKAAASAPSSLLDQPCLCPAPSVRTAVALTTPDITLVLPPDVIQQEASALREETEAWARPHESLAREEALTALGKLLYLLDGMLDGQVNSGIAATPASAAAATLDVAVRRGLSHGAQRLLCVALGQLDRPPDLAHDGRSLWLNIRGKEAAALSMFHVSTPLPVMTGGFLSCILGLVLPLAYGFQPDLVLVALGPGHGLQGPHAALLAAMLRGLAGGRVLALLEENSTPQLAGILARVLNGEAPPSLGPSSVASPEDVQALMYLRGQLEPQWKMLQ

SEQ ID NO: 13311 - protein, 662 aa, Homo sapiens [sequence omitted]

SEQ ID NO: 13312 - protein, 669 aa, Homo sapiens
MGTALVYHEDMTATRLLWDDPECEIERPERLTAALDRLRQRGLEQRCLRLSAREASEEELGLVHSPEYVSLVRETQVLGKEELQALSGQFDAIYFHPSTFHCARLAAGAGLQLVDAVLTGAVQNGLALVRPPGHHGQRAAANGFCVFNNVAIAAAHAKQKHGLHRILVVDWDVHHGQGIQYLFEDDPSVLYFSWHRYEHGRFWPFLRESDADAVGRGQGLGFTVNLPWNQVGMGNADYVAAFLHLLLPLAFEFDPELVLVSAGFDSAIGDPEGQMQATPECFAHLTQLLQVLAGGRVCAVLEGGYHLESLAESVCMTVQTLLGDPAPPLSGPMAPCQSALESIQSARAAQAPHWKSLQQQDVTAVPMSPSSHSPEGRPPPLLPGGPVCKAAASAPSSLLDQPCLCPAPSVRTAVALTTPDITLVLPPDVIQQEASALREETEAWARPHESLAREEALTALGKLLYLLDGMLDGQVNSGIAATPASAAAATLDVAVRRGLSHGAQRLLCVALGQLDRPPDLAHDGRSLWLNIRGKEAAALSMFHVSTPLPVMTGGFLSCILGLVLPLAYGFQPDLVLVALGPGHGLQGPHAALLAAMLRGLAGGRVLALLEENSTPQLAGILARVLNGEAPPSLGPSSVASPEDVQALMYLRGQLEPQWKMLQCHPHLVA

SEQ ID NO: 13313 - protein, 673 aa, Homo sapiens [sequence omitted]

SEQ ID NO: 13314 - protein, 618 aa, Homo sapiens [sequence omitted]

SEQ ID NO: 13315 - protein, 459 aa, Homo sapiens
MGTALVYHEDMTATRLLWDDPECEIERPERLTAALDRLRQRGLEQRCLRLSAREASEEELGLVHSPEYVSLVRETQVLGKEELQALSGQFDAIYYHLESLAESVCMTVQTLLGDPAPPLSGPMAPCQSALESIQSARAAQAPHWKSLQQQDVTAVPMSPSSHSPEGRPPPLLPGGPVCKAAASAPSSLLDQPCLCPAPSVRTAVALTTPDITLVLPPDVIQQEASALREETEAWARPHESLAREEALTALGKLLYLLDGMLDGQVNSGIAATPASAAAATLDVAVRRGLSHGAQRLLCVALGQLDRPPDLAHDGRSLWLNIRGKEAAALSMFHVSTPLPVMTGGFLSCILGLVLPLAYGFQPDLVLVALGPGHGLQGPHAALLAAMLRGLAGGRVLALLEENSTPQLAGILARVLNGEAPPSLGPSSVASPEDVQALMYLRGQLEPQWKMLQCHPHLVA

SEQ ID NO: 13316 - protein, 649 aa, Homo sapiens
MGTALVYHEDMTATRLLWDDPECEIERPERLTAALDRLRQRGLEQRCLRLSAREASEEELGLVHSPEYVSLVRETQVLGKEELQALSGQFDAIYFHPSTFHCARLAAGAGLQLVDAVLTGAVQNGLALVRPPGHHGQRAAANGFCVFNNVAIAAAHAKQKHGLHRILVVDWDVHHGQGIQYLFEDDPSVLYFSWHRYEHGRFWPFLRESDADAVGRGQGLGFTVNLPWNQVGMGNADYVAAFLHLLLPLAFEGQMQATPECFAHLTQLLQVLAGGRVCAVLEGGYHLESLAESVCMTVQTLLGDPAPPLSGPMAPCQSALESIQSARAAQAPHWKSLQQQDVTAVPMSPSSHSPEGRPPPLLPGGPVCKAAASAPSSLLDQPCLCPAPSVRTAVALTTPDITLVLPPDVIQQEASALREETEAWARPHESLAREEALTALGKLLYLLDGMLDGQVNSGIAATPASAAAATLDVAVRRGLSHGAQRLLCVALGQLDRPPDLAHDGRSLWLNIRGKEAAALSMFHVSTPLPVMTGGFLSCILGLVLPLAYGFQPDLVLVALGPGHGLQGPHAALLAAMLRGLAGGRVLALLEENSTPQLAGILARVLNGEAPPSLGPSSVASPEDVQALMYLRGQLEPQWKMLQCHPHLVA

SEQ ID NO: 13317 - protein, 316 aa, Homo sapiens
MPLLPAALTSSMLYFQMVIMAGTVMLAYYFEYTDTFTVNVQGFFCHDSAYRKPYPGPEDSSAVPPVLLYSLAAGVPVLVIIVGETAVFCLQLATRDFENQEKTILTGDCCYINPLVRRTVRFLGIYTFGLFATDIFVNAGQVVTGNLAPHFLALCKPNYTALGCQQYTQFISGEEACTGNPDLIMRARKTFPSKEAALSVYAAMYLTMYITNTIKAKGTRLAKPVLCLGLMCLAFLTGLNRVAEYRNHWSDVIAGFLVGISIAVFLVVCVVNNFKGRQAENEHIHMDNLAQMPMISIPRVESPLEKNHITAFAEVT

SEQ ID NO: 13318 - protein, 605 aa, Homo sapiens
MNMFDADTTTNLVTISFILPIGVHVFGLCSTALITDIIQLSTGYQAPYFLTVCKPNYTSLNVSCKENSYIVEDICSGSDLTVINSGRKSFPSQHATLAAFAAVYVSMYFNSTLTDSSKLLKPLLVFTFIICGIICGLTRITQYKNHPVDVYCGFLIGGGIALYLGLYAVGNFLPSDESMFQHRDALRSLTDLNQDPNRLLSAKNGSSSDGIAHTEGILNRNHRDASSLTNLKRANADVEIITPRSPMGKENMVTFSNTLPRANTPSVEDPVRRNASIHASMDSARSKQLLTQWKNKNESRKLSLQVIEPEPGQSPPRSIEMRSSSEPSRVGVNGDHHGPGNQYLKIQPGAVPGCNNSMPGGPRVSIQSRPGSSQLVHIPEETQENISTSPKSSSARAKWLKAAEKTVACNRSNSQPRIMQVIAMSKQQGVLQSSPKNTEGSTVSCTGSIRYKTLTDHEPSGIVRVEAHPENNRPIIQIPSTEGEGSGSWKWKAPEKGSLRQTYELNDLNRDSESCESLKDSFGSGDRKRSNIDSNEHHHHGITTIRVTPVEGSEIGSETLSISSSRDSTLRRKGNIILIPERSNSPENTRNIFYKGTSPTRAYKD

SEQ ID NO: 13319 - protein, 112 aa, Homo sapiens
MVCVLVLAAAAGAVAVFLILRIWVVLRSMDVTPRESLSILVVAGSGGHTTEILRLLGSLSNAYSPRHYVIADTDEMSANKINSFELDRADRDPSNMRRGLTVCPGWGAVVQS

SEQ ID NO: 13320 - protein, 216 aa, Homo sapiens
MVCVLVLAAAAGAVAVFLILRIWVVLRSMDVTPRESLSILVVAGSGGHTTEILRLLGSLSNAYSPRHYVIADTDEMSANKINSFELDRADRDPSNMYTKYYIHRIPRSREVQQSWPSTVFTTLHSMWLSFPLIHRVKPDLVLCNGPGTCVPICVSALLLGILGIKKVIIVYVESICRVETLSMSGKILFHLSDYFIVQWPALKEKYPKSVYLGRIV

SEQ ID NO: 13321 - protein, 274 aa, Homo sapiens
MGTDSRAAKALLARARTLHLQTGNLLNWGRLRKKCPSTHSEELHDCIQKTLNEWSSQINPDLVREFPDVLECTVSHAVEKINPDEREEMKVSAKLFIVESNSSSSTRSAVDMACSVLGVAQLDSVIIASPPIEDGVNLSLEHLQPYWEELENLVQSKKIVAIGTSDLDKTQLEQLYQWAQVKPNSNQVNLASCCVMPPDLTAFAKQFDIQLLTHNDPKELLSEASFQEALQESIPDIQAHEWVPLWLLRYSVIVKSRGIIKSKGYILQAKRRGS

SEQ ID NO: 13322 - protein, 274 aa, Homo sapiens; identical to SEQ ID NO: 13321

SEQ ID NO: 13323 - protein, 254 aa, Homo sapiens
MGTDSRAAKALLARARTLHLQTGNLLNWGRLRKKCPSTHSEELHDCIQKTLNEWSSQINPDLVREFPDVLECTVSHAVEKINPDEREEMKVSACSVLGVAQLDSVIIASPPIEDGVNLSLEHLQPYWEELENLVQSKKIVAIGTSDLDKTQLEQLYQWAQVKPNSNQVNLASCCVMPPDLTAFAKQFDIQLLTHNDPKELLSEASFQEALQESIPDIQAHEWVPLWLLRYSVIVKSRGIIKSKGYILQAKRRGS

SEQ ID NO: 13324 - protein, 254 aa, Homo sapiens; identical to SEQ ID NO: 13323

SEQ ID NO: 13325 - protein, 154 aa, Homo sapiens [sequence omitted]

SEQ ID NO: 13326 - protein, 286 aa, Homo sapiens [sequence omitted]

SEQ ID NO: 13327 - protein, 75 aa, Homo sapiens
MGGERSGVRGNKMAAAEPSPRRVGFVGAGRMAGAIAQGLIRAGKVEAQHILASAPTDRNLCHFQLSLTLLSLARP

SEQ ID NO: 13328 - protein, 286 aa, Homo sapiens [sequence omitted]

SEQ ID NO: 13329 - protein, 538 aa, Homo sapiens
MAAEQDPEARAAARPLLTDLYQATMALGYWRAGRARDAAEFELFFRRCPFGGAFALAAGLRDCVRFLRAFRLRDADVQFLASVLPPDTDPAFFEHLRALDCSEVTVRALPEGSLAFPGVPLLQVSGPLLVVQLLETPLLCLVSYASLVATNAARLRLIAGPEKRLLEMGLRRAQGPDGGLTASTYSYLGGFDSSSNVLAGQLRGVPVAGTLAHSFVTSFSGSEVPPDPMLAPAAGEGPGVDLAAKAQVWLEQVCAHLGLGVQEPHPGERAAFVAYALAFPRAFQGLLDTYSVWRSGLPNFLAVALALGELGYRAVGVRLDSGDLLQQAQEIRKVFRAAAAQFQVPWLESVLIVVSNNIDEEALARLAQEGSEVNVIGIGTSVVTCPQQPSLGGVYKLVAVGGQPRMKLTEDPEKQTLPGSKAAFRLLGSDGSPLMDMLQLAEEPVPQAGQELRVWPPGAQEPCTVRPAQVEPLLRLCLQQGQLCEPLPSLAESRALAQLSLSRLSPEHRRLRSPAQYQVVLSERLQALVNSLCAGQSP

SEQ ID NO: 13330 - protein, 132 aa, Homo sapiens
MDVSEGTTMSSSHSYLISSRQCWNHSDRLISKCSPEDLATAYNNRGQIKYFRVDFYEAMDDYTSAIEVQPNFEVPYYNRGLILYRLGYFDDALEDFKKVLDLNPGFQDATLSLKQTILDKEEKQRRNVAKNY

SEQ ID NO: 13331 - protein, 151 aa, Homo sapiens
MEGQRQESHATLTLAQAHFNNGEYAEAEALYSAYIRRCACAASSDESPGSKCSPEDLATAYNNRGQIKYFRVDFYEAMDDYTSAIEVQPNFEVPYYNRGLILYRLGYFDDALEDFKKVLDLNPGFQDATLSLKQTILDKEEKQRRNVAKNY

SEQ ID NO: 13332 - protein, 1012 aa, Homo sapiens
MPASAPPRRPRPPPPSLSLLLVLLGLGGRRLRAEPGDGAQTWARFSRPPAPEAAGLFQGTFPDGFLWAVGSAAYQTEGGWQQHGKGASIWDTFTHHPLAPPGDSRNASLPLGAPSPLQPATGDVASDSYNNVFRDTEALRELGVTHYRFSISWARVLPNGSAGVPNREGLRYYRRLLERLRELGVQPVVTLYHWDLPQRLQDAYGGWANRALADHFRDYAELCFRHFGGQVKYWITIDNPYVVAWHGYATGRLAPGIRGSPRLGYLVAHNLLLAHAKVWHLYNTSFRPTQGGQVSIALSSHWINPRRMTDHSIKECQKSLDFVLGWFAKPVFIDGDYPESMKNNLSSILPDFTESEKKFIKGTADFFALCFGPTLSFQLLDPHMKFRQLESPNLRQLLSWIDLEFNHPQIFIVENGWFVSGTTKRDDAKYMYYLKKFIMETLKAIKLDGVDVIGYTAWSLMDGFEWHRGYSIRRGLFYVDFLSQDKMLLPKSSALFYQKLIEKNGFPPLPENQPLEGTFPCDFAWGVVDNYIQVDTTLSQFTDLNVYLWDVHHSKRLIKVDGVVTKKRKSYCVDFAAIQPQIALLQEMHVTHFRFSLDWALILPLGNQSQVNHTILQYYRCMASELVRVNITPVVALWQPMAPNQGLPRLLARQGAWENPYTALAFAEYARLCFQELGHHVKLWITMNEPYTRNMTYSAGHNLLKAHALAWHVYNEKFRHAQNGKISIALQADWIEPACPFSQKDKEVAERVLEFDIGWLAEPIFGSGDYPWVMRDWLNQRNNFLLPYFTEDEKKLIQGTFDFLALSHYTTILVDSEKEDPIKYNDYLEVQEMTDITWLNSPSQVAVVPWGLRKVLNWLKFKYGDLPMYIISNGIDDGLHAEDDQLRVYYMQNYINEALKAHILDGINLCGYFAYSFNDRTAPRFGLYRYAADQFEPKASMKHYRKIIDSNGFPGPETLERFCPEEFTVCTECSFFHTRKSLLAFIAFLFFASIISLSLIFYYSKKGRRSYK

SEQ ID NO: 13333 - protein, 549 aa, Homo sapiens
MPASAPPRRPRPPPPSLSLLLVLLGLGGRRLRAEPGDGAQTWARFSRPPAPEAAGLFQGTFPDGFLWAVGSAAYQTEGGWQQHGKGASIWDTFTHHPLAPPGDSRNASLPLGAPSPLQPATGDVASDSYNNVFRDTEALRELGVTHYRFSISWARVLPNGSAGVPNREGLRYYRRLLERLRELGVQPVVTLYHWDLPQRLQDAYGGWANRALADHFRDYAELCFRHFGGQVKYWITIDNPYVVAWHGYATGRLAPGIRGSPRLGYLVAHNLLLAHAKVWHLYNTSFRPTQGGQVSIALSSHWINPRRMTDHSIKECQKSLDFVLGWFAKPVFIDGDYPESMKNNLSSILPDFTESEKKFIKGTADFFALCFGPTLSFQLLDPHMKFRQLESPNLRQLLSWIDLEFNHPQIFIVENGWFVSGTTKRDDAKYMYYLKKFIMETLKAIKLDGVDVIGYTAWSLMDGFEWHRGYSIRRGLFYVDFLSQDKMLLPKSSALFYQKLIEKNGFPPLPENQPLEGTFPCDFAWGVVDNYIQVSQLTKPISSLTKPYH

SEQ ID NO: 13334 - protein, 958 aa, Homo sapiens
MLKSKTFLKKTRAGGVMKIVREHYLRDDIGCGAPGCAACGGAHEGPALEPQPQDPASSVCPQPHYLLPDTNVLLHQIDVLEDPAIRNVIVLQTVLQEVRNRSAPVYKRIRDVTNNQEKHFYTFTNEHHRETYVEQEQGENANDRNDRAIRVAAKWYNEHLKKMSADNQLQVIFITNDRRNKEKAIEEGIPAFTCEEYVKSLTANPELIDRLACLSEEGNEIESGKIIFSEHLPLSKLQQGIKSGTYLQGTFRASRENYLEATVWIHGDNEENKEIILQGLKHLNRAVHEDIVAVELLPKSQWVAPSSVVLHDEGQNEEDVEKEEETERMLKTAVSEKMLKPTGRVVGIIKRNWRPYCGMLSKSDIKESRRHLFTPADKRIPRIRIETRQASTLEGRRIIVAIDGWPRNSRYPNGHFVRNLGDVGEKETETEVLLLEHDVPHQPFSQAVLSFLPKMPWSITEKDMKNREDLRHLCICSVDPPGCTDIDDALHCRELENGNLEVGVHIADVSHFIRPGNALDQESARRGTTVYLCEKRIDMVPELLSSNLCSLKCDVDRLAFSCIWEMNHNAEILKTKFTKSVINSKASLTYAEAQLRIDSANMNDDITTSLRGLNKLAKILKKRRIEKGALTLSSPEVRFHMDSETHDPIDLQTKELRETNSMVEEFMLLANISVAKKIHEEFSEHALLRKHPAPPPSNYEILVKAARSRNLEIKTDTAKSLAESLDQAESPTFPYLNTLLRILATRCMMQAVYFCSGMDNDFHHYGLASPIYTHFTSPIRRYADVIVHRLLAVAIGADCTYPELTDKHKLADICKNLNFRHKMAQYAQRASVAFHTQLFFKSKGIVSEEAYILFVRKNAIVVLIPKYGLEGTVFFEEKDKPNPQLIYDDEIPSLKIEDTVFHVFDKVKVKIMLDSSNLQHQKIRMSLVEPQIPGISIPTDTSNMDLNGPKKKKMKLGK

SEQ ID NO: 13335 - protein, 928 aa, Homo sapiens
MLKSKTFLKKTRAGGVMKIVREHYLRDDIGCGAPGCAACGGAHEGPALEPQPQDPASSVCPQPHYLLPDTNVLLHQIVSAWRPGTWASVASSLRLPGSLETYVEQEQGENANDRNDRAIRVAAKWYNEHLKKMSADNQLQVIFITNDRRNKEKAIEEGIPAFTCEEYVKSLTANPELIDRLACLSEEGNEIESGKIIFSEHLPLSKLQQGIKSGTYLQGTFRASRENYLEATVWIHGDNEENKEIILQGLKHLNRAVHEDIVAVELLPKSQWVAPSSVVLHDEGQNEEDVEKEEETERMLKTAVSEKMLKPTGRVVGIIKRNWRPYCGMLSKSDIKESRRHLFTPADKRIPRIRIETRQASTLEGRRIIVAIDGWPRNSRYPNGHFVRNLGDVGEKETETEVLLLEHDVPHQPFSQAVLSFLPKMPWSITEKDMKNREDLRHLCICSVDPPGCTDIDDALHCRELENGNLEVGVHIADVSHFIRPGNALDQESARRGTTVYLCEKRIDMVPELLSSNLCSLKCDVDRLAFSCIWEMNHNAEILKTKFTKSVINSKASLTYAEAQLRIDSANMNDDITTSLRGLNKLAKILKKRRIEKGALTLSSPEVRFHMDSETHDPIDLQTKELRETNSMVEEFMLLANISVAKKIHEEFSEHALLRKHPAPPPSNYEILVKAARSRNLEIKTDTAKSLAESLDQAESPTFPYLNTLLRILATRCMMQAVYFCSGMDNDFHHYGLASPIYTHFTSPIRRYADVIVHRLLAVAIGADCTYPELTDKHKLADICKNLNFRHKMAQYAQRASVAFHTQLFFKSKGIVSEEAYILFVRKNAIVVLIPKYGLEGTVFFEEKDKPNPQLIYDDEIPSLKIEDTVFHVFDKVKVKIMLDSSNLQHQKIRMSLVEPQIPGISIPTDTSNMDLNGPKKKKMKLGK

SEQ ID NO: 13336 - protein, 694 aa, Homo sapiens [sequence omitted]

SEQ ID NO: 13337 - protein, 694 aa, Homo sapiens [sequence omitted]

SEQ ID NO: 13338 - protein, 852 aa, Homo sapiens
MYNAVMLGWARQGAFKELVYVLFMVKDAGLTPDLLSYAAALQCMGRQDQDAGTIERCLEQMSHEGLKLQALFTAVPLSEEDRATVLKAVHKVKPTFSLPLQLPPPVNTSKLLRDVYAKDGRVSYPKLHLPLKTLQCLFEKQLHVELASRMCVVSVEKPTLPSKEVTHARKTLKTLRDQWEKALCRELRETKNRLERQVYEGRFSLYPFLCLLDECEVVRMLLQVLQALPAQGESFTTLARELSARTFSRHVVQRQRVSAQVQALQNHYRKYLCLLASDAEVPEPCLPRQYCEALGAPEALREQPWPLPVQMELGKLLAEMLVQATQMPCSLDKPHRSSRLVPVVYHVYSFRNVQQIGILKPHPAYVQLLEKATEPTLTFEAVDVPMFCPPLPWTSPHSGAFLLSPTKLMRTVEGATQHQELLETCPPTALHGALDALAQLGNCAWRVNGRVLDLVLQLFQAKGCPYLGVPAPPSEAPQPPEAHLPHSAAPARKAELRRELAHCQKVAREMHSLRAEALYRLSLAQHLRDRVFWRPHNMDFRSRTYPCPPHFNHLGSDVARALLEFAQGRPLGPRGLDWLKIHLVNLTGLKKREPLRKRLAFAEEVMDDILDSADQPLTGRKWWMGAEEPWQTLACCMEVANTVRASDPAAYVSHLPVHQDGSCNGLQHYAALGRDSVGAASVNLEPSDVPQDVYSGVAGQVEVFRRQDAQRGTRVAQVLEGFITREVVKQTVMTMVYGVTRYGGRLQIEKRLRELNDFPQEFVWEASHYLVRQVFKSLQEMFSGTRAIQHWLTESARLISHTGSVVEWVTPLGVPVIQPYRLDSKVKQIGGGIQSITYTHNGDISRKPNTRK

SEQ ID NO: 13339 - protein, 224 aa, Homo sapiens
MYNAVMLGWARQGAFKELVYVLFMVKDAGLTPDLLSYAAALQCMGRQDQDAGTIERCLEQMSHEGLKLQALFTAVPLSEEDRATVLKAVHKVKPTFSLPLQLPPPVNTSKLLRDVYAKDGRVSYPKLHLPLKTLQCLFEKQLHVELASRMCVVSVEKPTLPSKEVTHARKTLKTLRDQWEKALCRELRETKNRLERQVKQIGGGIQSITYTHNGDISRKPNTRK

SEQ ID NO: 13340 - protein, 829 aa, Homo sapiens
MVKDAGLTPDLLSYAAALQCMGRQDQDAGTIERCLEQMSHEGLKLQALFTAVPLSEEDRATVLKAVHKVKPTFSLPLQLPPPVNTSKLLRDVYAKDGRVSYPKLHLPLKTLQCLFEKQLHVELASRMCVVSVEKPTLPSKEVTHARKTLKTLRDQWEKALCRELRETKNRLERQVYEGRFSLYPFLCLLDECEVVRMLLQVLQALPAQGESFTTLARELSARTFSRHVVQRQRVSAQVQALQNHYRKYLCLLASDAEVPEPCLPRQYCEALGAPEALREQPWPLPVQMELGKLLAEMLVQATQMPCSLDKPHRSSRLVPVVYHVYSFRNVQQIGILKPHPAYVQLLEKATEPTLTFEAVDVPMFCPPLPWTSPHSGAFLLSPTKLMRTVEGATQHQELLETCPPTALHGALDALAQLGNCAWRVNGRVLDLVLQLFQAKGCPYLGVPAPPSEAPQPPEAHLPHSAAPARKAELRRELAHCQKVAREMHSLRAEALYRLSLAQHLRDRVFWRPHNMDFRSRTYPCPPHFNHLGSDVARALLEFAQGRPLGPRGLDWLKIHLVNLTGLKKREPLRKRLAFAEEVMDDILDSADQPLTGRKWWMGAEEPWQTLACCMEVANTVRASDPAAYVSHLPVHQDGSCNGLQHYAALGRDSVGAASVNLEPSDVPQDVYSGVAGQVEVFRRQDAQRGTRVAQVLEGFITREVVKQTVMTMVYGVTRYGGRLQIEKRLRELNDFPQEFVWEASHYLVRQVFKSLQEMFSGTRAIQHWLTESARLISHTGSVVEWVTPLGVPVIQPYRLDSKVKQIGGGIQSITYTHNGDISRKPNTRK

SEQ ID NO: 13341 - protein, 567 aa, Homo sapiens
MEAERRPAPGSPSEGLFADGHLILWTLCSVLLPVFITFWCSLQRSRRQLHRRDIFRKSKHGWRDTDLFSQPTYCCVCAQHILQGAFCDCCGLRVDEGCLRKADKRFQCKEIMLKNDTKVLDAMPHHWIRGNVPLCSYCMVCKQQCGCQPKLCDYRCIWCQKTVHDECMKNSLKNEKCDFGEFKNLIIPPSYLTSINQMRKDKKTDYEVLASKLGKQWTPLIILANSRSGTNMGEGLLGEFRILLNPVQVFDVTKTPPIKALQLCTLLPYYSARVLVCGGDGTVGWVLDAVDDMKIKGQEKYIPQVAVLPLGTGNDLSNTLGWGTGYAGEIPVAQVLRNVMEADGIKLDRWKVQVTNKGYYNLRKPKEFTMNNYFSVGPDALMALNFHAHREKAPSLFSSRILNKAVYLFYGTKDCLVQECKDLNKKVELELDGERVALPSLEGIIVLNIGYWGGGCRLWEGMGDETYPLARHDDGLLEVVGVYGSFHCAQIQVKLANPFRIGQAHTVRLILKCSMMPMQVDGEPWAQGPCTVTITHKTHAMMLYFSGEQTDDDISSTSDQEDIKATE

SEQ ID NO: 13342 - protein, 519 aa, Homo sapiens
MSPLWWGFLLSCLGCKILPGAQGQFPRVCMTVDSLVNKECCPRLGAESANVCGSQQGRGQCTEVRADTRPWSGPYILRNQDDRELWPRKFFHRTCKCTGNFAGYNCGDCKFGWTGPNCERKKPPVIRQNIHSLSPQEREQFLGALDLAKKRVHPDYVITTQHWLGLLGPNGTQPQFANCSVYDFFVWLHYYSVRDTLLGPGRPYRAIDFSHQGPAFVTWHRYHLLCLERDLQRLIGNESFALPYWNFATGRNECDVCTDQLFGAARPDDPTLISRNSRFSSWETVCDSLDDYNHLVTLCNGTYEGLLRRNQMGRNSMKLPTLKDIRDCLSLQKFDNPPFFQNSTFSFRNALEGFDKADGTLDSQVMSLHNLVHSFLNGTNALPHSAANDPIFVVLHSFTDAIFDEWMKRFNPPADAWPQELAPIGHNRMYNMVPFFPPVTNEELFLTSDQLGYSYAIDLPVSVEETPGWPTTLLVVMGTLVALVGLFVLLAFLQYRRLRKGYTPLMETHLSSKRYTEEA

SEQ ID NO: 13343 - protein, 166 aa, Homo sapiens
MGRNSMKLPTLKDIRDCLSLQKFDNPPFFQNSTFSFRNALEGFDKADGTLDSQVMSLHNLVHSFLNGTNALPHSAANDPIFVVLHSFTDAIFDEWMKRFNPPADAWPQELAPIGHNRMYNMVPFFPPVTNEELFLTSDQLGYSYAIDLPDFQANFICSYLVSVHQE

SEQ ID NO: 13344 - protein, 237 aa, Homo sapiens
MSPLWWGFLLSCLGCKILPGAQGQFPRVCMTVDSLVNKECCPRLGAESANVCGSQQGRGQCTEVRADTRPWSGPYILRNQDDRELWPRKFFHRTCKCTGNFAGYNCGDCKFGWTGPNCERKKPPVIRQNIHSLSPQEREQFLGALDLAKKRVHPDYVITTQHWLGLLGPNGTQPQFANCSVYDFFVWLHYYSVRDTLLGGFFPWLKVYYYRFVIGLRVWQWEVISCKLIKRATTRQP

SEQ ID NO: 13345 - protein, 807 aa, Homo sapiens
MMDSPFLELWQSKAVSIREQLGLGDRPNDSYCYNSAKNSTVLQGVTFGGIPTVLLIDVSCFLFLILVFSIIRRRFWDYGRIALVSEADSESRFQRLSSTSSSGQQDFENELGCCPWLTAIFRLHDDQILEWCGEDAIHYLSFQRHIIFLLVVVSFLSLCVILPVNLSGDLLDKDPYSFGRTTIANLQTDNDLLWLHTIFAVIYLFLTVGFMRHHTQSIKYKEENLVRRTLFITGLPRDARKETVESHFRDAYPTCEVVDVQLCYNVAKLIYLCKEKKKTEKSLTYYTNLQVKTGQRTLINPKPCGQFCCCEVLGCEWEDAISYYTRMKDRLLERITEEERHVQDQPLGMAFVTFQEKSMATYILKDFNACKCQSLQCKGEPQPSSHSRELYTSKWTVTFAADPEDICWKNLSIQGLRWWLQWLGINFTLFLGLFFLTTPSIILSTMDKFNVTKPIHALNNPIISQFFPTLLLWSFSALLPSIVYYSTLLESHWTKSGENQIMMTKVYIFLIFMVLILPSLGLTSLDFFFRWLFDKTSSEASIRLECVFLPDQGAFFVNYVIASAFIGNGMELLRLPGLILYTFRMIMAKTAADRRNVKQNQAFQYEFGAMYAWMLCVFTVIVAYSITCPIIAPFGLIYILLKHMVDRHNLYFVYLPAKLEKGIHFAAVNQALAAPILCLFWLYFFSFLRLGMKAPATLFTFLVLLLTILVCLAHTCFGCFKHLSPLNYKTEEPASDKGSEAEAHMPPPFTPYVPRILNGLASERTALSPQQQQQQTYGAIHNISGTIPGQCLAQSATGSVAAAPQEA

SEQ ID NO: 13346 - protein, 170 aa, Homo sapiens
MFSNFLSKPVDVSKFDVIFSGAQKNVGSAGVTVVIVRDDQLGFALRESPSVLECKVQAGNSSSYNTPPCFSIYIMGLLLEWTKNNGGAAAMEKLSSIKSQMIYEITDNSQGFYVCPVETQNRSKMNIPFCIGNVKGDDALVKRFLDKAFETQYVVLERAQVCGKHPGLSV

SEQ ID NO: 13347 - protein, 346 aa, Homo sapiens
MAASGKLSTCRLPPLPTIREIIKLLRLQAAKQLSQNFLLDLRLTDKIVRKAGNLTNAYVYEVGPGPGGITRSILNADVAELLVVEKDTRFIPGLQMLSDAAPGKLRIVHGDVLTFKVEKAFSESLKRPWEDDPPNVHIIGNLPFSVSTPLIIKWLENISCRDGPFVYGRTQMTLTFQKEVAERLAANTGSKQRSRLSVMAQYLCNVRHIFTIPGQAFVPKPEVDVGVVHFTPLIQPKIEQPFKLVEKVVQNVFQFRRKYCHRGLRMLFPEAQRLESTGRLLELADIDPTLRPRQLSISHFKSLCDVYRKMCDEDPQLFAYNFREELKRRKSKNEEKEEDDAENYRL

SEQ ID NO: 13348 - protein, 173 aa, Homo sapiens [sequence omitted]

SEQ ID NO: 13349 - protein, 184 aa, Homo sapiens
MAEPQPPSGGLTDEAALSCCSDADPSTKDFLLQQTMLRVKDPKKSLDFYTRVLGMTLIQKCDFPIMKFSLYFLAYEDKNDIPKEKDEKIAWALSRKATLELTHNWGTEDDETQSYHNGNSDPRGFGHIGIAVPDVYSACKRFEELGVKFVKKPDDGKMKGLAFIQDPDGYWIEILNPNKMATLM

SEQ ID NO: 13350 - protein, 184 aa, Homo sapiens; identical to SEQ ID NO: 13349

SEQ ID NO: 13351 - protein, 224 aa, Homo sapiens
MAQKEEAAVATEAASQNGEDLENLDDPEKLKELIELPPFEIVTGERLPANFFKFQFRNVEYSSGRNKTFLCYVVEAQGKGGQVQASRGYLEDEHAAAHAEEAFFNTILPAFDPALRYNVTWYVSSSPCAACADRIIKTLSKTKNLRLLILVGRLFMWEEPEIQAALKKLKEAGCKLRIMKPQDFEYVWQNFVEQEEGESKAFQPWEDIQENFLYYEEKLADILK

SEQ ID NO: 13352 - protein, 350 aa, Homo sapiens
MKCSLRVWFLSVAFLLVFIMSLLFTYSHHSMATLPYLDSGALDGTHRVKLVPGYAGLQRLSKERLSGKSCACRRCMGDAGASDWFDSHFDGNISPVWTRENMDLPPDVQRWWMMLQPQFKSHNTNEVLEKLFQIVPGENPYRFRDPHQCRRCAVVGNSGNLRGSGYGQDVDGHNFIMRMNQAPTVGFEQDVGSRTTHHFMYPESAKNLPANVSFVLVPFKVLDLLWIASALSTGQIRFTYAPVKSFLRVDKEKVQIYNPAFFKYIHDRWTEHHGRYPSTGMLVLFFALHVCDEVNVYGFGADSRGNWHHYWENNRYAGEFRKTGVHDADFEAHIIDMLAKASKIEVYRGN

SEQ ID NO: 13353 - protein, 350 aa, Homo sapiens; identical to SEQ ID NO: 13352

SEQ ID NO: 13354 - protein, 350 aa, Homo sapiens; identical to SEQ ID NO: 13352

SEQ ID NO: 13355 - protein, 350 aa, Homo sapiens; identical to SEQ ID NO: 13352

SEQ ID NO: 13356 - protein, 350 aa, Homo sapiens; identical to SEQ ID NO: 13352

SEQ ID NO: 13357 - protein, 870 aa, Homo sapiens
MASASSSRAGVALPFEKSQLTLKVVSAKPKVHNRQPRINSYVEVAVDGLPSETKKTGKRIGSSELLWNEIIILNVTAQSHLDLKVWSCHTLRNELLGTASVNLSNVLKNNGGKMENMQLTLNLQTENKGSVVSGGELTIFLDGPTVDLGNVPNGSALTDGSQLPSRDSSGTAVAPENRHQPPSTNCFGGRSRTHRHSGASARTTPATGEQSPGARSRHRQPVKNSGHSGLANGTVNDEPTTATDPEEPSVVGVTSPPAAPLSVTPNPNTTSLPAPATPAEGEEPSTSGTQQLPAAAQAPDALPAGWEQRELPNGRVYYVDHNTKTTTWERPLPPGWEKRTDPRGRFYYVDHNTRTTTWQRPTAEYVRNYEQWQSQRNQLQGAMQHFSQRFLYQSSSASTDHDPLGPLPPGWEKRQDNGRVYYVNHNTRTTQWEDPRTQGMIQEPALPPGWEMKYTSEGVRYFVDHNTRTTTFKDPRPGFESGTKQGSPGAYDRSFRWKYHQFRFLCHSNALPSHVKISVSRQTLFEDSFQQIMNMKPYDLRRRLYIIMRGEEGLDYGGIAREWFFLLSHEVLNPMYCLFEYAGKNNYCLQINPASSINPDHLTYFRFIGRFIAMALYHGKFIDTGFTLPFYKRMLNKRPTLKDLESIDPEFYNSIVWIKENNLEECGLELYFIQDMEILGKVTTHELKEGGESIRVTEENKEEYIMLLTDWRFTRGVEEQTKAFLDGFNEVAPLEWLRYFDEKELELMLCGMQEIDMSDWQKSTIYRHYTKNSKQIQWFWQVVKEMDNEKRIRLLQFVTGTCRLPVGGFAELIGSNGPQKFCIDKVGKETWLPRSHTCFNRLDLPPYKSYEQLREKLLYAIEETEGFGQE

SEQ ID NO: 13358 - protein, 870 aa, Homo sapiens; identical to SEQ ID NO: 13357

SEQ ID NO: 13359 - protein, 895 aa, Homo sapiens
MASASSSRAGVALPFEKSQLTLKVVSAKPKVHNRQPRINSYVEVAVDGLPSETKKTGKRIGSSELLWNEIIILNVTAQSHLDLKVWSCHTLRNELLGTASVNLSNVLKNNGGKMENMQLTLNLQTENKGSVVSGGELTIFLDGPTVDLGNVPNGSALTDGSQLPSRDSSGTAVAPENRHQPPSTNCFGGRSRTHRHSGASARTTPATGEQSPGARSRHRQPVKNSGHSGLANGTVNDEPTTATDPEEPSVVGVTSPPAAPLSVTPNPNTTSLPAPATPAEGEEPSTSGTQQLPAAAQAPDALPAGWEQRELPNGRVYYVDHNTKTTTWERPLPPGWEKRTDPRGRFYYVDHNTRTTTWQRPTAEYVRNYEQWQSQRNQLQGAMQHFSQRFLYQSSSASTDHDPLGPLPPGWEKRQDNGRVYYVNHNTRTTQWEDPRTQGMIQEPALPPGWEMKYTSEGVRYFVDHNTRTTTFKDPRPGFESGTKQGSPGAYDRSFRWKYHQFRFLCHSNALPSHVKISVSRQTLFEDSFQQIMNMKPYDLRRRLYIIMRGEEGLDYGGIAREWFFLLSHEVLNPMYCLFEYAGKNNYCLQINPASSINPDHLTYFRFIGRFIAMALYHGKFIDTGFTLPFYKRMLNKRPTLKDLESIDPEFYNSIVWIKENNLEECGLELYFIQDMEILGKVTTHELKEGGESIRVTEENKEEYIMLLTDWRFTRGVEEQTKAFLDGFNEVAPLEWLRYFDEKELELMLCGMQEIDMSDWQKSTIYRHYTKNSKQIQWFWQVVKEMDNEKRIRLLQFVTGTCRLPVGGFAELIGSNGPQKFCIDKVGKETWLPRSHTCFNRLDLPPYKSYEQLREKLLYAIEETEGFGQEGCRRGRRPPGLVRRGDWPLGVAVRD

SEQ ID NO: 13360 - protein, 870 aa, Homo sapiens; identical to SEQ ID NO: 13357

SEQ ID NO: 13361 - protein, 438 aa, Homo sapiens
MVQWKRLCQLHYLWALGCYMLLATVALKLSFRLKCDSDHLGLESRESQSQYCRNILYNFLKLPAKRSINCSGVTRGDQEAVLQAILNNLEVKKKREPFTDTHYLSLTRDCEHFKAERKFIQFPLSKEEVEFPIAYSMVIHEKIENFERLLRAVYAPQNIYCVHVDEKSPETFKEAVKAIISCFPNVFIASKLVRVVYASWSRVQADLNCMEDLLQSSVPWKYFLNTCGTDFPIKSNAEMVQALKMLNGRNSMESEVPPKHKETRWKYHFEVVRDTLHLTNKKKDPPPYNLTMFTGNAYIVASRDFVQHVLKNPKSQQLIEWVKDTYSPDEHLWATLQRARWMPGSVPNHPKYDISDMTSIARLVKWQGHEGDIDKGAPYAPCSGIHQRAICVYGAGDLNWMLQNHHLLANKFDPKVDDNALQCLEEYLRYKAIYGTEL

SEQ ID NO: 13362 - protein, 438 aa, Homo sapiens; identical to SEQ ID NO: 13361

SEQ ID NO: 13363 - protein, 375 aa, Homo sapiens [sequence omitted]

SEQ ID NO: 13364 - protein, 311 aa, Homo sapiens
MQNYKYDKAIVPESKNGGSPALNNNPRRSGSKRVLLICLDLFCLFMAGLPFLIIETSTIKPYHRGFYCNDESIKYPLKTGETINDAVLCAVGIVIAILAIITGEFYRIYYLKKSRSTIQNPYVAALYKQVGCFLFGCAISQSFTDIAKVSIGRLRPHFLSVCNPDFSQINCSEGYIQNYRCRGDDSKVQEARKSFFSGHASFSMYTMLYLVLYLQARFTWRGARLLRPLLQFTLIMMAFYTGLSRVSDHKHHPSDVLAGFAQGALVACCIVFFVSDLFKTKTTLSLPAPAIRKEILSPVDIIDRNNHHNMM

SEQ ID NO: 13365 - protein, 311 aa, Homo sapiens; identical to SEQ ID NO: 13364

SEQ ID NO: 13366 - protein, 311 aa, Homo sapiens; identical to SEQ ID NO: 13364

SEQ ID NO: 13367 - protein, 311 aa, Homo sapiens; identical to SEQ ID NO: 13364

SEQ ID NO: 13368 - protein, 189 aa, Homo sapiens [sequence omitted]

SEQ ID NO: 13369 - protein, 313 aa, Homo sapiens
MAARRALHFVFKVGNRFQTARFYRDVLGMKVESCSVARLECSGAISAHCSDYTRITEDSFSKPYDGKWSKTMVGFGPEDDHFVAELTYNYGVGDYKLGNDFMGITLASSQAVSNARKLEWPLTEVAEGVFETEAPGGYKFYLQNRSLPQSDPVLKVTLAVSDLQKSLNYWCNLLGMKIYEKDEEKQRALLGYADNQCKLELQGVKGGVDHAAAFGRIAFSCPQKELPDLEDLMKRENQKILTPLVSLDTPGKATVQVVILADPDGHEICFVGDEAFRELSKMDPEGSKLLDDAMAADKSDEWFAKHNKPKASG

SEQ ID NO: 13370 - protein, 298 aa, Homo sapiens
MAARRALHFVFKVGNRFQTARFYRDVLGMKVLRHEEFEEGCKAACNGPYDGKWSKTMVGFGPEDDHFVAELTYNYGVGDYKLGNDFMGITLASSQAVSNARKLEWPLTEVAEGVFETEAPGGYKFYLQNRSLPQSDPVLKVTLAVSDLQKSLNYWCNLLGMKIYEKDEEKQRALLGYADNQCKLELQGVKGGVDHAAAFGRIAFSCPQKELPDLEDLMKRENQKILTPLVSLDTPGKATVQVVILADPDGHEICFVGDEAFRELSKMDPEGSKLLDDAMAADKSDEWFAKHNKPKASG

SEQ ID NO: 13371 - protein, 298 aa, Homo sapiens; identical to SEQ ID NO: 13370

SEQ ID NO: 13372 - protein, 416 aa, Homo sapiens
MRTPRAVVSLVAPGHWPQMVPCGAASQERASVPPPLRKETPLSLGSAAAPGPSASRQGPKPGPPAATVARQTSRVSPAPPCSLRPGLRHESAPSAASDVTARGALRGLGCTVRVTAACGGNHGCSQSSALRIQSGKPLPDGAFLSGRPGDEGSDYTRITEDSFSKPYDGKWSKTMVGFGPEDDHFVAELTYNYGVGDYKLGNDFMGITLASSQAVSNARKLEWPLTEVAEGVFETEAPGGYKFYLQNRSLPQSDPVLKVTLAVSDLQKSLNYWCNLLGMKIYEKDEEKQRALLGYADNQCKLELQGVKGGVDHAAAFGRIAFSCPQKELPDLEDLMKRENQKILTPLVSLDTPGKATVQVVILADPDGHEICFVGDEAFRELSKMDPEGSKLLDDAMAADKSDEWFAKHNKPKASG

SEQ ID NO: 13373 - protein, 298 aa, Homo sapiens; identical to SEQ ID NO: 13370

SEQ ID NO: 13374 - protein, 420 aa, Homo sapiens
MAALVRPARFVVRPLLQVVQAWDLDARRWVRALRRSPVKVVFPSGEVVEQKRAPGKQPRKAPSEASAQEQREKQPLEESASRAPSTWEESGLRYDKAYPGDRRLSSVMTIVKSRPFREKQGKILLEGRRLISDALKAGAVPKMFFFSRLEYLKELPVDKLKGVSLIKVKFEDIKDWSDLVTPQGIMGIFAKPDHVKMTYPKTQLQHSLPLLLICDNLRDPGNLGTILRSAAGAGCSKVLLTKGCVDAWEPKVLRAGMGAHFRMPIINNLEWETVPNYLPPDTRVYVADNCGLYAQAEMSNKASDHGWVCDQRVMKFHKYEEEEDVETGASQDWLPHVEVQSYDSDWTEAPAAVVIGGETYGVSLESLQLAESTGGKRLLIPVVPGVDSLNSAMAASILLFEGKRQLRGRAEDLSRDRSYH

SEQ ID NO: 13375 - protein, 477 aa, Homo sapiens
MKRKSERRSSWAAAPPCSRRCSSTSPGVKKIRSSTQQDPRRRDPQDDVYLDITDRLCFAILYSRPKSASNVHYFSIDNELEYENFYADFGPLNLAMVYRYCCKINKKLKSITMLRKKIVHFTGSDQRKQANAAFLVGCYMVIYLGRTPEEAYRILIFGETSYIPFRDAAYGSCNFYITLLDCFHAVKKAMQYGFLNFNSFNLDEYEHYEKAENGDLNWIIPDRFIAFCGPHSRARLESGYHQHSPETYIQYFKNHNVTTIIRLNKRMYDAKRFTDAGFDHHDLFFADGSTPTDAIVKEFLDICENAEGAIAVHCKAGLGRTGTLIACYIMKHYRMTAAETIAWVRICRPGSVIGPQQQFLVMKQTNLWLEGDYFRQKLKGQENGQHRAAFSKLLSGVDDISINGVENQDQQEPEPYSDDDEINGVTQGDRLRALKSRRQSKTNAIPLTCPLAVLTSALCSVVIWWIVCDYILPILLF

SEQ ID NO: 13376 - protein, 498 aa, Homo sapiens
MKRKSERRSSWAAAPPCSRRCSSTSPGVKKIRSSTQQDPRRRDPQDDVYLDITDRLCFAILYSRPKSASNVHYFSIDNELEYENFYADFGPLNLAMVYRYCCKINKKLKSITMLRKKIVHFTGSDQRKQANAAFLVGCYMVIYLGRTPEEAYRILIFGETSYIPFRDAAYGSCNFYITLLDCFHAVKKAMQYGFLNFNSFNLDEYEHYEKAENGDLNWIIPDRFIAFCGPHSRARLESGYHQHSPETYIQYFKNHNVTTIIRLNKRMYDAKRFTDAGFDHHDLFFADGSTPTDAIVKEFLDICENAEGAIAVHCKAGLGRTGTLIACYIMKHYRMTAAETIAWVRICRPGSVIGPQQQFLVMKQTNLWLEGDYFRQKLKGQENGQHRAAFSKLLSGVDDISINGVENQDQQEPEPYSDDDEINGVTQGDRLRALKSRRQSKTNAIPLTVILQSSVQSCKTSEPNISGSAGITKRTTRSASRKSSVKSLSISRTKTVLR

SEQ ID NO: 13377 - protein, 450 aa, Homo sapiens
MKRKSERRSSWAAAPPCSRRCSSTSPGVKKIRSSTQQDPRRRDPQDDVYLDITDRLCFAILYSRPKSASNVHYFSIDNELEYENFYADFGPLNLAMVYRYCCKINKKLKSITMLRKKIVHFTGSDQRKQANAAFLVGCYMVIYLGRTPEEAYRILIFGETSYIPFRDAAYGSCNFYITLLAMQYGFLNFNSFNLDEYEHYEKAENGDLNWIIPDRFIAFCGPHSRARLESGYHQHSPETYIQYFKNHNVTTIIRLNKRMYDAKRFTDAGFDHHDLFFADGSTPTDAIVKEFLDICENAEGAIAVHCKAGLGRTGTLIACYIMKHYRMTAAETIAWVRICRPGSVIGPQQQFLVMKQTNLWLEGDYFRQKLKGQENGQHRAAFSKLLSGVDDISINGVENQDQQEPEPYSDDDEINGVTQGDRLRALKSRRQSKTNAVVSPFQGLKQSCVK

SEQ ID NO: 13378 - protein, 459 aa, Homo sapiens
MKRKSERRSSWAAAPPCSRRCSSTSPGVKKIRSSTQQDPRRRDPQDDVYLDITDRLCFAILYSRPKSASNVHYFSIDNELEYENFYADFGPLNLAMVYRYCCKINKKLKSITMLRKKIVHFTGSDQRKQANAAFLVGCYMVIYLGRTPEEAYRILIFGETSYIPFRDAAYGSCNFYITLLDCFHAVKKAMQYGFLNFNSFNLDEYEHYEKAENGDLNWIIPDRFIAFCGPHSRARLESGYHQHSPETYIQYFKNHNVTTIIRLNKRMYDAKRFTDAGFDHHDLFFADGSTPTDAIVKEFLDICENAEGAIAVHCKAGLGRTGTLIACYIMKHYRMTAAETIAWVRICRPGSVIGPQQQFLVMKQTNLWLEGDYFRQKLKGQENGQHRAAFSKLLSGVDDISINGVENQDQQEPEPYSDDDEINGVTQGDRLRALKSRRQSKTNAIPLTLSISRTKTVLR

SEQ ID NO: 13379 - protein, 500 aa, Homo sapiens [sequence omitted]

SEQ ID NO: 13380 - protein, 471 aa, Homo sapiens
MKRKSERRSSWAAAPPCSRRCSSTSPGVKKIRSSTQQDPRRRDPQDDVYLDITDRLCFAILYSRPKSASNVHYFSIDNELEYENFYADFGPLNLAMVYRYCCKINKKLKSITMLRKKIVHFTGSDQRKQANAAFLVGCYMVIYLGRTPEEAYRILIFGETSYIPFRDAAYGSCNFYITLLDCFHAVKKAMQYGFLNFNSFNLDEYEHYEKAENGDLNWIIPDRFIAFCGPHSRARLESGYHQHSPETYIQYFKNHNVTTIIRLNKRMYDAKRFTDAGFDHHDLFFADGSTPTDAIVKEFLDICENAEGAIAVHCKAGLGRTGTLIACYIMKHYRMTAAETIAWVRICRPGSVIGPQQQFLVMKQTNLWLEGDYFRQKLKGQENGQHRAAFSKLLSGVDDISINGVENQDQQEPEPYSDDDEINGVTQGDRLRALKSRRQSKTNAIPLTDGWLSQAVTFLDRLLIWLGIHKD

SEQ ID NO: 13381 - protein, 471 aa, Homo sapiens; identical to SEQ ID NO: 13380

SEQ ID NO: 13382 - protein, 491 aa, Homo sapiens [sequence omitted]

SEQ ID NO: 13383 - protein, 275 aa, Homo sapiens
MLERAERRSYREYRPYETERQADFTAEKFPDEKPGDRFDRDRPLRGRGGPRGGMRGRGRGGPGNRVFDAFDQRGKREFERYGGNDKIAVRTEDNMGGCGVRTWGSGKDTSDVEPTAPMEEPTVVEESQGTPEEESPAKVPELEVEEETQVQEMTLDEWKNLQEQTRPKPEFNIRKPESTVPSKAVVIHKSKYRDDMVKDDYEDDSHVFRKPANDITSQLEINFGNLPRPGRGARGGTRGGRGRIRRAENYGPRAEVVMQDVAPNPDDPEDFPALS

SEQ ID NO: 13384 - protein, 413 aa, Homo sapiens
MKGALGSPVAAAGAAMQESFGCVVANRFHQLLDDESDPFDILREAERRRQQQLQRKRRDEAAAAAGAGPRGGRSPAGASGHRAGAGGRRESQKERKSLPAPVAQRPDSPGGGLQAPGQKRTPRRGEQQGWNDSRGPEGMLERAERRSYREYRPYETERQADFTAEKFPDEKPGDRFDRDRPLRGRGGPRGGMRGRGRGGPGNRVFDAFDQRGKREFERYGGNDKIAVRTEDNMGGCGVRTWGSGKDTSDVEPTAPMEEPTVVEESQGTPEEESPAKVPELEVEEETQVQEMTLDEWKNLQEQTRPKPEFNIRKPESTVPSKAVVIHKSKYRDDMVKDDYEDDSHVFRKPANDITSQLEINFGNLPRPGRGARGGTRGGRGRIRRAENYGPRAEVVMQDVAPNPDDPEDFPALS

SEQ ID NO: 13385 - protein, 308 aa, Homo sapiens
MKGALGSPVAAAGAAMQESFGCVVANRFHQLLDDESDPFDILREAERRRQQQLQRKRRDEAAAAAGAGPRGGRSPAGASGHRAGAGGRRESQKERKSLPAPVAQRPDSPGGGLQAPGQKRTPRRGEQQGWNDSRGPEGMLERAERRSYREYRPYETERQADFTAEKFPDEKVPELEVEEETQVQEMTLDEWKNLQEQTRPKPEFNIRKPESTVPSKAVVIHKSKYRDDMVKDDYEDDSHVFRKPANDITSQLEINFGNLPRPGRGARGGTRGGRGRIRRAENYGPRAEVVMQDVAPNPDDPEDFPALS

SEQ ID NO: 13386 - protein, 154 aa, Homo sapiens [sequence omitted]

SEQ ID NO: 13387 - protein, 154 aa, Homo sapiens [sequence omitted]

SEQ ID NO: 13388 - protein, 136 aa, Homo sapiens
MKNFRNIQVDEANLLTWQGLIVPDNPPYDKGAFRIEINFPAEYPFKPPKITFKTKIYHPNIDEKGQVCLPVISAENWKPATKTDQVIQSLIALVNDPQPEHPLRADLAEEYSKDRKKFCKNAEEFTKKYGEKRPVD

SEQ ID NO: 13389 - protein, 520 aa, Homo sapiens
MGKRQHQKDKMYITCAEYTHFYGGKKPDLPQTNFRRLPFDHCSLSLQPFVYPVCTPDGIVFDLLNIVPWLKKYGTNPSNGEKLDGRSLIKLNFSKNSEGKYHCPVLFTVFTNNTHIVAVRTTGNVYAYEAVEQLNIKAKNFRDLLTDEPFSRQDIITLQDPTNLDKFNVSNFYHVKNNMKIIDPDEEKAKQDPSYYLKNTNAETRETLQELYKEFKGDEILAATMKAPEKKKVDKLNAAHYSTGKVSASFTSTAMVPETTHEAAAIDEDVLRYQFVKKKGYVRLHTNKGDLNLELHCDLTPKTCENFIRLCKKHYYDGTIFHRSIRNFVIQGGDPTGTGTGGESYWGKPFKDEFRPNLSHTGRGILSMANSGPNSNRSQFFITFRSCAYLDKKHTIFGRVVGGFDVLTAMENVESDPKTDRPKEEIRIDATTVFVDPYEEADAQIAQERKTQLKVAPETKVKSSQPQAGSQGPQTFRQGVGKYINPAATKRAAEEEPSTSATVPMSKKKPSRGFGDFSSW

SEQ ID NO: 13390 - protein, 520 aa, Homo sapiens; identical to SEQ ID NO: 13389

SEQ ID NO: 13391 - protein, 554 aa, Homo sapiens
MGKRQHQKDKMYITCAEYTHFYGGKKPDLPQTNFRRLPFDHCSLSLQPFVYPVCTPDGIVFDLLNIVPWLKKYGTNPSNGEKLDGRSLIKLNFSKNSEGKYHCPVLFTVFTNNTHIVAVRTTGNVYAYEAVEQLNIKAKNFRDLLTDEPFSRQDIITLQDPTNLDKFNVSNFYHVKNNMKIIDPDEEKAKQDPSYYLKNTNAETRETLQELYKEFKGDEILAATMKAPEKKKVDKLNAAHYSTGKVSASFTSTAMVPETTHEAAAIDEDVLRYQFVKKKGYVRLHTNKGDLNLELHCDLTPKTCENFIRLCKKHYYDGTIFHRSIRNFVIQGGDPTGTGTGGESYWGKPFKDEFRPNLSHTGRGILSMANSGPNSNRSQFFITFRSCAYLDKKHTIFGRVVGGFDVLTAMENVESDPKTDRPKEEIRIDATTVFVDPYEEADAQIAQERKTQLKVAPETKVKSSQPQAGSQGPQTFRQGVGKYINPAATEQQRKSPQPVPLSPCPRRSPVGVLGTSAPGSSRLAAVDLGGVAGLGAHVHISISSLSSLPSAASQ

SEQ ID NO: 13392 - protein, 342 aa, Homo sapiens
MKIIDPDEEKAKQDPSYYLKNTNAETRETLQELYKEFKGDEILAATMKAPEKKKVDKLNAAHYSTGKVSASFTSTAMVPETTHEAAAIDEDVLRYQFVKKKGYVRLHTNKGDLNLELHCDLTPKTCENFIRLCKKHYYDGTIFHRSIRNFVIQGGDPTGTGTGGESYWGKPFKDEFRPNLSHTGRGILSMANSGPNSNRSQFFITFRSCAYLDKKHTIFGRVVGGFDVLTAMENVESDPKTDRPKEEIRIDATTVFVDPYEEADAQIAQERKTQLKVAPETKVKSSQPQAGSQGPQTFRQGVGKYINPAATKRAAEEEPSTSATVPMSKKKPSRGFGDFSSW

SEQ ID NO: 13393 - protein, 703 aa, Homo sapiens [sequence omitted]

SEQ ID NO: 13394 - protein, 937 aa, Homo sapiens [sequence omitted]

SEQ ID NO: 13395 - protein, 796 aa, Homo sapiens
MKLKKQVTVCGAAIFCVAVFSLYLMLDRVQHDPTRHQNGGNFPRSQISVLQNRIEQLEQLLEENHEIISHIKDSVLELTANAEGPPAMLPYYTVNGSWVVPPEPRPSFFSISPQDCQFALGGRGQKPELQMLTVSEELPFDNVDGGVWRQGFDISYDPHDWDAEDLQVFVVPHSHNDPGWIKTFDKYYTEQTQHILNSMVSKLQEDPRRRFLWAEVSFFAKWWDNINVQKRAAVRRLVGNGQLEIATGGWVMPDEANSHYFALIDQLIEGHQWLERNLGATPRSGWAVDPFGYSSTMPYLLRRANLTSMLIQRVHYAIKKHFAATHSLEFMWRQTWDSDSSTDIFCHMMPFYSYDVPHTCGPDPKICCQFDFKRLPGGRINCPWKVPPRAITEANVAERAALLLDQYRKKSQLFRSNVLLVPLGDDFRYDKPQEWDAQFFNYQRLFDFFNSRPNLHVQAQFGTLSDYFDALYKRTGVEPGARPPGFPVLSGDFFSYADREDHYWTGYYTSRPFYKSLDRVLEAHLRGAEVLYSLAAAHARRSGLAGRYPLSDFTLLTEARRTLGLFQHHDAITGTAKEAVVVDYGVRLLRSLVNLKQVIIHAAHYLVLGDKETYHFDPEAPFLQVDDTRLSHDALPERTVIQLDSSPRFVVLFNPLEQERFSMVSLLVNSPRVRVLSEEGQPLAVQISAHWSSATEAVPDVYQVSVPVRLPALGLGVLQLQLGLDGHRTLPSSVRIYLHGRQLSVSRHEAFPLRVIDSGTSDFALSNRYMQVWFSGLTGLLKGSGLCFLAEHPKGG

SEQ ID NO: 13396 - protein, 797 aa, Homo sapiens [sequence omitted]

SEQ ID NO: 13397 - protein, 1184 aa, Homo sapiens
MKLKKQVTVCGAAIFCVAVFSLYLMLDRVQHDPTRHQNGGNFPRSQISVLQNRIEQLEQLLEENHEIISHIKDSVLELTANAEGPPAMLPYYTVNGSWVVPPEPRPSFFSISPQDCQFALGGRGQKPELQMLTVSEELPFDNVDGGVWRQGFDISYDPHDWDAEDLQVFVVPHSHNDPGWIKTFDKYYTEQTQHILNSMVSKLQEDPRRRFLWAEVSFFAKWLVGNGQLEIATGGWVMPDEANSHYFALIDQLIEGHQWLERNLGATPRSGWAVDPFGYSSTMPYLLRRANLTSMLIQRVHYAIKKHFAATHSLEFMWRQTWDSDSSTDIFCHMMPFYSYDVPHTCGPDPKICCQFDFKRLPGGRINCPWKVPPRAITEANVAERAALLLDQYRKKSQLFRSNVLLVPLGDDFRYDKPQEWDAQFFNYQRLFDFFNSRPNLHVQAQFGTLSDYFDALYKRTGVEPGARPPGFPVLSGDFFSYADREDHYWTGYYTSRPFYKSLDRVLEAHLRGAEVLYSLAAAHARRSGLAGRYPLSDFTLLTEARRTLGLFQHHDAITGTAKEAVVVDYGVRLLRSLVNLKQVIIHAAHYLVLGDKETYHFDPEAPFLQVVGWEEAEPMMVLPFRLTEFQDDTRLSHDALPERTVIQLDSSPRFVVLFNPLEQERFSMVSLLVNSPRVRVLSEEGQPLAVQISAHWSSATEAVPDVYQVSVPVRLPALGLGVLQLQLGLDGHRTLPSSVRIYLHGRQLSVSRHEAFPLRVIDSGTSDFALSNRYMQVWFSGLTGLLKSIRRVDEEHEQQVDMQVLVYGTRTSKDKSGAYLFLPDGEAKPYVPKEPPVLRVTEGPFFSEVVAYYEHIHQAVRLYNLPGVEGLSLDISSLVDIRDYVNKELALHIHTDIDSQGIFFTDLNGFQVQPRRYLKKLPLQANFYPMPVMAYIQDAQKRLTLHTAQALGVSSLKDGQLEVILDRRLMQDDNRGLGQGLKDNKRTCNRFRLLLERRTVGSEVQDSHSTSYPSLLSHLTSMYLNAPALALPVARMQLPGPGLRSFHPLASSLPCDFHLLNLRTLQAEHCLWAEALLHLRSLKALRPLPWALSVIQEDTLPSAETALILHRKGFDCGLEAKNLGFNCTTSQGKVALGSLFHGLDVVFLQPTSLTLLYPLASPSNSTDVYLEPMEIATFRLRLG

SEQ ID NO: 13398 - protein, 1417 aa, Homo sapiens
MAAVPQNNLQEQLERHSARTLNNKLSLSKPKFSGFTFKKKTSSDNNVSVTNVSVAKTPVLRNKDVNVTEDFSFSEPLPNTTNQQRVKDFFKNAPAGQETQRGGSKSLLPDFLQTPKEVVCTTQNTPTVKKSRDTALKKLEFSSSPDSLSTINDWDDMDDFDTSETSKSFVTPPQSHFVRVSTAQKSKKGKRNFFKAQLYTTNTVKTDLPPPSSESEQIDLTEEQKDDSEWLSSDVICIDDGPIAEVHINEDAQESDSLKTHLEDERDNSEKKKNLEEAELHSTEKVPCIEFDDDDYDTDFVPPSPEEIISASSSSSKCLSTLKDLDTSDRKEDVLSTSKDLLSKPEKMSMQELNPETSTDCDARQISLQQQLIHVMEHICKLIDTIPDDKLKLLDCGNELLQQRNIRRKLLTEVDFNKSDASLLGSLWRYRPDSLDGPMEGDSCPTGNSMKELNFSHLPSNSVSPGDCLLTTTLGKTGFSATRKNLFERPLFNTHLQKSFVSSNWAETPRLGKKNESSYFPGNVLTSTAVKDQNKHTASINDLERETQPSYDIDNFDIDDFDDDDDWEDIMHNLAASKSSTAAYQPIKEGRPIKSVSERLSSAKTDCLPVSSTAQNINFSESIQNYTDKSAQNLASRNLKHERFQSLSFPHTKEMMKIFHKKFGLHNFRTNQLEAINAALLGEDCFILMPTGGGKSLCYQLPACVSPGVTVVISPLRSLIVDQVQKLTSLDIPATYLTGDKTDSEATNIYLQLSKKDPIIKLLYVTPEKICASNRLISTLENLYERKLLARFVIDEAHCVSQWGHDFRQDYKRMNMLRQKFPSVPVMALTATANPRVQKDILTQLKILRPQVFSMSFNRHNLKYYVLPKKPKKVAFDCLEWIRKHHPYDSGIIYCLSRRECDTMADTLQRDGLAALAYHAGLSDSARDEVQQKWINQDGCQVICATIAFGMGIDKPDVRFVIHASLPKSVEGYYQESGRAGRDGEISHCLLFYTYHDVTRLKRLIMMEKDGNHHTRETHFNNLYSMVHYCENITECRRIQLLAYFGENGFNPDFCKKHPDVSCDNCCKTKDYKTRDVTDDVKSIVRFVQEHSSSQGMRNIKHVGPSGRFTMNMLVDIFLGSKSAKIQSGIFGKGSAYSRHNAERLFKKLILDKILDEDLYINANDQAIAYVMLGNKAQTVLNGNLKVDFMETENSSSVKKQKALVAKVSQREEMVKKCLGELTEVCKSLGKVFGVHYFNIFNTVTLKKLAESLSSDPEVLLQIDGVTEDKLEKYGAEVISVLQKYSEWTSPAEDSSPGISLSSSRGPGRSAAEELDEEIPVSSHYFASKTRNERKRKKMPASQRSKRRKTASSGSKAKGGSATCRKISSKTKSSSIIGSSSASHTSQATSGANSKLGIMAPPKPINRPFLKPSYAFS

SEQ ID NO: 13399 - protein, 1392 aa, Homo sapiens
MAAVPQNNLQEQLERHSARTLNNKLSLSKPKFSGFTFKKKTSSDNNVSVTNVSVAKTPVLRNKDVNVTEDFSFSEPLPNTTNQQRVKDFFKNAPAGQETQRGGSKSLLPDFLQTPKEVVCTTQNTPTVKKSRDTALKKLEFSSSPDSLSTINDWDDMDDFDTSETSKSFVTPPQSHFVRVSTAQKSKKGKRNFFKAQLYTTNTVKTDLPPPSSESEQIDLTEEQKDDSEWLSSDVICIDDGPIAEVHINEDAQESDSLKTHLEDERVVNKSMFINCFTVDNSEKKKNLEEAELHSTEKVPCIEFDDDDYDTDFVPPSPEEIISASSSSSKCLSTLKDLDTSDRKEDVLSTSKDLLSKPEKMSMQELNPETSTDCDARQISLQQQLIHVMEHICKLIDTIPDDKLKLLDCGNELLQQRNIRRKLLTEVDFNKSDASLLGSLWRYRPDSLDGPMEGDSCPTGNSMKELNFSHLPSNSVSPGDCLLTTTLGKTGFSATRKNLFERPLFNTHLQKSFVSSNWAETPRLGKKNESSYFPGNVLTSTAVKDQNKHTASINDLERETQPSYDIDNFDIDDFDDDDDWEDIMHNLAASKSSTAAYQPIKEGRPIKSVSERLSSAKTDCLPVSSTAQNINFSESIQNYTDKSAQNLASRNLKHERFQSLSFPHTKEMMKIFHKKFGLHNFRTNQLEAINAALLGEDCFILMPTGGGKSLCYQLPACVSPGVTVVISPLRSLIVDQVQKLTSLDICASNRLISTLENLYERKLLARFVIDEAHCVSQWGHDFRQDYKRMNMLRQKFPSVPVMALTATANPRVQKDILTQLKILRPQVFSMSFNRHNLKYYVLPKKPKKVAFDCLEWIRKHHPYDSGIIYCLSRRECDTMADTLQRDGLAALAYHAGLSDSARDEVQQKWINQDGCQVICATIAFGMGIDKPDVRFVIHASLPKSVEGYYQESGRAGRDGEISHCLLFYTYHDVTRLKRLIMMEKDGNHHTRETHFNNLYSMVHYCENITECRRIQLLAYFGENGFNPDFCKKHPDVSCDNCCKTKDYKTRDVTDDVKSIVRFVQEHSSSQGMRNIKHVGPSGRFTMNMLVDIFLGSKSAKIQSGIFGKGSAYSRHNAERLFKKLILDKILDEDLYINANDQAIAYVMLGNKAQTVLNGNLKVDFMETENSSSVKKQKALVAKVSQREEMVKKCLGELTEVCKSLGKVFGVHYFNIFNTVTLKKLAESLSSDPEVLLQIDGVTEDKLEKYGAEVISVLQKYSEWTSPAEDSSPGISLSSSRGPGRSAAEELDEEIPVSSHYFASKTRNERKRKKMPASQRSKRRKTASSGSKAKGGSATCRKISSKTKSSSIIGSSSASHTSQATSGANSKLGIMAPPKPINRPFLKPSYAFS

SEQ ID NO: 13400 - protein, 148 aa, Homo sapiens
MTKALLIYLVSSFLALNQASLISRCDLAQVLQLEDLDGFEGYSLSDWLCLAFVESKFNISKINENADGSFDYGLFQINSHYWCNDYKSYSENLCHVDCQDLLNPNLLAGIHCAKRIVSGARGMNNWVEWRLHCSGRPLFYWLTGCRLR

SEQ ID NO: 13401 - protein, 968 aa, Homo sapiens
MDSTLTASEIRQRFIDFFKRNEHTYVHSSATIPLDDPTLLFANAGMNQFKPIFLNTIDPSHPMAKLSRAANTQKCIRAGGKHNDLDDVGKDVYHHTFFEMLGSWSFGDYFKELACKMALELLTQEFGIPIERLYVTYFGGDEAAGLEADLECKQIWQNLGLDDTKILPGNMKDNFWEMGDTGPCGPCSEIHYDRIGGRDAAHLVNQDDPNVLEIWNLVFIQYNREADGILKPLPKKSIDTGMGLERLVSVLQNKMSNYDTDLFVPYFEAIQKGTGARPYTGKVGAEDADGIDMAYRVLADHARTITVALADGGRPDNTGRGYVLRRILRRAVRYAHEKLNASRGFFATLVDVVVQSLGDAFPELKKDPDMVKDIINEEEVQFLKTLSRGRRILDRKIQSLGDSKTIPGDTAWLLYDTYGFPVDLTGLIAEEKGLVVDMDGFEEERKLAQLKSQGKGAGGEDLIMLDIYAIEELRARGLEVTDDSPKYNYHLDSSGSYVFENTVATVMALRREKMFVEEVSTGQECGVVLDKTCFYAEQGGQIYDEGYLVKVDDSSEDKTEFTVKNAQVRGGYVLHIGTIYGDLKVGDQVWLFIDEPRRRPIMSNHTATHILNFALRSVLGEADQKGSLVAPDRLRFDFTAKGAMSTQQIKKAEEIANEMIEAAKAVYTQDCPLAAAKAIQGLRAVFDETYPDPVRVVSIGVPVSELLDDPSGPAGSLTSVEFCGGTHLRNSSHAGAFVIVTEEAIAKGIRRIVAVTGAEAQKALRKAESLKKCLSVMEAKVKAQTAPNKDVQREIADLGEALATAVIPQWQKDELRETLKSLKKVMDDLDRASKADVQKRVLEKTKQFIDSNPNQPLVILEMESGASAKALNEALKLFKMHSPQTSAMLFTVDNEAGKITCLCQVPQNAANRGLKASEWVQQVSGLMDGKGGGKDVSAQATGKNVGCLQEALQLATSFAQLRLGDVKN

SEQ ID NO: 13402 - protein, 192 aa, Homo sapiens
MEAKVKAQTAPNKDVQREIADLGEALATAVIPQWQKDELRETLKSLKKVMDDLDRASKADVQKRVLEKTKQFIDSNPNQPLVILEMESGASAKALNEALKLFKMHSPQTSAMLFTVDNEAGKITCLCQVPQNAANRGLKASEWVQQVSGLMDGKGGGKDVSAQATGKNVGCLQEALQLATSFAQLRLGDVKN

SEQ ID NO: 13403 - protein, 651 aa, Homo sapiens
  VARIANT (1)...(651): Xaa = Any Amino Acid
MSAITVALLSLLFITSGTIENHKDLGGHFFSTTQSPPATQGSTAAQRSTATQHSTATQSSTATQTSPVPLTPESPLFQNFSGYHIGVGRADCTGQVADINLMGYGKSGQNAQGILTRLYSRAFIMAEPDGSNRTVFVSIDIGMVSQRLRLEVLNRLQSKYGSLYRRDNVILSGTHTHSGPAGYFQYTVFVIASEGFSNQTFQHMVTGILKSIDIAHTNMKPGKIFINKGNVDGVQINRSPYSYLQNPQSERARYSSNTDKEMIVLKMVDLNGDDLGLISWFAIHPVSMNNSNHLVNSDNVGYASYLLEQEKNKGYLPGQGPFVAAFASSNLGDVSPNILGPRCINTGESCDNANSTCPIGGPSMCIAKGPGQDMFDSTQIIGRAMYQRAKELYASASQEVTGPLASAHQWVDMTDVTVWLNSTHASKTCKPALGYSFAAGTIDGVGGLNFTQGKTEGDPFWDTIRDQILGKPSEEIKECHKPKPILLHTGELSKPHPWHPDIVDVQIITLGSLAITAIPGEFTTMSGRRLREAVQAEFASHGMQNMTVVISGLCNVYTHYITTYEEYQAQRYEAASTIYGPHTLSAYIQLFRNLAKAIATDTVANLSRGPEPPFFKQLIVPLIPSIVDRAPKGRTFGDVLQPAKPEYRVVX

SEQ ID NO: 13404 - protein, 550 aa, Homo sapiens
  VARIANT (1)...(550): Xaa = Any Amino Acid
MGYGKSGQNAQGILTRLYSRAFIMAEPDGSNRTVFVSIDIGMVSQRLRLEVLNRLQSKYGSLYRRDNVILSGTHTHSGPAGYFQYTVFVIASEGFSNQTFQHMVTGILKSIDIAHTNMKPGKIFINKGNVDGVQINRSPYSYLQNPQSERARYSSNTDKEMIVLKMVDLNGDDLGLISWFAIHPVSMNNSNHLVNSDNVGYASYLLEQEKNKGYLPGQGPFVAAFASSNLGDVSPNILGPRCINTGESCDNANSTCPIGGPSMCIAKGPGQDMFDSTQIIGRAMYQRAKELYASASQEVTGPLASAHQWVDMTDVTVWLNSTHASKTCKPALGYSFAAGTIDGVGGLNFTQGKTEGDPFWDTIRDQILGKPSEEIKECHKPKPILLHTGELSKPHPWHPDIVDVQIITLGSLAITAIPGEFTTMSGRRLREAVQAEFASHGMQNMTVVISGLCNVYTHYITTYEEYQAQRYEAASTIYGPHTLSAYIQLFRNLAKAIATDTVANLSRGPEPPFFKQLIVPLIPSIVDRAPKGRTFGDVLQPAKPEYRVVX

SEQ ID NO: 13405 - protein, 313 aa, Homo sapiens
MTSCHIAEEHIQKVAIFGGTHGNELTGVFLVKHWLENGAEIQRTGLEVKPFITNPRAVKKCTRYIDCDLNRIFDLENLGKKMSEDLPYEVRRAQEINHLFGPKDSEDSYDIIFDLHNTTSNMGCTLILEDSRNNFLIQMFHYIKTSLAPLPCYVYLIEHPSLKYATTRSIAKYPVGIEVGPQPQGVLRADILDQMRKMIKHALDFIHHFNEGKEFPPCAIEVYKIIEKVDYPRDENGEIAAIIHPNLQDQDWKPLHPGDPMFLTLDGKTIPLGGDCTVYPVFVNEAAYYEKKEAFAKTTKLTLNAKSIRCCLH

SEQ ID NO: 13406 - protein, 206 aa, Homo sapiens
MNLQAWERFFSLVAVEVWFTNWKRTRVAQLMVSGSAALPLPVLEKWKNITGHTLLERYGMTEIGMALSGPLTTAVRLPGCAGFVQCHRPQSPRNMDGMSKARLAEAAGCRQVRTERVTGSGLCPLFVPDIPCDGVIFCTHIQEPMSLPTVTRLVSDALPRSTVASSMALTREDGQCPPSLFYWNRYKAEKLKSGAAQGPLSTPRES

SEQ ID NO: 13407 - protein, 322 aa, Homo sapiens
MSFYRNYHAMTEFLEVSQLSFIPDLGRKGLEGMIRKRSGGHRVPGLTCCGRDQVCYRWSKRWLVVKDSFLLYMCLETGAISFVQLFDPGFEVQVGKRSTEARHGVRIDTSHRSLILKCSSYRQARWWAQEITELAQGPGRDFLQLHRHDSYAPPRPGTLARWFVNGAGYFAAVADAILRAQEEIFITDWWLSPEVYLKRPAHSDDWRLDIMLKRKAEEGVRVSILLFKEVELALGINSGYSKRALMLLHPNIKVMRHPDQVTLWAHHEKLLVVDQVVAFLGGLDLAYGRWDDLHYRLTDLGDSSESAASQCSSLWPWLCTAP

SEQ ID NO: 13408 - protein, 922 aa, Homo sapiens
MTATPESLFPTGDELDSSQLQMESDEVDTLKEGEDPADRMHPFLAIYELQSLKVHPLVFAPGVPVTAQVVGTERYTSGSKVGTCTLYSVRLTHGDFSWTTKKKYRHFQELHRDLLRHKVLMSLLPLARFAVAYSPARDAGNREMPSLPRAGPEGSTRHAASKQKYLENYLNRLLTMSFYRNYHAMTEFLEVSQLSFIPDLGRKGLEGMIRKRSGGHRVPGLTCCGRDQVCYRWSKRWLVVKDSFLLYMCLETGAISFVQLFDPGFEVQVGKRSTEARHGVRIDTSHRSLILKCSSYRQARWWAQEITELAQGPGRDFLQLHRHDSYAPPRPGTLARWFVNGAGYFAAVADAILRAQEEIFITDWWLSPEVYLKRPAHSDDWRLDIMLKRKAEEGVRVSILLFKEVELALGINSGYSKRALMLLHPNIKVMRHPDQVTLWAHHEKLLVVDQVVAFLGGLDLAYGRWDDLHYRLTDLGDSSESAASQPPTPRPDSPATPDLSHNQFFWLGKDYSNLITKDWVQLDRPFEDFIDRETTPRMPWRDVGVVVHGLPARDLARHFIQRWNFTKTTKAKYKTPTYPYLLPKSTSTANQLPFTLPGGQCTTVQVLRSVDRWSAGTLENSILNAYLHTIRESQHFLYIENQFFISCSDGRTVLNKVGDEIVDRILKAHKQGWCYRVYVLLPLLPGFEGDISTGGGNSIQAILHFTYRTLCRGEYSILHRLKAAMGTAWRDYISICGLRTHGELGGHPVSELIYIHSKVLIADDRTVIIGSANINDRSLLGKRDSELAVLIEDTETEPSLMNGAEYQAGSVILGANTRPDLDLRDPICDDFFQLWQDMAESNANIYEQIFRCLPSNATRSLRTLREYVAVEPLATVSPPLARSELTQVQGHLVHFPLKFLEDESLLPPLGSKEGMIPLEVWT

SEQ ID NO: 13409 - protein, 933 aa, Homo sapiens
MTATPESLFPTGDELDSSQLQMESDEVDTLKEGEDPADRMHPFLAIYELQSLKVHPLVFAPGVPVTAQVVGTERYTSGSKVGTCTLYSVRLTHGDFSWTTKKKYRHFQELHRDLLRHKVLMSLLPLARFAVAYSPARDAGNREMPSLPRAGPEGSTRHAASKQKYLENYLNRLLTMSFYRNYHAMTEFLEVSQLSFIPDLGRKGLEGMIRKRSGGHRVPGLTCCGRDQVCYRWSKRWLVVKDSFLLYMCLETGAISFVQLFDPGFEVQVGKRSTEARHGVRIDTSHRSLILKCSSYRQARWWAQEITELAQGPGRDFLQLHRHDSYAPPRPGTLARWFVNGAGYFAAVADAILRAQEEIFITDWWLSPEVYLKRPAHSDDWRLDIMLKRKAEEGVRVSILLFKEVELALGINSGYSKRALMLLHPNIKVMRHPDQVTLWAHHEKLLVVDQVVAFLGGLDLAYGRWDDLHYRLTDLGDSSESAASQPPTPRPDSPATPDLSHNQFFWLGKDYSNLITKDWVQLDRPFEDFIDRETTPRMPWRDVGVVVHGLPARDLARHFIQRWNFTKTTKAKYKTPTYPYLLPKSTSTANQLPFTLPGGQCTTVQVLRSVDRWSAGTLENSILNAYLHTIRESQHFLYIENQFFISCSDGRTVLNKVGDEIVDRILKAHKQGWCYRVYVLLPLLPGFEGDISTGGGNSIQAILHFTYRTLCRGEYSILHRLKAAMGTAWRDYISICGLRTHGELGGHPVSELIYIHSKVLIADDRTVIIGSANINDRSLLGKRDSELAVLIEDTETEPSLMNGAEYQAGRFALSLRKHCFGVILGANTRPDLDLRDPICDDFFQLWQDMAESNANIYEQIFRCLPSNATRSLRTLREYVAVEPLATVSPPLARSELTQVQGHLVHFPLKFLEDESLLPPLGSKEGMIPLEVWT

SEQ ID NO: 13410 - protein, 341 aa, Homo sapiens
MIELDGTENKSKFGANAILGVSLAVCKAGAAEKGVPLYRHIADLAGNPDLILPVPAFNVINGGSHAGNKLAMQEFMILPVGASSFKEAMRIGAEVYHHLKGVIKAKYGKDATNVGDEGGFAPNILENNEALELLKTAIQAAGYPDKVVIGMDVAASEFYRNGKYDLDFKSPDDPARHITGEKLGELYKSFIKNYPVVSIEDPFDQDDWATWTSFLSGVNIQIVGDDLTVTNPKRIAQAVEKKACNCLLLKVNQIGSVTESIQACKLAQSNGWGVMVSHRSGETEDTFIADLVVGLCTGQIKTGAPCRSERLAKYNQLMRIEEALGDKAIFAGRKFRNPKAK

SEQ ID NO: 13411 - protein, 434 aa, Homo sapiens
MAMQKIFAREILDSRGNPTVEVDLHTAKGRFRAAVPSGASTGIYEALELRDGDKGRYLGKGVLKAVENINNTLGPALLQKKLSVVDQEKVDKFMIELDGTENKSKFGANAILGVSLAVCKAGAAEKGVPLYRHIADLAGNPDLILPVPAFNVINGGSHAGNKLAMQEFMILPVGASSFKEAMRIGAEVYHHLKGVIKAKYGKDATNVGDEGGFAPNILENNEALELLKTAIQAAGYPDKVVIGMDVAASEFYRNGKYDLDFKSPDDPARHITGEKLGELYKSFIKNYPVVSIEDPFDQDDWATWTSFLSGVNIQIVGDDLTVTNPKRIAQAVEKKACNCLLLKVNQIGSVTESIQACKLAQSNGWGVMVSHRSGETEDTFIADLVVGLCTGQIKTGAPCRSERLAKYNQLMRIEEALGDKAIFAGRKFRNPKAK

SEQ ID NO: 13412 - protein, 317 aa, Homo sapiens
MAVMRTLRAMAMQKIFAREILDSRGNPTVEVDLHTAKGRFRAAVPSGASTGIYEALELRDGDKGRYLGKGVLKAVENINNTLGPALLQKKLSVVDQEKVDKFMIELDGTENKSKFGANAILGVSLAVCKAGAAEKGVPLYRHIADLAGNPDLILPVPAFNVINGGSHAGNKLAMQEFMILPVGASSFKEAMRIGAEVYHHLKGVIKAKYGKDATNVGDEGGFAPNILENNEALELLKTAIQAAGYPDKVVIGMDVAASEFYRNGKYDLDFKSPDDPARHITGEKLGELYKSFIKNYPGEAFGCPSVPARIPCSCLIY

SEQ ID NO: 13413 - protein, 341 aa, Homo sapiens; identical to SEQ ID NO: 13410

SEQ ID NO: 13414 - protein, 434 aa, Homo sapiens; identical to SEQ ID NO: 13411

SEQ ID NO: 13415 - protein, 434 aa, Homo sapiens; identical to SEQ ID NO: 13411

SEQ ID NO: 13416 - protein, 1061 aa, Homo sapiens [sequence omitted]

SEQ ID NO: 13417 - protein, 1493 aa, Homo sapiens
MPNEGIPHSSQTQEQDCLQSQPVSNNEEMAIKQESGGDGEVEEYLSFRSVGDGLSTSAVGCASAAPRRGPALLHIDRHQIQAVEPSAQALELQGLGVDVYDQDVLEQGVLQQVDNAIHEASRASQLVDVEKEYRSVLDDLTSCTTSLRQINKIIEQLSPQAATSRDINRKLDSVKRQKYNKEQQLKKITAKQKHLQAILGGAEVKIELDHASLEEDAEPGPSSLGSMLMPVQETAWEELIRTGQMTPFGTQIPQKQEKKPRKIMLNEASGFEKYLADQAKLSFERKKQGCNKRAARKAPAPVTPPAPVQNKNKPNKKARVLSKKEERLKKHIKKLQKRALQFQGKVGLPKARRPWESDMRPEAEGDSEGEESEYFPTEEEEEEEDDEVEGAEADLSGDGTDYELKPLPKGGKRQKKVPVQEIDDDFFPSSGEEAEAASVGEGGGGGRKVGRYRDDGDEDYYKQRLRRWNKLRLQDKEKRLKLEDDSEESDAEFDEGFKVPGFLFKKLFKYQQTGVRWLWELHCQQAGGILGDEMGLGKTIQIIAFLAGLSYSKIRTRGSNYRFEGLGPTVIVCPTTVMHQWVKEFHTWWPPFRVAILHETGSYTHKKEKLIRDVAHCHGILITSYSYIRLMQDDISRYDWHYVILDEGHKIRNPNAAVTLACKQFRTPHRIILSGSPMQNNLRELWSLFDFIFPGKLGTLPVFMEQFSVPITMGGYSNASPVQVKTAYKCACVLRDTINPYLLRRMKSDVKMSLSLPDKNEQVLFCRLTDEQHKVYQNFVDSKEVYRILNGEMQIFSGLIALRKICNHPDLFSGGPKNLKGLPDDELEEDQFGYWKRSGKMIVVESLLKIWHKQGQRVLLFSQSRQMLDILEVFLRAQKYTYLKMDGTTTIASRQPLITRYNEDTSIFVFLLTTRVGGLGVNLTGANRVVIYDPDWNPSTDTQARERAWRIGQKKQVTVYRLLTAGTIEEKIYHRQIFKQFLTNRVLKDPKQRRFFKSNDLYELFTLTSPDASQSTETSAIFAGTGSDVQTPKCHLKRRIQPAFGADHDVPKRKKFPASNISVNDATSSEEKSEAKGAEVNAVTSNRSDPLKDDPHMSSNVTSNDRLGEETNAVSGPEELSVISGNGECSNSSGTGKTSMPSGDESIDEKLGLSYKRERPSQAQTEAFWENKQMENNFYKHKSKTKHHSVAEEETLEKHLRPKQKPKNSKHCRDAKFEGTRIPHLVKKRRYQKQDSENKSEAKEQSNDDYVLEKLFKKSVGVHSVMKHDAIMDGASPDYVLVEAEANRVAQDALKALRLSRQRCLGAVSGVPTWTGHRGISGAPAGKKSRFGKKRNSNFSVQHPSSTSPTEKCQDGIMKKEGKDNVPEHFSGRAEDADSSSGPLASSSLLAKMRARNHLILPERLESESGHLQEASALLPTTEHDDLLVEMRNFIAFQAHTDGQASTREILQEFESKLSASQSCVFRELLRNLCTFHRTSGGEGIWKLKPEYC

SEQ ID NO: 13418 - protein, 1493 aa, Homo sapiens; identical to SEQ ID NO: 13417

SEQ ID NO: 13419 - protein, 563 aa, Homo sapiens
MTGRDRVAGGGACSRVAVVWGFSRVWTCRWEQGERGQSGDIAKPRQIFKQFLTNRVLKDPKQRRFFKSNDLYELFTLTSPDASQSTETSAIFAGTGSDVQTPKCHLKRRIQPAFGADHDVPKRKKFPASNISVNDATSSEEKSEAKGAEVNAVTSNRSDPLKDDPHMSSNVTSNDRLGEETNAVSGPEELSVISGNGECSNSSGTGKTSMPSGDESIDEKLGLSYKRERPSQAQTEAFWENKQMENNFYKHKSKTKHHSVAEEETLEKHLRPKQKPKNSKHCRDAKFEGTRIPHLVKKRRYQKQDSENKSEAKEQSNDDYVLEKLFKKSVGVHSVMKHDAIMDGASPDYVLVEAEANRVAQDALKALRLSRQRCLGAVSGVPTWTGHRGISGAPAGKKSRFGKKRNSNFSVQHPSSTSPTEKCQDGIMKKEGKDNVPEHFSGRAEDADSSSGPLASSSLLAKMRARNHLILPERLESESGHLQEASALLPTTEHDDLLVEMRNFIAFQAHTDGQASTREILQEFESKLSASQSCVFRELLRNLCTFHRTSGGEGIWKLKPEYC

SEQ ID NO: 13420 - protein, 1356 aa, Homo sapiens [sequence omitted]

SEQ ID NO: 13421 - protein, 959 aa, Homo sapiens
MEEMYFAWLENPQSVHKSWDSFFREASEEAFSGSAQPRPPSVVHESRSAVSSRTKTSKLVEDHLAVQSLIRAYQIRGHHVAQLDPLGILDADLDSFVPSDLITTIDKLAFYDLQEADLDKEFQLPTTTFIGGSENTLSLREIIRRLENTYCQHIGLEFMFINDVEQCQWIRQKFETPGVMQFSSEEKRTLLARLVRSMRFEDFLARKWSSEKRFGLEGCEVMIPALKTIIDKSSEMGIENVILGMPHRGRLNVLANVIRKDLEQIFCQFDPKLEAADEGSGDVKYHLGMYHERINRVTNRNITLSLVANPSHLEAVDPVVQGKTKAEQFYRGDAQGKKVMSILVHGDAAFAGQGVVYETFHLSDLPSYTTNGTVHVVVNNQIGFTTDPRMARSSPYPTDVARVVNAPIFHVNADDPEAVIYVCSVAAEWRNTFNKDVVVDLVCYRRRGHNEMDEPMFTQPLMYKQIHRQVPVLKKYADKLIAEGTVTLQEFEEEIAKYDRICEEAYGRSKDKKILHIKHWLDSPWPGFFNVDGEPKSMTCPATGIPEDMLTHIGSVASSVPLEDFKIHTGLSRILRGRADMTKNRTVDWALAEYMAFGSLLKEGIHVRLSGQDVERGTFSHRHHVLHDQEVDRRTCVPMNHLWPDQAPYTVCNSSLSEYGVLGFELGYAMASPNALVLWEAQFGDFHNTAQCIIDQFISTGQAKWVRHNGIVLLLPHGMEGMGPEHSSARPERFLQMSNDDSDAYPAFTKDFEVSQLYDCNWIVVNCSTPANYFHVLRRQILLPFRKPLIIFTPKSLLRHPEAKSSFDQMVSGTSFQRVIPEDGAAARAPEQVQRLIFCTGKVYYDLVKERSSQDLEEKVAITRLEQISPFPFDLIKQEAEKYPGAELAWCQEEHKNMGYYDYISPRFMTILRRARPIWYVGRDPAAAPATGNRNTHLVSLKKFLDTAFNLQAFEGKTF

SEQ ID NO: 13422 - protein, 1010 aa, Homo sapiens
MSQLRLLPSRLGVQAARLLAAHDVPVFGWRSRSSGPPATFPSSKGGGGSSYMEEMYFAWLENPQSVHKSWDSFFREASEEAFSGSAQPRPPSVVHESRSAVSSRTKTSKLVEDHLAVQSLIRAYQIRGHHVAQLDPLGILDADLDSFVPSDLITTIDKLAFYDLQEADLDKEFQLPTTTFIGGSENTLSLREIIRRLENTYCQHIGLEFMFINDVEQCQWIRQKFETPGVMQFSSEEKRTLLARLVRSMRFEDFLARKWSSEKRFGLEGCEVMIPALKTIIDKSSEMGIENVILGMPHRGRLNVLANVIRKDLEQIFCQFDPKLEAADEGSGDVKYHLGMYHERINRVTNRNITLSLVANPSHLEAVDPVVQGKTKAEQFYRGDAQGKKVMSILVHGDAAFAGQGVVYETFHLSDLPSYTTNGTVHVVVNNQIGFTTDPRMARSSPYPTDVARVVNAPIFHVNADDPEAVIYVCSVAAEWRNTFNKDVVVDLVCYRRRGHNEMDEPMFTQPLMYKQIHRQVPVLKKYADKLIAEGTVTLQEFEEEIAKYDRICEEAYGRSKDKKILHIKHWLDSPWPGFFNVDGEPKSMTCPATGIPEDMLTHIGSVASSVPLEDFKIHTGLSRILRGRADMTKNRTVDWALAEYMAFGSLLKEGIHVRLSGQDVERGTFSHRHHVLHDQEVDRRTCVPMNHLWPDQAPYTVCNSSLSEYGVLGFELGYAMASPNALVLWEAQFGDFHNTAQCIIDQFISTGQAKWVRHNGIVLLLPHGMEGMGPEHSSARPERFLQMSNDDSDAYPAFTKDFEVSQLYDCNWIVVNCSTPANYFHVLRRQILLPFRKPLIIFTPKSLLRHPEAKSSFDQMVSGTSFQRVIPEDGAAARAPEQVQRLIFCTGKVYYDLVKERSSQDLEEKVAITRLEQISPFPFDLIKQEAEKYPGAELAWCQEEHKNMGYYDYISPRFMTILRRARPIWYVGRDPAAAPATGNRNTHLVSLKKFLDTAFNLQAFEGKTF

SEQ ID NO: 13423 - protein, 801 aa, Homo sapiens
MFINDVEQCQWIRQKFETPGVMQFSSEEKRTLLARLVRSMRFEDFLARKWSSEKRFGLEGCEVMIPALKTIIDKSSEMGIENVILGMPHRGRLNVLANVIRKDLEQIFCQFDPKLEAADEGSGDVKYHLGMYHERINRVTNRNITLSLVANPSHLEAVDPVVQGKTKAEQFYRGDAQGKKVMSILVHGDAAFAGQGVVYETFHLSDLPSYTTNGTVHVVVNNQIGFTTDPRMARSSPYPTDVARVVNAPIFHVNADDPEAVIYVCSVAAEWRNTFNKDVVVDLVCYRRRGHNEMDEPMFTQPLMYKQIHRQVPVLKKYADKLIAEGTVTLQEFEEEIAKYDRICEEAYGRSKDKKILHIKHWLDSPWPGFFNVDGEPKSMTCPATGIPEDMLTHIGSVASSVPLEDFKIHTGLSRILRGRADMTKNRTVDWALAEYMAFGSLLKEGIHVRLSGQDVERGTFSHRHHVLHDQEVDRRTCVPMNHLWPDQAPYTVCNSSLSEYGVLGFELGYAMASPNALVLWEAQFGDFHNTAQCIIDQFISTGQAKWVRHNGIVLLLPHGMEGMGPEHSSARPERFLQMSNDDSDAYPAFTKDFEVSQLYDCNWIVVNCSTPANYFHVLRRQILLPFRKPLIIFTPKSLLRHPEAKSSFDQMVSGTSFQRVIPEDGAAARAPEQVQRLIFCTGKVYYDLVKERSSQDLEEKVAITRLEQISPFPFDLIKQEAEKYPGAELAWCQEEHKNMGYYDYISPRFMTILRRARPIWYVGRDPAAAPATGNRNTHLVSLKKFLDTAFNLQAFEGKTF

SEQ ID NO: 13424 - protein, 268 aa, Homo sapiens [sequence omitted]

SEQ ID NO: 13425 - protein, 323 aa, Homo sapiens
MKSALFTRFFILLPWILIVIIMLDVDTRRPVPPLTPRPYFSPYAVGRGGARLPLRRGGPAHGTQKRNQSRPQPQPEPQLPTIYAITPTYSRPVQKAELTRLANTFRQVAQLHWILVEDAAARSELVSRFLARAGLPSTHLHVPTPRRYKRPGLPRATEQRNAGLAWLRQRHQHQRAQPGVLFFADDDNTYSLELFQEMRTTRKVSVWPVGLVGGRRYERPLVENGKVVGWYTGWRADRPFAIDMAGFAVSLQVILSNPKAVFKRRGSQPGMQESDFLKQITTVEELEPKANNCTKVLVWHTRTEKVNLANEPKYHLDTVKIEV

SEQ ID NO: 13426 - protein, 440 aa, Homo sapiens
MATRSCREKAQKLNEQHQLILSKLLREEDNKYCADCEAKGPRWASWNIGVFICIRCAGIHRNLGVHISRVKSVNLDQWTAEQIQCMQDMGNTKARLLYEANLPENFRRPQTDQAVEFFIRDKYEKKKYYDKNAIAITNKEKEKKKEEKKREKEPEKPAKPLTAEKLQKKDQQLEPKKSTSPKKAAEPTVDLLGLDGPAVAPVTNGNTTVPPLNDDLDIFGPMISNPLPATVMPPAQGTPSAPAAATLSTVTSGDLDLFTEQTTKSEEVAKKQLSKDSILSLYGTGTIQQQSTPGVFMGPTNIPFTSQAPAAFQGFPSMGVPVPAAPGLIGNVMGQSPSMMVGMPMPNGFMGNAQTGVMPLPQNVVGPQGGMVGQMGAPQSKFGLPQAQQPQWSLSQMNQQMAGMSISSATPTAGFGQPSSTTAGWSGSSSGQTLSTQLWK

SEQ ID NO: 13427 - protein, 463 aa, Homo sapiens [sequence omitted]

SEQ ID NO: 13428 - protein, 360 aa, Homo sapiens [sequence omitted]

SEQ ID NO: 13429 - protein, 467 aa, Homo sapiens
MATRSCREKAQKLNEQHQLILSKLLREEDNKYCADCEAKGPRWASWNIGVFICIRCAGIHRNLGVHISRVKSVNLDQWTAEQIQCMQDMGNTKARLLYEANLPENFRRPQTDQAVEFFIRDKYEKKKYYDKNAIAITNISSSDAPLQPLVSSPSLQAAVDKNKLEKEKEKKKEEKKREKEPEKPAKPLTAEKLQKKDQQLEPKKSTSPKKAAEPTVDLLGLDGPAVAPVTNGNTTVPPLNDDLDIFGPMISNPLPATVMPPAQGTPSAPAAATLSTVTSGDLDLFTEQTTKSEEVAKKQLSKDSILSLYGTGTIQQQSTPGVFMGPTNIPFTSQAPAAFQGFPSMGVPVPAAPGLIGNVMGQSPSMMVGMPMPNGFMGNAQTGVMPLPQNVVGPQGGMVGQMGAPQSKFGLPQAQQPQWSLSQMNQQMAGMSISSATPTAGFGQPSSTTAGWSGSSSGQTLSTQLWK

SEQ ID NO: 13430 - protein, 436 aa, Homo sapiens [sequence omitted]

SEQ ID NO: 13431 - protein, 284 aa, Homo sapiens
MNLPTVSALRKMGVNLTRSNKETVKHSDVLFLAVKPHIIPFILDEIGADVQARHIVVSCAAGVTISSVEKKLMAFQPAPKVIRCMTNTPVVVQEGATVYATGTHALVEDGQLLEQLMSSVGFCTEVEEDLIDAVTGLSGSGPAYAFMALDALADGGVKMGLPRRLAIQLGAQALLGAAKMLLDSEQHPCQLKDNVCSPGGATIHALHFLESGGFRSLLINAVEASCIRTRELQSMADQEKISPAALKKTLLDRVKLESPTVSTLTPSSPGKLLTRSLALGGKKD

SEQ ID NO: 13432 - protein, 284 aa, Homo sapiens; identical to SEQ ID NO: 13431

SEQ ID NO: 13433 - protein, 320 aa, Homo sapiens
MSVGFIGAGQLAYALARGFTAAGILSAHKIIASSPEMNLPTVSALRKMGVNLTRSNKETVKHSDVLFLAVKPHIIPFILDEIGADVQARHIVVSCAAGVTISSVEKKLMAFQPAPKVIRCMTNTPVVVQEGATVYATGTHALVEDGQLLEQLMSSVGFCTEVEEDLIDAVTGLSGSGPAYAFMALDALADGGVKMGLPRRLAIQLGAQALLGAAKMLLDSEQHPCQLKDNVCSPGGATIHALHFLESGGFRSLLINAVEASCIRTRELQSMADQEKISPAALKKTLLDRVKLESPTVSTLTPSSPGKLLTRSLALGGKKD

SEQ ID NO: 13434 - protein, 284 aa, Homo sapiens; identical to SEQ ID NO: 13431

SEQ ID NO: 13435 - protein, 757 aa, Homo sapiens
MSRKISKESKKVNISSSLESEDISLETTVPTDDISSSEEREGKVRITRQLIERKELLHNIQLLKIELSQKTMMIDNLKVDYLTKIEELEEKLNDALHQKQLLTLRLDNQLAFQQKDASKYQELMKQEMETILLRQKQLEETNLQLREKAGDVRRNLRDFELTEEQYIKLKAFPEDQLSIPEYVSVRFYELVNPLRKEICELQVKKNILAEELSTNKNQLKQLTETYEEDRKNYSEVQIRCQRLALELADTKQLIQQGDYRQENYDKVKSERDALEQEVIELRRKHEILEASHMIQTKERSELSKEVVTLEQTVTLLQKDKEYLNRQNMELSVRCAHEEDRLERLQAQLEESKKAREEMYEKYVASRDHYKTEYENKLHDELEQIRLKTNQEIDQLRNASREMYERENRNLREARDNAVAEKERAVMAEKDALEKHDQLLDRYRELQLSTESKVTEFLHQSKLKSFESERVQLLQEETARNLTQCQLECEKYQKKLEVLTKEFYSLQASSEKRITELQAQNSEHQARLDIYEKLEKELDEIIMQTAEIENEDEAERVLFSYGYGANVPTTAKRRLKQSVHLARRVLQLEKQNSLILKDLEHRKDQVTQLSQELDRANSLLNQTQQPYRYLIESVRQRDSKIDSLTESIAQLEKDVSNLNKEKSALLQTKNQMALDLEQLLNHREELAAMKQILVKMHSKHSENSLLLTKTEPKHVTENQKSKTLNVPKEHEDNIFTPKPTLFTKKEAPEWSKKQKMKT

SEQ ID NO: 13436 - protein, 400 aa, Homo sapiens
MSRKISKESKKVNISSSLESEDISLETTVPTDDISSSEEREGKVRITRQLIERKELLHNIQLLKIELSQKTMMIDNLKVDYLTKIEELEEKLNDALHQKQLLTLRLDNQLAFQQKDASKYQELMKQEMETILLRQKQLEETNLQLREKAGDVRRNLRDFELTEEQYIKLKAFPEDQLSIPEYVSVRFYELVNPLRKEICELQVKKNILAEELSTNKNQLKQLTETYEEDRKNYSEVQIRCQRLALELADTKQLIQQGDYRQENYDKVKSERDALEQEVIELRRKHEILEASHMIQTKERSELSKEVVTLEQTVTLLQKDKEYLNRQNMELSVRCAHEEDRLERLQAQLEESKKAREEIDHYKTEYENKLHDELEQIRLKTNQEIDQLRNASREMYERENR

SEQ ID NO: 13437 - protein, 733 aa, Homo sapiens
MQQALELALDRAEYVIESARQRPPKRKYLSSGRKSVFQKLYDLYIEECEKEPEVKQKLRRNVNLLEKLVMQETLSCLVVNLYPGNEGYSLMLRGKNGSDSETIRLPYEEGELLEYLDAEELPPILVDLLEKSQVNIFHCGCVIAEIRDYRQSSNMKSPGYQSRHILLRPTMQTLICDVHSITSDNHKWTQEDKLLLESQLILATAEPLCLDPSIAVTCTANRLLYNKQKMNTRPMKRCFKRYSRSSLNRQQDLSHCPPPPQLRLLDFLQKRKERKAGQHYDLKISKAGNCVDMWKRSPCNLAIPSEVDVEKYAKVEKSIKSDDSQPTVWPAHDVKDDYVFECEAGTQYQKTKLTILQSLGDPLYYGKIQPCKADEESDSQMSPSHSSTDDHSNWFIIGSKTDAERVVNQYQELVQNEAKCPVKMSHSSSGSASLSQVSPGKETDQTETVSVQSSVLGKGVKHRPPPIKLPSSSGNSSSGNYFTPQQTSSFLKSPTPPPSSKPSSIPRKSSVDLNQVSMLSPAALSPASSSQRTTATQVMANSAGLNFINVVGSVCGAQALMSGSNPMLGCNTGAITPAGINLSGLLPSGGLLPNALPSAMQAASQAGVPFGLKNTSSLRPLNLLQLPGGSLIFNTLQQQQQQLSQFTPQQPQQPTTCSPQQPGEQGSEQGSTSQEQALSAQQAAVINLTGVGSFMQSQAAAVAILAASNGYGSSSSTNSSATSSSAYRQPVKK

SEQ ID NO: 13438 - protein, 733 aa, Homo sapiens; identical to SEQ ID NO: 13437

SEQ ID NO: 13439 - protein, 732 aa, Homo sapiens
MQQALELALDRAEYVIESARQRPPKRKYLSSGRKSVFQKLYDLYIEECEKEPEVKKLRRNVNLLEKLVMQETLSCLVVNLYPGNEGYSLMLRGKNGSDSETIRLPYEEGELLEYLDAEELPPILVDLLEKSQVNIFHCGCVIAEIRDYRQSSNMKSPGYQSRHILLRPTMQTLICDVHSITSDNHKWTQEDKLLLESQLILATAEPLCLDPSIAVTCTANRLLYNKQKMNTRPMKRCFKRYSRSSLNRQQDLSHCPPPPQLRLLDFLQKRKERKAGQHYDLKISKAGNCVDMWKRSPCNLAIPSEVDVEKYAKVEKSIKSDDSQPTVWPAHDVKDDYVFECEAGTQYQKTKLTILQSLGDPLYYGKIQPCKADEESDSQMSPSHSSTDDHSNWFIIGSKTDAERVVNQYQELVQNEAKCPVKMSHSSSGSASLSQVSPGKETDQTETVSVQSSVLGKGVKHRPPPIKLPSSSGNSSSGNYFTPQQTSSFLKSPTPPPSSKPSSIPRKSSVDLNQVSMLSPAALSPASSSQRTTATQVMANSAGLNFINVVGSVCGAQALMSGSNPMLGCNTGAITPAGINLSGLLPSGGLLPNALPSAMQAASQAGVPFGLKNTSSLRPLNLLQLPGGSLIFNTLQQQQQQLSQFTPQQPQQPTTCSPQQPGEQGSEQGSTSQEQALSAQQAAVINLTGVGSFMQSQAAAVAILAASNGYGSSSSTNSSATSSSAYRQPVKK

SEQ ID NO: 13440 - protein, 663 aa, Homo sapiens
MGRYRIRVATGAWLFSGSYNRVQLWLVGTRGEAELELQLRPARGEEEEFDHDVAEDLGLLQFVRLRKHHWLVDDAWFCDRITVQGPGACAEVAFPCYRWVQGEDILSLPEGTARLPGDNALDMFQKHREKELKDRQQIYCWATWKEGLPLTIAADRKDDLPPNMRFHEEKRLDFEWTLKAGALEMALKRVYTLLSSWNCLEDFDQIFWGQKSALAEKVRQCWQDDELFSYQFLNGANPMLLRRSTSLPSRLVLPSGMEELQAQLEKELQNGSLFEADFILLDGIPANVIRGEKQYLAAPLVMLKMEPNGKLQPMVIQIQPPNPSSPTPTLFLPSDPPLAWLLAKSWVRNSDFQLHEIQYHLLNTHLVAEVIAVATMRCLPGLHPIFKFLIPHIRYTMEINTRARTQLISDGGIFDKAVSTGGGGHVQLLRRAAAQLTYCSLCPPDDLADRGLLGLPGALYAHDALRLWEIIARYVEGIVHLFYQRDDIVKGDPELQAWCREITEVGLCQAQDRGFPVSFQSQSQLCHFLTMCVFTCTAQHAAINQGQLDWYAWVPNAPCTMRMPPPTTKEDVTMATVMGSLPDVRQACLQMAISWHLSRRQPDMVPLGHHKEKYFSGPKPKAVLNQFRTDLEKLEKEITARNEQLDWPYEYLKPSCIENSVTI

SEQ ID NO: 13441 - protein, 663 aa, Homo sapiens; identical to SEQ ID NO: 13440

SEQ ID NO: 13442 - protein, 406 aa, Homo sapiens
MEELQAQLEKELEGGTLFEADFSLLDGIKANVILCSQQHLAAPLVMLKLQPDGKLLPMVIQLQLPRTGSPPPPLFLPTDPPMAWLLAKCWVRSSDFQLHELQSHLLRGHLMAEVIVVATMRCLPSIHPIFKLIIPHLRYTLEINVRARTGLVSDMGIFDQIMSTGGGGHVQLLKQAGAFLTYSSFCPPDDLADRGLLGVKSSFYAQDALRLWEIIYRYVEGIVSLHYKTDVAVKDDPELQTWCREITEIGLQGAQDRGFPVSLQARDQVCHFVTMCIFTCTGQHASVHLGQLDWYSWVPNAPCTMRLPPPTTKDATLETVMATLPNFHQASLQMSITWQLGRRQPVMVAVGQHEEEYFSGPEPKAVLKKFREELAALDKEIEIRNAKLDMPYEYLRPSVVENSVAI

SEQ ID NO: 13443 - protein, 406 aa, Homo sapiens; identical to SEQ ID NO: 13442

SEQ ID NO: 13444 - protein, 732 aa, Homo sapiens
MLDRWSIMTYELKLPPKASLLPGPPEASEEFYMTIYEDSVATHLTKILNSDEHAVVISSAKTLCETVKDFVAKVEKTYDKTLENAVVADAVASKCSVLNEKLEQLLQALHTDSQAAPVLPGLSPLIVEEDAVESSSEESLGESKEQLGDDVTKPSSQKAVKPREIMLRANSLKKAVRQVIEEAGKVMDDPTVHPCEPANQSSDYDSTETDESKEEAKDDVKTAPRSPDARASYGHSQTDSVPGPAVAASKENLPVLNTRIICPGLRAGLAASIAGSSIINKMLLANIDPFGATPFIDPDLDSVDGYSEKCVMNNYFGIGLDAKISLEFNNKREEHPEKCRSRTKNLMWYGVLGTRELLQRSYKNLEQRVQLECDGQYIPLPSLQGIAVLNIPSYAGGTNFWGGTKEDDIFAAPSFDDKILEVVAIFDSMQMAVSRVIKLQHHRIAQCRTVKITIFGDEGVPVQVDGEAWVQPPGIIKIVHKNRAQMLTRDRAFESTLKSWEDKQKCDSGKPVLRTHLYIHHAIDLATEEVSQMQLCSQAAEELITRICDAATIHCLLEQELAHAVNACSHALNKANPRCPESLTRDTATEIAINVKALYNETESLLVGRVPLQLESPHEERVSNALHSVEVELQKLTEIPWLYYILHPNEDEEPPMDCTKRNNRSTVFRIVPKFKKEKVQKQKTSSQPVQKWGTEEVAAWLDLLNLGEYKDIFIRHDIRGAELLHLERRDLK

SEQ ID NO: 13445 - protein, 881 aa, Homo sapiens
MLDRWSIMTYELKLPPKASLLPGPPEASEEFYMTIYEDSVATHLTKILNSDEHAVVISSAKTLCETVKDFVAKVEKTYDKTLENAVVADAVASKAAPVLPGLSPLIVEEDAVESSSEESLGESKEQLGDDVTKPSSQKAVKPREIMLRANSLKKAVRQVIEEAGKGLDGLVLSVFFLNMRSHMCLLFFPGLRAGLAASIAGSSIINKMLLANIDPFGATPFIDPDLDSVDGYSEKCVMNNYFGIGLDAKISLEFNNKREEHPEKCRSRTKNLMWYGVLGTRELLQRSYKNLEQRVQLECDGQYIPLPSLQGIAVLNIPSYAGGTNFWGGTKEDDIFAAPSFDDKILEVVAIFDSMQMAVSRVIKLQHHRIAQCRTVKITIFGDEGVPVQVDGEAWVQPPGIIKIVHKNRAQMLTRDRAFESTLKSWEDKQKCDSGKPVLRTHLYIHHAIDLATEEVSQMQLCSQAAEELITRICDAATIHCLLEQELAHAVNACSHALNKANPRCPESLTRDTATEIAINVKALYNETESLLVGRVPLQLESPHEERVSNALHSVEVELQKLTEIPWLYYILHPNEDEEPPMDCTKRNNRSTVFRIVPKFKKEKVQKQKTSSQPVQKWGTEEVAAWLDLLNLGEYKDIFIRHDIRGAELLHLERRDLKRLIEKVAAKLAARTGLPFVTAPNKFEALAAHDALVELSGAMNTTACSLMTIANNIRFLGSGPWSGLGELILPENEPGSSIMPGKVNPTQCEAMTMVVAQVMGNHVAVTVGGSSGHFELNVFKPMMIKNVLHSARLLADASVSFTENCVVGIQANTERINKLMNESQMLVTALNPRIAYDKAAKIAKTAHKNGSTLKETVIELGYLTPEQFDEQVKTKDMLSPK

SEQ ID NO: 13446 - protein, 705 aa, Homo sapiens
MLDRWSIMTYELKLPPKASLLPGPPEASEEFYMTIYEDSVATHLTKILNSDEHAVVISSAKTLCETVKDFVAKVEKTYDKTLENAVVADAVASKCSVLNEKLEQLLQALHTDSQAAPVLPGLSPLIVEEDAVESSSEESLGESKEQLGDDVTKPSSQKAVKPREIMLRANSLKKAVRQVIEEAGKVMDDPTVHPCEPANQSSDYDSTETDESKEEAKDDVKTAPRSPDARASYGHSQTDSVPGPAVAASKENLPVLNTRIICPGLRAGLAASIAGSSIINKMLLANIDPFGATPFIDPDLDSVDGYSEKCVMNNYFGIGLDAKISLEFNNKREEHPEKCRSRTKNLMWYGVLGTRELLQRSYKNLEQRVQLECDGQYIPLPSLQGIAVLNIPSYAGGTNFWGGTKEDDIFAAPSFDDKILEVVAIFDSMQMAVSRVIKLQHHRIAQCRTVKITIFGDEGVPVQVDGEAWVQPPGIIKIVHKNRAQMLTRDRAFESTLKSWEDKQKCDSGKPVLRTHLYIHHAIDLATEEVSQMQLCSQAAEELITRICDAATIHCLLEQELAHAVNACSHALNKANPRCPESLTRDTATEIAINVKALYNETESLLVGRVPLQLESPHEERVSNALHSVEVELQKLTEIPWLYYILHPNEDEEPPMDCTKRNNRSTVFRIVPKFKKEKVQKQKTSSQPGSGDTESGSCEANSPGN

SEQ ID NO: 13447 - protein, 72 aa, Homo sapiens
IAVSFFFNSSYRGDTLCWLSQGWSRRPENCSRHFKANVHCGLGRTIAFLDHHRRQHTSNGDGDAKSVFHTRK

SEQ ID NO: 13448 - protein, 164 aa, Homo sapiens
MLISVMLHSLWLVIHLDTWRPESFFDKVKKNRQNGMHTLCLLDIKVKEQSLENLIKGRKIYEPPRYMSVNQAAQQLLEIVQNQRIRGEEPAVTEETLCVGLARVGADDQKIAAGTLRQMCTVDLGEPLHSLIITGGSIHPMEMEMLSLFSIPENSSESQSINGL

SEQ ID NO: 13449 - protein, 285 aa, Homo sapiens
MLYLIGLGLGDAKDITVKGLEVVRRCSRVYLEAYTSVLTVGKEALEEFYGRKLVVADREEVEQEADNILKDADISDVAFLVVGDPFGATTHSDLVLRATKLGIPYRVIHNASIMNAVGCCGLQLYKFGETVSIVFWTDTWRPESFFDKVKKNRQNGMHTLCLLDIKVKEQSLENLIKGRKIYEPPRYMSVNQAAQQLLEIVQNQRIRGEEPAVTEETLCVGLARVGADDQKIAAGTLRQMCTVDLGEPLHSLIITGGSIHPMEMEMLSLFSIPENSSESQSINGL

SEQ ID NO: 13450 - protein, 123 aa, Homo sapiens
MNAVGCCGLQLYKFGETVSIDTWRPESFFDKVKKNRQNGMHTLCLLDIKVKEQSLENLINSYRGDTLCWLSQGWSRRPENCSRHFKANVHCGLGRTIAFLDHHRRQHTSNGDGDAKSVFHTRK

SEQ ID NO: 13451 - protein, 281 aa, Homo sapiens
MLYLIGLGLGDAKDITVKGLEVVRRCSRVYLEAYTSVLTVGKEALEEFYGRKLVVADREEVEQEADNILKDADISDVAFLVVGDPFGATTHSDLVLRATKLGIPYRVIHNASIMNAVGCCGLQLYKFGETVSIDTWRPESFFDKVKKNRQNGMHTLCLLDIKVKEQSLENLIKGRKIYEPPRYMSVNQAAQQLLEIVQNQRIRGEEPAVTEETLCVGLARVGADDQKIAAGTLRQMCTVDLGEPLHSLIITGGSIHPMEMEMLSLFSIPENSSESQSINGL

SEQ ID NO: 13452 - protein, 285 aa, Homo sapiens; identical to SEQ ID NO: 13449

SEQ ID NO: 13453 - protein, 164 aa, Homo sapiens; identical to SEQ ID NO: 13448

SEQ ID NO: 13454 - protein, 594 aa, Homo sapiens
MAAESGELIGACEFMKDRLYFATLRNRPKSTVNTHYFSIDEELVYENFYADFGPLNLAMVYRYCCKLNKKLKSYSLSRKKIVHYTCFDQRKRANAAFLIGAYAVIYLKKTPEEAYRALLSGSNPPYLPFRDASFGNCTYNLTILDCLQGIRKGLQHGFFDFETFDVDEYEHYERVENGDFNWIVPGKFLAFSGPHPKSKIENGYPLHAPEAYFPYFKKHNVTAVVRLNKKIYEAKRFTDAGFEHYDLFFIDGSTPSDNIVRRFLNICENTEGAIAVHCKAGLGRTGTLIACYVMKHYRFTHAEIIAWIRICRPGSIIGPQQHFLEEKQASLWVQGDIFRSKLKNRPSSEGSINKILSGLDDMSIGGNLSKTQNMERFGEDNLEDDDVEMKNGITQGDKLRALKSQRQPRTSPSCAFRSDDTKGHPRAVSQPFRLSSSLQGSAVTLKTSKMALSPSATAKRINRTSLSSGATVRSFSINSRLASSLGNLNAATDDPENKKTSSSSKAGFTASPFTNLLNGSSQPTTRNYPELNNNQYNRSSNSNGGNLNSPPGPHSAKTEEHTTILRPSYTGLSSSSARFLSRSIPSLQSEYVHY

SEQ ID NO: 13455 - protein, 623 aa, Homo sapiens
MAAESGELIGACEFMKDRLYFATLRNRPKSTVNTHYFSIDEELVYENFYADFGPLNLAMVYRYCCKLNKKLKSYSLSRKKIVHYTCFDQRKRANAAFLIGAYAVIYLKKTPEEAYRALLSGSNPPYLPFRDASFGNCTYNLTILDCLQGIRKGLQHGFFDFETFDVDEYEHYERVENGDFNWIVPGKFLAFSGPHPKSKIENGYPLHAPEAYFPYFKKHNVTAVVRLNKKIYEAKRFTDAGFEHYDLFFIDGSTPSDNIVRRFLNICENTEGAIAVHCKAGLGRTGTLIACYVMKHYRFTHAEIIAWIRICRPGSIIGPQQHFLEEKQASLWVQGDIFRSKLKNRPSSEGSINKILSGLDDMSIGGNLSKTQNMERFGEDNLEDDDVEMKNGITQGDKLRALKSQRQPRTSPSCAFRSDDTKGHPRAVSQPFRLSSSLQGSAVTLKTSKMALSPSATAKRINRTSLSSGATVRSFSINSRLASSLGNLNAATDDPENKKTSSSSKAGFTASPFTNLLNGSSQPTTRNYPELNNNQYNRSSNSNGGNLNSPPGPHSAKTEEHTTILRPSYTGLSSSSARFLSRSIPVSAQTPPPGPQNPECNFCALPSQPRLPPKKFNSAKEAF

SEQ ID NO: 13456 - protein, 383 aa, Homo sapiens
MAAESGELIGACEFMKDRLYFATLRNRPKSTVNTHYFSIDEELVYENFYADFGPLNLAMVYRYCCKLNKKLKSYSLSRKKIVHYTCFDQRKRANAAFLIGAYAVIYLKKTPEEAYRALLSGSNPPYLPFRDASFGNCTYNLTILDCLQGIRKGLQHGFFDFETFDVDEYEHYERVENGDFNWIVPGKFLAFSGPHPKSKIENGYPLHAPEAYFPYFKKHNVTAVVRLNKKIYEAKRFTDAGFEHYDLFFIDGSTPSDNIVRRFLNICENTEGAIAVHCKAGLGRTGTLIACYVMKHYRFTHAEIIAWIRICRPGSIIGPQQHFLEEKQASLWVQGDIFRSKLKNRPSSEGSINKILSGLDDMSIGGNLSKTQNMERFGEVSFP

SEQ ID NO: 13457 - protein, 284 aa, Homo sapiens
KGSSNSKFEHHVGQVSFCLPGPTIRWSRLYWDASFGNCTYNLTILDCLQGIRKGLQHGFFDFETFDVDEYEHYERVENGDFNWIVPGKFLAFSGPHPKSKIENGYPLHAPEAYFPYFKKHNVTAVVRLNKKIYEAKRFTDAGFEHYDLFFIDGSTPSDNIVRRFLNICENTEGAIAVHCKAGLGRTGTLIACYVMKHYRFTHAEIIAWIRICRPGSIIGPQQHFLEEKQASLWVQGDIFRSKLKNRPSSEGSINKILSGLDDMSIGGNLSKTQNMERFGEVSFP

SEQ ID NO: 13458 - protein, 1068 aa, Homo sapiens
MEQLNELELLMEKSFWEEAELPAELFQKKVVASFPRTVLSTGMDNRYLVLAVNTVQNKEGNCEKRLVITASQSLENKELCILRNDWCSVPVEPGDIIHLEGDCTSDTWIIDKDFGYLILYPDMLISGTSIASSIRCMRRAVLSETFRSSDPATRQMLIGTVLHEVFQKAINNSFAPEKLQELAFQTIQEIRHLKEMYRLNLSQDEIKQEVEDYLPSFCKWAGDFMHKNTSTDFPQMQLSLPSDNSKDNSTCNIEVVKPMDIEESIWSPRFGLKGKIDVTVGVKIHRGYKTKYKIMPLELKTGKESNSIEHRSQVVLYTLLSQERRADPEAGLLLYLKTGQMYPVPANHLDKRELLKLRNQMAFSLFHRISKSATRQKTQLASLPQIIEEEKTCKYCSQIGNCALYSRAVEQQMDCSSVPIVMLPKIEEETQHLKQTHLEYFSLWCLMLTLESQSKDNKKNHQNIWLMPASEMEKSGSCIGNLIRMEHVKIVCDGQYLHNFQCKHGAIPVTNLMAGDRVIVSGEERSLFALSRGYVKEINMTTVTCLLDRNLSVLPESTLFRLDQEEKNCDIDTPLGNLSKLMENTFVSKKLRDLIIDFREPQFISYLSSVLPHDAKDTVACILKGLNKPQRQAMKKVLLSKDYTLIVGMPGTGKTTTICTLVRILYACGFSVLLTSYTHSAVDNILLKLAKFKIGFLRLGQIQKVHPAIQQFTEQEICRSKSIKSLALLEELYNSQLIVATTCMGINHPIFSRKIFDFCIVDEASQISQPICLGPLFFSRRFVLVGDHQQLPPLVLNREARALGMSESLFKRLEQNKSAVVQLTVQYRMNSKIMSLSNKLTYEGKLECGSDKVANAVINLRHFKDVKLELEFYADYSDNPWLMGVFEPNNPVCFLNTDKVPAPEQVEKGGVSNVTEAKLIVFLTSIFVKAGCSPSDIGIIAPYRQQLKIINDLLARSIGMVEVNTVDKYQGRDKSIVLVSFVRSNKDGTVGELLKDWRRLNVAITRAKHKLILLGCVPSLNCYPPLEKLLNHLNSEKLISFFFCIWSHLIALLEHESLCHILGDFQRE

SEQ ID NO: 13459 - protein, 397 aa, Homo sapiens
MSKEERPGREEILECQVMWEPDSKKNTQMDRFRAAVGAACGLALESYDDLYHWSVESYSDFWAEFWKFSGIVFSRVYDEVVDTSKGIADVPEWFKGSRLNYAENLLRHKENDRVALYIAREGKEEIVKVTFEELRQEVALFAAAMRKMGVKKGDRVVGYLPNSEHAVEAMLAAASIGAIWSSTSPDFGVNGVLDRFSQIQPKLIFSVEAVVYNGKEHNHMEKLQQVVKGLPDLKKVVVIPYVSSRENIDLSKIPNSVFLDDFLATGTSEQAPQLEFEQLPFSHPLFIMFSSGTTGAPKCMVHSAGGTLIQHLKEHLLHGNMTSSDILLCYTTVGWMMWNWMVSLLATGAAMVLYDGSPLVPTPNVLWDLVDRIGYLGSWRLLQNQPQDRGHRHAWPE

SEQ ID NO: 13460 - protein, 672 aa, Homo sapiens
MSKEERPGREEILECQVMWEPDSKKNTQMDRFRAAVGAACGLALESYDDLYHWSVESYSDFWAEFWKFSGIVFSRVYDEVVDTSKGIADVPEWFKGSRLNYAENLLRHKENDRVALYIAREGKEEIVKVTFEELRQEVALFAAAMRKMGVKKGDRVVGYLPNSEHAVEAMLAAASIGAIWSSTSPDFGVNGVLDRFSQIQPKLIFSVEAVVYNGKEHNHMEKLQQVVKGLPDLKKVVVIPYVSSRENIDLSKIPNSVFLDDFLATGTSEQAPQLEFEQLPFSHPLFIMFSSGTTGAPKCMVHSAGGTLIQHLKEHLLHGNMTSSDILLCYTTVGWMMWNWMVSLLATGAAMVLYDGSPLVPTPNVLWDLVDRIGITVLVTGAKWLSVLEEKAMKPVETHSLQMLHTILSTGSPLKAQSYEYVYRCIKSSILLGSISGGTDIISCFMGHNFSLPVYKGEIQARNLGMAVEAWNEEGKAVWGESGELVCTKPIPCQPTHFWNDENGNKYRKAYFSKFPGIWAHGDYCRINPKTGGIVMLGRSDGTLNPNGVRFGSSEIYNIVESFEEVEDSLCVPQYNKYREERVILFLKMASGHAFQPDLVKRIRDAIRMGLSARHVPSLILETKGIPYTLNGKKVEVAVKQIIAGKAVEQGGAFSNPETLDLYRDIPELQGF

SEQ ID NO: 13461 - protein, 672 aa, Homo sapiens; identical to SEQ ID NO: 13460

SEQ ID NO: 13462 - protein, 672 aa, Homo sapiens; identical to SEQ ID NO: 13460

SEQ ID NO: 13463 - protein, 65 aa, Homo sapiens
VGSLLSNQRPLPQTCSARSSVRPRSIRAWDRNNPEPWNKLGPNDQYKFCSVNVDYSKLKKECPDF

SEQ ID NO: 13464 - protein, 81 aa, Homo sapiens [sequence omitted]

SEQ ID NO: 13465 - protein, 511 aa, Homo sapiens
MGVLKFKHIFFRSFVKSSGVSQIVFTFLLIPCCLTLNFRAPPVIPNVPFLWAWNAPSEFCLGKFDEPLDMSLFSFIGSPRINATGQGVTIFYVDRLGYYPYIDSITGVTVNGGIPQKISLQDHLDKAKKDITFYMPVDNLGMAVIDWEEWRPTWARNWKPKDVYKNRSIELVQQQNVQLSLTEATEKAKQEFEKAGKDFLVETIKLGKLLRPNHLWGYYLFPDCYNHHYKKPGYNGSCFNVEIKRNDDLSWLWNESTALYPSIYLNTQQSPVAATLYVRNRVREAIRVSKIPDAKSPLPVFAYTRIVFTDQVLKFLSQDELVYTFGETVALGASGIVIWGTLSIMRSMKSCLLLDNYMETILNPYIINVTLAAKMCSQVLCQEQGVCIRKNWNSSDYLHLNPDNFAIQLEKGGKFTVRGKPTLEDLEQFSEKFYCSCYSTLSCKEKADVKDTDAVDVCIADGVCIDAFLKPPMETEEPQIFYNASPSTLSATMFIWRLEVWDQGISRIGFF

SEQ ID NO: 13466 - protein, 509 aa, Homo sapiens
MGVLKFKHIFFRSFVKSSGVSQIVFTFLLIPCCLTLNFRAPPVIPNVPFLWAWNAPSEFCLGKFDEPLDMSLFSFIGSPRINATGQGVTIFYVDRLGYYPYIDSITGVTVNGGIPQKISLQDHLDKAKKDITFYMPVDNLGMAVIDWEEWRPTWARNWKPKDVYKNRSIELVQQQNVQLSLTEATEKAKQEFEKAGKDFLVETIKLGKLLRPNHLWGYYLFPDCYNHHYKKPGYNGSCFNVEIKRNDDLSWLWNESTALYPSIYLNTQQSPVAATLYVRNRVREAIRVSKIPDAKSPLPVFAYTRIVFTDQVLKFLSQDELVYTFGETVALGASGIVIWGTLSIMRSMKSCLLLDNYMETILNPYIINVTLAAKMCSQVLCQEQGVCIRKNWNSSDYLHLNPDNFAIQLEKGGKFTVRGKPTLEDLEQFSEKFYCSCYSTLSCKEKADVKDTDAVDVCIADGVCIDAFLKPPMETEEPQIFYNASPSTLSATMFIVSILFLIISSVASL

SEQ ID NO: 13467 - protein, 510 aa, Homo sapiens
MGVLKFKHIFFRSFVKSSGVSQIVFTFLLIPCCLTLNFRAPPVIPNVPFLWAWNAPSEFCLGKFDEPLDMSLFSFIGSPRINATGQGVTIFYVDRLGYYPYIDSITGVTVNGGIPQKISLQDHLDKAKKDITFYMPVDNLGMAVIDWEEWRPTWARNWKPKDVYKNRSIELVQQQNVQLSLTEATEKAKQEFEKAGKDFLVETIKLGKLLRPNHLWGYYLFPDCYNHHYKKPGYNGSCFNVEIKRNDDLSWLWNESTALYPSIYLNTQQSPVAATLYVRNRVREAIRVSKIPDAKSPLPVFAYTRIVFTDQVLKFLSQDELVYTFGETVALGASGIVIWGTLSIMRSMKSCLLLDNYMETILNPYIINVTLAAKMCSQVLCQEQGVCIRKNWNSSDYLHLNPDNFAIQLEKGGKFTVRGKPTLEDLEQFSEKFYCSCYSTLSCKEKADVKDTDAVDVCIADGVCIDAFLKPPMETEEPQIFYNASPSTLSATMFIDLCDLYLVPTSYLIL

SEQ ID NO: 13468 - protein, 93 aa, Homo sapiens
MSAKDERAREILRGFKLNWMNLRDAETGKILWQGTEDLSVPGVEHEARVPKKILKCKAVSRELNFSSTEQMEKFRLEQKVYFKGQCLEVGTLS

SEQ ID NO: 13469 - protein, 150 aa, Homo sapiens
MSAKDERAREILRGFKLNWMNLRDAETGKILWQGTEDLSVPGVEHEARVPKKILKCKAVSRELNFSSTEQMEKFRLEQKVYFKGQCLEEWFFEFGFVIPNSTNTWQSLIEAAPESQMMPASVLTGNVIIETKFFDDDLLVSTSRVRLFYV

SEQ ID NO: 13470 - protein, 656 aa, Homo sapiens
MAKVADTILFLLDPLEGWDSTGDYCLSCLFAQGLPTYTLAVQGISGLPLKKQIDTRKKLSKAVEKRFPHDKLLLLDTQQEAGMLLRQLANQKQQHLAFRDRRAYLFAHAVDFVPSEENNLVGTLKISGYVRGQTLNVNRLLHIVGYGDFQMKQIDAPGDPFPLNPRGIKPQKDPDMAMEICATDAVDDMEEGLKVLMKADPGRQESLQAEVIPDPMEGEQTWPTEEELSEAKDFLKESSKVVKKVPKGTSSYQAEWILDGGSQSGGEGDEYEYDDMEHEDFMEEESQDESSEEEEEYETMTIGESVHDDLYDKKVDEEAEAKMLEKYKQERLEEMFPDEVDTPRDVAARIRFQKYRGLKSFRTSPWDPKENLPQDYARIFQFQNFTNTRKSIFKEVEEKEVEGAEVGWYVTLHVSEVPVSVVECFRQGTPLIAFSLLPHEQKMSVLNMVVRRDPGNTEPVKAKEELIFHCGFRRFRASPLFSQHTAADKHKLQRFLTADMALVATVYAPITFPPASVLLFKQKSNGMHSLIATGHLMSVDPDRMVIKRVVLSGHPFKIFTKMAVVRYMFFNREDVLWFKPVELRTKWGRRGHIKEPLGTHGHMKCSFDGKLKSQDTVLMNLYKRVFPKWTYDPYVPEPVPWLKSEISSTVPQGGME

SEQ ID NO: 13471 - protein, 705 aa, Homo sapiens
MQLLQDRDTGTVHLNELGNTQNFMLLCPRLKHRWFFTSARPGDLHVVLDMAKVADTILFLLDPLEGWDSTGDYCLSCLFAQGLPTYTLAVQGISGLPLKKQIDTRKKLSKAVEKRFPHDKLLLLDTQQEAGMLLRQLANQKQQHLAFRDRRAYLFAHAVDFVPSEENNLVGTLKISGYVRGQTLNVNRLLHIVGYGDFQMKQIDAPGDPFPLNPRGIKPQKDPDMAMEICATDAVDDMEEGLKVLMKADPGRQESLQAEVIPDPMEGEQTWPTEEELSEAKDFLKESSKVVKKVPKGTSSYQAEWILDGGSQSGGEGDEYEYDDMEHEDFMEEESQDESSEEEEEYETMTIGESVHDDLYDKKVDEEAEAKMLEKYKQERLEEMFPDEVDTPRDVAARIRFQKYRGLKSFRTSPWDPKENLPQDYARIFQFQNFTNTRKSIFKEVEEKEVEGAEVGWYVTLHVSEVPVSVVECFRQGTPLIAFSLLPHEQKMSVLNMVVRRDPGNTEPVKAKEELIFHCGFRRFRASPLFSQHTAADKHKLQRFLTADMALVATVYAPITFPPASVLLFKQKSNGMHSLIATGHLMSVDPDRMVIKRVVLSGHPFKIFTKMAVVRYMFFNREDVLWFKPVELRTKWGRRGHIKEPLGTHGHMKCSFDGKLKSQDTVLMNLYKRVFPKWTYDPYVPEPVPWLKSEISSTVPQGGME

SEQ ID NO: 13472 - protein, 804 aa, Homo sapiens
MAAHRPGPLKQQNKAHKGGRHRGRGSAQRDGKGRLALKTLSKKVRKELSRVDQRHRASQLRKQKKEAVLAEKRQLGGKDGPPHQVLVVPLHSRISLPEAMQLLQDRDTGTVHLNELGNTQNFMLLCPRLKHRWFFTSARPGDLHVVLDMAKVADTILFLLDPLEGWDSTGDYCLSCLFAQGLPTYTLAVQGISGLPLKKQIDTRKKLSKAVEKRFPHDKLLLLDTQQEAGMLLRQLANQKQQHLAFRDRRAYLFAHAVDFVPSEENNLVGTLKISGYVRGQTLNVNRLLHIVGYGDFQMKQIDAPGDPFPLNPRGIKPQKDPDMAMEICATDAVDDMEEGLKVLMKADPGRQESLQAEVIPDPMEGEQTWPTEEELSEAKDFLKESSKVVKKVPKGTSSYQAEWILDGGSQSGGEGDEYEYDDMEHEDFMEEESQDESSEEEEEYETMTIGESVHDDLYDKKVDEEAEAKMLEKYKQERLEEMFPDEVDTPRDVAARIRFQKYRGLKSFRTSPWDPKENLPQDYARIFQFQNFTNTRKSIFKEVEEKEVEGAEVGWYVTLHVSEVPVSVVECFRQGTPLIAFSLLPHEQKMSVLNMVVRRDPGNTEPVKAKEELIFHCGFRRFRASPLFSQHTAADKHKLQRFLTADMALVATVYAPITFPPASVLLFKQKSNGMHSLIATGHLMSVDPDRMVIKRVVLSGHPFKIFTKMAVVRYMFFNREDVLWFKPVELRTKWGRRGHIKEPLGTHGHMKCSFDGKLKSQDTVLMNLYKRVFPKWTYDPYVPEPVPWLKSEISSTVPQGGME

SEQ ID NO: 13473 - protein, 340 aa, Homo sapiens
MCAQYCISFADVEKAHINIRDSIHLTPVLTSSILNQLTGRNLFFKCELFQKTGSFKIRGALNAVRSLVPDALERKPKAVVTHSSGNHGQALTYAAKLEGIPAYIVVPQTAPDCKKLAIQAYGASIVYCEPSDESRENVAKRVTEETEGIMVHPNQEPAVIAGQGTIALEVLNQVPLVDALVVPVGGGGMLAGIAITVKALKPSVKVYAAEPSNADDCYQSKLKGKLMPNLYPPETIADGVKSSIGLNTWPIIRDLVDDIFTVTEDEIKCATQLVWERMKLLIEPTAGVGVAAVLSQHFQTVSPEVKNICIVLSGGNVDLTSSITWVKQAERPASYQSVSV

SEQ ID NO: 13474 - protein, 340 aa, Homo sapiens; identical to SEQ ID NO: 13473

SEQ ID NO: 13475 - protein, 340 aa, Homo sapiens; identical to SEQ ID NO: 13473

SEQ ID NO: 13476 - protein, 199 aa, Homo sapiens
  VARIANT (1)...(199): Xaa = Any Amino Acid
MLQYDSTHGKFHGTIKAENGKLVINGNPITIFQDIFTAMEKVGAHLQRGAKRVMIFAPSTEAIMFMMKVNYEKYDNSLKIISNASCTTNCLAPLAKVIHDNSGVGRGPDLPSGKPAKYDDIKKMMKQASEDPIKGILGYTEHQIVSSDFNSDTQSSTFDAGAGITLNDHFVKLISWYDNEFGYSNRVVDLMAHMASKEX

SEQ ID NO: 13477 - protein, 1192 aa, Homo sapiens
MGDTSEDASIHRLEGTDLDCQVGGLICKSKSAASEQHVFKAPAPRPSLLGLDLLASLKRREREEKDDGEDKKKSKVSSYKDWEESKDDQKDAEEEGGDQAGQNIRKDRHYRSARVETPSHPGGVSEEFWERSRQRERERREHGVYASSKEEKDWKKEKSRDRDYDRKRDRDAATPSRSTWEEEDSGYGSSRRSQWESPSPTPSYRDSERSHRLSTRDRDRSVRGKYSDDTPLPTPSYKYNEWADDRRHLGSTPRLSRGRGRREEGEEGISFDTEEERQQWEDDQRQADRDWYMMDEGYDEFHNPLAYSSEDYVRRREQHLHKQKQKRISAQRRQINEDNERWETNRMLTSGVVHRLEVDEDFEEDNAAKVHLMVHNLVPPFLDGRIVFTKQPEPVIPVKDATSDLAIIARKGSQTVRKHREQKERKKAQHKHWELAGTKLGDIMGVKKEEEPDKAVTEDGKVDYRTEQKFADHMKRKSEASSEFAKKKSILEQRQYLPIFAVQQELLTIIRDNSIVIVVGETGSGKTTQLTQYLHEDGYTDYGMIGCTQPRRVAAMSVAKRVSEEMGGNLGEEVGYAIRFEDCTSENTLIKYMTDGILLRESLREADLDHYSAIIMDEAHERSLNTDVLFGLLREVVARRSDLKLIVTSATMDAEKFAAFFGNVPIFHIPGRTFPVDILFSKTPQEDYVEAAVKQSLQVHLSGAPGDILIFMPGQEDIEVTSDQIVEHLEELENAPALAVLPIYSQLPSDLQAKIFQKAPDGVRKCIVATNIAETSLTVDGIMFVIDSGYCKLKVFNPRIGMDALQIYPISQANANQRSGRAGRTGPGQCFRLYTQSAYKNELLTTTVPEIQRTNLANVVLLLKSLGVQDLLQFHFMDPPPEDNMLNSMYQLWILGALDNTGGLTSTGRLMVEFPLDPALSKMLIVSCDMGCSSEILLIVSMLSVPAIFYRPKGREEESDQIREKFAVPESDHLTYLNVYLQWKNNNYSTIWCNDHFIHAKAMRKVREVRAQLKDIMVQQRMSLASCGTDWDIVRKCICAAYFHQAAKLKGIGEYVNIRTGMPCHLHPTSSLFGMGYTPDYIVYHELVMTTKEYMQCVTAVDGEWLAELGPMFYSVKQAGKSRQENRRRAKEEASAMEEEMALAEEQLRARRQEQEKRSPLGSVRSTKIYTPGRKEQGEPMTPRRTPARFGL

SEQ ID NO: 13478 - protein, 1227 aa, Homo sapiens
MGDTSEDASIHRLEGTDLDCQVGGLICKSKSAASEQHVFKAPAPRPSLLGLDLLASLKRREREEKDDGEDKKKSKVSSYKDWEESKDDQKDAEEEGGDQAGQNIRKDRHYRSARVETPSHPGGVSEEFWERSRQRERERREHGVYASSKEEKDWKKEKSRDRDYDRKRDRDERDRSRHSSRSERDGGSERSSRRNEPESPRHRPKDAATPSRSTWEEEDSGYGSSRRSQWESPSPTPSYRDSERSHRLSTRDRDRSVRGKYSDDTPLPTPSYKYNEWADDRRHLGSTPRLSRGRGRREEGEEGISFDTEEERQQWEDDQRQADRDWYMMDEGYDEFHNPLAYSSEDYVRRREQHLHKQKQKRISAQRRQINEDNERWETNRMLTSGVVHRLEVDEDFEEDNAAKVHLMVHNLVPPFLDGRIVFTKQPEPVIPVKDATSDLAIIARKGSQTVRKHREQKERKKAQHKHWELAGTKLGDIMGVKKEEEPDKAVTEDGKVDYRTEQKFADHMKRKSEASSEFAKKKSILEQRQYLPIFAVQQELLTIIRDNSIVIVVGETGSGKTTQLTQYLHEDGYTDYGMIGCTQPRRVAAMSVAKRVSEEMGGNLGEEVGYAIRFEDCTSENTLIKYMTDGILLRESLREADLDHYSAIIMDEAHERSLNTDVLFGLLREVVARRSDLKLIVTSATMDAEKFAAFFGNVPIFHIPGRTFPVDILFSKTPQEDYVEAAVKQSLQVHLSGAPGDILIFMPGQEDIEVTSDQIVEHLEELENAPALAVLPIYSQLPSDLQAKIFQKAPDGVRKCIVATNIAETSLTVDGIMFVIDSGYCKLKVFNPRIGMDALQIYPISQANANQRSGRAGRTGPGQCFRLYTQSAYKNELLTTTVPEIQRTNLANVVLLLKSLGVQDLLQFHFMDPPPEDNMLNSMYQLWILGALDNTGGLTSTGRLMVEFPLDPALSKMLIVSCDMGCSSEILLIVSMLSVPAIFYRPKGREEESDQIREKFAVPESDHLTYLNVYLQWKNNNYSTIWCNDHFIHAKAMRKVREVRAQLKDIMVQQRMSLASCGTDWDIVRKCICAAYFHQAAKLKGIGEYVNIRTGMPCHLHPTSSLFGMGYTPDYIVYHELVMTTKEYMQCVTAVDGEWLAELGPMFYSVKQAGKSRQENRRRAKEEASAMEEEMALAEEQLRARRQEQEKRSPLGSVRSTKIYTPGRKEQGEPMTPRRTPARFGL

SEQ ID NO: 13479 - protein, 1227 aa, Homo sapiens; identical to SEQ ID NO: 13478

SEQ ID NO: 13480 - protein, 142 aa, Homo sapiens
MDLTVTGFQWWNTGYGPDSRSRPSSQKVLQERDGLRRVHRPAVLVKIAPDLTSQDKEDIASVVKELGIDGLIVTNTTVSRPAGLQGALRSETGGLSGKPLRDLSTQTIREMYALTQGKVSRVCVFRSACGLGSWVVMGIIIP

SEQ ID NO: 13481 - protein, 277 aa, Homo sapiens [sequence omitted]

SEQ ID NO: 13482 - protein, 300 aa, Homo sapiens
MATGDERFYAEHLMPTLQGLLDPESAHRLAVRFTSLGLLPRARFQDSDMLEVRVLGHKFRNPVGIAAGFDKHGEAVDGLYKMGFGFVEIGSVTPKPQEGNPRPRVFRLPEDQAVINRYGFNSHGLSVVEHRLRARQQKQAKLTEDGLPLGVNLGKNKTSVDAAEDYAEGVRVLGPLADYLVVNVSSPNTAGLRSLQGKAELRRLLTKVLQERDGLRRVHRPAVLVKIAPDLTSQDKEDIASVVKELGIDGLIVTNTTVSRPAGLQGALRSETGGLSGKPLRDLSTQTIREMYALTQGKFP

SEQ ID NO: 13483 - protein, 397 aa, Homo sapiens [sequence omitted]

SEQ ID NO: 13484 - protein, 328 aa, Homo sapiens
MAWRHLKKRAQDAVIILGGGGLLFASYLMATGDERFYAEHLMPTLQGLLDPESAHRLAVRFTSLGLLPRARFQDSDMLEVRVLGHKFRNPVGIAAGFDKHGEAVDGLYKMGFGFVEIGSVTPKPQEGNPRPRVFRLPEDQAVINRYGFNSHGLSVVEHRLRARQQKQAKLTEDGLPLGVNLGKNKTSVDAAEDYAEGVRVLGPLADYLVVNVSSPNTAGLRSLQGKAELRRLLTKVLQERDGLRRVHRPAVLVKIAPDLTSQDKEDIASVVKELGIDGLIVTNTTVSRPAGLQGALRSETGGLSGKPLRDLSTQTIREMYALTQGKFP

SEQ ID NO: 13485 - protein, 607 aa, Homo sapiens
MIQNVGNHLRRGLASVFSNRTSRKSALRAGNDSAMADGEGYRNPTEVQMSQLVLPCHTNQRGELSVGQLLKWIDTTACLSAERHAGCPCVTASMDDIYFEHTISVGQVVNIKAKVNRAFNSSMEVGIQVASEDLCSEKQWNVCKALATFVARREITKVKLKQITPRTEEEKMEHSVAAERRRMRLVYADTIKDLLANCAIQGDLESRDCSRMVPAEKTRVESVELVLPPHANHQGNTFGGQIMAWMENVATIAASRLCRAHPTLKAIEMFHFRGPSQVGDRLVLKAIVNNAFKHSMEVGVCVEAYRQEAETHRRHINSAFMTFVVLDADDQPQLLPWIRPQPGDGERRYREASARKKIRLDRKYIVSCKQTEVPLSVPWDPSNQVYLSYNNVSSLKMLVAKDNWVLSSEISQVRLYTLEDDKFLSFHMEMVVHVDAAQAFLLLSDLRQRPEWDKHYRSVELVQQVDEDDAIYHVTSPALGGHTKPQDFVILASRRKPCDNGDPYVIALRSVTLPTHRETPEYRRGETLCSGFCLWREGDQLTKCCWVRVSLTELVSASGFYSWGLESRSKGRRSDGWNGKLAGGHLSTLKAIPVAKINSRFGYLQDT

SEQ ID NO: 13486 - protein, 594 aa, Homo sapiens
MIQNVGNHLRRGLASVFSNRTSRKSALRAGNDSAMADGEGYRNPTEVQMSQLVLPCHTNQRGELSVGQLLKWIDTTACLSAERHAGCPCVTASMDDIYFEHTISVGQVVNIKAKVNRAFNSSMEVGIQVASEDLCSEKQWNVCKALATFVARREITKVKLKQITPRTEEEKMEHSVAAERRRMRLVYADTIKDLLANCAIQGDLESRDCSRMVPAEKTRVESVELVLPPHANHQGNTFGGQIMAWMENVATIAASRLCRAHPTLKAIEMFHFRGPSQVGDRLVLKAIVNNAFKHSMEVGVCVEAYRQEAETHRRHINSAFMTFVVLDADDQPQLLPWIRPQPGDGERRYREASARKKIRLDRKYIVSCKQTEVPLSVPWDPSNQVYLSYNNVSSLKMLVAKDNWVLSSEISQVRLYTLEDDKFLSFHMEMVVHVDAAQAFLLLSDLRQRPEWDKHYRSVELVQQVDEDDAIYHVTSPALGGHTKPQDFVILASRRKPCDNGDPYVIALRSVTLPTHRETPEYRRGETLCSGFCLWREGDQLTKVSYYNQATPGVLNYVTTNVAGLSSEFYTTFKACEQFLLDNRNDLAPSLQTL

SEQ ID NO: 13487 - protein, 594 aa, Homo sapiens; identical to SEQ ID NO: 13486

SEQ ID NO: 13488 - protein, 401 aa, Homo sapiens
MVCREQLSKNQVKWVFAGITCVSVVVIAAIVLAITLRRPGCELEACSPDADMLDYLLSLGQISRRDALEVTWYHAANSKKAMTAALNSNITVLEADVNVEGLGTANETGVPIMAHPPTIYSDNTLEQWLDAVLGSSQKGIKLDFKNIKAVGPSLDLLRQLTEEGKVRRPIWINADILKGPNMLISTEVNATQFLALVQEKYPKATLSPGWTTFYMSTSPNRTYTQAMVEKMHELVGGVPQRVTFPVRSSMVRAAWPHFSWLLSQSERYSLTLWQAASDPMSVEDLLYVRDNTAVHQVYYDIFEPLLEQLLTDMLELCQGLWQPVSFQMQAMLLGHSTAGAIGRLLASSPRATVTVEHNPAGGDYASVRTALLAARAVDRTRVYYRLPQGYHKDLLAHVGRN

SEQ ID NO: 13489 - protein, 585 aa, Homo sapiens
MVCREQLSKNQVKWVFAGITCVSVVVIAAIVLAITLRRPGCELEACSPDADMLDYLLSLGQISRRDALEVTWYHAANSKKAMTAALNSNITVLEADVNVEGLGTANETGVPIMAHPPTIYSDNTLEQWLDAVLGSSQKGIKLDFKNIKAVGPSLDLLRQLTEEGKVRRPIWINADILKGPNMLISTEVNATQFLALVQEKYPKATLSPGWTTFYMSTSPNRTYTQAMVEKMHELVGGVPQRVTFPVRSSMVRAAWPHFSWLLSQSERYSLTLWQAASDPMSVEDLLYVRDNTAVHQVYYDIFEPLLSQFKQLALNATRKPMYYTGGSLIPLLQLPGDDGLNVEWLVPDVQGSGKTATMTLPDTEGMILLNTGLEGTVAENPVPIVHTPSGNILTLESCLQQLATHPGHWGIHLQIAEPAALRPSLALLARLSSLGLLHWPVWVGAKISHGSFSVPGHVAGRELLTAVAEVFPHVTVAPGWPEEVLGSGYREQLLTDMLELCQGLWQPVSFQMQAMLLGHSTAGAIGRLLASSPRATVTVEHNPAGGDYASVRTALLAARAVDRTRVYYRLPQGYHKDLLAHVGRN

SEQ ID NO: 13490 - protein, 398 aa, Homo sapiens
MLMLLIELVAERIKQDPIPIGLLGVLTMAFNPDNEYHFKNRMKVSQRNWAEVFGEGNMFAVSPVSTFQKEPHGWVVDLVNKFGELGGFAAIQAKLHSEDIELGAVSALIQPLGVCAEYLNSSVVQPMLDPVILTTIQDVRSVEEKDLKDKRLVSIPELLSAVKLLCMRFQPDLVTIVDDLRLDILLRMLKSPHFSAKMNSLKEVTKLIEDSTLSKSVKNAIDTDRLLDWLVENSVLSIALEGNIDQAQYCDRIKGIIELLGSKLSLDELTKIWKIQSGQSSTVIENIHTIIAAAAVKFNSDQLNHLFVLIQKSWETESDRVRQKLLSLIGRIGREARFETTSGKVLDVLWELAHLPTLPSSLIQQALEEHLTILSDAYAVKEAIKRSYIIKCIEDIKR

SEQ ID NO: 13491 - protein, 335 aa, Homo sapiens
MKLPARVFFTLGSRLPCGLAPRRFFSYGTKILYQNTEALQSKFFSPLQKAMLPPNSFQGKVAFITGGGTGLGKGMTTLLSSLGAQCVIASRKMDVLKATAEQISSQTGNKVHAIQCDVRDPDMVQNTVSELIKVAGHPNIVINNAAGNFISPTERLSPNAWKTITDIVLNGTAFVTLEIGKQLIKAQKGAAFLSITTIYAETGSGFVVPSASAKAGVEAMSKSLAAEWGKYGMRFNVIQPGPIKTKGAFSRLDPTGTFEKEMIGRIPCGRLGTVEELANLAAFLCSDYASWINGAVIKFDGGEEVLISGEFNDLRKVTKEQWDTIEELIRKTKGS

SEQ ID NO: 13492 - protein, 335 aa, Homo sapiens; identical to SEQ ID NO: 13491

SEQ ID NO: 13493 - protein, 225 aa, Homo sapiens
MSLRHHGENEGQSKRVGCIGFLVTKAAFNSGKVYIVTTNDPIIDLNYMVYMFPSHSTYGKFHGTIKAENGKFVINGNPIAISQERDPTKIKWGDSGIDYVVESTGVFTAMGKARTHFQGVGGAKRVIISAPSADGPKFVMDINHEKPGKYDDIKKVEGPLKGILGYNEHQVVSFDFNSNTQYSIFDAGVGVTLNDHFVKLISCYDNEFGCSNRVVDLMVHIASKE

SEQ ID NO: 13494 - protein, 206 aa, Homo sapiens
MTCFLFPKQLSTIRCLDNVQDLLESVSHAVEHSVEATGPLDSSSYEEHFLTGTVSENKALCHPSSVDSLSTSAATEDHVSMGGWAARKALRVIEHVEQVLAIELLAACQGIEFLRPLKTTTPLEKVYDLVRSVVRKAKSGMEKHCLILLFSGHSLGMSKKVWEVAAPYIEKYRMEHIPESRPLSPTAFSLQFLHKKSTKIPESEDL

SEQ ID NO: 13495 - protein, 657 aa, Homo sapiens [sequence omitted]

SEQ ID NO: 13496 - protein, 426 aa, Homo sapiens
MAGGHSLLLENAQQVVLVCARGERFLARDALRSLAVLEGASLVVGKDGFIKAIGPADVIQRQFSGETFEEIIDCSGKCILPGLVDAHTHPVWAGERVHEFAMKLAGATYMEIHQAGGGIHFTVERTRQATEEELFRSLQQRLQCMMRAGTTLVECKSGYGLDLETELKMLRVIERARRELDIGISATYCGAHSVPKGKTATEAADDIINNHLPKLKELGRNGEIHVDNIDVFCEKGVFDLDSTRRILQRGKDIGLQINFHGDELHPMKAAELGAELGAQAISHLEEVSDEGIVAMATARCSAILLPTTAYMLRLKQPRARKMLDEGVIVALGSDFNPNAYCFSMPMVMHLACVNMRMSMPEALAAATINAAYALGKSHTHGSLEVGKQGDLIIINSSRWEHLIYQFGGHHELIEYVIAKGKLIYKT

SEQ ID NO: 13497 - protein, 426 aa, Homo sapiens; identical to SEQ ID NO: 13496

SEQ ID NO: 13498 - protein, 568 aa, Homo sapiens
MMGCWILNEGLSTILVLSWLGINFYLFIDTFYWYEEEESFHYTRVILGSTLAWARASALCLNFNCMLILIPVSRNLISFIRGTSICCRGPWRRQLDKNLRFHKLVAYGIAVNATIHIVAHFFNLERYHWSQSEEAQGLLAALSKLGNTPNESYLNPVRTFPTNTTTELLRTIAGVTGLVISLALVLIMTSSTEFIRQASYELFWYTHHVFIVFFLSLAIHGTGRIVRGQTQDSLSLHNITFCRDRYAEWQTVAQCPVPQFSGKEPSAWKWILGPVVLYACERIIRFWRFQQEVVITKVVSHPSGVLELHMKKRGFKMAPGQYILVQCPAISSLEWHPFTLTSAPQEDFFSVHIRAAGDWTAALLEAFGAEGQALQEPWSLPRLAVDGPFGTALTDVFHYPVCVCVAAGIGVTPFAALLKSIWYKCSEAQTPLKLSKVYFYWICRDARAFEWFADLLLSLETRMSEQGKTHFLSYHIFLTGWDENQALHIALHWDENTDVITGLKQKTFYGRPNWNNEFKQIAYNHPSSSIGVFFCGPKALSRTLQKMCHLYSSADPRGVHFYYNKESF

SEQ ID NO: 13499 - protein, 138 aa, Homo sapiens
MTMISTDGKSLLLALQIHFSGVFKAHLTFPKDYPLRPPKMKFITEIWHPNVDKNGDVCISILHEPGEDKYGYEKPEERWLPIHTVETIMISVISMLADPNGDSPANVDAAKEWREDRNGEFKRKVARCVRKSQETAFE

SEQ ID NO: 13500 - protein, 170 aa, Homo sapiens
MTELQSALLLRRQLAELNKNPVEGFSAGLIDDNDLYRWEVLIIGPPDTLYEGGVFKAHLTFPKDYPLRPPKMKFITEIWHPNVDKNGDVCISILHEPGEDKYGYEKPEERWLPIHTVETIMISVISMLADPNGDSPANVDAAKEWREDRNGEFKRKVARCVRKSQETAFE

SEQ ID NO: 13501 - protein, 232 aa, Homo sapiens
MTELQSALLLRRQLAELNKNPVEGFSAGLIDDNDLYRWEVLIIGPPDTLYEGGVFKAHLTFPKDYPLRPPKMKFITEIWHPNVDKNGDVCISILHEPGEDKYGYEKPEERWLPIHTVETIMISVISMLADPNGDSPANVDAAKEWREDRNGEFKRKVARCVRKSQETAFEFTIAFLHNFTKFACLNNVFHDFELFICGMIMNAFFCYFYCSIFFKLICVANRYISPVCYYTG

SEQ ID NO: 13502 - protein, 170 aa, Homo sapiens; identical to SEQ ID NO: 13500

SEQ ID NO: 13503 - protein, 1007 aa, Homo sapiens [sequence omitted]

SEQ ID NO: 13504 - protein, 385 aa, Homo sapiens
MEAAHLLPAADVLRHFSVTAEGGLSPAQVTGARERYGPNELPSEEGKSLWELVLEQFEDLLVRILLLAALVSFVLAWFEEGEETTTAFVEPLVIMLILVANAIVGVWQERNAESAIEALKEYEPEMGKVIRSDRKGVQRIRARDIVPGDIVEVAVGDKVPADLRLIEIKSTTLRVDQSILTGESVSVTKHTEAIPDPRAVNQDKKNMLFSGTNITSGKAVGVAVATGLHTELGKIRSQMAAVEPERTPLQRKLDEFGRQLSHAISVICVAVWVINIGHFADPAHGGSWLRGAVYYFKIAVALAVAAIPEGLPAVITTCLALGTRRMARKNAIVRSLPSVETLGCTSPRAPPGLRVPRPELGRCSESHCRPVCHAEVQLATRVPGT

SEQ ID NO: 13505 - protein, 993 aa, Homo sapiens
MEAAHLLPAADVLRHFSVTAEGGLSPAQVTGARERYGPNGKSLWELVLEQFEDLLVRILLLAALVSFVLAWFEEGEETTTAFVEPLVIMLILVANAIVGVWQERNAESAIEALKEYEPEMGKVIRSDRKGVQRIRARDIVPGDIVEVAVGDKVPADLRLIEIKSTTLRVDQSILTGESVSVTKHTEAIPDPRAVNQDKKNMLFSGTNITSGKAVGVAVATGLHTELGKIRSQMAAVEPERTPLQRKLDEFGRQLSHAISVICVAVWVINIGHFADPAHGGSWLRGAVYYFKIAVALAVAAIPEGLPAVITTCLALGTRRMARKNAIVRSLPSVETLGCTSVICSDKTGTLTTNQMSVCRMFVVAEADAGSCLLHEFTISGTTYTPEGEVRQGDQPVRCGQFDGLVELATICALCNDSALDYNEAKGVYEKVGEATETALTCLVEKMNVFDTDLQALSRVERAGACNTVIKQLMRKEFTLEFSRDRKSMSVYCTPTRPHPTGQGSKMFVKGAPESVIERCSSVRVGSRTAPLTPTSREQILAKIRDWGSGSDTLRCLALATRDAPPRKEDMELDDCSKFVQYETDLTFVGCVGMLDPPRPEVAACITRCYQAGIRVVMITGDNKGTAVAICRRLGIFGDTEDVAGKAYTGREFDDLSPEQQRQACRTARCFARVEPAHKSRIVENLQSFNEITAMTGDGVNDAPALKKAEIGIAMGSGTAVAKSAAEMVLSDDNFASIVAAVEEGRAIYSNMKQFIRYLISSNVGEVVCIFLTAILGLPEALIPVQLLWVNLVTDGLPATALGFNPPDLDIMEKLPRSPREALISGWLFFRYLAIGVYVGLATVAAATWWFVYDAEGPHINFYQLRNFLKCSEDNPLFAGIDCEVFESRFPTTMALSVLVTIEMCNALNSVSENQSLLRMPPWMNPWLLVAVAMSMALHFLILLVPPLPLIFQVTPLSGRQWVVVLQISLPVILLDEALKYLSRNHMHEEMSQK

SEQ ID NO: 13506 - protein, 905 aa, Homo sapiens
MLILVANAIVGVWQERNAESAIEALKEYEPEMGKVIRSDRKGVQRIRARDIVPGDIVEVAVGDKVPADLRLIEIKSTTLRVDQSILTGESVSVTKHTEAIPDPRAVNQDKKNMLFSGTNITSGKAVGVAVATGLHTELGKIRSQMAAVEPERTPLQRKLDEFGRQLSHAISVICVAVWVINIGHFADPAHGGSWLRGAVYYFKIAVALAVAAIPEGLPAVITTCLALGTRRMARKNAIVRSLPSVETLGCTSVICSDKTGTLTTNQMSVCRMFVVAEADAGSCLLHEFTISGTTYTPEGEVRQGDQPVRCGQFDGLVELATICALCNDSALDYNEAKGVYEKVGEATETALTCLVEKMNVFDTDLQALSRVERAGACNTVIKQLMRKEFTLEFSRDRKSMSVYCTPTRPHPTGQGSKMFVKGAPESVIERCSSVRVGSRTAPLTPTSREQILAKIRDWGSGSDTLRCLALATRDAPPRKEDMELDDCSKFVQYETDLTFVGCVGMLDPPRPEVAACITRCYQAGIRVVMITGDNKGTAVAICRRLGIFGDTEDVAGKAYTGREFDDLSPEQQRQACRTARCFARVEPAHKSRIVENLQSFNEITAMTGDGVNDAPALKKAEIGIAMGSGTAVAKSAAEMVLSDDNFASIVAAVEEGRAIYSNMKQFIRYLISSNVGEVVCIFLTAILGLPEALIPVQLLWVNLVTDGLPATALGFNPPDLDIMEKLPRSPREALISGWLFFRYLAIGVYVGLATVAAATWWFVYDAEGPHINFYQLRNFLKCSEDNPLFAGIDCEVFESRFPTTMALSVLVTIEMCNALNSVSENQSLLRMPPWMNPWLLVAVAMSMALHFLILLVPPLPLIFQVTPLSGRQWVVVLQISLPVILLDEALKYLSRNHMHEEMSQK

SEQ ID NO: 13507 - protein, 1043 aa, Homo sapiens
MEAAHLLPAADVLRHFSVTAEGGLSPAQVTGARERYGPNELPSEEGKSLWELVLEQFEDLLVRILLLAALVSFVLAWFEEGEETTTAFVEPLVIMLILVANAIVGVWQERNAESAIEALKEYEPEMGKVIRSDRKGVQRIRARDIVPGDIVEVAVGDKVPADLRLIEIKSTTLRVDQSILTGESVSVTKHTEAIPDPRAVNQDKKNMLFSGTNITSGKAVGVAVATGLHTELGKIRSQMAAVEPERTPLQRKLDEFGRQLSHAISVICVAVWVINIGHFADPAHGGSWLRGAVYYFKIAVALAVAAIPEGLPAVITTCLALGTRRMARKNAIVRSLPSVETLGCTSVICSDKTGTLTTNQMSVCRMFVVAEADAGSCLLHEFTISGTTYTPEGEVRQGDQPVRCGQFDGLVELATICALCNDSALDYNEAKGVYEKVGEATETALTCLVEKMNVFDTDLQALSRVERAGACNTVIKQLMRKEFTLEFSRDRKSMSVYCTPTRPHPTGQGSKMFVKGAPESVIERCSSVRVGSRTAPLTPTSREQILAKIRDWGSGSDTLRCLALATRDAPPRKEDMELDDCSKFVQYETDLTFVGCVGMLDPPRPEVAACITRCYQAGIRVVMITGDNKGTAVAICRRLGIFGDTEDVAGKAYTGREFDDLSPEQQRQACRTARCFARVEPAHKSRIVENLQSFNEITAMTGDGVNDAPALKKAEIGIAMGSGTAVAKSAAEMVLSDDNFASIVAAVEEGRAIYSNMKQFIRYLISSNVGEVVCIFLTAILGLPEALIPVQLLWVNLVTDGLPATALGFNPPDLDIMEKLPRSPREALISGWLFFRYLAIGVYVGLATVAAATWWFVYDAEGPHINFYQLRNFLKCSEDNPLFAGIDCEVFESRFPTTMALSVLVTIEMCNALNSVSENQSLLRMPPWMNPWLLVAVAMSMALHFLILLVPPLPLIFQVTPLSGRQWVVVLQISLPVILLDEALKYLSRNHMHACLYPGLLRTVSQAWSRQPLTTSWTPDHTGRNEPEVSAGNRVESPVCTSD

SEQ ID NO: 13508 - protein, 116 aa, Homo sapiens [sequence omitted]

SEQ ID NO: 13509 - protein, 216 aa, Homo sapiens
MLRLSERNMKVLLAAALIAGSVFFLLLPGPSAADEKKKGPKVTVKVYFDLRIGDEDVGRVIFGLFGKTVPKTVDNFVALATGEKGFGYKNSKFHRVIKDFMIQGGDFTRGDGTGGKSIYGERFPDENFKLKHYGPGWVSMANAGKDTNGSQFFITTVKTAWLDGKHVVFGKVLEGMEVVRKVESTKTDSRDKPLKDVIIADCGKIEVEKPFAIAKE

SEQ ID NO: 13510 - protein, 216 aa, Homo sapiens; identical to SEQ ID NO: 13509

SEQ ID NO: 13511 - protein, 450 aa, Homo sapiens
MSCLMVERCGEILFENPDQNAKCVCMLGDIRLRGQTGVRAERRGSYPFIDFRLLNSTTYSGEIGTKKKVKRLLSFQRYFHASRLLRGIIPQAPLHLLDEDYLGQARHMLSKVGMWDFDIFLFDRLTNGNSLVTLLCHLFNTHGLIHHFKLDMVTLHRFLVMVQEDYHSQNPYHNAVHAADVTQAMHCYLKEPKLASFLTPLDIMLGLLAAAAHDVDHPGVNQPFLIKTNHHLANLYQNMSVLENHHWRSTIGMLRESRLLAHLPKEMTQDIEQQLGSLILATDINRQNEFLTRLKAHLHNKDLRLEDAQDRHFMLQIALKCADICNPCRIWEMSKQWSERVCEEFYRQGELEQKFELEISPLCNQQKDSIPSIQIGFMSYIVEPLFREWAHFTGNSTLSENMLGHLAHNKAQWKSLLPRQHRSRGSSGSGPDHDHAGQGTESEEQEGDSP

SEQ ID NO: 13512 - protein, 438 aa, Homo sapiens [sequence omitted]

SEQ ID NO: 13513 - protein, 658 aa, Homo sapiens
MVPRLLLRAWPRGPAVGPGAPSRPLSAGSGPGQYLQRSIVPTMHYQDSLPRLPIPKLEDTIRRYLSAQKPLLNDGQFRKTEQFCKSFENGIGKELHEQLVALDKQNKHTSYISGPWFDMYLSARDSVVLNFNPFMAFNPDPKSEYNDQLTRATNMTVSAIRFLKTLRAGLLEPEVFHLNPAKSDTITFKRLIRFVPSSLSWYGAYLVNAYPLDMSQYFRLFNSTRLPKPSRDELFTDDKARHLLVLRKGNFYIFDVLDQDGNIVSPSEIQAHLKYILSDSSPAPEFPLAYLTSENRDIWAELRQKLMSSGNEESLRKVDSAVFCLCLDDFPIKDLVHLSHNMLHGDGTNRWFDKSFNLIIAKDGSTAVHFEHSWGDGVAVLRFFNEVFKDSTQTPAVTPQSQPATTDSTVTVQKLNFELTDALKTGITAAKEKFDATMKTLTIDCVQFQRGGKEFLKKQKLSPDAVAQLAFQMAFLRQYGQTVATYESCSTAAFKHGRTETIRPASVYTKRCSEAFVREPSRHSAGELQQMMVECSKYHGQLTKEAAMGQGFDRHLFALRHLAAAKGIILPELYLDPAYGQINHNVLSTSTLSSPAVNLGGFAPVVSDGFGVGYAVHDNWIGCNVSSYPGRNAREFLQCVEKALEDMFDALEGKSIKS

SEQ ID NO: 13514 - protein, 155 aa, Homo sapiens
MGKIALQLKATLENITNLRPVGEDFRWYLKMKCGNCGEISDKWQYIRLMDSVALKGGRGSASMVQKCKLCARENSIEILSSTIKPYNNFKTIVEFECRGLEPVDFQPQAGFAAEGVESGTAFSDINLQEKDWTDYDEKAQESVGIYEVTHQFVKC

SEQ ID NO: 13515 - protein, 160 aa, Homo sapiens
MGKIALQLKATLENITNLRPVGEDFRWYLKMKCGNCGEISDKWQYIRLMDSVALKGGRGSASMVQKCKLCARENSIEILSSTIKPYNAEDNENFKTIVEFECRGLEPVDFQPQAGFAAEGVESGTAFSDINLQEKDWTDYDEKAQESVGIYEVTHQFVKC

SEQ ID NO: 13516 - protein, 130 aa, Homo sapiens
MKCGNCGEISDKWQYIRLMDSVALKGGRGSASMVQKCKLCARENSIEILSSTIKPYNAEDNENFKTIVEFECRGLEPVDFQPQAGFAAEGVESGTAFSDINLQEKDWTDYDEKAQESVGIYEVTHQFVKC

SEQ ID NO: 13517 - protein, 926 aa, Homo sapiens
MLQVHRTGLGRLGVSLSKGLHHKAVLAVRREDVNAWERRAPLAPKHIKGITNLGYKVLIQPSNRRAIHDKDYVKAGGILQEDISEACLILGVKRPPEEKLMSRKTYAFFSHTIKAQEANMGLLDEILKQEIRLIDYEKMVDHRGVRVVAFGQWAGVAGMINILHGMGLRLLALGHHTPFMHIGMAHNYRNSSQAVQAVRDAGYEISLGLMPKSIGPLTFVFTGTGNVSKGAQAIFNELPCEYVEPHELKEVSQTGDLRKVYGTVLSRHHHLVRKTDAVYDPAEYDKHPERYISRFNTDIAPYTTCLINGIYWEQNTPRLLTRQDAQSLLAPGKFSPAGVEGCPALPHKLVAICDISADTGGSIEFMTECTTIEHPFCMYDADQHIIHDSVEGSGILMCSIDNLPAQLPIEATECFGDMLYPYVEEMILSDATQPLESQNFSPVVRDAVITSNGTLPDKYKYIQTLRESRERAQSLSMGTRRKVLVLGSGYISEPVLEYLSRDGNIEITVGSDMKNQIEQLGKKYNINPVSMDICKQEEKLGFLVAKQDLVISLLPYVLHPLVAKACITNKVNMVTASYITPALKELEKSVEDAGITIIGELGLDPGLDHMLAMETIDKAKEVGATIESYISYCGGLPAPEHSNNPLRYKFSWSPVGVLMNVMQSATYLLDGKVVNVAGGISFLDAVTSMDFFPGLNLEGYPNRDSTKYAEIYGISSAHTLLRGTLRYKGYMKALNGFVKLGLINREALPAFRPEANPLTWKQLLCDLVGISPSSEHDVLKEAVLKKLGGDNTQLEAAEWLGLLGDEQVPQAESILDALSKHLVMKLSYGPEEKDMIVMRDSFGIRHPSGHLEHKTIDLVAYGDINGFSAMAKTVGLPTAMAAKMLLDGEIGAKGLMGPFSKEIYGPILERIKAEGIIYTTQSTIKP

SEQ ID NO: 13518 - protein, 926 aa, Homo sapiens; identical to SEQ ID NO: 13517

SEQ ID NO: 13519 - protein, 1992 aa, Homo sapiens
MRILKRFLACIQLLCVCRLDWANGYYRQQRKLVEEIGWSYTGALNQKNWGKKYPTCNSPKQSPINIDEDLTQVNVNLKKLKFQGWDKTSLENTFIHNTGKTVEINLTNDYRVSGGVSEMVFKASKITFHWGKCNMSSDGSEHSLEGQKFPLEMQIYCFDADRFSSFEEAVKGKGKLRALSILFEVGTEENLDFKAIIDGVESVSRFGKQAALDPFILLNLLPNSTDKYYIYNGSLTSPPCTDTVDWIVFKDTVSISESQLAVFCEVLTMQQSGYVMLMDYLQNNFREQQYKFSRQVFSSYTGKEEIHEAVCSSEPENVQADPENYTSLLVTWERPRVVYDTMIEKFAVLYQQLDGEDQTKHEFLTDGYQDLGAILNNLLPNMSYVLQIVAICTNGLYGKYSDQLIVDMPTDNPELDLFPELIGTEEIIKEEEEGKDIEEGAIVNPGRDSATNQIRKKEPQISTTTHYNRIGTKYNEAKTNRSPTRGSEFSGKGDVPNTSLNSTSQPVTKLATEKDISLTSQTVTELPPHTVEGTSASLNDGSKTVLRSPHMNLSGTAESLNTVSITEYEEESLLTSFKLDTGAEDSSGSSPATSAIPFISENISQGYIFSSENPETITYDVLIPESARNASEDSTSSGSEESLKDPSMEGNVWFPSSTDITAQPDVGSGRESFLQTNYTEIRVDESEKTTKSFSAGPVMSQGPSVTDLEMPHYSTFAYFPTEVTPHAFTPSSRQQDLVSTVNVVYSQTTQPVYNGETPLQPSYSSEVFPLVTPLLLDNQILNTTPAASSSDSALHATPVFPSVDVSFESILSSYDGAPLLPFSSASFSSELFRHLHTVSQILPQVTSATESDKVPLHASLPVAGGDLLLEPSLAQYSDVLSTTHAASETLEFGSESGVLYKTLMFSQVEPPSSDAMMHARSSGPEPSYALSDNEGSQHIFTVSYSSAIPVHDSVGVTYQGSLFSGPSHIPIPKSSLITPTASLLQPTHALSGDGEWSGASSDSEFLLPDTDGLTALNISSPVSVAEFTYTTSVFGDDNKALSKSEIIYGNETELQIPSFNEMVYPSESTVMPNMYDNVNKLNASLQETSVSISSTKGMFPGSLAHTTTKVFDHEISQVPENNFSVQPTHTVSQASGDTSLKPVLSANSEPASSDPASSEMLSPSTQLLFYETSASFSTEVLLQPSFQASDVDTLLKTVLPAVPSDPILVETPKVDKISSTMLHLIVSNSASSENMLHSTSVPVFDVSPTSHMHSASLQGLTISYASEKYEPVLLKSESSHQVVPSLYSNDELFQTANLEINQAHPPKGRHVFATPVLSIDEPLNTLINKLIHSDEILTSTKSSVTGKVFAGIPTVASDTFVSTDHSVPIGNGHVAITAVSPHRDGSVTSTKLLFPSKATSELSHSAKSDAGLVGGGEDGDTDDDGDDDDDRDSDGLSIHKCMSCSSYRESQEKVMNDSDTHENSLMDQNNPISYSLSENSEEDNRVTSVSSDSQTGMDRSPGKSPSANGLSQKHNDGKEENDIQTGSALLPLSPESKAWAVLTSDEESGSGQGTSDSLNENETSTDFSFADTNEKDADGILAAGDSEITPGFPQSPTSSVTSENSEVFHVSEAEASNSSHESRIGLAEGLESEKKAVIPLVIVSALTFICLVVLVGILIYWRKCFQTAHFYLEDSTSPRVISTPPTPIFPISDDVGAIPIKHFPKHVADLHASSGFTEEFETLKEFYQEVQSCTVDLGITADSSNHPDNKHKNRYINIVAYDHSRVKLAQLAEKDGKLTDYINANYVDGYNRPKAYIAAQGPLKSTAEDFWRMIWEHNVEVIVMITNLVEKGRRKCDQYWPADGSEEYGNFLVTQKSVQVLAYYTVRNFTLRNTKIKKGSQKGRPSGRVVTQYHYTQWPDMGVPEYSLPVLTFVRKAAYAKRHAVGPVVVHCSAGVGRTGTYIVLDSMLQQIQHEGTVNIFGFLKHIRSQRNYLVQTEEQYSSFLDQQAKQS

SEQ ID NO: 13520 - protein, 1455 aa, Homo sapiens
MRILKRFLACIQLLCVCRLDWANGYYRQQRKLVEEIGWSYTGALNQKNWGKKYPTCNSPKQSPINIDEDLTQVNVNLKKLKFQGWDKTSLENTFIHNTGKTVEINLTNDYRVSGGVSEMVFKASKITFHWGKCNMSSDGSEHSLEGQKFPLEMQIYCFDADRFSSFEEAVKGKGKLRALSILFEVGTEENLDFKAIIDGVESVSRFGKQAALDPFILLNLLPNSTDKYYIYNGSLTSPPCTDTVDWIVFKDTVSISESQLAVFCEVLTMQQSGYVMLMDYLQNNFREQQYKFSRQVFSSYTGKEEIHEAVCSSEPENVQADPENYTSLLVTWERPRVVYDTMIEKFAVLYQQLDGEDQTKHEFLTDGYQDLGAILNNLLPNMSYVLQIVAICTNGLYGKYSDQLIVDMPTDNPELDLFPELIGTEEIIKEEEEGKDIEEGAIVNPGRDSATNQIRKKEPQISTTTHYNRIGTKYNEAKTNRSPTRGSEFSGKGDVPNTSLNSTSQPVTKLATEKDISLTSQTVTELPPHTVEGTSASLNDGSKTVLRSPHMNLSGTAESLNTVSITEYEEESLLTSFKLDTGAEDSSGSSPATSAIPFISENISQGYIFSSENPETITYDVLIPESARNASEDSTSSGSEESLKDPSMEGNVWFPSSTDITAQPDVGSGRESFLQTNYTEIRVDESEKTTKSFSAGPVMSQGPSVTDLEMPHYSTFAYFPTEVTPHAFTPSSRQQDLVSTVNVVYSQTTQPVYNEASNSSHESRIGLAEGLESEKKAVIPLVIVSALTFICLVVLVGILIYWRKCFQTAHFYLEDSTSPRVISTPPTPIFPISDDVGAIPIKHFPKHVADLHASSGFTEEFETLKEFYQEVQSCTVDLGITADSSNHPDNKHKNRYINIVAYDHSRVKLAQLAEKDGKLTDYINANYVDGYNRPKAYIAAQGPLKSTAEDFWRMIWEHNVEVIVMITNLVEKGRRKCDQYWPADGSEEYGNFLVTQKSVQVLAYYTVRNFTLRNTKIKKGSQKGRPSGRVVTQYHYTQWPDMGVPEYSLPVLTFVRKAAYAKRHAVGPVVVHCSAGVGRTGTYIVLDSMLQQIQHEGTVNIFGFLKHIRSQRNYLVQTEEQYVFIHDTLVEAILSKETEVLDSHIHAYVNALLIPGPAGKTKLEKQFQLLSQSNIQQSDYSAALKQCNREKNRTSSIIPVERSRVGISSLSGEGTDYINASYIMGYYQSNEFIITQHPLLHTIKDFWRMIWDHNAQLVVMIPDGQNMAEDEFVYWPNKDEPINCESFKVTLMAEEHKCLSNEEKLIIQDFILEATQDDYVLEVRHFQCPKWPNPDSPISKTFELISVIKEEAANRDGPMIVHDEHGGVTAGTFCALTTLMHQLEKENSVDVYQVAKMINLMRPGVFADIEQYQFLYKVILSLVSTRQEENPSTSLDSNGAALPDGNIAESLESLV

SEQ ID NO: 13521 - protein, 2314 aa, Homo sapiens
MRILKRFLACIQLLCVCRLDWANGYYRQQRKLVEEIGWSYTGALNQKNWGKKYPTCNSPKQSPINIDEDLTQVNVNLKKLKFQGWDKTSLENTFIHNTGKTVEINLTNDYRVSGGVSEMVFKASKITFHWGKCNMSSDGSEHSLEGQKFPLEMQIYCFDADRFSSFEEAVKGKGKLRALSILFEVGTEENLDFKAIIDGVESVSRFGKQAALDPFILLNLLPNSTDKYYIYNGSLTSPPCTDTVDWIVFKDTVSISESQLAVFCEVLTMQQSGYVMLMDYLQNNFREQQYKFSRQVFSSYTGKEEIHEAVCSSEPENVQADPENYTSLLVTWERPRVVYDTMIEKFAVLYQQLDGEDQTKHEFLTDGYQDLGAILNNLLPNMSYVLQIVAICTNGLYGKYSDQLIVDMPTDNPELDLFPELIGTEEIIKEEEEGKDIEEGAIVNPGRDSATNQIRKKEPQISTTTHYNRIGTKYNEAKTNRSPTRGSEFSGKGDVPNTSLNSTSQPVTKLATEKDISLTSQTVTELPPHTVEGTSASLNDGSKTVLRSPHMNLSGTAESLNTVSITEYEEESLLTSFKLDTGAEDSSGSSPATSAIPFISENISQGYIFSSENPETITYDVLIPESARNASEDSTSSGSEESLKDPSMEGNVWFPSSTDITAQPDVGSGRESFLQTNYTEIRVDESEKTTKSFSAGPVMSQGPSVTDLEMPHYSTFAYFPTEVTPHAFTPSSRQQDLVSTVNVVYSQTTQPVYNGETPLQPSYSSEVFPLVTPLLLDNQILNTTPAASSSDSALHATPVFPSVDVSFESILSSYDGAPLLPFSSASFSSELFRHLHTVSQILPQVTSATESDKVPLHASLPVAGGDLLLEPSLAQYSDVLSTTHAASETLEFGSESGVLYKTLMFSQVEPPSSDAMMHARSSGPEPSYALSDNEGSQHIFTVSYSSAIPVHDSVGVTYQGSLFSGPSHIPIPKSSLITPTASLLQPTHALSGDGEWSGASSDSEFLLPDTDGLTALNISSPVSVAEFTYTTSVFGDDNKALSKSEIIYGNETELQIPSFNEMVYPSESTVMPNMYDNVNKLNASLQETSVSISSTKGMFPGSLAHTTTKVFDHEISQVPENNFSVQPTHTVSQASGDTSLKPVLSANSEPASSDPASSEMLSPSTQLLFYETSASFSTEVLLQPSFQASDVDTLLKTVLPAVPSDPILVETPKVDKISSTMLHLIVSNSASSENMLHSTSVPVFDVSPTSHMHSASLQGLTISYASEKYEPVLLKSESSHQVVPSLYSNDELFQTANLEINQAHPPKGRHVFATPVLSIDEPLNTLINKLIHSDEILTSTKSSVTGKVFAGIPTVASDTFVSTDHSVPIGNGHVAITAVSPHRDGSVTSTKLLFPSKATSELSHSAKSDAGLVGGGEDGDTDDDGDDDDDRDSDGLSIHKCMSCSSYRESQEKVMNDSDTHENSLMDQNNPISYSLSENSEEDNRVTSVSSDSQTGMDRSPGKSPSANGLSQKHNDGKEENDIQTGSALLPLSPESKAWAVLTSDEESGSGQGTSDSLNENETSTDFSFADTNEKDADGILAAGDSEITPGFPQSPTSSVTSENSEVFHVSEAEASNSSHESRIGLAEGLESEKKAVIPLVIVSALTFICLVVLVGILIYWRKCFQTAHFYLEDSTSPRVISTPPTPIFPISDDVGAIPIKHFPKHVADLHASSGFTEEFETLKEFYQEVQSCTVDLGITADSSNHPDNKHKNRYINIVAYDHSRVKLAQLAEKDGKLTDYINANYVDGYNRPKAYIAAQGPLKSTAEDFWRMIWEHNVEVIVMITNLVEKGRRKCDQYWPADGSEEYGNFLVTQKSVQVLAYYTVRNFTLRNTKIKKGSQKGRPSGRVVTQYHYTQWPDMGVPEYSLPVLTFVRKAAYAKRHAVGPVVVHCSAGVGRTGTYIVLDSMLQQIQHEGTVNIFGFLKHIRSQRNYLVQTEEQYVFIHDTLVEAILSKETEVLDSHIHAYVNALLIPGPAGKTKLEKQFQLLSQSNIQQSDYSAALKQCNREKNRTSSIIPVERSRVGISSLSGEGTDYINASYIMGYYQSNEFIITQHPLLHTIKDFWRMIWDHNAQLVVMIPDGQNMAEDEFVYWPNKDEPINCESFKVTLMAEEHKCLSNEEKLIIQDFILEATQDDYVLEVRHFQCPKWPNPDSPISKTFELISVIKEEAANRDGPMIVHDEHGGVTAGTFCALTTLMHQLEKENSVDVYQVAKMINLMRPGVFADIEQYQFLYKVILSLVSTRQEENPSTSLDSNGAALPDGNIAESLESLV

SEQ ID NO: 13522 - protein, 2314 aa, Homo sapiens; identical to SEQ ID NO: 13521

SEQ ID NO: 13523 - protein, 167 aa, Homo sapiens
MRILKRFLACIQLLCVCRLDWANGYYRQQRKLVEEIGWSYTGALNQKNWGKKYPTCNSPKQSPINIDEDLTQVNVNLKKLKFQGWDKTSLENTFIHNTGKTVEINLTNDYRVSGGVSEMVFKASKITFHWGKCNMSSDGSEHSLEGQKFPLEVSQEICCVLFYFLNN

SEQ ID NO: 13524 - protein, 528 aa, Homo sapiens
MQGPWVLLLLGLRLQLSLGVIPAEEENPAFWNRQAAEALDAAKKLQPIQKVAKNLILFLGDGLGVPTVTATRILKGQKNGKLGPETPLAMDRFPYLALSKTYNVDRQVPDSAATATAYLCGVKANFQTIGLSAAARFNQCNTTRGNEVISVMNRAKQAGKSVGVVTTTRVQHASPAGTYAHTVNRNWYSDADMPASARQEGCQDIATQLISNMDIDVILGGGRKYMFPMGTPDPEYPADASQNGIRLDGKNLVQEWLAKHQGAWYVWNRTELMQASLDQSVTHLMGLFEPGDTKYEIHRDPTLDPSLMEMTEAALRLLSRNPRGFYLFVEGGRIDHGHHEGVAYQALTEAVMFDDAIERAGQLTSEEDTLTLVTADHSHVFSFGGYTLRGSSIFGLAPSKAQDSKAYTSILYGNGPGYVFNSGVRPDVNESESGSPDYQQQAAVPLSSETHGGEDVAVFARGPQAHLVHGVQEQSFVAHVMAFAACLEPYTACDLAPPACTTDAAHPVAASLPLLAGTLLLLGASAAP

SEQ ID NO: 13525 - protein, 439 aa, Homo sapiens
MDRFPYLALSKTYNVDRQVPDSAATATAYLCGVKANFQTIGLSAAARFNQCNTTRGNEVISVMNRAKQAGKSVGVVTTTRVQHASPAGTYAHTVNRNWYSDADMPASARQEGCQDIATQLISNMDIDVILGGGRKYMFPMGTPDPEYPADASQNGIRLDGKNLVQEWLAKHQGAWYVWNRTELMQASLDQSVTHLMGLFEPGDTKYEIHRDPTLDPSLMEMTEAALRLLSRNPRGFYLFVEGGRIDHGHHEGVAYQALTEAVMFDDAIERAGQLTSEEDTLTLVTADHSHVFSFGGYTLRGSSIFGLAPSKAQDSKAYTSILYGNGPGYVFNSGVRPDVNESESGSPDYQQQAAVPLSSETHGGEDVAVFARGPQAHLVHGVQEQSFVAHVMAFAACLEPYTACDLAPPACTTDAAHPVAASLPLLAGTLLLLGASAAP

SEQ ID NO: 13526 - protein, 528 aa, Homo sapiens; identical to SEQ ID NO: 13524

SEQ ID NO: 13527 - protein, 380 aa, Homo sapiens
MASLPVLQKESVFQSGAHAYRIPALLYLPGQQSLLAFAEQRASKKDEHAELIVLRRGDYDAPTHQVQWQAQEVVAQARLDGHRSMNPCPLYDAQTGTLFLFFIAIPGQVTEQQQLQTRANVTRLCQVTSTDHGRTWSSPRDLTDAAIGPAYREWSTFAVGPGHCLQLHDRARSLVVPAYAYRKLHPIQRPIPSAFCFLSHDHGRTWARGHFVAQDTLECQVAEVETGEQRVVTLNARSHLRARVQAQSTNDGLDFQESQLVKKLVEPPPQGCQGSVISFPSPRSGPGSPAQWLLYTHPTHSWQRADLGAYLNPRPPAPEAWSEPVLLAKGSCAYSDLQSMGTGPDGSPLFGCLYEANDYEEIVFLMFTLKQAFPAEYLPQ

SEQ ID NO: 13528 - protein, 340 aa, Homo sapiens
MVTLRKRTLKVLTFLVLFIFLTSFFLNYSHTMVATTWFPKQMVLELSENLKRLIKHRPCTCTHCIGQRKLSAWFDERFNQTMQPLLTAQNALLEDDTYRWWLRLQREKKPNNLNDTIKELFRVVPGNVDPMLEKRSVGCRRCAVVGNSGNLRESSYGPEIDSHDFVLRMNKAPTAGFEADVGTKTTHHLVYPESFRELGDNVSMILVPFKTIDLEWVVSAITTGTISHTYIPVPAKIRVKQDKILIYHPAFIKYVFDNWLQGHGRYPSTGILSVIFSMHVCDEVDLYGFGADSKGNWHHYWENNPSAGAFRKTGVHDADFESNVTATLASINKIRIFKGR

SEQ ID NO: 13529 - protein, 340 aa, Homo sapiens; identical to SEQ ID NO: 13528

SEQ ID NO: 13530 - protein, 340 aa, Homo sapiens; identical to SEQ ID NO: 13528

SEQ ID NO: 13531 - protein, 340 aa, Homo sapiens; identical to SEQ ID NO: 13528

SEQ ID NO: 13532 - protein, 245 aa, Homo sapiens
MAEREEDDDTEEAWMQLRPTEPLPSQCCGSGCSPCVFDLYHRDLARGIVDDLEIQRAYTPISPANAEGYFEVLIKCYQMGLMSRYVESWRVGDTAFWRGPFGDFFYKPNQYGELLLLAAGTGLAPMVPILQSITDNENDETFVTLVGCFKTFESIYLKTFLQEQARFWNVRTFFVLSQESSSEQLPWSYQEKTHFGHLGQDLIKELVSCCRRKPFALVCGSAEFTKDIARCLLCAGLTEDSYFLF

SEQ ID NO: 13533 - protein, 362 aa, Homo sapiens
MTGLAGEWLTATANTNLFTYEIAPVFTVMETILLKKMYEIIGWEETSRWNIFTCISSLYGILVAHYKQYPEIKTKGMTALPCIVLFVSEQGQTPFCVCATAGSTVYGAFDPLPDIADICEKHKLWMHVDAAWGGGLLLSRNYSYKLSGIESSEGIFIHFLIPSALSALLTGTVNIISASAPAKLAAWQQYPIHKMADAQSLQGLLDACNQMQAEYLFQSGKLYNVDFDTADKTIQCGRHVDIFKQWLMWKAKGTLGFEEQINKYMELAKYFYKVLKKKDNFKLVFDAESRQLHFQTVDNIREARLKHIPKGFERDQELRKIAPKIKAQMMMEGTIMISYQPCGDKKDVDYLIDEIERLGKDL

SEQ ID NO: 13534 - protein, 334 aa, Homo sapiens
MEAAHFFEGTEKLLEVWFSRQQPDANQGSGDLRTIPRSEWDILLKDVQCSIISVTKTDKQEAYVLSESSMFVSKRRFILKTCGTTLLLKALVPLLKLARDYSGFDSIQSFFYSRKNFMKPSHQGYPHRNFQEEIEFLNAIFPNGAAYCMGRMNSDCWYLYTLDFPESRVISQPDQTLEILMSELDPAVMDQFYMKDGVTAKDVTRESGIRDLIPGSVIDATMFNPCGYSMNGMKSDGTYWTIHITPEPEFSYVSFETNLSQTSYDDLIRKVVEVFKPGKFVTTLFVNQSSKCRTVLASPQKIEGFKRLDCQSAMFNDYNFVFTSFAKKQQQQQS

SEQ ID NO: 13535 - protein, 334 aa, Homo sapiens; identical to SEQ ID NO: 13534

SEQ ID NO: 13536 - protein, 397 aa, Homo sapiens
MNAGSDPVVIVSAARTIIGSFNGALAAVPVQDLGSTVIKEVLKRATVAPEDVSEVIFGHVLAAGCGQNPVRQASVGAGIPYSVPAWSCQMICGSGLKAVCLAVQSIGIGDSSIVVAGGMENMSKAPHLAYLRTGVKIGEMPLTDSILCDGLTDAFHNCHMGITAENVAKKWQVSREDQDKVAVLSQNRTENAQKAGHFDKEIVPVLVSTRKGLIEVKTDEFPRHGSNIEAMSKLKPYFLTDGTGTVTPANASGINDGAAAVVLMKKSEADKRGLTPLARIVSWSQVGVEPSIMGIGPIPAIKQAVTKAGWSLEDVDIFEINEAFAAVSAAIVKELGLNPEKVNIEGGAIALGHPLGASGCRILVTLLHTLERMGRSRGVAALCIGGGMGIAMCVQRE

SEQ ID NO: 13537 - protein, 397 aa, Homo sapiens; identical to SEQ ID NO: 13536

SEQ ID NO: 13538 - protein, 397 aa, Homo sapiens; identical to SEQ ID NO: 13536

SEQ ID NO: 13539 - protein, 140 aa, Homo sapiens
MLSRAVCGTSRQLAPVLGYLGSRQKHSLPDLPYDYGALEPHINAQIMQLHHSKHHAAYVNNLNVTEEKYQEALAKGRFQAERREAVPGRGDPREPGPIRTGLSVEENSLRICTGSEFSRHDSLSFKHMVYLIVEGVPRWV

SEQ ID NO: 13540 - protein, 222 aa, Homo sapiens
MLSRAVCGTSRQLAPVLGYLGSRQKHSLPDLPYDYGALEPHINAQIMQLHHSKHHAAYVNNLNVTEEKYQEALAKGDVTAQIALQPALKFNGGGHINHSIFWTNLSPNGGGEPKGELLEAIKRDFGSFDKFKEKLTAASVGVQGSGWGWLGFNKERGHLQIAACPNQDPLQGTTGLIPLLGIDVWEHAYYLQYKNVRPDYLKAIWNVINWENVTERYMACKK

SEQ ID NO: 13541 - protein, 222 aa, Homo sapiens; identical to SEQ ID NO: 13540

SEQ ID NO: 13542 - protein, 222 aa, Homo sapiens; identical to SEQ ID NO: 13540

SEQ ID NO: 13543 - protein, 283 aa, Homo sapiens
MVYMFLYDSTHGKFHGTIKAENGKLVINGNPITIFQERDPSKIKWGTAGAEYIVEPTGTFTTMEKTGAHLQGGAKRVIISAPSADASVFIMGVNNEKYDNSLKIISNASCTTNCLAPRAKVLHDNFGIVKGLMTTVHAITATQKTVDGPSRKLWHDGGGTLQNIIPASTGTAKAVGKVIPELNGKLTGMAFCVPTANVSVVDLIYHLEKPTKYHGIKKGILGYNTEHQVVSFDFNSDIHSSTFDVGAGIALNNHCVKLISWYENEFGYSNRVVDVMAHKSSKE

SEQ ID NO: 13544 - protein, 228 aa, Homo sapiens
MVYMFLYDSTHGKFHGTIKAENGKLVINGNPITIFQERDPSKIKWGTAGAEYIVEPTGTFTTMEKTGAHLQGGAKRVIISAPSADASVFIMGVNNEKYDNSLKIISNASCTTNCLAPRAKVLHDNFGIVKGLMTTVHAITATQKTVDGPSRKLWHDGGGTLQNIIPASTGTAKAVGKVIPELNGKLTGMAFCVPTANVSVVDLIYHLEKPTKYHGIKKVVKEASEGSL

SEQ ID NO: 13545 - protein, 72 aa, Homo sapiens
MLGLALPSTTTVSSSFPGMRMNLATATGWWTSWPTSPPRSKTPEPPAPVTAQEEKRGPHCWGVPATLSPLPQ

SEQ ID NO: 13546 - protein, 779 aa, Homo sapiens
MRIEERKSQHLTGLTDEKVKAYLSLHPQVLDEFVSESVSAETVEKWLKRKNNKSEDESAPKEVSRYQDTNMQGVVYELNSYIEQRLDTGGDNQLLLYELSSIIKIATKADGFALYFLGECNNSLCIFTPPGIKEGKPRLIPAGPITQGTTVSAYVAKSRKTLLVEDILGDERFPRGTGLESGTRIQSVLCLPIVTAIGDLIGILELYRHWGKEAFCLSHQEVATANLAWASVAIHQVQVCRGLAKQTELNDFLLDVSKTYFDNIVAIDSLLEHIMIYAKNLVNADRCALFQVDHKNKELYSDLFDIGEEKEGKPVFKKTKEIRFSIEKGIAGQVARTGEVLNIPDAYADPRFNREVDLYTGYTTRNILCMPIVSRGSVIGVVQMVNKISGSAFSKTDENNFKMFAVFCALALHCANMYHRIRHSECIYRVTMEKLSYHSICTSEEWQGLMQFTLPVRLCKEIELFHFDIGPFENMWPGIFVYMVHRSCGTSCFELEKLCRFIMSVKKNYRRVPYHNWKHAVTVAHCMYAILQNNHTLFTDLERKGLLIACLCHDLDHRGFSNSYLQKFDHPLAALYSTSTMEQHHFSQTVSILQLEGHNIFSTLSSSEYEQVLEIIRKAIIATDLALYFGNRKQLEEMYQTGSLNLNNQSHRDRVIGLMMTACDLCSVTKLWPVTKLTANDIYAEFWAEGDEMKKLGIQPIPMMDRDKKDEVPQGQLGFYNAVAIPCYTTLTQILPPTEPLLKACRDNLSQWEKVIRGEETATWISSPSVAQKAAASED

SEQ ID NO: 13547 - protein, 332 aa, Homo sapiens
MLLLAAAFLVAFVLLLYMVSPLISPKPLALPGAHVVVTGGSSGIGKCIAIECYKQGAFITLVARNEDKLLQAKKEIEMHSINDKQVVLCISVDVSQDYNQVENVIKQAQEKLGPVDMLVNCAGMAVSGKFEDLEVSTFERLMSINYLGSVYPSRAVITTMKERRVGRIVFVSSQAGQLGLFGFTAYSASKFAIRGLAEALQMEVKPYNVYITVAYPPDTDTPGFAEENRTKPLETRLISETTSVCKPEQVAKQIVKDAIQGNFNSSLGSDGYMLSALTCGMAPVTSITEGLQQVVTMGLFRTIALFYLGSFDSIVRRCMMQREKSENADKTA

SEQ ID NO: 13548 - protein, 332 aa, Homo sapiens; identical to SEQ ID NO: 13547

SEQ ID NO: 13549 - protein, 444 aa, Homo sapiens
MSSTSPNLQKAIDLASKAAQEDKAGNYEEALQLYQHAVQYFLHVVKYEAQGDKAKQSIRAKCTEYLDRAEKLKEYLKNKEKKAQKPVKEGQPSPADEKGNDSDGEGESDDPEKKKLQNQLQGAIVIERPNVKWSDVAGLEGAKEALKEAVILPIKFPHLFTGKRTPWRGILLFGPPGTGKSYLAKAVATEANNSTFFSISSSDLVSKWLGESEKLVKNLFQLARENKPSIIFIDEIDSLCGSRSENESEAARRIKTEFLVQMQGVGVDNDGILVLGATNIPWVLDSAIRRRFEKRIYIPLPEPHARAAMFKLHLGTTQNSLTEADFRELGRKTDGYSGADISIIVRDALMQPVRKVQSATHFKKVRGPSRADPNHLVDDLLTPCSPGDPGAIEMTWMDVPGDKLLEPVVSMSDMLRSLSNTKPTVNEHDLLKLKKFTEDFGQEG

SEQ ID NO: 13550 - protein, 444 aa, Homo sapiens; identical to SEQ ID NO: 13549

SEQ ID NO: 13551 - protein, 423 aa, Homo sapiens [sequence omitted]

SEQ ID NO: 13552 - protein, 311 aa, Homo sapiens
MARPQPCGPPHARCGSPSLPERPLQVKVVGLFSCPNFQIAKSAAENLKNNHPSKFEDPILVPLQEFAWHQYLQEKKRELKNETWEYSSSVISFVNGQFLGDALDLQKWAHEVWDIVDIKPSALYDALTEDFSAKFLRDTKHDFVFLDICIDSSPIGRLIFELYCDVCPKTCKNFQVLCTGKAGFSQRGIRLHYKNSIFHRIVQNGWIQGGDIVYGKGDNGESIYGPTFEDENFSVPHNKRGVLGMANKGRHSNGSQFYITLQATPYLDRKFVAFGQLIEGTEVLKQLELVPTQNERPIHMCRITDSGDPYA

SEQ ID NO: 13553 - protein, 393 aa, Homo sapiens [sequence omitted]

SEQ ID NO: 13554 - protein, 753 aa, Homo sapiens
MLRACQLSGVTAAAQSCLCGKFVLRPLRPCRRYSTSGSSGLTTGKIAGAGLLFVGGGIGGTILYAKWDSHFRESVEKTIPYSDKLFEMVLGPAAYNVPLPKKSIQSGPLKISSVSEVMKESKQPASQLQKQKGDTPASATAPTEAAQIISAAGDTLSVPAPAVQPEESLKTDHPEIGEGKPTPALSEEASSSSIRERPPEEVAARLAQQEKQEQVKIESLAKSLEDALRQTASVTLQAIAAQNAAVQAVNAHSNILKAAMDNSEIAGEKKSAQWRTVEGALKERRKAVDEAADALLKAKEELEKMKSVIENAKKKEVAGAKPHITAAEGKLHNMIVDLDNVVKKVQAAQSEAKVVSQYHELVVQARDDFKRELDSITPEVLPGWKGMTDKLSTDDLNSLIAHAHRRIDQLNRELAEQKATEKQHITLALEKQKLEEKRAFDSAVAKALEHHRSEIQAEQDRKIEEVRDAMENEMRTQLRRQAAAHTDHLRDVLRVQEQELKSEFEQNLSEKLSEQELQFRRLSQEQVDNFTLDINTAYARLRGIEQAVQSHAVAEEEARKAHQLWLSVEALKYSMKTSSAETPTIPLGSAVEAIKANCSDNEFTQALTAAIPPESLTRGVYSEETLRARFYAVQKLARRVAMIDETRNSLYQYFLSYLQSLLLFPPQQLKPPPELCPEDINTFKLLSYASYCIEHGDLELAAKFVNQLKGESRRVAQDWLKEARMTLETKQIVEILTAYASAVGIGTTQVQPE

SEQ ID NO: 13555 - protein, 1720 aa, Homo sapiens [sequence omitted]

SEQ ID NO: 13556 - protein, 1173 aa, Homo sapiens
  VARIANT (1)...(1173): Xaa = Any Amino Acid
MLISKNMPWRRLQGISFGMYSAEELKKLSVKSITNPRYLDSLGNPSANGLYDLALGPADSKEVCSTCVQDFSNCSGHLGHIELPLTVYNPLLFDKLYLLLRGSCLNCHMLTCPRAVIHLLLCQLRVLEVGALQAVYELERILNRFLEENADPSASEIREELEQYTTEIVQNNLLGSQGAHVKNVCESKSKLIALFWKAHMNAKRCPHCKTGRSVVRKEHNSKLTITFPAMVHRTAGQKDSEPLGIEEAQIGKRGYLTPTSAREHLSALWKNEGFFLNYLFSGMDDDGMESRFNPSVFFLDFLVVPPSRYRPVSRLGDQMFTNGQTVNLQAVMKDVVLIRKLLALMAQEQKLPEEVATPTTDEEKDSLIAIDRSFLSTLPGQSLIDKLYNIWIRLQSHVNIVFDSEMDKLMMDKYPGIRQILEKKEGLFRKHMMGKRVDYAARSVICPDMYINTNEIGIPMVFATKLTYPQPVTPWNVQELRQAVINGPNVHPGASMVINEDGSRTALSAVDMTQREAVAKQLLTPATGAPKPQGTKIVCRHVKNGDILLLNRQPTLHRPSIQAHRARILPEEKVLRLHYANCKAYNADFDGDEMNAHFPQSELGRAEAYVLACTDQQYLVPKDGQPLAGLIQDHMVSGASMTTRGCFFTREHYMELVYRGLTDKVGRVKLLSPSILKPFPLWTGKQVVSTLLINIIPEDHIPLNLSGKAKITGKAWVKETPRSVPGFNPDSMCESQVIIREGELLCGVLDKAHYGSSAYGLVHCCYEIYGGETSGKVLTCLARLFTAYLQLYRGFTLGVEDILVKPKADVKRQRIIEESTHCGPQAVRAALNLPEAASYDEVRGKWQDAHLGKDQRDFNMIDLKFKEEVNHYSNEINKACMPFGLHRQFPENSLQMMVQSGAKGSTVNTMQISCLLGQIELEGRRPPLMASGKSLPCFEPYEFTPRAGGFVTGRFLTGIKPPEFFFHCMAGREGLVDTAVKTSRSGYLQRCIIKHLEGLVVQYDLTVRDSDGSVVQFLYGEDGLDIPKTQFLQPKQFPFLASNYEVIMKSQHLHEVLSRADPKKALHHFRAIKKWQSKHPNTLLRRGAFLSYSQKIQEAVKALKLESENRNGRSPGTQEMLRMWYELDEESRRKYQKKAAACPDPSLSVWRPDIYFASVSETFETKVDDYSQX

SEQ ID NO: 13557 - protein, 1128 aa, Homo sapiens [sequence omitted]

SEQ ID NO: 13558 - protein, 1720 aa, Homo sapiens [sequence omitted]

SEQ ID NO: 13559 - protein, 941 aa, Homo sapiens [sequence omitted]

SEQ ID NO: 13560 - protein, 848 aa, Homo sapiens
MSHEKCLKHVRIPCTSVAPSLVRVPVAHCFGPRGLHKRKFCAVCRKVLEAPALHCEVCELHLHPDCVPFACSDCRQCHQDGHQDHDTHHHHWREGNLPSGARCEVCRKTCGSSDVLAGVRCEWCGVQAHSLCSAALAPECGFGRLRSLVLPPACVRLLPGGFSKTQSFRIVEAAEPGEGGDGADGSAAVGPGRETQATPESGKQTLKIFDGDDAVRRSQFRLVTVSRLAGAEEVLEAALRAHHIPEDPGHLELCRLPPSSQACDAWAGGKAGSAVISEEGRSPGSGEATPEAWVIRALPRAQEVLKIYPGWLKVGVAYVSVRVTPKSTARSVVLEVLPLLGRQAESPESFQLVEVAMGCRHVQRTMLMDEQPLLDRLQDIRQMSVRQVSQTRFYVAESRDVAPHVSLFVGGLPPGLSPEEYSSLLHEAGATKATVVSVSHIYSSQGAVVLDVACFAEAERLYMLLKDMAVRGRLLTALVLPDLLHAKLPPDSCPLLVFVNPKSGGLKGRDLLCSFRKLLNPHQVFDLTNGGPLPGLHLFSQVPCFRVLVCGGDGTVGWVLGALEETRYRLACPEPSVAILPLGTGNDLGRVLRWGAGYSGEDPFSVLLSVDEADAVLMDRWTILLDAHEAGSAENDTADAEPPKIVQMSNYCGIGIDAELSLDFHQAREEEPGKFTSRLHNKGVYVRVGLQKISHSRSLHKQIRLQVERQEVELPSIEGLIFINIPSWGSGADLWGSDSDTRFEKPRMDDGLLEVVGVTGVVHMGQVQGGLRSGIRIAQGSYFRVTLLKATPVQVDGEPWVQAPGHMIISAAGPKVHMLRKAKQKPRRAGTTRDARADAAPAPESDPR

SEQ ID NO: 13561 - protein, 892 aa, Homo sapiens [sequence omitted]

SEQ ID NO: 13562 - protein, 701 aa, Homo sapiens [sequence omitted]

SEQ ID NO: 13563 - protein, 331 aa, Homo sapiens [sequence omitted]

SEQ ID NO: 13564 - protein, 539 aa, Homo sapiens [sequence omitted]

SEQ ID NO: 13565 - protein, 263 aa, Homo sapiens
MTMQGFLNYYDACSEGLRAASPALRLGGPGDSFHTPPRSPLSWGLLRHCHDGTNFFTGEAGVRLDYISLHRKGARSSISILEQEKVVAQQIRQLFPKFADTPIYNDEADPLVGWSLPQPWRADVTYAAMVVKVIAQHQNLLLANTTSAFPYALLSNDNAFLSYHPHPFAQRTLTARFQVNNTRPPHVQLLRKPVLTAMGLLALLDEEQLWAEVSQAGTRPALRLPSLLLVHVCARPEKPPGQASHAAPRPAPDPRAAGSGLVG

SEQ ID NO: 13566 - protein, 130 aa, Homo sapiens [sequence omitted]

SEQ ID NO: 13567 - protein, 316 aa, Homo sapiens [sequence omitted]

SEQ ID NO: 13568 - protein, 523 aa, Homo sapiens [sequence omitted]

SEQ ID NO: 13569 - protein, 521 aa, Homo sapiens [sequence omitted]

SEQ ID NO: 13570 - protein, 376 aa, Homo sapiens [sequence omitted]

SEQ ID NO: 13571 - protein, 316 aa, Homo sapiens [sequence omitted]

SEQ ID NO: 13572 - protein, 523 aa, Homo sapiens [sequence omitted]

SEQ ID NO: 13573 - protein, 508 aa, Homo sapiens [sequence omitted]

SEQ ID NO: 13574 - protein, 803 aa, Homo sapiens [sequence omitted]

SEQ ID NO: 13575 - protein, 640 aa, Homo sapiens [sequence omitted]

SEQ ID NO: 13576 - protein, 803 aa, Homo sapiens [sequence omitted]

SEQ ID NO: 13577 - protein, 422 aa, Homo sapiens
MTFLIVTVAWAAHTRLFQVVGKTDDTLALLNLACMMTITFLPYTFSLMVTFPDVPLGIFLFCVCVIAIGVVQALIVGYAFHFPHLLSPQIQRSAHRALYRRHVLGIVLQGPALCFAAAIFSLFFVPLSYLLMVTVILLPYVSKVTGWCRDRLLGHREPSAHPVEVFSFDLHEPLSKERVEAFSDGVYAIVATLLILDICEDNVPDPKDVKERFSGSLVAALSATGPRFLAYFGSFATVGLLWFAHHSLFLHVRKATRAMGLLNTLSLAFVGGLPLAYQQTSAFARQPRDELERVRVSCTIIFLASIFQLAMWTTALLHQAETLQPSVWFGGREHVLMFAKLALYPCASLLAFASTCLLSRFSVGIFHLMQIAVPCAFLLLRLLVGLALATLRVLRGLARPEHPPPAPTGQDDPQSQLLPAPC

SEQ ID NO: 13578 - protein, 504 aa, Homo sapiens
MSQPRTPEQALDTPGDCPPGRRDEDAGEGIQCSQRMLSFSDALLSIIATVMILPVTHTEISPEQQFDRSVQRLLATRIAVYLMTFLIVTVAWAAHTRLFQVVGKTDDTLALLNLACMMTITFLPYTFSLMVTFPDVPLGIFLFCVCVIAIGVVQALIVGYAFHFPHLLSPQIQRSAHRALYRRHVLGIVLQGPALCFAAAIFSLFFVPLSYLLMVTVILLPYVSKVTGWCRDRLLGHREPSAHPVEVFSFDLHEPLSKERVEAFSDGVYAIVATLLILDICEDNVPDPKDVKERFSGSLVAALSATGPRFLAYFGSFATVGLLWFAHHSLFLHVRKATRAMGLLNTLSLAFVGGLPLAYQQTSAFARQPRDELERVRVSCTIIFLASIFQLAMWTTALLHQAETLQPSVWFGGREHVLMFAKLALYPCASLLAFASTCLLSRFSVGIFHLMQIAVPCAFLLLRLLVGLALATLRVLRGLARPEHPPPAPTGQDDPQSQLLPAPC

SEQ ID NO: 13579 - protein, 176 aa, Homo sapiens
AGARACQLHHHLPGQHLPAGHVDHGAAAPGGDAAALGVVWRPGACAHVRQAGAVPLCQPAGLRLHLPAEQVQCGHLPPHADRRALRLPVAAPARGPGPGHPAGPAGPRPARTPPASPHGPGRPTVPAPPCPLLAATEPTPSRPHQRWTREDRMLGRGSQVTGRPQWFLRGLVLFSL

SEQ ID NO: 13580 - protein, 422 aa, Homo sapiens; identical to SEQ ID NO: 13577

SEQ ID NO: 13581 - protein, 504 aa, Homo sapiens; identical to SEQ ID NO: 13578

SEQ ID NO: 13582 - protein, 388 aa, Homo sapiens
MMTITFLPYTFSLMVTFPDVPLGIFLFCVCVIAIGVVQALIVGYAFHFPHLLSPQIQRSAHRALYRRHVLGIVLQGPALCFAAAIFSLFFVPLSYLLMVTVILLPYVSKVTGWCRDRLLGHREPSAHPVEVFSFDLHEPLSKERVEAFSDGVYAIVATLLILDICEDNVPDPKDVKERFSGSLVAALSATGPRFLAYFGSFATVGLLWFAHHSLFLHVRKATRAMGLLNTLSLAFVGGLPLAYQQTSAFARQPRDELERVRVSCTIIFLASIFQLAMWTTALLHQAETLQPSVWFGGREHVLMFAKLALYPCASLLAFASTCLLSRFSVGIFHLMQIAVPCAFLLLRLLVGLALATLRVLRGLARPEHPPPAPTGQDDPQSQLLPAPC

SEQ ID NO: 13583 - protein, 758 aa, Homo sapiens
MAVSAGSARTSPSSDKVQKDKAELISGPRQDSRIGKLLGFEWTDLSSWRRLVTLLNRPTDPASLAVFRFLFGFLMVLDIPQERGLSSLDRKYLDGLDVCRFPLLDALRPLPLDWMYLVYTIMFLGALGMMLGLCYRISCVLFLLPYWYVFLLDKTSWNNHSYLYGLLAFQLTFMDANHYWSVDGLLNAHRRNAHVPLWNYAVLRGQIFIVYFIAGVKKLDADWVEGYSMEYLSRHWLFSPFKLLLSEELTSLLVVHWGGLLLDLSAGFLLFFDVSRSIGLFFVSYFHCMNSQLFSIGMFSYVMLASSPLFCSPEWPRKLVSYCPRRLQQLLPLKAAPQPSVSCVYKRSRGKSGQKPGLRHQLGAAFTLLYLLEQLFLPYSHFLTQGYNNWTNGLYGYSWDMMVHSRSHQHVKITYRDGRTGELGYLNPGVFTQSRRWKDHADMLKQYATCLSRLLPKYNVTEPQIYFDIWVSINDRFQQRIFDPRVDIVQAAWSPFQRTSWVQPLLMDLSPWRAKLQEIKSSLDNHTEVVFIADFPGLHLENFVSEDLGNTSIQLLQGEVTVELVAEQKNQTLREGEKMQLPAGEYHKVYTTSPSPSCYMYVYVNTTELALEQDLAYLQELKEKVENGSETGPLPPELQPLLEGEVKGGPEPTPLVQTFLRRQQRLQEIERRRNTPFHERFFRFLLRKLYVFRRSFLMTCISLRNLILGRPSLEQLAQEVTYANLRPFEAVGELNPSNTDSSHSNPPESNPDPVHSEF

SEQ ID NO: 13584 - protein, 132 aa, Homo sapiens
MAVSAGSARTSPSSDKVQKDKAELISGPRQDSRIGKLLGFEWTDLSSWRRLVTLLNRPTDPASLAVFRFLFGFLMVLDIPQERGLSSLDRKYLDGLDVCRFPLLDALRPLPLDWMYLVYTIMFLGEGNCGKY

SEQ ID NO: 13585 - protein, 395 aa, Homo sapiens
MNGQLNGFHEAFIEEGTFLFTSESVGEGHPDKICDQISDAVLDAHLQQDPDAKVACETVAKTGMILLAGEITSRAAVDYQKVVREAVKHIGYDDSSKGFDYKTCNVLVALEQQSPDIAQGVHLDRNEEDIGAGDQGLMFGYATDETEECMPLTIVLAHKLNAKLAELRRNGTLPWLRPDSKTQVTVQYMQDRGAVLPIRVHTIVISVQHDEEVCLDEMRDALKEKVIKAVVPAKYLDEDTIYHLQPSGRFVIGGPQGDAGLTGRKIIVDTYGGWGAHGGGAFSGKDYTKVDRSAAYAARWVAKSLVKGGLCRRVLVQVSYAIGVSHPLSISIFHYGTSQKSERELLEIVKKNFDLRPGVIVRDLDLKKPIYQRTAAYGHFGRDSFPWEVPKKLKY

SEQ ID NO: 13586 - protein, 395 aa, Homo sapiens; identical to SEQ ID NO: 13585

SEQ ID NO: 13587 - protein, 146 aa, Homo sapiens
MNGQLNGFHEAFIEEGTFLFTSESVGEGHPDKICDQISDAVLDAHLQQDPDAKVACETVAKTGMILLAGEITSRAAVDYQKVVREAVKHIGYDDSSKGFDYKTCNVLVALEQQSPDIAQGVHLDRNEEDIGAGDQVSWCRGCFNLF

SEQ ID NO: 13588 - protein, 362 aa, Homo sapiens
MNGQLNGFHEAFIEEGTFLFTSESVGEGHPDKICDQISDAVLDAHLQQDPDAKVACETVAKTGMILLAGEITSRAAVDYQKVVREAVKHIGYDDSSKGFDYKTCNVLVALEQQSPDIAQGVHLDRNEEDIGAGDQGLMFGYATDETEECMPLTIVLAHKLNAKLAELRRNGTLPWLRPDSKTQVTVQYMQDRGAVLPIRVHTIVISVQHDEEVCLDEMRDALKEKVIKAVVPAKYLDEDTIYHLQPSGRFVIGGPQGDAGLTGRKIIVDTYGGWGAHGGGAFSGKDYTKVDRSAAYAARWVAKSLVKGGLCRRVLVQVSYAIGVSHPLSISIFHYGTSQKSERELLEIVKKNFDLRPGVIVR

SEQ ID NO: 13589 - protein, 252 aa, Homo sapiens
MRTKAAGCAERRPLQPRTEAAAAPAGRAMPSEYTYVKLRSDCSRPSLQWYTRAQSKMRRPSLLLKDILKCTLLVFGVWILYILKLNYTTEECDMKKMHYVDPDHVKRAQKYAQQVLQKECRPKFAKTSMALLFEHRYSVDLLPFVQKAPKDSEAESKYDPPFGFRKFSSKVQTLLELLPEHDLPEHLKAKTCRRCVVIGSGGILHGLELGHTLNQFDVVIRTQCTALGQCGSRNSEGHRKLFTVPAHKGLNV

SEQ ID NO: 13590 - protein, 418 aa, Homo sapiens
MRTKAAGCAERRPLQPRTEAAAAPAGRAMPSEYTYVKLRSDCSRPSLQWYTRAQSKMRRPSLLLKDILKCTLLVFGVWILYILKLNYTTEECDMKKMHYVDPDHVKRAQKYAQQVLQKECRPKFAKTSMALLFEHRYSVDLLPFVQKAPKDSEAESKYDPPFGFRKFSSKVQTLLELLPEHDLPEHLKAKTCRRCVVIGSGGILHGLELGHTLNQFDVVIRLNSAPVEGYSEHVGNKTTIRMTYPEGAPLSDLEYYSNDLFVAVLFKSVDFNWLQAMVKKETLPFWVRLFFWKQVAEKIPLQPKHFRILNPVIIKETAFDILQYSEPQSRFWGRDKNVPTIGVIAVVLATHLCDEVSLAGFGYDLNQPRTPLHYFDSQCMAAMNFQTMHNVTTETKFLLKLVKEGVVKDLSGGIDREF

SEQ ID NO: 13591 - protein, 220 aa, Homo sapiens
MRTKAAGCAERRPLQPRTEAAAAPAGRAMPSEYTYVKLRSDCSRPSLQWYTRAQSKMRRPSLLLKDILKCTLLVFGVWILYILKLNYTTEECDMKKMHYVDPDHVKTLSPCGWHCVQLIMARWTQPLLHRLLSDSADLHRAFKGSRALPAEAFSEPRHQHLQTESFLSLVLLPAFQAFLGYLRAPEGAALALRHFLLSCELWASSGGGREQLKQMPVQLT

SEQ ID NO: 13592 - protein, 418 aa, Homo sapiens; identical to SEQ ID NO: 13590

SEQ ID NO: 13593 - protein, 290 aa, Homo sapiens
MALLFEHRYSVDLLPFVQKAPKDSEAESKYDPPFGFRKFSSKVQTLLELLPEHDLPEHLKAKTCRRCVVIGSGGILHGLELGHTLNQFDVVIRLNSAPVEGYSEHVGNKTTIRMTYPEGAPLSDLEYYSNDLFVAVLFKSVDFNWLQAMVKKETLPFWVRLFFWKQVAEKIPLQPKHFRILNPVIIKETAFDILQYSEPQSRFWGRDKNVPTIGVIAVVLATHLCDEVSLAGFGYDLNQPRTPLHYFDSQCMAAMNFQTMHNVTTETKFLLKLVKEGVVKDLSGGIDREF

SEQ ID NO: 13594 - protein, 482 aa, Homo sapiens
MPRSSQFKRILNRELTHLSETSRSGNQVSEYISRTFLDQQTEVELPKVTAEEAPQPMSRISGLHGLCHSASLSSATVPRFGVQTDQEEQLAKELEDTNKWGLDVFKVAELSGNRPLTAIIFSIFQERDLLKTFQIPADTLATYLLMLEGHYHANVAYHNSLHAADVAQSTHVLLATPALEAVFTDLEILAALFASAIHDVDHPGVSNQFLINTNSELALMYNDASVLENHHLAVGFKLLQAENCDIFQNLSAKQRLSLRRMVIDMVLATDMSKHMNLLADLKTMVETKKVTSLGVLLLDNYSDRIQVLQNLVHCADLSNPTKPLPLYRQWTDRIMAEFFQQGDRERESGLDISPMCDKHTASVEKSQVGFIDYIAHPLWETWADLVHPDAQDLLDTLEDNREWYQSKIPRSPSDLTNPERDGPDRFQFELTLEEAEEEDEEEEEEGEETALAKEALELPDTELLSPEAGPDPGDLPLDNQRT

SEQ ID NO: 13595 - protein, 657 aa, Homo sapiens
MENLGVGEGAEACSRLSRSRGRHSMTRAPKHLWRQPRRPIRIQQRFYSDPDKSAGCRERDLSPRPELRKSRLSWPVSSCRRFDLENGLSCGRRALDPQSSPGLGRIMQAPVPHSQRRESFLYRSDSDYELSPKAMSRNSSVASDLHGEDMIVTPFAQVLASLRTVRSNVAALARQQCLGAAKQGPVGNPSSSNQLPPAEDTGQKLALETLDELDWCLDQLETLQTRHSVGEMASNKFKRILNRELTHLSETSRSGNQVSEYISRTFLDQQTEVELPKVTAEEAPQPMSRISGLHGLCHSASLSSATVPRFGVQTDQEEQLAKELEDTNKWGLDVFKVAELSGNRPLTAIIFSIFQAVFTDLEILAALFASAIHDVDHPGVSNQFLINTNSELALMYNDASVLENHHLAVGFKLLQAENCDIFQNLSAKQRLSLRRMVIDMVLATDMSKHMNLLADLKTMVETKKVTSLGVLLLDNYSDRIQVLQNLVHCADLSNPTKPLPLYRQWTDRIMAEFFQQGDRERESGLDISPMCDKHTASVEKSQVGFIDYIAHPLWETWADLVHPDAQDLLDTLEDNREWYQSKIPRSPSDLTNPERDGPDRFQFELTLEEAEEEDEEEEEEGEETALAKEALELPDTELLSPEAGPDPGDLPLDNQRT

SEQ ID NO: 13596 - protein, 712 aa, Homo sapiens
MENLGVGEGAEACSRLSRSRGRHSMTRAPKHLWRQPRRPIRIQQRFYSDPDKSAGCRERDLSPRPELRKSRLSWPVSSCRRFDLENGLSCGRRALDPQSSPGLGRIMQAPVPHSQRRESFLYRSDSDYELSPKAMSRNSSVASDLHGEDMIVTPFAQVLASLRTVRSNVAALARQQCLGAAKQGPVGNPSSSNQLPPAEDTGQKLALETLDELDWCLDQLETLQTRHSVGEMASNKFKRILNRELTHLSETSRSGNQVSEYISRTFLDQQTEVELPKVTAEEAPQPMSRISGLHGLCHSASLSSATVPRFGVQTDQEEQLAKELEDTNKWGLDVFKVAELSGNRPLTAIIFSIFQERDLLKTFQIPADTLATYLLMLEGHYHANVAYHNSLHAADVAQSTHVLLATPALEAVFTDLEILAALFASAIHDVDHPGVSNQFLINTNSELALMYNDASVLENHHLAVGFKLLQAENCDIFQNLSAKQRLSLRRMVIDMVLATDMSKHMNLLADLKTMVETKKVTSLGVLLLDNYSDRIQVLQNLVHCADLSNPTKPLPLYRQWTDRIMAEFFQQGDRERESGLDISPMCDKHTASVEKSQVGFIDYIAHPLWETWADLVHPDAQDLLDTLEDNREWYQSKIPRSPSDLTNPERDGPDRFQFELTLEEAEEEDEEEEEEGEETALAKEALELPDTELLSPEAGPDPGDLPLDNQRT

SEQ ID NO: 13597 - protein, 680 aa, Homo sapiens
MQGPPAPAPVPGPGSPRGSPRGSPGLFRKLLVNQSIRLQRRFTVAHPLCFDLENGLSCGRRALDPQSSPGLGRIMQAPVPHSQRRESFLYRSDSDYELSPKAMSRNSSVASDLHGEDMIVTPFAQVLASLRTVRSNVAALARQQCLGAAKQGPVGNPSSSNQLPPAEDTGQKLALETLDELDWCLDQLETLQTRHSVGEMASNKFKRILNRELTHLSETSRSGNQVSEYISRTFLDQQTEVELPKVTAEEAPQPMSRISGLHGLCHSASLSSATVPRFGVQTDQEEQLAKELEDTNKWGLDVFKVAELSGNRPLTAIIFSIFQERDLLKTFQIPADTLATYLLMLEGHYHANVAYHNSLHAADVAQSTHVLLATPALEAVFTDLEILAALFASAIHDVDHPGVSNQFLINTNSELALMYNDASVLENHHLAVGFKLLQAENCDIFQNLSAKQRLSLRRMVIDMVLATDMSKHMNLLADLKTMVETKKVTSLGVLLLDNYSDRIQVLQNLVHCADLSNPTKPLPLYRQWTDRIMAEFFQQGDRERESGLDISPMCDKHTASVEKSQVGFIDYIAHPLWETWADLVHPDAQDLLDTLEDNREWYQSKIPRSPSDLTNPERDGPDRFQFELTLEEAEEEDEEEEEEGEETALAKEALELPDTELLSPEAGPDPGDLPLDNQRT

SEQ ID NO: 13598 - protein, 108 aa, Homo sapiens
MGAPNEDPRNSELSQLSKDTCLPPLPTPPPLQHLIPQVRRGRSYSTTSLVSPQPSELSETQERVKIRTPLSWAERYFSRQLYVDTGVSGWPGTADGAYLPLNHCRCTA

SEQ ID NO: 13599 - protein, 266 aa, Homo sapiens
MDLVQHGVPKPLLAAESHGRILQSHHVLPQRLRHLHALRLAGAVVRPACPPTAQPLGQDRAGGLGSVQLGAKLRQGALLPEPAGPSQGGRVRTLPQAPAPGNHDGDAVPVQVLSGLRELLAPRLHHREAVEERPGGLGRARGAGPQQKQLREVPATRRLHPRGRLPEPQGPGPVPAGAGQGPRPLPELLSLAGDAAASLLQLGTRFLQGLLETAGGIQVPDTRHSGLVHLRGWCGAWAARNLIFLGPHLSGGLIYLRTRLPEASPA

SEQ ID NO: 13600 - protein, 266 aa, Homo sapiens; identical to SEQ ID NO: 13599

SEQ ID NO: 13601 - protein, 364 aa, Homo sapiens
MDPLGPAKPQWSWRCCLTTLLFQLLMAVCFFSYLRVSQDDPTVYPNGSRFPDSTGTPAHSIPLILLWTWPFNKPIALPRCSEMVPGTADCNITADRKVYPQADAVIVHHREVMYNPSAQLPRSPRRQGQRWIWFSMESPSHCWQLKAMDGYFNLTMSYRSDSDIFTPYGWLEPWSGQPAHPPLNLSAKTELVAWAVSNWGPNSARVRYYQSLQAHLKVDVYGRSHKPLPQGTMMETLSRYKFYLAFENSLHPDYITEKLWRNALEAWAVPVVLGPSRSNYERFLPPDAFIHVDDFQSPKDLARYLQELDKDHARYLSYFRWRETLRPRSFSWALAFCKACWKLQEESSGGLIYLRTRLPEASPA

SEQ ID NO: 13602 - protein, 266 aa, Homo sapiens; identical to SEQ ID NO: 13599

SEQ ID NO: 13603 - protein, 404 aa, Homo sapiens
KPAYKVQAGVRVHYRPPVPPSPRQPLAPDWSFRKRCGASRSPLRSRPRPEGGVCPGPLPVRSAAPDSSGSLKRDSGALTSGHPHTDRSCSRGNNPARLAWRRAAKPKSWPRHEGCRPGWLRRRRLSSPRPKEERKPCHGVSAKWGQKKADAGLHGSGLFRSVRFHCTPEGGSKWNWVKLDPRLALSLTSSLSLDKCLILFSNLIKAPDSAPQSPKATPPGMAQGLASLRQQHSTLDFMLGTKADGETILKGLQSIFQDQGMVELVHTWKDHGYLATCTNKNGSFANLRIYPHGLCCWIFRVTMVMHKAKKRSTIEVVYDEDSSYQNIKILHSKQFGNILILSGDVNLAESDLAYTWDIMGSGKDYTGKDVLILGERDGGILCEIVKLKPKMVTMVELDQMVINR

SEQ ID NO: 13604 - protein, 139 aa, Homo sapiens
MTAVYMNGGGLVNPHYARWDRRDSVESGCQTESSKEGEEGQPRQLTPFEKLTQDMSQDEKVVREITLGKRIGFYRIRGEIGSGNFSQVKLGIHSLTKGIGERANLGGKKLSENTDIQKELSTGHAPVMDKGMRSDQDLH

SEQ ID NO: 13605 - protein, 357 aa, Homo sapiens
MSESKSKEQGRNDGENEPEKVAIKILDKTKLDQKTQRLLSREISSMEKLHHPNIIRLYEVVETLSKLHLVMEYAGGGELFGKISTEGKLSEPESKLIFSQIVSAVKHMHENQIIHRDLKAENVFYTSNTCVKVGDFGFSTVSKKGEMLNTFCGSPPYAAPELFRDEHYIGIYVDIWALGVLLYFMVTGTMPFRAETVAKLKKSILEGTYSVPPHVSEPCHRLIRGVLQQIPTERYGIDCIMNDEWMQGVPYPTPLEPFQLDPKHLSETSTLKEEENEVKSTLEHLGITEEHIRNNQGRDARSSITGVYRIILHRVQRKKALESVPVMMLPDPKERDLKKGSRVYRGIRHTSKFCSIL

SEQ ID NO: 13606 - protein, 312 aa, Homo sapiens
MEKLHHPNIIRLYEVVETLSKLHLVMEYAGGGELFGKISTEGKLSEPESKLIFSQIVSAVKHMHENQIIHRDLKAENVFYTSNTCVKVGDFGFSTVSKKGEMLNTFCGSPPYAAPELFRDEHYIGIYVDIWALGVLLYFMVTGTMPFRAETVAKLKKSILEGTYSVPPHVSEPCHRLIRGVLQQIPTERYGIDCIMNDEWMQGVPYPTPLEPFQLDPKHLSETSTLKEEENEVKSTLEHLGITEEHIRNNQGRDARSSITGVYRIILHRVQRKKALESVPVMMLPDPKERDLKKGSRVYRGIRHTSKFCSIL

SEQ ID NO: 13607 - protein, 206 aa, Homo sapiens [sequence omitted]

SEQ ID NO: 13608 - protein, 269 aa, Homo sapiens
MTDAERVDQAYRENGFNIYVSDKISLNRSLPDIRHPNCNSKRYLETLPNTSIIIPFHNEGWSSLLRTVHSVLNRSPPELVAEIVLVDDFSDREHLKKPLEDYMALFPSVRILRTKKREGLIRTRMLGASVATGDVITFLDSHCEANVNWLPPLLDRIARNRKTIVCPMIDVIDHDDFRYETQAGDAMRGAFDWEMYYKRIPIPPELQKADPSDPFESPVMAGGLFAVDRKWFWELGGYDPGLEIWGGEQYEISFKVSQLSRRPVLGTAS

SEQ ID NO: 13609 - protein, 105 aa, Homo sapiens
MTDAERVDQAYRENGFNIYVSDKISLNRSLPDIRHPNCNSKRYLETLPNTSIIIPFHNEGWSSLLRTVHSVLNRSPPELVAEIVLVDDFSDRDLPTASTPSPFVC

SEQ ID NO: 13610 - protein, 506 aa, Homo sapiens
MTDAERVDQAYRENGFNIYVSDKISLNRSLPDIRHPNCNSKRYLETLPNTSIIIPFHNEGWSSLLRTVHSVLNRSPPELVAEIVLVDDFSDREHLKKPLEDYMALFPSVRILRTKKREGLIRTRMLGASVATGDVITFLDSHCEANVNWLPPLLDRIARNRKTIVCPMIDVIDHDDFRYETQAGDAMRGAFDWEMYYKRIPIPPELQKADPSDPFESPVMAGGLFAVDRKWFWELGGYDPGLEIWGGEQYEISFKVWMCGGRMEDIPCSRVGHIYRKYVPYKVPAGVSLARNLKRVAEVWMDEYAEYIYQRRPEYRHLSAGDVAVQKKLRSSLNCKSFKWFMTKIAWDLPKFYPPVEPPAAAWGEIRNVGTGLCADTKHGALGSPLRLEGCVRGRGEAAWNNMQVFTFTWREDIRPGDPQHTKKFCFDAISHTSPVTLYDCHSMKGNQLWKYRKDKTLYHPVSGSCMDCSESDHRIFMNTCNPSSLTQQWLFEHTNSTVLEKFNRN

SEQ ID NO: 13611 - protein, 506 aa, Homo sapiens; identical to SEQ ID NO: 13610

SEQ ID NO: 13612 - protein, 36 aa, Homo sapiens
MVDRRLRIATFSITDGGRRGETTVNIANERKCPLTF

SEQ ID NO: 13613 - protein, 91 aa, Homo sapiens
MPPSPASCGRPEVSRCQQHKVVVDVDHEHLAGGHAQGLVPGGVQLLHLQLPLHPLHSVQGRSLVLLPHEEEELDELMSEEAYEKYIKSIEE

SEQ ID NO: 13614 - protein, 520 aa, Homo sapiens
MPQLSLSSLGLWPMAASPWLLLLLVGASWLLARILAWTYTFYDNCCRLRCFPQPPKRNWFLGHLGLIHSSEEGLLYTQSLACTFGDMCCWWVGPWHAIVRIFHPTYIKPVLFAPAAIVPKDKVFYSFLKPWLGDGLLLSAGEKWSRHRRMLTPAFHFNILKPYMKIFNESVNIMHAKWQLLASEGSARLDMFEHISLMTLDSLQKCVFSFDSHCQEKPSEYIAAILELSALVTKRHQQILLYIDFLYYLTPDGQRFRRACRLVHDFTDAVIQERRRTLPSQGVDDFLQAKAKSKTLDFIDVLLLSKDEDGKKLSDEDIRAEADTFMFEGHDTTASGLSWVLYHLAKHPEYQERCRQEVQELLKDREPKEIEWDDLAQLPFLTMCIKESLRLHPPVPAVSRCCTQDIVLPDGRVIPKGIICLISVFGTHHNPAVWPDPEVYDPFRFDPKNIKERSPLAFIPFSAGPRNCIGQAFAMAEMKVVLGLTLLRFRVLPDHTEPRRKPELVLRAEGGLWLRVEPLS

SEQ ID NO: 13615 - protein, 216 aa, Homo sapiens
MPQLSLSSLGLWPMAASPWLLLLLVGASWLLARILAWTYTFYDNCCRLRCFPQPPKRNWFLGHLGLVTPTEQGMRVLTQLVATYPQGFKVWMGPIFPVIRFCHPNIIRSVINASAAIVPKDKVFYSFLKPWLGDGLLLSAGEKWSRHRRMLTPAFHFNILKPYMKIFNESVNIMHAKWQLLASEGSARLDMFEHISLMTLDSLQKCVFSFDSHCQE

SEQ ID NO: 13616 - protein, 520 aa, Homo sapiens; identical to SEQ ID NO: 13614

SEQ ID NO: 13617 - protein, 520 aa, Homo sapiens
MPQLSLSSLGLWPMAASPWLLLLLVGASWLLARILAWTYTFYDNCCRLRCFPQPPKRNWFLGHLGLVTPTEQGMRVLTQLVATYPQGFKVWMGPIFPVIRFCHPNIIRSVINASAAIVPKDKVFYSFLKPWLGDGLLLSAGEKWSRHRRMLTPAFHFNILKPYMKIFNESVNIMHAKWQLLASEGSARLDMFEHISLMTLDSLQKCVFSFDSHCQEKPSEYIAAILELSALVTKRHQQILLYIDFLYYLTPDGQRFRRACRLVHDFTDAVIQERRRTLPSQGVDDFLQAKAKSKTLDFIDVLLLSKDEDGKKLSDEDIRAEADTFMFEGHDTTASGLSWVLYHLAKHPEYQERCRQEVQELLKDREPKEIEWDDLAQLPFLTMCIKESLRLHPPVPAVSRCCTQDIVLPDGRVIPKGIICLISVFGTHHNPAVWPDPEVYDPFRFDPKNIKERSPLAFIPFSAGPRNCIGQAFAMAEMKVVLGLTLLRFRVLPDHTEPRRKPELVLRAEGGLWLRVEPLS

SEQ ID NO: 13618 - protein, 619 aa, Homo sapiens
MEVELSQGLADNTVIAKVNNVVWDLDRPLEEDCTLELLKFEDEEAQAVYWHSSAHIMGEAMERVYGGCLCYGPPIENGFYYDMYLEEGGVSSNDFSSLEALCKKIIKEKQAFERLEVKKETLLAMFKYNKFKCRILNEKVNTPTTTVYRCGPLIDLCRGPHVRHTGKIKALKIHKNSSTYWEGKADMETLQRIYGISFPDPKMLKEWEKFQEEAKNRDHRKIGRDQELYFFHELSPGSCFFLPKGAYIYNALIEFIRSEYRKRGFQEVVTPNIFNSRLWMTSGHWQHYSENMFSFEVEKELFALKPMNCPGHCLMFDHRPRSWRELPLRLADFGVLHRNELSGALTGLTRVRRFQQDDAHIFCAMEQIEDEIKGCLDFLRTVYSVFGFSFKLNLSTRPEKFLGDIEVWDQAEKQLENSLNEFGEKWELNSGDGAFYGPKIDIQIKDAIGRYHQCATIQLDFQLPIRFNLTYVSHDGDDKKRPVIVHRAILGSVERMIAILTENYGGKWPFWLSPRQVMVVPVGPTCDEYAQKVRQQFHDAKFMADIDLDPGCTLNKKIRNAQLAQYNFILVVGEKEKISGTVNIRTRDNKVHGERTISETIERLQQLKEFRSKQAEEEF

SEQ ID NO: 13619 - protein, 723 aa, Homo sapiens
MFEEKASSPSGKMGGEEKPIGAGEEKQKEGGKKKNKEGSGDGGRAELNPWPEYIYTRLEMYNILKAEHDSILAEKAEKDSKPIKVTLPDGKQVDAESWKTTPYQIACGISQGLADNTVIAKVNNVVWDLDRPLEEDCTLELLKFEDEEAQAVYWHSSAHIMGEAMERVYGGCLCYGPPIENGFYYDMYLEEGGVSSNDFSSLEALCKKIIKEKQAFERLEVKKETLLAMFKYNKFKCRILNEKVNTPTTTVYRCGPLIDLCRGPHVRHTGKIKALKIHKNSSTYWEGKADMETLQRIYGISFPDPKMLKEWEKFQEEAKNRDHRKIGRDQELYFFHELSPGSCFFLPKGAYIYNALIEFIRSEYRKRGFQEVVTPNIFNSRLWMTSGHWQHYSENMFSFEVEKELFALKPMNCPGHCLMFDHRPRSWRELPLRLADFGVLHRNELSGALTGLTRVRRFQQDDAHIFCAMEQIEDEIKGCLDFLRTVYSVFGFSFKLNLSTRPEKFLGDIEVWDQAEKQLENSLNEFGEKWELNSGDGAFYGPKIDIQIKDAIGRYHQCATIQLDFQLPIRFNLTYVSHDGDDKKRPVIVHRAILGSVERMIAILTENYGGKWPFWLSPRQVMVVPVGPTCDEYAQKVRQQFHDAKFMADIDLDPGCTLNKKIRNAQLAQYNFILVVGEKEKISGTVNIRTRDNKVHGERTISETIERLQQLKEFRSKQAEEEF

SEQ ID NO: 13620 - protein, 101 aa, Homo sapiens
MLTSLLKSWMALQMMTALLVDEFGGTNSFFPLLAQYLKVDQLALNHRAKKVDGPSWFSSGCALWFSEDCDKFWPRIRSLTLNCPLWHAFLTVLHVSACLYL

SEQ ID NO: 13621 - protein, 106 aa, Homo sapiens
MAQEFVNCKIQPGKVVVFIKPTCPYCRRAQEILSQLPIKQGLLEFVDITATNHTNEIQDYLQQLTGARTVPRVFIGKDCIGGCSDLVSLQQSGELLTRLKQIGALQ

SEQ ID NO: 13622 - protein, 106 aa, Homo sapiens; identical to SEQ ID NO: 13621

SEQ ID NO: 13623 - protein, 54 aa, Homo sapiens
MKSIVGLGVIWIRGTSAEAVVMRNTLLFKMAIQIILNTVYLFYLDYQQRLKHEM

SEQ ID NO: 13624 - protein, 486 aa, Homo sapiens
MDENNGLLLLELNPPNPWDLQPRSPEELAFGEVQITYLTHACMDLKLGDKRMVFDPWLIGPAFARGWWLLHEPPSDWLERLCQADLIYISHLHSDHLSYPTLKKLAGRRPDIPIYVGNTERPVFWNLNQSGVQLTNINVVPFGIWQQVDKNLRFMILMDGVHPEMDTCIIVEYKGHKILNIVDCTRPNGGRLPMKVALMMSDFAGGASGFPMTFSGGKFTEEWKAQFIKTERKKLLNYKARLVKNLQPRIYCPFAGYFVESHPSDKYIKETNTKNDPNELNNLIKKNSDVITWTPRPGATLDLGRMLKDRTDSKGIIEPPEGTKIYKDSWDFEPYLEILNAALGDEIFLHSSWIKEYFTWAGFKDYNLVVRMIETDEDFNPFPGGYDYLVDFLDLSFPKERPQREHPYEEIHSRVDVIRHVVKNGLLWDELYIGFQTRLQRDPDIYHHLFWNHFQIKLPLTPPNWKSFLMCCEQNGPAILQECKTT

SEQ ID NO: 13625 - protein, 486 aa, Homo sapiens; identical to SEQ ID NO: 13624

SEQ ID NO: 13626 - protein, 486 aa, Homo sapiens; identical to SEQ ID NO: 13624

SEQ ID NO: 13627 - protein, 698 aa, Homo sapiens [sequence omitted]

SEQ ID NO: 13628 - protein, 725 aa, Homo sapiens [sequence omitted]

SEQ ID NO: 13629 - protein, 360 aa, Homo sapiens
MLTPAFHFNILKPYIKIFNRSVNIMHDKWQHLASEGSSRLDMFEHISLMTLDSLQKCIFSFDSHCQERPSEYIATILELSALVEKRNQHILQHMDFLYYLSHDGRRFRRACRLTLDFIDVLLLSKDEDGKVLSDEDVRAEADTFMFAGHDTTASGLSWVLYNLARHPEYQEHCRQEVQELLKDRDPKEIEWYDLAQLPFLTMCVKESLRLHPPVPYTSRHCIWDIVLPDGRVYNPFRFNSENSKERSPLAFIPFSAGPSLWENVHRMGADLGAVEDPGPGFRRDGAQMRILGAVTVPTPTRRNCIGHAFAMAKMKVVLALTLLRFRFLLDHTEPRRKPELIMRAEGGLWLRVEPLNAGLQ

SEQ ID NO: 13630 - protein, 154 aa, Homo sapiens
MLTPAFHFNILKPYIKIFNRSVNIMHDKWQHLASEGSSRLDMFEHISLMTLDSLQKCIFSFDSHCQERPSEYIATILELSALVEKRNQHILQHMDFLYYLSHDGRRFRRACRLVHDFTDAVIQERRHTLPTQGIVISSRTKPSPRLWISLMCFC

SEQ ID NO: 13631 - protein, 1144 aa, Homo sapiens
MKLSRQFTVFGSAIFCVVIFSLYLMLDRGHLDYPRNPRREGSFPQGQLSMLQEKIDHLERLLAENNEIISNIRDSVINLSESVEDGPKSSQSNFSQGAGSHLLPSQLSLSVDTADCLFASQSGSHNSDVQMLDVYSLISFDNPDGGVWKQGFDITYESNEWDTEPLQVFVVPHSHNDPGWLKTFNDYFRDKTQYIFNNMVLKLKEDSRRKFIWSEISYLSKWWDIIDIQKKDAVKSLIENGQLEIVTGGWVMPDEATPHYFALIDQLIEGHQWLENNIGVKPRSGWAIDPFGHSPTMAYLLNRAGLSHMLIQRVHYAVKKHFALHKTLEFFWRQNWDLGSVTDILCHMMPFYSYDIPHTCGPDPKICCQFDFKRLPGGRFGCPWGVPPETIHPGNVQSRARMLLDQYRKKSKLFRTKVLLAPLGDDFRYCEYTEWDLQFKNYQQLFDYMNSQSKFKVKIQFGTLSDFFDALDKADETQRDKGQSMFPVLSGDFFTYADRDDHYWSGYFTSRPFYKRMDRIMESHLRAAEILYYFALRQAHKYKINKFLSSSLYTALTEARRNLGLFQHHDAITGTAKDWVVVDYGTRLFHSLMVLEKIIGNSAFLLILKDKLTYDSYSPDTFLEMDLKQKSQDSLPQKNIIRLSAEPRYLVVYNPLEQDRISLVSVYVSSPTVQVFSASGKPVEVQVSAVWDTANTISETAYEISFRAHIPPLGLKVYKILESASSNSHLADYVLYKNKVEDSGIFTIKNMINTEEGITLENSFVLLRFDQTGLMKQMMTKEDGKHHEVNVQFSWYGTTIKRDKSGAYLFLPDGNAKPYVYTTPPFVRVTHGRIYSEVTCFFDHVTHRVRLYHIQGIEGQSVEVSNIVDIRKVYNREIAMKISSDIKSQNRFYTDLNGYQIQPRMTLSKLPLQANVYPMTTMAYIQDAKHRLTLLSAQSLGVSSLNSGQIEVIMDRRLMQDDNRGLEQGIQDNKITANLFRILLEKRSAVNTEEEKKSVSYPSLLSHITSSLMNHPVIPMANKFSSPTLELQGEFSPLQSSLPCDIHLVNLRTIQSKVGNGHSNEAALILHRKGFDCRFSSKGTGLFCSTTQGKILVQKLLNKFIVESLTPSSLSLMHSPPGTQNISEINLSPMEISTFRIQLR

SEQ ID NO: 13632 - protein, 337 aa, Homo sapiens
  VARIANT (1)...(337): Xaa = Any Amino Acid
MKLSRQFTVFGSAIFCVVIFSLYLMLDRGHLDYPRNPRREGSFPQGQLSMLQEKIDHLERLLAENNEIISNIRDSVINLSESVEDGPKSSQSNFSQGAGSHLLPSQLSLSVDTADCLFASQSGSHNSDVQMLDVYSLISFDNPDGGVWKQGFDITYESNEWDTEPLQVFVVPHSHNDPGWLKTFNDYFRDKTQYIFNNMVLKLKEDSRRKFIWSEISYLSKWWDIIDIQKKDAVKSLIENGQLEIVTGGWVMPDEATPHYFALIDQLIEGHQWLENNIGVKPRSGWAIDPFGHSPTMAYLLNRAGLSHMLIQRVHYAVKKHFALHKTLEFFWRQNWX

SEQ ID NO: 13633 - protein, 320 aa, Homo sapiens [sequence omitted]

SEQ ID NO: 13634 - protein, 520 aa, Homo sapiens
MPGSLPLNAEACWPKDVGIVALEIYFPSQYVDQAELEKYDGVDAGKYTIGLGQAKMGFCTDREDINSLCMTVVQNLMERNNLSYDCIGRLEVGTETIIDKSKSVKTNLMQLFEESGNTDIEGIDTTNACYGGTAAVFNAVNWIESSSWDGRYALVVAGDIAVYATGNARPTGGVGAVALLIGPNAPLIFERGLRGTHMQHAYDFYKPDMLSEYPIVDGKLSIQCYLSALDRCYSVYCKKIHAQWQKEGNDKDFTLNDFGFMIFHSPYCKLVQKSLARMLLNDFLNDQNRDKNSIYSGLEAFGDVKLEDTYFDRDVEKAFMKASSELFSQKTKASLLVSNQNGNMYTSSVYGSLASVLAQYSPQQLAGKRIGVFSYGSGLAATLYSLKVTQDATPGSALDKITASLCDLKSRLDSRTGVAPDVFAENMKLREDTHHLVNYIPQGSIDSLFEGTWYLVRVDEKHRRTYARRPTPNDDTLDEGVGLVHSNIATEHIPSPAKKVPRLPATAAEPEAAVISNGEH

SEQ ID NO: 13635 - protein, 520 aa, Homo sapiens; identical to SEQ ID NO: 13634

SEQ ID NO: 13636 - protein, 478 aa, Homo sapiens
MPGSLPLNAEACWPKDVGIVALEIYFPSQYVDQAELEKYDGVDAGKYTIGLGQAKMGFCTDREDINSLCMTVVQNLMERNNLSYDCIGRLEVGTETIIDKSKSVKTNLMQLFEESGNTDIEGIDTTNACYGGTAAVFNAVNWIESSSWDGLRGTHMQHAYDFYKPDMLSEYPIVDGKLSIQCYLSALDRCYSVYCKKIHAQWQKEGNDKDFTLNDFGFMIFHSPYCKLVQKSLARMLLNDFLNDQNRDKNSIYSGLEAFGDVKLEDTYFDRDVEKAFMKASSELFSQKTKASLLVSNQNGNMYTSSVYGSLASVLAQYSPQQLAGKRIGVFSYGSGLAATLYSLKVTQDATPGSALDKITASLCDLKSRLDSRTGVAPDVFAENMKLREDTHHLVNYIPQGSIDSLFEGTWYLVRVDEKHRRTYARRPTPNDDTLDEGVGLVHSNIATEHIPSPAKKVPRLPATAAEPEAAVISNGEH

SEQ ID NO: 13637 - protein, 200 aa, Homo sapiens
MEQTEVLKPRTLADLIRILHQLFAGDEVNVEEVQAIMEAYESDPTEWAMYAKFDQYRYTRNLVDQGNGKFNLMILCWGEGHGSSIHDHTNSHCFLKMLQGNLKETLFAWPDKKSNEMVKKSERVLRENQCAYINDSIGLHRVENISHTEPAVSLHLYSPPFDTCHAFDQRTGHKNKVTMTFHSKFGIRTPNATSGSLENN

SEQ ID NO: 13638 - protein, 490 aa, Homo sapiens
MQRLLTPVKRILQLTRAVQETSLTPARLLPVAHQRFSTASAVPLAKTDTWPKDVGILALEVYFPAQYVDQTDLEKYNNVEAGKYTVGLGQTRMGFCSVQEDINSLCLTVVQRLMERIQLPWDSVGRLEVGTETIIDKSKAGIDTTNACYGGTASLFNAANWMESSSWDGRYAMVVCGDIAVYPSGNARPTGGAGAVAMLIGPKAPLALERGLRGTHMENVYDFYKPNLASEYPIVDGKLSIQCYLRALDRCYTSYRKKIQNQWKQAGSDRPFTLDDLQYMIFHTPFCKMVQKSLARLMFNDFLSASSDTQTSLYKGLEAFGGLKLEDTYTNKDLDKALLKASQDMFDKKTKASLYLSTHNGNMYTSSLYGCLASLLSHHSAQELAGSRIGAFSYGSGLAASFFSFRVSQDAAPGSPLDKLVSSTSDLPKRLASRKCVSPEEFTEIMNQREQFYHKVNFSPPGDTNSLFPGTWYLERVDEQHRRKYARRPV

SEQ ID NO: 13639 - protein, 508 aa, Homo sapiens
MQRLLTPVKRILQLTRAVQETSLTPARLLPVAHQRFSTASAVPLAKTDTWPKDVGILALEVYFPAQYVDQTDLEKYNNVEAGKYTVGLGQTRMGFCSVQEDINSLCLTVVQRLMERIQLPWDSVGRLEVGTETIIDKSKAVKTVLMELFQDSGNTDIEGIDTTNACYGGTASLFNAANWMESSSWDGRYAMVVCGDIAVYPSGNARPTGGAGAVAMLIGPKAPLALERGLRGTHMENVYDFYKPNLASEYPIVDGKLSIQCYLRALDRCYTSYRKKIQNQWKQAGSDRPFTLDDLQYMIFHTPFCKMVQKSLARLMFNDFLSASSDTQTSLYKGLEAFGGLKLEDTYTNKDLDKALLKASQDMFDKKTKASLYLSTHNGNMYTSSLYGCLASLLSHHSAQELAGSRIGAFSYGSGLAASFFSFRVSQDAAPGSPLDKLVSSTSDLPKRLASRKCVSPEEFTEIMNQREQFYHKVNFSPPGDTNSLFPGTWYLERVDEQHRRKYARRPV

SEQ ID NO: 13640 - protein, 428 aa, Homo sapiens
MITGVFSMRLWTPVGVLTSLAYCLHQRRVALAELQEADGQCPVDRSLLKLKMVQVVFRHGARSPLKPLPLEEQVEWNPQLLEVPPQTQFDYTVTNLAGGPKPYSPYDSQYHETTLKGGMFAGQLTKVGMQQMFALGERLRKNYVEDIPFLSPTFNPQEVFIRSTNIFRNLESTRCLLAGLFQCQKEGPIIIHTDEADSEVLYPNYQSCWSLRQRTRGRRQTASLQPGISEDLKKVKDRMGIDSSDKVDFFILLDNVAAEQAHNLPSCPMLKRFARMIEQRAVDTSLYILPKEDRESLQMAVGPFLHILESNLLKAMDSATAPDKIRKLYLYAAHDVTFIPLLMTLGIFDHKWPPFAVDLTMELYQHLESKEWFVQLYYHGKEQVPRGCPDGLCPLDMFLNAMSVYTLSPEKYHALCSQTQVMEVGNEE

SEQ ID NO: 13641 - protein, 1129 aa, Homo sapiens
MSVEAYGPSSQTLTFLDTEEAELLGADTQGSEFEFTDFTLPSQTQTPPGGPGGPGGGGAGGPGGAGAGAAAGQLDAQVGPEGILQNGAVDDSVAKTSQLLAELNFEEDEEDTYYTKDLPIHACSYCGIHDPACVVYCNTSKKWFCNGRGNTSGSHIVNHLVRAKCKEVTLHKDGPLGETVLECYNCGCRNVFLLGFIPAKADSVVVLLCRQPCASQSSLKDINWDSSQWQPLIQDRCFLSWLVKIPSEQEQLRARQITAQQINKLEELWKENPSATLEDLEKPGVDEEPQHVLLRYEDAYQYQNIFGPLVKLEADYDKKLKESQTQDNITVRWDLGLNKKRIAYFTLPKTDSGNEDLVIIWLRDMRLMQGDEICLRYKGDLAPLWKGIGHVIKVPDNYGDEIAIELRSSVGAPVEVTHNFQVDFVWKSTSFDRMQSALKTFAVDETSVSGYIYHKLLGHEVEDVIIKCQLPKRFTAQGLPDLNHSQVYAVKTVLQRPLSLIQGPPGTGKTVTSATIVYHLARQGNGPVLVCAPSNIAVDQLTEKIHQTGLKVVRLCAKSREAIDSPVSFLALHNQIRNMDSMPELQKLQQLKDETGELSSADEKRYRALKRTAERELLMNADVICCTCVGAGDPRLAKMQFRSILIDESTQATEPECMVPVVLGAKQLILVGDHCQLGPVVMCKKAAKAGLSQSLFERLVVLGIRPIRLQVQYRMHPALSAFPSNIFYEGSLQNGVTAADRVKKGFDFQWPQPDKPMFFYVTQGQEEIASSGTSYLNRTEAANVEKITTKLLKAGAKPDQIGIITPYEGQRSYLVQYMQFSGSLHTKLYQEVEIASVDAFQGREKDFIILSCVRANEHQGIGFLNDPRRLNVALTRARYGVIIVGNPKALSKQPLWNHLLNYYKEQKVLVEGPLNNLRESLMQFSKPRKLVNTINPGARFMTTAMYDAREAIIPGSVYDRSSQGRPSSMYFQTHDQIGMISAGPSHVAAMNIPIPFNLVMPPMPPPGYFGQANGPAAGRGTPKGKTGRGGRQKNRFGLPGPSQTNLPNSQASQDVASQPFSQGALTQGYISMSQPSQMSQPGLSQPELSQDSYLGDEFKSQIDVALSQDSTYQGERAYQHGGVTGLSQY

SEQ ID NO: 13642 - protein, 1118 aa, Homo sapiens
MSVEAYGPSSQTLTFLDTEEAELLGADTQGSEFEFTDFTLPSQTQTPPGGPGGPGGGGAGGPGGAGAGAAAGQLDAQVGPEGILQNGAVDDSVAKTSQLLAELNFEEDEEDTYYTKDLPIHACSYCGIHDPACVVYCNTSKKWFCNGRGNTSGSHIVNHLVRAKCKEVTLHKDGPLGETVLECYNCGCRNVFLLGFIPAKADSVVVLLCRQPCASQSSLKDINWDSSQWQPLIQDRCFLSWLVKIPSEQEQLRARQITAQQINKLEELWKENPSATLEDLEKPGVDEEPQHVLLRYEDAYQYQNIFGPLVKLEADYDKKLKESQTQDNITVRWDLGLNKKRIAYFTLPKTDSDMRLMQGDEICLRYKGDLAPLWKGIGHVIKVPDNYGDEIAIELRSSVGAPVEVTHNFQVDFVWKSTSFDRMQSALKTFAVDETSVSGYIYHKLLGHEVEDVIIKCQLPKRFTAQGLPDLNHSQVYAVKTVLQRPLSLIQGPPGTGKTVTSATIVYHLARQGNGPVLVCAPSNIAVDQLTEKIHQTGLKVVRLCAKSREAIDSPVSFLALHNQIRNMDSMPELQKLQQLKDETGELSSADEKRYRALKRTAERELLMNADVICCTCVGAGDPRLAKMQFRSILIDESTQATEPECMVPVVLGAKQLILVGDHCQLGPVVMCKKAAKAGLSQSLFERLVVLGIRPIRLQVQYRMHPALSAFPSNIFYEGSLQNGVTAADRVKKGFDFQWPQPDKPMFFYVTQGQEEIASSGTSYLNRTEAANVEKITTKLLKAGAKPDQIGIITPYEGQRSYLVQYMQFSGSLHTKLYQEVEIASVDAFQGREKDFIILSCVRANEHQGIGFLNDPRRLNVALTRARYGVIIVGNPKALSKQPLWNHLLNYYKEQKVLVEGPLNNLRESLMQFSKPRKLVNTINPGARFMTTAMYDAREAIIPGSVYDRSSQGRPSSMYFQTHDQIGMISAGPSHVAAMNIPIPFNLVMPPMPPPGYFGQANGPAAGRGTPKGKTGRGGRQKNRFGLPGPSQTNLPNSQASQDVASQPFSQGALTQGYISMSQPSQMSQPGLSQPELSQDSYLGDEFKSQIDVALSQDSTYQGERAYQHGGVTGLSQY

SEQ ID NO: 13643 - protein, 1118 aa, Homo sapiens; identical to SEQ ID NO: 13642

SEQ ID NO: 13644 - protein, 1118 aa, Homo sapiens; identical to SEQ ID NO: 13642

SEQ ID NO: 13645 - protein, 382 aa, Homo sapiens [sequence omitted]

SEQ ID NO: 13646 - protein, 168 aa, Homo sapiens [sequence omitted]

SEQ ID NO: 13647 - protein, 198 aa, Homo sapiens [sequence omitted]

SEQ ID NO: 13648 - protein, 198 aa, Homo sapiens [sequence omitted]

SEQ ID NO: 13649 - protein, 382 aa, Homo sapiens [sequence omitted]

SEQ ID NO: 13650 - protein, 351 aa, Homo sapiens
MSLVCLTDFQAHAREQLSKSTRDFIEGGADDSITRDDNIAAFKRIRLRPRYLRDVSEVDTRTTIQGEEISAPICIAPTGFHCLVWPDGEMSTARAAQAAGICYITSTFASCSLEDIVIAAPEGLRWFQLYVHPDLQLNKQLIQRVESLGFKALVITLDTPVCGNRRHDIRNQLRRNLTLTDLQSPKKGNAIPYFQMTPISTSLCWNDLSWFQSITRLPIILKGILTKEDAELAVKHNVQGIIVSNHGGRQLDEVLASIDALTEVVAAVKGKIEVYLDGGVRTGNDVLKALALGAKCIFLGRPILWGLACKGEHGVKEVLNILTNEFHTSMALTGCRSVAEINRNLVQFSRL

SEQ ID NO: 13651 - protein, 364 aa, Homo sapiens
MEDKMWSECEGPEMSLVCLTDFQAHAREQLSKSTRDFIEGGADDSITRDDNIAAFKRIRLRPRYLRDVSEVDTRTTIQGEEISAPICIAPTGFHCLVWPDGEMSTARAAQAAGICYITSTFASCSLEDIVIAAPEGLRWFQLYVHPDLQLNKQLIQRVESLGFKALVITLDTPVCGNRRHDIRNQLRRNLTLTDLQSPKKGNAIPYFQMTPISTSLCWNDLSWFQSITRLPIILKGILTKEDAELAVKHNVQGIIVSNHGGRQLDEVLASIDALTEVVAAVKGKIEVYLDGGVRTGNDVLKALALGAKCIFLGRPILWGLACKGEHGVKEVLNILTNEFHTSMALTGCRSVAEINRNLVQFSRL

SEQ ID NO: 13652 - protein, 637 aa, Homo sapiens
MTTPALLPLSGRRIPPLNLGPPSFPHHRATLRLSEKFILLLILSAFITLCFGAFFFLPDSSKHKRFDLGLEDVLIPHVDAGKGAKNPGVFLIHGPDEHRHREEEERLRNKIRADHEKALEEAKEKLRKSREEIRAEIQTEKNKVVQEMKIKENKPLPPVPIPNLVGIRGGDPEDNDIREKREKIKEMMKHAWDNYRTYGWGHNELRPIARKGHSPNIFGSSQMGATIVDALDTLYIMGLHDEFLDGQRWIEDNLDFSVNSEVSVFEVNIRFIGGLLAAYYLSGEEIFKIKAVQLAEKLLPAFNTPTGIPWAMVNLKSGVGRNWGWASAGSSILAEFGTLHMEFIHLSYLTGDLTYYKKVMHIRKLLQKMDRPNGLYPNYLNPRTGRWGQYHTSVGGLGDSFYEYLLKAWLMSDKTDHEARKMYDDAIEAIEKHLIKKSRGGLTFIGEWKNGHLEKKMGHLACFAGGMFALGADGSRADKAGHYLELGAEIARTCHESYDRTALKLGPESFKFDGAVEAVAVRQAEKYYILRPEVIETYWYLWRFTHDPRYRQWGWEAALAIEKYCRVNGGFSGVKDVYSSTPTHDDVQQSFFLAETLKYLYLLFSGDDLLPLDHWVFNTEAHPLPVLHLANTTLSES

SEQ ID NO: 13653 - protein, 641 aa, Homo sapiens
MTTPALLPLSGRRIPPLNLGPPSFPHHRATLRLSEKFILLLILSAFITLCFGAFFFLPDSSKHKRFDLGLEDVLIPHVDAGKGAKNPGVFLIHGPDEHRHREEEERLRNKIRADHEKALEEAKEKLRKSREEIRAEIQTEKNKVVQEMKIKENKPLPPVPIPNLVGIRGGDPEDNDIREKREKIKEMMKHAWDNYRTYGWGHNELRPIARKGHSPNIFGSSQMGATIVDALDTLYIMGLHDEFLDGQRWIEDNLDFSVNSEVSVFEVNIRFIGGLLAAYYLSGEEIFKIKAVQLAEKLLPAFNTPTGIPWAMVNLKSGVGRNWGWASAGSSILAEFGTLHMEFIHLSYLTGDLTYYKKVMHIRKLLQKMDRPNGLYPNYLNPRTGRWGQYHTSVGGLGDSFYEYLLKAWLMSDKTDHEARKMYDDAIEAIEKHLIKKSRGGLTFIGEWKNGHLEKKMGHLACFAGGMFALGADGSRADKAGHYLELGAEIARTCHESYDRTALKLGPESFKFDGAVEAVAVRQAEKYYILRPEVIETYWYLWRFTHDPRYRQWGWEAALAIEKYCRVNGGFSGVKDVYSSTPTHDDVQQSFFLAETLKYLYLLFSGDDLLPLDHWVFNTEAHPLPVLHLANTTLSGNPAVR

SEQ ID NO: 13654 - protein, 598 aa, Homo sapiens
  VARIANT (1)...(598): Xaa = Any Amino Acid
MTTPALLPLSGRRIPPLNLGPPSFPHHRATLRLSEKFILLLILSAFITLCFGAFFFLPDSSKHKRFDLGLEDVLIPHVDAGKGAKNPGVFLIHGPDEHRHREEEERLRNKIRADHEKALEEAKEKLRKSREEIRAEIQTEKNKVVQEMKIKENKPLPPVPIPNLVGIRGGDPEDNDIREKREKIKEMMKHAWDNYRTYGWGHNELRPIARKGHSPNIFGSSQMGATIVDALDTLYIMGLHDEFLDGQRWIEDNLDFSVNSEVSVFEVNIRFIGGLLAAYYLSGEEIFKIKAVQLAEKLLPAFNTPTGIPWAMVNLKSGVGRNWGWASAGSSILAEFGTLHMEFIHLSYLTGDLTYYKKVMHIRKLLQKMDRPNGLYPNYLNPRTGRWGQYHTSVGGLGDSFYEYLLKAWLMSDKTDHEARKMYDDAIEAIEKHLIKKSRGGLTFIGEWKNGHLEKKMGHLACFAGGMFALGADGSRADKAGHYLELGAEIARTCHESYDRTALKLGPESFKFDGAVEAVAVRQAEKYYILRPEVIETYWYLWRFTHDPRYRQWGWEAALAIEKYCRVNGGFSGVKDVYSSTPTHDDVQQSFFLAETLX

SEQ ID NO: 13655 - protein, 532 aa, Homo sapiens
MGKKVAIIGAGVSGLASIRSCLEEGLEPTCFEKSNDIGGLWKFSDHAEEGRASIYKSVFSNSSKEMMCFPDFPFPDDFPNFMHNSKIQEYIIAFAKEKNLLKYIQFKTFVSSVNKHPDFATTGQWDVTTERDGKKESAVFDAVMVCSGHHVYPNLPKESFPGLNHFKGKCFHSRDYKEPGVFNGKRVLVVGLGNSGCDIATELSRTAEQVMISSRSGSWVMSRVWDNGYPWDMLLVTRFGTFLKNNLPTAISDWLYVKQMNARFKHENYGLMPLNGVLRKEPVFNDELPASILCGIVSVKPNVKEFTETSAIFEDGTIFEGIDCVIFATGYSFAYPFLDESIIKSRNNEIILFKGVFPPLLEKSTIAVIGFVQSLGAAIPTVDLQSRWAAQVIKGTCTLPSMEDMMNDINEKMEKKRKWFGKSETIQTDYIVYMDELSSFIGAKPNIPWLFLTDPKLAMEVYFGPCSPYQFRLVGPGQWPGARNAILTQWDRSLKPMQTRVVGRLQKPCFFFHWLKLFAIPILLIAVFLVLT

SEQ ID NO: 13656 - protein, 532 aa, Homo sapiens; identical to SEQ ID NO: 13655

SEQ ID NO: 13657 - protein, 1128 aa, Homo sapiens
MSRRKPASGGLAASSSAPARQAVLSRFFQSTGSLKSTSSSTGAADQVDPGAAAAAAPPAPAFPPQLPPHVATEIDRRKKRPLENDGPVKKKVKKVQQKEGGSDLGMSGNSEPKKCLRTRNVSKSLEKLKEFCCDSALPQSRVQTESLQERFAVLPKCTDFDDISLLHAKNAVSSEDSKRQINQKDTTLFDLSQFGSSNTSHENLQKTASKSANKRSKSIYTPLELQYIEMKQQHKDAVLCVECGYKYRFFGEDAEIAARELNIYCHLDHNFMTASIPTHRLFVHVRRLVAKGYKVGVVKQTETAALKAIGDNRSSLFSRKLTALYTKSTLIGEDVNPLIKLDDAVNVDEIMTDTSTSYLLCISENKENVRDKKKGNIFIGIVGVQPATGEVVFDSFQDSASRSELETRMSSLQPVELLLPSALSEQTEALIHRATSVSVQDDRIRVERMDNIYFEYSHAFQAVTEFYAKDTVDIKGSQIISGIVNLEKPVICSLAAIIKYLKEFNLEKMLSKPENFKQLSSKMEFMTINGTTLRNLEILQNQTDMKTKGSLLWVLDHTKTSFGRRKLKKWVTQPLLKLREINARLDAVSEVLHSESSVFGQIENHLRKLPDIERGLCSIYHKKCSTQEFFLIVKTLYHLKSEFQAIIPAVNSHIQSDLLRTVILEIPELLSPVEHYLKILNEQAAKVGDKTELFKDLSDFPLIKKRKDEIQGVIDEIRMHLQEIRKILKNPSAQYVTVSGQEFMIEIKNSAVSCIPTDWVKVGSTKAVSRFHSPFIVENYRHLNQLREQLVLDCSAEWLDFLEKFSEHYHSLCKAVHHLATVDCIFSLAKVAKQGDYCRPTVQEERKIVIKNGRHPVIDVLLGEQDQYVPNNTDLSEDSERVMIITGPNMGGKSSYIKQVALITIMAQIGSYVPAEEATIGIVDGIFTRMGAADNIYKGRSTFMEELTDTAEIIRKATSQSLVILDELGRGTSTHDGIAIAYATLEYFIRDVKSLTLFVTHYPPVCELEKNYSHQVGNYHMGFLVSEDESKLDPGAAEQVPDFVTFLYQITRGIAARSYGLNVAKLADVPGEILKKAAHKSKELEGLINTKRKRLKYFAKLWTMHNAQDLQKWTEEFNMEETQTSLLH

SEQ ID NO: 13658 - protein, 419 aa, Homo sapiens
MASIFSKLLTGRNASLLFATMGTSVLTTGYLLNRQKVCAEVREQPRLFPPSADYPDLRKHNNCMAECLTPAIYAKLRNKVTPNGYTLDQCIQTGVDNPGHPFIKTVGMVAGDEESYEVFADLFDPVIKLRHNGYDPRVMKHTTDLDASKITQGQFDEHYVLSSRVRTGRSIRGLSLPPACTRAERREVENVAITALEGLKGDLAGRYYKLSEMTEQDQQRLIDDHFLFDKPVSPLLTCAGMARDWPDARGIWHNYDKTFLIWINEEDHTRVISMEKGGNMKRVFERFCRGLKEVERLIQERGWEFMWNERLGYILTCPSNLGTGLRAGVHVRIPKLSKDPRFSKILENLRLQKRGTGGVDTAAVADVYDISNIDRIGRSEVELVQIVIDGVNYLVDCEKKLERGQDIKVPPPLPQFGKK

SEQ ID NO: 13659 - protein, 419 aa, Homo sapiens; identical to SEQ ID NO: 13658

SEQ ID NO: 13660 - protein, 419 aa, Homo sapiens; identical to SEQ ID NO: 13658

SEQ ID NO: 13661 - protein, 514 aa, Homo sapiens
MSSPISKSRSLAAFLQQLRSPRQPPRLVTSTAYTSPQPREVPVCPLTAGGETQNAAALPGPTSWPLLGSLLQILWKGGLKKQHDTLVEYHKKYGKIFRMKLGSFESVHLGSPCLLEALYRTESAYPQRLEIKPWKAYRDYRKEGYGLLILEGEDWQRVRSAFQKKLMKPGEVMKLDNKINEVLADFMGRIDELCDERGHVEDLYSELNKWSFESICLVLYEKRFGLLQKNAGDEAVNFIMAIKTMMSTFGRMMVTPVELHKSLNTKVWQDHTLAWDTIFKSVKACIDNRLEKYSQQPSADFLCDIYHQNRLSKKELYAAVTELQLAAVETTANSLMWILYNLSRNPQVQQKLLKEIQSVLPENQVPRAEDLRNMPYLKACLKESMRLTPSVPFTTRTLDKATVLGEYALPKGTVLMLNTQVLGSSEDNFEDSSQFRPERWLQEKEKINPFAHLPFGVGKRMCIGRRLAELQLHLALCWIVRKYDIQATDNEPVEMLHSGTLVPSRELPIAFCQR

SEQ ID NO: 13662 - protein, 460 aa, Homo sapiens
MASREEVLALQAEVAQREEELNSLKQKLASALLAEQEPQPERLVPVSPLPPKAALSRDEILRYSRQLVLPELGVHGQLRLGTACVLIVGCGGLGCPLAQYLAAAGVGRLGLVDYDVVEMSNLARQVLHGEALAGQAKAFSAAASLRRLNSAVECVPYTQALTPATALDLVRRYDVVADCSDNVPTRYLVNDACVLAGRPLVSASALRFEGQITVYHYDGGPCYRCIFPQPPPAETVTNCADGGVLGVVTGVLGCLQALEVLKIAAGLGPSYSGSLLLFDALRGHFRSIRLRSRRLDCAACGERPTVTDLLDYEAFCGSSATDKCRSLQLLSPEERVSVTDYKRLLDSGAFHLLLDVRPQVEVDICRLPHALHIPLKHLERRDAESLKLLKEAIWEEKQGTQEGAAVPIYVICKLGNDSQKAVKILQSLSAAQELDPLTVRDVVGGLMAWAAKIDGTFPQY

SEQ ID NO: 13663 - protein, 333 aa, Homo sapiens
  VARIANT (1)...(333): Xaa = Any Amino Acid
MEMEKEFEQIDKSGSWAAIYQDIRHEASDFPCRVAKLPKNKNRNRYRDVSPFDHSRIKLHQEDNDYINASLIKMEEAQRSYILTQGPLPNTCGHFWEMVWEQKSRGVVMLNRVMEKGSLKCAQYWPQKEEKEMIFEDTNLKLTLISEDIKSYYTVRQLELENLTTQETREILHFHYTTWPDFGVPESPASFLNFLFKVRESGSLSPEHGPVVVHCSAGIGRSGTFCLADTCLLLMDKRKDPSSVDIKKVLLEMRKFRMGLIQTADQLRFSYLAVIEGAKFIMGDSSVDQWKELSHEDLEPPPEHIPPPPRPPKRILEPHNGKCREFFPNHQWX

SEQ ID NO: 13664 - protein, 432 aa, Homo sapiens
MEMEKEFEQIDKSGSWAAIYQDIRHEASDFPCRVAKLPKNKNRNRYRDVSPFDHSRIKLHQEDNDYINASLIKMEEAQRSYILTQGPLPNTCGHFWEMVWEQKSRGVVMLNRVMEKGSLKCAQYWPQKEEKEMIFEDTNLKLTLISEDIKSYYTVRQLELENLTTQETREILHFHYTTWPDFGVPESPASFLNFLFKVRESGSLSPEHGPVVVHCSAGIGRSGTFCLADTCLLLMDKRKDPSSVDIKKVLLEMRKFRMGLIQTADQLRFSYLAVIEGAKFIMGDSSVQDQWKELSHEDLEPPPEHIPPPPRPPKRILEPHNGKCREFFPNHQWVKEETQEDKDCPIKEEKGSPLNAAPYGIESMSQDTEVRSRVVGGSLRGAQAASPAKGEPSLPEKDEDHALSYWKPFLVNMCVATVLTAGAYLCYRVCFH

SEQ ID NO: 13665 - protein, 435 aa, Homo sapiens
MEMEKEFEQIDKSGSWAAIYQDIRHEASDFPCRVAKLPKNKNRNRYRDVSPFDHSRIKLHQEDNDYINASLIKMEEAQRSYILTQGPLPNTCGHFWEMVWEQKSRGVVMLNRVMEKGSLKCAQYWPQKEEKEMIFEDTNLKLTLISEDIKSYYTVRQLELENLTTQETREILHFHYTTWPDFGVPESPASFLNFLFKVRESGSLSPEHGPVVVHCSAGIGRSGTFCLADTCLLLMDKRKDPSSVDIKKVLLEMRKFRMGLIQTADQLRFSYLAVIEGAKFIMGDSSVQDQWKELSHEDLEPPPEHIPPPPRPPKRILEPHNGKCREFFPNHQWVKEETQEDKDCPIKEEKGSPLNAAPYGIESMSQDTEVRSRVVGGSLRGAQAASPAKGEPSLPEKDEDHALSYWKPFLVNMCVATVLTAGAYLCYRFLFNSNT

SEQ ID NO: 13666 - protein, 853 aa, Homo sapiens
MKGDTRHLNGEEDAGGREDSILVNGACSDQSSDSPPILEAIRTPEIRGRRSSSRLSKREVSSLLSYTQDLTGDGDGEDGDGSDTPVMPKLFRETRTRSESPAVRTRNNNSVSSRERHRPSPRSTRGRQGRNHVDESPVEFPATRSLRRRATASAGTPWPSPPSSYLTIDLTDDTEDTHGTPQSSSTPYARLAQDSQQGGMESPQVEADSGDGDSSEYQDGKEFGIGDLVWGKIKGFSWWPAMVVSWKATSKRQAMSGMRWVQWFGDGKFSEVSADKLVALGLFSQHFNLATFNKLVSYRKAMYHALEKARVRAGKTFPSSPGDSLEDQLKPMLEWAHGGFKPTGIEGLKPNNTQPVVNKSKVRRAGSRKLESRKYENKTRRRTADDSATSDYCPAPKRLKTNCYNNGKDRGDEDQSREQMASDVANNKSSLEDGCLSCGRKNPVSFHPLFEGGLCQTCRDRFLELFYMYDDDGYQSYCTVCCEGRELLLCSNTSCCRCFCVECLEVLVGTGTAAEAKLQEPWSCYMCLPQRCHGVLRRRKDWNVRLQAFFTSDTGLEYEAPKLYPAIPAARRRPIRVLSLFDGIATGYLVLKELGIKVGKYVASEVCEESIAVGTVKHEGNIKYVNDVRNITKKNIEEWGPFDLVIGGSPCNDLSNVNPARKGLYEGTGRLFFEFYHLLNYSRPKEGDDRPFFWMFENVVAMKVGDKRDISRFLECNPVMIDAIKVSAAHRARYFWGNLPGMNRPVIASKNDKLELQDCLEYNRIAKLKKVQTITTKSNSIKQGKNQLFPVVMNGKEDVLWCTELERIFGFPVHYTDVSNMGRGARQKLLGRSWSVPVIRHLFAPLKDYFACE

SEQ ID NO: 13667 - protein, 845 aa, Homo sapiens
MEPSPEPPSLESMKGDTRHLNGEEDAGGREDSILVNGACSDQSSDSPPILEAIRTPEIRGRRSSSRLSKREVSSLLSYTQDLTGDGDGEDGDGSDTPVMPKLFRETRTRSESPAVRTRNNNSVSSRERHRPSPRSTRGRQGRNHVDESPVEFPATRSLRRRATASAGTPWPSPPSSYLTIDLTDDTEDTHGTPQSSSTPYARLAQDSQQGGMESPQVEADSGDGDSSEYQDGKEFGIGDLVWGKIKGFSWWPAMVVSWKATSKRQAMSGMRWVQWFGDGKFSEVSADKLVALGLFSQHFNLATFNKLVSYRKAMYHALEKARVRAGKTFPSSPGDSLEDQLKPMLEWAHGGFKPTGIEGLKPNNTQPENKTRRRTADDSATSDYCPAPKRLKTNCYNNGKDRGDEDQSREQMASDVANNKSSLEDGCLSCGRKNPVSFHPLFEGGLCQTCRDRFLELFYMYDDDGYQSYCTVCCEGRELLLCSNTSCCRCFCVECLEVLVGTGTAAEAKLQEPWSCYMCLPQRCHGVLRRRKDWNVRLQAFFTSDTGLEYEAPKLYPAIPAARRRPIRVLSLFDGIATGYLVLKELGIKVGKYVASEVCEESIAVGTVKHEGNIKYVNDVRNITKKNIEEWGPFDLVIGGSPCNDLSNVNPARKGLYEGTGRLFFEFYHLLNYSRPKEGDDRPFFWMFENVVAMKVGDKRDISRFLECNPVMIDAIKVSAAHRARYFWGNLPGMNRPVIASKNDKLELQDCLEYNRIAKLKKVQTITTKSNSIKQGKNQLFPVVMNGKEDVLWCTELERIFGFPVHYTDVSNMGRGARQKLLGRSWSVPVIRHLFAPLKDYFACE

SEQ ID NO: 13668 - protein, 812 aa, Homo sapiens
MKGDTRHLNGEEDAGGREDSILVNGACSDQSSDSPPILEAIRTPEIRGRRSSSRLSKREVSSLLSYTQDLTGDGDGEDGDGSDTPVMPKLFRETRTRSESPAVRTRNNNSVSSRERHRPSPRSTRGRQGRNHVDESPVEFPATRSLRRRATASAGTPWPSPPSSYLTIDLTDDTEDTHGTPQSSSTPYARLAQDSQQGGMESPQVEADSGDGDSSEYQDGKEFGIGDLVWGKIKGFSWWPAMVVSWKATSKRQAMSGMRWVQWFGDGKFSEVSADKLVALGLFSQHFNLATFNKLVSYRKAMYHALEKARVRAGKTFPSSPGDSLEDQLKPMLEWAHGGFKPTGIEGLKPNNTQPVVNKSKVRRAGSRKLESRKYENKTRRRTADDSATSDYCPAPKRLKTNCYNNGKDRGDEDQSREQMASDVANNKSSLEDGCLSCGRKNPVSFHPLFEGGLCQTCRDRFLELFYMYDDDGYQSYCTVCCEGRELLLCSNTSCCRCFCVECLEVLVGTGTAAEAKLQEPWSCYMCLPQRCHGVLRRRKDWNVRLQAFFTSDTGLEYEAPKLYPAIPAARRRPIRVLSLFDGIATGYLVLKELGIKVGKYVASEVCEESIAVGTVKHEGNIKYVNDVRNITKKNIEEWGPFDLVIGGSPCNDLSNVNPARKGLYEGTGRLFFEFYHLLNYSRPKEGDDRPFFWMFENVVAMKVGDKRDISRFLECNPVMIDAIKVSAAHRARYFWGNLPGMNRPVIASKNDKLELQDCLEYNRIAKDLWLSCALHRRVQHGPWCPPEAAGKVLERACHPTPLRPSEGLLCM

SEQ ID NO: 13669 - protein, 770 aa, Homo sapiens
MKGDTRHLNGEEDAGGREDSILVNGACSDQSSDSPPILEAIRTPEIRGRRSSSRLSKREVSSLLSYTQDLTGDGDGEDGDGSDTPVMPKLFRETRTRSESPAVRTRNNNSVSSRERHRPSPRSTRGRQGRNHVDESPVEFPATRSLRRRATASAGTPWPSPPSSYLTIDLTDDTEDTHGTPQSSSTPYARLAQDSQQGGMESPQVEADSGDGDSSEYQDGKEFGIGDLVWGKIKGFSWWPAMVVSWKATSKRQAMSGMRWVQWFGDGKFSEVSADKLVALGLFSQHFNLATFNKLVSYRKAMYHALEKARVRAGKTFPSSPGDSLEDQLKPMLEWAHGGFKPTGIEGLKPNNTQPENKTRRRTADDSATSDYCPAPKRLKTNCYNNGKDRGDEDQSREQMASDVANNKSSLEDGCLSCGRKNPVSFHPLFEGGLCQTCRDRFLELFYMYDDDGYQSYCTVCCEGRELLLCSNTSCCRCFCVECLEVLVGTGTAAEAKLQEPWSCYMCLPQRCHGVLRRRKDWNVRLQAFFTSDTGLEYEAPKLYPAIPAARRRPIRVLSLFDGIATGYLVLKELGIKVGKYVASEVCEESIAVGTVKHEGNIKYVNDVRNITKKNIEEWGPFDLVIGGSPCNDLSNVNPARKGLYEGTGRLFFEFYHLLNYSRPKEGDDRPFFWMFENVVAMKVGDKRDISRFLECNPVMIDAIKVSAAHRARYFWGNLPGMNRIFGFPVHYTDVSNMGRGARQKLLGRSWSVPVIRHLFAPLKDYFACE

SEQ ID NO: 13670 - protein, 853 aa, Homo sapiens; identical to SEQ ID NO: 13666

SEQ ID NO: 13671 - protein, 345 aa, Homo sapiens
MAPPGSSTVFLLALTIIASTWALTPTHYLTKHDVERLKASLDRPFTNLESAFYSIVGLSSLGAQVPDAKKACTYIRSNLDPSNVDSLFYAAQASQALSGCEISISNETKDLLLAAVSEDSSVTQIYHAVAALSGFGLPLASQEALSALTARLSKEETVLARVWSTVLESRSLFSKRTVQALQTASHLSQQADLRSIVEEIEDLVARLDELGGVYLQFEEGLETTALFVAATYKLMDHVGTEPSIKEDQVIQLMNAIFSKKNFESLSEAFSVASAAAVLSHNRYHVPVVVVPEGSASDTHEQAILRLQVTNVLSQPLTQATVKLEHAKSVASRATVLQKTSFTPVG

SEQ ID NO: 13672 - protein, 429 aa, Homo sapiens
MDHVGTEPSIKEDQVIQLMNAIFSKKNFESLSEAFSVASAAAVLSHNRYHVPVVVVPEGSASDTHEQAILRLQVTNVLSQPLTQATVKLEHAKSVASRATVLQKTSFTPVGDVFELNFMNVKFSSGYYDFLVEVEGDNRYIANTVELRVKISTEVGITNVDLSTVDKDQSIAPKTTRVTYPAKAKGTFIADSHQNFALFFQLVDVNTGAELTPHQTFVRLHNQKTGQEVVFVAEPDNKNVYKFELDTSERKIEFDSASGTYTLYLIIGDATLKNPILWNVADVVIKFPEEEAPSTVLSQNLFTPKQEIQHLFREPEKRPPTVVSNTFTALILSPLLLLFALWIRIGANVSNFTFAPSTIIFHLGHAAMLGLMYVYWTQLNMFQTLKYLAILGSVTFLAGNRMLAQQAVKRIAAEQSSRLAKYRTLRTAH

SEQ ID NO: 13673 - protein, 631 aa, Homo sapiens
MAPPGSSTVFLLALTIIASTWALTPTHYLTKHDVERLKASLDRPFTNLESAFYSIVGLSSLGAQVPDAKKACTYIRSNLDPSNVDSLFYAAQASQALSGCEISISNETKDLLLAAVSEDSSVTQIYHAVAALSGFGLPLASQEALSALTARLSKEETVLATVQALQTASHLSQQADLRSIVEEIEDLVARLDELGGVYLQFEEGLETTALFVAATYKLMDHVGTEPSIKEDQVIQLMNAIFSKKNFESLSEAFSVASAAAVLSHNRYHVPVVVVPEGSASDTHEQAILRLQVTNVLSQPLTQATVKLEHAKSVASRATVLQKTSFTPVGDVFELNFMNVKFSSGYYDFLVEVEGDNRYIANTVELRVKISTEVGITNVDLSTVDKDQSIAPKTTRVTYPAKAKGTFIADSHQNFALFFQLVDVNTGAELTPHQTFVRLHNQKTGQEVVFVAEPDNKNVYKFELDTSERKIEFDSASGTYTLYLIIGDATLKNPILWNVADVVIKFPEEEAPSTVLSQNLFTPKQEIQHLFREPEKRPPTVVSNTFTALILSPLLLLFALWIRIGANVSNFTFAPSTIIFHLGHAAMLGLMYVYWTQLNMFQTLKYLAILGSVTFLAGNRMLAQQAVKRTAH

SEQ ID NO: 13674 - protein, 311 aa, Homo sapiens
MNVKFSSGYYDFLVEVEGDNRYIANTVELRVKISTEVGITNVDLSTVDKDQSIAPKTTRVTYPAKAKGTFIADSHQNFALFFQLVDVNTGAELTPHQTFVRLHNQKTGQEVVFVAEPDNKNVYKFELDTSERKIEFDSASGTYTLYLIIGDATLKNPILWNVADVVIKFPEEEAPSTVLSQNLFTPKQEIQHLFREPEKRPPTVVSNTFTALILSPLLLLFALWIRIGANVSNFTFAPSTIIFHLGHAAMLGLMYVYWTQLNMFQTLKYLAILGSVTFLAGNRMLAQQAVKRIAAEQSSRLAKYRTLRTAH

SEQ ID NO: 13675 - protein, 687 aa, Homo sapiens
MAEELVLERCDLELETNGRDHHTADLCREKLVVRRGQPFWLTLHFEGRNYEASVDSLTFSVVTGPAPSQEAGTKARFPLRDAVEEGDWTATVVDQQDCTLSLQLTTPANAPIGLYRLSLEASTGYQGSSFVLGHFILLFNAWCPADAVYLDSEEERQEYVLTQQGFIYQGSAKFIKNIPWNFGQFEDGILDICLILLDVNPKFLKNAGRDCSRRSSPVYVGRVVSGMVNCNDDQGVLLGRWDNNYGDGVSPMSWIGSVDILRRWKNHGCQRVKYGQCWVFAAVACTVLRCLGIPTRVVTNYNSAHDQNSNLLIEYFRNEFGEIQGDKSEMIWNFHCWVESWMTRPDLQPGYEGWQALDPTPQEKSEGTYCCGPVPVRAIKEGDLSTKYDAPFVFAEVNADVVDWIQQDDGSVHKSINRSLIVGLKISTKSVGRDEREDITHTYKYPEGSSEEREAFTRANHLNKLAEKEETGMAMRIRVGQSMNMGSDFDVFAHITNNTAEEYVCRLLLCARTVSYNGILGPECGTKYLLNLNLEPFSEKSVPLCILYEKYRDCLTESNLIKVRALLVEPVINSYLLAERDLYLENPEIKIRILGEPKQKRKLVAEVSLQNPLPVALEGCTFTVEGAGLTEEQKTVEIPDPVEAGEEVKVRMDLLPLHMGLHKLVVNFESDKLKAVKGFRNVIIGPA

SEQ ID NO: 13676 - protein, 687 aa, Homo sapiens; identical to SEQ ID NO: 13675

SEQ ID NO: 13677 - protein, 349 aa, Homo sapiens
MAEELVLERCDLELETNGRDHHTADLCREKLVVRRGQPFWLTLHFEGRNYEASVDSLTFSVVTGPAPSQEAGTKARFPLRDAVEEGDWTATVVDQQDCTLSLQLTTPANAPIGLYRLSLEASTGYQGSSFVLGHFILLFNAWCPADAVYLDSEEERQEYVLTQQGFIYQGSAKFIKNIPWNFGQFEDGILDICLILLDVNPKFLKNAGRDCSRRSSPVYVGRVVSGMVNCNDDQGVLLGRWDNNYGDGVSPMSWIGSVDILRRWKNHGCQRVKYGQCWVFAAVACTGELHAGMWVMSPGRGHEEHWSRNQDIPALVLPPATNTLNALCGLEPVTTLSGPLSNSHPSSGC

SEQ ID NO: 13678 - protein, 548 aa, Homo sapiens
MAEELVLERCDLELETNGRDHHTADLCREKLVVRRGQPFWLTLHFEGRNYEASVDSLTFSVVTGPAPSQEAGTKARFPLRDAVEEGDWTATVVDQQDCTLSLQLTTPANAPIGLYRLSLEASTGYQGSSFVLGHFILLFNAWCPADAVYLDSEEERQEYVLTQQGFIYQGSAKFIKNIPWNFGQFEDGILDICLILLDVNPKFLKNAGRDCSRRSSPVYVGRVVSGMVNCNDDQGVLLGRWDNNYGDGVSPMSWIGSVDILRRWKNHGCQRVKYGQCWVFAAVACTVLRCLGIPTRVVTNYNSAHDQNSNLLIEYFRNEFGEIQGDKSEMIWNFHCWVESWMTRPDLQPGYEGWQALDPTPQEKSEGTYCCGPVPVRAIKEGDLSTKYDAPFVFAEVNADVVDWIQQDDGSVHKSINRSLIVGLKISTKSVGRDEREDITHTYKYPEGSSEEREAFTRANHLNKLAEKEETGMAMRIRVGQSMNMGSDFDVFAHITNNTAEEYVCRLLLCARTVSYNGILGPECGTKYLLNLNLEPFSGKALCSWSIC

SEQ ID NO: 13679 - protein, 687 aa, Homo sapiens; identical to SEQ ID NO: 13675

SEQ ID NO: 13680 - protein, 687 aa, Homo sapiens; identical to SEQ ID NO: 13675

SEQ ID NO: 13681 - protein, 897 aa, Homo sapiens
MESGQPARRIAMAPLLEYERQLVLELLDTDGLVVCARGLGADRLLYHFLQLHCHPACLVLVLNTQPAEEEYFINQLKIEGVEHLPRRVTNEITSNSRYEVYTQGGVIFATSRILVVDFLTDRIPSDLITGILVYRAHRIIESCQEAFILRLFRQKNKRGFIKAFTDNAVAFDTGFCHVERVMRNLFVRKLYLWPRFHVAVNSFLEQHKPEVVEIHVSMTPTMLAIQTAILDILNACLKELKCHNPSLEVEDLSLENAIGKPFDKTIRHYLDPLWHQLGAKTKSLVQDLKILRTLLQYLSQYDCVTFLNLLESLRATEKAFGQNSGWLFLDSSTSMFINARARVYHLPDAKMSKKEKISEKMEIKEGEETKKELVLESNPKWEALTEVLKEIEAENKESEALGGPGQVLICASDDRTCSQLRDYITLGAEAFLLRLYRKTFEKDSKAEEVWMKFRKEDSSKRIRKSHKRPKDPQNKERASTKERTLKKKKRKLTLTQMVGKPEELEEEGDVEEGYRREISSSPESCPEEIKHEEFDVNLSSDAAFGILKEPLTIIHPLLGCSDPYALTRGLKMLFFQPKSSVLTCRVYFLIYGGSTEEQRYLTALRKEKEAFEKLIREKASMVVPEEREGRDETNLDLVRGTASADVSTDTRKAGGQEQNGTQQSIVVDMREFRSELPSLIHRRGIDIEPVTLEVGDYILTPEMCVERKSISDLIGSLNNGRLYSQCISMSRYYKRPVLLIEFDPSKPFSLTSRGALFQEISSNDISSKLTLLTLHFPRLRILWCPSPHATAELFEELKQSKPQPDAATALAITADSETLPESEKYNPGPQDFLLKMPGVNAKNCRSLMHHVKNIAELAALSQDELTSILGNAANAKQLYDFIHTSFAEVVSKGKGKK

SEQ ID NO: 13682 - protein, 916 aa, Homo sapiens
MESGQPARRIAMAPLLEYERQLVLELLDTDGLVVCARGLGADRLLYHFLQLHCHPACLVLVLNTQPAEEEYFINQLKIEGVEHLPRRVTNEITSNSRYEVYTQGGVIFATSRILVVDFLTDRIPSDLITGILVYRAHRIIESCQEAFILRLFRQKNKRGFIKAFTDNAVAFDTGFCHVERVMRNLFVRKLYLWPRFHVAVNSFLEQHKPEVVEIHVSMTPTMLAIQTAILDILNACLKELKCHNPSLEVEDLSLENAIGKPFDKTIRHYLDPLWHQLGAKTKSLVQDLKILRTLLQYLSQYDCVTFLNLLESLRATEKAFGQNSGWLFLDSSTSMFINARARVYHLPDAKMSKKEKISEKMEIKEGEETKKELVLESNPKWEALTEVLKEIEAENKESEALGGPGQVLICASDDRTCSQLRDYITLGAEAFLLRLYRKTFEKDSKAEEVWMKFRKEDSSKRIRKSHKRPKDPQNKERASTKERTLKKKKRKLTLTQMVGKPEELEEEGDVEEGYRREISSSPESCPEEIKHEEFDVNLSSDAAFGILKEPLTIIHPLLGCSDPYALTRVLHEVEPRYVVLYDAELTFVRQLEIYRASRPGKPLRVYFLIYGGSTEEQRYLTALRKEKEAFEKLIREKASMVVPEEREGRDETNLDLVRGTASADVSTDTRKAGGQEQNGTQQSIVVDMREFRSELPSLIHRRGIDIEPVTLEVGDYILTPEMCVERKSISDLIGSLNNGRLYSQCISMSRYYKRPVLLIEFDPSKPFSLTSRGALFQEISSNDISSKLTLLTLHFPRLRILWCPSPHATAELFEELKQSKPQPDAATALAITADSETLPESEKYNPGPQDFLLKMPGVNAKNCRSLMHHVKNIAELAALSQDELTSILGNAANAKQLYDFIHTSFAEVVSKGKGKK

SEQ ID NO: 13683 - protein, 580 aa, Homo sapiens
MGCFCAVPEEFYCEVLLLDESKLTLTTQQQGIKKSTKGSVVLDHVFHHVNLVEIDYFGLRYCDRSHQTYWLDPAKTLAEHKELINTGPPYTLYFGIKFYAEDPCKLKEEITRYQFFLQVKQDVLQGRLPCPVNTAAQLGAYAIQSELGDYDPYKHTAGYVSEYRFVPDQKEELEEAIERIHKTLMGQIPSEAELNYLRTAKSLEMYGVDLHPVYGENKSEYFLGLTPVGVVVYKNKKQVGKYFWPRITKVHFKETQFELRVLGKDCNETSFFFEARSKTACKHLWKCSVEHHTFFRMPENESNSLSRKLSKFGSIRYKHRYSGRTALQMSRDLSIQLPRPDQNVTRSRSKTYPKRIAQTQPAESNTISRITANMENGENEGTIKIIAPSPVKSFKKAKNENSPDTQRSKSHAPWEENGPQSGLYNSPSDRTKSPKFPYTRRRNPSCGSDNDSVQPVRRRKAHNSGEDSDLKQRRRSRSRCNTSSGSESENSNREHRKKRNRIRQENDMVDSAPQWEAVLRRQKEKNQADPNSRRSRHRSRSRSPDIQAKEELWKHIQKELVDPSGLSEEQLKEIPYTKIE

SEQ ID NO: 13684 - protein, 686 aa, Homo sapiens
MGCFCAVPEEFYCEVLLLDESKLTLTTQQQGIKKSTKGSVVLDHVFHHVNLVEIDYFGLRYCDRSHQTYWLDPAKTLAEHKELINTGPPYTLYFGIKFYAEDPCKLKEEITRYQFFLQVKQDVLQGRLPCPVNTAAQLGAYAIQSELGDYDPYKHTAGYVSEYRFVPDQKEELEEAIERIHKTLMGQIPSEAELNYLRTAKSLEMYGVDLHPVYGENKSEYFLGLTPVGVVVYKNKKQVGKYFWPRITKVHFKETQFELRVLGKDCNETSFFFEARSKTACKHLWKCSVEHHTFFRMPENESNSLSRKLSKFGSIRYKHRYSGRTALQMSRDLSIQLPRPDQNVTRSRSKTYPKRIAQTQPAESNTISRITANMENGENEGTIKIIAPSPVKSFKKAKNENSPDTQRSKSHAPWEENGPQSGLYNSPSDRTKSPKFPYTRRRNPSCGSDNDSVQPVRRRKAHNSGEDSDLKQRRRSRSRCNTSSGSESENSNREHRKKRNRIRQENDMVDSAPQWEAVLRRQKEKNQADPNSRRSRHRSRSRSPDIQAKEELWKHIQKELVDPSGLSEEQLKEIPYTKIETQGDPIRIRHSHSPRSYRQYRRSQCSDGERSVLSEVNSKTDLVPPLPVTHSSDAQGSGDATVHQRRNGSKDSLMEEKPQTSTNNLAGKHTAKTIKTIQASRLKTET

SEQ ID NO: 13685 - protein, 580 aa, Homo sapiens; identical to SEQ ID NO: 13683

SEQ ID NO: 13686 - protein, 583 aa, Homo sapiens
MGCFCAVPEEFYCEVLLLDESKLTLTTQQQGIKKSTKGSVVLDHVFHHVNLVEIDYFGLRYCDRSHQTYWLDPAKTLAEHKELINTGPPYTLYFGIKFYAEDPCKLKEEITRYQFFLQVKQDVLQGRLPCPVNTAAQLGAYAIQSELGDYDPYKHTAGYVSEYRFVPDQKEELEEAIERIHKTLMGQIPSEAELNYLRTAKSLEMYGVDLHPVYGENKSEYFLGLTPVGVVVYKNKKQVGKYFWPRITKVHFKETQFELRVLGKDCNETSFFFEARSKTACKHLWKCSVEHHTFFRMPENESNSLSRKLSKFGSIRYKHRYSGRTALQMSRDLSIQLPRPDQNVTRSRSKTYPKRIAQTQPAESNTISRITANMENGENEGTIKIIAPSPVKSFKKAKNENSPDTQRSKSHAPWEENGPQSGLYNSPSDRTKSPKFPYTRRRNPSCGSDNDSVQPVRRRKAHNSGEDSDLKQRRRSRSRCNTSSGSESENSNREHRKKRNRIRQENDMVDSAPQWEAVLRRQKEKNQADPNSRRSRHRSRSRSPDIQAKEELWKHIQKELVDPSGLSEEQLKEIPYTKIEDTR

SEQ ID NO: 13687 - protein, 586 aa, Homo sapiens
MLARVTRKMLRHAKCFQRLAIFGSVRALHKDNRTATPQNFSNYESMKQDFKLGIPEYFNFAKDVLDQWTDKEKAGKKPSNPAFWWINRNGEEMRWSFEELGSLSRKFANILSEACSLQRGDRVILILPRVPEWWLANVACLRTGTVLIPGTTQLTQKDILYRLQSSKANCIITNDVLAPAVDAVASKCENLHSKLIVSENSREGWGNLKELMKHASDSHTCVKTKHNEIMAIFFTSGTSGYPKMTAHTHSSFGLGLSVNGRFWLDLTPSDVMWNTSDTGWAKSAWSSVFSPWIQGACVFTHHLPRFEPTSILQTLSKYPITVFCSAPTVYRMLVQNDITSYKFKSLKHCVSAGEPITPDVTEKWRNKTGLDIYEGYGQTETVLICGNFKGMKIKPGSMGKPSPAFDVKIVDVNGNVLPPGQEGDIGIQVLPNRPFGLFTHYVDNPSKTASTLRGNFYITGDRGYMDKDGYFWFVARADDVILSSGYRIGPFEVENALNEHPSVAESAVVSSPDPIRGEVVKAFVVLNPDYKSHDQEQLIKEIQEHVKKTTAPYKYPRKVEFIQELPKTISGKTKRNELRKKEWKTI

SEQ ID NO: 13688 - protein, 438 aa, Homo sapiens
MLARVTRKMLRHAKCFQRLAIFGSVRALHKDNRTATPQNFSNYESMKQDFKLGIPEYFNFAKDVLDQWTDKEKAGKKPSNPAFWWINRNGEEMRWSFEELGSLSRKFANILSEACSLQRGDRVILILPRVPEWWLANVACLRTGTVLIPGTTQLTQKDILYRLQSSKANCIITNDVLAPAVDAVASKCENLHSKLIVSENSREGWGNLKELMKHASDSHTCVKTKHNEIMAIFFTSGTSGYPKMTAHTHSSFGLGLSVNGRFWLDLTPSDVMWNTSDTGWAKSAWSSVFSPWIQGACVFTHHLPRFEPTSILQTLSKYPITVFCSAPTVYRMLVQNDITSYKFKSLKHCVSAGEPITPDVTEKWRNKTGLDIYEGYGQTETVLICGNFKGMKIKPGSMGKPSPAFDVKVCTSPSRRMFNNPICTLPTYRLPPYKLSLL

SEQ ID NO: 13689 - protein, 142 aa, Homo sapiens
MPSSSARSAQFPRAQDKVHYYIKLKDLRDQLRGIERNTDVQEVQYTFDLQLAQEDAKKMAVKEEKYDLGYEAAYGGAYGENPCDSEPCSFSSNGLIESLELRGESTFSGIPNEQWMTQSFTDQIPSFNNHCGTQEQEEESHA

SEQ ID NO: 13690 - protein, 415 aa, Homo sapiens
MLWSGCRRFGARLGCLPGGLRVLVQTGHRSLTSCIDPSMGLNEEQKEFQKVAFDFAAREMAPNMAEWDQKELFPVDVMRKAAQLGFGGVYIQTDVGGSGLSRLDTSVIFEALATGCTSTTAYISIHNMCAWMIDSFGNEEQRHKFCPPLCTMEKFASYCLTEPGSGSDAASLLTSAKKQGDHYILNGSKAFISGAGESDIYVVMCRTGGPGPKGISCIVVEKGTPGLSFGKKEKKVGWNSQPTRAVIFEDCAVPVANRIGSEGQGFLIAVRGLNGGRINIASCSLGAAHASVILTRDHLNVRKQFGEPLASNQYLQFTLADMATRLVAARLMVRNAAVALQEERKDAVALCSMAKLFATDECFAICNQALQMHGGYGYLKDYAVQQYVRDSRVHQILEGSNEVMRILISRSLLQE

SEQ ID NO: 13691 - protein, 515 aa, Homo sapiens
MSTIAAFYGGKSILITGATGFLGKVLMEKLFRTSPDLKVIYILVRPKAGQTLQQRVFQILDSKLFEKVKEVCPNVHEKIRAIYADLNQNDFAISKEDMQELLSCTNIIFHCAATVRFDDTLRHAVQLNVTATRQLLLMASQMPKLEAFIHISTAYSNCNLKHIDEVIYPCPVEPKKIIDSLEWLDDAIIDEITPKLIRDWPNIYTYTKALGEMVVQQESRNLNIAIIRPSIVGATWQEPFPGWVDNINGPNGIIIATGKGFLRAIKATPMAVADVIPVDTVVNLMLAVGWYTAVHRPKSTLVYHITSGNMNPCNWHKMGVQVLATFEKIPFERPFRRPNANFTSNSFTSQYWNAVSHRAPAIIYDCYLRLTGRKPRMTKLMNRLLRTVSMLEYFINRSWEWSTYNTEMLMSELSPEDQRVFNFDVRQLNWLEYIENYVLGVKKYLLKEDMAGIPKAKQRLKRLRNIHYLFNTALFLIAWRLLIARSQMARNVWFFIVSFCYKFLSYFRASSTLKV

SEQ ID NO: 13692 - protein, 515 aa, Homo sapiens; identical to SEQ ID NO: 13691

SEQ ID NO: 13693 - protein, 418 aa, Homo sapiens
MLQAGHSDVVLVDTMDELPSLADVQLAHLRLRALCLPDSSVAEDKWLSALEGTRWLDYVRACLRKASDISVLVTSRVRSVILQERGDRDLNGLLSSLVQLLSAPEARTLFGFQSLVQREWVAAGHPFLTRLGGTGASEEAPVFLLFLDCVWQLLQQFPADFEFSEFFLLALHDSVRVPDTLTFLRNTPWERGKQSGQLNSYTQVYTPGYSQPPAGNSFNLQLSVWDWDLRYSNAQILQFQNPGYDPEHCPDSWLPRPQPSFMVPGPPSSVWLFSRGALTPLNQLCPWRDSPSLLAVSSRWLPRPAISSESLADQEWGLPSHWGACPLPPGLLLPGYLGPQIRLWRRCYLRGRPEVQMGLSAPTISGLQDELSHLQELLRKWTPRISPEDHSKKRDPHTILNPTEIAGILKGRAEGDLG

SEQ ID NO: 13694 - protein, 244 aa, Homo sapiens
MPEPRSRQPSSCLASRCLPGEQILAWAPGVRKGLEPELSGTLICTNFRVTFQPCGWQWNQDTPLNSEYDFALVNIGRLEAVSGLSRVQLLRPGSLHKFIPEEILIHGRDFRLLRVGFEAGGLEPQAFQVTMAIVQARAQSNQAQQYSGITLSKAGQGSGSRKPPIPLMETAEDWETERKKQAARGWRVSTVNERFDVATRLRCFSSSLIVSGSSSSSFQLILNSLSFSFLLFMTVSGFLTPLPS

SEQ ID NO: 13695 - protein, 272 aa, Homo sapiens
MWWGGRGQSFNIAPQKEEPEMGSVQENRMPEPRSRQPSSCLASRCLPGEQILAWAPGVRKGLEPELSGTLICTNFRVTFQPCGWQWNQDTPLNSEYDFALVNIGRLEAVSGLSRVQLLRPGSLHKFIPEEILIHGRDFRLLRVGFEAGGLEPQAFQVTMAIVQARAQSNQAQQYSGITLSKAGQGSGSRKPPIPLMETAEDWETERKKQAARGWRVSTVNERFDVATRLRCFSSSLIVSGSSSSSFQLILNSLSFSFLLFMTVSGFLTPLPS

SEQ ID NO: 13696 - protein, 682 aa, Homo sapiens
MSHLRMKLLCKKIQKRNLKLRQQNLKLQGASNLTLSETQNGNVSEETMGGGKVKKSKHSMNMGLSGAPNGDMSQEAVENIKVKKSPQKSTILINGEAAMQSPNSESKKKKKKKKRKMLNDVVPDTKKAKTENKGESEEESAETPKETENNVEKPDNDEDDSEVPSLPLGLTGAFEDTSFVSLHNLVNENTLKAIKEMGFTNMTEIQHKSIRPLLEGRDFWQLQKQAVTCQVHTYGLIMGGSNRSAEAQKLANGINIIVATPGCLLDHMQNTPGFMYKNLQCLVIDEADHILDVGFEEELKQVIKLLPTCRQTMLFSATQTQKVEGLARISLKKEPLYFGVDDDKANATVNGLEQGYVVCPSKKRFLLLFTFLKKKQKKKLMAFFSSCMSVKYPYELLNYIDLPYVAIHGKQKQNKCTTTFFQFCNPDSGTLLCTDVATRGLDIPEVDWIVQYDPPDDPKEYIHSIDTYSSANSHTHHQSFEMIWVFLIGNHANISKTLKRRVNVHTAGAHVMERTKLFCMVQSTMQKRKTNKAAEETFQVDLETEETASCGGPALENSSMSLSPETLPRREEGCNIKLFRIPFKTPGELEPLSAFENSSWGWTYLSPQRSLVPGAAPGGTQREPPPSPESVLENESARELKQFFLLAFFLFSPKVDPIPPTLGSSCSSIPSPGQTLKSWMTE

SEQ ID NO: 13697 - protein, 425 aa, Homo sapiens
MADYLSNCCTGYVPEDGLIPQQLFTSADGLTYNDVPILPGFIDFIADEVDLTSVLTRKITLKTPLTLISSPMDTVTEADMAIAMALMGGIGFIHHNCTPEFQAKRPGGAEPLAHCGYVLEAKMRHGFSGIPMTETDIMGSKLVGIITSADINFLAEKDHNTLLSEVMMPRIELVVAPAGVMLKEANEILQRSKKGKLPIVNDLDELVAIIACTDLKKNRDYPLASKDSHEQLLWHIHIYAAVGTHEDGKYCLDLLTQAGDDFIILDSSQGNSSVSDRHSALHQTEVPQPPGSDGLRSAPGHCCVQGGQVCPTLWCAHHRTVEHVVKALELGASTVMMGCLLAAITEAPCKYFSDGKHQGMGSLDAMEKSSSSQKQYFSEGDKVKITQGVSCSIQYKGGLKFEKQTVLAQIEGGVHGLCSHEKRLY

SEQ ID NO: 13698 - protein, 415 aa, Homo sapiens
MADYLSNCCTGYVPEDGLIPQQLFTSADGLTYNDVPILPGFIDFIADEVDLTSVLTRKITLKTPLTLISSPMDTVTEADMAIAMALMGGIGFIHHNCTPEFQAKRPGGAEPLAHCGYVLEAKMRHGFSGIPMTETDIMGSKLVGIITSADINFLAEKDHNTLLSEVMMPRIELVVAPAGVMLKEANEILQRSKKGKLPIVNDLDELVAIIACTDLKKNRDYPLASKDSHEQLLWGTQVYQIAIVHYIKQKYPNLQVIGGNIVTAAQGKNLIDAGVDGLRVGMGCSSICITQEVMACGRPQGTAVYKVAKTVEHVVKALELGASTVMMGCLLAAITEAPCKYFSDGKHQGMGSLDAMEKSSSSQKQYFSEGDKVKITQGVSCSIQYKGGLKFEKQTVLAQIEGGVHGLCSHEKRLY

SEQ ID NO: 13699 - protein, 289 aa, Homo sapiens [sequence omitted]

SEQ ID NO: 13700 - protein, 381 aa, Homo sapiens
MGLEAARELECAALGTLLRDPREAERTLLLDCRPFLAFCRRHVRAARPVPWNALLRRRARGPPAAVLACLLPDRALRTRLVRGELARAVVLDEGSASVAELRPDSPAHVLLAALLHETRAGPTAVYFLRGGFDGFQGCCPDLCSEAPAPALPPTGDKTSRSDSRAPVYDQASPPLCSLQGGPVEILPYLFLGSCSHSSDLQGLQACGITAVLNVSASCPNHFEGLFRYKSIPVEDNQMVEISAWFQEAIGAGCWCTARRVSRALPPSVWHTSCRVAVCGWTRPLTSLSSAGGSSPPTSVSWGSCCSLRPRCCVTEVVPLCLPAPLCWQELTVDWWAPLWASTVPSPLAGLLPPQSFRSPHMGALGMPACWSFRPGALLLGD

SEQ ID NO: 13701 - protein, 313 aa, Homo sapiens
MGLEAARELECAALGTLLRDPREAERTLLLDCRPFLAFCRRHAALLHETRAGPTAVYFLRGGFDGFQGCCPDLCSEAPAPALPPTGDKTSRSDSRAPVYDQASPPLCSLQGGPVEILPYLFLGSCSHSSDLQGLQACGITAVLNVSASCPNHFEGLFRYKSIPVEDNQMVEISAWFQEAIAEAGCWCTARRVSRALPPSVWHTSCRVAVCGWTRPLTSLSSAGGSSPPTSVSWGSCCSLRPRCCVTEVVPLCLPAPLCWQELTVDWWAPLWASTVPSPLAGLLPPQSFRSPHMGALGMPACWSFRPGALLLGD

SEQ ID NO: 13702 - protein, 145 aa, Homo sapiens
MVEISAWFQEAIAEAGCWCTARRVSRALPPSVWHTSCRVAVCGWTRPLTSLSSAGGSSPPTSVSWGSCCSLRPRCCVTEVVPLCLPAPLCWQELTVDWWAPLWASTVPSPLAGLLPPQSFRSPHMGALGMPACWSFRPGALLLGD

SEQ ID NO: 13703 - protein, 314 aa, Homo sapiens
MGLEAARELECAALGTLLRDPREAERTLLLDCRPFLAFCRRHVRAARPVPWNALLRRRARGPPAAVLACLLPDRALRTRLVRGELARAVVLDEGSASVAELRPDSPAHVLLAALLHETRAGPTAVYFLRGGFDGFQGCCPDLCSEAPAPALPPTGDKTSRSDSRAPVYDQGGPVEILPYLFLGSCSHSSDLQGLQACGITAVLNVSASCPNHFEGLFRYKSIPVEDNQMVEISAWFQEAIGFIDWVKNSGGRVLVHCQAGISRSATICLAYLMQSRRVRLDEAFDFVKQRRGVISPNFSFMGQLLQFETQVLCH

SEQ ID NO: 13704 - protein, 2125 aa, Homo sapiens [sequence omitted]

SEQ ID NO: 13705 - protein, 2136 aa, Homo sapiens
MADVTARSLQYEYKANSNLVLQADRSLIDRTRRDEPTGEVLSLVGKLEGTRMGDKAQRTKPQMQEERRAKRRKRDEDRHDINKMKGYTLLSEGIDEMVGIIYKPKTKETRETYEVLLSFIQAALGDQPRDILCGAADEVLAVLKNEKLRDKERRKEIDLLLGQTDDTRYHVLVNLGKKITDYGGDKEIQNMDDNIDETYGVNVQFESDEEEGDEDVYGEVREEASDDDMEGDEAVVRCTLSANLVASGELMSSKKKDLHPRDIDAFWLQRQLSRFYDDAIVSQKKADEVLEILKTASDDRECENQLVLLLGFNTFDFIKVLRQHRMMILYCTLLASAQSEAEKERIMGKMEADPELSKFLYQLHETEKEDLIREERSRRERVRQSRMDTDLETMDLDQGGEALAPRQVLDLEDLVFTQGSHFMANKRCQLPDGSFRRQRKGYEEVHVPALKPKPFGSEEQLLPVEKLPKYAQAGFEGFKTLNRIQSKLYRAALETDENLLLCAPTGAGKTNVALMCMLREIGKHINMDGTINVDDFKIIYIAPMRSLVQEMVGSFGKRLATYGITVAELTGDHQLCKEEISATQIIVCTPEKWDIITRKGGERTYTQLVRLIILDEIHLLHDDRGPVLEALVARAIRNIEMTQEDVRLIGLSATLPNYEDVATFLRVDPAKGLFYFDNSFRPVPLEQTYVGITEKKAIKRFQIMNEIVYEKIMEHAGKNQVLVFVHSRKETGKTARAIRDMCLEKDTLGLFLREGSASTEVLRTEAEQCKNLELKDLLPYGFAIHHAGMTRVDRTLVEDLFADKHIQVLVSTATLAWGVNLPAHTVIIKGTQVYSPEKGRWTELGALDILQMLGRAGRPQYDTKGEGILITSHGELQYYLSLLNQQLPIESQMVSKLPDMLNAEIVLGNVQNAKDAVNWLGYAYLYIRMLRSPTLYGISHDDLKGDPLLDQRRLDLVHTAALMLDKNNLVKYDKKTGNFQVTELGRIASHYYITNDTVQTYNQLLKPTLSEIELFRVFSLSSEFKNITVREEEKLELQKLLERVPIPVKESIEEPSAKINVLLQAFISQLKLEGFALMADMVYVTQSAGRLMRAIFEIVLNRGWAQLTDKTLNLCKMIDKRMWQSMCPLRQFRKLPEEVVKKIEKKNFPFERLYDLNHNEIGELIRMPKMGKTIHKYVHLFPKLELSVHLQPITRSTLKVELTITPDFQWDEKVHGSSEAFWILVEDVDSEVILHHEYFLLKAKYAQDEHLITFFVPVFEPLPPQYFIRVVSDRWLSCETQLPVSFRHLILPEKYPPPTELLDLQPLPVSALRNSAFESLYQDKFPFFNPIQTQVFNTVYNSDDNVFVGAPTGSGKTICAEFAILRMLLQSSEGRCVYITPMEALAEQVYMDWYEKFQDRLNKKVVLLTGETSTDLKLLGKGNIIISTPEKWDILSRRWKQRKNVQNINLFVVDEVHLIGGENGPVLEVICSRMRYISSQIERPIRIVALSSSLSNAKDVAHWLGCSATSTFNFHPNVRPVPLELHIQGFNISHTQTRLLSMAKPVYHAITKHSPKKPVIVFVPSRKQTRLTAIDILTTCAADIQRQRFLHCTEKDLIPYLEKLSDSTLKETLLNGVGYLHEGLSPMERRLVEQLFSSGAIQVVVASRSLCWGMNVAAHLVIIMDTQYYNGKIHAYVDYPIYDVLQMVGHANRPLQDDEGRCVIMCQGSKKDFFKKFLYEPLPVESHLDHCMHDHFNAEIVTKTIENKQDAVDYLTWTFLYRRMTQNPNYYNLQGISHRHLSDHLSELVEQTLSDLEQSKCISIEDEMDVAPLNLGMIAAYYYINYTTIELFSMSLNAKTKVRGLIEIISNAAEYENIPIRHHEDNLLRQLAQKVPHKLNNPKFNDPHVKTNLLLQAHLSRMQLSAELQSDTEEILSKAIRLIQACVDVLSSNGWLSPALAAMELAQMVTQAMWSKDSYLKQLPHFTSEHIKRCTDKGVESVFDIMEMEDEERNALLQLTDSQIADVARFCNRYPNIELSYEVVDKDSIRSGGPVVVLVQLEREEEVTGPVIAPLFPQKREEGWWVVIGDAKSNSLISIKRLTLQQKAKVKLDFVAPATGAHNYTLYFMSDAYMGCDQEYKFSVDVKEAETDSDSD

SEQ ID NO: 13706 - protein, 736 aa, Homo sapiens
MGSPLRFDGRVVLVTGAGAGLGRAYALAFAERGALVVVNDLGGDFKGVGKGSLAADKVVEEIRRRGGKAVANYDSVEEGEKVVKTALDAFGRIDVVVNNAGILRDRSFARISDEDWDIIHRVHLRGSFQVTRAAWEHMKKQKYGRIIMTSSASGIYGNFGQANYSAAKLGLLGLANSLAIEGRKSNIHCNTIAPNAGSRMTQTVMPEDLVEALKPEYVAPLVLWLCHESCEENGGLFEVGAGWIGKLRWERTLGAIVRQKNHPMTPEAVKANWKKICDFENASKPQSIQESTGSIIEVLSKIDSEGGVSANHTSRATSTATSGFAGAIGQKLPPFSYAYTELEAIMYALGVGASIKDPKDLKFIYEGSSDFSCLPTFGVIIGQKSMMGGGLAEIPGLSINFAKVLHGEQYLELYKPLPRAGKLKCEAVVADVLDKGSGVVIIMDVYSYSEKELICHNQFSLFLVGSGGFGGKRTSDKVKVAVAIPNRPPDAVLTDTTSLNQAALYRLSGDWNPLHIDPNFASLAGFDKPILHGLCTFGFSARRVLQQFADNDVSRFKAIKARFAKPVYPGQTLQTEMWKEGNRIHFQTKVQETGDIVISNAYVDLAPTSGTSAKTPSEGGKLQSTFVFEEIGRRLKDIGPEVVKKVNAVFEWHITKGGNIGAKWTIDLKSGSGKVYQGPAKGAADTTIILSDEDFMEVVLGKLDPQKAFFSGRLKARGNIMLSQKLQMILKDYAKL

SEQ ID NO: 13707 - protein, 212 aa, Homo sapiens
MGPGPRLLLPLVLCVGLGALVFSSGAEGFRKRGPSVTAKVFFDVRIGDKDVGRIVIGLFGKVVPKTVENFVALATGEKGYGYKGSKFHRVIKDFMIQGGDITTGDGTGGVSIYGETFPDENFKLKHYGIGWVSMANAGPDTNGSQFFITLTKPTWLDGKHVVFGKVIDGMTVVHSIELQATDGHDRPLTNCSIINSGKIDVKTPFVVEIADW

SEQ ID NO: 13708 - protein, 212 aa, Homo sapiens; identical to SEQ ID NO: 13707

SEQ ID NO: 13709 - protein, 156 aa, Homo sapiens
MQRTHRFGGFGGPKLPKPLLLPTCKVLLAVRACEDFLPGAWWAFKALLKLQPPFVRGGNIMSCYRYPGSISRIQISLFENDRFSSLVLKDKPASGASAGHQELHSDKLSRVKEEELDLPGIDGHGDIGVVHMADCNGGSNKDTRRKDTRAANMQNE

SEQ ID NO: 13710 - protein, 417 aa, Homo sapiens
MRFAWTVLLLGPLQLCALVHCAPPAAGQQQPPREPPAAPGAWRQQIQWENNGQVFSLLSLGSQYQPQRRRDPGAAVPGAANASAQQPRTPILLIRDNRTAAARTRTAGSSGVTAGRPRPTARHWFQAGYSTSRAREAGASRAENQTAPGEVPALSNLRPPSRVDGMVGDDPYNPYKYSDDNPYYNYYDTYERPRPGGRYRPGYGTGYFQYGLPDLVADPYYIQASTYVQKMSMYNLRCAAEENCLASTAYRADVRDYDHRVLLRFPQRVKNQGTSDFLPSRPRYSWEWHSCHQHYHSMDEFSHYDLLDANTQRRVAEGHKASFCLEDTSCDYGYHRRFACTAHTQGLSPGCYDTYGADIDCQWIDITDVKPGNYILKVSVNPSYLVPESDYTNNVVRCDIRYTGHHAYASGCTISPY

SEQ ID NO: 13711 - protein, 155 aa, Homo sapiens [sequence omitted]

SEQ ID NO: 13712 - protein, 534 aa, Homo sapiens
MTQAEIKLCSLLLQEHFGEIVEKIGVHLIRTGSQPLRVIAHDTGTSLDQVKKALCVLVQHNLVSYQVHKRGVVEYEAQCSRVLRMLRYPRYIYTTKTLYSDTGELIVEELLLNGKLTMSAVVKKVADRLTETMEDGKTMDYAEVSNTFVRLADTHFVQRCPSVPTTENSDPGPPPPAPTLVINEKDMYLVPKLSLIGKGKRRRSSDEDAAGEPKAKRPKYTTDNKEPIPDDGIYWQANLDRFHQHFRDQAIVSAVANRMDQTSSEIVRTMLRMSEITTSSSAPFTQPLSSNEIFRSLPVGYNISKQVLDQYLTLLADDPLEFVGKSGDSGGGMYVINLHKALASLATATLESVVQERFGSRCARIFRLVLQKKHIEQKQVEDFAMIPAKEAKDMLYKMLSENFMSLQEIPKTPDHAPSRTFYLYTVNILSAARMLLHRCYKSIANLIERRQFETKENKRLLEKSQRVEAIIASMQATGAEEAQLQEIEEMITAPERQQLETLKRNVNKLDASEIQVDETIFLLESYIECTMKRQ

SEQ ID NO: 13713 - protein, 534 aa, Homo sapiens; identical to SEQ ID NO: 13712

SEQ ID NO: 13714 - protein, 534 aa, Homo sapiens; identical to SEQ ID NO: 13712

SEQ ID NO: 13715 - protein, 319 aa, Homo sapiens
MTQAEIKLCSLLLQEHFGEIVEKIGVHLIRTGSQPLRVIAHDTGTSLDQVKKALCVLVQHNLVSYQVHKRGVVEYEAQCSRVLRMLRYPRYIYTTKTLYSDTGELIVEELLLNGKLTMSAVVKKVADRLTETMEDGKTMDYAEVSNTFVRLADTHFVQRCPSVPTTENSDPGPPPPAPTLVINEKDMYLVPKLSLIGKGKRRRSSDEDAAGEPKAKRPKYTTDNKEPIPDDGIYWQANLDRFHQHFRDQAIVSAVANRMDQTSSEIVRTMLRMSEITTSSSAPFTQPLSSNEIFRSLPVGYNISKQVLDQYLTLLADDP

SEQ ID NO: 13716 - protein, 160 aa, Homo sapiens
MLVVLNSVLMEQQDCALPLLTDVIQTNKEVAFKDLDVAILLGSVPREERFTENVKIIKWQGAALEKYDKKFVKVIVMGNPANINCLTASKLVPSIFNENFSCLTCLDHNQTQVQITLKLGVTADNNKTWKFVEALSINDSSCKKMDLTAKELAGKKKKLL

SEQ ID NO: 13717 - protein, 344 aa, Homo sapiens
MPRIDADLKLDFKDVLLRPKRSSLKSRAEVDLERTFTFRNSKQTYSGIPIIVANMDTVGTFEMAAVMSQHSMFTAIHKHYSLDDWKLFATNHPECLQNVAVSSGSGQNDLEKMTSILEAVPQVKFICLDVANGYSEHFVEFVKLVRAKFPEHTIMAGNVVTGEMVEELILSGADIIKVGVGPGSVCTTRTKTGVGYPQLSAVIECADSAHGLKGHIISDGGCTCPGDVAKAFAGADFVMLGGMFSGHTECAGEVFERNGRKLKLFYGMSSDTAMNKHAGGVAEYRASEGKTVEVPYKGDVENTILDILGGLRSTCTYVGAAKLKELSRRATFIRVTQQHNTVFS

SEQ ID NO: 13718 - protein, 345 aa, Homo sapiens
MPRIDADLKLDFKDVLLRPKRSSLKSRAEVDLERTFTFRNSKQTYSGIPIIVANMDTVGTFEMAAVMSQHSMFTAIHKHYSLDDWKLFATNHPECLQNVAVSSGSGQNDLEKMTSILEAVPQVKFICLDVANGYSEHFVEFVKLVRAKFPEHTIMAGNVVTGEMVEELILSGADIIKVGVGPGSVCTTRTKTGVGYPQLSAVIECADSAHGLKGHIISDGGCTCPGDVAKAFGAGADFVMLGGMFSGHTECAGEVFERNGRKLKLFYGMSSDTAMNKHAGGVAEYRASEGKTVEVPYKGDVENTILDILGGLRSTCTYVGAAKLKELSRRATFIRVTQQHNTVFS

SEQ ID NO: 13719 - protein, 538 aa, Homo sapiens
MPLRKMKIPFLLLFFLWEAESHAASRPNIILVMADDLGIGDPGCYGNKTIRTPNIDRLASGGVKLTQHLAASPLCTPSRAAFMTGRYPVRSGMASWSRTGVFLFTASSGGLPTDEITFAKLLKDQGYSTALIGKWHLGMSCHSKTDFCHHPLHHGFNYFYGISLTNLRDCKPGEGSVFTTGFKRLVFLPLQIVGVTLLTLAALNCLGLLHVPLGVFFSLLFLAALILTLFLGFLHYFRPLNCFMMRNYEIIQQPMSYDNLTQRLTVEAAQFIQRGQILNLLDELRLANDTLIYFTSDQGAHVEEVSSKGEIHGGSNGIYKGGKANNWEGGIRVPGILRWPRVIQAGQKIDEPTSNMDIFPTVAKLAGAPLPEDRIIDGRDLMPLLEGKSQRSDHEFLFHYCNAYLNAVRWHPQNSTSIWKAFFFTPNFNPVGSNGCFATHVCFCFGSYVTHHDPPLLFDISKDPRERNPLTPASEPRFYEILKVMQEAADRHTQTLPEVPDQFSWNNFLWKPWLQLCCPSTGLSCQCDREKQDKRLSR

SEQ ID NO: 13720 - protein, 570 aa, Homo sapiens
MSYQGKKNIPRITSDRLLIKGGRIVNDDQSFYADIYMEDGLIKQIGDNLIVPGGVKTIEANGKMVIPGGIDVHTHFQMPYKGMTTVDDFFQGTKAALAGGTTMIIDHVVPEPESSLTEAYEKWREWADGKSCCDYALHVDITHWNDSVKQEVQNLIKDKGVNSFMVYMAYKDLYQVSNTELYEIFTCLGELGAIAQVHAENGDIIAQEQTRMLEMGITGPEGHVLSRPEELEAEAVFRAITIASQTNCPLYVTKVMSKSAADLISQARKKGNVVFGEPITASLGIDGTHYWSKNWAKAAAFVTSPPLSPDPTTPDYINSLLASGDLQLSGSAHCTFSTAQKAIGKDNFTAIPEGTNGVEERMSVIWDKAVATGKMDENQFVAVTSTNAAKIFNLYPRKGRISVGSDSDLVIWDPDAVKIVSAKNHQSAAEYNIFEGMELRGAPLVVICQGKIMLEDGNLHVTQGAGRFIPCSPFSDYVYKRIKARRKMADLHAVPRGMYDGPVFDLTTTPKGGTPAGSARGSPTRPNPPVRNLHQSGFSLSGTQVDEGVRSASKRIVAPPGGRSNITSLS

SEQ ID NO: 13721 - protein, 570 aa, Homo sapiens; identical to SEQ ID NO: 13720

SEQ ID NO: 13722 - protein, 570 aa, Homo sapiens; identical to SEQ ID NO: 13720

SEQ ID NO: 13723 - protein, 570 aa, Homo sapiens; identical to SEQ ID NO: 13720

SEQ ID NO: 13724 - protein, 535 aa, Homo sapiens
MATCIWLRSCGARRLGSTFPGCRLRPRAGGLVPASGPAPGPAQLRCYAGRLAGLSAALLRTDSFVGGRWLPAAATFPVQDPASGAALGMVADCGVREARAAVRAAYEAFCRWREVSAKERSSLLRKWYNLMIQNKDDLARIITAESGKPLKEAHGEILYSAFFLEWFSEEARRVYGDIIHTPAKDRRALVLKQPIGVAAVITPWNFPSAMITRKVGAALAAGCTVVVKPAEDTPFSALALAELASQAGIPSGVYNVIPCSRKNAKEVGEAICTDPLVSKISFTGSTTTGKILLHHAANSVKRVSMELGGLAPFIVFDSANVDQAVAGAMASKFRNTGQTCVCSNQFLVQRGIHDAFVKAFAEAMKKNLRVGNGFEEGTTQGPLINEKAVEKVEKQVNDAVSKGATVVTGGKRHQLGKNFFEPTLLCNVTQDMLCTHEETFGPLAPVIKFDTEEEAIAIANAADVGLAGYFYSQDPAQIWRVAEQLEVGMVGVNEGLISSVECPFGGVKQSGLGREGSKYGIDEYLELKYVCYGGL

SEQ ID NO: 13725 - protein, 535 aa, Homo sapiens; identical to SEQ ID NO: 13724

SEQ ID NO: 13726 - protein, 174 aa, Homo sapiens
MPEFYNRFKGRNDLMEYAKQHGIPIPVTPKNPWNMDENLMHISYEAGILENPKNQVPPDRVKKGVPVKVTNVNDGSTHPTSLEFFMYLNEVADKHGVGCTDIVENRFTGMKSRGIYETPAGTILYHTHLDIKAFTMDWEVCKIKQGLGLKFAELVYTAFWHSPECEFVRHCIAK

SEQ ID NO: 13727 - protein, 136 aa, Homo sapiens
MSSKGSMRVLAYGGGLDTSCILVWVKEQGYDVIAYLANTGQKEDFEEARKKALKLGAKKVFIEDVIREFVEEFIWPAIQSSTLYEDRYLLGTFLARPCIASKQVEIAQQEGVSRGATGKGNIRSGLSSPGTRWSPR

SEQ ID NO: 13728 - protein, 840 aa, Homo sapiens [sequence omitted]

SEQ ID NO: 13729 - protein, 176 aa, Homo sapiens [sequence omitted]

SEQ ID NO: 13730 - protein, 840 aa, Homo sapiens [sequence omitted]

SEQ ID NO: 13731 - protein, 903 aa, Homo sapiens
MQVAMARATTATGNRLWPGLLIMLGSLCHRGSPCGLSTHIEIGHRALEFLQLHNGRVNYRELLLEHQDAYQAGIVFPDCFYPSICKGGKFHDVSESTHWTPFLNASVHYIRENYPLPWEKDTEKLVAFLFGITSHMAADVSWHSLGLEQGFLRTMGAIDFHGSYSEAHSAGDFGGDVLSQFEFNFNYLARRWYVPVKDLLGIYEKLYGRKVITENVIVDCSHIQFLEMYGEMLAVSKLYPTYSTKSPFLVEQFQEYFLGGLDDMAFWSTNIYHLTSFMLENGTSDCNLPENPLFIACGGQQNHTQGSKMQKNDFHRNLTTSLTESVDRNINYTERGVFFSVNSWTPDSMSFIYKALERNIRTMFIGGSQLSQKHVSSPLASYFLSFPYARLGWAMTSADLNQDGHGDLVVGAPGYSRPGHIHIGRVYLIYGNDLGLPPVDLDLDKEAHRILEGFQPSGRFGSALAVLDFNVDGVPDLAVGAPSVGSEQLTYKGAVYVYFGSKQGGMSSSPNITISCQDIYCNLGWTLLAADVNGDSEPDLVIGSPFAPGGGKQKGIVAAFYSGPSLSDKEKLNVEAANWTVRGEEDFSWFGYSLHGVTVDNRTLLLVGSPTWKNASRLGHLLHIRDEKKSLGRVYGYFPPNGQSWFTISGDKAMGKLGTSLSSGHVLMNGTLKQVLLVGAPTYDDVSKVAFLTVTLHQGGATRMYALISDAQPLLLSTFSGDRRFSRFGGVLHLSDLDDDGLDEIIMAAPLRIADVTSGLIGGEDGRVYVYNGKETTLGDMTGKCKSWITPCPEEKAQYVLISPEASSRFGSSLITVRSKAKNQVVIAAGRSSLGARLSGALHVYSLGSDFPLMASHDHTQEWGNLTCTSSVFFQISDGSNIFIPITKPPEKWTPKLPHMTSH

SEQ ID NO: 13732 - protein, 520 aa, Homo sapiens
MAALKLLSSGLRLCASARGSGATWYKGCVCSFSTSAHRHTKFYTDPVEAVKDIPDGATVLVGGFGLCGIPENLIDALLKTGVKGLTAVSNNAGVDNFGLGLLLRSKQIKRMVSSYVGENAEFERQYLSGELEVELTPQGTLAERIRAGGAGVPAFYTPTGYGTLVQEGGSPIKYNKDGSVAIASKPREVREFNGQHFILEEAITGDFALVKAWKADRAGNVIFRKSARNFNLPMCKAAETTVVEVEEIVDIGAFAPEDIHIPQIYVHRLIKGEKYEKRIERLSIRKEGDGEAKSAKPGDDVRERIIKRAALEFEDGMYANLGIGIPLLASNFISPNITVHLQSENGVLGLGPYPRQHEADADLINAGKETVTILPGASFFSSDESFAMIRGGHVDLTMLGAMQVSKYGDLANWMIPGKMVKGMGGAMDLVSSAKTKVVVTMEHSAKGNAHKIMEKCTLPLTGKQCVNRIITEKAVFDVDKKKGLTLIELWEGLTVDDVQKSTGCDFAVSPKLMPMQQIAN

SEQ ID NO: 13733 - protein, 520 aa, Homo sapiens; identical to SEQ ID NO: 13732

SEQ ID NO: 13734 - protein, 145 aa, Homo sapiens
MELALLCGLVVMAGVIPIQGGILNLNKMVKQVTGKMPILSYWPYGCHCGLGGRGQPKDATDWCCQTHDCCYDHLKTQGCSIYKDYYRYNFSQGNIHCSDKGSWCEQQLCACDKEVAFCLKRNLDTYQKRLRFYWRPHCRGQTPGC

SEQ ID NO: 13735 - protein, 332 aa, Homo sapiens
MCPAGWKLLAMLALVLVVMVWYSISREDRYIELFYFPIPEKKEPCLQGEAESKASKLFGNYSRDQPIFLRLEDYFWVKTPSAYELPYGTKGSEDLLLRVLAITSSSIPKNIQSLRCRRCVVVGNGHRLRNSSLGDAINKYDVVIRLNNAPVAGYEGDVGSKTTMRLFYPESAHFDPKVENNPDTLLVLVAFKAMDFHWIETILSDKKRVRKGFWKQPPLIWDVNPKQIRILNPFFMEIAADKLLSLPMQQPRKIKQKPTTGLLAITLALHLCDLVHIAGFGYPDAYNKKQTIHYYEQITLKSMAGSGHNVSQEALAIKRMLEMGAIKNLTSF

SEQ ID NO: 13736 - protein, 169 aa, Homo sapiens
MRLFYPESAHFDPKVENNPDTLLVLVAFKAMDFHWIETILSDKKRVRKGFWKQPPLIWDVNPKQIRILNPFFMEIAADKLLSLPMQQPRKIKQKPTTGLLAITLALHLCDLVHIAGFGYPDAYNKKQTIHYYEQITLKSMAGSGHNVSQEALAIKRMLEMGAIKNLTSF

SEQ ID NO: 13737 - protein, 329 aa, Homo sapiens
MVSKSRWKLLAMLALVLVVMVWYSISREDSFYFPIPEKKEPCLQGEAESKASKLFGNYSRDQPIFLRLEDYFWVKTPSAYELPYGTKGSEDLLLRVLAITSSSIPKNIQSLRCRRCVVVGNGHRLRNSSLGDAINKYDVVIRLNNAPVAGYEGDVGSKTTMRLFYPESAHFDPKVENNPDTLLVLVAFKAMDFHWIETILSDKKRVRKGFWKQPPLIWDVNPKQIRILNPFFMEIAADKLLSLPMQQPRKIKQKPTTGLLAITLALHLCDLVHIAGFGYPDAYNKKQTIHYYEQITLKSMAGSGHNVSQEALAIKRMLEMGAIKNLTSF

SEQ ID NO: 13738 - protein, 329 aa, Homo sapiens; identical to SEQ ID NO: 13737

SEQ ID NO: 13739 - protein, 329 aa, Homo sapiens; identical to SEQ ID NO: 13737

SEQ ID NO: 13740 - protein, 375 aa, Homo sapiens
MVSKSRWKLLAMLALVLVVMVWYSISREDRYIELFYFPIPEKKEPCLQGEAESKASKLFGNYSRDQPIFLRLEDYFWVKTPSAYELPYGTKGSEDLLLRVLAITSSSIPKNIQRLNNAPVAGYEGDVGSKTTMRLFYPESAHFDPKVENNPDTLLVLVAFKAMDFHWIETILSDKKRVRKGFWKQPPLIWDVNPKQIRILNPFFMEIAADKLLSLPMQQPRKIKQDAEFGQSRSCQSSAEWQLNPGRALPVLRKACNCVFTMLFQDSQGRYNFPQQERGTSEVCTAWLATQVLAKVTVGLLARPPPAVPGALTMRSGGGVLRMKHLIWPFSPWRACWVWVLEMMGGPVEKQRPIRHPGRARPCWRPLGWVQKCIH

SEQ ID NO: 13741 - protein, 334 aa, Homo sapiens
MPKRRDILAIVLIVLPWTLLITVWHQSTLAPLLAVHKDEGSDPRRETPPGADPREYCTSDRDIVEVVRTEYVYTRPPPWSDTLPTIHVVTPTYSRPVQKAELTRMANTLLHVPNLHWLVVEDAPRRTPLTARLLRDTGLNYTHLHVETPRNYKLRGDARDPRIPRGTMQRNLALRWLRETFPRNSSQPGVVYFADDDNTYSLELFEEMRSTRRVSVWPVAFVGGLRYEAPRVNGAGKVVGWKTVFDPHRPFAIDMAGFAVNLRLILQRSQAYFKLRGVKGGYQESSLLRELVTLNDLEPKAANCTKILVWHTRTEKPVLVNEGKKGFTDPSVEI

SEQ ID NO: 13742 - protein, 334 aa, Homo sapiens; identical to SEQ ID NO: 13741

SEQ ID NO: 13743 - protein, 334 aa, Homo sapiens; identical to SEQ ID NO: 13741

SEQ ID NO: 13744 - protein, 334 aa, Homo sapiens; identical to SEQ ID NO: 13741

SEQ ID NO: 13745 - protein, 334 aa, Homo sapiens; identical to SEQ ID NO: 13741

SEQ ID NO: 13746 - protein, 334 aa, Homo sapiens; identical to SEQ ID NO: 13741

SEQ ID NO: 13747 - protein, 438 aa, Homo sapiens
MNTPNGNSLSAAELTCGMIMCLARQIPQATASMKDGKWERKKFMGTELNGKTLGILGLGRIGREVATRMQSFGMKTIGYDPIISPEVSASFGVQQLPLEEIWPLCDFITVHTPLLPSTTGLLNDNTFAQCKKGVRVVNCARGGIVDEGALLRALQSGQCAGAALDVFTEEPPRDRALVDHENVISCPHLGASTKEAQSRCGEEIAVQFVDMVKGKSLTGVVNAQALTSAFSPHTKPWIGLAEALGTLMRAWAGSPKGTIQVITQGTSLKNAGNCLSPAVIVGLLKEASKQADVNLVNAKLLVKEAGLNVTTSHSPAAPGEQGFGECLLAVALAGAPYQAVGLVQGTTPVLQGLNGAVFRPEVPLRRDLPLLLFRTQTSDPAMLPTMIGLLAEAGVRLLSYQTSLVSDGETWHVMGISSLLPSLEAWKQHVTEAFQFHF

SEQ ID NO: 13748 - protein, 533 aa, Homo sapiens
MAFANLRKVLISDSLDPCCRKILQDGGLQVVEKQNLSKEELIAELQDCEGLIVRSATKVTADVINAAEKLQVVGRAGTGVDNVDLEAATRKGILVMNTPNGNSLSAAELTCGMIMCLARQIPQATASMKDGKWERKKFMGTELNGKTLGILGLGRIGREVATRMQSFGMKTIGYDPIISPEVSASFGVQQLPLEEIWPLCDFITVHTPLLPSTTGLLNDNTFAQCKKGVRVVNCARGGIVDEGALLRALQSGQCAGAALDVFTEEPPRDRALVDHENVISCPHLGASTKEAQSRCGEEIAVQFVDMVKGKSLTGVVNAQALTSAFSPHTKPWIGLAEALGTLMRAWAGSPKGTIQVITQGTSLKNAGNCLSPAVIVGLLKEASKQADVNLVNAKLLVKEAGLNVTTSHSPAAPGEQGFGECLLAVALAGAPYQAVGLVQGTTPVLQGLNGAVFRPEVPLRRDLPLLLFRTQTSDPAMLPTMIGLLAEAGVRLLSYQTSLVSDGETWHVMGISSLLPSLEAWKQHVTEAFQFHF

SEQ ID NO: 13749 - protein, 196 aa, Homo sapiens
MSVIIHTTSIIDIIGVTHRESIMNINVKRTQLLLEACVQATVPVFIYTSTPEVAGPNSYKEIIQNSHEEEPLENTWYAPYPHSKKLAEKAVLAANGWTLKNGGTLYTCALRPMFIYGEGSPILSAGINEALNNHGILSSFSKFSRVNPVYIGNMAWAHILALRPCGSPRRPQVSEDSSTTSQMTCLTKAMITLITS

SEQ ID NO: 13750 - protein, 459 aa, Homo sapiens
MAPLCPSPWLPLLIPAPAPGLTVQLLLSLLLLVPVHPQRLPRMQEDSPLGGGSSGEDDPLGEEDLPSEEDSPREEDPPGEEDLPGEEDLPGEEDLPEVKPKSEEEGSLKLEDLPTVEAPGDPQEPQNNAHRDKEGDDQSHWRYGGDPPWPRVSPACAGRFQSPVDIRPQLAAFCPALRPLELLGFQLPPLPELRLRNNGHSVQLTLPPGLEMALGPGREYRALQLHLHWGAAGRPGSEHTVEGHRFPAEIHVVHLSTAFARVDEALGRPGGLAVLAAFLEEGPEENSAYEQLLSRLEEIAEEGSETQVPGLDISALLPSDFSRYFQYEGSLTTPPCAQGVIWTVFNQTVMLSAKQLHTLSDTLWGPGDSRLQLNFRATQPLNGRVIEASFPAGVDSSPRAAEPVQLNSCLAAGDILALVFGLLFAVTSVAFLVQMRRQHRRGTKGGVSYRPAEVAETGA

SEQ ID NO: 13751 - protein, 229 aa, Homo sapiens [sequence omitted]

SEQ ID NO: 13752 - protein, 303 aa, Homo sapiens [sequence omitted]

SEQ ID NO: 13753 - protein, 303 aa, Homo sapiens [sequence omitted]

SEQ ID NO: 13754 - protein, 303 aa, Homo sapiens [sequence omitted]

SEQ ID NO: 13755 - protein, 239 aa, Homo sapiens [sequence omitted]

SEQ ID NO: 13756 - protein, 239 aa, Homo sapiens [sequence omitted]

SEQ ID NO: 13757 - protein, 343 aa, Homo sapiens
MAEKVLVTGGAGYIGSHTVLELLEAGYLPVVIDNFHNAFRGGGSLPESLRRVQELTGRSVEFEEMDILDQGALQRLFKKYSFMAVIHFAGLKAVGESVQKPLDYYRVNLTGTIQLLEIMKAHGVKNLVFSSSATVYGNPQYLPLDEAHPTGGCTNPYGKSKFFIEEMIRDLCQADKTWNAVLLRYFNPTGAHASGCIGEDPQGIPNNLMPYVSQVAIGRREALNVFGNDYDTEDGTGVRDYIHVVDLAKGHIAALRKLKEQCGCRIYNLGTGTGYSAKLQLPPVLQIPYKVVARREGDVAACYANPSLAQEELGWTAALGLDRMCEDLWRWQKQNPSGFGTQA

SEQ ID NO: 13758 - protein, 303 aa, Homo sapiens [sequence omitted]

SEQ ID NO: 13759 - protein, 303 aa, Homo sapiens [sequence omitted]

SEQ ID NO: 13760 - protein, 303 aa, Homo sapiens [sequence omitted]

SEQ ID NO: 13761 - protein, 303 aa, Homo sapiens [sequence omitted]

SEQ ID NO: 13762 - protein, 303 aa, Homo sapiens [sequence omitted]

SEQ ID NO: 13763 - protein, 170 aa, Homo sapiens
MGTLPKRVKIVEVGPRDGLQNEKNIVSTPVKIKLIDMLSEAGLSVIETTSFVSPKWVPQMGDHTEVLKGIQKFPGINYPVLTPNLKGFEAAVAAGAKEVVIFGAASELSTLPWPWGPCSLTSQDTGHGGSSQAGRGHLWKVESYVVAICQLQHLWKISTLNVIFENSLCN

SEQ ID NO: 13764 - protein, 325 aa, Homo sapiens
MAAMRKALPRRLVGLASLRAVSTSSMGTLPKRVKIVEVGPRDGLQNEKNIVSTPVKIKLIDMLSEAGLSVIETTSFVSPKWVPQMGDHTEVLKGIQKFPGINYPVLTPNLKGFEAAVAAGAKEVVIFGAASELFTKKNINCSIEESFQRFDAILKAAQSANISVRGYVSCALGCPYEGKISPAKVAEVTKKFYSMGCYEISLGDTIGVGTPGIMKDMLSAVMQEVPLAALAVHCHDTYGQALANTLMALQMGVSVVDSSVAGLGGCPYAQGASGNLATEDLVYMLEGLGIHTGVNLQKLLEAGNFICQALNRKTSSKVAQATCKL

SEQ ID NO: 13765 - protein, 206 aa, Homo sapiens
MAAMRKALPRRLVGLASLRAVSTSSMGTLPKRVKIVEVGPRDGLQNEKNIVSTPVKIKLIDMLSEAGLSVIETTSFVSPKWVPQMGDHTEVLKGIQKFPGINYPVLTPNLKGFEAAVAAGAKEVVIFGAASELFTKKNINCSIEESFQRFDAILKAAQSANISVRGYVSCALGCPYEGKISPAKVAEVCACVRAGGLVRVGHLVCP

SEQ ID NO: 13766 - protein, 199 aa, Homo sapiens
MPNYKLTYFNMRGRAEIIRYIFAYLDIQYEDHRIEQADWPEIKSTLPFGKIPILEVDGLTLHQSLAIARYLTKNTDLAGNTEMEQCHVDAIVDTLDDFMSCFPWAEKKQDVKEQMFNELLTYNAPHLMQDLDTYLGGREWLIGNSVTWADFYWEICSTTLLVFKPDLLDNHPRLVTLRKKVQAIPAVANWIKRRPQTKL

SEQ ID NO: 13767 - protein, 199 aa, Homo sapiens; identical to SEQ ID NO: 13766

SEQ ID NO: 13768 - protein, 97 aa, Homo sapiens
MAQKRPACTLKPECVQQLLVCSQEAKKSAYCPYSHFPVGAALLTQEGRIFKGCNIENACYPLGICAERTAIQKAVSEGYKDFRAIAIASLAPTGPCT

SEQ ID NO: 13769 - protein, 146 aa, Homo sapiens [sequence omitted]

SEQ ID NO: 13770 - protein, 166 aa, Homo sapiens [sequence omitted]

SEQ ID NO: 13771 - protein, 126 aa, Homo sapiens
MMPAERRLPLSFVLDVLEGRAQHPGVLYVQKQCSNLPSELPQLLPDLESHVPWASEALGKMPDAVNFWLGEAAAVTSCRCKGNTKCTRTTMRTSTAWSQERSISCSIRPATGPSSPMSCTRRQPTS

SEQ ID NO: 13772 - protein, 543 aa, Homo sapiens
MRVELKKEAGLRELAVRLGFGPCAEEQAFLSRRKQVVAAALRQALQLDGDLQEDEIPVVAIMATGGGIRAMTSLYGQLAGLKELGLLDCVSYITGASGSTWALANLYEDPEWSQKDLAGPTELLKTQVTKNKLGVLAPSQLQRYRQELAERARLGYPSCFTNLWALINEALLHDEPHDHKLSDQREALSHGQNPLPIYCALNTKGQSLTTFEFGEWCEFSPYEVGFPKYGAFIPSELFGSEFFMGQLMKRLPESRICFLEGIWSNLYAANLQDSLYWASEPSQFWDRWVRNQANLDKEQVPLLKIEEPPSTAGRIAEFFTDLLTWRPLAQATHNFLRGLHFHKDYFQHPHFSTWKATTLDGLPNQLTPSEPHLCLLDVGYLINTSCLPLLQPTRDVDLILSLDYNLHGAFQQLQLLGRFCQEQGIPFPPISPSPEEQLQPRECHTFSDPTCPGAPAVLHFPLVSDSFREYSAPGVRRTPEEAAAGEVNLSSSDSPYHYTKVTYSQEDVDKLLHLTHYNVCNNQEQLLEALRQAVQRRRQRRPH

SEQ ID NO: 13773 - protein, 1012 aa, Homo sapiens
MAEAALEAVRSELREFPAAARELCVPLAVPYLDKPPTPLHFYRDWVCPNRPCIIRNALQHWPALQKWSLPYFRATVGSTEVSVAVTPDGYADAVRGDRFMMPAERRLPLSFVLDVLEGRAQHPGVLYVQKQCSNLPSELPQLLPDLESHVPWASEALGKMPDAVNFWLGEAAAVTSLHKDHYENLYCVVSGEKHFLFHPPSDRPFIPYELYTPATYQLTEEGTFKVVDEEAMEKAEVSRTCLLTVRVLQAHRLPSKDLVTPSDCYVTLWLPTACSHRLQTRTVKNSSSPVWNQSFHFRIHRQLKNVMELKVFDQDLVTGDDPVLSVLFDAGTLRAGEFRRESFSLSPQGEGRLEVEFRLQSLADRGEWLVSNGVLVARELSCLHVQLEETGDQKSSEHRVQLVVPGSCEGPQEASVGTGTFRFHCPACWEQELSIRLQDAPEEQLKAPLSALPSGQVVRLVFPTSQEPLMRVELKKEAGLRELAVRLGFGPCAEEQAFLSRRKQVVAAALRQALQLDGDLQEDEIPVVAIMATGGGIRAMTSLYGQLAGLKELGLLDCVSYITGASGSTWALANLYEDPEWSQKDLAGPTELLKTQVTKNKLGVLAPSQLQRYRQELAERARLGYPSCFTNLWALINEALLHDEPHDHKLSDQREALSHGQNPLPIYCALNTKGQSLTTFEFGEWCEFSPYEVGFPKYGAFIPSELFGSEFFMGQLMKRLPESRICFLEGIWSNLYAANLQDSLYWASEPSQFWDRWVRNQANLDKEQVPLLKIEEPPSTAGRIAEFFTDLLTWRPLAQATHNFLRGLHFHKDYFQHPHFSTWKATTLDGLPNQLTPSEPHLCLLDVGYLINTSCLPLLQPTRDVDLILSLDYNLHGAFQQLQLLGRFCQEQGIPFPPISPSPEEQLQPRECHTFSDPTCPGAPAVLHFPLVSDSFREYSAPGVRRTPEEAAAGEVNLSSSDSPYHYTKVTYSQEDVDKLLHLTHYNVCNNQEQLLEALRQAVQRRRQRRPH

SEQ ID NO: 13774 - protein, 173 aa, Homo sapiens
MCYQGYGYPLMLFLEEGGVVTVCKINTQEPEETLDFDFCSTNVINKIILQSEGLREAFSELDMTSEVLQITMSPDKPYFRLSTFGNAGSSHLDYPKDSDLMEAFHCNQTQVNRYKISLLKPSTKALVLSCKVSIRTDNRGFLSLQYMIRNEDGQICFVEYYCCPDEEVPESES

SEQ ID NO: 13775 - protein, 282 aa, Homo sapiens
MPLLTQQIQDEDDQYSLVASLDNVRNLSTILKAIHFREHATCFATKNGIKVTVENAKCVQANAFIQAGIFQEFKVQEESVTFRINLTVLLDCLSIFGSSPMPGTLTALRMCYQGYGYPLMLFLEEGGVVTVCKINTQEPEETLDFDFCSTNVINKIILQSEGLREAFSELDMTSEVLQITMSPDKPYFRLSTFGNAGSSHLDYPKDSDLMEAFHCNQTQVNRYKISLLKPSTKALVLSCKVSIRTDNRGFLSLQYMIRNEDGQICFVEYYCCPDEEVPESES

SEQ ID NO: 13776 - protein, 182 aa, Homo sapiens
MPGTLTALRMCYQGYGYPLMLFLEEGGVVTVCKINTQEPEETLDFDFCSTNVINKIILQSEGLREAFSELDMTSEVLQITMSPDKPYFRLSTFGNAGSSHLDYPKDSDLMEAFHCNQTQVNRYKISLLKPSTKALVLSCKVSIRTDNRGFLSLQYMIRNEDGQICFVEYYCCPDEEVPESES

SEQ ID NO: 13777 - protein, 157 aa, Homo sapiens [sequence omitted]

SEQ ID NO: 13778 - protein, 282 aa, Homo sapiens; identical to SEQ ID NO: 13775

SEQ ID NO: 13779 - protein, 282 aa, Homo sapiens; identical to SEQ ID NO: 13775

SEQ ID NO: 13780 - protein, 282 aa, Homo sapiens; identical to SEQ ID NO: 13775

SEQ ID NO: 13781 - protein, 173 aa, Homo sapiens; identical to SEQ ID NO: 13774

SEQ ID NO: 13782 - protein, 521 aa, Homo sapiens
MSEPKAIDPKLSTTDRVVKAVPFPPSHRLTAKEVFDNDGKPRVDILKAHLMKEGRLEESVALRIITEGASILRQEKNLLDIDAPVTVCGDIHGQFFDLMKLFEVGGSPANTRYLFLGDYVDRGYFSIECVLYLWALKILYPKTLFLLRGNHECRHLTEYFTFKQECKIKYSERVYDACMDAFDCLPLAALMNQQFLCVHGGLSPEINTLDDIRKLDRFKEPPAYGPMCDILWSDPLEDFGNEKTQEHFTHNTVRGCSYFYSYPAVCEFLQHNNLLSILRAHEAQDAGYRMYRKSQTTGFPSLITIFSAPNYLDVYNNKAAVLKYENNVMNIRQFNCSPHPYWLPNFMDVFTWSLPFVGEKVTEMLVNVLNICSDDELGSEEDGFDGATAAARKEVIRNKIRAIGKMARVFSVLREESESVLTLKGLTPTGMLPSGVLSGGKQTLQSATVEAIEADEAIKGFSPQHKITSFEEAKGLDRINERMPPRRDAMPSDANLNSINKALTSETNGTDSNGSNSSNIQ

SEQ ID NO: 13783 - protein, 511 aa, Homo sapiens
MSEPKAIDPKLSTTDRVVKAVPFPPSHRLTAKEVFDNDGKPRVDILKAHLMKEGRLEESVALRIITEGASILRQEKNLLDIDAPVTVCGDIHGQFFDLMKLFEVGGSPANTRYLFLGDYVDRGYFSIECVLYLWALKILYPKTLFLLRGNHECRHLTEYFTFKQECKIKYSERVYDACMDAFDCLPLAALMNQQFLCVHGGLSPEINTLDDIRKLDRFKEPPAYGPMCDILWSDPLEDFGNEKTQEHFTHNTVRGCSYFYSYPAVCEFLQHNNLLSILRAHEAQDAGYRMYRKSQTTGFPSLITIFSAPNYLDVYNNKAAVLKYENNVMNIRQFNCSPHPYWLPNFMDVFTWSLPFVGEKVTEMLVNVLNICSDDELGSEEDGFDGATAAARKEVIRNKIRAIGKMARVFSVLREESESVLTLKGLTPTGMLPSGVLSGGKQTLQSAIKGFSPQHKITSFEEAKGLDRINERMPPRRDAMPSDANLNSINKALTSETNGTDSNGSNSSNIQ

SEQ ID NO: 13784 - protein, 412 aa, Homo sapiens [sequence omitted]

SEQ ID NO: 13785 - protein, 555 aa, Homo sapiens
MERPAPGEVVMSQAIQPAHATARGELSAGQLLKWIDTTACLAAEKHAGVSCVTASVDDIQFEETARVGQVITIKAKVTRAFSTSMEISIKVMVQDMLTGIEKLVSVAFSTFVAKPVGKEKIHLKPVTLLTEQDHVEHNLAAERRKVRLQHEDTFNNLMKESSKFDDLIFDEEEGAVSTRGTSVQSIELVLPPHANHHGNTFGGQIMAWMETVATISASRLCWAHPFLKSVDMFKFRGPSTVGDRLVFTAIVNNTFQTCVEVGVRVEAFDCQEWAEGRGRHINSAFLIYNAADDKENLITFPRIQPISKDDFRRYRGAIARKRIRLGRKYVISHKEEVPLCIHWDISKQASLSDSNVEALKKLAAKRGWEVTSTVEKIKIYTLEEHDVLSVWVEKHVGSPAHLAYRLLSDFTKRPLWDPHFVSCEVIDWVSEDDQLYHITCPILNDDKPKDLVVLVSRRKPLKDGNTYTVAVKSVILPSVPPSPQYIRSEIICAGFLIHAIDSNSCIVSYFNHMSASILPYFAGNLGGWSKSIEETAASCIQFLENPPDDGFVSTF

SEQ ID NO: 13786 - protein, 512 aa, Homo sapiens
MERPAPGEVVMSQAIQPAHATARGELSAGQLLKWIDTTACLAEISIKVMVQDMLTGIEKLVSVAFSTFVAKPVGKEKIHLKPVTLLTEQDHVEHNLAAERRKVRLQHEDTFNNLMKESSKFDDLIFDEEEGAVSTRGTSVQSIELVLPPHANHHGNTFGGQIMAWMETVATISASRLCWAHPFLKSVDMFKFRGPSTVGDRLVFTAIVNNTFQTCVEVGVRVEAFDCQEWAEGRGRHINSAFLIYNAADDKENLITFPRIQPISKDDFRRYRGAIARKRIRLGRKYVISHKEEVPLCIHWDISKQASLSDSNVEALKKLAAKRGWEVTSTVEKIKIYTLEEHDVLSVWVEKHVGSPAHLAYRLLSDFTKRPLWDPHFVSCEVIDWVSEDDQLYHITCPILNDDKPKDLVVLVSRRKPLKDGNTYTVAVKSVILPSVPPSPQYIRSEIICAGFLIHAIDSNSCIVSYFNHMSASILPYFAGNLGGWSKSIEETAASCIQFLENPPDDGFVSTF

SEQ ID NO: 13787 - protein, 866 aa, Homo sapiens [sequence omitted]

SEQ ID NO: 13788 - protein, 774 aa, Homo sapiens [sequence omitted]

SEQ ID NO: 13789 - protein, 533 aa, Homo sapiens
MGPRGAASLPRGPGPRRLLLPVVLPLLLLLLLAPPGSGAGASRPPHLVFLLADDLGWNDVGFHGSRIRTPHLDALAAGGVLLDNYYTQPLCTPSRSQLLTGRYQIRTGLQHQIIWPCQPSCVPLDEKLLPQLLKEAGYTTHMVGKWHLGMYRKECLPTRRGFDTYFGYLLGSEDYYSHERCTLIDALNVTRCALDFRDGEEVATGYKNMYSTNIFTKRAIALITNHPPEKPLFLYLALQSVHEPLQVPEEYLKPYDFIQDKNRHHYAGMVSLMDEAVGNVTAALKSSGLWNNTVFIFSTDNGGQTLAGGNNWPLRGRKWSLWEGGVRGVGFVASPLLKQKGVKNRELIHISDWLPTLVKLARGHTNGTKPLDGFDVWKTISEGSPSPRIELLHNIDPNFVDSSPCPRNSMAPAKDDSSLPEYSAFNTSVHAAIRHGNWKLLTGYPGCGYWFPPPSQYNVSEIPSSDPPTKTLWLFDIDRDPEERHDLSREYPHIVTKLLSRLQFYHKHSVPVYFPAQDPRCDPKATGVWGPWM

SEQ ID NO: 13790 - protein, 533 aa, Homo sapiens; identical to SEQ ID NO: 13789

SEQ ID NO: 13791 - protein, 303 aa, Homo sapiens
MARGKAKEEGSWKKFIWNSEKKEFLGRTGGSWFKILLFYVIFYGCLAGIFIGTIQVMLLTISEFKPTYQDRVAPPGLTQIPQIQKTEISFRPNDPKSYEAYVLNIVRFLEKYKDSAQRDDMIFEDCGDVPSEPKERGDFNHERGERKVCRFKLEWLGNCSGLNDETYGYKEGKPCIIIKLNRVLGFKPKPPKNESLETYPVMKYNPNVLPVQCTGKRDEDKDKVGNVEYFGLGNSPGFPLQYYPYYGKLLQPKYLQPLLAVQFTNLTMDTEIRIECKAYGENIGYSEKDRFQGRFDVKIEVKS

SEQ ID NO: 13792 - protein, 194 aa, Homo sapiens [sequence omitted]

SEQ ID NO: 13793 - protein, 340 aa, Homo sapiens
MHDVKNHRTFLKRTKYDNLHLEDLFIGNKVNVFSRQLVLIDYGDQYTARQLGSRKEKTLALIKPDAISKAGEIIEIINKAGFTITKLKMMMLSRKEALDFHVDHQSRPFFNELIQFITTGPIIAMEILRDDAICEWKRLLGPANSGVARTDASESIRALFGTDGIRNAAHGPDSFASAAREMELFFPSSGGCGPANTAKFTNCTCCIVKPHAVSEGLLGKILMAIRDAGFEISAMQMFNMDRVNVEEFYEVYKGVVTEYHDMVTEMYSGPCVAMEIQQNNATKTFREFCGPADPEIARHLRPGTLRAIFGKTKIQNAVHCTDLPEDGLLEVQYFFKILDN

SEQ ID NO: 13794 - protein, 376 aa, Homo sapiens
MNHSERFVFIAEWYDPNASLLRRYELLFYPGDGSVEMHDVKNHRTFLKRTKYDNLHLEDLFIGNKVNVFSRQLVLIDYGDQYTARQLGSRKEKTLALIKPDAISKAGEIIEIINKAGFTITKLKMMMLSRKEALDFHVDHQSRPFFNELIQFITTGPIIAMEILRDDAICEWKRLLGPANSGVARTDASESIRALFGTDGIRNAAHGPDSFASAAREMELFFPSSGGCGPANTAKFTNCTCCIVKPHAVSEGLLGKILMAIRDAGFEISAMQMFNMDRVNVEEFYEVYKGVVTEYHDMVTEMYSGPCVAMEIQQNNATKTFREFCGPADPEIARHLRPGTLRAIFGKTKIQNAVHCTDLPEDGLLEVQYFFKILDN

SEQ ID NO: 13795 - protein, 297 aa, Homo sapiens
MYAQPVTNTKEVKWQKVLYERQPFPDNYVDRRFLEELRKNIHARKYQYWAVVFESSVVIQQLCSVCVFVVIWWYMDEGLLAPHWLLGTGLASSLIGYVLFDLIDGGEGRKKSGQTRWADLKSALVFITFTYGFSPVLKTLTESVSTDTIYAMSVFMLLGHLIFFDYGANAAIVSSTLSLNMAIFASVCLASRLPRSLHAFIMVTFAIQIFALWPMLQKKLKACTPRSYVGVTLLFAFSAVGGLLSISAVGAVLFALLLMSISCLCSFYLIRLQLFKENIHGPWDEAEIKEDLSRFLS

SEQ ID NO: 13796 - protein, 297 aa, Homo sapiens; identical to SEQ ID NO: 13795

SEQ ID NO: 13797 - protein, 432 aa, Homo sapiens
MIIANDATVKGGAYYPVTVKKQLRAQEIAMQNRLPCIYLVDSGGAYLPRQADVFPDRDHFGRTFYNQAIMSSKNIAQIAVVMGSCTAGGAYVPAMADENIIVRKQGTIFLAGPPLVKAATGEEVSAEDLGGADLHCRKSGVSDHWALDDHHALHLTRKVVRNLNYQKKLDVTIEPSEEPLFPADELYGIVGANLKRSFDVREVIARIVDGSRFTEFKAFYGDTLVTGFARIFGYPVGIVGNNGVLFSESAKKGTHFVQLCCQRNIPLLFLQNITGFMVGREYEAEGIAKDGAKMVAAVACAQVPKITLIIGGSYGAGNYGMCGRAYSPRFLYIWPNARISVMGGEQAANVLATITKDQRAREGKQFSSADEAALKEPIIKKFEEEGNPYYSSARVWDDGIIDPADTRLVLGLSFSAALNAPIEKTDFGIFRM

SEQ ID NO: 13798 - protein, 563 aa, Homo sapiens
MWAVLRLALRPCARASPAGPRAYHGDSVASLGTQPDLGSALYQENYKQMKALVNQLHERVEHIKLGGGEKARALHISRGKLLPRERIDNLIDPGSPFLELSQFAGYQLYDNEEVPGGGIITGIGRVSGVECMIIANDATVKGGAYYPVTVKKQLRAQEIAMQNRLPCIYLVDSGGAYLPRQADVFPDRDHFGRTFYNQAIMSSKNIAQIAVVMGSCTAGGAYVPAMADENIIVRKQGTIFLAGPPLVKAATGEEVSAEDLGGADLHCRKSGVSDHWALDDHHALHLTRKVVRNLNYQKKLDVTIEPSEEPLFPADELYGIVGANLKRSFDVREVIARIVDGSRFTEFKAFYGDTLVTGFARIFGYPVGIVGNNGVLFSESAKKGTHFVQLCCQRNIPLLFLQNITGFMVGREYEAEGIAKDGAKMVAAVACAQVPKITLIIGGSYGAGNYGMCGRAYSPRFLYIWPNARISVMGGEQAANVLATITKDQRAREGKQFSSADEAALKEPIIKKFEEEGNPYYSSARVWDDGIIDPADTRLVLGLSFSAALNAPIEKTDFGIFRM

SEQ ID NO: 13799 - protein, 308 aa, Homo sapiens
MKFDAQGHLRAINPENGFFGVAPGTSVKTNPNAIKTIQKNTIFTNVAETSDGGVYWEGIDEPLASGVTITSWKNKEWSSEDGEPCAHPNSRFCTPASQCPIIDAAWESPEGVPIEGIIFGGRRPAGVPLVYEALSWQHGVFVGAAMRSEATAAAEHKGKIIMHDPFAMRPFFGYNFGKYLAHWLSMAQHPAAKLPKIFHVNWFRKDKEGKFLWPGFGENSRVLEWMFNRIDGKASTKLTPIGYIPKEDALNLKGLGHINMMELFSISKEFWEKEVEDIEKYLEDQVNADLPCEIEREILALKQRISQM

SEQ ID NO: 13800 - protein, 622 aa, Homo sapiens [sequence omitted]

SEQ ID NO: 13801 - protein, 950 aa, Homo sapiens
MADLSLLQEDLQEDADGFGVDDYSSESDVIIIPSALDFVSQDEMLTPLGRLDKYAASENIFNRQMVARSLLDTLREVCDDERDCIAVLERISRLADDSEPTVRAELMEQVPHIALFCQENRPSIPYAFSKFLLPIVVRYLADQNNQVRKTSQAALLALLEQELIERFDVETKVCPVLIELTAPDSNDDVKTEAVAIMCKMAPMVGKDITERLILPRFCEMCCDCRMFHVRKVCAANFGDICSVVGQQATEEMLLPRFFQLCSDNVWGVRKACAECFMAVSCATCQEIRRTKLSALFINLISDPSRWVRQAAFQSLGPFISTFANPSSSGQYFKEESKSSEEMSVENKNRTRDQEAPEDVQVRPEDTPSDLSVSNSSVILENTMEDHAAEASGKPLGEISVPLDSSLLCTLSSESHQEAASNENDKKPGNYKSMLRPEVGTTSQDSALLDQELYNSFHFWRTPLPEIDLDIELEQNSGGKPSPEGPEEESEGPVPSSPNITMATRKELEEMIENLEPHIDDPDVKAQVEVLSAALRASSLDAHEETISIEKRSDLQDELDINELPNCKINQEDSVPLISDAVENMDSTLHYIHSDSDLSNNSSFSPDEERRTKVQDVVPQALLDQYLSMTDPSRAQTVDTEIAKHCAYSLPGVALTLGRQNWHCLRETYETLASDMQWKVRRTLAFSIHELAVILGDQLTAADLVPIFNGFLKDLDEVRIGVLKHLHDFLKLLHIDKRREYLYQLQEFLVTDNSRNWRFRAELAEQLILLLELYSPRDVYDYLRPIALNLCADKVSSVRWISYKLVSEMVKKLHAATPPTFGVDLINELVENFGRCPKWSGRQAFVFVCQTVIEDDCLPMDQFAVHLMPHLLTLANDRVPNVRVLLAKTLRQTLLEKDYFLASASCHQEAVEQTIMALQMDRDSDVKYFASIHPASTKISEDAMSTASSTY

SEQ ID NO: 13802 - protein, 907 aa, Homo sapiens
MLTPLGRLDKYAASENIFNRQMVARSLLDTLREVCDDERDCIAVLERISRLADDSEPTVRAELMEQVPHIALFCQENRPSIPYAFSKFLLPIVVRYLADQNNQVRKTSQAALLALLEQELIERFDVETKVCPVLIELTAPDSNDDVKTEAVAIMCKMAPMVGKDITERLILPRFCEMCCDCRMFHVRKVCAANFGDICSVVGQQATEEMLLPRFFQLCSDNVWGVRKACAECFMAVSCATCQEIRRTKLSALFINLISDPSRWVRQAAFQSLGPFISTFANPSSSGQYFKEESKSSEEMSVENKNRTRDQEAPEDVQVRPEDTPSDLSVSNSSVILENTMEDHAAEASGKPLGEISVPLDSSLLCTLSSESHQEAASNENDKKPGNYKSMLRPEVGTTSQDSALLDQELYNSFHFWRTPLPEIDLDIELEQNSGGKPSPEGPEEESEGPVPSSPNITMATRKELEEMIENLEPHIDDPDVKAQVEVLSAALRASSLDAHEETISIEKRSDLQDELDINELPNCKINQEDSVPLISDAVENMDSTLHYIHSDSDLSNNSSFSPDEERRTKVQDVVPQALLDQYLSMTDPSRAQTVDTEIAKHCAYSLPGVALTLGRQNWHCLRETYETLASDMQWKVRRTLAFSIHELAVILGDQLTAADLVPIFNGFLKDLDEVRIGVLKHLHDFLKLLHIDKRREYLYQLQEFLVTDNSRNWRFRAELAEQLILLLELYSPRDVYDYLRPIALNLCADKVSSVRWISYKLVSEMVKKLHAATPPTFGVDLINELVENFGRCPKWSGRQAFVFVCQTVIEDDCLPMDQFAVHLMPHLLTLANDRVPNVRVLLAKTLRQTLLEKDYFLASASCHQEAVEQTIMALQMDRDSDVKYFASIHPASTKISEDAMSTASSTY

SEQ ID NO: 13803 - protein, 933 aa, Homo sapiens
MADLSLLQEDLQEDADGSLDFVSQDEMLTPLGRLDKYAASENIFNRQMVARSLLDTLREVCDDERDCIAVLERISRLADDSEPTVRAELMEQVPHIALFCQENRPSIPYAFSKFLLPIVVRYLADQNNQVRKTSQAALLALLEQELIERFDVETKVCPVLIELTAPDSNDDVKTEAVAIMCKMAPMVGKDITERLILPRFCEMCCDCRMFHVRKVCAANFGDICSVVGQQATEEMLLPRFFQLCSDNVWGVRKACAECFMAVSCATCQEIRRTKLSALFINLISDPSRWVRQAAFQSLGPFISTFANPSSSGQYFKEESKSSEEMSVENKNRTRDQEAPEDVQVRPEDTPSDLSVSNSSVILENTMEDHAAEASGKPLGEISVPLDSSLLCTLSSESHQEAASNENDKKPGNYKSMLRPEVGTTSQDSALLDQELYNSFHFWRTPLPEIDLDIELEQNSGGKPSPEGPEEESEGPVPSSPNITMATRKELEEMIENLEPHIDDPDVKAQVEVLSAALRASSLDAHEETISIEKRSDLQDELDINELPNCKINQEDSVPLISDAVENMDSTLHYIHSDSDLSNNSSFSPDEERRTKVQDVVPQALLDQYLSMTDPSRAQTVDTEIAKHCAYSLPGVALTLGRQNWHCLRETYETLASDMQWKVRRTLAFSIHELAVILGDQLTAADLVPIFNGFLKDLDEVRIGVLKHLHDFLKLLHIDKRREYLYQLQEFLVTDNSRNWRFRAELAEQLILLLELYSPRDVYDYLRPIALNLCADKVSSVRWISYKLVSEMVKKLHAATPPTFGVDLINELVENFGRCPKWSGRQAFVFVCQTVIEDDCLPMDQFAVHLMPHLLTLANDRVPNVRVLLAKTLRQTLLEKDYFLASASCHQEAVEQTIMALQMDRDSDVKYFASIHPASTKISEDAMSTASSTY

SEQ ID NO: 13804 - protein, 52 aa, Homo sapiens
MPNPGPLGGSVKGVGPPAGSQEKRPLLGPGFGILPALSSSIISSISLAVKSS

SEQ ID NO: 13805 - protein, 388 aa, Homo sapiens
MRARRGLLRLPRRSLLAALFFFSLSSSLLYFVYVAPGIVNTYLFMMQAQGILIRDNVRTIGAQVYEQVLRSAYAKRNSSVNDSDYPLDLNHSETFLQTTTFLPEDFTYFANHTCPERLPSMKGPIDINMSEIGMDYIHELFSKDPTIKLGGHWKPSDCMPRWKVAILIPFRNRHEHLPVLFRHLLPMLQRQRLQFAFYVVEQVGTQPFNRAMLFNVGFQEAMKDLDWDCLIFHDVDHIPESDRNYYGCGQMPRHFATKLDKYMYLLPYTEFFGGVSGLTVEQFRKINGFPNAFWGWGGEDDDLWNRVQNAGYSVSRPEGDTGKYKSIPHHHRGEVQFLGRYALLRKSKERQGLDGLNNLNYFANITYDALYKNITVNLTPELAQVNEY

SEQ ID NO: 13806 - protein, 388 aa, Homo sapiens; identical to SEQ ID NO: 13805

SEQ ID NO: 13807 - protein, 585 aa, Homo sapiens
MGEKMAEEERFPNTTHEGFNVTLHTTLVVTTKLVLPTPGKPILPVQTGEQAQQEEQSSGMTIFFSLLVLAICIILVHLLIRYRLHFLPESVAVVSLGILMGAVIKIIEFKKLANWKEEEMFRPNMFFLLLLPPIIFESGYSLHKGNFFQNIGSITLFAVFGTAISAFVVGGGIYFLGQADVISKLNMTDSFAFGSLISAVDPVATIAIFNALHVDPVLNMLVFGESILNDAVSIVLTNTAEGLTRKNMSDVSGWQTFLQALDYFLKMFFGSAALGTLTGLISALIVIYVLKHIDLRKTPSLEFGMMIIFAYLPYGLAEGISLSGIMAILFSGIVMSHYTHHNLSPVTQILMQQTLRTVAFLCETCVFAFLGLSIFSFPHKFEISFVIWCIVLVLFGRAVNIFPLSYLLNFFRDHKITPKMMFIMWFSGLRGAIPYALSLHLDLEPMEKRQLIGTTTIVIVLFTILLLGGSTMPLIRLMDIEDAKAHRRNKKDVNLSKTEKMGNTVESEHLSELTEEEYEAHYIRRQDLKGFVWLDAKYLNPFFTRRLTQEDLHHGRIQMKTLTNKWYEEVRQGPSGSEDDEQELL

SEQ ID NO: 13808 - protein, 314 aa, Homo sapiens
MGEKMAEEERFPNTTHEGFNVTLHTTLVVTTKLVLPTPGKPILPVQTGEQAQQEEQSSGMTIFFSLLVLAICIILVHLLIRYRLHFLPESVAVVSLVRREAGQTQVMRSANSLSEGKVKKIMGDGKKGVSSGSSETGSKSPLKRIQEQSPQKRGQPPKNEKNVTIVESAKQAISVCYQAITKKLKICEEETGSTSIRAADSTAVNGSITDKKMGFGGLGLMRSGIVSNLLKMGHTVTVWNRTAKKREVGNAAKMMLIVNIVQGSFIAMITEKDLCLAIALGNAVNSLTPMAAAANQVYKRAKALDQSNNMSAVS

SEQ ID NO: 13809 - protein, 285 aa, Homo sapiens [sequence omitted]

SEQ ID NO: 13810 - protein, 151 aa, Homo sapiens
MGEKMAEEERFPNTTHEGFNVTLHTTLVVTTKLVLPTPGKPILPVQTGEQAQQEEQSSGMTIFFSLLVLAICIILVHLLIRYRLHFLPESVAVVSLGILMGAVIKIIEFKKLANWKEEEMFRPNMFFLLLLPPIIFESGYSLHKVRLRHTL

SEQ ID NO: 13811 - protein, 91 aa, Homo sapiens
MGEKMAEEERFPNTTHEGFNVTLHTTLVVTTKLVLPTPGKPILPVQTGEQAQQEEQSSGMTIFFSLLVLGEYGHCHPHHLPSRVCVLGLCV

SEQ ID NO: 13812 - protein, 500 aa, Homo sapiens
MAWAALLGLLAALLLLLLLSRRRTRRPGEPPLDLGSIPWLGYALDFGKDAASFLTRMKEKHGDIFTILVGGRYVTVLLDPHSYDAVVWEPRTRLDFHAYAIFLMERIFDVQLPHYSPSDEKARMKLTLLHRELQALTEAMYTNLHAVLLGDATEAGSGWHEMGLLDFSYSFLLRAGYLTLYGIEALPRTHESQAQDRVHSADVFHTFRQLDRLLPKLARGSLSVGDKDHMCSVKSRLWKLLSPARLARRAHRSKWLESYLLHLEEMGVSEEMQARALVLQLWATQGNMGPAAFWLLLFLLKNPEALAAVRGELESILWQAEQPVSQTTTLPQKVLDSTPVLDSVLSESLRLTAAPFITREVVVDLAMPMADGREFNLRRGDRLLLFPFLSPQRDPEIYTDPEVFKYNRFLNPDGSEKKDFYKDGKRLKNYNMPWGAGHNHCLGRSYAVNSIKQFVFLVLVHLDLELINADVEIPEFDLSRYGFGLMQPEHDVPVRYRIRP

SEQ ID NO: 13813 - protein, 225 aa, Homo sapiens
CVSARPVAPECTEDGGCCRTVAPSVGSSCHAPAVTQHAPYFKGTAVVNGEFKDLSLDDFKGKYLVLFFYPLDFTFVCPTEIVAFSDKANEFHDVNCEVVAVSVDSHFSHLAWINTPRKNGGLGHMNIALLSDLTKQISRDYGVLLEGSGLALRGLFIIDPNGVIKHLSVNDLPVGRSVEETLRLVKAFQYVETHGEVCPANWTPDSPTIKPSPAASKEYFQKVNQ

SEQ ID NO: 13814 - protein, 256 aa, Homo sapiens
MAAAVGRLLRASVARHVSAIPWGISATAALRPAACGRTSLTNLLCSGSSQAKLFSTSSSCHAPAVTQHAPYFKGTAVVNGEFKDLSLDDFKGKYLVLFFYPLDFTFVCPTEIVAFSDKANEFHDVNCEVVAVSVDSHFSHLAWINTPRKNGGLGHMNIALLSDLTKQISRDYGVLLEGSGLALRGLFIIDPNGVIKHLSVNDLPVGRSVEETLRLVKAFQYVETHGEVCPANWTPDSPTIKPSPAASKEYFQKVNQ

SEQ ID NO: 13815 - protein, 256 aa, Homo sapiens; identical to SEQ ID NO: 13814

SEQ ID NO: 13816 - protein, 757 aa, Homo sapiens
MGKGVGRDKYEPAAVSEQGDKKGKKGKKDRDMDELKKEVSMDDHKLSLDELHRKYGTDLSRGLTSARAAEILARDGPNALTPPPTTPEWIKFCRQLFGGFSMLLWIGAILCFLAYSIQAATEEEPQNDNLYLGVVLSAVVIITGCFSYYQEAKSSKIMESFKNMVPQQALVIRNGEKMSINAEEVVVGDLVEVKGGDRIPADLRIISANGCKVDNSSLTGESEPQTRSPDFTNENPLETRNIAFFSTNCVEGTARGIVVYTGDRTVMGRIATLASGLEGGQTPIAAEIEHFIHIITGVAVFLGVSFFILSLILEYTWLEAVIFLIGIIVANVPEGLLATVTVCLTLTAKRMARKNCLVKNLEAVETLGSTSTICSDKTGTLTQNRMTVAHMWFDNQIHEADTTENQSGVSFDKTSATWLALSRIAGLCNRAVFQANQENLPILKRAVAGDASESALLKCIELCCGSVKEMRERYAKIVEIPFNSTNKYQLSIHKNPNTSEPQHLLVMKGAPERILDRCSSILLHGKEQPLDEELKDAFQNAYLELGGLGERVLGFCHLFLPDEQFPEGFQFDTDDVNFPIDNLCFVGLISMIDPPRAAVPDAVGKCRSAGIKVIMVTGDHPITAKAIAKGVGIISEGNETTYEQRKIVEFTCHTAFFVSIVVVQWADLVICKTRRNSVFQQGMKNKILIFGLFEETALAAFLSYCPGMGVALRMYPLKPTWWFCAFPYSLLIFVYDEVRKLIIRRRPGGWVEKETYY

SEQ ID NO: 13817 - protein, 992 aa, Homo sapiens
MDELKKEVSMDDHKLSLDELHRKYGTDLSRGLTSARAAEILARDGPNALTPPPTTPEWIKFCRQLFGGFSMLLWIGAILCFLAYSIQAATEEEPQNDNLYLGVVLSAVVIITGCFSYYQEAKSSKIMESFKNMVPQQALVIRNGEKMSINAEEVVVGDLVEVKGGDRIPADLRIISANGCKVDNSSLTGESEPQTRSPDFTNENPLETRNIAFFSTNCVEGTARGIVVYTGDRTVMGRIATLASGLEGGQTPIAAEIEHFIHIITGVAVFLGVSFFILSLILEYTWLEAVIFLIGIIVANVPEGLLATVTVCLTLTAKRMARKNCLVKNLEAVETLGSTSTICSDKTGTLTQNRMTVAHMWFDNQIHEADTTENQSGVSFDKTSATWLALSRIAGLCNRAVFQANQENLPILKRAVAGDASESALLKCIELCCGSVKEMRERYAKIVEIPFNSTNKYQLSIHKNPNTSEPQHLLVMKGAPERILDRCSSILLHGKEQPLDEELKDAFQNAYLELGGLGERVLGFCHLFLPDEQFPEGFQFDTDDVNFPIDNLCFVGLISMIDPPRAAVPDAVGKCRSAGIKVIMVTGDHPITAKAIAKGVGIISEGNETVEDIAARLNIPVSQVNPRDAKACVVHGSDLKDMTSEQLDDILKYHTEIVFARTSPQQKLIIVEGCQRQGAIVAVTGDGVNDSPALKKADIGVAMGIAGSDVSKQAADMILLDDNFASIVTGVEEGRLIFDNLKKSIAYTLTSNIPEITPFLIFIIANIPLPLGTVTILCIDLGTDMVPAISLAYEQAESDIMKRQPRNPKTDKLVNERLISMAYGQIGMIQALGGFFTYFVILAENGFLPIHLLGLRVDWDDRWINDVEDSYGQQWTYEQRKIVEFTCHTAFFVSIVVVQWADLVICKTRRNSVFQQGMKNKILIFGLFEETALAAFLSYCPGMGVALRMYPLKPTWWFCAFPYSLLIFVYDEVRKLIIRRRPGGWVEKETYY

SEQ ID NO: 13818 - protein, 729 aa, Homo sapiens
MGKGVGRDKYEPAAVSEQGDKKGKKGKKDRDMDELKKEVSMDDHKLSLDELHRKYGTDLSRGLTSARAAEILARDGPNALTPPPTTPEWIKFCRQLFGGFSMLLWIGAILCFLAYSIQAATEEEPQNDNLYLGVVLSAVVIITGCFSYYQEAKSSKIMESFKNMVPQQALVIRNGEKMSINAEEVVVGDLVEVKGGDRIPADLRIISANGCKVDNSSLTGESEPQTRSPDFTNENPLETRNIAFFSTNCVEGTARGIVVYTGDRTVMGRIATLASGLEGGQTPIAAEIEHFIHIITGVAVFLGVSFFILSLILEYTWLEAVIFLIGIIVANVPEGLLATVTVCLTLTAKRMARKNCLVKNLEAVETLGSTSTICSDKTGTLTQNRMTVAHMWFDNQIHEADTTENQSGVSFDKTSATWLALSRIAGLCNRAVFQANQENLPILKRAVAGDASESALLKCIELCCGSVKEMRERYAKIVEIPFNSTNKYQLSIHKNPNTSEPQHLLVMKGAPERILDRCSSILLHGKEQPLDEELKDAFQNAYLELGGLGERVLGFCHLFLPDEQFPEGFQFDTDDVNFPIDNLCFVGLISMIDPPRAAVPDAVGKCRSAGIKTYEQRKIVEFTCHTAFFVSIVVVQWADLVICKTRRNSVFQQGMKNKILIFGLFEETALAAFLSYCPGMGVALRMYPLKPTWWFCAFPYSLLIFVYDEVRKLIIRRRPGGWVEKETYY

SEQ ID NO: 13819 - protein, 470 aa, Homo sapiens
MGKGVGRDKYEPAAVSEQGDKKGKKGKKDRDMDELKKEVSMDDHKLSLDELHRKYGTDLSRGLTSARAAEILARDGPNALTPPPTTPEWIKFCRQLFGGFSMLLWIGAILCFLAYSIQAATEEEPQNDNLYLGVVLSAVVIITGCFSYYQEAKSSKIMESFKNMVPQQALVIRNGEKMSINAEEVVVGDLVEVKGGDRIPADLRIISANGCKVDNSSLTGESEPQTRSPDFTNENPLETRNIAFFSTNCVEGTARGIVVYTGDRTVMGRIATLASGLEGGQTPIAAEIEHFIHIITGVAVFLGVSFFILSLILEYTWLEAVIFLIGIIVANVPEGLLATVTVCLTLTAKRMARKNCLVKNLEAVETLGSTSTICSDKTGTLTQNRMTVAHMWFDNQIHEADTTENQSGVSFDKTSATWLALSRIAGLCNRAVFQANQENLPSLLIFVYDEVRKLIIRRRPGGWVEKETYY

SEQ ID NO: 13820 - protein, 1023 aa, Homo sapiens
MGKGVGRDKYEPAAVSEQGDKKGKKGKKDRDMDELKKEVSMDDHKLSLDELHRKYGTDLSRGLTSARAAEILARDGPNALTPPPTTPEWIKFCRQLFGGFSMLLWIGAILCFLAYSIQAATEEEPQNDNLYLGVVLSAVVIITGCFSYYQEAKSSKIMESFKNMVPQQALVIRNGEKMSINAEEVVVGDLVEVKGGDRIPADLRIISANGCKVDNSSLTGESEPQTRSPDFTNENPLETRNIAFFSTNCVEGTARGIVVYTGDRTVMGRIATLASGLEGGQTPIAAEIEHFIHIITGVAVFLGVSFFILSLILEYTWLEAVIFLIGIIVANVPEGLLATVTVCLTLTAKRMARKNCLVKNLEAVETLGSTSTICSDKTGTLTQNRMTVAHMWFDNQIHEADTTENQSGVSFDKTSATWLALSRIAGLCNRAVFQANQENLPILKRAVAGDASESALLKCIELCCGSVKEMRERYAKIVEIPFNSTNKYQLSIHKNPNTSEPQHLLVMKGAPERILDRCSSILLHGKEQPLDEELKDAFQNAYLELGGLGERVLGFCHLFLPDEQFPEGFQFDTDDVNFPIDNLCFVGLISMIDPPRAAVPDAVGKCRSAGIKVIMVTGDHPITAKAIAKGVGIISEGNETVEDIAARLNIPVSQVNPRDAKACVVHGSDLKDMTSEQLDDILKYHTEIVFARTSPQQKLIIVEGCQRQGAIVAVTGDGVNDSPALKKADIGVAMGIAGSDVSKQAADMILLDDNFASIVTGVEEGRLIFDNLKKSIAYTLTSNIPEITPFLIFIIANIPLPLGTVTILCIDLGTDMVPAISLAYEQAESDIMKRQPRNPKTDKLVNERLISMAYGQIGMIQALGGFFTYFVILAENGFLPIHLLGLRVDWDDRWINDVEDSYGQQWTYEQRKIVEFTCHTAFFVSIVVVQWADLVICKTRRNSVFQQGMKNKILIFGLFEETALAAFLSYCPGMGVALRMYPLKPTWWFCAFPYSLLIFVYDEVRKLIIRRRPGGWVEKETYY

SEQ ID NO: 13821 - protein, 366 aa, Homo sapiens
MDSDDEMVEEAVEGHLDDDGLPHGFCTVTYSSTDRFEGNFVHGEKNGRGKFFFFDGSTLEGYYVDDALQGQGVYTYEDGGVLQGTYVDGELNGPAQEYDTDGRLIFKGQYKDNIRHGVCWIYYPDGGSLVGEVNEDGEMTGEKIAYVYPDERTALYGKFIDGEMIEGKLATLMSTEEGRPHFELMPGNSVYHFDKSTSSCISTNALLPDPYESERVYVAESLISSAGEGLFSKVAVGPNTVMSFYNGVRITHQEVDSRDWALNGNTLSLDEETVIDVPEPYNHVSKYCASLGHKANHSFTPNCIYDMFVHPRFGPIKCIRTLRAVEADEELTVAYGYDHSPPGKSGPEAPEWYQVELKAFQATQQK

SEQ ID NO: 13822 - protein, 652 aa, Homo sapiens
MIMNKGLGSNERLEFIVSTGPYPSESAMTKAVFPLSNGSSGGWSAVLQASNGNTLTISISSPASAPIGRYTMALQIFSQGGISSVKLGTFILLFNPWLNVDSVFMGNHAEREEYVQEDAGIIFVGSTNRIGMIGWNFGQFEEDILSICLSILDRSLNFRRDAATDVASRNDPKYVGRVLSAMINSNDDNGVLAGNWSGTYTGGRDPRSWNGSVEILKNWKKSGFSPVRYGQCWVFAGTLNTALRSLGIPSRVITNFNSAHDTDRNLSVDVYYDPMGNPLDKGSDSVWNFHVWNEGWFVRSDLGPSYGGWQVLDATPQERSQGVFQCGPASVIGVREGDVQLNFDMPFIFAEVNADRITWLYDNTTGKQWKNSVNSHTIGRYISTKAVGSNARMDVTDKYKYPEGSDQERQVFQKALGKLKPNTPFAATSSMGLETEEQEPSIIGKLKVAGMLAVGKEVNLVLLLKNLSRDTKTVTVNMTAWTIIYNGTLVHEVWKDSATMSLDPEEEAEHPIKISYAQYEKYLKSDNMIRITAVCKVPDESEVVVERDIILDNPTLTLEVLNEARVRKPVNVQMLFSNPLDEPVRDCVLMVEGSGLLLGNLKIDVPTLGPKERSRVRFDILPSRSGTKQLLADFSCNKFPAIKAMLSIDVAE

SEQ ID NO: 13823 - protein, 693 aa, Homo sapiens [sequence omitted]

SEQ ID NO: 13824 - protein, 693 aa, Homo sapiens [sequence omitted]

SEQ ID NO: 13825 - protein, 795 aa, Homo sapiens [sequence omitted]

SEQ ID NO: 13826 - protein, 795 aa, Homo sapiens [sequence omitted]

SEQ ID NO: 13827 - protein, 795 aa, Homo sapiens [sequence omitted]

SEQ ID NO: 13828 - protein, 622 aa, Homo sapiens
MRLLRRRHMPLRLAMVGCAFVLFLFLLHRDVSSREEATEKPWLKSLVSRKDHVLDLMLEAMNNLRDSMPKLQIRAPEAQQTLFSINQSCLPGFYTPAELKPFWERPPQDPNAPGADGKAFQKSKWTPLETQEKEEGYKKHCFNAFASDRISLQRSLGPDTRPPECVDQKFRRCPPLATTSVIIVFHNEAWSTLLRTVYSVLHTTPAILLKEIILVDDASTEEHLKEKLEQYVKQLQVVRVVRQEERKGLITARLLGASVAQAEVLTFLDAHCECFHGWLEPLLARIAEDKTVVVSPDIVTIDLNTFEFAKPVQRGRVHSRGNFDWSLTFGWETLPPHEKQRRKDETYPIKSPTFAGGLFSISKSYFEHIGTYDNQMEIWGGENVEMSFRVWQCGGQLEIIPCSVVGHVFRTKSPHTFPKGTSVIARNQVRLAEVWMDSYKKIFYRRNLQAAKMAQEKSFGDISERLQLREQLHCHNFSWYLHNVYPEMFVPDLTPTFYGAIKNLGTNQCLDVGENNRGGKPLIMYSCHGLGGNQYFEYTTQRDLRHNIAKQLCLHVSKGALGLGSCHFTGKNSQVPKDEEWELAQDQLIRNSGSGTCLTSQDKKPAMAPCNPSDPHQLWLFV

SEQ ID NO: 13829 - protein, 622 aa, Homo sapiens; identical to SEQ ID NO: 13828

SEQ ID NO: 13830 - protein, 484 aa, Homo sapiens
MPSIYKSVTINTSKEMMCFSDFPVPDHFPNYMHNSKLMDYFGMYATHFGLLNYIRFKTEVQSVRKHPDFSINGQWDVVVETEEKQETLVFDGVLVCSGHHTDPYLPLQSFPGIEKFEGCYFHSREYKSPEDFSGKRIIVIGIGNSGVDIAVELSRVAKQVCFTRRGSWILHRVWDNGYPMDSSFFTRFNSFLQKILTTPQINNQLEKIMNSRFNHAHCGLQPQHRWALSQHPTVSDDLPNHIISGKVQVKPSVKEFTETDAIFEDSTVEENIDVVIFATGYSFSFSFLDGLIKVTNNEVSLYKLMFPPDLEKPTLAVIGLIQPLGIILPIAELQSRWATRVFKGLIKLPSAENMMADIAQRKRAMEKRRYVKTPRHTIQVDHIEYMDEIAMPAGVKPNLLFLFLSDPKLAMEVFFGPCTPYQYHLHGPEKWDGARRANLTQRERIIKPLSTRITSEDSHPSSQLSWIKMAPVSLAFLAAGLAYF

SEQ ID NO: 13831 - protein, 366 aa, Homo sapiens
MAGPAWISKVSRLLGAFHNPKQVTRGFTGGVQTVTLIPGDGIGPEISAAVMKIFDAAKAPIQWEERNVTAIQGPGGKWMIPSEAKESMDKNKMGLKGPLKTPIAAGHPSMNLLLRKTFDLYANVRPCVSIEGYKTPYTDVNIVTIRENTEGEYSGIEHVIVDGVVQSIKLITEGASKRIAEFAFEYARNNHRSNVTAVHKANIMRMSDGLFLQKCREVAESCKDIKFNEMYLDTVCLNMVQDPSQFDVLVMPNLYGDILSDLCAGLIGGLGVTPSGNIGANGVAIFESVHGTAPDIAGKDMANPTALLLSAVMMLRHMGLFDHAARIEAACFATIKDGKSLTKDLGGNAKCSDFTEEICRRVKDLD

SEQ ID NO: 13832 - protein, 366 aa, Homo sapiens; identical to SEQ ID NO: 13831

SEQ ID NO: 13833 - protein, 427 aa, Homo sapiens
MRILEESAERRWRWWPSPVAPVLLALELVAMEELQEPLRGQLRLCFTQAARTSLLLLRLNDAALRALQECQRQQVRPVIAFQGHRGYLRLPGPGWSCLFSFIVSQCCQEGAGGSLDLVCQRFLRSGPNSLHCLGSLRERLIIWAAMDSIPAPSSVQGHNLTEDARHPESWQNTGGYSEGDAVSQPQMALEEVSVSDPLASNQGQSLPGSSREHMAQWEVRSQTHVPNREPVQALPSSASRKRLDKKRSVPVATVELEEKRFRTLPLVPSPLQGLTNQDLQEGEDWEQEDEDMDPRLEHSSSVQEDSESPSPEDIPDYLLQYRAIHSAEQQHAYEQDFETDYAEYRILHARVGTASQRFIELGAEIKRVRRGTPEYKVLEDKIIQEYKKFRKQYPSYREEKRRCEYLHQKLSHIKGLILEFEEKNRGS

SEQ ID NO: 13834 - protein, 397 aa, Homo sapiens
MEELQEPLRGQLRLCFTQAARTSLLLLRLNDAALRALQECQRQQVRPVIAFQGHRGYLRLPGPGWSCLFSFIVSQCCQEGAGGSLDLVCQRFLRSGPNSLHCLGSLRERLIIWAAMDSIPAPSSVQGHNLTEDARHPESWQNTGGYSEGDAVSQPQMALEEVSVSDPLASNQGQSLPGSSREHMAQWEVRSQTHVPNREPVQALPSSASRKRLDKKRSVPVATVELEEKRFRTLPLVPSPLQGLTNQDLQEGEDWEQEDEDMDPRLEHSSSVQEDSESPSPEDIPDYLLQYRAIHSAEQQHAYEQDFETDYAEYRILHARVGTASQRFIELGAEIKRVRRGTPEYKVLEDKIIQEYKKFRKQYPSYREEKRRCEYLHQKLSHIKGLILEFEEKNRGS

SEQ ID NO: 13835 - protein, 505 aa, Homo sapiens
MRLRRLALFPGVALLLAAARLAAASDVLELTDDNFESRISDTGSAGLMLVEFFAPWCGHCKRLAPEYEAAATRLKGIVPLAKVDCTANTNTCNKYGVSGYPTLKIFRDGEEAGAYDGPRTADGIVSHLKKQAGPASVPLRTEEEFKKFISDKDASIVGFFDDSFSEAHSEFLKAASNLRDNYRFAHTNVESLVNEYDDNGEGIILFRPSHLTNKFEDKTVAYTEQKMTSGKIKKFIQENIFGICPHMTEDNKDLIQGKDLLIAYYDVDYEKNAKGSNYWRNRVMMVAKKFLDAGHKLNFAVASRKTFSHELSDFGLESTAGEIPVVAIRTAKGEKFVMQEEFSRDGKALERFLQDYFDGNLKRYLKSEPIPESNDGPVKVVVAENFDEIVNNENKDVLIEFYAPWCGHCKNLEPKYKELGEKLSKDPNIVIAKMDATANDVPSPYEVRGFPTIYFSPANKKLNPKKYEGGRELSDFISYLQREATNPPVIQEEKPKKKKKAQEDL

SEQ ID NO: 13836 - protein, 237 aa, Homo sapiens
MLGGSLGSRLLRGVGGSHGRFGARGVREGGAAMAAGESMAQRMVWVDLEMTGLDIEKDQIIEMACLITDSDLNILAEGPNLIIKQPDELLDSMSDWCKEHHGKSGLTKAVKESTITLQQAEYEFLSFVRQQTPPGLCPLAGNSVHEDKKFLDKYMPQFMKHLHYRIIDVSTVKELCRRWYPEEYEFAPKKAASHRALDDISESIKELQFYRNNIFKKKIDEKKRKIIENGENEKTVS

SEQ ID NO: 13837 - protein, 179 aa, Homo sapiens
MLGGSLGSRLLRGVGGSHGRFGARGVREGGAAMAAGESMAQRMVWVDLEMTGLDIEKDQIIEMACLITDSDLNILAEGPNLIIKQPDELLDSMSDWCKEHHGKSGLTKAVKESTITLQQAEYEFLSFVRQQTPPGLCPLAGNSVHEDKKFLDKYMPQFMKHLHYRIIDVSTVKELCSFL

SEQ ID NO: 13838 - protein, 145 aa, Homo sapiens
MSTEGGGRRCQAQVSRRISFSASHRLYSKFLSDEENLKLFGKCNNPNGHGHNYKVVVTVHGEIDPATGMVMNLADLKKYMEEAIMQPLDHKNLDMDVPYFADVVSTTENVAVYIWDNLQKVLPVGVLYKVKVYETDNNIVVYKGE

SEQ ID NO: 13839 - protein, 331 aa, Homo sapiens
MWLWEDQGGLLGPFSFLLLVLLLVTRSPVNACLLTGSLFVLLRVFSFEPVPSCRALQVLKPRDRISAIAHRGGSHDAPENTLAAIRQAAKNGATGVELDIEFTSDGIPVLMHDNTVDRTTDGTGRLCDLTFEQIRKLNPAANHRLRNDFPDEKIPTLREAVAECLNHNLTIFFDVKGHAHKATEALKKMYMEFPQLYNNSVVCSFLPEVIYKMRQTDRDVITALTHRPWSLSHTGDGKPRYDTFWKHFIFVMMDILLDWSMHNILWYLCGISAFLMQKDFVSPAYLKKWSAKGIQVVGWTVNTFDEKSYYESHLGSSYITDSMVEDCEPHF

SEQ ID NO: 13840 - protein, 221 aa, Homo sapiens
MHDNTVDRTTDGTGRLCDLTFEQIRKLNPAANHRLRNDFPDEKIPTLREAVAECLNHNLTIFFDVKGHAHKATEALKKMYMEFPQLYNNSVVCSFLPEVIYKMRQTDRDVITALTHRPWSLSHTGDGKPRYDTFWKHFIFVMMDILLDWSMHNILWYLCGISAFLMQKDFVSPAYLKKWSAKGIQVVGWTVNTFDEKSYYESHLGSSYITDSMVEDCEPHF

SEQ ID NO: 13841 - protein, 300 aa, Homo sapiens
MWLWEDQGGLLGPFSFLLLVLLLVTRSPVNACLLTGSLFVLLRVFSFEPVPSCRALQVLKPRDRISAIAHRGGSHDAPENTLAAIRQAAKNGATGVELDIEFTSDGIPVLMHDNTVDRTTDGTGRLCDLTFEQIRKLNPAANHRLRNDFPDEKIPTLREAVAECLNHNLTIFFDVKGHAHKMRQTDRDVITALTHRPWSLSHTGDGKPRYDTFWKHFIFVMMDILLDWSMHNILWYLCGISAFLMQKDFVSPAYLKKWSAKGIQVVGWTVNTFDEKSYYESHLGSSYITDSMVEDCEPHF

SEQ ID NO: 13842 - protein, 361 aa, Homo sapiens [sequence omitted]

SEQ ID NO: 13843 - protein, 443 aa, Homo sapiens [sequence omitted]

SEQ ID NO: 13844 - protein, 657 aa, Homo sapiens
MSPTPPLFSLPEARTRFTKSTREALNNKNIKPLLSTFSQVPGSENEKKCTLDQAFRGILEEEIINHSSCENVLAIISLAIGGVTEGICTASTPFVLLGDVLDCLPLDQCDTIFTFVEKNVATWKSNTFYSAGKNYLLRMCNDLLRRLSKSQNTVFCGRIQLFLARLFPLSEKSGLNLQSQFNLENVTVFNTNEQESTLGQKHTEDREEGMDVEEGEMGDEEAPTTCSIPIDYNLYRKFWSLQDYFRNPVQCYEKISWKTFLKYSEEVLAVFKSYKLDDTQASRKKMEELKTGGEHVYFAKFLTSEKLMDLQLSDSNFRRHILLQYLILFQYLKGQVKFKSSNYVLTDEQSLWIEDTTKSVYQLLSENPPDGERFSKMVEHILNTEENWNSWKNEGCPSFVKERTSDTKPTRIIRKRTAPEDFLGKGPTKKILMGNEELTRLWNLCPDNMEACKSETREHMPTLEEFFEEAIEQADPENMVENEYKAVNNSNYGWRALRLLARRSPHFFQPTNQQFKSLPEYLENMVIKLAKELPPPSEEIKTGEDEDEEDNDALLKENESPDVRRDKPVTGEQIEVFANKLGEQWKILAPYLEMKDSEIRQIECDSEDMKMRAKQLLVAWQDQEGVHATPENLINALNKSGLSDLAESLTNDNETNS

SEQ ID NO: 13845 - protein, 468 aa, Homo sapiens
MSPTPPLFSLPEARTRFTKSTREALNNKNIKPLLSTFSQVPGSENEKKCTLDQAFRGILEEEIINHSSCENVLAIISLAIGGVTEGICTASTPFVLLGDVLDCLPLDQCDTIFTFVEKNVATWKSNTFYSAGKNYLLRMCNDLLRRLSKSQNTVFCGRIQLFLARLFPLSEKSGLNLQSQFNLENVTVFNTNEQESTLGQKHTEDREEGMDVEEGEMGDEEAPTTCSIPIDYNLYRKFWSLQDYFRNPVQCYEKISWKTFLKYSEEVLAVFKSYKLDDTQASRKKMEELKTGGEHVYFAKFLTSEKLMDLQLSDSNFRRHILLQYLILFQYLKGQVKFKSSNYVLTDEQSLWIEDTTKSVYQLLSENPPDGERFSKMVEHILNTEENWNSWKNEGCPSFVKERTSDTKPTRIIRKRTAPEDFLGKGPTKKILMGNEELTRLWNLCPDNMEACKSETRQGTHAHFGGIL

SEQ ID NO: 13846 - protein, 635 aa, Homo sapiens [sequence omitted]

SEQ ID NO: 13847 - protein, 377 aa, Homo sapiens
MSPTPPLFSLPEARTRFTKSTREALNNKNIKPLLSTFSQVPGSENEKKCTLDQAFRGILEEEIINHSSCENVLAIISLAIGGVTEGICTASTPFVLLGDVLDCLPLDQCDTIFTFVEKNVATWKSNTFYSAGKNYLLRMCNDLLRRLSKSQNTVFCGRIQLFLARLFPLSEKSGLNLQSQFNLENVTVFNTNEQESTLGQKHTEDREEGMDVEEGEMGDEEAPTTCSIPIDYNLYRKFWSLQDYFRNPVQCYEKISWKTFLKYSEEVLAVFKSYKLDDTQASRKKMEELKTGGEHVYFAKFLTSEKLMDLQLSDSNFRRHILLQYLILFQYLKGQVKFKSSNYVLTDEQSLWIEDTTKSVYQVSSTRNKPMIEKMEI

SEQ ID NO: 13848 - protein, 401 aa, Homo sapiens
MRQEVFVTIADLSYQDVHLLLGSEDRAELFSLTIKSIITLPSVRTLTQIQEIMPNGTCNTECLYRQTFQAFSEMLQSLVVKDPHLENLDTIIKLPLRFQRLGHLVALMALLCGDPQEKVAEEAAEGIHSLLHITLRLKYITHDKKDQQNLKRALTKCREFLELHSSAAKCFYNCPFRIAQVFEGFLDSNELCQFIMTTFDTLKNLKHPCIQRSAGELLLTLAKNTESQFEKVPEIMGVICAQLSIISQPRVRQQIINTVSLFISRPKYTDIVLSFLLCHPVPYNRHLAEVWRMLSVELPSTTWILWRLLRKLQKCHNEPAQEKMAYVAVAATDALYEVFLGNRLRAATFRLFPQLLMTLLIQIHHSIGLTMSDVDIPSGLYTEQEVPSEVTPLWYCPSLFH

SEQ ID NO: 13849 - protein, 368 aa, Homo sapiens [sequence omitted]

SEQ ID NO: 13850 - protein, 586 aa, Homo sapiens [sequence omitted]

SEQ ID NO: 13851 - protein, 333 aa, Homo sapiens
MRQEVFVTIADLSYQDVHLLLGSEDRAELFSLTIKSIITLPSVRTLTQIQEIMPNGTCNTECLYRQTFQAFSEMLQSLVVKDPHLENLDTIIKLPLRFQRLGHLVALMALLCGDPQEKVAEEAAEGIHSLLHITLRLKYITHDKKDQQNLKRALTKCREFLELHSSAAKCFYNCPFRIAQVFEGFLDSNELCQFIMTTFDTLKNLKHPCIQRSAGELLLTLAKNTESQFEKVPEIMGVICAQLSIISQPRVRQQIINTVSLFISRPKYTDIVLSFLLCHPVPYNRHLAEVWRMLSVELPSTTWILWRLLRKLQKCHNEPAQEKMAYVAVAVSP

SEQ ID NO: 13852 - protein, 436 aa, Homo sapiens [sequence omitted]

SEQ ID NO: 13853 - protein, 703 aa, Homo sapiens
MAAPVGPVKFWRPGTEGPGVSISEERQSLAENSGTTVVYNPYAALSIEQQRQKLPVFKLRNHILYLIENYQTVVIVGETGCGKSTQIPQYLAEAGWTAEGRVVGVTQPRRVAAVTVAGRVAEERGAVLGHEVGYCIRFDDCTDQLATRIKFLTDGMLVREMMVDPLLTKYSVIMLDEAHERTLYTDIAIGLLKKIQKKRGDLRLIVASATLDADKFRDFFNQNETSDPARDTCVILTVEGRTFPVDIFYLQSPVPDYIKSTVETVVKIHQTEGDGDVLAFLTGQEEVETVVSMLIEQARALARTGMKRHLRVLPMYAGLPSFEQMKVFERVSRSVRKVIVATNVAETSITISGIVYVIDCGFVKLRAYNPRTAIECLVVVPVSQASANQRAGRGGRSRSGKCYRLYTEEAFDKLPQSTVPEMQRSNLAPVILQLKALGIDNVLRFHFMSPPPAQSMVQALELLYALGGLDKDCRLTEPLGMRIAEFPLNPMFAKMLLESGNFGCSQEILSIAAMMQIQNIFVVPPNQKSHAIRVHRKFAVEEGDHLTMLNIYEAFIKHNKDSKWCQEHFLNYKGLVRAATVREQLKKLLVKFQVPRKSSEGDPDLVLRCIVSGFFANAARFHSTGAYRTIRDDHELHIHPASVLYAEKPPRWVIYNEVIQTSKYYMRDVTAIESAWLLELAPHFYQQGTHLSLKAKRAKVQDP

SEQ ID NO: 13854 - protein, 589 aa, Homo sapiens
MLVREMMVDPLLTKYSVIMLDEAHERTLYTDIAIGLLKKIQKKRGDLRLIVASATLDADKFRDFFNQNETSDPARDTCVILTVEGRTFPVDIFYLQSPVPDYIKSTVETVVKIHQTEGDGDVLAFLTGQEEVETVVSMLIEQARALARTGMKRHLRVLPMYAGLPSFEQMKVFERVSRSVRKVIVATNVAETSITISGIVYVIDCGFVKLRAYNPRTAIECLVVVPVSQASANQRAGRGGRSRSGKCYRLYTEEAFDKLPQSTVPEMQRSNLAPVILQLKALGIDNVLRFHFMSPPPAQSMVQALELLYALGGLDKDCRLTEPLGMRIAEFPLNPMFAKMLLESGNFGCSQEILSIAAMMQIQNIFVVPPNQKSHAIRVHRKFAVEEGDHLTMLNIYEAFIKHNKDSKWCQEHFLNYKGLVRAATVREQLKKLLVKFQVPRKSSEGDPDLVLRCIVSGFFANAARFHSTGAYRWSFALVAHARVQWGDLGSSQPLPPSFKRFSCLSLRSSWDYRTIRDDHELHIHPASVLYAEKPPRWVIYNEVIQTSKYYMRDVTAIESAWLLELAPHFYQQGTHLSLKAKRAKVQDP

SEQ ID NO: 13855 - protein, 702 aa, Homo sapiens [sequence omitted]

SEQ ID NO: 13856 - protein, 404 aa, Homo sapiens [sequence omitted]

SEQ ID NO: 13857 - protein, 753 aa, Homo sapiens
MVLLIFAKEDSQSDGFWWACDRAGYRCNIARTPESALECFLDKHHEIIVIDHRQTQNFDAEAVCRSIRATNPSEHTVILAVVSRVSDDHEEASVLPLLHAGFNRRFMENSSIIACYNELIQIEHGEVRSQFKLRACNSVFTALDHCHEAIEITSDDHVIQYVNPAFERMMGYHKGELLGKELADLPKSDKNRADLLDTINTCIKKGKEWQGVYYARRKSGDSIQQHVKITPVIGQGGKIRHFVSLKKLCCTTDNNKQIHKIHRDSGDNSQTEPHSFRYKNRRKESIDVKSISSRGSDAPSLQNRRYPSMARIHSMTIEAPITKVINIINAAQENSPVTVAEALDRVLEILRTTELYSPQLGTKDEDPHTSDLVGGLMTDGLRRLSGNEYVFTKNVHQSHSHLAMPITINDVPPCISQLLDNEESWDFNIFELEAITHKRPLVYLGLKVFSRFGVCEFLNCSETTLRAWFQVIEANYHSSNAYHNSTHAADVLHATAFFLGKERVKGSLDQLDEVAALIAATVHDVDHPGRTNSFLCNAGSELAVLYNDTAVLESHHTALAFQLTVKDTKCNIFKNIDRNHYRTLRQAIIDMVLATEMTKHFEHVNKFVNSINKPMAAEIEGSDCECNPAGKNFPENQILIKRMMIKCADVANPCRPLDLCIEWAGRISEEYFAQTDEEKRQGLPVVMPVFDRNTCSIPKSQISFIDYFITDMFDAWDAFAHLPALMQHLADNYKHWKTLDDLKCKSLRLPSDS

SEQ ID NO: 13858 - protein, 761 aa, Homo sapiens
MRLTQDPIQVLLIFAKEDSQSDGFWWACDRAGYRCNIARTPESALECFLDKHHEIIVIDHRQTQNFDAEAVCRSIRATNPSEHTVILAVVSRVSDDHEEASVLPLLHAGFNRRFMENSSIIACYNELIQIEHGEVRSQFKLRACNSVFTALDHCHEAIEITSDDHVIQYVNPAFERMMGYHKGELLGKELADLPKSDKNRADLLDTINTCIKKGKEWQGVYYARRKSGDSIQQHVKITPVIGQGGKIRHFVSLKKLCCTTDNNKQIHKIHRDSGDNSQTEPHSFRYKNRRKESIDVKSISSRGSDAPSLQNRRYPSMARIHSMTIEAPITKVINIINAAQENSPVTVAEALDRVLEILRTTELYSPQLGTKDEDPHTSDLVGGLMTDGLRRLSGNEYVFTKNVHQSHSHLAMPITINDVPPCISQLLDNEESWDFNIFELEAITHKRPLVYLGLKVFSRFGVCEFLNCSETTLRAWFQVIEANYHSSNAYHNSTHAADVLHATAFFLGKERVKGSLDQLDEVAALIAATVHDVDHPGRTNSFLCNAGSELAVLYNDTAVLESHHTALAFQLTVKDTKCNIFKNIDRNHYRTLRQAIIDMVLATEMTKHFEHVNKFVNSINKPMAAEIEGSDCECNPAGKNFPENQILIKRMMIKCADVANPCRPLDLCIEWAGRISEEYFAQTDEEKRQGLPVVMPVFDRNTCSIPKSQISFIDYFITDMFDAWDAFAHLPALMQHLADNYKHWKTLDDLKCKSLRLPSDS

SEQ ID NO: 13859 - protein, 459 aa, Homo sapiens
MLRWLIGGGREPQGLAEKSPLQTIGEEQTQNPYTELLVLKAHHDIVRFLVQLDDYRFASAGDDGIVVVWNAQTGEKLLELNGHTQKITAIITFPSLESCEEKNQLILTASADRTVIVWDGDTTRQVQRISCFQSTVKCLTVLQRLDVWLSGGNDLCVWNRKLDLLCKTSHLSDTGISALVEIPKNCVVAAVGKELIIFRLVAPTEGSLEWDILEVKRLLDHQDNILSLINVNDLSFVTGSHVGELIIWDALDWTMQAYERNFWDPSPQLDTQQEIKLCQKSNDISIHHFTCDEENVFAAVGRGLYVYSLQMKRVIACQKTAHDSNVLHIARLPNRQLISCSEDGSVRIWELREKQQLAAEPVPTGFFNMWGFGRVSKQASQPVKKQQENATSCSLELIGDLIGHSSSVEMFLYFEDHGLVTCSADHLIILWKNGERESGLRSLRLFQKLEENGDLYLAV

SEQ ID NO: 13860 - protein, 926 aa, Homo sapiens
MTDNIPLQPVRQKKRMDSRPRAGCCEWLRCCGGGEARPRTVWLGHPEKRDQRYPRNVINNQKYNFFTFLPGVLFNQFKYFFNLYFLLLACSQFVPEMRLGALYTYWVPLGFVLAVTVIREAVEEIRCYVRDKEVNSQVYSRLTARGTVVGVVLYTGRELRSVMNTSNPRSKIGLFDLEVNCLTKILFGALVVVSLVMVALQHFAGRWYLQIIRFLLLFSNIIPISLRVNLDMGKIVYSWVIRRDSKIPGTVVRSSTIPEQLGRISYLLTDKTGTLTQNEMIFKRLHLGTVAYGLDSMDEVQSHIFSIYTQQSQDPPAQKGPTLTTKVRRTMSSRVHEAVKAIALCHNVTPVYESNGVTDQAEAEKQYEDSCRVYQASSPDEVALVQWTESVGLTLVGRDQSSMQLRTPGDQILNFTILQIFPFTYESKRMGIIVRDESTGEITFYMKGADVVMAGIVQYNDWLEEECGNMAREGLRVLVVAKKSLAEEQYQDFEARYVQAKLSVHDRSLKVATVIESLEMEMELLCLTGVEDQLQADVRPTLETLRNAGIKVWMLTGDKLETATCTAKNAHLVTRNQDIHVFRLVTNRGEAHLELNAFRRKHDCALVISGDSLEVCLKYYEYEFMELACQCPAVVCCRCAPTQKAQIVRLLQERTGKLTCAVGDGGNDVSMIQESDCGVGVEGKEGKQASLAADFSITQFKHLGRLLMVHGRNSYKRSAALSQFVIHRSLCISTMQAVFSSVFYFASVPLYQGFLIIGYSTIYTMFPVFSLVLDKDVKSEVAMLYPELYKDLLKGRPLSYKTFLIWVLISIYQGSTIMYGALLLFESEFVHIVAISFTSLILTELLMVALTIQTWHWLMTVAELLSLACYIASLVFLHEFIDVYFIATLSFLWKVSVITLVSCLPLYVLKYLRRRFSPPSYSKLTS

SEQ ID NO: 13861 - protein, 1047 aa, Homo sapiens
MTDNIPLQPVRQKKRMDSRPRAGCCEWLRCCGGGEARPRTVWLGHPEKRDQRYPRNVINNQKYNFFTFLPGVLFNQFKYFFNLYFLLLACSQFVPEMRLGALYTYWVPLGFVLAVTVIREAVEEIRCYVRDKEVNSQVYSRLTARGTVKVKSSNIQVGDLIIVEKNQRVPADMIFLRTSEKNGSCFLRTDQLDGETDWKLRLPVACTQRLPTAADLLQIRSYVYAEEPNIDIHNFVGTFTREDSDPPISESLSIENTLWAGTVVASGTVVGVVLYTGRELRSVMNTSNPRSKIGLFDLEVNCLTKILFGALVVVSLVMVALQHFAGRWYLQIIRFLLLFSNIIPISLRVNLDMGKIVYSWVIRRDSKIPGTVVRSSTIPEQLGRISYLLTDKTGTLTQNEMIFKRLHLGTVAYGLDSMDEVQSHIFSIYTQQSQDPPAQKGPTLTTKVRRTMSSRVHEAVKAIALCHNVTPVYESNGVTDQAEAEKQYEDSCRVYQASSPDEVALVQWTESVGLTLVGRDQSSMQLRTPGDQILNFTILQIFPFTYESKRMGIIVRDESTGEITFYMKGADVVMAGIVQYNDWLEEECGNMAREGLRVLVVAKKSLAEEQYQDFEARYVQAKLSVHDRSLKVATVIESLEMEMELLCLTGVEDQLQADVRPTLETLRNAGIKVWMLTGDKLETATCTAKNAHLVTRNQDIHVFRLVTNRGEAHLELNAFRRKHDCALVISGDSLEVCLKYYEYEFMELACQCPAVVCCRCAPTQKAQIVRLLQERTGKLTCAVGDGGNDVSMIQESDCGVGVEGKEGKQASLAADFSITQFKHLGRLLMVHGRNSYKRSAALSQFVIHRSLCISTMQAVFSSVFYFASVPLYQGFLIIGYSTIYTMFPVFSLVLDKDVKSEVAMLYPELYKDLLKGRPLSYKTFLIWVLISIYQGSTIMYGALLLFESEFVHIVAISFTSLILTELLMVALTIQTWHWLMTVAELLSLACYIASLVFLHEFIDVYFIATLSFLWKVSVITLVSCLPLYVLKYLRRRFSPPSYSKLTS

SEQ ID NO: 13862 - protein, 1047 aa, Homo sapiens; identical to SEQ ID NO: 13861

SEQ ID NO: 13863 - protein, 926 aa, Homo sapiens; identical to SEQ ID NO: 13860

SEQ ID NO: 13864 - protein, 468 aa, Homo sapiens
  VARIANT (1)...(468): Xaa = Any Amino Acid
MAQTPAFDKPKVELHVHLDGSIKPETILYYGRRRGIALPANTAEGLLNVIGMDKPLTLPDFLAKFDYYMPAIAGCREAIKRIAYEFVEMKAKEGVVYVEVRYSPHLLANSKVEPIPWNQAEGDLTPDEVVALVGQGLQEGERDFGVKARSILCCMRHQPNWSPKVVELCKKYQQQTVVAIDLAGDETIPGSSLLPGHVQAYQEAVKSGIHRTVHAGEVGSAEVVKEAVDILKTERLGHGYHTLEDQALYNRLRQENMHFEICPWSSYLTGAWKPDTEHAVIRLKNDQANYSLNTDDPLIFKSTLDTDYQMTKRDMGFTEEEFKRLNINAAKSSFLPEDEKRELLDLLYKAYGMPPSASAGRTSEDATPPSLHPVESPQLCGAEQHFYIYSFQEDHDLNSQLLMLLNPMCPFLHTRIPRHGRVTSLIMCPGQGPAPLHMGMVESETLLLWQLVLKIWCSIKKPMAGGMX

SEQ ID NO: 13865 - protein, 363 aa, Homo sapiens
MAQTPAFDKPKVELHVHLDGSIKPETILYYGRRRGIALPANTAEGLLNVIGMDKPLTLPDFLAKFDYYMPAIAGCREAIKRIAYEFVEMKAKEGVVYVEVRYSPHLLANSKVEPIPWNQAEGDLTPDEVVALVGQGLQEGERDFGVKARSILCCMRHQPNWSPKVVELCKKYQQQTVVAIDLAGDETIPGSSLLPGHVQAYQEAVKSGIHRTVHAGEVGSAEVVKEAVDILKTERLGHGYHTLEDQALYNRLRQENMHFEICPWSSYLTGAWKPDTEHAVIRLKNDQANYSLNTDDPLIFKSTLDTDYQMTKRDMGFTEEEFKRLNINAAKSSFLPEDEKRELLDLLYKAYGMPPSASAGQNL

SEQ ID NO: 13866 - protein, 1477 aa, Homo sapiens
MRGLGTCLATLAGLLLTAAGETFSGGCLFDEPYSTCGYSQSEGDDFNWEQVNTLTKPTSDPWMPSGSFMLVNASGRPEGQRAHLLLPQLKENDTHCIDFHYFVSSKSNSPPGLLNVYVKVNNGPLGNPIWNISGDPTRTWNRAELAISTFWPNFYQVIFEVITSGHQGYLAIDEVKVLGHPCTRTPHFLRIQNVEVNAGQFATFQCSAIGRTVAGDRLWLQGIDVRDAPLKEIKVTSSRRFIASFNVVNTTKRDAGKYRCMIRTEGGVGISNYAELVVKEPPVPIAPPQLASVGATYLWIQLNANSINGDGPIVAREVEYCTASGSWNDRQPVDSTSYKIGHLDPDTEYEISVLLTRPGEGGTGSPGPALRTRTKCADPMRGPRKLEVVEVKSRQITIRWEPFGYNVTRCHSYNLTVHYCYQVGGQEQVREEVSWDTENSHPQHTITNLSPYTNVSVKLILMNPEGRKESQELIVQTDEDLPGAVPTESIQGSTFEEKIFLQWREPTQTYGVITLYEITYKAVSSFDPEIDLSNQSGRVSKLGNETHFLFFGLYPGTTYSFTIRASTAKGFGPPATNQFTTKISAPSMPAYELETPLNQTDNTVTVMLKPAHSRGAPVSVYQIVVEEERPRRTKKTTEILKCYPVPIHFQNASLLNSQYYFAAEFPADSLQAAQPFTIGDNKTYNGYWNTPLLPYKSYRIYFQAASRANGETKIDCVQVATKAAIIVTQLTTPYIRIAPAAGDGQLTGAATPKPVPEPEKQTDHTVKIAGVIAGILLFVIIFLGVVLVMKKRKLAKKRKETMSSTRQEMTVMVNSMDKSYAEQGTNCDEAFSFMDTHNLNGRSVSSPSSFTMKTNTLSTSVPNSYYPDETHTMASDTSSLVQSHTYKKREPADVPYQTGQLHPAIRVADLLQHITQMKCAEGYGFKEEYESFFEGQSAPWDSAKKDENRMKNRYGNIIAYDHSRVRLQTIEGDTNSDYINGNYIDGYHRPNHYIATQGPMQETIYDFWRMVWHENTASIIMVTNLVEVGRVKCCKYWPDDTEIYKDIKVTLIETELLAEYVIRTFAVEKRGVHEIREIRQFHFTGWPDHGVPYHATGLLGFVRQVKSKSPPSAGPLVVHCSAGAGRTGCFIVIDIMLDMAEREGVVDIYNCVRELRSRRVNMVQTEEQYVFIHDAILEACLCGDTSVPASQVRSLYYDMNKLDPQTNSSQIKEEFRTLNMVTPTLRVEDCSIALLPRNHEKNRCMDILPPDRCLPFLITIDGESSNYINAALMDSYKQPSAFIVTQHPLPNTVKDFWRLVLDYHCTSVVMLNDVDPAQLCPQYWPENGVHRHGPIQVEFVSADLEEDIISRIFRIYNAARPQDGYRMVQQFQFLGWPMYRDTPVSKRSFLKLIRQVDKWQEEYNGGEGRTVVHCLNGGGRSGTFCAISIVCEMLRHQRTVDVFHAVKTLRNNKPNMVDLLDQYKFCYEVALEYLNSG

SEQ ID NO: 13867 - protein, 1452 aa, Homo sapiens
MRGLGTCLATLAGLLLTAAGETFSGGCLFDEPYSTCGYSQSEGDDFNWEQVNTLTKPTSDPWMPSGSFMLVNASGRPEGQRAHLLLPQLKENDTHCIDFHYFVSSKSNSPPGLLNVYVKVNNGPLGNPIWNISGDPTRTWNRAELAISTFWPNFYQVIFEVITSGHQGYLAIDEVKVLGHPCTRTPHFLRIQNVEVNAGQFATFQCSAIGRTVAGDRLWLQGIDVRDAPLKEIKVTSSRRFIASFNVVNTTKRDAGKYRCMIRTEGGVGISNYAELVVKEPPVPIAPPQLASVGATYLWIQLNANSINGDGPIVAREVEYCTASGSWNDRQPVDSTSYKIGHLDPDTEYEISVLLTRPGEGGTGSPGPALRTRTKCADPMRGPRKLEVVEVKSRQITIRWEPFGYNVTRCHSYNLTVHYCYQVGGQEQVREEVSWDTENSHPQHTITNLSPYTNVSVKLILMNPEGRKESQELIVQTDEDLPGAVPTESIQGSTFEEKIFLQWREPTQTYGVITLYEITYKAVSSFDPEIDLSNQSGRVSKLGNETHFLFFGLYPGTTYSFTIRASTAKGFGPPATNQFTTKISAPSMPAYELETPLNQTDNTVTVMLKPAHSRGAPVSVYQIVVEEERPRRTKKTTEILKCYPVPIHFQNASLLNSQYYFAAEFPADSLQAAQPFTIGDNKTYNGYWNTPLLPYKSYRIYFQAASRANGETKIDCVQVATKGAATPKPVPEPEKQTDHTVKIAGVIAGILLFVIIFLGVVLVMKKRKLAKKRKETMSSTRQEMTVMVNSMDKSYAEQGTNCDEAFSFMDTHNLNGRSVSSPSSFTMKTNTLSTSVPNSYYPDETHTMASDTSSLVQSHTYKKREPADVPYQTGQLHPAIRVADLLQHITQMKCAEGYGFKEEYESFFEGQSAPWDSAKKDENRMKNRYGNIIAYDHSRVRLQTIEGDTNSDYINGNYIDGYHRPNHYIATQGPMQETIYDFWRMVWHENTASIIMVTNLVEVGRVKCCKYWPDDTEIYKDIKVTLIETELLAEYVIRTFAVEKRGVHEIREIRQFHFTGWPDHGVPYHATGLLGFVRQVKSKSPPSAGPLVVHCSAGAGRTGCFIVIDIMLDMAEREGVVDIYNCVRELRSRRVNMVQTEEQYVFIHDAILEACLCGDTSVPASQVRSLYYDMNKLDPQTNSSQIKEEFRTLNMVTPTLRVEDCSIALLPRNHEKNRCMDILPPDRCLPFLITIDGESSNYINAALMDSYKQPSAFIVTQHPLPNTVKDFWRLVLDYHCTSVVMLNDVDPAQLCPQYWPENGVHRHGPIQVEFVSADLEEDIISRIFRIYNAARPQDGYRMVQQFQFLGWPMYRDTPVSKRSFLKLIRQVDKWQEEYNGGEGRTVVHCLNGGGRSGTFCAISIVCEMLRHQRTVDVFHAVKTLRNNKPNMVDLLDQYKFCYEVALEYLNSG

SEQ ID NO: 13868 - protein, 197 aa, Homo sapiens [sequence omitted]

SEQ ID NO: 13869 - protein, 1452 aa, Homo sapiens; identical to SEQ ID NO: 13867

SEQ ID NO: 13870 - protein, 117 aa, Homo sapiens
MLNNGTKTDMLGLGTWKSPPGQVAEAVKVAINTVYRHIDCSHVHQNKDQEQLKEQVVRREWLFIISKPWGICHRKCLRNLVVTPTSVTLDRIAENFKVFDFELSSQDMTSLLSCNRN

SEQ ID NO: 13871 - protein, 124 aa, Homo sapiens
MLNNGTKTDMLGLGTWKSPPGQVAEAVKVAINTVYRHIDCSHVHQNKDQEQLKEQVVRREWLFIISKPWGICHRKCLVRGSCRKVLSGLELDYLDLHLIHWPTGCHPGKEFSFLDESGNSFRGW

SEQ ID NO: 13872 - protein, 493 aa, Homo sapiens [sequence omitted]

SEQ ID NO: 13873 - protein, 130 aa, Homo sapiens [sequence omitted]

SEQ ID NO: 13874 - protein, 875 aa, Homo sapiens
MERAGPSFGQQRQQQQPQQQKQQQRDQDSVEAWLDDHWDFTFSYFVRKATREMVNAWFAERVHTIPVCKEGIRGHTESCSCPLQQSPRADNSAPGTPTRKISASEFDRPLRPIVVKDSEGTVSFLSDSEKKEQMPLTPPRFDHDEGDQCSRLLELVKDISSHLDVTALCHKIFLHIHGLISADRYSLFLVCEDSSNDKFLISRLFDVAEGSTLEEVSNNCIRLEWNKGIVGHVAALGEPLNIKDAYEDPRFNAEVDQITGYKTQSILCMPIKNHREEVVGVAQAINKKSGNGGTFTEKDEKDFAAYLAFCGIVLHNAQLYETSLLENKRNQVLLDLASLIFEEQQSLEVILKKIAATIISFMQVQKCTIFIVDEDCSDSFSSVFHMECEELEKSSDTLTREHDANKINYMYAQYVKNTMEPLNIPDVSKDKRFPWTTENTGNVNQQCIRSLLCTPIKNGKKNKVIGVCQLVNKMEENTGKVKPFNRNDEQFLEAFVIFCGLGIQNTQMYEAVERAMAKQMVTLEVLSYHASAAEEETRELQSLAAAVVPSAQTLKITDFSFSDFELSDLETALCTIRMFTDLNLVQNFQMKHEVLCRWILSVKKNYRKNVAYHNWRHAFNTAQCMFAALKAGKIQNKLTDLEILALLIAALSHDLDHRGVNNSYIQRSEHPLAQLYCHSIMEHHHFDQCLMILNSPGNQILSGLSIEEYKTTLKIIKQAILATDLALYIKRRGEFFELIRKNQFNLEDPHQKELFLAMLMTACDLSAITKPWPIQQRIAELVATEFFDQGDRERKELNIEPTDLMNREKKNKIPSMQVGFIDAICLQLYEALTHVSEDCFPLLDGCRKNRQKWQALAEQQEKMLINGESGQAKRN

SEQ ID NO: 13875 - protein, 823 aa, Homo sapiens
MVNAWFAERVHTIPVCKEGIRGHTESCSCPLQQSPRADNSAPGTPTRKISASEFDRPLRPIVVKDSEGTVSFLSDSEKKEQMPLTPPRFDHDEGDQCSRLLELVKDISSHLDVTALCHKIFLHIHGLISADRYSLFLVCEDSSNDKFLISRLFDVAEGSTLEEVSNNCIRLEWNKGIVGHVAALGEPLNIKDAYEDPRFNAEVDQITGYKTQSILCMPIKNHREEVVGVAQAINKKSGNGGTFTEKDEKDFAAYLAFCGIVLHNAQLYETSLLENKRNQVLLDLASLIFEEQQSLEVILKKIAATIISFMQVQKCTIFIVDEDCSDSFSSVFHMECEELEKSSDTLTREHDANKINYMYAQYVKNTMEPLNIPDVSKDKRFPWTTENTGNVNQQCIRSLLCTPIKNGKKNKVIGVCQLVNKMEENTGKVKPFNRNDEQFLEAFVIFCGLGIQNTQMYEAVERAMAKQMVTLEVLSYHASAAEEETRELQSLAAAVVPSAQTLKITDFSFSDFELSDLETALCTIRMFTDLNLVQNFQMKHEVLCRWILSVKKNYRKNVAYHNWRHAFNTAQCMFAALKAGKIQNKLTDLEILALLIAALSHDLDHRGVNNSYIQRSEHPLAQLYCHSIMEHHHFDQCLMILNSPGNQILSGLSIEEYKTTLKIIKQAILATDLALYIKRRGEFFELIRKNQFNLEDPHQKELFLAMLMTACDLSAITKPWPIQQRIAELVATEFFDQGDRERKELNIEPTDLMNREKKNKIPSMQVGFIDAICLQLYEALTHVSEDCFPLLDGCRKNRQKWQALAEQQEKMLINGESGQAKRN

SEQ ID NO: 13876 - protein, 921 aa, Homo sapiens [sequence omitted]

SEQ ID NO: 13877 - protein, 865 aa, Homo sapiens [sequence omitted]

SEQ ID NO: 13878 - protein, 530 aa, Homo sapiens
MSMPDAMPLPGVGEELKQAKEIEDAEKYSFMATVTKAPKKQIQFADDMQEFTKFPTKTGRRSLSRSISQSSTDSYSSAASYTDSSDDEVSPREKQQTNSKGSSNFCVKNIKQAEFGRREIEIAEQDMSALISLRKRAQGEKPLAGAKIVGCTHITAQTAVLIETLCALGAQCRWSACNIYSTQNEVAAALAEAGVAVFAWKGESEDDFWWCIDRCVNMDGWQANMILDDGGDLTHWVYKKYPNVFKKIRGIVEESVTGVHRLYQLSKAGKLCVPAMNVNDSVTKQKFDNLYCCRESILDGLKRTTDVMFGGKQVVVCGYGEVGKGCCAALKALGAIVYITEIDPICALQACMDGFRVVKLNEVIRQVDVVITCTGNKNVVTREHLDRMKNSCIVCNMGHSNTEIDVTSLRTPELTWERVRSQVDHVIWPDGKRVVLLAEGRLLNLSCSTVPTFVLSITATTQALALIELYNAPEGRYKQDVYLLPKKMDEYVASLHLPSFDAHLTELTDDQAKYLGLNKNGPFKPNYYRY

SEQ ID NO: 13879 - protein, 553 aa, Homo sapiens [sequence omitted]

SEQ ID NO: 13880 - protein, 530 aa, Homo sapiens; identical to SEQ ID NO: 13878

SEQ ID NO: 13881 - protein, 79 aa, Homo sapiens
MPLESETELIPGLSLTFPGSSTQFELLHSSHLCSVHHSHNTGMWQNACLHCTAICGTGRRSVPVRVYCTMFSSSYSFLM

SEQ ID NO: 13882 - protein, 483 aa, Homo sapiens
MQEFTKFPTKTGRRSLSRSISQSSTDSYSSAASYTDSSDDEVSPREKQQTNSKGSSNFCVKNIKQAEFGRREIEIAEQDMSALISLRKRAQGEKPLAGAKIVGCTHITAQTAVLIETLCALGAQCRWSACNIYSTQNEVAAALAEAGVAVFAWKGESEDDFWWCIDRCVNMDGWQANMILDDGGDLTHWVYKKYPNVFKKIRGIVEESVTGVHRLYQLSKAGKLCVPAMNVNDSVTKQKFDNLYCCRESILDGLKRTTDVMFGGKQVVVCGYGEVGKGCCAALKALGAIVYITEIDPICALQACMDGFRVVKLNEVIRQVDVVITCTGNKNVVTREHLDRMKNSCIVCNMGHSNTEIDVTSLRTPELTWERVRSQVDHVIWPDGKRVVLLAEGRLLNLSCSTVPTFVLSITATTQALALIELYNAPEGRYKQDVYLLPKKMDEYVASLHLPSFDAHLTELTDDQAKYLGLNKNGPFKPNYYRY

SEQ ID NO: 13883 - protein, 481 aa, Homo sapiens
MPLPGVGEELKQAKEIEDAEKYSFMATVTKAPKKQIQFADDMQEFTKFPTKTGRRSLSRSISQSSTDSYSSAASYTDSSDDEVSPREKQQTNSKGSSNFCVKNIKQAEFGRREIEIAEQDMSALISLRKRAQGEKPLAGAKIVGCTHITAQTAVLIETLCALGAQCRWSACNIYSTQNEVAAALAEAGVAVFAWKGESEDDFWWCIDRCVNMDGWQANMILDDGGDLTHWVYKKYPNVFKKIRGIVEESVTGVHRAAWNLKRIRQILPQIMLCQLTWFLFVFVTSSLFRLYQLSKAGKLCVPAMNVNDSVTKQKFDNLYCCRESILDGLKRTTDVMFGGKQVVVCGYGEVGKGCCAALKALGAIVYITEIDPICALQACMDGFRVVKLNEVIRQVDVVITCTGNKNVVTREHLDRMKNSCIVCNMGHSNTEIDVTSLRTPELTWERVRSQVDHVIWPDGKRVVLLAEVHTEKDPGRAAQAE

SEQ ID NO: 13884 - protein, 432 aa, Homo sapiens [sequence omitted]

SEQ ID NO: 13885 - protein, 824 aa, Homo sapiens [sequence omitted]

SEQ ID NO: 13886 - protein, 37 aa, Homo sapiens
MCFWMTAWTREFSFWETDWAMKCTFLLCRGWKGKNDG

SEQ ID NO: 13887 - protein, 138 aa, Homo sapiens
MKGLLPLAWFLACSVPAVQGGLLDLKSMIEKVTGKNALTNYGFYGCYCGWGGRGTPKDGTDWCCWAHDHCYGRLEEKGCNIRTQSYKYRFAWGVVTCEPGPFCHVNLCACDRKLVYCLKRNLRSYNPQYQYFPNILCS

SEQ ID NO: 13888 - protein, 152 aa, Homo sapiens
MLIATSFFLFFSSVVAAPTHSSFWQFQRRVKHITGRSAFFSYYGYGCYCGLGDKGIPVDDTDRHSPSSPSPYEKLKEFSCQPVLNSYQFHIVNGAVVCGCTLGPGASCHCRLKACECDKQSVHCFKESLPTYEKNFKQFSSQPRCGRHKPWC

SEQ ID NO: 13889 - protein, 154 aa, Homo sapiens
MLLVHLPSPQPGMKSPHVLVFLCLLVALVTGNLVQFGVMIEKMTGKSALQYNDYGCYCGIGGSHWPVDQTDWCCHAHDCCYGRLEKLGCEPKLEKYLFSVSERGIFCAGRTTCQRLTCECDKRAALCFRRNLGTYNRKYAHYPNKLCTGPTPPC

SEQ ID NO: 13890 - protein, 211 aa, Homo sapiens
MADGAKANPKGFKKKVLDRCFSGWRGPRFGASCPSRTSRSSLGMKKFFTVAILAGSVLSTAHGSLLNLKAMVEAVTGRSAILSFVGYGCYCGLGGRGQPKDEVDWCCHAHDCCYQELFDQGCHPYVDHYDHTIENNTEIVCSDLNKTECDKQTCMCDKNMVLCLMNQTYREEYRGFLNVYCQGPTPNCSIYEPPPEEVTCSHQSPAPPAPP

SEQ ID NO: 13891 - protein, 168 aa, Homo sapiens
MKKFFTVAILAGSVLSTAHGSLLNLKAMVEAVTGRSAILSFVGYGCYCGLGGRGQPKDEVDWCCHAHDCCYQELFDQGCHPYVDHYDHTIENNTEIVCSDLNKTECDKQTCMCDKNMVLCLMNQTYREEYRGFLNVYCQGPTPNCSIYEPPPEEVTCSHQSPAPPAPP

SEQ ID NO: 13892 - protein, 168 aa, Homo sapiens; identical to SEQ ID NO: 13891

SEQ ID NO: 13893 - protein, 316 aa, Homo sapiens [sequence omitted]

SEQ ID NO: 13894 - protein, 147 aa, Homo sapiens
MWKFPGGLSEPEEDIGDTAVREVFEETGIKSEFRSVLSIRQQHTNPGAFGKSDMYIICRLKPYSFTINFCQEECLRCEWMDLNDLAKTENTTPITSRVARLLLYGYREGFDKIDLTVEELPAVYTGLFYKLYHKELPENYKTMKGID

SEQ ID NO: 13895 - protein, 252 aa, Homo sapiens [sequence omitted]

SEQ ID NO: 13896 - protein, 313 aa, Homo sapiens [sequence omitted]

SEQ ID NO: 13897 - protein, 556 aa, Homo sapiens
MELCGLGLPRPPMLLALLLATLLAAMLALLTQVALVVQVAEAARAPSVSAKPGPALWPLPLSVKMTPNLLHLAPENFYISHSPNSTAGPSCTLLEEAFRRYHGYIFGFYKWHHEPAEFQAKTQVQQLLVSITLQSECDAFPNISSDESYTLLVKEPVAVLKANRVWGALRGLETFSQLVYQDSYGTFTINESTIIDSPRFSHRGILIDTSRHYLPVKIILKTLDAMAFNKFNVLHWHIVDDQSFPYQSITFPELSNKGSYSLSHVYTPNDVRMVIEYARLRGIRVLPEFDTPGHTLSWGKGQKDLLTPCYSRQNKLDSFGPINPTLNTTYSFLTTFFKEISEVFPDQFIHLGGDEVEFKCWESNPKIQDFMRQKGFGTDFKKLESFYIQKVLDIIATINKGSIVWQEVFDDKAKLAPGTIVEVWKDSAYPEELSRVTASGFPVILSAPWYLDLISYGQDWRKYYKVEPLDFGGTQKQKQLFIGGEACLWGEYVDATNLTPRLWPRASAVGERLWSSKDVRDMDDAYDRLTRHRCRMVERGIAAQPLYAGYCNHENM

SEQ ID NO: 13898 - protein, 556 aa, Homo sapiens; identical to SEQ ID NO: 13897

SEQ ID NO: 13899 - protein, 811 aa, Homo sapiens
MKREWIQGQAWWLTPVIPALWEAETVTVWRIKMLTNLRIFAMSHQTIPSVYINNICCYKIRASLKRLKPHVPLGRNCSSLPGLIGNDIKSLHSIINPPIAKIRNIGIMAHIDAGKTTTTERILYYSGYTRSLGDVDDGDTVTDFMAQERERGITIQSAAVTFDWKGYRVNLIDTPGHVDFTLEVERCLRVLDGAVAVFDASAGVEAQTLTVWRQADKHNIPRICFLNKMDKTGASFKYAVESIREKLKAKPLLLQLPIGEAKTFKGVVDVVMKEKLLWNCNSNDGKDFERKPLLEMNDPELLKETTEARNALIEQVADLDDEFADLVLEEFSENFDLLPAEKLQTAIHRVTLAQTAVPVLCGSALKNKGIQPLLDAVTMYLPSPEERNYEFLQWYKDDLCALAFKVLHDKQRGPLVFMRIYSGTIKPQLAIHNINGNCTERISRLLLPFADQHVEIPSLTAGNIALTVGLKHTATGDTIVSSKSSALAAARRAEREGEKKHRQNNEAERLLLAGVEIPEPVFFCTIEPPSLSKQPDLEHALKCLQREDPSLKVRLDPDSGQTVLCGMGELHIEIIHDRIKREYGLETYLGPLQVAYRETILNSVRATDTLDRTLGDKRHLVTVEVEARPIETSSVMPVIEFEYAESINEGLLKVSQEAIENGIHSACLQGPLLGSPIQDVAITLHSLTIHPGTSTTMISACVSRCVQKALKKADKQVLEPLMNLEVTVARDYLSPVLADLAQRRGNIQEIQTRQDNKVVIGFVPLAEIMGYSTVLRTLTSGSATFALELSTYQAMNPQDQNTLLNRRSGLT

SEQ ID NO: 13900 - protein, 779 aa, Homo sapiens
MLTNLRIFAMSHQTIPSVYINNICCYKIRASLKRLKPHVPLGRNCSSLPGLIGNDIKSLHSIINPPIAKIRNIGIMAHIDAGKTTTTERILYYSGYTRSLGDVDDGDTVTDFMAQERERGITIQSAAVTFDWKGYRVNLIDTPGHVDFTLEVERCLRVLDGAVAVFDASAGVEAQTLTVWRQADKHNIPRICFLNKMDKTGASFKYAVESIREKLKAKPLLLQLPIGEAKTFKGVVDVVMKEKLLWNCNSNDGKDFERKPLLEMNDPELLKETTEARNALIEQVADLDDEFADLVLEEFSENFDLLPAEKLQTAIHRVTLAQTAVPVLCGSALKNKGIQPLLDAVTMYLPSPEERNYEFLQWYKDDLCALAFKVLHDKQRGPLVFMRIYSGTIKPQLAIHNINGNCTERISRLLLPFADQHVEIPSLTAGNIALTVGLKHTATGDTIVSSKSSALAAARRAEREGEKKHRQNNEAERLLLAGVEIPEPVFFCTIEPPSLSKQPDLEHALKCLQREDPSLKVRLDPDSGQTVLCGMGELHIEIIHDRIKREYGLETYLGPLQVAYRETILNSVRATDTLDRTLGDKRHLVTVEVEARPIETSSVMPVIEFEYAESINEGLLKVSQEAIENGIHSACLQGPLLGSPIQDVAITLHSLTIHPGTSTTMISACVSRCVQKALKKADKQVLEPLMNLEVTVARDYLSPVLADLAQRRGNIQEIQTRQDNKVVIGFVPLAEIMGYSTVLRTLTSGSATFALELSTYQAMNPQDQNTLLNRRSGLT

SEQ ID NO: 13901 - protein, 732 aa, Homo sapiens
MLTNLRIFAMSHQTIPSVYINNICCYKIRASLKRLKPHVPLGRNCSSLPGLIGNDIKSLHSIINPPIAKIRNIGIMAHIDAGKTTTTERILYYSGYTRSLGDVDDGDTVTDFMAQERERGITIQSAAVTFDWKGYRVNLIDTPGHVDFTLEVERCLRVLDGAVAVFDASAGVEAQTLTVWRQADKHNIPRICFLNKMDKTGASFKYAVESIREKLKAKPLLLQLPIGEAKTFKGVVDVVMKEKLLWNCNSNDGKDFERKPLLEMNDPELLKETTEARNALIEQVADLDDEFADLVLEEFSENFDLLPAEKLQTAIHRVTLAQTAVPVLCGSALKNKGIQPLLDAVTMYLPSPEERNYEFLERISRLLLPFADQHVEIPSLTAGNIALTVGLKHTATGDTIVSSKSSALAAARRAEREGEKKHRQNNEAERLLLAGVEIPEPVFFCTIEPPSLSKQPDLEHALKCLQREDPSLKVRLDPDSGQTVLCGMGELHIEIIHDRIKREYGLETYLGPLQVAYRETILNSVRATDTLDRTLGDKRHLVTVEVEARPIETSSVMPVIEFEYAESINEGLLKVSQEAIENGIHSACLQGPLLGSPIQDVAITLHSLTIHPGTSTTMISACVSRCVQKALKKADKQVLEPLMNLEVTVARDYLSPVLADLAQRRGNIQEIQTRQDNKVVIGFVPLAEIMGYSTVLRTLTSGSATFALELSTYQAMNPQDQNTLLNRRSGLT

SEQ ID NO: 13902 - protein, 779 aa, Homo sapiens; identical to SEQ ID NO: 13900

SEQ ID NO: 13903 - protein, 457 aa, Homo sapiens
MLLRAAWRRAAVAVTAAPGPKPAAPTRGLRLRVGDRAPQSAVPADTAAAPEVGPVLRPLYMDVQATTPLDPRVLDAMLPYLINYYGNPHSRTHAYGWESEAAMERARQQVASLIGADPREIIFTSGATESNNIAIKGVARFYRSRKKHLITTQTEHKCVLDSCRSLEAEGFQVTYLPVQKSGIIDLKELEAAIQPDTSLVSVMTVNNEIGVKQPIAEIGRICSSRKVYFHTDAAQAVGKIPLDVNDMKIDLMSISGHKIYGPKGVGAIYIRRRPRVRVEALQSGGGQERGMRSGTVPTPLVVGLGAACEVAQQEMEYDHKRISKLSERLIQNIMKSLPDVVMNGDPKHHYPGCINLSFAYVEGESLLMALKDVALSSGSACTSASLEPSYVLRAIGTDEDLAHSSIRFGIGRFTTEEEVDYTVEKCIQHVKRLREMSPLWEMVQDGIDLKSIKWTQH

SEQ ID NO: 13904 - protein, 457 aa, Homo sapiens; identical to SEQ ID NO: 13903

SEQ ID NO: 13905 - protein, 254 aa, Homo sapiens
MIRYRSLGLVAAYVLSLWLITSFLHQHSSQKDLRNMAKIHPGICHHPSNFSRKCNCSSEVHTCSACLHVPGESDWFDRRFDSTVEPLQRPQDPTSNDALILWLGLERVKSEKEVENKQQQLIKAPPLCPLGHVVSNCRVCAVVGNSRFQTVQVPGGTEDSKDKVLVISLYFLRYIQESWLENHGQYPSLEFVALLYALHTCDQVSLFGFGEDNCKRWSHYWDDKYWFENTMQNFPAEYQIILKLQCERKIAVYG

SEQ ID NO: 13906 - protein, 314 aa, Homo sapiens
MSRVPAFLSAAEVEEHLRSSSLLIPPLETALANFSSGPEGGVMQPVRTVVPVTKHRGYLGVMPAYSAAEDALTTKLVTFYEDRGITSVVPSHQATVLLFEPSNGTLLAVMDGNVITAKRTAAVSAIATKFLKPPSSEVLCILGAGVQAYSHYEIFTEQFSFKEVRIWNRTKENAEKFADTVQGEVRVCSSVQEAVAGADVIITVTLATEPILFGEWVKPGAHINAVGASRPDWRELDDELMKEAVLYVDSQEAALKESGDVLLSGAEIFAELGEVIKGVKPAHCEKTTVFKSLGMAVEDTVAAKLIYDSWSSGK

SEQ ID NO: 13907 - protein, 279 aa, Homo sapiens
MQPVRTVVPVTKHRGYLGVMPAYSAAEDALTTKLVTFYEDRGITSVVPSHQATVLLFEPSNGTLLAVMDGNVITAKRTAAVSAIATKFLKPPSSEVLCILGAGVQAYSHYEIFTEQFSFKEVRIWNRTKENAEKFADTVQGEVRVCSSVQEAVAGADVIITVTLATEPILFGEWVKPGAHINAVGASRPDWRELDDELMKEAVLYVDSQEAALKESGDVLLSGAEIFAELGEVIKGVKPAHCEKTTVFKSLGMAVEDTVAAKLIYDSWSSAAPISLNLK

SEQ ID NO: 13908 - protein, 314 aa, Homo sapiens; identical to SEQ ID NO: 13906

SEQ ID NO: 13909 - protein, 691 aa, Homo sapiens
MATKRLARQLGLIRRKSIAPANGNLGRSKSKQLFDYLIVIDFESTCWNDGKHHHSQEIIEFPAVLLNTSTGQIDSEFQAYVQPQEHPILSEFCMELTGIKQAQVDEGVPLKICLSQFCKWIHKIQQQKNIIFATGISEPSASEVKLCAFVTWSDWDLGVCLEYECKRKQLLKPVFLNSWIDLRATYKLFYRRKPKGLSGALQEVGIEFSGREHSGLDDSRNTALLAWKMIRDGCVMKITRSLNKVPTKKNFSILARNLNTIQVEEMSACNISIQGPSIYNKEPKNIINPHEKVQMKSICANSPIKAQQDQLQVKNNIKASLHNVKSSLPLFNTKSSTSVGQLQSPTLNSPIYMQKQGKNEHLAFNTKSKASTVGSELVLVSTTVPTVHHVSDLEMSSTLDCLPVLADWEDVVLLPASQPEENVDCTVPISDSDLEISFNSGERLMVLKELEMSSHENFGDIEETPQKSETSKSIVYKSPHTTIYNVKEAKDPGSDISAFKLPEHKSSTFNRVNANMSHPLVLGKHPLLSGGTKRNPCSPQAFPPAKKQPFTIHEEKPTSSDCSPVRSSSWRRLPSILTSTVNLQEPWKSGKMTPPLCKCGRRSKRLVVSNNGPNHGKVFYCCPIGKYQENRKCCGYFKWEQTLQKERANSMVPSHSTGGLTFSSPETSHICDRNLSISTKNSLRLRPSMRN

SEQ ID NO: 13910 - protein, 573 aa, Homo sapiens
MSQLHFYRFYLEFGCLRKAFRHKFRLPPPSSDFLADVVGLQTEQRAGDLPKTMEGPLPSNAKAAINLQDDPIIQKYGSKKVGLTRCLLTKEEMRTFHFPLQGFPDCENFLLTKCNGSIADNSPLFGLDCEMARTTFNFSIGVLQAECLTSKGRELTRISLVAEGGCCVMDELVKPENKILDYLTSFSGITKKILNPVTTKLKDVQRQLKALLPPDAVLVGHSLDLDLRALKMIHPYVIDTSLLYVREQGRRFKLKFLAKVILGKDIQCPDRLGHDATEDARTILELARYFLKHGPKKIAELNLEALANHQEIQAAGQEPKNTAEVLQHPNTSVLECLDSVGQKLLFLTRETDAGELPSSRNCQTIKCLSNKEVQRPVTELTLDCDTLVNELEGDSENQGSIYLSGVSETFKEQLLQEPRLFLGLEAVILPKDLKSGKQKKYCFLKFKSFGSAQQALNILTGKDWKLKGRHALTPRHLHAWLRGLPPESTRLPGLRVVPPPFEQEALQTLKLDHPKIAAWRWSRKIGKLYNSLCPGTLCLILLPGTKSTHGSLSGLGLMGIKEEEESAGPGLCS

SEQ ID NO: 13911 - protein, 774 aa, Homo sapiens
MEPEREGTERHPRKVRESRQAPNKLVGAAEAMKAGWDLEESQPEAKKARLSTILFTDNCEVTHDQLCELLKYAVLGKSNVPKPSWCQLFHQNHLNNVVVFVLQGMSQLHFYRFYLEFGCLRKAFRHKFRLPPPSSDFLADVVGLQTEQRAGDLPKTMEGPLPSNAKAAINLQDDPIIQKYGSKKVGLTRCLLTKEEMRTFHFPLQGFPDCENFLLTKCNGSIADNSPLFGLDCEMCLTSKGRELTRISLVAEGGCCVMDELVKPENKILDYLTSFSGITKKILNPVTTKLKDVQRQLKALLPPDAVLVGHSLDLDLRALKMIHPYVIDTSLLYVREQGRRFKLKFLAKVILGKDIQCPDRLGHDATEDARTILELARYFLKHGPKKIAELNLEALANHQEIQAAGQEPKNTAEVLQHPNTSVLECLDSVGQKLLFLTRETDAGELPSSRNCQTIKCLSNKEVLEQARVEIPLFPFSIVQFSFKAFSPVLTEEMNKRMRIKWTEISTVYAGPFSKNCNLRALKRLFKSFGPVQSMTFVLETRQPHLCIQYEVLEAAQLAIESLDGILVDGICIKVQRPVTELTLDCDTLVNELEGDSENQGSIYLSGVSETFKEQLLQEPRLFLGLEAVILPKDLKSGKQKKYCFLKFKSFGSAQQALNILTGKDWKLKGRHALTPRHLHAWLRGLPPESTRLPGLRVVPPPFEQEALQTLKLDHPKIAAWRWSRKIGKLYNSLCPGTLCLILLPGTKSTHGSLSGLGLMGIKEEEESAGPGLCS

SEQ ID NO: 13912 - protein, 1155 aa, Homo sapiens
MAVCAKKRPPEEERRARANDREYNEKFQYASNCIKTSKYNILTFLPVNLFEQFQEVANTYFLFLLILQLIPQISSLSWFTTIVPLVLVLTITAVKDATDDYFRHKSDNQVNNRQSQVLINGILQQEQWMNVCVGDIIKLENNQFVAAVDWTLSSGILVSCSGEVICEPPNNKLDKFSGTLYWKENKFPLSNQNMLLRGCVLRNTEWCFGLVIFAGPDTKLMQNSGRTKFKRTSIDRLMNTLVLWIFGFLVCMGVILAIGNAIWEHEVGMRFQVYLPWDEAVDSAFFSGFLSFWSYIIILNTVVPISLYVSVEVIRLGHSYFINWDKKMFCMKKRTPAEARTTTLNEELGQVEYIFSDKTGTLTQNIMVFNKCSINGHSYGDVFDVLGHKAELGERPEPVDFSFNPLADKKFLFWDPSLLEAVKIGDPHTHEFFRLLSLCHTVMSEEKNEGELYYKAQSPDEGALVTAARNFGFVFRSRTPKTITVHEMGTAITYQLLAILDFNNIRKRMSVIVRNPEGKIRLYCKGADTILLDRLHHSTQELLNTTMDHLNEYAGEGLRTLVLAYKDLDEEYYEEWAERRLQASLAQDSREDRLASIYEEVENNMMLLGATAIEDKLQQGVPETIALLTLANIKIWVLTGDKQETAVNIGYSCKMLTDDMTEVFIVTGHTVLEVREELRKAREKMMDSSRSVGNGFTYQDKLSSSKLTSVLEAVAGEYALVINGHSLAHALEADMELEFLETACACKAVICCRVTPLQKAQVVELVKKYKKAVTLAIGDGANDVSMIKTAHIGVGISGQEGIQAVLASDYSFSQFKFLQRLLLVHGRWSYLRMCKFLCYFFYKNFAFTMVHFWFGFFCGFSAQTVYDQYFITLYNIVYTSLPVLAMGVFDQDVPEQRSMEYPKLYEPGQLNLLFNKREFFICIAQGIYTSVLMFFIPYGVFADATRDDGTQLADYQSFAVTVATSLVIVVSVQIGLDTGYWTAINHFFIWGSLAVYFAILFAMHSNGLFDMFPNQFRFVGNAQNTLAQPTVWLTIVLTTVVCIMPVVAFRFLRLNLKPDLSDTVRYTQLVRKKQKAQHRCMRRVGRTGSRRSGYAFSHQEGFGELIMSGKNMRLSSLALSSFTTRSSSSWIESLRRKKSDSASSPSGGADKPLKG

SEQ ID NO: 13913 - protein, 381 aa, Homo sapiens
MTVPKEMPEKWARAQAPPSWSRKKPSWGTEEERRARANDREYNEKFQYASNCIKTSKYNILTFLPVNLFEQFQEVANTYFLFLLILQLIPQISSLSWFTTIVPLVLVLTITAVKDATDDYFRHKSDNQVNNRQSQVLINGILQQEQWMNVCVGDIIKLENNQFVAADLLLLSSSEPHGLCYIETAELDGETNMKVRQAIPVTSELGDISKLAKFDGEVICEPPNNKLDKFSGTLYWKENKFPLSNQNMLLRGCVLRNTEWCFGLVIFAGPDTKLMQNSGRTKFKRTSIDRLMNTLVLWIFGFLVCMGVILAIGNAIWEHEVGMRFQVYLPWDEAVDSAFFSGFLSFWSYIIILNTVVPISLYVSPECGGHPSGPQLLHQLG

SEQ ID NO: 13914 - protein, 1164 aa, Homo sapiens
MAVCAKKRPPEEERRARANDREYNEKFQYASNCIKTSKYNILTFLPVNLFEQFQEVANTYFLFLLILQLIPQISSLSWFTTIVPLVLVLTITAVKDATDDYFRHKSDNQVNNRQSQVLINGILQQEQWMNVCVGDIIKLENNQFVAAVDWTLSSGILVSCSGEVICEPPNNKLDKFSGTLYWKENKFPLSNQNMLLRGCVLRNTEWCFGLVIFAGPDTKLMQNSGRTKFKRTSIDRLMNTLVLWIFGFLVCMGVILAIGNAIWEHEVGMRFQVYLPWDEAVDSAFFSGFLSFWSYIIILNTVVPISLYVSVEVIRLGHSYFINWDKKMFCMKKRTPAEARTTTLNEELGQVEYIFSDKTGTLTQNIMVFNKCSINGHSYGDVFDVLGHKAELGERPEPVDFSFNPLADKKFLFWDPSLLEAVKIGDPHTHEFFRLLSLCHTVMSEEKNEGELYYKAQSPDEGALVTAARNFGFVFRSRTPKTITVHEMGTAITYQLLAILDFNNIRKRMSVIVRNPEGKIRLYCKGADTILLDRLHHSTQELLNTTMDHLNVGEYAGEGLRTLVLAYKDLDEEYYEEWAERRLQASLAQDSREDRLASIYEEVENNMMESLWYFQLLGATAIEDKLQQGVPETIALLTLANIKIWVLTGDKQETAVNIGYSCKMLTDDMTEVFIVTGHTVLEVREELRKAREKMMDSSRSVGNGFTYQDKLSSSKLTSVLEAVAGEYALVINGHSLAHALEADMELEFLETACACKAVICCRVTPLQKAQVVELVKKYKKAVTLAIGDGANDVSMIKTAHIGVGISGQEGIQAVLASDYSFSQFKFLQRLLLVHGRWSYLRMCKFLCYFFYKNFAFTMVHFWFGFFCGFSAQTVYDQYFITLYNIVYTSLPVLAMGVFDQDVPEQRSMEYPKLYEPGQLNLLFNKREFFICIAQGIYTSVLMFFIPYGVFADATRDDGTQLADYQSFAVTVATSLVIVVSVQIGLDTGYWTAINHFFIWGSLAVYFAILFAMHSNGLFDMFPNQFRFVGNAQNTLAQPTVWLTIVLTTVVCIMPVVAFRFLRLNLKPDLSDTVRYTQLVRKKQKAQHRCMRRVGRTGSRRSGYAFSHQEGFGELIMSGKNMRLSSLALSSFTTRSSSSWIESLRRKKSDSASSPSGGADKPLKG

SEQ ID NO: 13915 - protein, 299 aa, Homo sapiens
MADSETFISLEECRGHKRARKRTSMETALALEKLFPKQCQVLGIVTPGIVVTPMGSGSNRPQEIEIGESGFALLFPQIEGIKIQPFHFIKDPKNLTLERHQLTEVGLLDNPELRVVLVFGYNCCKVGASNYLQQVVSTFSDMNIILAGGQVDNLSSLTSEKNPLDIDASGVVGLSFSGHRIQSATVLLNEDVSDEKTAEAAMQRLKAANIPEHNTIGFMFACVGRGFQYYRAKGNVEADAFRKFFPSVPLFGFFGNGEIGCDRIVTGNFILRKCNEVKDDDLFHSYTTIMALIHLGSSK

SEQ ID NO: 13916 - protein, 403 aa, Homo sapiens
MEPVGCCGECRGSSVDPRSTFVLSNLAEVVERVLTFLPAKALLRVACVCRLWRECVRRVLRTHRSVTWISAGLAEAGHLEGHCLVRVVAEELENVRILPHTVLYMADSETFISLEECRGHKRARKRTSMETALALEKLFPKQCQVLGIVTPGIVVTPMGSGSNRPQEIEIGESGFALLFPQIEGIKIQPFHFIKDPKNLTLERHQLTEVGLLDNPELRVVLVFGYNCCKVGASNYLQQVVSTFSDMNIILAGGQVDNLSSLTSEKNPLDIDASGVVGLSFSGHRIQSATVLLNEDVSDEKTAEAAMQRLKAANIPEHNTIGFMFACVGRGFQYYRAKGNVEADAFRKFFPSVPLFGFFGNGEIGCDRIVTGNFILRKCNEVKDDDLFHSYTTIMALIHLGSSK

SEQ ID NO: 13917 - protein, 172 aa, Homo sapiens
MADSETFISLEECRGHKRARKRTSMETALALEKLFPKQCQVLGIVTPGIVVTPMGSGSNRPQEIEIGESGFALLFPQIEGIKIQPFHFIKDPKNLTLERHQLTEVGLLDNPELRVVLVFGYNCCKVGASNYLQQVVSTFSDMNIILAGGQVDNLSSLTSEKYVLCASDFVCE

SEQ ID NO: 13918 - protein, 294 aa, Homo sapiens
MNSELDYYEKFEEVHGILMYKDFVKYWDNVEAFQARPDDLVIATYPKSGTTWVSEIVYMIYKEGDVEKCKEDVIFNRIPFLECRKENLMNGVKQLDEMNSPRIVKTHLPPELLPASFWEKDCKIIYLCRNAKDVAVSFYYFFLMVAGHPNPGSFPEFVEKFMQGQVPYGSWYKHVKSWWEKGKSPRVLFLFYEDLKEDIRKEVIKLIHFLERKPSEELVDRIIHHTSFQEMKNNPSTNYTTLPDEIMNQKLSPFMRKGITGDWKNHFTVALNEKFDKHYEQQMKESTLKFRTEI

SEQ ID NO: 13919 - protein, 462 aa, Homo sapiens
MSSVKRSLKQEIVTQFHCSAAEGDIAKLTGILSHSPSLLNETSENGWTALMYAARNGHPEIVQFLLEKGCDRSIVNKSRQTALDIAVFWGYKHIANLLATAKGGKKPWFLTNEVEECENYFSKTLLDRKSEKRNNSDWLLAKESHPATVFILFSDLNPLVTLGGNKESFQQPEVRLCQLNYTDIKDYLAQPEKITLIFLGVELEIKDKLLNYAGEVPREEEDGLVAWFALGIDPIAAEEFKQRHENCYFLHPPMPALLQLKEKEAGVVAQARSVLAWHSRYKFCPTCGNATKIEEGGYKRLCLKEDCPSLNGVHNTSYPRVDPVVIMQVIHPDGTKCLLGRQKRFPPGMFTCLAGFIEPGETIEDAVRREVEEESGVKVGHVQYVACQPWPMPSSLMIGCLALAVSTEIKVDKNEIEDARWFTREQVLDVLTKGKQQAFFVPPSRAIAHQLIKHWIRINPNL

SEQ ID NO: 13920 - protein, 113 aa, Homo sapiens
MSSPQAPEDGQGCGDRGDPPGDLRSVLVTTVLNLEPLDEDLFRGRHYWVPAKRLFGGQIVGQALVAAAKSVSEDVHVHSLHCYFVRAEQMPSCVLRRSPAEKSLWTFTVCDLY

SEQ ID NO: 13921 - protein, 319 aa, Homo sapiens
MSSPQAPEDGQGCGDRGDPPGDLRSVLVTTVLNLEPLDEDLFRGRHYWVPAKRLFGGQIVGQALVAAAKSVSEDVHVHSLHCYFVRAGDPKLPVLYQVERTRTGSSFSVRSVKAVQHGKPIFICQASFQQAQPSPMQHQFSMPTVPPPEELLDCETLIDQYLRDPNLQKRYPLALNRIAAQEVPIEIKPVNPSPLSQLQRMEPKQMFWVRARGYIGEGDMKMHCCVAAYISDYAFLGTALLPHQWQHKVHFMVSLDHSMWFHAPFRADHWMLYECESPWAGGSRGLVHGRLWRQDGVLAVTCAQEGVIRVKPQVSESKL

SEQ ID NO: 13922 - protein, 76 aa, Homo sapiens
ITTWRTWLDLLYREPIVFLTQVVRGTAVLLGRAVEGDCSQSSSLCDLFEEARRGVKVLLNCQLGFLWEELPLNDGP

SEQ ID NO: 13923 - protein, 179 aa, Homo sapiens
MASQNRDPAATSVAAARKGAEPSGGAARGPVGKRLQQELMTLMMSGDKGISAFPESDNLFKWVGTIHGAAGTVYEDLRYKLSLEFPSGYPYNAPTVKFLTPCYHPNVDTQGNICLDILKEKWSALYDVRTILLSIQSLLGEPNIDSPLNTHAAELWKNPTAFKKYLQETYSKQVTSQEP

SEQ ID NO: 13924 - protein, 161 aa, Homo sapiens
MASQNRDPAATSVAAARKGAEPSGGAARGPVGKRLQQELMTLMMSGDKGISAFPESDNLFKWVGTIHGAAGTAVGSIRTSSTVCLLSGPRETQDSSKPLVWGLGWDMRLLLELTLQLFLQMPEPNIDSPLNTHAAELWKNPTAFKKYLQETYSKQVTSQEP

SEQ ID NO: 13925 - protein, 198 aa, Homo sapiens [sequence omitted]

SEQ ID NO: 13926 - protein, 373 aa, Homo sapiens
MHRGTQEGAMASRLLHRLRHALAGDGPGEAAASPEAEQFPESSELEDDDAEGLSSRLSGTLSFTSAEDDEDDEDEDDEEAGPDQLPLGDGTSGEDAERSPPPDGQWGSQLLARQLQDFWKKSRNTLAPQRLLFEVTSANVVKDPPSKYVLYTLAVIGPGPPDCQPAQISRRYSDFERLHRNLQRQFRGPMAAISFPRKRLRRNFTAETIARRSRAFEQFLGHLQAVPELRHAPDLQDFFVLPELRRAQSLTCTGLYREALALWANAWQLQAQLGTPSGPDRPLLTLAGLAVCHQELEDPGEARACCEKALQLLGDKSLHPLLAPFLEAHVRLSWRLGLDKRQSEARLQALQEAGLTPTPPPSLKELLIKEVLD

SEQ ID NO: 13927 - protein, 184 aa, Homo sapiens
MAAISFPRKRLRRNFTAETIARRSRAFEQFLGHLQAVPELRHAPDLQDFFVLPELRRAQSLTCTGLYREALALWANAWQLQAQLGTPSGPDRPLLTLAGLAVCHQELEDPGEARACCEKALQLLGDKSLHPLLAPFLEAHVRLSWRLGLDKRQSEARLQALQEAGLTPTPPPSLKELLIKEVLD

SEQ ID NO: 13928 - protein, 940 aa, Homo sapiens
MNRIRKFFRGSGRVLAFIFVASVIWLLFDMAALRLSFSEINTRVIKEDIVRRERIGFRVQPDQGKIFYSSIKEMKPPLRGHGKGAWGKENVRKTEESVLKVEVDLDQTQRERKMQNALGRGKVVPLWHPAHLQTLPVTPNKQKTDGRGTKPEASSHQGTPKQTTAQGAPKTSFIAAKGTQVVKISVHMGRVSLKQEPRKSHSPSSDTSKLAAERDLNVTISLSTDRPKQRSQAVANERAHPASTAVPKSGEAMALNKTKTQSKEVNANKHKANTSLPFPKFTVNSNRLRKQSINETPLGSLSKDDGARGAHGKKLNFSESHLVIITKEEEQKADPKEVSNSKTKTIFPKVLGKSQSKHISRNRSEMSSSSLAPHRVPLSQTNHALTGGLEPAKINITAKAPSTEYNQSHIKALLPEDSGTHQVLRIDVTLSPRDPKAPGQFGRPVVVPHGKEKEAERRWKEGNFNVYLSDLIPVDRAIEDTRPAGCAEQLVHNNLPTTSVIMCFVDEVWSTLLRSVHSVINRSPPHLIKEILLVDDFSTKDYLKDNLDKYMSQFPKVRILRLKERHGLIRARLAGAQNATGDVLTFLDSHVECNVGWLEPLLERVYLSRKKVACPVIEVINDKDMSYMTVDNFQRGIFVWPMNFGWRTIPPDVIAKNRIKETDTIRCPVMAGGLFSIDKSYFFELGTYDPGLDVWGGENMELSFKVWMCGGEIEIIPCSRVGHIFRNDNPYSFPKDRMKTVERNLVRVAEVWLDEYKELFYGHGDHLIDQGLDVGNLTQQRELRKKLKCKSFKWYLENVFPDLRAPIVRASGVLINVALGKCISIENTTVILEDCDGSKELQQFNYTWLRLIKCGEWCIAPIPDKGAVRLHPCDNRNKGLKWLHKSTSVFHPELVNHIVFENNQQLLCLEGNFSQKILKVAACDPVKPYQKWKFEKYYEA

SEQ ID NO: 13929 - protein, 660 aa, Homo sapiens [sequence omitted]

SEQ ID NO: 13930 - protein, 1251 aa, Homo sapiens
MRRGGWRKRAENDGWETWGGYMAAKVQKLEEQFRSDAAMQKDGTSSTIFSGVAIYVNGYTDPSAEELRKLMMLHGGQYHVYYSRSKTTHIIATNLPNAKIKELKGEKVIRPEWIVESIKAGRLLSYIPYQLYTKQSSVQKGLSFNPVCRPEDPLPGPSNIAKQLNNRVNHIVKKIETENEVKVNGMNSWNEEDENNDFSFVDLEQTSPGRKQNGIPHPRGSTAIFNGHTPSSNGALKTQDCLVPMVNSVASRLSPAFSQEEDKAEKSSTDFRDCTLQQLQQSTRNTDALRNPHRTNSFSLSPLHSNTKINGAHHSTVQGPSSTKSTSSVSTFSKAAPSVPSKPSDCNFISNFYSHSRLHHISMWKCELTEFVNTLQRQSNGIFPGREKLKKMKTGRSALVVTDTGDMSVLNSPRHQSCIMHVDMDCFFVSVGIRNRPDLKGKPVAVTSNRGTGRAPLRPGANPQLEWQYYQNKILKGKAADIPDSSLWENPDSAQANGIDSVLSRAEIASCSYEARQLGIKNGMFFGHAKQLCPNLQAVPYDFHAYKEVAQTLYETLASYTHNIEAVSCDEALVDITEILAETKLTPDEFANAVRMEIKDQTKCAASVGIGSNILLARMATRKAKPDGQYHLKPEEVDDFIRGQLVTNLPGVGHSMESKLASLGIKTCGDLQYMTMAKLQKEFGPKTGQMLYRFCRGLDDRPVRTEKERKSVSAEINYGIRFTQPKEAEAFLLSLSEEIQRRLEATGMKGKRLTLKIMVRKPGAPVETAKFGGHGICDNIARTVTLDQATDNAKIIGKAMLNMFHTMKLNISDMRGVGIHVNQLVPTNLNPSTCPSRPSVQSSHFPSGSYSVRDVFQVQKAKKSTEEEHKEVFRAAVDLEISSASRTCTFLPPFPAHLPTSPDTNKAESSGKWNGLHTPVSVQSRLNLSIEVPSPSQLDQSVLEALPPDLREQVEQVCAVQQAESHGDKKKEPVNGCNTGILPQPVGTVLLQIPEPQESNSDAGINLIALPAFSQVDPEVFAALPAELQRELKAAYDQRQRQGENSTHQQSASASVPKNPLLHLKAAVKEKKRNKKKKTIGSPKRIQSPLNNKLLNSPAKTLPGACGSPQKLIDGFLKHEGPPAEKPLEELSASTSGVPGLSSLQSDPAGCVRPPAPNLAGAVEFNDVKTLLREWITTISDPMEEDILQVVKYCTDLIEEKDLEKLDLVIKYMKRLMQQSVESVWNMAFDFILDNVQVVLQQTYGSTLKVT

SEQ ID NO: 13931 - protein, 1250 aa, Homo sapiens
MRRGGWRKRAENDGWETWGGYMAAKVQKLEEQFRSDAAMQKDGTSSTIFSGVAIYVNGYTDPSAEELRKLMMLHGGQYHVYYSRSKTTHIIATNLPNAKIKELKGEKVIRPEWIVESIKAGRLLSYIPYQLYTKQSSVQKGLSFNPVCRPEDPLPGPSNIAKQLNNRVNHIVKKIETENEVKVNGMNSWNEEDENNDFSFVDLEQTSPGRKQNGIPHPRGSTAIFNGHTPSSNGALKTQDCLVPMVNSVASRLSPAFSQEEDKAEKSSTDFRDCTLQQLQQSTRNTDALRNPHRTNSFSLSPLHSNTKINGAHHSTVQGPSSTKSTSSVSTFSKAAPSVPSKPSDCNFISNFYSHSRLHHISMWKCELTEFVNTLQRQSNGIFPGREKLKKMKTGRSALVVTDTGDMSVLNSPRHQSCIMHVDMDCFFVSVGIRNRPDLKGKPVAVTSNRGTGRAPLRPGANPQLEWQYYQNKILKGKADIPDSSLWENPDSAQANGIDSVLSRAEIASCSYEARQLGIKNGMFFGHAKQLCPNLQAVPYDFHAYKEVAQTLYETLASYTHNIEAVSCDEALVDITEILAETKLTPDEFANAVRMEIKDQTKCAASVGIGSNILLARMATRKAKPDGQYHLKPEEVDDFIRGQLVTNLPGVGHSMESKLASLGIKTCGDLQYMTMAKLQKEFGPKTGQMLYRFCRGLDDRPVRTEKERKSVSAEINYGIRFTQPKEAEAFLLSLSEEIQRRLEATGMKGKRLTLKIMVRKPGAPVETAKFGGHGICDNIARTVTLDQATDNAKIIGKAMLNMFHTMKLNISDMRGVGIHVNQLVPTNLNPSTCPSRPSVQSSHFPSGSYSVRDVFQVQKAKKSTEEEHKEVFRAAVDLEISSASRTCTFLPPFPAHLPTSPDTNKAESSGKWNGLHTPVSVQSRLNLSIEVPSPSQLDQSVLEALPPDLREQVEQVCAVQQAESHGDKKKEPVNGCNTGILPQPVGTVLLQIPEPQESNSDAGINLIALPAFSQVDPEVFAALPAELQRELKAAYDQRQRQGENSTHQQSASASVPKNPLLHLKAAVKEKKRNKKKKTIGSPKRIQSPLNNKLLNSPAKTLPGACGSPQKLIDGFLKHEGPPAEKPLEELSASTSGVPGLSSLQSDPAGCVRPPAPNLAGAVEFNDVKTLLREWITTISDPMEEDILQVVKYCTDLIEEKDLEKLDLVIKYMKRLMQQSVESVWNMAFDFILDNVQVVLQQTYGSTLKVT

SEQ ID NO: 13932 - protein, 413 aa, Homo sapiens
MRRGGWRKRAENDGWETWGGYMAAKVQKLEEQFRSDAAMQKDGTSSTIFSGVAIYVNGYTDPSAEELRKLMMLHGGQYHVYYSRSKTTHIIATNLPNAKIKELKGEKVIRPEWIVESIKAGRLLSYIPYQLYTKQSSVQKGLSFNPVCRPEDPLPGPSNIAKQLNNRVNHIVKKIETENEVKVNGMNSWNEEDENNDFSFVDLEQTSPGRKQNGIPHPRGSTAIFNGHTPSSNGALKTQDCLVPMVNSVASRLSPAFSQEEDKAEKSSTDFRDCTLQQLQQSTRNTDALRNPHRTNSFSLSPLHSNTKINGAHHSTVQGPSSTKSTSSVSTFSKAAPSVPSKPSDCNFISNFYSHSRLHHISMWKCELTEFVNTLQRQSNGIFPGREKLKKMKTGRSALVVTDTGRYLLKLSS

SEQ ID NO: 13933 - protein, 933 aa, Homo sapiens
MTAREHSPRHGARARAMQRASTIDVAADMLGLSLAGNIQDPDEPILEFSLACSELHTPSLDRKPNSFVAVSVTTPPQAFWTKHAQTEIIEGTNNPIFLSSIAFFQDSLINQMTQVKLSVYDVKDRSQGTMYLLGSGTFIVKDLLQDRHHRLHLTLRSAESDRVGNITVIGWQMEEKSDQRPPVTRSVDTVNGRMVLPVDESLTEALGIRSKYASLRKDTLLKSVFGGAICRMYRFPTTDGNHLRILEQMAESVLSLHVPRQFVKLLLEEDAARVCELEELGELSPCWESLRRQIVTQYQTIILTYQENLTDLHQYRGPSFKASSLKADKKLEFVPTNLHIQRMRVQDDGGSDQNYDIVTIGAPAAHCQGFKSGGLRKKLHKFEETKKHTSSGCQSIIYIPQDVVRAKEIIAQINTLKTQVSYYAERLSRAAKDRSATGLERTLAILADKTRQLVTVCDCKLLANSIHGLNAARPDYIASKASPTSTEEEQVMLRNDQDTLMARWTGRNSRSSLQVDWHEEEWEKVWLNVDKSLECIIQRVDKLLQKERLHGEGCEDVFPCAGSCTSKKDCSPPPEESSPGEWSEALYPLLTTLTDCVAMMSDKAKKAMVFLLMQDSAPTIATYLSLQYRRDVVFCQTLTALICGFIIKLRNCLHDDGFLRQLYTIGLLAQFESLLSTYGEELAMLEDMSLGIMDLRNVTFKVTQATSSASADMLPVITGNRDGFNVRVPLPGPLFDALPREIQSGMLLRVQPVLFNVGINEQQTLAERFGDTSLQEVINVESLVRLNSYFEQFKEVLPEDCLPRSRSQTCLPELLRFLGQNVHARKNKNVDILWQAAEICRRLNGVRFTSCKSAKDRTAMSVTLEQCLILQHEHGMAPQVFTQALECMRSEGCRRENTMKNVGSRKYAFNSLQLKAFPKHYRPPEGTYGKVET

SEQ ID NO: 13934 - protein, 603 aa, Homo sapiens [sequence omitted]

SEQ ID NO: 13935 - protein, 933 aa, Homo sapiens; identical to SEQ ID NO: 13933

SEQ ID NO: 13936 - protein, 972 aa, Homo sapiens
MTAREHSPRHGARARAMQRASTIDVAADMLGLSLAGNIQDPDEPILEFSLACSELHTPSLDRKPNSFVAVSVTTPPQAFWTKHAQTEIIEGTNNPIFLSSIAFFQDSLINQMTQVKLSVYDVKDRSQGTMYLLGSGTFIVKDLLQDRHHRLHLTLRSAESDRVGNITVIGWQMEEKSDQRPPVTRSVDTVNGRMVLPVDESLTEALGIRSKYASLRKDTLLKSVFGGAICRMYRFPTTDGNHLRILEQMAESVLSLHVPRQFVKLLLEEDAARVCELEELGELSPCWESLRRQIVTQYQTIILTYQENLTDLHQYRGPSFKASSLKADKKLEFVPTNLHIQRMRVQDDGGSDQNYDIVTIGAPAAHCQGFKSGGLRKKLHKFEETKKHTSSGCQSIIYIPQDVVRAKEIIAQINTLKTQVSYYAERLSRAAKDRSATGLERTLAILADKTRQLVTVCDCKLLANSIHGLNAARPDYIASKASPTSTEEEQVMLRNDQDTLMARWTGRNSRSSLQVDWHEEEWEKVWLNVDKSLECIIQRVDKLLQKERLHGEGCEDVFPCAGSCTSKKGNPDSHAYWIRPEDPFCDVPSSPCPSTMPSTACHPHLTTHCSPPPEESSPGEWSEALYPLLTTLTDCVAMMSDKAKKAMVFLLMQDSAPTIATYLSLQYRRDVVFCQTLTALICGFIIKLRNCLHDDGFLRQLYTIGLLAQFESLLSTYGEELAMLEDMSLGIMDLRNVTFKVTQATSSASADMLPVITGNRDGFNVRVPLPGPLFDALPREIQSGMLLRVQPVLFNVGINEQQTLAERFGDTSLQEVINVESLVRLNSYFEQFKEVLPEDCLPRSRSQTCLPELLRFLGQNVHARKNKNVDILWQAAEICRRLNGVRFTSCKSAKDRTAMSVTLEQCLILQHEHGMAPQVFTQALECMRSEGCRRENTMKNVGSRKYAFNSLQLKAFPKHYRPPEGTYGKVET

SEQ ID NO: 13937 - protein, 949 aa, Homo sapiens
MTAREHSPRHGARARAMQRASTIDVAADMLGLSLAGNIQDPDEPILEFSLACSELHTPSLDRKPNSFVAVSVTTPPQAFWTKHAQTEIIEGTNNPIFLSSIAFFQDSLINQMTQVKLSVYDVKDRSQGTMYLLGSGTFIVKDLLQDRHHRLHLTLRSAESDRVGNITVIGWQMEEKSDQRPPVTRSVDTVNGRMVLPVDESLTEALGIRSKYASLRKDTLLKSVFGGAICRMYRFPTTDGNHLRILEQMAESVLSLHVPRQFVKLLLEEDAARVCELEELGELSPCWESLRRQIVTQYQTIILTYQENLTDLHQYRGPSFKASSLKADKKLEFVPTNLHIQRMRVQDDGGSDQNYDIVTIGAPAAHCQGFKSGGLRKKLHKFEETKKHTSSGCQSIIYIPQDVVRAKEIIAQINTLKTQVSYYAERLSRAAKDRSATGLERTLAILADKTRQLVTVCDCKLLANSIHGLNAARPDYIASKASPTSTEEEQVMLRNDQDTLMARWTGRNSRSSLQVDWHEEEWEKVWLNVDKSLECIIQRVDKLLQKERLHGEGCEDVFPCAGSCTSKKDCSPPPEESSPGEWSEALYPLLTTLTDCVAMMSDKAKKAMVFLLMQDSAPTIATYLSLQYRRDVVFCQTLTALICGFIIKLRNCLHDDGFLRQLYTIGLLAQFESLLSTYGEELAMLEDMSLGIMDLRNVTFKVTQATSSASADMLPVITGNRDGFNVRVPLPGPLFDALPREIQSGMLLRVQPVLFNVGINEQQTLAERFGDTSLQEVINVESLVRLNSYFEQFKEVLPEDCLPRSRSQTCLPELLRFLGQNVHARKNKNVDILWQAAEICRRLNGVRFTSCKSAKDRTAMSVTLEQCLILQHEHGMAPQVFTQALECMRSIGTREVVTQKNLSGLVPIRDLRLDPSLLCSIPLLALSPNLLIVWLFLSIAYLVTKLRCK

SEQ ID NO: 13938 - protein, 587 aa, Homo sapiens [sequence omitted]

SEQ ID NO: 13939 - protein, 458 aa, Homo sapiens
MLRNDQDTLMARWTGRNSRSSLQVDWHEEEWEKVWLNVDKSLECIIQRVDKLLQKERLHGEGCEDVFPCAGSCTSKKDCSPPPEESSPGEWSEALYPLLTTLTDCVAMMSDKAKKAMVFLLMQDSAPTIATYLSLQYRRDVVFCQTLTALICGFIIKLRNCLHDDGFLRQLYTIGLLAQFESLLSTYGEELAMLEDMSLGIMDLRNVTFKVTQATSSASADMLPVITGNRDGFNVRVPLPGPLFDALPREIQSGMLLRVQPVLFNVGINEQQTLAERFGDTSLQEVINVESLVRLNSYFEQFKEVLPEDCLPRSRSQTCLPELLRFLGQNVHARKNKNVDILWQAAEICRRLNGVRFTSCKSAKDRTAMSVTLEQCLILQHEHGMAPQVFTQALECMRSIGTREVVTQKNLSGLVPIRDLRLDPSLLCSIPLLALSPNLLIVWLFLSIAYLVTKLRCK

SEQ ID NO: 13940 - protein, 274 aa, Homo sapiens
MTTSRKRSRPAQLHPGLRRRRTSRIMAKSGLRQDPQSTAAATVLKRAVELDSESRYPQALVCYQEGIDLLLQVLKGTKDNTKRCNLREKISKYMDRAENIKKYLDQEKEDGKYHKQIKIEENATGFSYESLFREYLNETVTEVWIEDPYIRHTHQLYNFLRFCEMLIKRPCKVKTIHLLTSLDEGIEQVQQSRGLQEIEESLRSHGVLLEVQYSSSIHDREIRFNNGWMIKIGRGLDYFKKPQSRFSLGYCDFDLRPCHETTVDIFHKKHTKNI

SEQ ID NO: 13941 - protein, 316 aa, Homo sapiens
MVIVPTRELALQVSQICIQVSKHMGGAKVMATTGGTNLRDDIMRLDDTVHVVIATPGRILDLIKKGVAKVDHVQMIVLDEADKLLSQDFVQIMEDIILTLPKNRQILLYSATFPLSVQKFMNSHLQKPYEINLMEELTLKGVTQYYAYVTERQKVHCLNTLFSRLQINQSIIFCNSSQRVELLAKKISQLGYSCFYIHAKMRQEHRNRVFHDFRNGLCRNLVCTDLFTRGIDIQAVNVVINFDFPKLAETYLHRIGRSGRFGHLGLAINLITYDDRFNLKSIEEQLGTEIKPIPSNIDKSLYVAEYHSEPVEDEKP

SEQ ID NO: 13942 - protein, 478 aa, Homo sapiens
MSTARTENPVIMGLSSQNGQLRGPVKPTGGPGGGGTQTQQQMNQLKNTNTINNGTQQQAQSMTTTIKPGDDWKKTLKLPPKDLRIKTSDVTSTKGNEFEDYCLKRELLMGIFEMGWEKEESIPIALSGRDILARAKNGTGKSGAYLIPLLERLDLKKDNIQAMVIVPTRELALQVSQICIQVSKHMGGAKVMATTGGTNLRDDIMRLDDTVHVVIATPGRILDLIKKGVAKVDHVQMIVLDEADKLLSQDFVQIMEDIILTLPKNRQILLYSATFPLSVQKFMNSHLQKPYEINLMEELTLKGVTQYYAYVTERQKVHCLNTLFSRLQINQSIIFCNSSQRVELLAKKISQLGYSCFYIHAKMRQEHRNRVFHDFRNGLCRNLVCTDLFTRGIDIQAVNVVINFDFPKLAETYLHRIGRSGRFGHLGLAINLITYDDRFNLKSIEEQLGTEIKPIPSNIDKSLYVAEYHSEPVEDEKP

SEQ ID NO: 13943 - protein, 731 aa, Homo sapiens
MRNFAEKVFASEVKDEGGRQEISPFDVDEICPISHHEMQAHIFHLETLSTSTEARRKKRFQGRKTVNLSIPLSETSSTKLSHIDEYISSSPTYQTVPDFQRVQITGDYASGVTVEDFEIVCKGLYRALCIREKYMQKSFQRFPKTPSKYLRNIDGEAWVANESFYPVFTPPVKKGEDPFRTDNLPENLGYHLKMKDGVVYVYPNEAAVSKDEPKPLPYPNLDTFLDDMNFLLALIAQGPVKTYTHRRLKFLSSKFQVHQMLNEMDELKELKNNPHRDFYNCRKVDTHIHAAACMNQKHLLRFIKKSYQIDADRVVYSTKEKNLTLKELFAKLKMHPYDLTVDSLDVHAGRQTFQRFDKFNDKYNPVGASELRDLYLKTDNYINGEYFATIIKEVGADLVEAKYQHAEPRLSIYGRSPDEWSKLSSWFVCNRIHCPNMTWMIQVPRIYDVFRSKNFLPHFGKMLENIFMPVFEATINPQADPELSVFLKHITGFDSVDDESKHSGHMFSSKSPKPQEWTLEKNPSYTYYAYYMYANIMVLNSLRKERGMNTFLFRPHCGEAGALTHLMTAFMIADDISHGLNLKKSPVLQYLFFLAQIPIAMSPLSNNSLFLEYAKNPFLDFLQKGLMISLSTDDPMQFHFTKEPLMEEYAIAAQVFKLSTCDMCEVARNSVLQCGISHEEKVKFLGDNYLEEGPAGNDIRRTNVAQIRMAYRYETWCYELNLIAEGLKSTE

SEQ ID NO: 13944 - protein, 471 aa, Homo sapiens
MAKKVAVIGAGVSGLISLKCCVDEGLEPTCFERTEDIGGVWRFKENVEDGRASIYQSVVTNTSKEMSCFSDFPMPEDFPNFLHNSKLLEYFRIFAKKFDLLKYIQFQTTVLSVRKCPDFSSSGQWKVVTQSNGKEQSAVFDAVMVCSGHHILPHIPLKSFPGMERFKGQYFHSRQYKHPDGFEGKRILVIGMGNSGSDIAVELSKNAAQVFISTRHGTWVMSRISEDGYPWDSVFHTRFRSMLRNVLPRTAVKWMIEQQMNRWFNHENYGLEPQNKYIMKEPVLNDDVPSRLLCGAIKVKSTVKELTETSAIFEDGTVEENIDVIIFATGYSFSFPFLEDSLVKVENNMVSLYKYIFPAHLDKSTLACIGLIQPLGSIFPTAELQARWVTRVFKGLCSLPSERTMMMDIIKRNEKRIDLFGESQSQTLQTNYVDYLDELALEIGAKPDFCSLLFKDPKLAVRLYFGPCNSY

SEQ ID NO: 13945 - protein, 348 aa, Homo sapiens
MAKRVAIVGAGVSGLASIKCCLEEGLEPTCFERSDDLGGLWRFTTKVCSVTKCSDSAVSGQWEVVTMHEEKQESAIFDAVMVCTGFLTNPYLPLDSFPGINAFKGQYFHSRQYKHPDIFKDKRVLVIGMGNSGTDIAVEASHLAEKVFLSTTGGGWVISRIFDSGYPWDMVFMTRFQNMLRNSLPTPIVTWLMERKINNWLNHANYGLIPEDRTQLKEFVLNDELPGRIITGKVFIRPSIKEVKENSVIFNNTSKEEPIDIIVFATGYTFAFPFLDESVVKVEDGQASLYKYIFPAHLQKPTLAIIGLIKPLGSMIPTGETQARWAVRVLKGLACATARLYNQIISHT

SEQ ID NO: 13946 - protein, 532 aa, Homo sapiens
MAKRVAIVGAGVSGLASIKCCLEEGLEPTCFERSDDLGGLWRFTEHVEEGRASLYKSVVSNSCKEMSCYSDFPFPEDYPNYVPNSQFLEYLKMYANHFDLLKHIQFKTKVCSVTKCSDSAVSGQWEVVTMHEEKQESAIFDAVMVCTGFLTNPYLPLDSFPGINAFKGQYFHSRQYKHPDIFKDKRVLVIGMGNSGTDIAVEASHLAEKVFLSTTGGGWVISRIFDSGYPWDMVFMTRFQNMLRNSLPTPIVTWLMERKINNWLNHANYGLIPEDRTQLKEFVLNDELPGRIITGKVFIRPSIKEVKENSVIFNNTSKEEPIDIIVFATGYTFAFPFLDESVVKVEDGQASLYKYIFPAHLQKPTLAIIGLIKPLGSMIPTGETQARWAVRVLKGVNKLPPPSVMIEEINARKENKPSWFGLCYCKALQSDYITYIDELLTYINAKPNLFSMLLTDPHLALTVFFGPCSPYQFRLTGPGKWEGARNAIMTQWDRTFKVIKARVVQESPSPFESFLKVFSFLALLVAIFLIFL

SEQ ID NO: 13947 - protein, 532 aa, Homo sapiens; identical to SEQ ID NO: 13946

SEQ ID NO: 13948 - protein, 532 aa, Homo sapiens; identical to SEQ ID NO: 13946

SEQ ID NO: 13949 - protein, 483 aa, Homo sapiens
MAKKVAVIGAGVSGLSSIKCCVDEDLEPTCFERSDDIGGLWKFTESSKDGMTRVYKSLVTNVCKEMSCYSDFPFHEDYPNFMNHEKFWDYLQEFAEHFDLLKYIQFKTTVCSITKRPDFSETGQWDVVTETEGKQNRAVFDAVMVCTGHFLNPHLPLEAFPGIHKFKGQILHSQEYKIPEGFQGKRVLVIGLGNTGGDIAVELSRTAAQVLLSTRTGTWVLGRSSDWGYPYNMMVTRRCCSFIAQVLPSRFLNWIQERKLNKRFNHEDYGLSITKGKKAKFIVNDELPNCILCGAITMKTSVIEFTETSAVFEDGTVEENIDVVIFTTGYTFSFPFFEEPLKSLCTKKIFLYKQVFPLNLERATLAIIGLIGLKGSILSGTELQARWVTRVFKGLCKIPPSQKLMMEATEKEQLIKRGVFKDTSKDKFDYIAYMDDIAACIGTKPSHLLSELLYYLLLCFQYPLSCHPFQCIFYPATSVIILK

SEQ ID NO: 13950 - protein, 558 aa, Homo sapiens
MAKKVAVIGAGVSGLSSIKCCVDEDLEPTCFERSDDIGGLWKFTESSKDGMTRVYKSLVTNVCKEMSCYSDFPFHEDYPNFMNHEKFWDYLQEFAEHFDLLKYIQFKTTVCSITKRPDFSETGQWDVVTETEGKQNRAVFDAVMVCTGHFLNPHLPLEAFPGIHKFKGQILHSQEYKIPEGFQGKRVLVIGLGNTGGDIAVELSRTAAQVLLSTRTGTWVLGRSSDWGYPYNMMVTRRCCSFIAQVLPSRFLNWIQERKLNKRFNHEDYGLSITKGKKAKFIVNDELPNCILCGAITMKTSVIEFTETSAVFEDGTVEENIDVVIFTTGYTFSFPFFEEPLKSLCTKKIFLYKQVFPLNLERATLAIIGLIGLKGSILSGTELQARWVTRVFKGLCKIPPSQKLMMEATEKEQLIKRGVFKDTSKDKFDYIAYMDDIAACIGTKPSIPLLFLKDPRLAWEVFFGPCTPYQYRLMGPGKWDGARNAILTQWDRTLKPLKTRIVPDSSKPASMSHYLKAWGAPVLLASLLLICKSSLFLKLVRDKLQDRMSPYLVSLWRG

SEQ ID NO: 13951 - protein, 304 aa, Homo sapiens
MGVFCLGPWGLGRKLRTPGKGPLQLLSRLCGDHLQAIPAKKAPAGQEEPGTPPSSPLSAEQLDRIQRNKAAALLRLAARNVPVGFGESWKKHLSGEFGKPYFIKLMGFVAEERKHYTVYPPPHQVFTWTQMCDIKDVKVVILGQDPYHGPNQAHGLCFSVQRPVPPPPSLENIYKELSTDIEDFVHPGHGDLSGWAKQGVLLLNAVLTVRAHQANSHKERGWEQFTDAVVSWLNQNSNGLVFLLWGSYAQKKGSAIDRKRHHVLQTAHPSPLSVYRGFFGCRHFSKTNELLQKSGKKPIDWKEL

SEQ ID NO: 13952 - protein, 313 aa, Homo sapiens
MIGQKTLYSFFSPSPARKRHAPSPEPAVQGTGVAGVPEESGDAAAIPAKKAPAGQEEPGTPPSSPLSAEQLDRIQRNKAAALLRLAARNVPVGFGESWKKHLSGEFGKPYFIKLMGFVAEERKHYTVYPPPHQVFTWTQMCDIKDVKVVILGQDPYHGPNQAHGLCFSVQRPVPPPPSLENIYKELSTDIEDFVHPGHGDLSGWAKQGVLLLNAVLTVRAHQANSHKERGWEQFTDAVVSWLNQNSNGLVFLLWGSYAQKKGSAIDRKRHHVLQTAHPSPLSVYRGFFGCRHFSKTNELLQKSGKKPIDWKEL

SEQ ID NO: 13953 - protein, 304 aa, Homo sapiens; identical to SEQ ID NO: 13951

SEQ ID NO: 13954 - protein, 313 aa, Homo sapiens; identical to SEQ ID NO: 13952

SEQ ID NO: 13955 - protein, 304 aa, Homo sapiens; identical to SEQ ID NO: 13951

SEQ ID NO: 13956 - protein, 474 aa, Homo sapiens
MATNWGSLLQDKQQLEELARQAVDRALAEGVLLRTSQEPTSSEVVSYAPFTLFPSLVPSALLEQAYAVQMDFNLLVDAVSQNAAFLEQTLSSTIKQDDFTARLFDIHKQVLKEGIAQTVFLGLNRSDYMFQRSADGSPALKQIEINTISASFGGLASRTPAVHRHVLSVLSKTKEAGKILSNNPSKGLALGIAKAWELYGSPNALVLLIAQEKERNIFDQRAIENELLARNIHVIRRTFEDISEKGSLDQDRRLFVDGQEIAVVYFRDGYMPRQYSLQNWEARLLLERSHAAKCPDIATQLAGTKKVQQELSRPGMLEMLLPGQPEAVARLRATFAGLYSLDVGEEGDQAIAEALAAPSRFVLKPQREGGGNNLYGEEMVQALKQLKDSEERASYILMEKIEPEPFENCLLRPGSPARVVQCISELGIFGVYVRQEKTLVMNKHVGHLLRTKAIEHADGGVAAGVAVLDNPYPV

SEQ ID NO: 13957 - protein, 474 aa, Homo sapiens; identical to SEQ ID NO: 13956

SEQ ID NO: 13958 - protein, 269 aa, Homo sapiens
MGPGGVGVRGGAGPRSACQCLYRSPGRHAEPRRGASSRVSPPLQPRAPRRGPRASAPQLPPPPLWSLSRPQSAACVASGSSRPRAMAAAGGARLLRAASAVLGGPAGRWLHHAGSRAGSSGLLRNRGPGGSAEASRSLSVSARARSSSEDKITVHFINRDGETLTTKGKVGDSLLDVVVENNLDIDGFGACEGTLACSTCHLIFEDHIYEKLDAITDEENDMLDLAYGLTDRSRLGCQICLTKSMDNMTVRVPETVADARQSIDVGKTS

SEQ ID NO: 13959 - protein, 623 aa, Homo sapiens
MAAENEASQESALGAYSPVDYMSITSFPRLPEDEPAPAAPLRGRKDEDAFLGDPDTDPDSFLKSARLQRLPSSSSEMGSQDGSPLRETRKDPFSAAAAECSCRQDGLTVIVTACLTFATGVTVALVMQIYFGDPQIFQQGAVVTDAARCTSLGIEVLSKQGSSVDAAVAAALCLGIVAPHSSGLGGGGVMLVHDIRRNESHLIDFRESAPGALREETLQRSWETKPGLLVGVPGMVKGLHEAHQLYGRLPWSQVLAFAAAVAQDGFNVTHDLARALAEQLPPNMSERFRETFLPSGRPPLPGSLLHRPDLAEVLDVLGTSGPAAFYAGGNLTLEMVAEAQHAGGVITEEDFSNYSALVEKPVCGVYRGHLVLSPPPPHTGPALISALNILEGFNLTSLVSREQALHWVAETLKIALALASRLGDPVYDSTITESMDDMLSKVEAAYLRGHINDSQAAPAPLLPVYELDGAPTAAQVLIMGPDDFIVAMVSSLNQPFGSGLITPSGILLNSQMLDFSWPNRTANHSAPSLENSVQPGKRPLSFLLPTVVRPAEGLCGTYLALGANGAARGLSGLTQVLLNVLTLNRNLSDSLARGRLHPDLQSNLLQVDSECRAETSWGGHRDR

SEQ ID NO: 13960 - protein, 666 aa, Homo sapiens
MAAENEASQESALGAYSPVDYMSITSFPRLPEDEPAPAAPLRGRKDEDAFLGDPDTDPDSFLKSARLQRLPSSSSEMGSQDGSPLRETRKDPFSAAAAECSCRQDGLTVIVTACLTFATGVTVALVMQIYFGDPQIFQQGAVVTDAARCTSLGIEVLSKQGSSVDAAVAAALCLGIVAPHSSGLGGGGVMLVHDIRRNESHLIDFRESAPGALREETLQRSWETKVGTLPGLLVGVPGMVKGLHEAHQLYGRLPWSQVLAFAAAVAQDGFNVTHDLARALAEQLPPNMSERFRETFLPSGRPPLPGSLLHRPDLAEVLDVLGTSGPAAFYAGGNLTLEMVAEAQHAGGVITEEDFSNYSALVEKPVCGVYRGHLVLSPPPPHTGPALISALNILEGFNLTSLVSREQALHWVAETLKIALALASRLGDPVYDSTITESMDDMLSKVEAAYLRGHINDSQAAPAPLLPVYELDGAPTAAQVLIMGPDDFIVAMVSSLNQPFGSGLITPSGILLNSQMLDFSWPNRTANHSAPSLENSVQPGKRPLSFLLPTVVRPAEGLCGTYLALGANGAARGLSGLTQVLLNVLTLNRNLSDSLARGRLHPDLQSNLLQVDSEFTEEEIEFLEARGHHVEKVDVLSWVHGSRRTNNFIIAVKDPRSPDAAGATIL

SEQ ID NO: 13961 - protein, 666 aa, Homo sapiens; identical to SEQ ID NO: 13960

SEQ ID NO: 13962 - protein, 662 aa, Homo sapiens
MAAENEASQESALGAYSPVDYMSITSFPRLPEDEPAPAAPLRGRKDEDAFLGDPDTDPDSFLKSARLQRLPSSSSEMGSQDGSPLRETRKDPFSAAAAECSCRQDGLTVIVTACLTFATGVTVALVMQIYFGDPQIFQQGAVVTDAARCTSLGIEVLSKQGSSVDAAVAAALCLGIVAPHSSGLGGGGVMLVHDIRRNESHLIDFRESAPGALREETLQRSWETKPGLLVGVPGMVKGLHEAHQLYGRLPWSQVLAFAAAVAQDGFNVTHDLARALAEQLPPNMSERFRETFLPSGRPPLPGSLLHRPDLAEVLDVLGTSGPAAFYAGGNLTLEMVAEAQHAGGVITEEDFSNYSALVEKPVCGVYRGHLVLSPPPPHTGPALISALNILEGFNLTSLVSREQALHWVAETLKIALALASRLGDPVYDSTITESMDDMLSKVEAAYLRGHINDSQAAPAPLLPVYELDGAPTAAQVLIMGPDDFIVAMVSSLNQPFGSGLITPSGILLNSQMLDFSWPNRTANHSAPSLENSVQPGKRPLSFLLPTVVRPAEGLCGTYLALGANGAARGLSGLTQVLLNVLTLNRNLSDSLARGRLHPDLQSNLLQVDSEFTEEEIEFLEARGHHVEKVDVLSWVHGSRRTNNFIIAVKDPRSPDAAGATIL

SEQ ID NO: 13963 - protein, 364 aa, Homo sapiens
  VARIANT (1)...(364): Xaa = Any Amino Acid
MVKGLHEAHQLYGRLPWSQVLAFAAAVAQDGFNVTHDLARALAEQLPPNMSERFRETFLPSGRPPLPGSLLHRPDLAEVLDVLGTSGPAAFYAGGNLTLEMVAEAQHAGGVITEEDFSNYSALVEKPVCGVYRGHLVLSPPPPHTGPALISALNILEGFNLTSLVSREQALHWVAETLKIALALASRLGDPVYDSTITESMDDMLSKVEAAYLRGHINDSQAAPAPLLPVYELDGAPTAAQVLIMGPDDFIVAMVSSLNQPFGSGLITPSGILLNSQMLDFSWPNRTANHSAPSLENSVQPGKRPLSFLLPTVVRPAEGLCGTYLALGANGAARGLSGLTQHLNRQPALFRVGFERKGLLFSRX

SEQ ID NO: 13964 - protein, 655 aa, Homo sapiens
MGLPEERVRSGSGSRGQEEAGAGGRARSWSPPPEVSRSAHVPSLQRYRELHRRSVEEPREFWGDIAKEFYWKTPCPGPFLRYNFDVTKGKIFIEWMKGATTNICYNVLDRNVHEKKLGDKVAFYWEGNEPGETTQITYHQLLVQVCQFSNVLRKQGIQKGDRVAIYMPMIPELVVAMLACARIGALHSIVFAGFSSESLCERILDSSCSLLITTDAFYRGEKLVNLKELADEALQKCQEKGFPVRCCIVVKHLGRAELGMGDSTSQSPPIKRSCPDVQGVVHTVGGYMLYVATTFKYVFDFHAEDVFWCTADIGWITGHSYVTYGPLANGATSVLFEGIPTYPDVNRLWSIVDKYKVTKFYTAPTAIRLLMKFGDEPVTKHSRASLQVLGTVGEPINPEAWLWYHRVVGAQRCPIVDTFWQTETGGHMLTPLPGATPMKPGSATFPFFGVAPAILNESGEELEGEAEGYLVFKQPWPGIMRTVYGNHERFETTYFKKFPGYYVTGDGCQRDQDGYYWITGRIDDMLNVSGHLLSTAEVESALVEHEAVAEAAVVGHPHPVKGECLYCFVTLCDGHTFSPKLTEELKKQIREKIGPIATPDYIQNAPGLPKTRSGKIMRRVLRKIAQNDHDLGDMSTVADPSVISHLFSHRCLTIQ

SEQ ID NO: 13965 - protein, 701 aa, Homo sapiens [sequence omitted]

SEQ ID NO: 13966 - protein, 655 aa, Homo sapiens; identical to SEQ ID NO: 13964

SEQ ID NO: 13967 - protein, 703 aa, Homo sapiens [sequence omitted]

SEQ ID NO: 13968 - protein, 714 aa, Homo sapiens
MGLPEERVRSGSGSRGQEEAGAGGRARSWSPPPEVSRSAHVPSLQRYRELHRRSVEEPREFWGDIAKEFYWKTPCPGPFLRYNFDVTKGKIFIEWMKGATTNICYNVLDRNVHEKKLGDKVAFYWSTSGNSSYRYTCREGNEPGETTQITYHQLLVQVCQFSNVLRKQGIQKGDRVAIYMPMIPELVVAMLACARIGALHSIVFAGFSSESLCERILDSSCSLLITTDAFYRGEKLVNLKELADEALQKCQEKGFPVRCCIVVKHLGRAELGMGDSTSQSPPIKRSCPDVQISWNQGIDLWWHELMQEAGDECEPEWCDAEDPLFILYTSGSTGKPKGVVHTVGGYMLYVATTFKYVFDFHAEDVFWCTADIGWITGHSYVTYGPLANGATSVLFEGIPTYPDVNRLWSIVDKYKVTKFYTAPTAIRLLMKFGDEPVTKHSRASLQVLGTVGEPINPEAWLWYHRVVGAQRCPIVDTFWQTETGGHMLTPLPGATPMKPGSATFPFFGVAPAILNESGEELEGEAEGYLVFKQPWPGIMRTVYGNHERFETTYFKKFPGYYVTGDGCQRDQDGYYWITGRIDDMLNVSGHLLSTAEVESALVEHEAVAEAAVVGHPHPVKGECLYCFVTLCDGHTFSPKLTEELKKQIREKIGPIATPDYIQNAPGLPKTRSGKIMRRVLRKIAQNDHDLGDMSTVADPSVISHLFSHRCLTIQ

SEQ ID NO: 13969 - protein, 427 aa, Homo sapiens [sequence omitted]

SEQ ID NO: 13970 - protein, 432 aa, Homo sapiens
MSDKLPYKVADIGLAAWGRKALDIAENEMPGLMRMRERYSASKPLKGARIAGCLHMTVETAVLIETLVTLGAEVQWSSCNIFSTQDHAAAAIAKAGIPVYAWKGETDEEYLWCIEQTLYFKDGPLNMILDDGGDLTNLIHTKYPQLLPGIRGISEETTTGVHNLYKMMANGILKVPAINVNDSVTKSKFDNLYGCRESLIDGIKRATDVMIAGKVAVVAGYGDVGKGCAQALRGFGARVIITEIDPINALQAAMEGYEVTTMDEACQEGNIFVTTTGCIDIILGRHFEQMKDDAIVCNIGHFDVEIDVKWLNENAVEKVNIKPQVDRYRLKNGRRIILLAEGRLVNLGCAMGHPSFVMSNSFTNQVMAQIELWTHPDKYPVGVHFLPKKLDEAVAEAHLGKLNVKLTKLTEKQAQYLGMSCDGPFKPDHYRY

SEQ ID NO: 13971 - protein, 432 aa, Homo sapiens; identical to SEQ ID NO: 13970

SEQ ID NO: 13972 - protein, 476 aa, Homo sapiens
MANSAKAEEYEKMSLEQAKASVNSETESSFNINENTTASGTGLSEKTSVCRQVDIARKRKEFEDDLVKESSSCGKDTPSKKRKLDPEIVPEEKDCGDAEGNSKKRKRETEDVPKDKSSTGDGTQNKRKIALEDVPEKQKNLEEGHSSTVAAHYNELQEVGLEKRSQSRIFYLRNFNNWMKSVLIGEFLEKVRQKKKRDITVLDLGCGKGGDLLKWKKGRINKLVCTDIADVSVKQCQQRYEDMKNRRDSEYIFSAEFITADSSKELLIDKFRDPQMCFDICSCQFVCHYSFESYEQADMMLRNACERLSPGGYFIGTTPNSFELIRRLEASETESFGNEIYTVKFQKKGDYPLFGCKYDFNLEGVVDVPEFLVYFPLLNEMAKKYNMKLVYKKTFLEFYEEKIKNNENKMLLKRMQALEPYPANESSKLVSEKVDDYEHAAKYMKNSQVRLPLGTLSKSEWEATSIYLVFAFEKQQ

SEQ ID NO: 13973 - protein, 504 aa, Homo sapiens
MANSAKAEEYEKMSLEQAKASVNSETESSFNINENTTASGTGLSEKTSVCRQVDIARKRKEFEDDLVKESSSCGKDTPSKKRKLDPEIVPEEKDCGDAEGNSKKRKRETEDVPKDKSSTGDGTQNKRKIALEDVPEKQKNLEEGHSSTVAAHYNELQEVGLEKRSQSRIFYLRNFNNWMKSVLIGEFLEKVRQKKKRDITVLDLGCGKGGDLLKWKKGRINKLVCTDIADVSVKQCQQRYEDMKNRRDSEYIFSAEFITADSSKELLIDKFRDPQMCFDICSCQFVCHYSFESYEQADMMLRNACERLSPGGYFIGTTPNSFELIRRLEASETESFGNEIYTVKFQKKGDYPLFGCKYDFNLEGVVDVPEFLVYFPLLNEMAKKYNMKLVYKKTFLEFYEEKIKNNENKMLLKRMQALEPYPANESSKLVSEKVDDYEHAAKYMKNSQVRLPLGTLSKSEWEATRLTVTIMREAWLSTVGPGRAPVAASSVKWGTPRPAMQFIL

SEQ ID NO: 13974 - protein, 476 aa, Homo sapiens; identical to SEQ ID NO: 13972

SEQ ID NO: 13975 - protein, 476 aa, Homo sapiens; identical to SEQ ID NO: 13972

SEQ ID NO: 13976 - protein, 727 aa, Homo sapiens
MGNGESQLSSVPAQKLGWFIQEYLKPYEECQTLIDEMVNTICDVLQEPEQFPLVQGVAIGGSYGRKTVLRGNSDGTLVLFFSDLKQFQDQKRSQRDILDKTGDKLKFCLFTKWLKNNFEIQKSLDGFTIQVFTKNQRISFEVLAAFNALSLNDNPSPWIYRELKRSLDKTNASPGEFAVCFTELQQKFFDNRPGKLKDLILLIKHWHQQCQKKIKDLPSLSPYALELLTVYAWEQGCRKDNFDIAEGVRTVLELIKCQEKLCIYWMVNYNFEDETIRNILLHQLQSARPVILDPVDPTNNVSGDKICWQWLKKEAQTWLTSPNLDNELPAPSWNVLPAPLFTTPGHLLDKFIKEFLQPNKCFLEQIDSAVNIIRTFLKENCFRQSTAKIQIVRGGSTAKGTALKTGSDADLVVFHNSLKSYTSQKNERHKIVKEIHEQLKAFWREKEEELEVSFEPPKWKAPRVLSFSLKSKVLNESVSFDVLPAFNALGQLSSGSTPSPEVYAGLIDLYKSSDLPGGEFSTCFTVLQRNFIRSRPTKLKDLIRLVKHWYKECERKLKPKGSLPPKYALELLTIYAWEQGSGVPDFDTAEGFRTVLELVTQYQQLCIFWKVNYNFEDETVRKFLLSQLQKTRPVILDPAEPTGDVGGGDRWCWHLLAKEAKEWLSSPCFKDGTGNPIPPWKVPTMQTPGSCGARIHPIVNEMFSSRSHRILNNNSKRNFWRSSGNRF

SEQ ID NO: 13977 - protein, 687 aa, Homo sapiens
MGNGESQLSSVPAQKLGWFIQEYLKPYEECQTLIDEMVNTICDVLQEPEQFPLVQGVAIGGSYGRKTVLRGNSDGTLVLFFSDLKQFQDQKRSQRDILDKTGDKLKFCLFTKWLKNNFEIQKSLDGFTIQVFTKNQRISFEVLAAFNALSLNDNPSPWIYRELKRSLDKTNASPGEFAVCFTELQQKFFDNRPGKLKDLILLIKHWHQQCQKKIKDLPSLSPYALELLTVYAWEQGCRKDNFDIAEGVRTVLELIKCQEKLCIYWMVNYNFEDETIRNILLHQLQSARPVILDPVDPTNNVSGDKICWQWLKKEAQTWLTSPNLDNELPAPSWNVLPAPLFTTPGHLLDKFIKEFLQPNKCFLEQIDSAVNIIRTFLKENCFRQSTAKIQIVRGGSTAKGTALKTGSDADLVVFHNSLKSYTSQKNERHKIVKEIHEQLKAFWREKEEELEVSFEPPKWKAPRVLSFSLKSKVLNESVSFDVLPAFNALGQLSSGSTPSPEVYAGLIDLYKSSDLPGGEFSTCFTVLQRNFIRSRPTKLKDLIRLVKHWYKECERKLKPKGSLPPKYALELLTIYAWEQGSGVPDFDTAEGFRTVLELVTQYQQLCIFWKVNYNFEDETVRKFLLSQLQKTRPVILDPAEPTGDVGGGDRWCWHLLAKEAKEWLSSPCFKDGTGNPIPPWKVPVKVI

SEQ ID NO: 13978 - protein, 150 aa, Homo sapiens [sequence omitted]

SEQ ID NO: 13979 - protein, 212 aa, Homo sapiens [sequence omitted]

SEQ ID NO: 13980 - protein, 149 aa, Homo sapiens
MANIAVQRIKREFKEVLKSEEVRFITKIWHPNISSVTGAICLDILKDQWAAAMTLRTVLLSLQALLAAAEPDDPQDAVVANQYKQNPEMFKQTARLWAHVYAGAPVSSPEYTKKIENLCAMGFDRNAVIVALSSKSWDVETATELLLSN

SEQ ID NO: 13981 - protein, 97 aa, Homo sapiens
MTLRTVLLSLQALLAAAEPDDPQDAVVANQYKQNPEMFKQTARLWAHVYAGAPVSSPEYTKKIENLCAMGFDRNAVIVALSSKSWDVETATELLLSN

SEQ ID NO: 13982 - protein, 494 aa, Homo sapiens [sequence omitted]

SEQ ID NO: 13983 - protein, 494 aa, Homo sapiens
MFEIKKICCIGAGYVGGPTCSVIAHMCPEIRVTVVDVNESRINAWNSPTLPIYEPGLKEVVESCRGKNLFFSTNIDDAIKEADLVFISVNTPTKTYGMGKGRAADLKYIEACARRIVQNSNGYKIVTEKSTVPVRAAESIRRIFDANTKPNLNLQVLSNPEFLAEGTAIKDLKNPDRVLIGGDETPEGQRAVQALCAVYEHWVPREKILTTNTWSSELSKLAANAFLAQRISSINSISALCEATGADVEEVATAIGMDQRIGNKFLKASVGFGGSCFQKDVLNLVYLCEALNLPEVARYWQQVIDMNDYQRRRFASRIIDSLFNTVTDKKIAILGFAFKKDTGDTRESSSIYISKYLMDEGAHLHIYDPKVPREQIVVDLSHPGVSEDDQVSRLVTISKDPYEACDGAHAVVICTEWDMFKELDYERIHKKMLKPAFIFDGRRVLDGLHNELQTIGFQIETIGKKVSSKRIPYAPSGEIPKFSLQDPPNKKPKV

SEQ ID NO: 13984 - protein, 372 aa, Homo sapiens
MSLRCGDAARTLGPRVFGRYFCSPVRPLSSLPDKKKELLQNGPDLQDFVSGDLADRSTWDEYKGNLKRQKGERLRLPPWLKTEIPMGKNYNKLKNTLRNLNLHTVCEEARCPNIGECWGGGEYATATATIMLMGDTCTRGCRFCSVKTARNPPPLDASEPYNTAKAIAEWGLDYVVLTSVDRDDMPDGGAEHIAKTVSYLKERNPKILVECLTPDFRGDLKAIEKVALSGLDVYAHNVETVPELQSKVRDPRANFDQSLRVLKHAKKVQPDVISKTSIMLGLGENDEQVYATMKALREADVDCLTLGQYMQPTRRHLKVEEYITPEKFKYWEKVGNELGFHYTASGPLVRSSYKAGEFFLKNLVAKRKTKDL

SEQ ID NO: 13985 - protein, 372 aa, Homo sapiens; identical to SEQ ID NO: 13984

SEQ ID NO: 13986 - protein, 323 aa, Homo sapiens
MADLDKLNIDSIIQRLLEVRGSKPGKNVQLQENEIRGLCLKSREIFLSQPILLELEAPLKICGDIHGQYYDLLRLFEYGGFPPESNYLFLGDYVDRGKQSLETICLLLAYKIKYPENFFLLRGNHECASINRIYGFYDECKRRYNIKLWKTFTDCFNCLPIAAIVDEKIFCCHGGLSPDLQSMEQIRRIMRPTDVPDQGLLCDLLWSDPDKDVLGWGENDRGVSFTFGAEVVAKFLHKHDLDLICRAHQVVEDGYEFFAKRQLVTLFSAPNYCGEFDNAGAMMSVDETLMCSFQILKPAEKKKPNATRPVTPPRGMITKQAKK

SEQ ID NO: 13987 - protein, 337 aa, Homo sapiens
MADLDKLNIDSIIQRLLEVRGSKPGKNVQLQENEIRGLCLKSREIFLSQPILLELEAPLKICGDIHGQYYDLLRLFEYGGFPPESNYLFLGDYVDRGKQSLETICLLLAYKIKYPENFFLLRGNHECASINRIYGFYDECKRRYNIKLWKTFTDCFNCLPIAAIVDEKIFCCHGGLSPDLQSMEQIRRIMRPTDVPDQGLLCDLLWSDPDKDVLGWGENDRGVSFTFGAEVVAKFLHKHDLDLICRAHQVVEDGYEFFAKRQLVTLFSAPNYCGEFDNAGAMMSVDETLMCSFQILKPAEKKKPNATRPVTPPRVASGLNPSIQKASNYRNNTVLYE

SEQ ID NO: 13988 - protein, 323 aa, Homo sapiens; identical to SEQ ID NO: 13986

SEQ ID NO: 13989 - protein, 344 aa, Homo sapiens
MCGDGTNDVGALKHADVGVALLANAPERVVERRRRPRDSPTLSNSGIRATSRTAKQRSGLPPSEEQPTSQRDRLSQVLRDLEDESTPIVKLGDASIAAPFTSKLSSIQCICHVIKQGRCTLVTTLQMFKILALNALILAYSQSVLYLEGVKFSDFQATLQGLLLAGCFLFISRSKPLKTLSRERPLPNIFNLYTILTVMLQFFVHFLSLVYLYREAQARSPEKQEQFVDLYKEFEPSLVNSTVYIMAMAMQMATFAINYKGPPFMESLPENKPLVWSLAVSLLAIIGLLLGSSPDFNSQFGLVDIPVEFKLVIAQVLLLDFCLALLADRVLQFFLGTPKLKVPS

SEQ ID NO: 13990 - protein, 1086 aa, Homo sapiens
MEKWEELNSHQPGEEYDPSKATFVKVVPTPNNGSTELVALHRNEGEDGLEVLSFEFQKIKYSYDALEKKQFLPVAFPVGNAFSYYQSNRGFQEDSEIRAAEKKFGSNKAEMVVPDFSELFKERATAPFFVFQVFCVGLWCLDEYWYYSVFTLSMLVAFEASLVQQQMRNMSEIRKMGNKPHMIQVYRSRKWRPIASDEIVPGDIVSIGRSPQENLVPCDVLLLRGRCIVDEAMLTGESVPQMKEPIEDLSPDRVLDLQADSRLHVIFGGTKVVQHIPPQKATTGLKPVDSGCVAYVLRTGFNTSQGKLLRTILFGVKRVTANNLETFIFILFLLVFAIAAAAYVWIEGTKDPSRNRYKLFLECTLILTSVVPPELPIELSLAVNTSLIALAKLYMYCTEPFRIPFAGKVEVCCFDKTGTLTSDSLVVRGVAGLRDGKEVTPVSSIPVETHRALASCHSLMQLDDGTLVGDPLEKAMLTAVDWTLTKDEKVFPRSIKTQGLKIHQRFHFASALKRMSVLASYEKLGSTDLCYIAAVKGAPETLHSMFSQCPPDYHHIHTEISREGARVLALGYKELGHLTHQQAREVKREALECSLKFVGFIVVSCPLKADSKAVIREIQNASHRVVMITGDNPLTACHVAQELHFIEKAHTLILQPPSEKGRQCEWRSIDGSIVLPLARGSPKALALEYALCLTGDGLAHLQATDPQQLLRLIPHVQVFARVAPKQKEFVITSLKELGYVTLMCGDGTNDVGALKHADVGVALLANAPERVVERRRRPRDSPTLSNSGIRATSRTAKQRSGLPPSEEQPTSQRDRLSQVLRDLEDESTPIVKLGDASIAAPFTSKLSSIQCICHVIKQGRCTLVTTLQMFKILALNALILAYSQSVLYLEGVKFSDFQATLQGLLLAGCFLFISRSKPLKTLSRERPLPNIFNLYTILTVMLQFFVHFLSLVYLYREAQARSPEKQEQFVDLYKEFEPSLVNSTVYIMAMAMQMATFAINYKGPPFMESLPENKPLVWSLAVSLLAIIGLLLGSSPDFNSQFGLVDIPVEFKLVIAQVLLLDFCLALLADRVLQFFLGTPKLKVPS

SEQ ID NO: 13991 - protein, 1204 aa, Homo sapiens
MAAAAAVGNAVPCGARPCGVRPDGQPKPGPQPRALLAAGPALIANGDELVAAVWPYRRLALLRRLTVLPFAGLLYPAWLGAAAAGCWGWGSSWVQIPEAALLVLATICLAHALTVLSGHWSVHAHCALTCTPEYDPSKATFVKVVPTPNNGSTELVALHRNEGEDGLEVLSFEFQKIKYSYDALEKKQFLPVAFPVGNAFSYYQSNRGFQEDSEIRAAEKKFGSNKAEMVVPDFSELFKERATAPFFVFQVFCVGLWCLDEYWYYSVFTLSMLVAFEASLVQQQMRNMSEIRKMGNKPHMIQVYRSRKWRPIASDEIVPGDIVSIGRSPQENLVPCDVLLLRGRCIVDEAMLTGESVPQMKEPIEDLSPDRVLDLQADSRLHVIFGGTKVVQHIPPQKATTGLKPVDSGCVAYVLRTGFNTSQGKLLRTILFGVKRVTANNLETFIFILFLLVFAIAAAAYVWIEGTKDPSRNRYKLFLECTLILTSVVPPELPIELSLAVNTSLIALAKLYMYCTEPFRIPFAGKVEVCCFDKTGTLTSDSLVVRGVAGLRDGKEVTPVSSIPVETHRALASCHSLMQLDDGTLVGDPLEKAMLTAVDWTLTKDEKVFPRSIKTQGLKIHQRFHFASALKRMSVLASYEKLGSTDLCYIAAVKGAPETLHSMFSQCPPDYHHIHTEISREGARVLALGYKELGHLTHQQAREVKREALECSLKFVGFIVVSCPLKADSKAVIREIQNASHRVVMITGDNPLTACHVAQELHFIEKAHTLILQPPSEKGRQCEWRSIDGSIVLPLARGSPKALALEYALCLTGDGLAHLQATDPQQLLRLIPHVQVFARVAPKQKEFVITSLKELGYVTLMCGDGTNDVGALKHADVGVALLANAPERVVERRRRPRDSPTLSNSGIRATSRTAKQRSGLPPSEEQPTSQRDRLSQVLRDLEDESTPIVKLGDASIAAPFTSKLSSIQCICHVIKQGRCTLVTTLQMFKILALNALILAYSQSVLYLEGVKFSDFQATLQGLLLAGCFLFISRSKPLKTLSRERPLPNIFNLYTILTVMLQFFVHFLSLVYLYREAQARSPEKQEQFVDLYKEFEPSLVNSTVYIMAMAMQMATFAINYKGPPFMESLPENKPLVWSLAVSLLAIIGLLLGSSPDFNSQFGLVDIPVEFKLVIAQVLLLDFCLALLADRVLQFFLGTPKLKVPS

SEQ ID NO: 13992 - protein, 572 aa, Homo sapiens
MSVLASYEKLGSTDLCYIAAVKGAPETLHSMFSQCPPDYHHIHTEISREGARVLALGYKELGHLTHQQAREVKREALECSLKFVGFIVVSCPLKADSKAVIREIQNASHRVVMITGDNPLTACHVAQELHFIEKAHTLILQPPSEKGRQCEWRSIDGSIVLPLARGSPKALALEYALCLTGDGLAHLQATDPQQLLRLIPHVQVFARVAPKQKEFVITSLKELGYVTLMCGDGTNDVGALKHADVGVALLANAPERVVERRRRPRDSPTLSNSGIRATSRTAKQRSGLPPSEEQPTSQRDRLSQVLRDLEDESTPIVKLGDASIAAPFTSKLSSIQCICHVIKQGRCTLVTTLQMFKILALNALILAYSQSVLYLEGVKFSDFQATLQGLLLAGCFLFISRSKPLKTLSRERPLPNIFNLYTILTVMLQFFVHFLSLVYLYREAQARSPEKQEQFVDLYKEFEPSLVNSTVYIMAMAMQMATFAINYKGPPFMESLPENKPLVWSLAVSLLAIIGLLLGSSPDFNSQFGLVDIPVEFKLVIAQVLLLDFCLALLADRVLQFFLGTPKLKVPS

SEQ ID NO: 13993 - protein, 606 aa, Homo sapiens
MAAAAAVGNAVPCGARPCGVRPDGQPKPGPQPRALLAAGPALIANGDELVAAVWPYRRLALLRRLTVLPFAGLLYPAWLGAAAAGCWGWGSSWVQIPEAALLVLATICLAHALTVLSGHWSVHAHCALTCTPEYDPSKATFVKVVPTPNNGSTELVALHRNEGEDGLEVLSFEFQKIKYSYDALEKKQFLPVAFPVGNAFSYYQSNRGFQEDSEIRAAEKKFGSNKAEMVVPDFSELFKERATAPFFVFQVFCVGLWCLDEYWYYSVFTLSMLVAFEASLVQQQMRNMSEIRKMGNKPHMIQVYRSRKWRPIASDEIVPGDIVSIGRSPQENLVPCDVLLLRGRCIVDEAMLTGESVPQMKEPIEDLSPDRVLDLQADSRLHVIFGGTKVVQHIPPQKATTGLKPVDSGCVAYVLRTGFNTSQGKLLRTILFGVKRVTANNLETFIFILFLLVFAIAAAAYVWIEGTKDPSRNRYKLFLECTLILTSVVPPELPIELSLAVNTSLIALAKLYMYCTEPFRIPFAGKVEVCCFDKTGTLTSDSLVVRGVAGLRDGKEVTPVSSIPVETHRALASCHSLMQLDDGTLVGDPLEKAMLTAVDWTLTKVP

SEQ ID NO: 13994 - protein, 1204 aa, Homo sapiens; identical to SEQ ID NO: 13991

SEQ ID NO: 13995 - protein, 1086 aa, Homo sapiens; identical to SEQ ID NO: 13990

SEQ ID NO: 13996 - protein, 388 aa, Homo sapiens
MAAAAAVGNAVPCGARPCGVRPDGQPKPGPQPRALLAAGPALIANGDELVAAVWPYRRLALLRRLTVLPFAGLLYPAWLGAAAAGCWGWGSSWVQIPEAALLVLATICLAHALTVLSGHWSVHAHCALTCTPEYDPSKATFVKVVPTPNNGSTELVALHRNEGEDGLEVLSFEFQKIKYSYDALEKKQFLPVAFPVGNAFSYYQSNRGFQEDSEIRAAEKKFGSNKAEMVVPDFSELFKERATAPFFVFQVFCVGLWCLDEYWYYSVFTLSMLVAFEASLVQQQMRNMSEIRKMGNKPHMIQVWLPGRPRLGVQHRCGFCADTHAPPRSTEAASGGPLPVMRSYQGTSSPSVRPGSAQSQWEPQPQGLWPTLLPLPCRPLPTGEPGAM

SEQ ID NO: 13997 - protein, 483 aa, Homo sapiens
MAGFAELGLSSWLVEQCRQLGLKQPTPVQLGCIPAILEGRDCLGCAKTGSGKTAAFVLPILQKLSEDPYGIFCLVLTPTRELAYQIAEQFRVLGKPLGLKDCIIVGGMDMVAQALELSRKPHVVIATPGRLADHLRSSNTFSIKKIRFLVMDEADRLLEQGCTDFTVDLEAILAAVPARRQTLLFSATLTDTLRELQGLATNQPFFWEAQAPVSTVEQLDQRYLLVPEKVKDAYLVHLIQRFQDEHEDWSIIIFTNTCKTCQILCMMLRKFSFPTVALHSMMKQKERFAALAKFKSSIYRILIATDVASRGLDIPTVQVVINHNTPGLPKIYIHRVGRTARAGRQGQAITLVTQYDIHLVHAIEEQIKKKLEEFSVEEAEVLQILTQVNVVRRECEIKLEAAHFDEKKEINKRKQLILEGKDPDLEAKRKAELAKIKQKNRRFKEKVEETLKRQKAGRAGHKGRPPRTPSGSHSGPVPSQGLV

SEQ ID NO: 13998 - protein, 166 aa, Homo sapiens
MAGFAELGLSSWLVEQCRQLGLKQPTPVQLGCIPAILEGRDCLGCAKTGSGKTAAFVLPILQKLSEDPYGIFCLVLTPTRGPAELNKMAPVQWLTPVIPALWELQGAGLPDRRAVPGPGEASRAERLHHRRWHGHGGPGAGALSETTRGHRHAGAPGRSPAQLQHF

SEQ ID NO: 13999 - protein, 632 aa, Homo sapiens
METPAAAAPAGSLFPSFLLLACGTLVAALLGAAHRLGLFYQLLHKVDKASVRHGGENVAAVLRAHGVRFIFTLVGGHISPLLVACEKLGIRVVDTRHEVTAVFAADAMARLSGTVGVAAVTAGPGLTNTVTAVKNAQMAQSPILLLGGAASTLLQNRGALQAVDQLSLFRPLCKFCVSVRRVRDIVPTLRAAMAAAQSGTPGPVFVELPVDVLYPYFMVQKEMVPAKPPKGLVGRVVSWYLENYLANLFAGAWEPQPEGPLPLDIPQASPQQVQRCVEILSRAKRPLMVLGSQALLTPTSADKLRAAVETLGVPCFLGGMARGLLGRNHPLHIRENRSAALKKADVIVLAGTVCDFRLSYGRVLSHSSKIIIVNRNREEMLLNSDIFWKPQEAVQGDVGSFVLKLVEGLQGQTWAPDWVEELREADRQKEQTFREKAAMPVAQHLNPVQVLQLVEETLPDNSILVVDGGDFVGTAAHLVQPRGPLRWLDPGAFGTLGVGAGFALGAKLCRPDAEVWCLFGDGAFGYSLIEFDTFVRHKIPVMALVGNDAGWTQISREQVPSLGSNVACGLAYTDYHKAAMGLGARGLLLSRENEDQVVKVLHDAQQQCRDGHPVVVNILIGRTDFRDGSIAV

SEQ ID NO: 14000 - protein, 632 aa, Homo sapiens; identical to SEQ ID NO: 13999

SEQ ID NO: 14001 - protein, 632 aa, Homo sapiens; identical to SEQ ID NO: 13999

SEQ ID NO: 14002 - protein, 360 aa, Homo sapiens
MPELVVTALLAPSRLSLKLLRAFMWSLVFSVALVAAAVYGCIALTHVLCRPRRGCCGRRRSASPACLSDPSLGEHGFLNLKSSGLRLHYVSAGRGNGPLMLFLHGFPENWFSWRYQLREFQSRFHVVAVDLRGYGPSDAPRDVDCYTIDLLLVDIKDVILGLGYSKCILVAHDWGALLAWHFSIYYPSLVERMVVVSGAPMSVYQDYSLHHISQFFRSHYMFLFQLPWLPEKLLSMSDFQILKTTLTHRKTGIPCLTPSELEAFLYNFSQPGGLTGPLNYYRNLFRNFPLEPQELTTPTLLLWGEKDTYLELGLVEAIGSRFVPGRLEAHILPGIGHWIPQSNPQEMHQYMWAFLQDLLD

SEQ ID NO: 14003 - protein, 360 aa, Homo sapiens; identical to SEQ ID NO: 14002

SEQ ID NO: 14004 - protein, 491 aa, Homo sapiens
MRGNEEDMRLMEDLGHYFRDVQLWWLGSFYPVLHLVHPTFTAPVLQASAAVALKDMSFYGFLKPWLGDGLLISAGDKWRWHRHLLTPAFHFKILKPYVKIFNESTNIMHAKWQRLALEGSVRLEMFEHISLMTLDSLQKCIFSFDSNCQDEYIDAILELSALSLKRHQHIFLLTDFLYFLTPNGRRFCRACDIVHNFTDAVIQERRRTLTSQGVDDFLQAKAKSKTLDFIDVLLLAKDENGKKLSDENIRAEADTFMSGGHDTTASGLSWVLYNLARYPEYQEHCRQEVQELLKNGDPKEIEWDDLAQLPFLTMCLKESLRLHSPVSRIHRCCPQDGVLPDGRVIPKGNTCTISIFGIHHNPSVWPDPEVLPLPPSPSRGLVYDPFRFDPENLQKTSPLAFIPFSAVPRRGSRRDGAGMGVLGTVRVPTPSPGNCIGQTFAMAEMKVVLALTLLRFRVLPDHAEPRRKLELIVRAEDGLWLRVEPLSADLQ

SEQ ID NO: 14005 - protein, 735 aa, Homo sapiens
MAEPLLRKTFSRLRGREKLPRKKSDAKERGHPAQRPEPSPPEPEPQAPEGSQAGAEGPSSPEASRSPARGAYLQSLEPSSRRWVLGGAKPAEDTSLGPGVPGTGEPAGEIWYNPIPEEDPRPPAPEPPGPQPGSAESEGLAPQGAAPASPPTKASRTKSPGPARRLSIKMKKLPELRRRLSLRGPRAGRERERAAPAGSVISRYHLDSSVGGPGPAAGPGGTRSPRAGYLSDGDSPERPAGPPSPTSFRPYEVGPAARAPPAALWGRLSLHLYGLGGLRPAPGATPRDLCCLLQVDGEARARTGPLRGGPDFLRLDHTFHLELEAARLLRALVLAWDPGVRRHRPCAQGTVLLPTVFRGCQAQQLAVRLEPQGLLYAKLTLSEQQEAPATAEPRVFGLPLPLLVERERPPGQVPLIIQKCVGQIERRGLRVVGLYRLCGSAAVKKELRDAFERDSAAVCLSEDLYPDINVITGILKDYLRELPTPLITQPLYKVVLEAMARDPPNRVPPTTEGTRGLLSCLPDVERATLTLLLDHLRLVSSFHAYNRMTPQNLAVCFGPVLLPARQAPTRPRARSSGPGLASAVDFKHHIEVLHYLLQSWPDPRLPRQSPDVAPYLRPKRQPPLHLPLADPEVVTRPRGRGGPESPPSNRYAGDWSVCGRDFLPCGRDFLSGPDYDHVTGSDSEDEDEEVGEPRVTGDFEDDFDAPFNPHLNLKDFDALILDLERELSKQINVCL

SEQ ID NO: 14006 - protein, 576 aa, Homo sapiens
MAEPLLRKTFSRLRGREKLPRKKSDAKERGHPAQRPEPSPPEPEPQAPEGSQAGAEGPSSPEASRSPARGAYLQSLEPSSRRWVLGGAKPAEDTSLGPGVPGTGEPAGEIWYNPIPEEDPRPPAPEPPGPQPGSAESEGLAPQGKNKLPIPFPKAPLHKDEEAAGTAAPPEPARPPGWQGAREGCPCGLRHQPLPPGQQRCQAQQLAVRLEPQGLLYAKLTLSEQQEAPATAEPRVFGLPLPLLVERERPPGQVPLIIQKCVGQIERRGLRVVGLYRLCGSAAVKKELRDAFERDSAAVCLSEDLYPDINVITGILKDYLRELPTPLITQPLYKVVLEAMARDPPNRVPPTTEGTRGLLSCLPDVERATLTLLLDHLRLVSSFHAYNRMTPQNLAVCFGPVLLPARQAPTRPRARSSGPGLASAVDFKHHIEVLHYLLQSWPDPRLPRQSPDVAPYLRPKRQPPLHLPLADPEVVTRPRGRGGPESPPSNRYAGDWSVCGRDFLPCGRDFLSGPDYDHVTGSDSEDEDEEVGEPRVTGDFEDDFDAPFNPHLNLKDFDALILDLERELSKQINVCL

SEQ ID NO: 14007 - protein, 756 aa, Homo sapiens
MAEPLLRKTFSRLRGREKLPRKKSDAKERGHPAQRPEPSPPEPEPQAPEGSQAGAEGPSSPEASRSPARGAYLQSLEPSSRRWVLGGAKPAEDTSLGPGVPGTGEPAGEIWYNPIPEEDPRPPAPEPPGPQPGSAESEGLAPQGAAPASPPTKASRTKSPGPARRLSIKMKKLPELRRRLSLRGPRAGRERERAAPAGSVISRYHLDSSVGGPGPAAGPGGTRSPRAGYLSDGDSPERPAGPPSPTSFRPYEVGPAARAPPAALWGRLSLHLYGLGGLRPAPGATPRDLCCLLQVDGEARARTGPLRGGPDFLRLDHTFHLELEAARLLRALVLAWDPGVRRHRPCAQGTVLLPTVFRGCQAQQLAVRLEPQGLLYAKLTLSEQQEAPATAEPRVFGLPLPLLVERERPPGQVPLIIQKCVGQIERRGLRVVGLYRLCGSAAVKKELRDAFERDSAAVCLSEDLYPDINVITAVPSLALEASGALTRGDPVFTGILKDYLRELPTPLITQPLYKVVLEAMARDPPNRVPPTTEGTRGLLSCLPDVERATLTLLLDHLRLVSSFHAYNRMTPQNLAVCFGPVLLPARQAPTRPRARSSGPGLASAVDFKHHIEVLHYLLQSWPDPRLPRQSPDVAPYLRPKRQPPLHLPLADPEVVTRPRGRGGPESPPSNRYAGDWSVCGRDFLPCGRDFLSGPDYDHVTGSDSEDEDEEVGEPRVTGDFEDDFDAPFNPHLNLKDFDALILDLERELSKQINVCL

SEQ ID NO: 14008 - protein, 237 aa, Homo sapiens
MARDPPNRVPPTTEGTRGLLSCLPDVERATLTLLLDHLRLVSSFHAYNRMTPQNLAVCFGPVLLPARQAPTRPRARSSGPGLASAVDFKHHIEVLHYLLQSWPDPRLPRQSPDVAPYLRPKRQPPLHLPLADPEVVTRPRGRGGPESPPSNRYAGDWSVCGRDFLPCGRDFLSGPDYDHVTGSDSEDEDEEVGEPRVTGDFEDDFDAPFNPHLNLKDFDALILDLERELSKQINVCL

SEQ ID NO: 14009 - protein, 882 aa, Homo sapiens
MPALACLRRLCRHVSPQAVLFLLFIFCLFSVFISAYYLYGWKRGLEPSADAPEPDCGDPPPVAPSRLLPLKPVQAATPSRTDPLVLVFVESLYSQLGQEVVAILESSRFKYRTEIAPGKGDMPTLTDKGRGRFALIIYENILKYVNLDAWNRELLDKYCVAYGVGIIGFFKANENSLLSAQLKGFPLFLHSNLGLKDCSINPKSPLLYVTRPSEVEKGVLPGEDWTVFQSNHSTYEPVLLAKTRSSESIPHLGADAGLHAALHATVVQDLGLHDGIQRVLFGNNLNFWLHKLVFVDAVAFLTGKRLSLPLDRYILVDIDDIFVGKEGTRMKVEDVKALFDTQNELRAHIPNFTFNLGYSGKFFHTGTNAEDAGDDLLLSYVKEFWWFPHMWSHMQPHLFHNQSVLAEQMALNKKFAVEHGIPTDMGYAVAPHHSGVYPVHVQLYEAWKQVWSIRVTSTEEYPHLKPARYRRGFIHNGIMVLPRQTCGLFTHTIFYNEYPGGSSELDKIINGGELFLTVLLNPISIFMTHLSNYGNDRLGLYTFKHLVRFLHSWTNLRLQTLPPVQLAQKYFQIFSEEKDPLWQDPCEDKRHKDIWSKEKTCDRFPKLLIIGPQKTGTTALYLFLGMHPDLSSNYPSSETFEEIQFFNGHNYHKGIDWYMEFFPIPSNTTSDFYFEKSANYFDSEVAPRRAAALLPKAKVLTILINPADRAYSWYQHQRAHDDPVALKYTFHEVITAGSDASSKLRALQNRCLVPGWYATHIERWLSAYHANQILVLDGKLLRTEPAKVMDMVQKFLGVTNTIDYHKTLAFDPKKGFWCQLLEGGKTKCLGKSKGRKYPEMDLDSRAFLKDYYRDHNIELSKLLYKMGQTLPTWLREDLQNTR

SEQ ID NO: 14010 - protein, 629 aa, Homo sapiens
MPALACLRRLCRHVSPQAVLFLLFIFCLFSVFISAYYLYGWKRGLEPSADAPEPDCGDPPPVAPSRLLPLKPVQAATPSRTDPLVLVFVESLYSQLGQEVVAILESSRFKYRTEIAPGKGDMPTLTDKGRGRFALIIYENILKYVNLDAWNRELLDKYCVAYGVGIIGFFKANENSLLSAQLKGFPLFLHSNLGLKDCSINPKSPLLYVTRPSEVEKGVLPGEDWTVFQSNHSTYEPVLLAKTRSSESIPHLGADAGLHAALHATVVQDLGLHDGIQRVLFGNNLNFWLHKLVFVDAVAFLTGKRLSLPLDRYILVDIDDIFVGKEGTRMKVEDVKALFDTQNELRAHIPNFTFNLGYSGKFFHTGTNAEDAGDDLLLSYVKEFWWFPHMWSHMQPHLFHNQSVLAEQMALNKKFAVEHGIPTDMGYAVAPHHSGVYPVHVQLYEAWKQVWSIRVTSTEEYPHLKPARYRRGFIHNGIMVLPRQTCGLFTHTIFYNEYPGGSSELDKIINGGELFLTVLLNPISIFMTHLSNYGNDRLGLYTFKHLVRFLHSWTNLRLQTLPPVQLAQKYFQIFSEEKDPLWQDPCEDKRHKDIWSKEKTCDRFPKLLIIGPQKTGRHHCPLPVPGHAP

SEQ ID NO: 14011 - protein, 556 aa, Homo sapiens
MPALACLRRLCRHVSPQAVLFLLFIFCLFSVFISAYYLYGWKRGLEPSADAPEPDCGDPPPVAPSRLLPLKPVQAATPSRTDPLVLVFVESLYSQLGQEVVAILESSRFKYRTEIAPGKGDMPTLTDKGRGRFALIIYENILKYVNLDAWNRELLDKYCVAYGVGIIGFFKANENSLLSAQLKGFPLFLHSNLGLKDCSINPKSPLLYVTRPSEVEKGVLPGEDWTVFQSNHSTYEPVLLAKTRSSESIPHLGADAGLHAALHATVVQDLGLHDGIQRVLFGNNLNFWLHKLVFVDAVAFLTGKRLSLPLDRYILVDIDDIFVGKEGTRMKVEDVKALFDTQNELRAHIPNFTFNLGYSGKFFHTGTNAEDAGDDLLLSYVKEFWWFPHMWSHMQPHLFHNQSVLAEQMALNKKFAVEHGIPTDMGYAVAPHHSGVYPVHVQLYEAWKQVWSIRVTSTEEYPHLKPARYRRGFIHNGIMVLPRQTCGLFTHTIFYNEYPGGSSELDKIINGGELFLTVLLNPVSAPQPMAAGEKGLLHSLSAADTGFLEPGKGGEA

SEQ ID NO: 14012 - protein, 860 aa, Homo sapiens
MGEVTAEEVEKFLDSNIGFAKQYYNLHYRAKLISDLLGAKEAAVDFSNYHSPSSMEESEIIFDLLRDFQENLQTEKCIFNVMKKLCFLLQADRMSLFMYRTRNGIAELATRLFNVHKDAVLEDCLVMPDQEIVFPLDMGIVGHVAHSKKIANVPNTEEDEHFCDFVDILTEYKTKNILASPIMNGKDVVAIIMAVNKVDGSHFTKRDEEILLKYLNFANLIMKVYHLSYLHNCETRRGQILLWSGSKVFEELTDIERQFHKALYTVRAFLNCDRYSVGLLDMTKQKEFFDVWPVLMGEVPPYSGPRTPDGREINFYKVIDYILHGKEDIKVIPNPPPDHWALVSGLPAYVAQNGLICNIMNAPAEDFFAFQKEPLDESGWMIKNVLSMPIVNKKEEIVGVATFYNRKDGKPFDEMDETLMESLTQFLGWSVLNPDTYESMNKLENRKDIFQDIVKYHVKCDNEEIQKILKTREVYGKEPWECEEEELAEILQAELPDADKYEINKFHFSDLPLTELELVKCGIQMYYELKVVDKFHIPQEALVRFMYSLSKGYRKITYHNWRHGFNVGQTMFSLLVTGKLKRYFTDLEALAMVTAAFCHDIDHRGTNNLYQMKSQNPLAKLHGSSILERHHLEFGKTLLRDESLNIFQNLNRRQHEHAIHMMDIAIIATDLALYFKKRTMFQKIVDQSKTYESEQEWTQYMMLEQTRKEIVMAMMMTACDLSAITKPWEVQSQVALLVAAEFWEQGDLERTVLQQNPIPMMDRNKADELPKLQVGFIDFVCTFVYKEFSRFHEEITPMLDGITNNRKEWKALADEYDAKMKVQEEKKQKQQSAKSAAAGNQPGGNPSPGGATTSKSCCIQ

SEQ ID NO: 14013 - protein, 269 aa, Homo sapiens
MVTAAFCHDIDHRGTNNLYQMKSQNPLAKLHGSSILERHHLEFGKTLLRDESLNIFQNLNRRQHEHAIHMMDIAIIATDLALYFKKRTMFQKIVDQSKTYESEQEWTQYMMLEQTRKEIVMAMMMTACDLSAITKPWEVQSQVALLVAAEFWEQGDLERTVLQQNPIPMMDRNKADELPKLQVGFIDFVCTFVYKEFSRFHEEITPMLDGITNNRKEWKALADEYDAKMKVQEEKKQKQQSAKSAAAGNQPGGNPSPGGATTSKSCCIQ

SEQ ID NO: 14014 - protein, 179 aa, Homo sapiens
MDQREILQKFLDEAQSKKITKEEFANEFLKLKRQSTKYKADKTYPTTVAEKPKNIKKNRYKDILPYDYSRVELSLITSDEDSSYINANFIKGVYGPKAYIATQGPLSTTLLDFWRMIWEYSVLIIVMACMEYEMGKEAEKRKSDYIIRTLKVKFNSVSVILAHQTSLQNLFSQITPAHF

SEQ ID NO: 14015 - protein, 783 aa, Homo sapiens [sequence omitted]

SEQ ID NO: 14016 - protein, 807 aa, Homo sapiens
MDQREILQKFLDEAQSKKITKEEFANEFLKLKRQSTKYKADKTYPTTVAEKPKNIKKNRYKDILPYDYSRVELSLITSDEDSSYINANFIKGVYGPKAYIATQGPLSTTLLDFWRMIWEYSVLIIVMACMEYEMGKKKCERYWAEPGEMQLEFGPFSVSCEAEKRKSDYIIRTLKVKFNSETRTIYQFHYKNWPDHDVPSSIDPILELIWDVRCYQEDDSVPICIHCSAGCGRTGVICAIDYTWMLLKDGIIPENFSVFSLIREMRTQRPSLVQTQEQYELVYNAVLELFKRQMDVIRDKHSGTESQAKHCIPEKNHTLQADSYSPNLPKSTTKAAKMMNQQRTKMEIKESSSFDFRTSEISAKEELVLHPAKSSTSFDFLELNYSFDKNADTTMKWQTKAFPIVGEPLQKHQSLDLGSLLFEGCSNSKPVNAAGRYFNSKVPITRTKSTPFELIQQRETKEVDSKENFSYLESQPHDSCFVEMQAQKVMHVSSAELNYSLPYDSKHQIRNASNVKHHDSSALGVYSYIPLVENPYFSSWPPSGTSSKMSLDLPEKQDGTVFPSSLLPTSSTSLFSYYNSHDSLSLNSPTNISSLLNQESAVLATAPRIDDEIPPPLPVWTPESFIVVEEAGEFSPNVPKSLSSAVKVKIGTSLEWGGTSEPKKFDDSVILRPSKSVKLRSPKSELHQDRSSPPPPLPERTLESFFLADEDCMQAQSIETYSTSYPDTMENSTSSKQTLKTPGKSFTRSKSLKILRNMKKSICNSCPPNKPAESVQSNNSSSFLNFGFANRFSKPKGPRNPPPTWNI

SEQ ID NO: 14017 - protein, 691 aa, Homo sapiens
MDQREILQKFLDEAQSKKITKEEFANEFLKLKRQSTKYKADKTYPTTVAEKPKNIKKNRYKDILPYDYSRVELSLITSDEDSSYINANFIKGVYGPKAYIATQGPLSTTLLDFWRMIWEYSVLIIVMACMEYEMGKKKCERYWAEPGEMQLEFGPFSVSCEAEKRKSDYIIRTLKVKFNSETRTIYQFHYKNWPDHDVPSSIDPILELIWDVRCYQEDDSVPICIHCSAGCGRTGVICAIDYTWMLLKDGIIPENFSVFSLIREMRTQRPSLVQTQEQYELVYNAVLELFKRQMDVIRDKHSGTESQAKHCIPEKNHTLQADSYSPNLPKSTTKAAKMMNQQRTKMEIKESSSFDFRTSEISAKEELVLHPAKSSTSFDFLELNYSFDKNADTTMKWQTKAFPIVGEPLQKHQSLDLGSLLFEGCSNSKPVNAAGRYFNSKVPITRTKSTPFELIQQRETKEVDSKENFSYLESQPHDSCFVEMQAQKVMHVSSAELNYSLPYDSKHQIRNASNVKHHDSSALGVYSYIPLVENPYFSSWPPSGTSSKMSLDLPEKQDGTVFPSSLLPTSSTSLFSYYNSHDSLSLNSPTNISSLLNQESAVLATAPRIDDEIPPPLPVWTPESFIVVEEAGEFSPNVPKSLSSAVKVKIGTSLEWGGTSEPKKFDDSVILRPSKSVKLRSPKSGKNFSWL

SEQ ID NO: 14018 - protein, 372 aa, Homo sapiens
MGWSCLVTGAGGLLGQRIVRLLVEEKELKEIRALDKAFRPELREEFSKLQNRTKLTVLEGDILDEPFLKRACQDVSVVIHTACIIDVFGVTHRESIMNVNVKGTQLLLEACVQASVPVFIYTSSIEVAGPNSYKEIIQNGHEEEPLENTWPTPYPYSKKLAEKAVLAANGWNLKNGDTLYTCALRPTYIYGEGGPFLSASINEALNNNGILSSVGKFSTVNPVYVGNVAWAHILALRALRDPKKAPSVRGQFYYISDDTPHQSYDNLNYILSKEFGLRLDSRWSLPLTLMYWIGFLLEVVSFLLSPIYSYQPPFNRHTVTLSNSVFTFSYKKAQRDLAYKPLYSWEEAKQKTVEWVGSLVDRHKETLKSKTQ

SEQ ID NO: 14019 - protein, 372 aa, Homo sapiens; identical to SEQ ID NO: 14018

SEQ ID NO: 14020 - protein, 372 aa, Homo sapiens; identical to SEQ ID NO: 14018

SEQ ID NO: 14021 - protein, 261 aa, Homo sapiens [sequence omitted]

SEQ ID NO: 14022 - protein, 375 aa, Homo sapiens [sequence omitted]

SEQ ID NO: 14023 - protein, 360 aa, Homo sapiens
MALHSMRKARERWSFIRALHKGSAAAPALQKDSKKRVFSGIQPTGILHLGNYLGAIESWVRLQDEYDSVLYSIVDLHSITVPQDPAVLRQSILDMTAVLLACGINPEKSILFQQSQVSEHTQLSWILSCMVRLPRLQHLHQWKAKTTKQKHDGTVGLLTYPVLQAADILLYKSTHVPVGEDQVQHMELVQDLAQGFNKKYGEFFPVPESILTSMKKVKSLRDPSAKMSKSDPDKLATVRITDSPEEIVQKFRKAVTDFTSEVTYDPAGRAGVSNIVAVHAAVTGLSVEEVVRRSAGMNTARYKLAVADAVIEKFAPIKREIEKLKLDKDHLEKVLQIGSAKAKELAYTVCQEVKKLVGFL

SEQ ID NO: 14024 - protein, 158 aa, Homo sapiens [sequence omitted]

SEQ ID NO: 14025 - protein, 296 aa, Homo sapiens
MMLPLQGAQMLQMLEKSLRKSLPASLKVYGTVFHINHGNPFNLKAVVDKWPDFNTVVVCPQEQDMTDDLDHYTNTYQIYSKDPQNCQEFLGSPELINWKQHLQIQSSQPSLNEAIQNLAAIKSFKVKQTQRILYMAAETAKELTPFLLKSKILSPSGGKPKAINQEMFKLSSMDVTHAHLVNKFWHFGGNERSQRFIERCIQTFPTCCLLGPEGTPVCWDLMDQTGEMRMAGTLPEYRLHGLVTYVIYSHAQKLGKLGFPVYSHVDYSNEAMQKMSYTLQHVPIPRSWNQWNCVPL

SEQ ID NO: 14026 - protein, 163 aa, Homo sapiens
MMLPLQGAQMLQMLEKSLRKSLPASLKVYGTVFHINHGNPFNLKAVVDKWPDFNTVVVCPQEQDMTDDLDHYTNTYQIYSKDPQNCQEFLGSPELINWKQHLQIQSSQPSLNEAIQNLAAIKSFKVKQTQRILYMAAETAKELTPFLLKSKILSPSGGKPKAM

SEQ ID NO: 14027 - protein, 1548 aa, Homo sapiens [sequence omitted]

SEQ ID NO: 14028 - protein, 879 aa, Homo sapiens
MRLHLLLLLALCGAGTTAAELSYSLRGNWSICNGNGSLELPGAVPGCVHSALFQQGLIQDSYYRFNDLNYRWVSLDNWTYSKEFKIPFEISKWQKVNLILEGVDTVSKILFNEVTIGETDNMFNRYSFDITNVVRDVNSIELRFQSAVLYAAQQSKAHTRYQVPPDCPPLVQKGECHVNFVRKEQCSFSWDWGPSFPTQGIWKDVRIEAYNICHLNYFTFSPIYDKSAQEWNLEIESTFDVVSSKPVGGQVIVAIPKLQTQQTYSIELQPGKRIVELFVNISKNITVETWWPHGHGNQTGYNMTVLFELDGGLNIEKSAKVYFRTVELIEEPIKGSPGLSFYFKINGFPIFLKGSNWIPADSFQDRVTSELLRLLLQSVVDANMNTLRVWGGGIYEQDEFYELCDELGIMVWQDFMFACALYPTDQGFLDSVTAEVAYQIKRLKSHPSIIIWSGNNENEEALMMNWYHISFTDRPIYIKDYVTLYVKNIRELVLAGDKSRPFITSSPTNGAETVAEAWVSQNPNSNYFGDVHFYDYISDCWNWKVFPKARFASEYGYQSWPSFSTLEKVSSTEDWSFNSKFSLHRQHHEGGNKQMLYQAGLHFKLPQSTDPLRTFKDTIYLTQVMQAQCVKTETEFYRRSRSEIVDQQGHTMGALYWQLNDIWQAPSWASLEYGGKWKMLHYFAQNFFAPLLPVGFENENTFYIYGVSDLHSDYSMTLSVRVHTWSSLEPVCSRVTERFVMKGGEAVCLYEEPVSELLRRCGNCTRESCVVSFYLSADHELLSPTNYHFLSSPKEAVGLCKAQITAIISQQGDIFVFDLETSAVAPFVWLDVGSIPGRFSDNGFLMTEKTRTILFYPWEPTSKNELEQSFHVTSLTDIY

SEQ ID NO: 14029 - protein, 342 aa, Homo sapiens [sequence omitted]

SEQ ID NO: 14030 - protein, 914 aa, Homo sapiens
MEAAVKEEISVEDEAVDKNIFRDCNKIAFYRRQKQWLSKKSTYRALLDSVTTDEDSTRFQIINEASKVPLLAEIYGIEGNIFRLKINEETPLKPRFEVPDVLTSKPSTVRLISCSGDTGSLILADGKGDLKCHITANPFKVDLVSEEEVVISINSLGQLYFEHLQILHKQRAAKENEEETSVDTSQENQEDLGLWEEKFGKFVDIKANGPSSIGLDFSLHGFEHLYGIPQHAESHQLKNTGDGDAYRLYNLDVYGYQIYDKMGIYGSVPYLLAHKLGRTIGIFWLNASETLVEINTEPAVEYTLTQMGPVAAKQKVRSRTHVHWMSESGIIDVFLLTGPTPSDVFKQYSHLTGTQAMPPLFSLGYHQCRWNYEDEQDVKAVDAGFDEHDIPYDAMWLDIEHTEGKRYFTWDKNRFPNPKRMQELLRSKKRKLVVISDPHIKIDPDYSVYVKAKDQGFFVKNQEGEDFEGVCWPGLSSYLDFTNPKVREWYSSLFAFPVYQGSTDILFLWNDMNEPSVFRGPEQTMQKNAIHHGNWEHRELHNIYGFYHQMATAEGLIKRSKGKERPFVLTRSFFAGSQKYGAVWTGDNTAEWSNLKISIPMLLTLSITGISFCGADIGGFIGNPETELLVRWYQAGAYQPFFRGHATMNTKRREPWLFGEEHTRLIREAIRERYGLLPYWYSLFYHAHVASQPVMRPLWVEFPDELKTFDMEDEYMLGSALLVHPVTEPKATTVDVFLPGSNEVWYDYKTFAHWEGGCTVKIPVALDTIPVFQRGGSVIPIKTTVGKSTGWMTESSYGLRVALSTKGSSVGELYLDDGHSFQYLHQKQFLHRKFSFCSSVLINSFADQRGHYPSKCVVEKILVLGFRKEPSSVTTHSSDGKDQPVAFTYCAKTSILSLEKLSLNIATDWEVRII

SEQ ID NO: 14031 - protein, 476 aa, Homo sapiens [sequence omitted]

SEQ ID NO: 14032 - protein, 476 aa, Homo sapiens [sequence omitted]

SEQ ID NO: 14033 - protein, 223 aa, Homo sapiens
MTSLSCDPCSTPLAKPAAGGAENLSFGKQPGLETNILKMTTPNKTPPGADPKQLERTGTVREIGSQAVWSLSSCKPGFGVDQLRDDNLETYWQSDGSQPHLVNIQFRRKTTVKTLCIYADYKSDESYTPSKISVRVGNNFHNLQEIRQLELVEPSGWIHVPLTDNHKKPTRTFMIQIAVLANHQNGRDTHMRQIKIYTPVEESSIGKFPRCTTIDFMMYRSIR

SEQ ID NO: 14034 - protein, 120 aa, Homo sapiens [sequence omitted]

SEQ ID NO: 14035 - protein, 185 aa, Homo sapiens
MTTPNKTPPGADPKQLERTGTVREIGSQAVWSLSSCKPGFGVDQLRDDNLETYWQSDGSQPHLVNIQFRRKTTVKTLCIYADYKSDESYTPSKISVRVGNNFHNLQEIRQLELVEPSGWIHVPLTDNHKKPTRTFMIQIAVLANHQNGRDTHMRQIKIYTPVEESSIGKFPRCTTIDFMMYRSIR

SEQ ID NO: 14036 - protein, 765 aa, Homo sapiens
MSGDHLHNDSQIEADFRLNDSHKHKDKHKDREHRHKEHKKEKDREKSKHSNSEHKDSEKKHKEKEKTKHKDGSSEKHKDKHKDRDKEKRKEEKVRASGDAKIKKEKENGFSSPPQIKDEPEDDGYFVPPKEDIKPLKRPRDEDDADYKPKKIKTEDTKKEKKRKLEEEEDGKLKKPKNKDKDKKVPEPDNKKKKPKKEEEQKWKWWEEERYPEGIKWKFLEHKGPVFAPPYEPLPENVKFYYDGKVMKLSPKAEEVATFFAKMLDHEYTTKEIFRKNFFKDWRKEMTNEEKNIITNLSKCDFTQMSQYFKAQTEARKQMSKEEKLKIKEENEKLLKEYGFCIMDNHKERIANFKIEPPGLFRGRGNHPKMGMLKRRIMPEDIIINCSKDAKVPSPPPGHKWKEVRHDNKVTWLVSWTENIQGSIKYIMLNPSSRIKGEKDWQKYETARRLKKCVDKIRNQYREDWKSKEMKVRQRAVALYFIDKLALRAGNEKEEGETADTVGCCSLRVEHINLHPELDGQEYVVEFDFLGKDSIRYYNKVPVEKRVFKNLQLFMENKQPEDDLFDRLNTGILNKHLQDLMEGLTAKVFRTYNASITLQQQLKELTAPDENIPAKILSYNRANRAVAILCNHQRAPPKTFEKSMMNLQTKIDAKKEQLADARRDLKSAKADAKVMKDAKTKKVVESKKKAVQRLEEQLMKLEVQATDREENKQIALGTSKLNYLDPRITVAWCKKWGVPIEKIYNKTQREKFAWAIDMADEDYEF

SEQ ID NO: 14037 - protein, 765 aa, Homo sapiens; identical to SEQ ID NO: 14036

SEQ ID NO: 14038 - protein, 715 aa, Homo sapiens
MSGDHLHNDSQIEADFRLNDSHKHKDKHKDREHRHKEHKKEKDREKSKHSNSEHKDSEKKHKEKEKTKHKDGSSEKHKDKHKDRDKEKRKEEKVRASGDAKIKKEKENGFSSPPQIKDEPEDDGYFVPPKEDIKPLKRPRDEDDADYKPKKIKTEDTKKEKKRKLEEEEDGKLKKPKNKDKDKKVPEPDNKKKKPKKEEEQKWKWWEEERYPEGIKWKFLEHKGPVFAPPYEPLPENVKFYYDGKVMKLSPKAEEVATFFAKMLDHEYTTKEIFRKNFFKDWRKEMTNEEKNIITNLSKCDFTQMSQYFKAQTEARKQMSKEEKLKIKEENEKLLKEYGFCIMDNHKERIANFKIEPPGLFRGRGNHPKMGMLKRRIMPEDIIINCSKDAKVPSPPPGHKWKEVRHDNKVTWLVSWTENIQGSIKYIMLNPSSRIKGEKDWQKYETARRLKKCVDKIRNQYREDWKSKEMKVRQRAVALYFIDKLALRAGNEKEEGETADTVGCCSLRVEHINLHPELDGQEYVVEFDFLGKDSIRYYNKVPVEKRVFKNLQLFMENKQPEDDLFDRLNTGILNKHLQDLMEGLTAKVFRTYNASITLQQQLKELTAPDENIPAKILSYNRANRAVAILCNHQRAPPKTFEKSMMNLQTKLEVQATDREENKQIALGTSKLNYLDPRITVAWCKKWGVPIEKIYNKTQREKFAWAIDMADEDYEF

SEQ ID NO: 14039 - protein, 768 aa, Homo sapiens [sequence omitted]

SEQ ID NO: 14040 - protein, 319 aa, Homo sapiens
MSVGFIGAGQLAFALAKGFTAAGVLAAHKIMASSPDMDLATVSALRKMGVKLTPHNKETVQHSDVLFLAVKPHIIPFILDEIGADIEDRHIVVSCAAGVTISSIEKKLSAFRPAPRVIRCMTNTPVVVREGATVYATGTHAQVEDGRLMEQLLSSVGFCTEVEEDLIDAVTGLSGSGPAYAFTALDALADGGVKMGLPRRLAVRLGAQALLGAAKMLLHSEQHPGQLKDNVSSPGGATIHALHVLESGGFRSLLINAVEASCIRTRELQSMADQEQVSPAAIKKTILDKVKLDSPAGTALSPSGHTKLLPRSLAPAGKD

SEQ ID NO: 14041 - protein, 139 aa, Homo sapiens
MGVKLTPHNKETVQHSDVLFLAVKPHIIPFILDEIGADIEDRHIVVSCAAGVTISSIEKKLSAFRPAPRVIRCMTNTPVVVREGATVYATGTHAQVEDGRLMEQLLSSVGFCTEVEEDLIDAVTGLSGSGPAYGAAVHG

SEQ ID NO: 14042 - protein, 273 aa, Homo sapiens
MSVGFIGAGQLAFALAKGFTAAGVLAAHKIMASSPDMDLATVSALRKMGVKLTPHNKETVQHSDVLFLAVKPHIIPFILDEIGADIEDRHIVVSCAAGVTISSIEKKLSAFRPAPRVIRCMTNTPVVVREGATVYATGTHAQVEDGRLMEQLLSSVGFCTEVEEDLIDAVTGLSGSGPAYAFTALDALADGGVKMGLPRRLAVRLGAQALLVRGCQDAAALRTAPRPAQGQRQLSWWGHHPCLACAGEWGLPLPAHQRCGGLLHPHTGAAVHG

SEQ ID NO: 14043 - protein, 217 aa, Homo sapiens
MSVGFIGAGQLAFALAKGFTAAGVLAAHKIMASSPDMDLATVSALRKMGVKLTPHNKETVQHSDVLFLAVKPHIIPFILDEIGADIEDRHIVVSCAAGVTISSIEKKLSAFRPAPRVIRCMTNTPVVVREGATVYATGTHAQVEDGRLMEQLLSSVGFCTEVEEDLIDAVTGLSGSGPAYAFTALDALADGGVKMGLPRRLAVRLGAQALLGAAVHG

SEQ ID NO: 14044 - protein, 319 aa, Homo sapiens; identical to SEQ ID NO: 14040

SEQ ID NO: 14045 - protein, 319 aa, Homo sapiens; identical to SEQ ID NO: 14040

SEQ ID NO: 14046 - protein, 288 aa, Homo sapiens
MSVGFIGAGQLAFALAKGFTAAGVLAAHKIMASSPDMDLATVSALRKMGVKLTPHNKETVQHSDVLFLAVKPHIIPFILDEIGADIEDRHIVVSCAAGVTISSIEKKLSAFRPAPRVIRCMTNTPVVVREGATVYATGTHAQVEDGRLMEQLLSSVGFCTEVEEDLIDAVTGLSGSGPAYGAAKMLLHSEQHPGQLKDNVSSPGGATIHALHVLESGGFRSLLINAVEASCIRTRELQSMADQEQVSPAAIKKTILDKVKLDSPAGTALSPSGHTKLLPRSLAPAGKD

SEQ ID NO: 14047 - protein, 319 aa, Homo sapiens; identical to SEQ ID NO: 14040

SEQ ID NO: 14048 - protein, 260 aa, Homo sapiens
MSHHWGYGKHNGPEHWHKDFPIAKGERQSPVDIDTHTAKYDPSLKPLSVSYDQATSLRILNNGHAFNVEFDDSQDKAVLKGGPLDGTYRLIQFHFHWGSLDGQGSEHTVDKKKYAAELHLVHWNTKYGDFGKAVQQPDGLAVLGIFLKVGSAKPGLQKVVDVLDSIKTKGKSADFTNFDPRGLLPESLDYWTYPGSLTTPPLLECVTWIVLKEPISVSSEQVLKFRKLNFNGEGEPEELMVDNWRPAQPLKNRQIKASFK

SEQ ID NO: 14049 - protein, 350 aa, Homo sapiens
MLEGAELYFNVDHGYLEGLVRGCKASLLTQQDYINLVQCETLEDLKIHLQTTDYGNFLANHTNPLTVSKIDTEMRKRLCGEFEYFRNHSLEPLSTFLTYMTCSYMIDNVILLMNGALQKKSVKEILGKCHPLGRFTEMEAVNIAETPSDLFNAILIETPLAPFFQDCMSENALDELNIELLRNKLYKSYLEAFYKFCKNHGDVTAEVMCPILEFEADRRAFIITLNSFGTELSKEDRETLYPTFGKLYPEGLRLLAQAEDFDQMKNVADHYGVYKPLFEAVGGSGGKTLEDVFYEREVQMNVLAFNRQFHYGVFYAYVKLKEQEIRNIVWIAECISQRHRTKINSYIPIL

SEQ ID NO: 14050 - protein, 232 aa, Homo sapiens
MTEGVLPGLYLGNFIDAKDLDQLGRNKITHIISIHESPQPLLQDITYLRIPVADTPEVPIKKHFKECINFIHCCRLNGGNCLVHCFAGISRSTTIVTAYVMTVTGLGWRDVLEAIKATRPIANPNPGFRQQLEEFGWASSQKLRRQLEERFGESPFRDEEELRALLPLCKRCRQGSATSASSAGPHSAASEGTVQRLVPRTPREAHRPLPLLARVKQTFSCLPRCLSRKGGK

SEQ ID NO: 14051 - protein, 132 aa, Homo sapiens
MTVTGLGWRDVLEAIKATRPIANPNPGFRQQLEEFGWASSQKLRRQLEERFGESPFRDEEELRALLPLCKRCRQGSATSASSAGPHSAASEGTVQRLVPRTPREAHRPLPLLARVKQTFSCLPRCLSRKGGK

SEQ ID NO: 14052 - protein, 243 aa, Homo sapiens
MGNGMTKVLPGLYLGNFIGHPASQIGSSILFLSDAKDLDQLGRNKITHIISIHESPQPLLQDITYLRIPVADTPEVPIKKHFKECINFIHCCRLNGGNCLVHCTTIVTAYVMTVTGLGWRDVLEAIKATRPIANPNPGFRQQLEEFGWASSQKLRRQLEERFGESPFRDEEELRALLPLCKRCRQGSATSASSAGPHSAASEGTVQRLVPRTPREAHRPLPLLARVKQTFSCLPRCLSRKGGK

SEQ ID NO: 14053 - protein, 206 aa, Homo sapiens [sequence omitted]

SEQ ID NO: 14054 - protein, 223 aa, Homo sapiens [sequence omitted]

SEQ ID NO: 14055 - protein, 432 aa, Homo sapiens
MLGNSAPGPATREAGSALLALQQTALQEDQENINPEKAAPVQQPRTRAALAVLKSGNPRGLAQQQRPKTRRVAPLKDLPVNDEHVTVPPWKANSKQPAFTIHVDEAEKEAQKKPAESQKIEREDALAFNSAISLPGPRKPLVPLDYPMDGSFESPHTMDMSIVLEDEKPVSVNEVPDYHEDIHTYLREMEVKCKPKVGYMKKQPDITNSMRAILVDWLVEVGEEYKLQNETLHLAVNYIDRFLSSMSVLRGKLQLVGTAAMLLASKFEEIYPPEVAEFVYITDDTYTKKQVLRMEHLVLKVLTFDLAAPTVNQFLTQYFLHQQPANCKVESLAMFLGELSLIDADPYLKYLPSVIAGAAFHLALYTVTGQSWPESLIRKTGYTLESLKPCLMDLHQTYLKAPQHAQQSIREKYKNSKYHGVSLLNPPETLNL

SEQ ID NO: 14056 - protein, 456 aa, Homo sapiens
MKETPLSNCERRFLLRAIEEKKRLDGRQTYDYRNIRISFGTDYGCCIVELGKTRVLGQVSCELVSPKLNRATEGILFFNLELSQMAAPAFEPGRQSDLLVKLNRLMERCLRNSKCIDTESLCVVAGEKVWQIRVDLHLLNHDGNIIDAASIAAIVALCHFRRPDVSVQGDEVTLYTPEERDPVPLSIHHMPICVSFAFFQQGTYLLVDPNEREERVMDGLLVIAMNKHREICTIQSSGGIMLLKDQVLRCSKIAGVKVAEITELILKALENDQKVRKEGGKFGFAESIANQRITAFKMEKAPIDTSDVEEKAEEIIAEAEPPSEVVSTPVLWTPGTAQIGEGVENSWGDLEDSEKEDDEGGGDQAIILDGIKMDTGVEVSDIGSQELGFHHVGQTGLEFLTSDAPIILSDSEEEEMIILEPDKNPKKIRTQTTSAKQEKAPSKKPVKRRKKKRAAN

SEQ ID NO: 14057 - protein, 439 aa, Homo sapiens
MKETPLSNCERRFLLRAIEEKKRLDGRQTYDYRNIRISFGTDYGCCIVELGKTRVLGQVSCELVSPKLNRATEGILFFNLELSQMAAPAFEPGRQSDLLVKLNRLMERCLRNSKCIDTESLCVVAGEKVWQIRVDLHLLNHDGNIIDAASIAAIVALCHFRRPDVSVQGDEVTLYTPEERDPVPLSIHHMPICVSFAFFQQGTYLLVDPNEREERVMDGLLVIAMNKHREICTIQSSGGIMLLKDQVLRCSKIAGVKVAEITELILKALENDQKVRKEGGKFGFAESIANQRITAFKMEKAPIDTSDVEEKAEEIIAEAEPPSEVVSTPVLWTPGTAQIGEGVENSWGDLEDSEKEDDEGGGDQAIILDGIKMDTGVEVSDIGSQDAPIILSDSEEEEMIILEPDKNPKKIRTQTTSAKQEKAPSKKPVKRRKKKRAAN

SEQ ID NO: 14058 - protein, 393 aa, Homo sapiens
MKETPLSNCERRFLLRAIEEKKRLDGRQTYDYRNIRISFGTDYGCCIVELGKTRVLGQVSCELVSPKLNRATEGILFFNLELSQMAAPAFEPGRQSDLLVKLNRLMERCLRNSKCIDTESLCVVAGEKYTPEERDPVPLSIHHMPICVSFAFFQQGTYLLVDPNEREERVMDGLLVIAMNKHREICTIQSSGGIMLLKDQVLRCSKIAGVKVAEITELILKALENDQKVRKEGGKFGFAESIANQRITAFKMEKAPIDTSDVEEKAEEIIAEAEPPSEVVSTPVLWTPGTAQIGEGVENSWGDLEDSEKEDDEGGGDQAIILDGIKMDTGVEVSDIGSQDAPIILSDSEEEEMIILEPDKNPKKIRTQTTSAKQEKAPSKKPVKRRKKKRAAN

SEQ ID NO: 14059 - protein, 377 aa, Homo sapiens
MNLCLQRLDGRQTYDYRNIRISFGTDYGCCIVELGKTRVLGQVSCELVSPKLNRATEGILFFNLELSQMAAPAFEPGRQSDLLVKLNRLMERCLRNSKCIDTESLCVVAGEKYTPEERDPVPLSIHHMPICVSFAFFQQGTYLLVDPNEREERVMDGLLVIAMNKHREICTIQSSGGIMLLKDQVLRCSKIAGVKVAEITELILKALENDQKVRKEGGKFGFAESIANQRITAFKMEKAPIDTSDVEEKAEEIIAEAEPPSEVVSTPVLWTPGTAQIGEGVENSWGDLEDSEKEDDEGGGDQAIILDGIKMDTGVEVSDIGSQDAPIILSDSEEEEMIILEPDKNPKKIRTQTTSAKQEKAPSKKPVKRRKKKRAAN

SEQ ID NO: 14060 - protein, 423 aa, Homo sapiens
MNLCLQRLDGRQTYDYRNIRISFGTDYGCCIVELGKTRVLGQVSCELVSPKLNRATEGILFFNLELSQMAAPAFEPGRQSDLLVKLNRLMERCLRNSKCIDTESLCVVAGEKVWQIRVDLHLLNHDGNIIDAASIAAIVALCHFRRPDVSVQGDEVTLYTPEERDPVPLSIHHMPICVSFAFFQQGTYLLVDPNEREERVMDGLLVIAMNKHREICTIQSSGGIMLLKDQVLRCSKIAGVKVAEITELILKALENDQKVRKEGGKFGFAESIANQRITAFKMEKAPIDTSDVEEKAEEIIAEAEPPSEVVSTPVLWTPGTAQIGEGVENSWGDLEDSEKEDDEGGGDQAIILDGIKMDTGVEVSDIGSQDAPIILSDSEEEEMIILEPDKNPKKIRTQTTSAKQEKAPSKKPVKRRKKKRAAN

SEQ ID NO: 14061 - protein, 236 aa, Homo sapiens [sequence omitted]

SEQ ID NO: 14062 - protein, 428 aa, Homo sapiens
MNNSSINNQLLPVDAIRILGIHKRAGEPLGVTFRVENNDLVIARILHGGMIDRQGLLHVGDIIKEVNGHEVGNNPKELQELLKNISGSVTLKILPSYRDTITPQQVFVKCHFDYNPYNDNLIPCKEAGLKFSKGEILQIVNREDPNWWQASHVKEGGSAGLIPSQFLEEKRKAFVRRDWDNSGPFCGTISSKKKKKMMYLTTRNAEFDRHEIQIYEEVAKMPPFQRKTLVLIGAQGVGRRSLKNRFIVLNPTRFGTTVPFTSRKPREDEKDGQAYKFVSRSEMEADIKAGKYLEHGEYEGNLYGTKIDSILEVVQTGRTCILDVNPQALKVLRTSEFMPYVVFIAAPELETLRAMHKAVVDAGITTKLLTDSDLKKTVDESARIQRAYNHYFDLIIINDNLDKAFEKLQTAIEKLRMEPQWVPISWVY

SEQ ID NO: 14063 - protein, 540 aa, Homo sapiens
MQQVLENLTELPSSTGAEEIDLIFLKGIMENPIVKSLAKAHERLEDSKLEAVSDNNLELVNEILEDITPLINVDENVAELVGILKEPHFQSLLEAHDIVASKCYDSPPSSPEMNNSSINNQLLPVDAIRILGIHKRAGEPLGVTFRVENNDLVIARILHGGMIDRQGLLHVGDIIKEVNGHEVGNNPKELQELLKNISGSVTLKILPSYRDTITPQQVFVKCHFDYNPYNDNLIPCKEAGLKFSKGEILQIVNREDPNWWQASHVKEGGSAGLIPSQFLEEKRKAFVRRDWDNSGPFCGTISSKKKKKMMYLTTRNAEFDRHEIQIYEEVAKMPPFQRKTLVLIGAQGVGRRSLKNRFIVLNPTRFGTTVPFTSRKPREDEKDGQAYKFVSRSEMEADIKAGKYLEHGEYEGNLYGTKIDSILEVVQTGRTCILDVNPQALKVLRTSEFMPYVVFIAAPELETLRAMHKAVVDAGITTKLLTDSDLKKTVDESARIQRAYNHYFDLIIINDNLDKAFEKLQTAIEKLRMEPQWVPISWVY

SEQ ID NO: 14064 - protein, 307 aa, Homo sapiens
MAALLLGAVLLVAQPQLVPSRPAELGQQELLRKAGTLQDDVRDGVAPNGSAQQLPQTIIIGVRKGGTRALLEMLSLHPDVAAAENEVHFFDWEEHYSHGLGWYLSQMPFSWPHQLTVEKTPAYFTSPKVPERVYSMNPSIRLLLILRDPSERVLSDYTQVFYNHMQKHKPYPSIEEFLVRDGRLNVDYKALNRSLYHVHMQNWLRFFPLRHIHIVDGDRLIRDPFPEIQKVERFLKLSPQINASNFYFNKTKGFYCLRDSGRDRCLHESKGRAHPQVDPKLLNKLHEYFHEPNKKFFELVGRTFDWH

SEQ ID NO: 14065 - protein, 307 aa, Homo sapiens; identical to SEQ ID NO: 14064

SEQ ID NO: 14066 - protein, 307 aa, Homo sapiens; identical to SEQ ID NO: 14064

SEQ ID NO: 14067 - protein, 307 aa, Homo sapiens; identical to SEQ ID NO: 14064

SEQ ID NO: 14068 - protein, 524 aa, Homo sapiens
MISPFLVLAIGTCLTNSLVPEKEKDPKYWRDQAQETLKYALELQKLNTNVAKNVIMFLGDGMGVSTVTAARILKGQLHHNPGEETRLEMDKFPFVALSKTYNTNAQVPDSAGTATAYLCGVKANEGTVGVSAATERSRCNTTQGNEVTSILRWAKDAGKSVGIVTTTRVNHATPSAAYAHSADRDWYSDNEMPPEALSQGCKDIAYQLMHNIRDIDVIMGGGRKYMYPKNKTDVEYESDEKARGTRLDGLDLVDTWKSFKPRYKHSHFIWNRTELLTLDPHNVDYLLGLFEPGDMQYELNRNNVTDPSLSEMVVVAIQILRKNPKGFFLLVEGGRIDHGHHEGKAKQALHEAVEMDRAIGQAGSLTSSEDTLTVVTADHSHVFTFGGYTPRGNSIFGLAPMLSDTDKKPFTAILYGNGPGYKVVGGERENVSMVDYAHNNYQAQSAVPLRHETHGGEDVAVFSKGPMAHLLHGVHEQNYVPHVMAYAACIGANLGHCAPASSAGSLAAGPLLLALALYPLSVLF

SEQ ID NO: 14069 - protein, 524 aa, Homo sapiens; identical to SEQ ID NO: 14068

SEQ ID NO: 14070 - protein, 524 aa, Homo sapiens; identical to SEQ ID NO: 14068

SEQ ID NO: 14071 - protein, 469 aa, Homo sapiens
MFLGDGMGVSTVTAARILKGQLHHNPGEETRLEMDKFPFVALSKTYNTNAQVPDSAGTATAYLCGVKANEGTVGVSAATERSRCNTTQGNEVTSILRWAKDAGKSVGIVTTTRVNHATPSAAYAHSADRDWYSDNEMPPEALSQGCKDIAYQLMHNIRDIDVIMGGGRKYMYPKNKTDVEYESDEKARGTRLDGLDLVDTWKSFKPRYKHSHFIWNRTELLTLDPHNVDYLLGLFEPGDMQYELNRNNVTDPSLSEMVVVAIQILRKNPKGFFLLVEGGRIDHGHHEGKAKQALHEAVEMDRAIGQAGSLTSSEDTLTVVTADHSHVFTFGGYTPRGNSIFGLAPMLSDTDKKPFTAILYGNGPGYKVVGGERENVSMVDYAHNNYQAQSAVPLRHETHGGEDVAVFSKGPMAHLLHGVHEQNYVPHVMAYAACIGANLGHCAPASSAGSLAAGPLLLALALYPLSVLF

SEQ ID NO: 14072 - protein, 219 aa, Homo sapiens
MGYFRCAGAGSFGRRRKMEPSTAARAWALFWLLLPLLGAVCASGPRTLVLLDNLNVRETHSLFFRSLKDRGFELTFKTADDPSLSLIKYGEFLYDNLIIFSPSVEDFGGNINVETISAFIDGGGSVLVAASSDIGDPLRELGSECGIEFDEEKTAVIDHHNYDISDLGQHTLIVADTENLLKAPTIVGKSSLNPIPSPHSVETGQGGGLLGLVVLFCFV

SEQ ID NO: 14073 - protein, 456 aa, Homo sapiens
MGYFRCAGAGSFGRRRKMEPSTAARAWALFWLLLPLLGAVCASGPRTLVLLDNLNVRETHSLFFRSLKDRGFELTFKTADDPSLSLIKYGEFLYDNLIIFSPSVEDFGGNINVETISAFIDGGGSVLVAASSDIGDPLRELGSECGIEFDEEKTAVIDHHNYDISDLGQHTLIVADTENLLKAPTIVGKSSLNPILFRGVGMVADPDNPLVLDILTGSSTSYSFFPDKPITQYPHAVGKNTLLIAGLQARNNARVIFSGSLDFFSDSFFNSAVQKAAPGSQRYSQTGNYELAVALSRWVFKEEGVLRVGPVSHHRVGETAPPNAYTVTDLVEYSIVIQQLSNGKWVPFDGDDIQLEFVRIDPFVRTFLKKKGGKYSVQFKLPDVYGVFQFKVDYNRLGYTHLYSSTQVSVRPLQHTQYERFIPSAYPYYASAFSMMLGLFIFSIVFLHMKEKEKSD

SEQ ID NO: 14074 - protein, 199 aa, Homo sapiens
MGYFRCAGAGSFGRRRKMEPSTAARAWALFWLLLPLLGAVCASGPRTLVLLDNLNVRETHSLFFRSLKDRGFELTFKTADDPSLSLIKYGEFLYDNLLEFVRIDPFVRTFLKKKGGKYSVQFKLPDVYGVFQFKVDYNRLGYTHLYSSTQVSVRPLQHTQYERFIPSAYPYYASAFSMMLGLFIFSIVFLHMKEKEKSD

SEQ ID NO: 14075 - protein, 456 aa, Homo sapiens; identical to SEQ ID NO: 14073

SEQ ID NO: 14076 - protein, 199 aa, Homo sapiens
MGYFRCAGAGSFGRRRKMEPSTAARAWALFWLLLPLLGAVCASGPRTLVLLDNLNVRETHSLFFRSLKDRGFELTFKTADDPSLSLIKYGEFLYDIQLEFVRIDPFVRTFLKKKGGKYSVQFKLPDVYGVFQFKVDYNRLGYTHLYSSTQVSVRPLQHTQYERFIPSAYPYYASAFSMMLGLFIFSIVFLHMKEKEKSD

SEQ ID NO: 14077 - protein, 581 aa, Homo sapiens
MAVRQALGRGLQLGRALLLRFTGKPGRAYGLGRPGPAAGCVRGERPGWAAGPGAEPRRVGLGLPNRLRFFRQSVAGLAARLQRQFVVRAWGCAGPCGRAVFLAFGLGLGLIEEKQAESRRAVSACQEIQAIFTQKSKPGPDPLDTRRLQGFRLEEYLIGQSIGKGCSAAVYEATMPTLPQNLEVTKSTGLLPGRGPGTSAPGEGQERAPGAPAFPLAIKMMWNISAGSSSEAILNTMSQELVPASRVALAGEYGAVTYRKSKRGPKQLAPHPNIIRVLRAFTSSVPLLPGALVDYPDVLPSRLHPEGLGHGRTLFLVMKNYPCTLRQYLCVNTPSPRLAAMMLLQLLEGVDHLVQQGIAHRDLKSDNILVELDPDGCPWLVIADFGCCLADESIGLQLPFSSWYVDRGGNGCLMAPEVSTARPGPRAVIDYSKADAWAVGAIAYEIFGLVNPFYGQGKAHLESRSYQEAQLPALPESVPPDVRQLVRALLQREASKRPSARVAANVLHLSLWGEHILALKNLKLDKMVGWLLQQSAATLLANRLTEKCCVETKMKMLFLANLECETLCQAALLLCSWRAAL

SEQ ID NO: 14078 - protein, 1052 aa, Homo sapiens
MSSAAEPPPPPPPESAPSKPAASIASGGSNSSNKGGPEGVAAQAVASAASAGPADAEMEEIFDDASPGKQKEIQEPDPTYEEKMQTDRANRFEYLLKQTELFAHFIQPAAQKTPTSPLKMKPGRPRIKKDEKQNLLSVGDYRHRRTEQEEDEELLTESSKATNVCTRFEDSPSYVKWGKLRDYQVRGLNWLISLYENGINGILADEMGLGKTLQTISLLGYMKHYRNIPGPHMVLVPKSTLHNWMSEFKRWVPTLRSVCLIGDKEQRAAFVRDVLLPGEWDVCVTSYEMLIKEKSVFKKFNWRYLVIDEAHRIKNEKSKLSEIVREFKTTNRLLLTGTPLQNNLHELWSLLNFLLPDVFNSADDFDSWFDTNNCLGDQKLVERLHMVLRPFLLRRIKADVEKSLPPKKEVKIYVGLSKMQREWYTRILMKDIDILNSAGKMDKMRLLNILMQLRKCCNHPYLFDGAEPGPPYTTDMHLVTNSGKMVVLDKLLPKLKEQGSRVLIFSQMTRVLDILEDYCMWRNYEYCRLDGQTPHDERQDSINAYNEPNSTKFVFMLSTRAGGLGINLATADVVILYDSDWNPQVDLQAMDRAHRIGQTKTVRVFRFITDNTVEERIVERAEMKLRLDSIVIQQGRLVDQNLNKIGKDEMLQMIRHGATHVFASKESEITDEDIDGILERGAKKTAEMNEKLSKMGESSLRNFTMDTESSVYNFEGEDYREKQKIAFTEWIEPPKRERKANYAVDAYFREALRVSEPKAPKAPRPPKQPNVQDFQFFPPRLFELLEKEILFYRKTIGYKVPRNPELPNAAQAQKEEQLKIDEAESLNDEELEEKEKLLTQGFTNWNKRDFNQFIKANEKWGRDDIENIAREVEGKTPEEVIEYSAVFWERCNELQDIEKIMAQIERGEARIQRRISIKKALDTKIGRYKAPFHQLRISYGTNKGKNYTEEEDRFLICMLHKLGFDKENVYDELRQCIRNSPQFRFDWFLKSRTAMELQRRCNTLITLIERENMELEEKEKAEKKKRGPKPSTQKRKMDGAPDGRGRKKKLKL

SEQ ID NO: 14079 - protein, 1052 aa, Homo sapiens; identical to SEQ ID NO: 14078

SEQ ID NO: 14080 - protein, 612 aa, Homo sapiens
MAAPEGSGLGEDARLDQETAQWLRWDKNSLTLEAVKRLIAEGNKEELRKCFGARMEFGTAGLRAAMGPGISRMNDLTIIQTTQGFCRYLEKQFSDLKQKGIVISFDARAHPSSGGSSRRFARLAATTFISQGIPVYLFSDITPTPFVPFTVSHLKLCAGIMITASHNPKQDNGYKVYWDNGAQIISPHDKGISQAIEENLEPWPQAWDDSLIDSSPLLHNPSASINNDYFEDLKKYCFHRSVNRETKVKFVHTSVHGVGHSFVQSAFKAFDLVPPEAVPEQKDPDPEFPTVKYPNPEEGKGVLTLSFALADKTKARIVLANDPDADRLAVAEKQDSGEWRVFSGNELGALLGWWLFTSWKEKNQDRSALKDTYMLSSTVSSKILRAIALKEGFHFEETLTGFKWMGNRAKQLIDQGKTVLFAFEEAIGYMCCPFVLDKDGVSAAVISAELASFLATKNLSLSQQLKAIYVEYGYHITKASYFICHDQETIKKLFENLRNYDGKNNYPKACGKFEISAIRDLTTGYDDSQPDKKAVLPTSKSSQMITFTFANGGVATMRTSGTEPKIKYYAELCAPPGNSDPEQLKKELNELVSAIEEHFFQPQKYNLQPKAD

SEQ ID NO: 14081 - protein, 452 aa, Homo sapiens [sequence omitted]

SEQ ID NO: 14082 - protein, 499 aa, Homo sapiens [sequence omitted]

SEQ ID NO: 14083 - protein, 411 aa, Homo sapiens [sequence omitted]

SEQ ID NO: 14084 - protein, 411 aa, Homo sapiens [sequence omitted]

SEQ ID NO: 14085 - protein, 411 aa, Homo sapiens [sequence omitted]

SEQ ID NO: 14086 - protein, 369 aa, Homo sapiens
MGFNRPSKIQEMALPMMLAHPPQNLIAQSQSGTGKTAAFVLAMLSRVNALELFPQCLCLAPTYELALQTGRVVEQMGKFCVDVQVMYAIRGNRIPRGTDITKQIIIGTPGTVLDWCFKLKLIDLTKIRVFVLDEADVMIDTQGFSDHSIRIQRALPSECQMLLFSATFEDSVWHFAERIIPDPNVIKLRKEELTLNNIRQYYVLCEHRKDKYQALCNIYGSITIGQAIIFCQTRRNAKWLTVEMIQDGHQVSLLSGELTVEQRASIIQRFRDGKEKVLITTNVCARGIDVKQVTIVVNFDLPVKQGEEPDYETYLHRIGRTGRFGKKGLAFNMIEVDELPSLMKIQDHFNSSIKQLNAEDMDEIEKIDY

SEQ ID NO: 14087 - protein, 483 aa, Homo sapiens
MASLLWGGDAGAAESERLNSHFSNLSQPRKNLWGIKSTAVRNIDGSINNINEDDEEDVVDLAANSLLNKLIHQSLVESSHRVEVLQKDPSSPLYSVKTFEELRLKEELLKGIYAMGFNRPSKIQEMALPMMLAHPPQNLIAQSQSGTGKTAAFVLAMLSRVNALELFPQCLCLAPTYELALQTGRVVEQMGKFCVDVQVMYAIRGNRIPRGTDITKQIIIGTPGTVLDWCFKLKLIDLTKIRVFVLDEADVMIDTQGFSDHSIRIQRALPSECQMLLFSATFEDSVWHFAERIIPDPNVIKLRKEELTLNNIRQYYVLCEHRKDKYQALCNIYGSITIGQAIIFCQTRRNAKWLTVEMIQDGHQVSLLSGELTVEQRASIIQRFRDGKEKVLITTNVCARGIDVKQVTIVVNFDLPVKQGEEPDYETYLHRIGRTGRFGKKGLAFNMIEVDELPSLMKIQDHFNSSIKQLNAEDMDEIEKIDY

SEQ ID NO: 14088 - protein, 481 aa, Homo sapiens [sequence omitted]

SEQ ID NO: 14089 - protein, 481 aa, Homo sapiens [sequence omitted]

SEQ ID NO: 14090 - protein, 43 aa, Homo sapiens [sequence omitted]

SEQ ID NO: 14091 - protein, 259 aa, Homo sapiens
MLVTSHPSSLSGISAISCPGCEEQAREEDEHEDPGGTRSIQPLLLRRSLRVETGKLIERKSSIRVPDKLQGPVMFALKIKSKYYFPEKELNLPGEERSYKSRGLSERPEQSLSNTSSPDAAATRSPVLSATVNPTVFFNIAIDSEPLGHVSFKLFADKFPKTAENFCALSTGEKAFGYKGSCFHRIIPGTGGKSIYGEKFDDENFILKHTGHGILSMANAGPSTNGSQFFICTAKSEWLDGKQVVFGKMKEGMNIVEAT

SEQ ID NO: 14092 - protein, 724 aa, Homo sapiens
MPRNSGAGYGCPHGDPSMLDSRETPQESRQDMIVRTTQEKLKTSSLTDRQPLSKESLNHALELSVPEKVNNAQWDAPEEALWTTRADGRVRLRIDPSCPQLPYTVHRMFYEALDKYGDLIALGFKRQDKWEHISYSQYYLLARRAAKGFLKLGLKQAHSVAILGFNSPEWFFSAVGTVFAGGIVTGIYTTSSPEACQYIAYDCCANVIMVDTQKQLEKILKIWKQLPHLKAVVIYKEPPPNKMANVYTMEEFMELGNEVPEEALDAIIDTQQPNQCCVLVYTSGTTGNPKGVMLSQDNITWTARYGSQAGDIRPAEVQQEVVVSYLPLSHIAAQIYDLWTGIQWGAQVCFAEPDALKGSLVNTLREVEPTSHMGVPRVWEKIMERIQEVAAQSGFIRRKMLLWAMSVTLEQNLTCPGSDLKPFTTRLADYLVLAKVRQALGFAKCQKNFYGAAPMMAETQHFFLGLNIRLYAGYGLSETSGPHFMSSPYNYRLYSSGKLVPGCRVKLVNQDAEGIGEICLWGRTIFMGYLNMEDKTCEAIDEEGWLHTGDAGRLDADGFLYITGRLKELIITAGGENVPPVPIEEAVKMELPIISNAMLIGDQRKFLSMLLTLKCTLDPDTSDQTDNLTEQAVEFCQRVGSRATTVSEIIEKKDEAVYQAIEEGIRRVNMNAAARPYHIQKWAILERDFSISGGELGPTMKLKRLTVLEKYKGIIDSFYQEQKM

SEQ ID NO: 14093 - protein, 387 aa, Homo sapiens
MSTFFSDTAWICLAVPTVLCGTVFCKYKKSSGQLWSWMVCLAGLCAVCLLILSPFWGLILFSVSCFLMYTYLSGQELLPVDQKAVLVTGGDCGLGHALCKYLDELGFTVFAGVLNENGPGAEELRRTCSPRLSVLQMDITKPVQIKDAYSKVAAMLQDRGLWAVINNAGVLGFPTDGELLLMTDYKQCMAVNFFGTVEVTKTFLPLLRKSKGRLVNVSSMGGGAPMERLASYGSSKAAVTMFSSVMRLELSKWGIKVASIQPGGFLTNIAGTSDKWEKLEKDILDHLPAEVQEDYGQDYILAQRNFLLLINSLASKDFSPVLRDIQHAILAKSPFAYYTPGKGAYLWICLAHYLPIGIYDYFAKRHFGQDKPMPRALRMPNYKKKAT

SEQ ID NO: 14094 - protein, 408 aa, Homo sapiens
MSTTVNVDSLAEYEKSQIKRALELGTVMTVFSFRKSTPERRTVQVIMETRQVAWSKTADKIEGFLDIMEIKEIRPGKNSKDFERAKAVRQKEDCCFTILYGTQFVLSTLSLAADSKEDAVNWLSGLKILHQEAMNASTPTIIESWLRKQIYSVDQTRRNSISLRELKTILPLINFKVSSAKFLKDKFVEIGAHKDELSFEQFHLFYKKLMFEQQKSILDEFKKDSSVFILGNTDRPDASAVYLHDFQRFLIHEQQEHWAQDLNKVRERMTKFIDDTMRETAEPFLFVDEFLTYLFSRENSIWDEKYDAVDMQDMNNPLSHYWISSSHNTYLTGDQLRSESSPEAYIRCLRMGCRCIELDCWDGPDGKPVIYHGWTRTTKIKFDDVVQAIKDHAFVTSRCPLSWVEVLL

SEQ ID NO: 14095 - protein, 1265 aa, Homo sapiens
MSTTVNVDSLAEYEKSQIKRALELGTVMTVFSFRKSTPERRTVQVIMETRQVAWSKTADKIEGFLDIMEIKEIRPGKNSKDFERAKAVRQKEDCCFTILYGTQFVLSTLSLAADSKEDAVNWLSGLKILHQEAMNASTPTIIESWLRKQIYSVDQTRRNSISLRELKTILPLINFKVSSAKFLKDKFVEIGAHKDELSFEQFHLFYKKLMFEQQKSILDEFKKDSSVFILGNTDRPDASAVYLHDFQRFLIHEQQEHWAQDLNKVRERMTKFIDDTMRETAEPFLFVDEFLTYLFSRENSIWDEKYDAVDMQDMNNPLSHYWISSSHNTYLTGDQLRSESSPEAYIRCLRMGCRCIELDCWDGPDGKPVIYHGWTRTTKIKFDDVVQAIKDHAFVTSSFPVILSIEEHCSVEQQRHMAKAFKEVFGDLLLTKPTEASADQLPSPSQLREKIIIKHKKLGPRGDVDVNMEDKKDEHKQQGELYMWDSIDQKWTRHYCAIADAKLSFSDDIEQTMEEEVPQDIPPTELHFGEKWFHKKVEKRTSAEKLLQEYCMETGGKDGTFLVRESETFPNDYTLSFWRSGRVQHCRIRSTMEGGTLKYYLTDNLTFSSIYALIQHYRETHLRCAEFELRLTDPVPNPNPHESKPWYYDSLSRGEAEDMLMRIPRDGAFLIRKREGSDSYAITFRARGKVKHCRINRDGRHFVLGTSAYFESLVELVSYYEKHSLYRKMRLRYPVTPELLERYNMERDINSLYDVSRMYVDPSEINPSMPQRTVKALYDYKAKRSDELSFCRGALIHNVSKEPGGWWKGDYGTRIQQYFPSNYVEDISTADFEELEKQIIEDNPLGSLCRGILDLNTYNVVKAPQGKNQKSFVFILEPKQQGDPPVEFATDRVEELFEWFQSIREITWKIDTKENNMKYWEKNQSIAIELSDLVVYCKPTSKTKDNLENPDFREIRSFVETKADSIIRQKPVDLLKYNQKGLTRVYPKGQRVDSSNYDPFRLWLCGSQMVALNFQTADKYMQMNHALFSLNGRTGYVLQPESMRTEKYDPMPPESQRKILMTLTVKVLGARHLPKLGRSIACPFVEVEICGAEYDNNKFKTTVVNDNGLSPIWAPTQEKVTFEIYDPNLAFLRFVVYEEDMFSDPNFLAHATYPIKAVKSGFRSVPLKNGYSEDIELASLLVFCEMRPVLESEEELYSSCRQLRRRQEELNNQLFLYDTHQNLRNANRDALVKEFSVNENQLQLYQEKCNKRLREKRVSNSKFYS

SEQ ID NO: 14096 - protein, 1265 aa, Homo sapiens; identical to SEQ ID NO: 14095

SEQ ID NO: 14097 - protein, 152 aa, Homo sapiens
MAGLPRRIIKETQRLLAEPVPGIKAEPDESNARYFHVVIAGPQDSPFEGGTFKLELFLPEEYPMAAPKVRFMTKIYHPNVDKLGRICLDILKDKWSPALQIRTVLLSIQALLSAPNPDDPLANDVAEQWKTNEAQAIETARAWTRLYAMNNI

SEQ ID NO: 14098 - protein, 152 aa, Homo sapiens; identical to SEQ ID NO: 14097

SEQ ID NO: 14099 - protein, 152 aa, Homo sapiens; identical to SEQ ID NO: 14097

SEQ ID NO: 14100 - protein, 426 aa, Homo sapiens
MAEMATATRLLGWRVASWRLRPPLAGFVSQRAHSLLPVDDAINGLSEEQRQLRQTMAKFLQEHLAPKAQEIDRSNEFKNLREFWKQLGNLGVLGITAPVQYGGSGLGYLEHVLVMEEISRASGAVGLSYGAHSNLCINQLVRNGNEAQKEKYLPKLISGEYIGALAMSEPNAGSDVVSMKLKAEKKGNHYILNGNKFWITNGPDADVLIVYAKTDLAAVPASRGITAFIVEKGMPGFSTSKKLDKLGMRGSNTCELIFEDCKIPAANILGHENKGVYVLMSGLDLERLVLAGGPLGLMQAVLDHTIPYLHVREAFGQKIGHFQLMQGKMADMYTRLMACRQYVYNVAKACDEGHCTAKDCAGVILYSAECATQVALDGIQCFGGNGYINDFPMGRFLRDAKLYEIGAGTSEVRRLVIGRAFNADFH

SEQ ID NO: 14101 - protein, 426 aa, Homo sapiens; identical to SEQ ID NO: 14100

SEQ ID NO: 14102 - protein, 1181 aa, Homo sapiens
MSLLNPVLLPPKVKAYLSQGERFIKWDDETTVASPVILRVDPKGYYLYWTYQSKEMEFLDITSIRDTRFGKFAKMPKSQKLRDVFNMDFPDNSFLLKTLTVVSGPDMVDLTFHNFVSYKENVGKAWAEDVLALVKHPLTANASRSTFLDKILVKLKMQLNSEGKIPVKNFFQMFPADRKRVEAALSACHLPKGKNDAINPEDFPEPVYKSFLMSLCPRPEIDEIFTSYHAKAKPYMTKEHLTKFINQKQRDSRLNSLLFPPARPDQVQGLIDKYEPSGINAQRGQLSPEGMVWFLCGPENSVLAQDKLLLHHDMTQPLNHYFINSSHNTYLTAGQFSGLSSAEMYRQVLLSGCRCVELDCWKGKPPDEEPIITHGFTMTTDIFFKEAIEAIAESAFKTSPYPIILSFENHVDSPRQQAKMAEYCRTIFGDMLLTEPLEKFPLKPGVPLPSPEDLRGKILIKNKKNQFSGPTSSSKDTGGEAEGSSPPSAPAVWAGEEGTELEEEEVEEEEEEESGNLDEEEIKKMQSDEGTAGLEVTAYEEMSSLVNYIQPTKFVSFEFSAQKNRSYVISSFTELKAYDLLSKASVQFVDYNKRQMSRIYPKGTRMDSSNYMPQMFWNAGCQMVALNFQTMDLPMQQNMAVFEFNGQSGYLLKHEFMRRPDKQFNPFSVDRIDVVVATTLSITVISGQFLSERSVRTYVEVELFGLPGDPKRRYRTKLSPSTNSINPVWKEEPFVFEKILMPELASLRVAVMEEGNKFLGHRIIPINALNSGYHHLCLHSESNMPLTMPALFIFLEMKDYIPGAWADLTVALANPIKFFSAHDTKSVKLKEAMGGLPEKPFPLASPVASQVNGALAPTSNGSPAARAGAREEAMKEAAEPRTASLEELRELKGVVKLQRRHEKELRELERRGARRWEELLQRGAAQLAELGPPGVGGVGACKLGPGKGSRKKRSLPREESAGAAPGEGPEGVDGRVRELKDRLELELLRQGEEQYECVLKRKEQHVAEQISKMMELAREKQAAELKALKETSENDTKEMKKKLETKRLERIQGMTKVTTDKMAQERLKREINNSHIQEVVQVIKQMTENLERHQEKLEEKQAACLEQIREMEKQFQKEALAEYEARMKGLEAEVKESVRACLRTCFPSEAKDKPERACECPPELCEQDPLIAKADAQESRL

SEQ ID NO: 14103 - protein, 1181 aa, Homo sapiens; identical to SEQ ID NO: 14102

SEQ ID NO: 14104 - protein, 1313 aa, Homo sapiens
MASELGARDDGGCTELAKPLYLQYLERALRLDHFLRQTSAIFNRNISSDDSEDGLDDSNPLLPQSGDPLIQVKEEPPNSLLGETSGAGSSGMLNTYSLNGVLQSESKCDKGNLYNFSKLKKSRKWLKSILLSDESSEADSQSEDDDEEELNLSREELHNMLRLHKYKKLHQNKYSKDKELQQYQYYSAGLLSTYDPFYEQQRHLLGPKKKKFKEEKKLKAKLKKVKKKRRRDEELSSEESPRRHHHQTKVFAKFSHDAPPPGTKKKHLSIEQLNARRRKVWLSIVKKELPKANKQKASARNLFLTNSRKLAHQCMKEVRRAALQAQKNCKETLPRARRLTKEMLLYWKKYEKVEKEHRKRAEKEALEQRKLDEEMREAKRQQRKLNFLITQTELYAHFMSRKRDMGHDGIQEEILRKLEDSSTQRQIDIGGGVVVNITQEDYANKSGTGFGESYSLANPSIRAGEDIPQPTIFNGKLKGYQLKGMNWLANLYEQGINGILADEMGLGKTVQSIALLAHLAERENIWGPFLIISPASTLNNWHQEFTRFVPKFKVSLFTLPLLYLQKTLYTQDAPFHVVITSYQLVVQDVKYFQRVKWQYMVLDEAQALKSSSSVRWKILLQFQCRNRLLLTGTPIQNTMAELWALLHFIMPTLFDSHEEFNEWFSKDIESHAENKSAIDENQLSRLHMILKPFMLRRIKKDVENELSDKNCLALLPRLECNGVISAHCNLWLPGSGNSPASASQGAETTGACHHAWLIFVFLVEMRLPHVGQAALKLLASRDPPASASQSAGRSQFFPEPAGGLWSIRPQNGWSFIRIPGKESLITDSGKLYALDVLLTRLKSQGHRVLIYSQMTRMIDLLEEYMVYRKHTYMRLDGSSKISERRDMVADFQNRNDIFVFLLSTRAGGLGINLTAADTVIFYDSDWNPTVDQQAMDRAHRLGQTKQVTVYRLICKGTIEERILQRAKEKSEIQRMVISGGNFKPDTLKPKEVVSLLLDDEELEKKLRLRQEEKRQQEETNRVKERKRKREKYAEKKKKEDELDGKRRKEGVNLVIPFVPSADNSNLSADGDDSFISVDSAMPSPFSEISISSELHTGSIPLDESSSDMLVIVDDPASSAPQSRATNSPASITGSVSDTVNGISIQEMPAAGRGHSARSRGRPKGSGSTAKGAGKGRSRKSTAGSAAAMAGAKAGAAAASAAAYAAYGYNVSKAQTLVTKATGSKEAYAGLVLTFLSLSVPTGISASSPLQTSLVRPAGLADFGPSSASSPLSSPLSKGNNVPGNPKNLHMTSSLAPDSLVRKQGKGTNPSGGR

SEQ ID NO: 14105 - protein, 1616 aa, Homo sapiens
MASELGARDDGGCTELAKPLYLQYLERALRLDHFLRQTSAIFNRNISSDDSEDGLDDSNPLLPQSGDPLIQVKEEPPNSLLGETSGAGSSGMLNTYSLNGVLQSESKCDKGNLYNFSKLKKSRKWLKSILLSDESSEADSQSEDDDEEELNLSREELHNMLRLHKYKKLHQNKYSKDKELQQYQYYSAGLLSTYDPFYEQQRHLLGPKKKKFKEEKKLKAKLKKVKKKRRRDEELSSEESPRRHHHQTKVFAKFSHDAPPPGTKKKHLSIEQLNARRRKVWLSIVKKELPKANKQKASARNLFLTNSRKLAHQCMKEVRRAALQAQKNCKETLPRARRLTKEMLLYWKKYEKVEKEHRKRAEKEALEQRKLDEEMREAKRQQRKLNFLITQTELYAHFMSRKRDMGHDGIQEEILRKLEDSSTQRQIDIGGGVVVNITQEDYDSNHFKAQALKNAENAYHIHQARTRSFDEDAKESRAAALRAANKSGTGFGESYSLANPSIRAGEDIPQPTIFNGKLKGYQLKGMNWLANLYEQGINGILADEMGLGKTVQSIALLAHLAERENIWGPFLIISPASTLNNWHQEFTRFVPKFKVLPYWGNPHDRKVIRRFWSQKTLYTQDAPFHVVITSYQLVVQDVKYFQRVKWQYMVLDEAQALKSSSSVRWKILLQFQCRNRLLLTGTPIQNTMAELWALLHFIMPTLFDSHEEFNEWFSKDIESHAENKSAIDENQLSRLHMILKPFMLRRIKKDVENELSDKIEILMYCQLTSRQKLLYQALKNKISIEDLLQSSMGSTQQAQNTTSSLMNLVMQFRKVCNHPELFERQETWSPFHISLKPYHISKFIYRHGQIRVFNHSRDRWLRVLSPFAPDYIQRSLFHRKGINEESCFSFLRFIDISPAEMANLMLQGLLARWLALFLSLKASYRLHQLRSWGAPEGESHQRYLRNKDFLLGVNFPLSFPNLCSCPLLKSLVFSSHCKAVSGYSDQVVHQRRSATSSLRRCLLTELPSFLCVASPRRLERLRFLQLEQEHTCPQEGRAERLRGQPLKVTAVPLDSYCNDRSAEYERRVLKEGGSLAAKQCLLNGAPELAADWLNRRSQFFPEPAGGLWSIRPQNGWSFIRIPGKESLITDSGKLYALDVLLTRLKSQGHRVLIYSQMTRMIDLLEEYMVYRKHTYMRLDGSSKISERRDMVADFQNRNDIFVFLLSTRAGGLGINLTAADTVIFYDSDWNPTVDQQAMDRAHRLGQTKQVTVYRLICKGTIEERILQRAKEKSEIQRMVISGGNFKPDTLKPKEVVSLLLDDEELEKKLRLRQEEKRQQEETNRVKERKRKREKYAEKKKKEDELDGKRRKEGVNLVIPFVPSADNSNLSADGDDSFISVDSAMPSPFSEISISSELHTGSIPLDESSSDMLVIVDDPASSAPQSRATNSPASITGSVSDTVNGISIQEMPAAGRGHSARSRGRPKGSGSTAKGAGKGRSRKSTAGSAAAMAGAKAGAAAASAAAYAAYGYNVSKAQTLVTKATGSKEAYAGLVLTFLSLSVPTGISASSPLQTSLVRPAGLADFGPSSASSPLSSPLSKGNNVPGNPKNLHMTSSLAPDSLVRKQGKGTNPSGGR

SEQ ID NO: 14106 - protein, 126 aa, Homo sapiens
MVEISLKSVISHRASKGDCIPVVHSLQAAPQVSEPQSVIIGESSDCERWWRPLSMVEARGSLSTGSCVPSNSSHPAWFTPREPSDPTSNRSTFHPGDSQKPVKRPGATSISRTASLPLLQSPLCPS

SEQ ID NO: 14107 - protein, 1556 aa, Homo sapiens
MASELGARDDGGCTELAKPLYLQYLERALRLDHFLRQTSAIFNRNISSDDSEDGLDDSNPLLPQSGDPLIQVKEEPPNSLLGETSGAGSSGMLNTYSLNGVLQSESKCDKGNLYNFSKLKKSRKWLKSILLSDESSEADSQSEDDDEEELNLSREELHNMLRLHKYKKLHQNKYSKDKELQQYQYYSAGLLSTYDPFYEQQRHLLGPKKKKFKEEKKLKAKLKKVKKKRRRDEELSSEESPRRHHHQTKVFAKFSHDAPPPGTKKKHLSIEQLNARRRKVWLSIVKKELPKANKQKASARNLFLTNSRKLAHQCMKEVRRAALQAQKNCKETLPRARRLTKEMLLYWKKYEKVEKEHRKRAEKEALEQRKLDEEMREAKRQQRKLNFLITQTELYAHFMSRKRDMGHDGIQEEILRKLEDSSTQRQIDIGGGVVVNITQEDYDSNHFKAQALKNAENAYHIHQARTRSFDEDAKESRAAALRAANKSGTGFGESYSLANPSIRAGEDIPQPTIFNGKLKGYQLKGMNWLANLYEQGINGILADEMGLGKTVQSIALLAHLAERENIWGPFLIISPASTLNNWHQEFTRFVPKFKVLPYWGNPHDRKVIRRFWSQKTLYTQDAPFHVVITSYQLVVQDVKYFQRVKWQYMVLDEAQALKSSSSVRWKILLQFQCRNRLLLTGTPIQNTMAELWALLHFIMPTLFDSHEEFNEWFSKDIESHAENKSAIDENQLSRLHMILKPFMLRRIKKDVENELSDKIEILMYCQLTSRQKLLYQALKNKISIEDLLQSSMGSTQQAQNTTSSLMNLVMQFRKVCNHPELFERQETWSPFHISLKPYHISKFIYRHGQIRVFNHSRDRWLRVLSPFAPDYIQRSLFHRKGINEESCFSFLRFIDISPAEMANLMLQGLLARWLALFLSLKASYRLHQLRSWGAPEGESHQRYLRNKDFLLGVNFPLSFPNLCSCPLLKSLVFSSHCKAVSGYSDQVVHQRRSATSSLRRCLLTELPSFLCVASPRVTAVPLDSYCNDRSAEYERRVLKEGGSLAAKQCLLNGAPELAADWLNRRSQFFPEPAGGLWSIRPQNGWSFIRIPGKESLITDSGKLYALDVLLTRLKSQGHRVLIYSQMTRMIDLLEEYMVYRKHTYMRLDGSSKISERRDMVADFQNRNDIFVFLLSTRAGGLGINLTAADTVIFYDSDWNPTVDQQAMDRAHRLGQTKQVTVYRLICKGTIEERILQRAKEKSEIQRMVISGGNFKPDTLKPKEVVSLLLDDEELEKKLRLRQEEKRQQEETNRVKERKRKREKYAEKKKKEDELDGKRRKEGVNLVIPFVPSADNSNLSADGDDSFISVDSAMPSPFSEISISSELHTGSIPLDESSSDMLVIVDDPASSAPQSRATNSPASITGSVSDTVNGISIQEMPAAGRGHSARSRGRPKGSGSTAKGAGKGRSRKSTAGSAAAMAGAKAGAAAASAAAYAAYGYNVSKGISASSPLQTSLVRPAGLADFGPSSASSPLSSPLSKGNNVPGNPKNLHMTSSLAPDSLVRKQGKGTNPSGGR

SEQ ID NO: 14108 - protein, 545 aa, Homo sapiens
MWLDRRGWLRVLGHWRYDLRRPSFTRTWSGDKGPMAETVSTQVGTEGGLRASHQQNGDAGGDAKVELSPGPPKPAGREVEPAPVGGEHPSAAAPGPGKHKKRRGATRERVVPPPKKRRTGVSFGDEHFAETSYYFEGGLRKVRPYYFDFRTYCKGRWVGHSLLHVFSTEFRAQPLAYYEAAVRAGRLQLNEKPVQDLNIVLKDNDFLRNTVHRHEPPVTAEPIRLLAENEDVVVVDKPSSIPVHPCGRFRHNTVIFILGKEHQLKELHPLHRLDRLTSGVLMFAKTAAVSERIHEQVRDRQLEKEYVCRVEGEFPTEEVTCKEPILVVSYKVGVCRVDPRGKPCETVFQRLSYNGQSSVVRCRPLTGRTHQIRVHLQFLGHPILNDPIYNSVAWGPSRGRGGYIPKTNEELLRDLVAEHQAKQSLDVLDLCEGDLSPGLTDSTAPSSELGKDDLEELAAAAQKMEEVAEAAPQELDTIALASEKAVETDVMNQETDPLCAECRLVRQDPLPQDLVMFLHALRYKGPGFEYFSPMPAWAQDDWQKD

SEQ ID NO: 14109 - protein, 545 aa, Homo sapiens; identical to SEQ ID NO: 14108

SEQ ID NO: 14110 - protein, 541 aa, Homo sapiens
MKSYTPYFILLWSAVGIAKAAKIIIVPPIMFESHMYIFKTLASALHERGHHTVFLLSEGRDIAPSNHYSLQRYPGIFNSTTSDAFLQSKMRNIFSGRLTAIELFDILDHYTKNCDLMVGNHALIQGLKKEKFDLLLVDPNDMCGFVIAHLLGVKYAVFSTGLWYPAEVGAPAPLAYVPEFNSLLTDRMNLLQRMKNTGVYLISRLGVSFLVLPKYERIMQKYNLLPEKSMYDLVHGSSLWMLCTDVALEFPRPTLPNVVYVGGILTKPASPLPEDLQRWVNGANEHGFVLVSFGAGVKYLSEDIANKLAGALGRLPQKVIWRFSGPKPKNLGNNTKLIEWLPQNDLLGHSKIKAFLSHGGLNSIFETMYHGVPVVGIPLFGDHYDTMTRVQAKGMGILLEWKTVTEKELYEALVKVINNPSYRQRAQKLSEIHKDQPGHPVNRTIYWIDYIIRHNGAHHLRAAVHQISFCQYFLLDIAFVLLLGAALLYFLLSWVTKFIYRKIKSLWSRNKHSTVNGHYHNGILNGKYKRNGHIKHEKKVK

SEQ ID NO: 14111 - protein, 336 aa, Homo sapiens
MAASLRLLGAASGLRYWSRRLRPAAGSFAAVCSRSVASKTPVGFIGLGNMGNPMAKNLMKHGYPLIIYDVFPDACKEFQDAGEQVVSSPADVAEKADRIITMLPTSINAIEAYSGANGILKKVKKGSLLIDSSTIDPAVSKELAKEVEKMGAVFMDAPVSGGVGAARSGNLTFMVGGVEDEFAAAQELLGCMGSNVVYCGAVGTGQAAKICNNMLLAISMIGTAEAMNLGIRLGLDPKLLAKILNMSSGRCWSSDTYNPVPGVMDGVPSANNYQGGFGTTLMAKDLGLAQDSATSTKSPILLGSLAHQIYRMMCAKGYSKKDFSSVFQFLREEETF

SEQ ID NO: 14112 - protein, 336 aa, Homo sapiens; identical to SEQ ID NO: 14111

SEQ ID NO: 14113 - protein, 235 aa, Homo sapiens
MLPTSINAIEAYSGANGILKKVKKGSLLIDSSTIDPAVSKELAKEVEKMGAVFMDAPVSGGVGAARSGNLTFMVGGVEDEFAAAQELLGCMGSNVVYCGAVGTGQAAKICNNMLLAISMIGTAEAMNLGIRLGLDPKLLAKILNMSSGRCWSSDTYNPVPGVMDGVPSANNYQGGFGTTLMAKDLGLAQDSATSTKSPILLGSLAHQIYRMMCAKGYSKKDFSSVFQFLREEETF

SEQ ID NO: 14114 - protein, 266 aa, Homo sapiens [sequence omitted]

SEQ ID NO: 14115 - protein, 266 aa, Homo sapiens [sequence omitted]

SEQ ID NO: 14116 - protein, 178 aa, Homo sapiens
MHVNGKVALVTGAAQGIGRAFAEALLLKGAKVALVDWNLEAGVQCKAALDEQFEPQKTLFIQCDVADQQQLRDTFRKVVDHFGRLDILVNNAGVNNEKNWEKTLQINLVSVISGTYLGLDYMSKQNGGEGGIIINMSSLAGLMPVAQQPVYCASKHGIVGFTRSAAPTIDCQWIDNTH

SEQ ID NO: 14117 - protein, 259 aa, Homo sapiens [sequence omitted]

SEQ ID NO: 14118 - protein, 346 aa, Homo sapiens
MARKSNLPVLLVPFLLCQALVRCSSPLPLVVNTWPFKNATEAAWRALASGGSALDAVESGCAMCEREQCDGSVGFGGSPDELGETTLDAMIMDGTTMDVGAVGDLRRIKNAIGVARKVLEHTTHTLLVGESATTFAQSMGFINEDLSTSASQALHSDWLARNCQPNYWRNVIPDPSKYCGPYKPPGILKQDIPIHKETEDDRGHDTIGMVVIHKTGHIAAGTSTNGIKFKIHGRVGDSPIPGAGAYADDTAGAAAATGNGDILMRFLPSYQAVEYMRRGEDPTIACQKVISRIQKHFPEFFGAVICANVTGSYGAACNKLSTFTQFSFMVYNSEKNQPTEEKVDCI

SEQ ID NO: 14119 - protein, 346 aa, Homo sapiens; identical to SEQ ID NO: 14118

SEQ ID NO: 14120 - protein, 209 aa, Homo sapiens [sequence omitted]

SEQ ID NO: 14121 - protein, 518 aa, Homo sapiens [sequence omitted]

SEQ ID NO: 14122 - protein, 507 aa, Homo sapiens
MTSGVKQKIMSVIREWGSGSDTLRCLALATHDNPLRREEMHLEDSANFIKYETNLTFVGCVGMLDPPRIEVASSVKLCRQAGIRVIMITGDNKGTAVAICRRIGIFGQDEDVTSKAFTGREFDELNPSAQRDACLNARCFARVEPSHKSKIVEFLQSFDEITAMTGDGVNDAPALKKAEIGIAMGSGTAVAKTASEMVLADDNFSTIVAAVEEGRAIYNNMKQFIRYLISSNVGEVVCIFLTAALGFPEALIPVQLLWVNLVTDGLPATALGFNPPDLDIMNKPPRNPKEPLISGWLFFRYLAIGCYVGAATVGAAAWWFIAADGGPRVSFYQLSHFLQCKEDNPDFEGVDCAIFESPYPMTMALSVLVTIEMCNALNSLSENQSLLRMPPWENIWLVGSICLSMSLHFLILYVEPLPLIFQITPLNVTQWLMVLKISLPVILMDETLKFVARNYLEPGKECVQPATKSCSFSACTDGISWPFVLLIMPLVIWVYSTDTNFSDMFWS

SEQ ID NO: 14123 - protein, 917 aa, Homo sapiens
MGKVYRQDRKSVQRIKAKDIVPGDIVEIAVGDKVPADIRLTSIKSTTLRVDQSILTGESVSVIKHTDPVPDPRAVNQDKKNMLFSGTNIAAGKAMGVVVATGVNTEIGKIRDEMVATEQERTPLQQKLDEFGEQLSKVISLICIAVWIINIGHFNDPVHGGSWIRGAIYYFKIAVALAVAAIPEGLPAVITTCLALGTRRMAKKNAIVRSLPSVETLGCTSVICSDKTGTLTTNQMSVCRMFILDRVEGDTCSLNEFTITGSTYAPIGEVHKDDKPVNCHQYDGLVELATICALCNDSALDYNEAKGVYEKVGEATETALTCLVEKMNVFDTELKGLSKIERANACNSVIKQLMKKEFTLEFSRDRKSMSVYCTPNKPSRTSMSKMFVKGAPEGVIDRCTHIRVGSTKVPMTSGVKQKIMSVIREWGSGSDTLRCLALATHDNPLRREEMHLEDSANFIKYETNLTFVGCVGMLDPPRIEVASSVKLCRQAGIRVIMITGDNKGTAVAICRRIGIFGQDEDVTSKAFTGREFDELNPSAQRDACLNARCFARVEPSHKSKIVEFLQSFDEITAMTGDGVNDAPALKKAEIGIAMGSGTAVAKTASEMVLADDNFSTIVAAVEEGRAIYNNMKQFIRYLISSNVGEVVCIFLTAALGFPEALIPVQLLWVNLVTDGLPATALGFNPPDLDIMNKPPRNPKEPLISGWLFFRYLAIGCYVGAATVGAAAWWFIAADGGPRVSFYQLSHFLQCKEDNPDFEGVDCAIFESPYPMTMALSVLVTIEMCNALNSLSENQSLLRMPPWENIWLVGSICLSMSLHFLILYVEPLPLIFQITPLNVTQWLMVLKISLPVILMDETLKFVARNYLEPGKECVQPATKSCSFSACTDGISWPFVLLIMPLVIWVYSTDTNFSDMFWS

SEQ ID NO: 14124 - protein, 872 aa, Homo sapiens
MGKVYRQDRKSVQRIKAKDIVPGDIVEIAVGDKVPADIRLTSIKSTTLRVDQSILTGESVSVIKHTDPVPDPRAVNQDKKNMLFSGTNIAAGKAMGVVVATGVNTEIGKIRDEMVATEQERTPLQQKLDEFGEQLSKVISLICIAVWIINIGHFNDPVHGGSWIRGAIYYFKIAVALAVAAIPEGLPAVITTCLALGTRRMAKKNAIVRSLPSVETLGCTSVICSDKTGTLTTNQMSVCRMFILDRVEGDTCSLNEFTITGSTYAPIGEVHKDDKPVNCHQYDGLVELATICALCNDSALDYNEAKGVYEKVGEATETALTCLVEKMNVFDTELKGLSKIERANACNSVIKQLMKKEFTLEFSRDRKSMSVYCTPNKPSRTSMSKMFVKGAPEGVIDRCTHIRVGSTKVPMTSGVKQKIMSVIREWGSGSDTLRCLALATHDNPLRREEMHLEDSANFIKYETNLTFVGCVGMLDPPRIEVASSVKLCRQAGIRVIMITGDNKGTAVAICRRIGIFGQDEDVTSKAFTGREFDELNPSAQRDACLNARCFARVEPSHKSKIVEFLQSFDEITAMTGDGVNDAPALKKAEIGIAMGSGTAVAKTASEMVLADDNFSTIVAAVEEGRAIYNNMKQFIRYLISSNVGEVVCIFLTAALGFPEALIPVQLLWVNLVTDGLPATALGFNPPDLDIMNKPPRNPKEPLISGWLFFRYLAIGCYVGAATVGAAAWWFIAADGGPRVSFYQLSHFLQCKEDNPDFEGVDCAIFESPYPMTMALSVLVTIEMCNALNSLSENQSLLRMPPWENIWLVGSICLSMSLHFLILYVEPLPLIFQITPLNVTQWLMVLKISLPVILMDETLKFVARNYLEPAILE

SEQ ID NO: 14125 - protein, 1050 aa, Homo sapiens
MLCWGYWSLGQPGISTNLQGIVAEPQVCGFISDRSVKEVACGGNHSVFLLEDGEVYTCGLNTKGQLGHEREGNKPEQIGALADQHIIHVACGESHSLALSDRGQLFSWGAGSDGQLGLMTTEDSVAVPRLIQKLNQQTILQVSCGNWHCLALAADGQFFTWGKNSHGQLGLGKEFPSQASPQRVRSLEGIPLAQVAAGGAHSFALSLSGAVFGWGMNNAGQLGLSDEKDRESPCHVKLLRTQKVVYISCGEEHTAVLTKSGGVFTFGAGSCGQLGHDSMNDEVNPRRVLELMGSEVTQIACGRQHTLAFVPSSGLIYAFGCGARGQLGTGHTCNVKCPSPVKGYWAAHSGQLSARADRFKYHIVKQIFSGGDQTFVLCSKYENYSPAVDFRTMNQAHYTSLINDETIAVWRQKLSEHNNANTINGVVQILSSAACWNGSFLEKKIDEHFKTSPKIPGIDLNSTRVLFEKLMNSQHSMILEQILNSFESCLIPQLSSSPPDVEAMRIYLILPEFPLLQDSKYYITLTIPLAMAILRLDTNPSKVLDNWWSQVCPKYFMKLVNLYKGAVLYLLRGRKTFLIPVLFNNYITAALKLLEKLYKVNLKVKHVEYDTFYIPEISNLVDIQEDYLMWFLHQAGMKARPSIIQDTVTLCSYPFIFDAQAKTKMLQTDAELQMQVAVNGANLQNVFMLLTLEPLLARSPFLVLHVRRNNLVGDALRELSIHSDIDLKKPLKVIFDGEEAVDAGGVTKEFFLLLLKELLNPIYGMFTYYQDSNLLWFSDTCFVEHNWFHLIGITCGLAIYNSTVVDLHFPLALYKKLLNVKPGLEDLKELSPTEGRSLQELLDYPGEDVEETFCLNFTICRESYGVIEQKKLIPGGDNVTVCKDNRQEFVDAYVNYVFQISVHEWYTAFSSGFLKVCGGKVLELFQPSELRAMMVGNSNYNWEELEETAIYKGDYSATHPTVKLFWETFHEFPLEKKKKFLLFLTGSDRIPIYGMASLQIVIQSTASGEEYLPVAHTCYNLLDLPKYSSKEILSARLTQALDNYEGFSLA

SEQ ID NO: 14126 - protein, 1162 aa, Homo sapiens
MEEVRCPEHGTFCFLKTGVRDGPNKGKSFYVCRADTCSFVRATDIPVSHCLLHEDFVVELQGLLLPQDKKEYRLFFRCIRSKAEGKRWCGSIPWQDPDSKEHSVSNKSQHASETFHHSSNWLRNPFKVLDKNQEPALWKQLIKGEGEEKKADKKQREKGDQLFDQKKEQKPEMMEKDLSSGLVPKKKQSVVQEKKQEEGAEIQCEAETGGTHKRDFSEIKSQQCQGNELTRPSASSQEKSSGKSQDVQRESEPLREKVTQLLPQNVHSHNSISKPQKGGPLNKEYTNWEAKETKAKDGPSIQATQKSLPQGHFQERPETHSVPAPGGPAAQAAPAAPGLSLGEGREAATSSDDEEEDDVVFVSSKPGSPLLFDSTLDLETKENLQFPDRSVQRKVSPASGVSKKVEPSDPVARRVYLTTQLKQKKSTLASVNIQALPDKGQKLIKQIQELEEVLSGLTLSPEQGTNEKSNSQVPQQSHFTKTTTGPPHLVPPQPLPRRGTQPVGSLELKSACQVTAGGSSQCYRGHTNQDHVHAVWKITSEAIGQLHRSLESCPGETVVAEDPAGLKVPLLLHQKQALAWLLWRESQKPQGGILADDMGLGKTLTMIALILTQKNQEKKEEKEKSTALTWLSKDDSCDFTSHGTLIICPASLIHHWKNEVEKRVNSNKLRVYLYHGPNRDSRARVLSTYDIVITTYSLVAKEIPTNKQEAEIPGANLNVEGTSTPLLRIAWARIILDEAHNVKNPRVQTSIAVCKLQACARWAVTGTPIQNNLLDMYSLLKFLRCSPFDEFNLWRSQVDNGSKKGGERLSILTKSLLLRRTKDQLDSTGRPLVILPQRKFQLHHLKLSEDEETVYNVFFARSRSALQSYLKRHESRGNQSGRSPNNPFSRVALEFGSEEPRHSEAADSPRSSTVHILSQLLRLRQCCCHLSLLKSALDPMELKGEGLVLSLEEQLSALTLSELRDSEPSSTVSLNGTFFKMELFEGMRESTKISSLLAELEAIQRNSASQKSVIVSQWTNMLKVVALHLKKHGLTYATIDGSVNPKQRMDLVEAFNHSRGPQVMLISLLAGGVGLNLTGGNHLFLLDMHWNPSLEDQACDRIYRVGQQKDVVIHRFVCEGTVEEKILQLQEKKKDLAKQVLSGSGESVTKLTLADLRVLFGI

SEQ ID NO: 14127 - protein, 1162 aa, Homo sapiens; identical to SEQ ID NO: 14126

SEQ ID NO: 14128 - protein, 130 aa, Homo sapiens [sequence omitted]

SEQ ID NO: 14129 - protein, 256 aa, Homo sapiens
MVKVKPGVNGLGCIGCVVTRAAFNSGKVDIVAINDAFNDLNYMVYMFQYDFTHGEFHGTVKAENRKLVINRDPITIFQELDSTRIKWAPQAKIIHDNFGTVEGLVTTVHTITATQKTVDGPSRKLCHNSRRALQNIILASTGTAKPVGKGILAYTEHQAVSSDFNSDTHSSTFDTGAGIALNDHFVKLISCYDNEFGYSNRVVDFMAHMASKENLSSTGLNEKATVTEEIDVYLDSGAPGKNPPVFTMAVPGACRT

SEQ ID NO: 14130 - protein, 35 aa, Homo sapiens
MAPPGNCVITAAGLSRTSSLPLPALPSLWARSSLS

SEQ ID NO: 14131 - protein, 576 aa, Homo sapiens
MPALSTGSGSDTGLYELLAALPAQLQPHVDSQEDLTFLWDMFGEKSLHSLVKIHEKLHYYEKQSPVPILHGAAALADDLAEELQNKPLNSEIRELLKLLSKPNVKALLSVHDTVAQKNYDPVLPPMPEDIDDEEDSVKIIRLVKNREPLGATIKKDEQTGAIIVARIMRGGAADRSGLIHVGDELREVNGIPVEDKRPEEIIQILAQSQGAITFKIIPGSKEETPSKEGKMFIKALFDYNPNEDKAIPCKEAGLSFKKGDILQIMSQDDATWWQAKHEADANPRAGLIPSKHFQERRLALRRPEILVQPLKVSNRKSSGFRRSFRLSRKDKKTNKSMYECKKSDQYDTADVPTYEEVTPYRRQTNEKYRLVVLVGPVGVGLNELKRKLLISDTQHYGVTVPHTTRARRSQESDGVEYIFISKHLFETDVQNNKFIEYGEYKNNYYGTSIDSVRSVLAKNKVCLLDVQPHTVKHLRTLEFKPYVIFIKPPSIERLRETRKNAKIISSRDDQGAAKPFTEEDFQEMIKSAQIMESQYGHLFDKIIINDDLTVAFNELKTTFDKLETETHWVPVSWLHS

SEQ ID NO: 14132 - protein, 337 aa, Homo sapiens
MPALSTGSGSDTGLYELLAALPAQLQPHVDSQEDLTFLWDMFGEKSLHSLVKHFQERRLALRRPEILVQPLKVSNRKSSGFRRSFRLSRKDKKTNKSMYECKKSDQYDTADVPTYEEVTPYRRQTNEKYRLVVLVGPVGVGLNELKRKLLISDTQHYGVTVPHTTRARRSQESDGVEYIFISKHLFETDVQNNKFIEYGEYKNNYYGTSIDSVRSVLAKNKVCLLDVQPHTVKHLRTLEFKPYVIFIKPPSIERLRETRKNAKIISSRDDQGAAKPFTEEDFQEMIKSAQIMESQYGHLFDKIIINDDLTVAFNELKTTFDKLETETHWVPVSWLHS

SEQ ID NO: 14133 - protein, 297 aa, Homo sapiens
MFVQLLRAIYVPQNVYCIHVDEKAPMKYKTAVQTLVNCFENVFISSKTEKVAYAGFTRLQADINCMKVLVHSKFQWNYVINLCGQDFPIKTNREIIHYIRSKWSDKNITPGVIQPLHIKSKTSQSHLEFVPKGSIYAPPNNRFKDKPPHNLTIYFGSAYYVLTRKFVEFILTDIHAKDMLQWSKDIRSPEQHYWVTLNRLKGFCVSFCRPLRRRHLRIRTRRPAVAHSVAFSVCQQIRTLDRPACGYLLRAAAQTSSAEAGRSSYRATLAFSTAESFQYETEPLGSVCFLTGIILFP

SEQ ID NO: 14134 - protein, 305 aa, Homo sapiens
MFVQLLRAIYVPQNVYCIHVDEKAPMKYKTAVQTLVNCFENVFISSKTEKVAYAGFTRLQADINCMKVLVHSKFQWNYVINLCGQDFPIKTNREIIHYIRSKWSDKNITPGVIQPLHIKSKTSQSHLEFVPKGSIYAPPNNRFKDKPPHNLTIYFGSAYYVLTRKFVEFILTDIHAKDMLQWSKDIRSPEQHYWVTLNRLKGATPNAGWEGNVRAIKPLRRRHLRIRTRRPAVAHSVAFSVCQQIRTLDRPACGYLLRAAAQTSSAEAGRSSYRATLAFSTAESFQYETEPLGSVCFLTGIILFP

SEQ ID NO: 14135 - protein, 739 aa, Homo sapiens [sequence omitted]

SEQ ID NO: 14136 - protein, 739 aa, Homo sapiens [sequence omitted]

SEQ ID NO: 14137 - protein, 263 aa, Homo sapiens [sequence omitted]

SEQ ID NO: 14138 - protein, 137 aa, Homo sapiens
  VARIANT (1)...(137): Xaa = Any Amino Acid
MAFHVPSANMLVRDLTWHLEKPAKYDDTNKVVKQASEGLLKDILGYTEHHVVSYFNSDTHSSTLMLRLPLPSMTTLSSSCPGITVQLATATEWWTSQTTWPLRSQNPRPSTQARAREEERGPQLLESSCHTQSPTTX

SEQ ID NO: 14139 - protein, 803 aa, Homo sapiens [sequence omitted]

SEQ ID NO: 14140 - protein, 846 aa, Homo sapiens [sequence omitted]

SEQ ID NO: 14141 - protein, 846 aa, Homo sapiens [sequence omitted]

SEQ ID NO: 14142 - protein, 763 aa, Homo sapiens [sequence omitted]

SEQ ID NO: 14143 - protein, 846 aa, Homo sapiens [sequence omitted]

SEQ ID NO: 14144 - protein, 803 aa, Homo sapiens [sequence omitted]

SEQ ID NO: 14145 - protein, 862 aa, Homo sapiens
MASEVPYASGMPIKKIGHRSVDSSGGTTSSALKGAIQLGITHTVGSLSTKPESDVLMQDFHMVESIFFPSEGSNLTPAHHYNAFRFKTYAPVAFRYFWELFGIRPDDYLYSLCSEPLIELCSSGASGSLFYVSSDDEFIVKTVRHKEAEFLQKLLPGYYINLNQNPRTLLPKFYGLYCVQTGGKNIRIVVMNNLLPRSVKMHIKYDLKGSTYRRRASQKEREKPLPTFKDLDFLQDIPDGLFLDADVHNALCKTLQRDCLVLQSFKIMDYSLLMSIHNIDHAQREPLSSETQYSVDTRRPAPQKALYSTAMESIQGEARRGGTMETDDHMGGIPARNSKGERLLLYIGIIDILQSYRFVKKLEHSWKALIHDGDTVSVHRPGFYAEWFQRFMCNTVFKKIPLKPSPSKKLRSGSSFSQRAGSSGNSCITYQPLVSGEHKAQVTTKAEVEPGVHLGCPDVLPQTPPLEEISEGSPTPDPSFSPLVEETLQMLTTSVDNSEYMGNGDFLPTRLQAQQDAVNTVCHSKTRSNPENNVGLITLDNDCEVLTTLTPDTGRILSKLHTVQPKGKITFCMGIHVAHLALKHRQGNNHKIRIIAFVGNPVEDNEKNLVKLAKCLKKEKVNVDIINFGEEEVNTEKLTAFVNTLNGKDGTGSHLVTVPPGPSLADALISFPILAGEGGAMMGLGASDFEFGVDPSADPELALVLRVFMEEQRQRQEEEARQAAAASAAEAGIATTGTEDSDDALLKMTISQQEFGHTGLPDLSSMTEEEKIVCAMQMSLQGAEFGLAESADIDASSAMDTSEPAKEEDDYDVMQDPEFLQSVLENLPGVDPNNEAIRNAVGSLASQATKDSKKDKKEEDKK

SEQ ID NO: 14146 - protein, 644 aa, Homo sapiens
MASEVPYASGMPIKKIGHRSVDSSGGTTSSALKGAIQLGITHTVGSLSTKPESDVLMQDFHMVESIFFPSEGSNLTPAHHYNAFRFKTYAPVAFRYFWELFGIRPDDYLYSLCSEPLIELCSSGASGSLFYVSSDDEFIVKTVRHKEAEFLQKLLPGYYINLNQNPRTLLPKFYGLYCVQTDFLQDIPDGLFLDADVHNALCKTLQRDCLVLQSFKIMDYSLLMSIHNIDHAQREPLSSETQYSTPPLEEISEGSPTPDPSFSPLVEETLQMLTTSVDNSEYMGNGDFLPTRLQAQQDAVNTVCHSKTRSNPENNVGLITLDNDCEVLTTLTPDTGRILSKLHTVQPKGKITFCMGIHVAHLALKHRQGNNHKIRIIAFVGNPVEDNEKNLVKLAKCLKKEKVNVDIINFGEEEVNTEKLTAFVNTLNGKDGTGSHLVTVPPGPSLADALISFPILAGEGGAMMGLGASDFEFGVDPSADPELALVLRVFMEEQRQRQEEEARQAAAASAAEAGIATTGTEDSDDALLKMTISQQEFGHTGLPDLSSMTEEEKIVCAMQMSLQGAEFGLAESADIDASSAMDTSEPAKEEDDYDVMQDPEFLQSVLENLPGVDPNNEAIRNAVGSLASQATKDSKKDKKEEDKK

SEQ ID NO: 14147 - protein, 490 aa, Homo sapiens
MDPAVALVLCLSCLFLLSLWRQSSGRGRLPSGPTPLPIIGNILQLDVKDMSKSLTNFSKVYGPVFTVYFGLKPIVVLHGYEAVKEALIDHGEEFSGRGSFPVAEKVNKGLGILFSNGKRWKEIRRFCLMTLRNFGMGKRSIEDRVQEEARCLVEELRKTNASPCDPTFILGCAPCNVICSVIFHDRFDYKDQRFLNLMEKFNENLRILSSPWIQVCNNFPALIDYLPGSHNKIAENFAYIKSYVLERIKEHQESLDMNSARDFIDCFLIKMEQEKHNQQSEFTVESLIATVTDMFGAGTETTSTTLRYGLLLLLKYPEVTAKVQEEIECVVGRNRSPCMQDRSHMPYTDAVVHEIQRYIDLLPTNLPHAVTCDVKFKNYLIPKGTTIITSLTSVLHNDKEFPNPEMFDPGHFLDKSGNFKKSDYFMPFSAGKRMCMGEGLARMELFLFLTTILQNFNLKSQVDPKDIDITPIANAFGRVPPLYQLCFIPV

SEQ ID NO: 14148 - protein, 874 aa, Homo sapiens
MPAERPAGSGGSEAPAMVEQLDTAVITPAMLEEEEQLEAAGLERERKMLEKARMSWDRESTEIRYRRLQHLLEKSNIYSKFLLTKMEQQQLEEQKKKEKLERKKESLKVKKGKNSIDASEEKPVMRKKRGREDESYNISEVMSKEEILSVAKKNKKENEDENSSSTNLCVEDLQKNKDSNSIIKDRLSETVRQNTKFFFDPVRKCNGQPVPFQQPKHFTGGVMRWYQVEGMEWLRMLWENGINGILADEMGLGKTVQCIATIALMIQRGVPGPFLVCGPLSTLPNWMAEFKRFTPDIPTMLYHGTQEERQKLVRNIYKRKGTLQIHPVVITSFEIAMRDRNALQHCYWKYLIVDEGHRIKNMKCRLIRELKRFNADNKLLLTGTPLQNNLSELWSLLNFLLPDVFDDLKSFESWFDITSLSETAEDIIAKEREQNVLHMLHQILTPFLLRRLKSDVALEVPPKREVVVYAPLSKKQEIFYTAIVNRTIANMFGSSEKETIELSPTGRPKRRTRKSINYSKIDDFPNELEKLISQIQPEVDRERAVVEVNIPVESEVNLKLQNIMMLLRKCCNHPYLIEYPIDPVTQEFKIDEELVTNSGKFLILDRMLPELKKRGHKVVLLFSQMTSMLDILMDYCHLRDFNFSRLDGSMSYSEREKNMHSFNTDPEVFIFLVSTRAGGLGINLTAADTVIIYDSDWNPQSDLQAQDRCHRIGQTKPVVVYRLVTANTIDQKIVERAAAKRKLEKLIIHKNHFKGGQSGLNLSKNFLDPKELMELLKSRDYEREIKGSREKVISDKDLELLLDRSDLIDQMNASGPIKEKMGIFKILENSEDSSPELETGFHHLGLTGPELISGDLPTSASQSAGITSVSHCVA

SEQ ID NO: 14149 - protein, 873 aa, Homo sapiens
MPAERPAGSGGSEAPAMVEQLDTAVITPAMLEEEEQLEAAGLERERKMLEKARMSWDRESTEIRYRRLQHLLEKSNIYSKFLLTKMEQQQLEEQKKKEKLERKKESLKVKKGKNSIDASEEKPVMRKKRGREDESYNISEVMSKEEILSVAKKNKKENEDENSSSTNLCVEDLQKNKDSNSIIKDRLSETVRQNTKFFFDPVRKCNGQPVPFQQPKHFTGGVMRWYQVEGMEWLRMLWENGINGILADEMGLGKTVQCIATIALMIQRGVPGPFLVCGPLSTLPNWMAEFKRFTPDIPTMLYHGTQEERQKLVRNIYKRKGTLQIHPVVITSFEIAMRDRNALQHCYWKYLIVDEGHRIKNMKCRLIRELKRFNADNKLLLTGTPLQNNLSELWSLLNFLLPDVFDDLKSFESWFDITSLSETAEDIIAKEREQNVLHMLHQILTPFLLRRLKSDVALEVPPKREVVVYAPLSKKQEIFYTAIVNRTIANMFGSSEKETIELSPTGRPKRRTRKSINYSKIDDFPNELEKLISQIQPEVDRERAVVEVNIPVESEVNLKLQNIMMLLRKCCNHPYLIEYPIDPVTQEFKIDEELVTNSGKFLILDRMLPELKKRGHKVLLFSQMTSMLDILMDYCHLRDFNFSRLDGSMSYSEREKNMHSFNTDPEVFIFLVSTRAGGLGINLTAADTVIIYDSDWNPQSDLQAQDRCHRIGQTKPVVVYRLVTANTIDQKIVERAAAKRKLEKLIIHKNHFKGGQSGLNLSKNFLDPKELMELLKSRDYEREIKGSREKVISDKDLELLLDRSDLIDQMNASGPIKEKMGIFKILENSEDSSPELETGFHHLGLTGPELISGDLPTSASQSAGITSVSHCVA

SEQ ID NO: 14150 - protein, 839 aa, Homo sapiens
MPAERPAGSGGSEAPAMVEQLDTAVITPAMLEEEEQLEAAGLERERKMLEKARMSWDRESTEIRYRRLQHLLEKSNIYSKFLLTKMEQQQLEEQKKKEKLERKKESLKVKKGKNSIDASEEKPVMRKKRGREDESYNISEVMSKEEILSVAKKNKKENEDENSSSTNLCVEDLQKNKDSNSIIKDRLSETVRQNTKFFFDPVRKCNGQPVPFQQPKHFTGGVMRWYQVEGMEWLRMLWENGINGILADEMGLGKTVQCIATIALMIQRGVPGPFLVCGPLSTLPNWMAEFKRFTPDIPTMLYHGTQEERQKLVRNIYKRKGTLQIHPVVITSFEIAMRDRNALQHCYWKYLIVDEGHRIKNMKCRLIRELKRFNADNKLLLTGTPLQNNLSELWSLLNFLLPDVFDDLKSFESWFDITSLSETAEDIIAKEREQNVLHMLHQILTPFLLRRLKSDVALEVPPKREVVVYAPLSKKQEIFYTAIVNRTIANMFGSSEKETIELSPTGRPKRRTRKSINYSKIDDFPNELEKLISQIQPEVDRERAVVEVNIPVESEVNLKLQNIMMLLRKCCNHPYLIEYPIDPVTQEFKIDEELVTNSGKFLILDRMLPELKKRGHKVVLLFSQMTSMLDILMDYCHLRDFNFSRLDGSMSYSEREKNMHSFNTDPEVFIFLVSTRAGGLGINLTAADTVIIYDSDWNPQSDLQAQDRCHRIGQTKPVVVYRLVTANTIDQKIVERAAAKRKLEKLIIHKNHFKGGQSGLNLSKNFLDPKELMELLKSRDYEREIKGSREKVISDKDLELLLDRSDLIDQMNASGPIKEKMGIFKILENSEDSSPECLF

SEQ ID NO: 14151 - protein, 486 aa, Homo sapiens
MSSSSPPAGAASAAISASEKVDGFTRKSVRKAQRQKRSQGSSQFRSQGSQAELHPLPQLKDATSNEQQELFCQKLQQCCILFDFMDSVSDLKSKEIKRATLNELVEYVSTNRGVIVESAYSDIVKMISANIFRTLPPSDNPDFDPEEDEPTLEASWPHIQLVYEFFLRFLESPDFQPSIAKRYIDQKFVQQLLELFDSEDPRERDFLKTVLHRIYGKFLGLRAFIRKQINNIFLRFIYETEHFNGVAELLEILGSIINGFALPLKAEHKQFLMKVLIPMHTAKGLALFHAQLAYCVVQFLEKDTTLTEPVIRGLLKFWPKTCSQKEVMFLGEIEEILDVIEPTQFKKIEEPLFKQISKCVSSSHFQVAERALYFWNNEYILSLIEENIDKILPIMFASLYKISKEHWNPTIVALVYNVLKTLMEMNGKLFDDLTSSYKAERQREKKKELEREELWKKLEELKLKKALEKQNSAYNMHSILSNTSAE

SEQ ID NO: 14152 - protein, 486 aa, Homo sapiens; identical to SEQ ID NO: 14151

SEQ ID NO: 14153 - protein, 417 aa, Homo sapiens
MEKERETLQAWKERVGQELDRVVAFWMEHSHDQEHGGFFTCLGREGRVYDDLKYVWLQGRQVWMYCRLYRTFERFRHAQLLDAAKAGGEFLLRYARVAPPGKKCAFVLTRDGRPVKVQRTIFSECFYTMAMNELWRATGEVRYQTEAVEMMDQIVHWVQEDASGLGRPQLQGAPAAEPMAVPMMLLNLVEQLGEADEELAGKYAELGDWCARRILQHVQRDGQAVLENVSEGGKELPGCLGRQQNPGHTLEAGWFLLRHCIRKGDPELRAHVIDKFLLLPFHSGWDPDHGGLFYFQDADNFCPTQLEWAMKLWWPHSEAMIAFLMGYSDSGDPVLLRLFYQVAEYTFRQFRDPEYGEWFGYLSREGKVALSIKGGPFKGCFHVPRCLAMCEEMLGALLSRPAPAPSPAPTPACRGAE

SEQ ID NO: 14154 - protein, 417 aa, Homo sapiens; identical to SEQ ID NO: 14153

SEQ ID NO: 14155 - protein, 427 aa, Homo sapiens
MSKGLPARQDMEKERETLQAWKERVGQELDRVVAFWMEHSHDQEHGGFFTCLGREGRVYDDLKYVWLQGRQVWMYCRLYRTFERFRHAQLLDAAKAGGEFLLRYARVAPPGKKCAFVLTRDGRPVKVQRTIFSECFYTMAMNELWRATGEVRYQTEAVEMMDQIVHWVQEDASGLGRPQLQGAPAAEPMAVPMMLLNLVEQLGEADEELAGKYAELGDWCARRILQHVQRDGQAVLENVSEGGKELPGCLGRQQNPGHTLEAGWFLLRHCIRKGDPELRAHVIDKFLLLPFHSGWDPDHGGLFYFQDADNFCPTQLEWAMKLWWPHSEAMIAFLMGYSDSGDPVLLRLFYQVAEYTFRQFRDPEYGEWFGYLSREGKVALSIKGGPFKGCFHVPRCLAMCEEMLGALLSRPAPAPSPAPTPACRGAE

SEQ ID NO: 14156 - protein, 384 aa, Homo sapiens
MEGLGRSCLWLRRELSPPRPRLLLLDCRSRELYESARIGGALSVALPALLLRRLRRGSLSVRALLPGPPLQPPPPAPVLLYDQGGGRRRRGEAEAEAEEWEAESVLGTLLQKLREEGYLAYYLQGGFSRFQAECPHLCETSLAGRAGSSMAPVPGPVPVVGLGSLCLGSDCSDAESEADRDSMSCGLDSEGATPPPVGLRASFPVQILPNLYLGSARDSANLESLAKLGIRYILNVTPNLPNFFEKNGDFHYKQIPISDHWSQNLSRFFPEAIEFIDEALSQNCGVLVHCLAGVSRSVTVTVAYLMQKLHLSLNDAYDLVKRKKSNISPNFNFMGQLLDFERSLRLEERHSQEQGSGGQASAASNPPSFFTTPTSDGAFELAPT

SEQ ID NO: 14157 - protein, 384 aa, Homo sapiens; identical to SEQ ID NO: 14156

SEQ ID NO: 14158 - protein, 384 aa, Homo sapiens; identical to SEQ ID NO: 14156

SEQ ID NO: 14159 - protein, 118 aa, Homo sapiens
MNIRNARPEDLMNMQHCNLLCLPENYQMKYYFYHGLSWPQLSYIAEDENGKIVGYVLAKMEEDPDDVPHGHITSLAVKRSHRRLGLAQKLMDQASRAMIENFNAKYVSLHVRKRWKPG

SEQ ID NO: 14160 - protein, 235 aa, Homo sapiens
MNIRNARPEDLMNMQHCNLLCLPENYQMKYYFYHGLSWPQLSYIAEDENGKIVGYVLAKMEEDPDDVPHGHITSLAVKRSHRRLGLAQKLMDQASRAMIENFNAKYVSLHVRKSNRAALHLYSNTLNFQISEVEPKYYADGEDAYAMKRDLTQMADELRRHLELKEKGRHVVLGAIENKVESKGNSPPSSGEACREEKGLAAEDSGGDSKDLSEVSETTESTDVKDSSEASDSAS

SEQ ID NO: 14161 - protein, 220 aa, Homo sapiens
MNIRNARPEDLMNMQHCNLLCLPENYQMKYYFYHGLSWPQLSYIAEDENGKIVGYVLAKMEEDPDDVPHGHITSLAVKRSHRRLGLAQKLMDQASRAMIENFNAKYVSLHVRKRISEVEPKYYADGEDAYAMKRDLTQMADELRRHLELKEKGRHVVLGAIENKVESKGNSPPSSGEACREEKGLAAEDSGGDSKDLSEVSETTESTDVKDSSEASDSAS

SEQ ID NO: 14162 - protein, 603 aa, Homo sapiens
MASASTSKYNSHSLENESIKRTSRDGVNRDLTEAVPRLPGETLITDKEVIYICPFNGPIKGRVYITNYRLYLRSLETDSSLILDVPLGVISRIEKMGGATSRGENSYGLDITCKDMRNLRFALKQEGHSRRDMFEILTRYAFPLAHSLPLFAFLNEEKFNVDGWTVYNPVEEYRRQGLPNHHWRITFINKCYELCDTYPALLVVPYRASDDDLRRVATFRSRNRIPVLSWIHPENKTVIVRCSQPLVGMSGKRNKDDEKYLDVIRETNKQISKLTIYDARPSVNAVANKATGGGYESDDAYHNAELFFLDIHNIHVMRESLKKVKDIVYPNVEESHWLSSLESTHWLEHIKLVLTGAIQVADKVSSGKSSVLVHCSDGWDRTAQLTSLAMLMLDSFYRSIEGFEILVQKEWISFGHKFASRIGHGDKNHTDADRSPIFLQFIDCVWQMSKQFPTAFEFNEQFLIIILDHLYSCRFGTFLFNCESARERQKVTERTVSLWSLINSNKEKFKNPFYTKEINRVLYPVASMRHLELWVNYYIRWNPRIKQQQPNPVEQRYMELLALRDEYIKRLEELQLANSAKLSDPPTSPSSPSQMMPHVQTHF

SEQ ID NO: 14163 - protein, 603 aa, Homo sapiens; identical to SEQ ID NO: 14162

SEQ ID NO: 14164 - protein, 355 aa, Homo sapiens [sequence omitted]

SEQ ID NO: 14165 - protein, 600 aa, Homo sapiens [sequence omitted]

SEQ ID NO: 14166 - protein, 566 aa, Homo sapiens
MEVPQPEPAPGSALSPAGVCGGAQRPGHLPGLLLGSHGLLGSPVRAAASSPVTTLTQTMHDLAGLGSRSRLTHLSLSRRASESSLSSESSESSDAGLCMDSPSPMDPHMAEQTFEQAIQAASRIIRNEQFAIRRFQSMPVRLLGHSPVLRNITNSQAPDGRRKSEAGSGAASSSGEDKENDGFVFKMPWKPTHPSSTHALAEWASRREAFAQRPSSAPDLMCLSPDRKMEVEELSPLALGRFSLTPAEGDTEEDDGFVDILESDLKDDDAVPPGMESLISAPLVKTLEKEEEKDLVMYSKCQRLFRSPSMPCSVIRPILKRLERPQDRDTPVQNKRRRSVTPPEEQQEAEEPKARVLRSKSLCHDEIENLLDSDHRELIGDYSKAFLLQTVDGKHQDLKYISPETMVALLTGKFSNIVDKFVIVDCRYPYEYEGGHIKTAVNLPLERDAESFLLKSPIAPCSLDKRVILIFHCEFSSERGPRMCRFIRERDRAVNDYPSLYYPEMYILKGGYKEFFPQHPNFCEPQDYRPMNHEAFKDELKTFRLKTRSWAGERSRRELCSRLQDQ

SEQ ID NO: 14167 - protein, 566 aa, Homo sapiens; identical to SEQ ID NO: 14166

SEQ ID NO: 14168 - protein, 580 aa, Homo sapiens
MEVPQPEPAPGSALSPAGVCGGAQRPGHLPGLLLGSHGLLGSPVRAAASSPVTTLTQTMHDLAGLGSETPKSQVGTLLFRSRSRLTHLSLSRRASESSLSSESSESSDAGLCMDSPSPMDPHMAEQTFEQAIQAASRIIRNEQFAIRRFQSMPVRLLGHSPVLRNITNSQAPDGRRKSEAGSGAASSSGEDKENDGFVFKMPWKPTHPSSTHALAEWASRREAFAQRPSSAPDLMCLSPDRKMEVEELSPLALGRFSLTPAEGDTEEDDGFVDILESDLKDDDAVPPGMESLISAPLVKTLEKEEEKDLVMYSKCQRLFRSPSMPCSVIRPILKRLERPQDRDTPVQNKRRRSVTPPEEQQEAEEPKARVLRSKSLCHDEIENLLDSDHRELIGDYSKAFLLQTVDGKHQDLKYISPETMVALLTGKFSNIVDKFVIVDCRYPYEYEGGHIKTAVNLPLERDAESFLLKSPIAPCSLDKRVILIFHCEFSSERGPRMCRFIRERDRAVNDYPSLYYPEMYILKGGYKEFFPQHPNFCEPQDYRPMNHEAFKDELKTFRLKTRSWAGERSRRELCSRLQDQ

SEQ ID NO: 14169 - protein, 601 aa, Homo sapiens
MEVPQPEPAPGSALSPAGVCGGAQRPGHLPGLLLGSHGLLGSPVRAAASSPVTTLTQTMHDLAGLGSRSRLTHLSLSRRASESSLSSESSESSDAGLCMDSPSPMDPHMAEQTFEQAIQAASRIIRNEQFAIRRFQSMPVRLLGHSPVLRNITNSQAPDGRRKSEAGSGAASSSGEDKENVRFWKAGVGALREEEGACWGGSLACEDPPLPSWLQDGFVFKMPWKPTHPSSTHALAEWASRREAFAQRPSSAPDLMCLSPDRKMEVEELSPLALGRFSLTPAEGDTEEDDGFVDILESDLKDDDAVPPGMESLISAPLVKTLEKEEEKDLVMYSKCQRLFRSPSMPCSVIRPILKRLERPQDRDTPVQNKRRRSVTPPEEQQEAEEPKARVLRSKSLCHDEIENLLDSDHRELIGDYSKAFLLQTVDGKHQDLKYISPETMVALLTGKFSNIVDKFVIVDCRYPYEYEGGHIKTAVNLPLERDAESFLLKSPIAPCSLDKRVILIFHCEFSSERGPRMCRFIRERDRAVNDYPSLYYPEMYILKGGYKEFFPQHPNFCEPQDYRPMNHEAFKDELKTFRLKTRSWAGERSRRELCSRLQDQ

SEQ ID NO: 14170 - protein, 463 aa, Homo sapiens [sequence omitted]

SEQ ID NO: 14171 - protein, 580 aa, Homo sapiens; identical to SEQ ID NO: 14168

SEQ ID NO: 14172 - protein, 161 aa, Homo sapiens
MVALLTGKFSNIVDKFVIVDCRYPYEYEGGHIKTAVNLPLERDAESFLLKSPIAPCSLDKRVILIFHCEFSSERGPRMCRFIRERDRAVNDYPSLYYPEMYILKGGYKEFFPQHPNFCEPQDYRPMNHEAFKDELKTFRLKTRSWAGERSRRELCSRLQDQ

SEQ ID NO: 14173 - protein, 601 aa, Homo sapiens; identical to SEQ ID NO: 14169

SEQ ID NO: 14174 - protein, 539 aa, Homo sapiens
MEVPQPEPAPGSALSPAGVCGGAQRPGHLPGLLLGSHGLLGSPVRAAASSPVTTLTQTMHDLAGLGSETPKSQVGTLLFRSRSRLTHLSLSRRASESSLSSESSESSDAGLCMDSPSPMDPHMAEQTFEQAIQAASRIIRNEQFAIRRFQSMPDGFVFKMPWKPTHPSSTHALAEWASRREAFAQRPSSAPDLMCLSPDRKMEVEELSPLALGRFSLTPAEGDTEEDDGFVDILESDLKDDDAVPPGMESLISAPLVKTLEKEEEKDLVMYSKCQRLFRSPSMPCSVIRPILKRLERPQDRDTPVQNKRRRSVTPPEEQQEAEEPKARVLRSKSLCHDEIENLLDSDHRELIGDYSKAFLLQTVDGKHQDLKYISPETMVALLTGKFSNIVDKFVIVDCRYPYEYEGGHIKTAVNLPLERDAESFLLKSPIAPCSLDKRVILIFHCEFSSERGPRMCRFIRERDRAVNDYPSLYYPEMYILKGGYKEFFPQHPNFCEPQDYRPMNHEAFKDELKTFRLKTRSWAGERSRRELCSRLQDQ

SEQ ID NO: 14175 - protein, 539 aa, Homo sapiens; identical to SEQ ID NO: 14174

SEQ ID NO: 14176 - protein, 161 aa, Homo sapiens; identical to SEQ ID NO: 14172

SEQ ID NO: 14177 - protein, 194 aa, Homo sapiens
MAASLVGKKIVFVTGNAKKLEEVVQILGDKFPCTLVAQKIDLPEYQGEPDEISIQKCQEAVRQVQGPVLVEDTCLCFNALGGLPGPYIKWFLEKLKPEGLHQLLAGFEDKSAYALCTFALSTGDPSQPVRLFRGRTSGRIVAPRGCQDFGWDPCFQPDGYEQTYAEMPKAEKNAVSHRFRALLELQEYFGSLAA

SEQ ID NO: 14178 - protein, 153 aa, Homo sapiens
MAASLVGKKIVFVTGNAKKLEEVQGPVLVEDTCLCFNALGGLPGPYIKWFLEKLKPEGLHQLLAGFEDKSAYALCTFALSTGDPSQPVRLFRGRTSGRIVAPRGCQDFGWDPCFQPDGYEQTYAEMPKAEKNAVSHRFRALLELQEYFGSLAA

SEQ ID NO: 14179 - protein, 236 aa, Homo sapiens
MHHHAQLILYFLVEMGFLHVGQAGFKLLTSGDPLASASQSAGITGVSHRAFPHFDEHQNGLRSLVVQILGDKFPCTLVAQKIDLPEYQGEPDEISIQKCQEAVRQVQGPVLVEDTCLCFNALGGLPGPYIKWFLEKLKPEGLHQLLAGFEDKSAYALCTFALSTGDPSQPVRLFRGRTSGRIVAPRGCQDFGWDPCFQPDGYEQTYAEMPKAEKNAVSHRFRALLELQEYFGSLAA

SEQ ID NO: 14180 - protein, 107 aa, Homo sapiens
MKTQDLANAPNAPEILEIEFKKGVPVKMTNVKDGTTHQTSLELFVYLSQVTGKHSVGRTDIVENRCIRMKSRGIYETPAGTILYHTYLDIKVFTMDWEVHKVKQASA

SEQ ID NO: 14181 - protein, 341 aa, Homo sapiens
MESEKHQVKEGGKWKKLATKIKYERRKVGVNAEAHQNTKNQPPPGLYMKTQDLANAPNAPEILEIEFKKGVPVKMTNVKDGTTHQTSLELFVYLSQVTGKHSVGRTDIVENRCIRMKSRGIYETPAGTILYHTYLDIKVFTMDWEHSPECEFAHHCIAKSQERVEGKVQVSVLKGQVYILSRESPLSLYNKELVSMNMQGDYEPIDSTGFININSLKLKEYHLQRKIPQVQALIVVRNLTEEFAHQQPYKPERLEASEKDNTTSNRSSVEPEIRIWLRTFGRPLVFSPHWSSSSQVDFPSTSHMMASGLKEEEVSAERKKTDTQDEPRRAGADVIQGQMSL

SEQ ID NO: 14182 - protein, 902 aa, Homo sapiens
MKIAVIGQSLFGQEVYCHLRKEGHEVVGVFTVPDKDGKADPLGLEAEKDGVPVFKYSRWRAKGQALPDVVAKYQALGAELNVLPFCSQFIPMEIISAPRHGSIIYHPSLLPRHRGASAINWTLIHGDKKGGFSIFWADDGLDTGDLLLQKECEVLPDDTVSTLYNRFLFPEGIKGMVQAVRLIAEGKAPRLPQPEEGATYEGIQKKETAKINWDQPAEAIHNWIRGNDKVPGAWTEACEQKLTFFNSTLNTSGLVPEGDALPIPGAHRPGVVTKAGLILFGNDDKMLLVKNIQLEDGKMILASNFFKGAASSVLELTEAELVTAEAVRSVWQRILPKVLEVEDSTDFFKSGAASVDVVRLVEEVKELCDGLELENEDVYMASTFGDFIQLLVRKLRGDDEEGECSIDYVEMAVNKRTVRMPHQLFIGGEFVDAEGAKTSETINPTDGSVICQVSLAQVTDVDKAVAAAKDAFENGRWGKISARDRGRLMYRLADLMEQHQEELATIEALDAGAVYTLALKTHVGMSIQTFRYFAGWCDKIQGSTIPINQARPNRNLTLTRKEPVGVCGIIIPWNYPLMMLSWKTAACLAAGNTVVIKPAQVTPLTALKFAELTLKAGIPKGVVNVLPGSGSLVGQRLSDHPDVRKIGFTGSTEVGKHIMKSCAISNVKKVSLELGGKSPLIIFADCDLNKAVQMGMSSVFFNKGENCIAAGRLFVEDSIHDEFVRRVVEEVRKMKVGNPLDRDTDHGPQNHHAHLVKLMEYCQHGVKEGATLVCGGNQVPRPGFFFEPTVFTDVEDHMFIAKEESFGPVMIISRFADGDLDAVLSRANATEFGLASGVFTRDINKALYVSDKLQAGTVFVNTYNKTDVAAPFGGFKQSGFGKDLGEAALNEYLRVKTVTFEY

SEQ ID NO: 14183 - protein, 333 aa, Homo sapiens
MKIAVIGQSLFGQEVYCHLRKEGHEVVGVFTVPDKDGKADPLGLEAEKDGVPVFKYSRWRAKGQALPDVVAKYQALGAELNVLPFCSQFIPMEIISAPRHGSIIYHPSLLPRHRGASAINWTLIHGDKKGGFSIFWADDGLDTGDLLLQKECEVLPDDTVSTLYNRFLFPEGIKGMAVRLIAEGKAPRLPQPEEGATYEGIQKKETAKINWDQPAEAIHNWIRGNDKVPGAWTEACEQKLTFFNSTLNTSGLVPEGDALPIPGAHRPGVVTKAGLILFGNDDKMVRARLWVTCLLKATHAPVLGLRPHRKTLGSSGENGKNQTQEGTLTLICP

SEQ ID NO: 14184 - protein, 505 aa, Homo sapiens
MKIAVIGQSLFGQEVYCHLRKEGHEVVGVFTVPDKDGKADPLGLEAEKDGVPVFKYSRWRAKGQALPDVVAKYQALGAELNVLPFCSQFIPMEIISAPRHGSIIYHPSLLPRHRGASAINWTLIHGDKKGGFSIFWADDGLDTGDLLLQKECEVLPDDTVSTLYNRFLFPEGIKGMVQAVRLIAEGKAPRLPQPEEGATYEGIQKKETAKINWDQPAEAIHNWIRGNDKVPGAWTEACEQKLTFFNSTLNTSGLVPEGDALPIPGAHRPGVVTKAGLILFGNDDKMLLVKNIQLEDGKMILASNFFKGAASSVLELTEAELVTAEAVRSVWQRILPKVLEVEDSTDFFKSGAASVDVVRLVEEVKELCDGLELENEDVYMASTFGDFIQLLVRKLRGDDEEGECSIDYVEMAVNKRTVRMPHQLFIGGEFVDAEGAKTSETINPTDGSVICQVSLAQVTDVDKAVAAAKDAFENGRWGKISARDRGRLMYRAPPSPSTRPDPTAT

SEQ ID NO: 14185 - protein, 895 aa, Homo sapiens
MASSPAQRRRGNDPLTSSPGRSSRRTDALTSSPGRDLPPFEDESEGLLGTEGPLEEEEDGEELIGDGMERDYRAIPELDAYEAEGLALDDEDVEELTASQREAAERAMRQRDREAGRGLGRMRRGLLYDSDEEDEERPARKRRQVERATEDGEEDEEMIESIENLEDLKGHSVREWVSMAGPRLEIHHRFKNFLRTHVDSHGHNVFKERISDMCKENRESLVVNYEDLAAREHVLAYFLPEAPAELLQIFDEAALEVVLAMYPKYDRITNHIHVRISHLPLVEELRSLRQLHLNQLIRTSGVVTSCTGVLPQLSMVKYNCNKCNFVLGPFCQSQNQEVKPGSCPECQSAGPFEVNMEETIYQNYQRIRIQESPGKVAAGRLPRSKDAILLADLVDSCKPGDEIELTGIYHNNYDGSLNTANGFPVFATVILANHVAKKDNKVAVGELTDEDVKMITSLSKDQQIGEKIFASIAPSIYGHEDIKRGLALALFGGEPKNPGGKHKVRGDINVLLCGDPGTAKSQFLKYIEKVSSRAIFTTGQGASAVGLTAYVQRHPVSREWTLEAGALVLADRGVCLIDEFDKMNDQDRTSIHEAMEQQSISISKAGIVTSLQARCTVIAAANPIGGRYDPSLTFSENVDLTEPIISRFDILCVVRDTVDPVQDEMLARFVVGSHVRHHPSNKEEEGLANGSAAEPAMPNTYGVEPLPQEVLKKYIIYAKERVHPKLNQMDQDKVAKMYSDLRKESMATGSIPITVRHIESMIRMAEAHARIHLRDYVIEDDVNMAIRVMLESFIDTQKFSVMRSMRKTFARYLSFRRDNNELLLFILKQLVAEQVTYQRNRFGAQQDTIEVPEKDLVDKARQINIHNLSAFYDSELFRMNKFSHDLKRKMILQQF

SEQ ID NO: 14186 - protein, 904 aa, Homo sapiens
MAESSESFTMASSPAQRRRGNDPLTSSPGRSSRRTDALTSSPGRDLPPFEDESEGLLGTEGPLEEEEDGEELIGDGMERDYRAIPELDAYEAEGLALDDEDVEELTASQREAAERAMRQRDREAGRGLGRMRRGLLYDSDEEDEERPARKRRQVERATEDGEEDEEMIESIENLEDLKGHSVREWVSMAGPRLEIHHRFKNFLRTHVDSHGHNVFKERISDMCKENRESLVVNYEDLAAREHVLAYFLPEAPAELLQIFDEAALEVVLAMYPKYDRITNHIHVRISHLPLVEELRSLRQLHLNQLIRTSGVVTSCTGVLPQLSMVKYNCNKCNFVLGPFCQSQNQEVKPGSCPECQSAGPFEVNMEETIYQNYQRIRIQESPGKVAAGRLPRSKDAILLADLVDSCKPGDEIELTGIYHNNYDGSLNTANGFPVFATVILANHVAKKDNKVAVGELTDEDVKMITSLSKDQQIGEKIFASIAPSIYGHEDIKRGLALALFGGEPKNPGGKHKVRGDINVLLCGDPGTAKSQFLKYIEKVSSRAIFTTGQGASAVGLTAYVQRHPVSREWTLEAGALVLADRGVCLIDEFDKMNDQDRTSIHEAMEQQSISISKAGIVTSLQARCTVIAAANPIGGRYDPSLTFSENVDLTEPIISRFDILCVVRDTVDPVQDEMLARFVVGSHVRHHPSNKEEEGLANGSAAEPAMPNTYGVEPLPQEVLKKYIIYAKERVHPKLNQMDQDKVAKMYSDLRKESMATGSIPITVRHIESMIRMAEAHARIHLRDYVIEDDVNMAIRVMLESFIDTQKFSVMRSMRKTFARYLSFRRDNNELLLFILKQLVAEQVTYQRNRFGAQQDTIEVPEKDLVDKARQINIHNLSAFYDSELFRMNKFSHDLKRKMILQQF

SEQ ID NO: 14187 - protein, 229 aa, Homo sapiens
MSQGDSNPAAIPHAAEDIQGDDRWMSQHNRFVLDCKDKEPDVLFVGDSMVQLMQQYEIWRELFSPLHALNFGIGGDTTRHVLWRLKNGELENIKPKVIVVWVGTNNHENTAEEVAGGIEAIVQLINTRQPQAKIIVLGLLPRGEKPNPLRQKNAKVNQLLKVSLPKLANVQLLDTDGGFVHSDGAISCHDMFDFLHLTGGGYAKICKPLHELIMQLLEETPEEKQTTIA

SEQ ID NO: 14188 - protein, 503 aa, Homo sapiens
MALRAKAEVCMAVPWLSLQRAQALGTRAARVPRTVLPFEAMPRRPGNRWLRLLQIWREQGYEDLHLEVHQTFQELGPIFRYDLGGAGMVCVMLPEDVEKLQQVDSLHPHRMSLEPWVAYRQHRGHKCGVFLLNGPEWRFNRLRLNPEVLSPNAVQRFLPMVDAVARDFSQALKKKVLQNARGSLTLDVQPSIFHYTIEASNLALFGERLGLVGHSPSSASLNFLHALEVMFKSTVQLMFMPRSLSRWTSPKVWKEHFEAWDCIFQYGDNCIQKIYQELAFSRPQQYTSIVAELLLNAELSPDAIKANSMELTAGSVDTTVFPLLMTLFELARNPNVQQALRQESLAAAASISEHPQKATTELPLLRAALKETLRLYPVGLFLERVASSDLVLQNYHIPAGTLVRVFLYSLGRNPALFPRPERYNPQRWLDIRGSGRNFYHVPFGFGMRQCLGRRLAEAEMLLLLHHVLKHLQVETLTQEDIKMVYSFILRPSMFPLLTFRAIN

SEQ ID NO: 14189 - protein, 503 aa, Homo sapiens; identical to SEQ ID NO: 14188

SEQ ID NO: 14190 - protein, 503 aa, Homo sapiens; identical to SEQ ID NO: 14188

SEQ ID NO: 14191 - protein, 151 aa, Homo sapiens [sequence omitted]

SEQ ID NO: 14192 - protein, 447 aa, Homo sapiens
MGGGRLGAPMERHGRASATSVSSAGEQAAGDPEGRRQEPLRRRASSASVPAVGASAEGTRRDRLGSYSGPTSVSRQRVESLRKKRPLFPWFGLDIGGTLVKLVYFEPKDITAEEEEEEVESLKSIRKYLTSNVAYGSTGIRDVHLELKDLTLCGRKGNLHFIRFPTHDMPAFIQMGRDKNFSSLHTVFCATGGGAYKFEQDFLTIGDLQLCKLDELDCLIKGILYIDSVGFNGRSQCYYFENPADSEKCQKLPFDLKNPYPLLLVNIGSGVSILAVYSKDNYKRVTGTSLGGGTFFGLCCLLTGCTTFEEALEMASRGDSTKVDKLVRDIYGGDYERFGLPGWAVASSFGNMMSKEKREAVSKEDLARATLITITNNIGSIARMCALNENINQVVFVGNFLRINTIAMRLLAYALDYWSKGQLKALFSEHEGYFGAVGALLELLKIP

SEQ ID NO: 14193 - protein, 279 aa, Homo sapiens
MPAFIQMGRDKNFSSLHTVFCATGGGAYKFEQDFLTIGDLQLCKLDELDCLIKGILYIDSVGFNGRSQCYYFENPADSEKCQKLPFDLKNPYPLLLVNIGSGVSILAVYSKDNYKRVTGTSLGGGTFFGLCCLLTGCTTFEEALEMASRGDSTKVDKLVRDIYGGDYERFGLPGWAVASSFGNMMSKEKREAVSKEDLARATLITITNNIGSIARMCALNENINQVVFVGNFLRINTIAMRLLAYALDYWSKGQLKALFSEHEGYFGAVGALLELLKIP

SEQ ID NO: 14194 - protein, 264 aa, Homo sapiens
MESGFTSKDTYLSHFNPRDYLEKYYKFGSRHSAESQILKHLLKNLFKIFCLDGVKGDLLIDIGSGPTIYQLLSACESFKEIVVTDYSDQNLQELEKWLKKEPEAFDWSPVVTYVCDLEGNRVKGPEKEEKLRQAVKQVLKCDVTQSQPLGAVPLPPADCVLSTLCLDAACPDLPTYCRALRNLGSLLKPGGFLVIMDALKSSYYMIGEQKFSSLPLGREAVEAAVKEAGYTIEWFEVISQSYSSTMANNEGLFSLVARKLSRPL

SEQ ID NO: 14195 - protein, 264 aa, Homo sapiens; identical to SEQ ID NO: 14194

SEQ ID NO: 14196 - protein, 264 aa, Homo sapiens; identical to SEQ ID NO: 14194

SEQ ID NO: 14197 - protein, 439 aa, Homo sapiens
MFSKLAHLQRFAVLSRGVHSSVASATSVATKKTVQGPPTSDDIFEREYKYGAHNYHPLPVALERGKGIYLWDVEGRKYFDFLSSYSAVNQGHCHPKIVNALKSQVDKLTLTSRAFYNNVLGEYEEYITKLFNYHKVLPMNTGVEAGETACKLARKWGYTVKGIQKYKAKIVFAAGNFWGRTLSAISSSTDPTSYDGFGPFMPGFDIIPYNDLPALERALQDPNVAAFMVEPIQGEAGVVVPDPGYLMGVRELCTRHQVLFIADEIQTGLARTGRWLAVDYENVRPDIVLLGKALSGGLYPVSAVLCDDDIMLTIKPGEHGSTYGGNPLGCRVAIAALEVLEEENLAENADKLGIILRNELMKLPSDVVTAVRGKGLLNAIVIKETKDWDAWKVCLRLRDNGLLAKPTHGDIIRFAPPLVIKEDELRESIEIINKTILSF

SEQ ID NO: 14198 - protein, 439 aa, Homo sapiens; identical to SEQ ID NO: 14197

SEQ ID NO: 14199 - protein, 439 aa, Homo sapiens; identical to SEQ ID NO: 14197

SEQ ID NO: 14200 - protein, 439 aa, Homo sapiens; identical to SEQ ID NO: 14197

SEQ ID NO: 14201 - protein, 439 aa, Homo sapiens; identical to SEQ ID NO: 14197

SEQ ID NO: 14202 - protein, 265 aa, Homo sapiens
MGAAVFFGCTFVAFGPAFALFLITVAGDPLRVIILVAGAFFWLVSLLLASVVWFILVHVTDRSDARLQYGLLIFGAAVSVLLQEVFRFAYYKLLKKADEGLASLSEDGRSPISIRQMAYVSGLSFGIISGVFSVINILADALGPGVVGIHGDSPYYFLTSAFLTAAIILLHTFWGVVFFDACERRRYWALGLVVGSHLLTSGLTFLNPWYEASLLPIYAVTVSMGLWAFITAGGSLRSIQRSLLCRRQEDSRVMVYSALRIPPED

SEQ ID NO: 14203 - protein, 247 aa, Homo sapiens
MGAAVFFGCTFVAFGPAFALFLITVAGDPLRVIILVAGAFFWLVSLLLASVVWFILVHVTDRSDARLQYGLLIFGAAVSVLLQEVFRFAYYKLLKKADEGLASLSEDGRSPISIRQMAYVSGLSFGIISGVFSVINILADALGPGVVGIHGDSPYYFLTSAFLTAAIILLHTFWGVVFFDACERRRYWALGLVVGSHLLTSGLTFLNPWYEASLLPIYAVTVSMGLWAFITAGGSLRSIQRSLLCKD

SEQ ID NO: 14204 - protein, 247 aa, Homo sapiens; identical to SEQ ID NO: 14203

SEQ ID NO: 14205 - protein, 94 aa, Homo sapiens
MKQLHRAKEFCFWEPYLGKLGHTERKMSPSLFSPDQKTSVPPFNLRELLPKQLGQYFRYNGSLTTPPCYQSVLWTVFYRRSQISMEQVSGGETR

SEQ ID NO: 14206 - protein, 336 aa, Homo sapiens
MLFSALLLEVIWILAADGGQHWTYEGPHGQDHWPASYPECGNNAQSPIDIQTDSVTFDPDLPALQPHGYDQPGTEPLDLHNNGHTVQLSLPSTLYLGGLPRKYVAAQLHLHWGQKGSPGGSEHQINSEATFAELHIVHYDSDSYDSLSEAAERPQGLAVLGILIEVGETKNIAYEHILSHLHEVRHKDQKTSVPPFNLRELLPKQLGQYFRYNGSLTTPPCYQSVLWTVFYRRSQISMEQLEKLQGTLFSTEEEPSKLLVQNYRALQPLNQRMVFASFIQGSSYTTGEMLSLGVGILVGCLCLLLAVYFIARKIRKKRLENRKSVVFTSAQATTEA

SEQ ID NO: 14207 - protein, 288 aa, Homo sapiens [sequence omitted]

SEQ ID NO: 14208 - protein, 336 aa, Homo sapiens
ADLKASRQPFHTGTSSPGRKTHCAGPHGQDHWPASYPECGNNAQSPIDIQTDSVTFDPDLPALQPHGYDQPGTEPLDLHNNGHTVQLSLPSTLYLGGLPRKYVAAQLHLHWGQKGSPGGSEHQINSEATFAELHIVHYDSDSYDSLSEAAERPQGLAVLGILIEVGETKNIAYEHILSHLHEVRHKDQKTSVPPFNLRELLPKQLGQYFRYNGSLTTPPCYQSVLWTVFYRRSQISMEQLEKLQGTLFSTEEEPSKLLVQNYRALQPLNQRMVFASFIQAGSSYTTGEMLSLGVGILVGCLCLLLAVYFIARKIRKKRLENRKSVVFTSAQATTEA

SEQ ID NO: 14209 - protein, 337 aa, Homo sapiens
MLFSALLLEVIWILAADGGQHWTYEGPHGQDHWPASYPECGNNAQSPIDIQTDSVTFDPDLPALQPHGYDQPGTEPLDLHNNGHTVQLSLPSTLYLGGLPRKYVAAQLHLHWGQKGSPGGSEHQINSEATFAELHIVHYDSDSYDSLSEAAERPQGLAVLGILIEVGETKNIAYEHILSHLHEVRHKDQKTSVPPFNLRELLPKQLGQYFRYNGSLTTPPCYQSVLWTVFYRRSQISMEQLEKLQGTLFSTEEEPSKLLVQNYRALQPLNQRMVFASFIQAGSSYTTGEMLSLGVGILVGCLCLLLAVYFIARKIRKKRLENRKSVVFTSAQATTEA

SEQ ID NO: 14210 - protein, 408 aa, Homo sapiens
MWAFSELPMPLLINLIVSLLGFVATVTLIPAFRGHFIAARLCGQDLNKTSRQQIPESQGVISGAVFLIILFCFIPFPFLNCFVKEQCKAFPHHEFVALIGALLAICCMIFLGFADDVLNLRWRHKLLLPTAASLPLLMVYFTNFGNTTIVVPKPFRPILGLHLDLGILYYVYMGLLAVFCTNAINILAGINGLEAGQSLVISASIIVFNLVELEGDCRDDHVFSLYFMIPFFFTTLGLLYHNWYPSRVFVGDTFCYFAGMTFAVVGILGHFSKTMLLFFMPQVFNFLYSLPQLLHIIPCPRHRIPRLNIKTGKLEMSYSKFKTKSLSFLGTFILKVAESLQLVTVHQSETEDGEFTECNNMTLINLLLKVLGPIHERNLTLLLLLLQILGSAITFSIRYQLVRLFYDV

SEQ ID NO: 14211 - protein, 408 aa, Homo sapiens; identical to SEQ ID NO: 14210

SEQ ID NO: 14212 - protein, 408 aa, Homo sapiens; identical to SEQ ID NO: 14210

SEQ ID NO: 14213 - protein, 408 aa, Homo sapiens; identical to SEQ ID NO: 14210

SEQ ID NO: 14214 - protein, 408 aa, Homo sapiens; identical to SEQ ID NO: 14210

SEQ ID NO: 14215 - protein, 408 aa, Homo sapiens; identical to SEQ ID NO: 14210

SEQ ID NO: 14216 - protein, 361 aa, Homo sapiens [sequence omitted]

SEQ ID NO: 14217 - protein, 171 aa, Homo sapiens
MSGNGNAAATAEENSPKMRVIRVGTRKSQLARIQTDSVVATLKASYPGLQFEIIAMSTTGDKILDTALSKIGEKSLFTKELEHALEKNEVDLVVHSLKDLPTVLPPGFTIGAICKRENPHDAVVFHPKFVGKTLETLPEKSVVGTSSLRRAAQLQRKFPHLEFRSIDVTLL

SEQ ID NO: 14218 - protein, 334 aa, Homo sapiens
MALRWGIVSVGLISSDFTAVLQTLPRSEHQVVAVAARDLSRAKEFAQKHDIPKAYGSYEELAKDPSVEVAYIGTQHPQHKAAVMLCLAAGKAVLCEKPTGVNAAEVREMVAEARSRALFLMEAIWTRFFPASEALRSVLAQGTLGDLRVARAEFGKNLIHVPRAVDRAQAGGALLDIGIYCVQFTSMVFGGQKPEKISVVGRRHETGVDDTVTVLLQYPGEVHGSFTCSITVQLSNTASVSGTKGMVQLLNPCWCPTELVVKGEHKEFPLPPVPKDCNFDNGAGMSYEAKHVWECLRKGMKESPVIPLSESELLADILEEVRKAIGVTFPQDKR

SEQ ID NO: 14219 - protein, 333 aa, Homo sapiens
MFRAAAPGQLRRAASLLRFQSTLVIAEHANDSLAPITLNTITAATRLGGEVSCLVAGTKCDKVAQDLCKVAGIAKVLVAQHDVYKGLLPEELTPLILATQKQFNYTHICAGASAFGKNLLPRVAAKLEVAPISDIIAIKSPDTFVRTIYAGNALCTVKCDEKVKVFSVRGTSFDAAATSGGSASSEKASSTSPVEISEWLDQKLTKSDRPELTGAKVVVSGGRGLKSGENFKLLYDLADQLHAAVGASRAAVDAGFVPNDMQVGQTGKIVAPELYIAVGISGAIQHLAGMKDSKTIVAINKDPEAPIFQVADYGIVADLFKVVPEMTEILKKK

SEQ ID NO: 14220 - protein, 370 aa, Homo sapiens
MVGKLKQNLLLACLVISSVTVFYLGQHAMECHHRIEERSQPVKLESTRTTVRTGLDLKANKTFAYHKDMPLIFIGGVPRSGTTLMRAMLDAHPDIRCGEETRVIPRILALKQMWSRSSKEKIRLDEAGVTDEVLDSAMQAFLLEIIVKHGEPAPYLCNKDPFALKSLTYLSRLFPNAKFLLMVRDGRASVHSMISRKVTIAGFDLNSYRDCLTKWNRAIETMYNQCMEVGYKKCMLVHYEQLVLHPERWMRTLLKFLQIPWNHSVLHHEEMIGKAGGVSLSKVERSTDQVIKPVNVGALSKWVGKIPPDVLQDMAVIAPMLAKLGYDPYANPPNYGKPDPKIIENTRRVYKGEFQLPDFLKEKPQTEQVE

SEQ ID NO: 14221 - protein, 370 aa, Homo sapiens; identical to SEQ ID NO: 14220

SEQ ID NO: 14222 - protein, 370 aa, Homo sapiens; identical to SEQ ID NO: 14220

SEQ ID NO: 14223 - protein, 370 aa, Homo sapiens; identical to SEQ ID NO: 14220

SEQ ID NO: 14224 - protein, 316 aa, Homo sapiens [sequence omitted]

SEQ ID NO: 14225 - protein, 420 aa, Homo sapiens
MTMEKGMSSGEGLPSRSSQVSAGKITAKELETKQSYKEKRGGFVLVHAGAGYHSESKAKEYKHVCKRACQKAIEKLQAGALATDAVTAALVELEDSPFTNAGMGSNLNLLGEIECDASIMDGKSLNFGAVGALSGIKNPVSVANRLLCEGQKGKLSAGRIPPCFLVGEGAYRWAVDHGIPSCPPNIMTTRFSLAAFKRNKRKLELAERVDTDFMQLKKRRQSSEKENDSGTLDTVGAVVVDHEGNVAAAVSSGGLALKHPGRVGQAALYGCGCWAENTGAHNPYSTAVSTSGCGEHLVRTILARECSHALQAEDAHQALLETMQNKFISSPFLASEDGVLGGVIVLRSCRCSAEPDSSQNKQTLLVEFLWSHTTESMCVGYMSAQDGKAKTHISRLPPGAVAGQSVAIEGGVCRLESPVN

SEQ ID NO: 14226 - protein, 132 aa, Homo sapiens
MTMEKGMSSGEGLPSRSSQVSAGKITAKELETKQSYKEKRGGFVLVHAGAGYHSESKAKEYKHVCKRACQKAIEKLQAGALATDAVTAALVELELMWKGQFQVLCVLTNLFLDIIKNPTKTKFKTISNVKVY

SEQ ID NO: 14227 - protein, 420 aa, Homo sapiens; identical to SEQ ID NO: 14225

SEQ ID NO: 14228 - protein, 318 aa, Homo sapiens
MGSNLNLLGEIECDASIMDGKSLNFGAVGALSGIKNPVSVANRLLCEGQKGKLSAGRIPPCFLVGEGAYRWAVDHGIPSCPPNIMTTRFSLAAFKRNKRKLELAERVDTDFMQLKKRRQSSEKENDSGTLDTVGAVVVDHEGNVAAAVSSGGLALKHPGRVGQAALYGCGCWAENTGAHNPYSTAVSTSGCGEHLVRTILARECSHALQAEDAHQALLETMQNKFISSPFLASEDGVLGGVIVLRSCRCSAEPDSSQNKQTLLVEFLWSHTTESMCVGYMSAQDGKAKTHISRLPPGAVAGQSVAIEGGVCRLESPVN

SEQ ID NO: 14229 - protein, 199 aa, Homo sapiens [sequence omitted]

SEQ ID NO: 14230 - protein, 647 aa, Homo sapiens [sequence omitted]

SEQ ID NO: 14231 - protein, 647 aa, Homo sapiens [sequence omitted]

SEQ ID NO: 14232 - protein, 601 aa, Homo sapiens
MAGASELGTGPGAAGGDGDDSLYPIAVLIDELRNEDVQLRLNSIKKLSTIALALGVERTRSELLPFLTDTIYDEDEVLLALAEQLGNFTGLVGGPDFAHCLLPPLENLATVEETVVRDKAVESLRQISQEHTPVALEAYFVPLVKRLASGDWFTSRTSACGLFSVCYPRASNAVKAEIRQQFRSLCSDDTPMVRRAAASKLGEFAKVLELDSVKSEIVPLFTSLASDEQDSVRLLAVEACVSIAQLLSQDDLETLVMPTLRQAAEDKSWRVRYMVADRFSELQKAMGPKITLNDLIPAFQNLLKDCEAEVRAAAAHKVKELGENLPIEDRETIIMNQILPYIKELVSDTNQHVKSALASVIMGLSTILGKENTIEHLLPLFLAQLKDECPDVRLNIISNLDCVNEVIGIRQLSQSLLPAIVELAEDAKWRVRLAIIEYMPLLAGQLGVEFFDEKLNSLCMAWLVDHVYAIREAATNNLMKLVQKFGTEWAQNTIVPKVLVMANDPNYLHRMTTLFCINALSEACGQEITTKQMLPIVLKMAGDQVANVRFNVAKSLQKIGPILDTNALQGEVKPVLQKLGQDEDMDVKYFAQEAISVLALA

SEQ ID NO: 14233 - protein, 667 aa, Homo sapiens
MAGASELGTGPGAAGGDGDDSLYPIAVLIDELRNEDVQLRLNSIKKLSTIALALGVERTRSELLPFLTDTIYDEDEVLLALAEQLGNFTGLVGGPDFAHCLLPPLENLATVEETVVRDKAVESLRQISQEHTPVALEAYFVPLVKRLASGDWFTSRTSACGLFSVCYPRASNAVKAEIRQQFRSLCSDDTPMVRRAAASKLGEFAKVLELDSVKSEIVPLFTSLASDEQDSVRLLAVEACVSIAQLLSQDDLETLVMPTLRQAAEDKSWRVRYMVADRFSELQKAMGPKITLNDLIPAFQNLLKDCEAEVRAAAAHKVKELGENLPIEDRETIIMNQILPYIKELVSDTNQHVKSALASVIMGLSTILGKENTIEHLLPLFLAQLKDECPDVRLNIISNLDCVNEVIGIRQLSQSLLPAIVELAEDAKWRVRLAIIEYMPLLAGQLGVEFFDEKLNSLCMAWLVDHVYAIREAATNNLMKLVQKFGTEWAQNTIVPKVLVMANDPNYLHRMTTLFCINALSEACGQEITTKQMLPIVLKMAGDQVANVRFNVAKSLQKIGPILDTNALQGEVKPVLQKLGQDEDMDVKYFAQEAISVVAQRLRKLEFPVKDSGEPSVPRADKNHFPRPTVPGEDMGKGPVYQLRGDTRDTLAQLGIAELVHFSQSTD

SEQ ID NO: 14234 - protein, 404 aa, Homo sapiens [sequence omitted]

SEQ ID NO: 14235 - protein, 393 aa, Homo sapiens
MEPFVVLVLCLSFMLLFSLWRQSCRRRKLPPGPTPLPIIGNMLQIDVKDICKSFTNFSKVYGPVFTVYFGMNPIVVFHGYEAVKEALIDNGEEFSGRGNSPISQRITKGLGIISSNGKRWKEIRRFSLTTLRNFGMGKRSIEDRVQEEAHCLVEELRKTKASPCDPTFILGCAPCNVICSVVFQKRFDYKDQNFLTLMKRFNENFRILNSPWIQVCNNFPLLIDCFPGTHNKVLKNVALTRSYIREKVKEHQASLDVNNPRDFIDCFLIKMEQEKDNQKSEFNIENLVGTVADLFVAGTETTSTTLRYGLLLLLKHPEVTAKVQEEIDHVIGRHRSPCMQDRSHMPYTDAVVHEIQRYSDLVPTGVPHAVTTDTKFRNYLIPKSFDNKIMLAA

SEQ ID NO: 14236 - protein, 490 aa, Homo sapiens
MEPFVVLVLCLSFMLLFSLWRQSCRRRKLPPGPTPLPIIGNMLQIDVKDICKSFTNFSKVYGPVFTVYFGMNPIVVFHGYEAVKEALIDNGEEFSGRGNSPISQRITKGLGIISSNGKRWKEIRRFSLTTLRNFGMGKRSIEDRVQEEAHCLVEELRKTKASPCDPTFILGCAPCNVICSVVFQKRFDYKDQNFLTLMKRFNENFRILNSPWIQVCNNFPLLIDCFPGTHNKVLKNVALTRSYIREKVKEHQASLDVNNPRDFIDCFLIKMEQEKDNQKSEFNIENLVGTVADLFVAGTETTSTTLRYGLLLLLKHPEVTAKVQEEIDHVIGRHRSPCMQDRSHMPYTDAVVHEIQRYSDLVPTGVPHAVTTDTKFRNYLIPKGTTIMALLTSVLHDDKEFPNPNIFDPGHFLDKNGNFKKSDYFMPFSAGKRICAGEGLARMELFLFLTTILQNFNLKSVDDLKNLNTTAVTKGIVSLPPSYQICFIPV

SEQ ID NO: 14237 - protein, 490 aa, Homo sapiens [sequence omitted]

SEQ ID NO: 14238 - protein, 162 aa, Homo sapiens
MDSLVVLVLCLSCLLLLSLWRQSSGRGKLPPGPTPLPVIGNILQIGIKDISKSLTNLSKVYGPVFTLYFGLKPIVVLHGYEAVKEALIDLGEEFSGRGIFPLAERANRGFGIVFSNGKKWKEIRRFSLMTLRNFGMGKRSIEDRVQEEARCLVEELRKTKGG

SEQ ID NO: 14239 - protein, 162 aa, Homo sapiens
MAVLAALLRSGARSRSPLLRRLVQEIRYVERSYVSKPTLKEVVIVSATRTPIGSFLGSLSLLPATKLGSIAIQGAIEKAGIPKEEVKEAYMGNVLQGGEGQAPTRQAVLGAGLPISTPCTTINKVCASGMKAIMMASQSLMCGHQIKQETGSLAKICCHVRR

SEQ ID NO: 14240 - protein, 427 aa, Homo sapiens
MAVLAALLRSGARSRSPLLRRLVQEIRYVERSYVSKPTLKEVVIVSATRTPIGSFLGSLSLLPATKLGSIAIQGAIEKAGIPKEEVKEAYMGNVLQGGEGQAPTRQAVLGAGLPISTPCTTINKVCASGMKAIMMASQSLMCGHQDVMVAGGMESMSNVPYVMNRGSTPYGGVKLEDLIVKDGLTDVYNKIHMGSCAENTAKKLNIARNEQDAYAINSYTRSKAAWEAGKFGNEVIPVTVTVKGQPDVVVKEDEEYKRVDFSKVPKLKTVFQKENGTVTAANASTLNDGAAALVLMTADAAKRLNVTPLARIVAFADAAVEPIDFPIAPVYAASMVLKDVGLKKEDIAMWEVNEAFSLVVLANIKMLEIDPQKVNINGGAVSLGHPIGMSGARIVGHLTHALKQGEYGLASICNGGGGASAMLIQKL

SEQ ID NO: 14241 - protein, 428 aa, Homo sapiens
MKRRKYGFIYKTHLFGRPTVRVMGADNVRRILLGEHRLVSVHWPASVRTILGSGCLSNLHDSSHKQRKKVIMRAFSREALECYVPVITEEVGSSLEQWLSCGERGLLVYPEVKRLMFRIAMRILLGCEPQLAGDGDSEQQLVEAFEEMTRNLFSLPIDVPFSGLYRGMKARNLIHARIEQNIRAKICGLRASEAGQGCKDALQLLIEHSWERGERLDMQALKQSSTELLFGGHETTASAATSLITYLGLYPHVLQKVREELKSKGLLCKSNQDNKLDMEILEQLKYIGCVIKETLRLNPPVPGGFRVALKTFELNGYQIPKGWNVIYSICDTHDVAEIFTNKEEFNPDRFMLPHPEDASRFSFIPFGGGLRSCVGKEFAKILLKIFTVELARHCDWQLLNGPPTMKTSPTVYPVDNLPARFTHFHGEI

SEQ ID NO: 14242 - protein, 497 aa, Homo sapiens
MGLPALLASALCTFVLPLLLFLAAIKLWDLYCVSGRDRSCALPLPPGTMGFPFFGETLQMVLQRRKFLQMKRRKYGFIYKTHLFGRPTVRVMGADNVRRILLGEHRLVSVHWPASVRTILGSGCLSNLHDSSHKQRKKVIMRAFSREALECYVPVITEEVGSSLEQWLSCGERGLLVYPEVKRLMFRIAMRILLGCEPQLAGDGDSEQQLVEAFEEMTRNLFSLPIDVPFSGLYRGMKARNLIHARIEQNIRAKICGLRASEAGQGCKDALQLLIEHSWERGERLDMQALKQSSTELLFGGHETTASAATSLITYLGLYPHVLQKVREELKSKGLLCKSNQDNKLDMEILEQLKYIGCVIKETLRLNPPVPGGFRVALKTFELNGYQIPKGWNVIYSICDTHDVAEIFTNKEEFNPDRFMLPHPEDASRFSFIPFGGGLRSCVGKEFAKILLKIFTVELARHCDWQLLNGPPTMKTSPTVYPVDNLPARFTHFHGEI

SEQ ID NO: 14243 - protein, 858 aa, Homo sapiens
MGEINQVAVEKYLEENPQFAKEYFDRKLRVEVLGEIFKNSQVPVQSSMSFSELTQVEESALCLELLWTVQEEGGTPEQGVHRALQRLAHLLQADRCSMFLCRSRNGIPEVASRLLDVTPTSKFEDNLVGPDKEVVFPLDIGIVGWAAHTKKTHNVPDVKKNSHFSDFMDKQTGYVTKNLLATPIVVGKEVLAVIMAVNKVNASEFSKQDEEVFSKYLNFVSIILRLHHTSYMYNIESRRSQILMWSANKVFEELTDVERQFHKALYTVRSYLNCERYSIGLLDMTKEKEFYDEWPIKLGEVEPYKGPKTPDGREVNFYKIIDYILHGKEEIKVIPTPPADHWTLISGLPTYVAENGFICNMMNAPADEYFTFQKGPVDETGWVIKNVLSLPIVNKKEDIVGVATFYNRKDGKPFDEHDEYITETLTQFLGWSLLNTDTYDKMNKLENRKDIAQEMLMNQTKATPEEIKSILKFQEKLNVDVIDDCEEKQLVAILKEDLPDPRSAELYEFRFSDFPLTEHGLIKCGIRLFFEINVVEKFKVPVEVLTRWMYTVRKGYRAVTYHNWRHGFNVGQTMFTLLMTGRLKKYYTDLEAFAMLAAAFCHDIDHRGTNNLYQMKSTSPLARLHGSSILERHHLEYSKTLLQDESLNIFQNLNKRQFETVIHLFEVAIIATDLALYFKKRTMFQKIVDACEQMQTEEEAIKYVTVDPTKKEIIMAMMMTACDLSAITKPWEVQSQVALMVANEFWEQGDLERTVLQQQPIPMMDRNKRDELPKLQVGFIDFVCTFVYKEFSRFHKEITPMLSGLQNNRVEWKSLADEYDAKMKVIEEEAKKQEGGAEKAAEDSGGGDDKKSKTCLML

SEQ ID NO: 14244 - protein, 474 aa, Homo sapiens [sequence omitted]

SEQ ID NO: 14245 - protein, 359 aa, Homo sapiens
MRSIRKRWTICTISLLLIFYKTKEIARTEEHQETQLIGDGELSLSRSLVNSSDKIIRKAGSSIFQHNVEGWKINSSLVLEIRKNILRFLDAERDVSVVKSSFKPGDVIHYVLDRRRTLNISHDLHSLLPEVSPMKNRRFKTCAVVGNSGILLDSECGKEIDSHNFVIRCNLAPVVEFAADVGTKSDFITMNPSVVQRAFGGFRNESDREKFVHRLSMLNDSVLWIPAFMVKGGEKHVEWVNALILKNKLKVRTAYPSLRLIHAVRGYWLTNKVPIKRPSTGLLMYTLATRFCDEIHLYGFWPFPKDLNGKAVKYHYYDDLKYRYFSNASPHRMPLEFKTLNVLHNRGALKLTTGKCVKQ

SEQ ID NO: 14246 - protein, 168 aa, Homo sapiens
MRSIRKRWTICTISLLLIFYKTKEIARTEEHQETQLIGDGELSLSRSLVNSSDKIIRKAGSSIFQHNVEGWKINSSLVLEIRKNILRFLDAERDVSVVKSSFKPGDVIHYVLDRRRTLNISHDLHSLLPEVSPMKNRRFKTCAVVGNSGILLDSECGKEIDSHNFVIR

SEQ ID NO: 14247 - protein, 175 aa, Homo sapiens
MAAVSMSVVLRQTLWRRRAVAVAALSVSRVPTRSLRTSTWRLAQDQTQDTQLITVDEKLDITTLTGVPEEHIKTRKVRIFVPARNNMQSGVNNTKKWKMEFDTRERWENPLMGWASTADPLSNMVLTFSTKEDAVSFAEKNGWSYDIEERKVPKPKSKSYGANFSWNKRTRVSTK

SEQ ID NO: 14248 - protein, 373 aa, Homo sapiens
MEPAVSEPMRDQVARTHLTEDTPKVNADIEKVNQNQAKRCTVIGGSGFLGQHMVEQLLARGYAVNVFDIQQGFDNPQVRFFLGDLCSRQDLYPALKGVNTVFHCASPPPSSNNKELFYRVNYIGTKNVIETCKEAGVQKLILTSSASVIFEGVDIKNGTEDLPYAMKPIDYYTETKILQERAVLGANDPEKNFLTTAIRPHGIFGPRDPQLVPILIEAARNGKMKFVIGNGKNLVDFTFVENVVHGHILAAEQLSRDSTLGGKAFHITNDEPIPFWTFLSRILTGLNYEAPKYHIPYWVAYYLALLLSLLVMVISPVIQLQPTFTPMRVALAGTFHYYSCERAKKAMGYQPLVTMDDAMERTVQSFRHLRRVK

SEQ ID NO: 14249 - protein, 373 aa, Homo sapiens; identical to SEQ ID NO: 14248

SEQ ID NO: 14250 - protein, 1220 aa, Homo sapiens
MGDMANSSIEFHPKPQQQRDVPQAGGFGCTLAELRTLMELRGAEALQKIEEAYGDVSGLCRRLKTSPTEGLADNTNDLEKRRQIYGQNFIPPKQPKTFLQLVWEALQDVTLIILEVAAIVSLGLSFYAPPGEESEACGNVSGGAEDEGEAEAGWIEGAAILLSVICVVLVTAFNDWSKEKQFRGLQSRIEQEQKFTVIRNGQLLQVPVAALVVGDIAQVKYGDLLPADGVLIQANDLKIDESSLTGESDHVRKSADKDPMLLSGTHVMEGSGRMVVTAVGVNSQTGIIFTLLGAGGEEEEKKDKKGKQQDGAMESSQTKAKKQDGAVAMEMQPLKSAEGGEMEEREKKKANAPKKEKSVLQGKLTKLAVQIGKAGLVMSAITVIILVLYFVIETFVVEGRTWLAECTPVYVQYFVKFFIIGVTVLVVAVPEGLPLAVTISLAYSVKKMMKDNNLVRHLDACETMGNATAICSDKTGTLTTNRMTVVQSYLGDTHYKEIPAPSALTPKILDLLVHAISINSAYTTKILPPEKEGALPRQVGNKTECALLGFVLDLKRDFQPVREQIPEDKLYKVYTFNSVRKSMSTVIRMPDGGFRLFSKGASEILLKKCTNILNSNGELRGFRPRDRDDMVRKIIEPMACDGLRTICIAYRDFSAGQEPDWDNENEVVGDLTCIAVVGIEDPVRPEVPEAIRKCQRAGITVRMVTGDNINTARAIAAKCGIIQPGEDFLCLEGKEFNRRIRNEKGEIEQERLDKVWPKLRVLARSSPTDKHTLVKGIIDSTTGEQRQVVAVTGDGTNDGPALKKADVGFAMGIAGTDVAKEASDIILTDDNFTSIVKAVMWGRNVYDSISKFLQFQLTVNVVAVIVAFTGACITQDSPLKAVQMLWVNLIMDTFASLALATEPPTESLLLRKPYGRDKPLISRTMMKNILGHAVYQLAIIFTLLFVGELFFDIDSGRNAPLHSPPSEHYTIIFNTFVMMQLFNEINARKIHGERNVFDGIFSNPIFCTIVLGTFGIQIVIVQFGGKPFSCSPLSTEQWLWCLFVGVGELVWGQVIATIPTSQLKCLKEAGHGPGKDEMTDEELAEGEEEIDHAERELRRGQILWFRGLNRIQTQIRVVKAFRSSLYEGLEKPESKTSIHNFMATPEFLINDYTHNIPLIDDTDVDENEERLRAPPPPSPNQNNNAIDSGIYLTTHVTKSATSSVFSSSPGSPLHSVETSL

SEQ ID NO: 14251 - protein, 1173 aa, Homo sapiens
MGDMANSSIEFHPKPQQQRDVPQAGGFGCTLAELRTLMELRGAEALQKIEEAYGDVSGLCRRLKTSPTEGLADNTNDLEKRRQIYGQNFIPPKQPKTFLQLVWEALQDVTLIILEVAAIVSLGLSFYAPPGEESEACGNVSGGAEDEGEAEAGWIEGAAILLSVICVVLVTAFNDWSKEKQFRGLQSRIEQEQKFTVIRNGQLLQVPVAALVVGDIAQVKYGDLLPADGVLIQANDLKIDESSLTGESDHVRKSADKDPMLLSGTHVMEGSGRMVVTAVGVNSQTGIIFTLLGAGGEEEEKKDKKGKQQDGAMESSQTKAKKQDGAVAMEMQPLKSAEGGEMEEREKKKANAPKKEKSVLQGKLTKLAVQIGKAGLVMSAITVIILVLYFVIETFVVEGRTWLAECTPVYVQYFVKFFIIGVTVLVVAVPEGLPLAVTISLAYSVKKMMKDNNLVRHLDACETMGNATAICSDKTGTLTTNRMTVVQSYLGDTHYKEIPAPSALTPKILDLLVHAISINSAYTTKILPPEKEGALPRQVGNKTECALLGFVLDLKRDFQPVREQIPEDKLYKVYTFNSVRKSMSTVIRMPDGGFRLFSKGASEILLKKCTNILNSNGELRGFRPRDRDDMVRKIIEPMACDGLRTICIAYRDFSAGQEPDWDNENEVVGDLTCIAVVGIEDPVRPEVPEAIRKCQRAGITVRMVTGDNINTARAIAAKCGIIQPGEDFLCLEGKEFNRRIRNEKGEIEQERLDKVWPKLRVLARSSPTDKHTLVKGIIDSTTGEQRQVVAVTGDGTNDGPALKKADVGFAMGIAGTDVAKEASDIILTDDNFTSIVKAVMWGRNVYDSISKFLQFQLTVNVVAVIVAFTGACITQDSPLKAVQMLWVNLIMDTFASLALATEPPTESLLLRKPYGRDKPLISRTMMKNILGHAVYQLAIIFTLLFVGELFFDIDSGRNAPLHSPPSEHYTIIFNTFVMMQLFNEINARKIHGERNVFDGIFSNPIFCTIVLGTFGIQIVIVQFGGKPFSCSPLSTEQWLWCLFVGVGELVWGQVIATIPTSQLKCLKEAGHGPGKDEMTDEELAEGEEEIDHAERELRRGQILWFRGLNRIQTQMEVVSTFKRSGSVQGAVRRRSSVLSQLHDVTNLSTPTHAILSAANPTSAAGNPGGESVP

SEQ ID NO: 14252 - protein, 1159 aa, Homo sapiens
MGDMANSSIEFHPKPQQQRDVPQAGGFGCTLAELRTLMELRGAEALQKIEEAYGDVSGLCRRLKTSPTEGLADNTNDLEKRRQIYGQNFIPPKQPKTFLQLVWEALQDVTLIILEVAAIVSLGLSFYAPPGEESEACGNVSGGAEDEGEAEAGWIEGAAILLSVICVVLVTAFNDWSKEKQFRGLQSRIEQEQKFTVIRNGQLLQVPVAALVVGDIAQVKYGDLLPADGVLIQANDLKIDESSLTGESDHVRKSADKDPMLLSGTHVMEGSGRMVVTAVGVNSQTGIIFTLLGAGGEEEEKKDKKAKKQDGAVAMEMQPLKSAEGGEMEEREKKKANAPKKEKSVLQGKLTKLAVQIGKAGLVMSAITVIILVLYFVIETFVVEGRTWLAECTPVYVQYFVKFFIIGVTVLVVAVPEGLPLAVTISLAYSVKKMMKDNNLVRHLDACETMGNATAICSDKTGTLTTNRMTVVQSYLGDTHYKEIPAPSALTPKILDLLVHAISINSAYTTKILPPEKEGALPRQVGNKTECALLGFVLDLKRDFQPVREQIPEDKLYKVYTFNSVRKSMSTVIRMPDGGFRLFSKGASEILLKKCTNILNSNGELRGFRPRDRDDMVRKIIEPMACDGLRTICIAYRDFSAGQEPDWDNENEVVGDLTCIAVVGIEDPVRPEVPEAIRKCQRAGITVRMVTGDNINTARAIAAKCGIIQPGEDFLCLEGKEFNRRIRNEKGEIEQERLDKVWPKLRVLARSSPTDKHTLVKGIIDSTTGEQRQVVAVTGDGTNDGPALKKADVGFAMGIAGTDVAKEASDIILTDDNFTSIVKAVMWGRNVYDSISKFLQFQLTVNVVAVIVAFTGACITQDSPLKAVQMLWVNLIMDTFASLALATEPPTESLLLRKPYGRDKPLISRTMMKNILGHAVYQLAIIFTLLFVGELFFDIDSGRNAPLHSPPSEHYTIIFNTFVMMQLFNEINARKIHGERNVFDGIFSNPIFCTIVLGTFGIQIVIVQFGGKPFSCSPLSTEQWLWCLFVGVGELVWGQVIATIPTSQLKCLKEAGHGPGKDEMTDEELAEGEEEIDHAERELRRGQILWFRGLNRIQTQMEVVSTFKRSGSVQGAVRRRSSVLSQLHDVTNLSTPTHAILSAANPTSAAGNPGGESVP

SEQ ID NO: 14253 - protein, 284 aa, Homo sapiens
MFDKTRLPYVALDVLCVLLAGLPFAILTSRHTPFQRGVFCNDESIKYPYKEDTIPYALLGGIIIPFSIIVIILGETLSVYCNLLHSNSFIRNNYIATIYKAIGTFLFGAAASQSLTDIAKYSIGRLRPHFLDVCDPDWSKINCSDGYIEYYICRGNAERVKEGRLSFYSGHSSFSMYCMLFVALYLQARMKGDWARLLRPTLQFGLVAVSIYVGLSRVSDYKHHWSDVLTGLIQGALVAILVAVYVSDFFKERTSFKERKEEDSHTTLHETPTTGNHYPSNHQP

SEQ ID NO: 14254 - protein, 284 aa, Homo sapiens; identical to SEQ ID NO: 14253

SEQ ID NO: 14255 - protein, 285 aa, Homo sapiens
MFDKTRLPYVALDVLCVLLASMPMAVLKLGQIYPFQRGFFCKDNSINYPYHDSTVTSTVLILVGVGLPISSIILGETLSVYCNLLHSNSFIRNNYIATIYKAIGTFLFGAAASQSLTDIAKYSIGRLRPHFLDVCDPDWSKINCSDGYIEYYICRGNAERVKEGRLSFYSGHSSFSMYCMLFVALYLQARMKGDWARLLRPTLQFGLVAVSIYVGLSRVSDYKHHWSDVLTGLIQGALVAILVAVYVSDFFKERTSFKERKEEDSHTTLHETPTTGNHYPSNHQP

SEQ ID NO: 14256 - protein, 349 aa, Homo sapiens
MAGGRCGPQLTALLAAWIAAVAATAGPEEAALPPEQSRVQPMTASNWTLVMEGEWMLKFYAPWCPSCQQTDSEWEAFAKNGEILQISVGKVDVIQEPGLSGRFFVTTLPAFFHAKDGIFRRYRGPGIFEDLQNYILEKKWQSVEPLTGWKSPASLTMSGMAGLFSISGKIWHLHNYFTVTLGIPAWCSYVFFVIATLVFGLFMGLVLVVISECFYVPLPRHLSERSEQNRRSEEAHRAEQLQDAEEEKDDSNEEENKDSLVDDEEEKEDLGDEDEAEEEEEEDNLAAGVDEERSEANDQGPPGEDGVTREEVEPEEAEEGISEQPCPADTEVVEDSLRQRKSQHADKGL

SEQ ID NO: 14257 - protein, 193 aa, Homo sapiens
MSGMAGLFSISGKIWHLHNYFTVTLGIPAWCSYVFFVIATLVFGLFMGLVLVVISECFYVPLPRHLSERSEQNRRSEEAHRAEQLQDAEEEKDDSNEEENKDSLVDDEEEKEDLGDEDEAEEEEEEDNLAAGVDEERSEANDQGPPGEDGVTREEVEPEEAEEGISEQPCPADTEVVEDSLRQRKSQHADKGL

SEQ ID NO: 14258 - protein, 193 aa, Homo sapiens; identical to SEQ ID NO: 14257

SEQ ID NO: 14259 - protein, 241 aa, Homo sapiens
MLPRLICINDYEQHAKSVLPKSIYDYYRSGANDEETLADNIAAFSRWKLYPRMLRNVAETDLSTSVLGQRVSMPICVGATAMQRMAHVDGELATVRACQSLGTGMMLSSWATSSIEEVAEAGPEALRWLQLYIYKDREVTKKLVRQAEKMGYKAIFVTVDTPYLGNRLDDVRNRFKLPPQLRMKNFETSTLSFSPEENFGDDSGLAAYVAKAIDPSISWEDIKWLRRLTSLPIVAKGILRD

SEQ ID NO: 14260 - protein, 370 aa, Homo sapiens
MLPRLICINDYEQHAKSVLPKSIYDYYRSGANDEETLADNIAAFSRWKLYPRMLRNVAETDLSTSVLGQRVSMPICVGATAMQRMAHVDGELATVRACQSLGTGMMLSSWATSSIEEVAEAGPEALRWLQLYIYKDREVTKKLVRQAEKMGYKAIFVTVDTPYLGNRLDDVRNRFKLPPQLRMKNFETSTLSFSPEENFGDDSGLAAYVAKAIDPSISWEDIKWLRRLTSLPIVAKGILRGDDAREAVKHGLNGILVSNHGARQLDGVPATIDVLPEIVEAVEGKVEVFLDGGVRKGTDVLKALALGAKAVFVGRPIVWGLAFQGEKGVQDVLEILKEEFRLAMALSGCQNVKVIDKTLVRKNPLAVSKI

SEQ ID NO: 14261 - protein, 370 aa, Homo sapiens; identical to SEQ ID NO: 14260

SEQ ID NO: 14262 - protein, 148 aa, Homo sapiens
MQCTAWLNAYFHQPEAIEEFPVPALHHPVFQQESFTRQVLWKLLKVVKFGEVISYQQLAALAGNPKAARAVGGAMRGNPVPILIPCHRVVCSSGAVGNYSGGLAVKEWLLAHEGHRLGKPGLGGSSGLAGAWLKGAGATSGSPPAGRN

SEQ ID NO: 14263 - protein, 207 aa, Homo sapiens
MDKDCEMKRTTLDSPLGKLELSGCEQGLHEIKLLGKGTSAADAVEVPAPAAVLGGPEPLMQCTAWLNAYFHQPEAIEEFPVPALHHPVFQQESFTRQVLWKLLKVVKFGEVISYQQLAALAGNPKAARAVGGAMRGNPVPILIPCHRVVCSSGAVGNYSGGLAVKEWLLAHEGHRLGKPGLGGSSGLAGAWLKGAGATSGSPPAGRN

SEQ ID NO: 14264 - protein, 148 aa, Homo sapiens; identical to SEQ ID NO: 14262

SEQ ID NO: 14265 - protein, 244 aa, Homo sapiens
MAAAAAAGEARRVLVYGGRGALGSRCVQAFRARNWWVASVDVVENEEASASIIVKMTDSFTEQADQVTAEVGKLLGEEKVDAILCVAGGWAGGNAKSKSLFKNCDLMWKQSIWTSTISSHLATKHLKEGGLLTLAGAKAALDGTPGMIGYGMAKGAVHQLCQSLAGKNSGMPPGAAAIAVLPVTLDTPMNRKSMPEADFSSWTPLEFLVETFHDWITGKNRPSSGSLIQVVTTEGRTELTPAYF

SEQ ID NO: 14266 - protein, 244 aa, Homo sapiens; identical to SEQ ID NO: 14265

SEQ ID NO: 14267 - protein, 1051 aa, Homo sapiens
MTCLKKHWMKLAFMTNTNGKIPVRSITRTFASGKTEKVIFQALKELGLPSGKNDEIEPTAFSYEKFYELTQKICPRTDIEDLFKKINGDKTDYLTVDQLVSFLNEHQRDPRLNEILFPFYDAKRAMQIIEMYEPDEDLKKKGLISSDGFCRYLMSDENAPVFLDRLELYQEMDHPLAHYFISSSHNTYLTGRQFGGKSSVEMYRQVLLAGCRCVELDCWDGKGEDQEPIITHGKAMCTDILFKDVIQAIKETAFVTSEYPVILSFENHCSKYQQYKMSKYCEDLFGDLLLKQALESHPLEPGRALPSPNDLKRKILIKNKRLKPEVEKKQLEALRSMMEAGESASPANILEDDNEEEIESADQEEEAHPEFKFGNELSADDLGHKEAVANSVKKGLVTVEDEQAWMASYKYVGATTNIHPYLSTMINYAQPVKFQGFHVAEERNIHYNMSSFNESVGLGYLKTHAIEFVNYNKRQMSRIYPKGGRVDSSNYMPQIFWNAGCQMVSLNYQTPDLAMQLNQGKFEYNGSCGYLLKPDFMRRPDRTFDPFSETPVDGVIAATCSVQVISGQFLSDKKIGTYVEVDMYGLPTDTIRKEFRTRMVMNNGLNPVYNEESFVFRKVILPDLAVLRIAVYDDNNKLIGQRILPLDGLQAGYRHISLRNEGNKPLSLPTIFCNIVLKTYVPDGFGDIVDALSDPKKFLSITEKRADQMRAMGIETSDIADVPSDTSKNDKKGKANTAKANVTPQSSSELRPTTTAALASGVEAKKGIELIPQVRIEDLKQMKAYLKHLKKQQKELNSLKKKHAKEHSTMQKLHCTQVDKIVAQYDKEKSTHEKILEKAMKKKGGSNCLEMKKETEIKIQTLTSDHKSKVKEIVAQHTKEWSEMINTHSAEEQEIRDLHLSQQCELLKKLLINAHEQQTQQLKLSHDRESKEMRAHQAKISMENSKAISQDKSIKNKAERERRVRELNSSNTKKFLEERKRLAMKQSKEMDQLKKVQLEHLEFLEKQNEQLLKSCHAVSQTQGEGDAADGEIGSRDGPQTSNSSMKLQNAN

SEQ ID NO: 14268 - protein, 1041 aa, Homo sapiens
MNNNWNVCFFLFCPSITRTFASGKTEKVIFQALKELGLPSGKNDEIEPTAFSYEKFYELTQKICPRTDIEDLFKKINGDKTDYLTVDQLVSFLNEHQRDPRLNEILFPFYDAKRAMQIIEMYEPDEDLKKKGLISSDGFCRYLMSDENAPVFLDRLELYQEMDHPLAHYFISSSHNTYLTGRQFGGKSSVEMYRQVLLAGCRCVELDCWDGKGEDQEPIITHGKAMCTDILFKDVIQAIKETAFVTSEYPVILSFENHCSKYQQYKMSKYCEDLFGDLLLKQALESHPLEPGRALPSPNDLKRKILIKNKRLKPEVEKKQLEALRSMMEAGESASPANILEDDNEEEIESADQEEEAHPEFKFGNELSADDLGHKEAVANSVKKGLVTVEDEQAWMASYKYVGATTNIHPYLSTMINYAQPVKFQGFHVAEERNIHYNMSSFNESVGLGYLKTHAIEFVNYNKRQMSRIYPKGGRVDSSNYMPQIFWNAGCQMVSLNYQTPDLAMQLNQGKFEYNGSCGYLLKPDFMRRPDRTFDPFSETPVDGVIAATCSVQVISGQFLSDKKIGTYVEVDMYGLPTDTIRKEFRTRMVMNNGLNPVYNEESFVFRKVILPDLAVLRIAVYDDNNKLIGQRILPLDGLQAGYRHISLRNEGNKPLSLPTIFCNIVLKTYVPDGFGDIVDALSDPKKFLSITEKRADQMRAMGIETSDIADVPSDTSKNDKKGKANTAKANVTPQSSSELRPTTTAALASGVEAKKGIELIPQVRIEDLKQMKAYLKHLKKQQKELNSLKKKHAKEHSTMQKLHCTQVDKIVAQYDKEKSTHEKILEKAMKKKGGSNCLEMKKETEIKIQTLTSDHKSKVKEIVAQHTKEWSEMINTHSAEEQEIRDLHLSQQCELLKKLLINAHEQQTQQLKLSHDRESKEMRAHQAKISMENSKAISQDKSIKNKAERERRVRELNSSNTKKFLEERKRLAMKQSKEMDQLKKVQLEHLEFLEKQNEQLLKSCHAVSQTQGEGDAADGEIGSRDGPQTSNSSMKLQNAN

SEQ ID NO: 14269 - protein, 1022 aa, Homo sapiens
MNNNWNVCFFLFCPSITRTFASGKTEKVIFQALKELGLPSGKNDEIEPTAFSYEKFYELTQKICPRTDIEDLFKKINGDKTDYLTVDQLVSFLNEHQRDPRLNEILFPFYDAKRAMQIIEMYEPDEDLKKKGLISSDGFCRYLMSDENAPVFLDRLELYQEMDHPLAHYFISSSHNTYLTGRQFGGKSSVEMYRQVLLAGCRCVELDCWDGKGEDQEPIITHGKAMCTDILFKDVIQAIKETAFVTSEYPVILSFENHCSKYQQYKMSKYCEDLFGDLLLKQALESHPLEPGRALPSPNDLKRKILIKNKRLKPEVEKKQLEALRSMMEAGESASPANILEDDNEEEIESADQEEEAHPEFKFGNELSADDLGHKEAVANSVKKGLVTVEDEQAWMASYKYVGATTNIHPYLSTMINYAQPVKFQGFHVAEERNIHYNMSSFNESVGLGYLKTHAIEFVNYNKRQMSRIYPKGGRVDSSNYMPQIFWNAGCQMVSLNYQTPDLAMQLNQGKFEYNGSCGYLLKPDFMRRPDRTFDPFSETPVDGVIAATCSVQVISGQFLSDKKIGTYVEVDMYGLPTDTIRKEFRTRMVMNNGLNPVYNEESFVFRKVILPDLAVLRIAVYDDNNKLIGQRILPLDGLQAGYRHISLRNEGNKPLSLPTIFCNIVLKTYVPDGFGDIVDALSDPKKFLSITEKRADQMRAMGIETSDIADVPSDTSKNDKKGKANTAKANVTPQSSSELRPTTTAALASGVEAKKGIELIPQVRIEDLKQMKAYLKHLKKQQKELNSLKKKHAKEHSTMQKLHCTQVDKIVAQYDKEKSTHEKILEKAMKKKGGSNCLEMKKETEIKIQTLTSDHKSKVKEIVAQHTKEWSEMINTHSAEEQEIRDLHLSQQCELLKKLLINAHEQQTQQLKLSHDRESKEMRAHQAKISMENSKAISQDKSIKNKAERERRVRELNSSNTKKFLEERKRLAMKQSKEMDQLKKVQLEHLEFLEKQNEQAKEMQQMVKLEAEMDRRPATVV

SEQ ID NO: 14270 - protein, 1081 aa, Homo sapiens
MVAENPEVTKQWVEGLRSIIHNFRANNVSPMTCLKKHWMKLAFMTNTNGKIPVRSITRTFASGKTEKVIFQALKELGLPSGKNDEIEPTAFSYEKFYELTQKICPRTDIEDLFKKINGDKTDYLTVDQLVSFLNEHQRDPRLNEILFPFYDAKRAMQIIEMYEPDEDLKKKGLISSDGFCRYLMSDENAPVFLDRLELYQEMDHPLAHYFISSSHNTYLTGRQFGGKSSVEMYRQVLLAGCRCVELDCWDGKGEDQEPIITHGKAMCTDILFKDVIQAIKETAFVTSEYPVILSFENHCSKYQQYKMSKYCEDLFGDLLLKQALESHPLEPGRALPSPNDLKRKILIKNKRLKPEVEKKQLEALRSMMEAGESASPANILEDDNEEEIESADQEEEAHPEFKFGNELSADDLGHKEAVANSVKKGLVTVEDEQAWMASYKYVGATTNIHPYLSTMINYAQPVKFQGFHVAEERNIHYNMSSFNESVGLGYLKTHAIEFVNYNKRQMSRIYPKGGRVDSSNYMPQIFWNAGCQMVSLNYQTPDLAMQLNQGKFEYNGSCGYLLKPDFMRRPDRTFDPFSETPVDGVIAATCSVQVISGQFLSDKKIGTYVEVDMYGLPTDTIRKEFRTRMVMNNGLNPVYNEESFVFRKVILPDLAVLRIAVYDDNNKLIGQRILPLDGLQAGYRHISLRNEGNKPLSLPTIFCNIVLKTYVPDGFGDIVDALSDPKKFLSITEKRADQMRAMGIETSDIADVPSDTSKNDKKGKANTAKANVTPQSSSELRPTTTAALASGVEAKKGIELIPQVRIEDLKQMKAYLKHLKKQQKELNSLKKKHAKEHSTMQKLHCTQVDKIVAQYDKEKSTHEKILEKAMKKKGGSNCLEMKKETEIKIQTLTSDHKSKVKEIVAQHTKEWSEMINTHSAEEQEIRDLHLSQQCELLKKLLINAHEQQTQQLKLSHDRESKEMRAHQAKISMENSKAISQDKSIKNKAERERRVRELNSSNTKKFLEERKRLAMKQSKEMDQLKKVQLEHLEFLEKQNEQLLKSCHAVSQTQGEGDAADGEIGSRDGPQTSNSSMKLQNAN

SEQ ID NO: 14271 - protein, 1062 aa, Homo sapiens
MVAENPEVTKQWVEGLRSIIHNFRANNVSPMTCLKKHWMKLAFMTNTNGKIPVRSITRTFASGKTEKVIFQALKELGLPSGKNDEIEPTAFSYEKFYELTQKICPRTDIEDLFKKINGDKTDYLTVDQLVSFLNEHQRDPRLNEILFPFYDAKRAMQIIEMYEPDEDLKKKGLISSDGFCRYLMSDENAPVFLDRLELYQEMDHPLAHYFISSSHNTYLTGRQFGGKSSVEMYRQVLLAGCRCVELDCWDGKGEDQEPIITHGKAMCTDILFKDVIQAIKETAFVTSEYPVILSFENHCSKYQQYKMSKYCEDLFGDLLLKQALESHPLEPGRALPSPNDLKRKILIKNKRLKPEVEKKQLEALRSMMEAGESASPANILEDDNEEEIESADQEEEAHPEFKFGNELSADDLGHKEAVANSVKKGLVTVEDEQAWMASYKYVGATTNIHPYLSTMINYAQPVKFQGFHVAEERNIHYNMSSFNESVGLGYLKTHAIEFVNYNKRQMSRIYPKGGRVDSSNYMPQIFWNAGCQMVSLNYQTPDLAMQLNQGKFEYNGSCGYLLKPDFMRRPDRTFDPFSETPVDGVIAATCSVQVISGQFLSDKKIGTYVEVDMYGLPTDTIRKEFRTRMVMNNGLNPVYNEESFVFRKVILPDLAVLRIAVYDDNNKLIGQRILPLDGLQAGYRHISLRNEGNKPLSLPTIFCNIVLKTYVPDGFGDIVDALSDPKKFLSITEKRADQMRAMGIETSDIADVPSDTSKNDKKGKANTAKANVTPQSSSELRPTTTAALASGVEAKKGIELIPQVRIEDLKQMKAYLKHLKKQQKELNSLKKKHAKEHSTMQKLHCTQVDKIVAQYDKEKSTHEKILEKAMKKKGGSNCLEMKKETEIKIQTLTSDHKSKVKEIVAQHTKEWSEMINTHSAEEQEIRDLHLSQQCELLKKLLINAHEQQTQQLKLSHDRESKEMRAHQAKISMENSKAISQDKSIKNKAERERRVRELNSSNTKKFLEERKRLAMKQSKEMDQLKKVQLEHLEFLEKQNEQAKEMQQMVKLEAEMDRRPATVV

SEQ ID NO: 14272 - protein, 233 aa, Homo sapiens
MKMGERWSSLFPFPVSPSCCFLLTQSARGVIECLKIVTRAKSQRIAKFAFDYATKKGRGKVTAVHKANIMKLGDGLFLQCCEEVAELYPKIKFETMIIDNCCMQLVQNPYQFDVLVMPNLYGNIIDNLAAGLVGGAGVVPGESYSAEYAVFETGARHPFAQAVGRNIANPTAMLLSASNMLRHLNLEYHSSMIADAVKKVIKVGKVRTRDMGGYSTTTDFIKSVIGHLQTKGS

SEQ ID NO: 14273 - protein, 385 aa, Homo sapiens
MAALSGVRWLTRALVSAGNPGAWRGLSTSAAAHAASRSQAEDVRVEGSFPVTMLPGDGVGPELMHAVKEVFKAAAVPVEFQEHHLSEVQNMASEEKLEQVLSSMKENKVAIIGKIHTPMEYKGELASYDMRLRRKLDLFANVVHVKSLPGYMTRHNNLDLVIIREQTEGEYSSLEHESARGVIECLKIVTRAKSQRIAKFAFDYATKKGRGKVTAVHKANIMKLGDGLFLQCCEEVAELYPKIKFETMIIDNCCMQLVQNPYQFDVLVMPNLYGNIIDNLAAGLVGGAGVVPGESYSAEYAVFETGARHPFAQAVGRNIANPTAMLLSASNMLRHLNLEYHSSMIADAVKKVIKVGKVRTRDMGGYSTTTDFIKSVIGHLQTKGS

SEQ ID NO: 14274 - protein, 385 aa, Homo sapiens; identical to SEQ ID NO: 14273

SEQ ID NO: 14275 - protein, 383 aa, Homo sapiens
MAALSGVRWLTRALVSAGNPGAWRGLSTSAAAHAASRSQAEDVRVEGSFPVTMLPGDGVGPELMHAVKEVFKAAAVPVEFQEHHLSEVQNMASEEKLEQVLSSMKENKVAIIGKIHTPMEYKGELASYDMRLRRKLDLFANVVHVKSLPGYMTRHNNLDLVIIREQTEGEYSSLEHESARGVIECLKIVTRAKSQRIAKFAFDYATKKGRGKVTAVHKANIMKLGDGLFLQCCEEVAELYPKIKFETMIIDNCCMQLVQNPYQFDVLVMPNLYGNIIDNLAAGLVGGAGVVPGESYSAEYAVFETGARHPFAQAVGRNIANPTAMLLSASNMLRHLNLEYHSSMIADAVKKVIKVGKVRTSDMGGYATCHDFTEAVIAALPHP

SEQ ID NO: 14276 - protein, 387 aa, Homo sapiens
MAALSGVRWLTRALVSAGNPGAWRGLSTSAAAHAASRSQAEDVRVEGSFPVTMLPGDGVGPELMHAVKEVFKAAAVPVEFQEHHLSEVQNMASEEKLEQVLSSMKENKVAIIGKIHTPMEYKGELASYDMRLRRKLDLFANVVHVKSLPGYMTRHNNLDLVIIREQTEGEYSSLEHESARGVIECLKIVTRAKSQRIAKFAFDYATKKGRGKVTAVHKANIMKLGDGLFLQCCEEVAELYPKIKFETMIIDNCCMQLVQNPYQFDVLVMPNLYGNIIDNLAAGLVGGAGVVPGESYSAEYAVFETGARHPFAQAVGRNIANPTAMLLSASNMLRHLNLEYHSSMIADAVKKVIKVGKVRTRDMGGYSTTTDFIKSVIGHLQTKGSNL

SEQ ID NO: 14277 - protein, 905 aa, Homo sapiens [sequence omitted]

SEQ ID NO: 14278 - protein, 430 aa, Homo sapiens
MGKRDTADIISTVEFNHTGELLATGDKGGRVVIFQREPESKNAPHSQGEYDVYSTFQSHEPEFDYLKSLEIEEKINKIKWLPQQNAAHSLLSTNDKTIKLWKITERDKRPEGYNLKDEEGKLKDLSTVTSLQVPVLKPMDLMVEVSPRRIFANGHTYHINSISVNSDCETYMSADDLRINLWHLAITDRSFNIVDIKPANMEDLTEVITASEFHPHHCNLFVYSSSKGSLRLCDMRAAALCDKHSKLFEEPEDPSNRSFFSEIISSVSDVKFSHSGRYMLTRDYLTVKVWDLNMEARPIETYQVHDYLRSKLCSLYENDCIFDKFECAWNGSDSVIMTGAYNNFFRMFDRNTKRDVTLEASRESSKPRAVLKPRRVCVGGKRRRDDISVDSLDFTKKILHTAWHPAENIIAIAATNNLYIFQDKVNSDMH

SEQ ID NO: 14279 - protein, 447 aa, Homo sapiens
MGLSFFSKHLPIQEGQPWALKTPADIISTVEFNHTGELLATGDKGGRVVIFQREPESKNAPHSQGEYDVYSTFQSHEPEFDYLKSLEIEEKINKIKWLPQQNAAHSLLSTNDKTIKLWKITERDKRPEGYNLKDEEGKLKDLSTVTSLQVPVLKPMDLMVEVSPRRIFANGHTYHINSISVNSDCETYMSADDLRINLWHLAITDRSFNIVDIKPANMEDLTEVITASEFHPHHCNLFVYSSSKGSLRLCDMRAAALCDKHSKLFEEPEDPSNRSFFSEIISSVSDVKFSHSGRYMLTRDYLTVKVWDLNMEARPIETYQVHDYLRSKLCSLYENDCIFDKFECAWNGSDSVIMTGAYNNFFRMFDRNTKRDVTLEASRESSKPRAVLKPRRVCVGGKRRRDDISVDSLDFTKKILHTAWHPAENIIAIAATNNLYIFQDKVNSDMH

SEQ ID NO: 14280 - protein, 440 aa, Homo sapiens
MREADTLRPPQLMEVSADIISTVEFNHTGELLATGDKGGRVVIFQREPESKNAPHSQGEYDVYSTFQSHEPEFDYLKSLEIEEKINKIKWLPQQNAAHSLLSTNDKTIKLWKITERDKRPEGYNLKDEEGKLKDLSTVTSLQVPVLKPMDLMVEVSPRRIFANGHTYHINSISVNSDCETYMSADDLRINLWHLAITDRSFNIVDIKPANMEDLTEVITASEFHPHHCNLFVYSSSKGSLRLCDMRAAALCDKHSKLFEEPEDPSNRSFFSEIISSVSDVKFSHSGRYMLTRDYLTVKVWDLNMEARPIETYQVHDYLRSKLCSLYENDCIFDKFECAWNGSDSVIMTGAYNNFFRMFDRNTKRDVTLEASRESSKPRAVLKPRRVCVGGKRRRDDISVDSLDFTKKILHTAWHPAENIIAIAATNNLYIFQDKVNSDMH

SEQ ID NO: 14281 - protein, 795 aa, Homo sapiens
MSKRHRLDLGEDYPSGKKRAGTDGKDRDRDRDREDRSKDRDRERDRGDREREREKEKEKELRASTNAMLISAGLPPLKASHSAHSTHSAHSTHSTHSAHSTHAGHAGHTSLPQCINPFTNLPHTPRYYDILKKRLQLPVWEYKDRFTDILVRHQSFVLVGETGSGKTTQIPQWCVEYMRSLPGPKRGVACTQPRRVAAMSVAQRVADEMDVMLGQEVGYSIRFEDCSSAKTILKYMTDGMLLREAMNDPLLERYGVIILDEAHERTLATDILMGVLKEVVRQRSDLKVIVMSATLDAGKFQIYFDNCPLLTIPGRTHPVEIFYTPEPERDYLEAAIRTVIQIHMCEEEEGDLLLFLTGQEEIDEACKRIKREVDDLGPEVGDIKIIPLYSTLPPQQQQRIFEPPPPKKQNGAIGRKVVVSTNIAETSLTIDGVVFVIDPGFAKQKVYNPRIRVESLLVTAISKASAQQRAGRAGRTRPGKCFRLYTEKAYKTEMQDNTYPEILRSNLGSVVLQLKKLGIDDLVHFDFMDPPAPETLMRALELLNYLAALNDDGDLTELGSMMAEFPLDPQLAKMVIASCDYNCSNEVLSITAMLSVPQCFVRPTEAKKAADEAKMRFAHIDGDHLTLLNVYHAFKQNHESVQWCYDNFINYRSLMSADNVRQQLSRIMDRFNLPRRSTDFTSRDYYINIRKALVTGYFMQVAHLERTGHYLTVKDNQVVQLHPSTVLDHKPEWVLYNEFVLTTKNYIRTCTDIKPEWLVKIAPQYYDMSNFPQCEAKRQLDRIIAKLQSKEYSQY

SEQ ID NO: 14282 - protein, 533 aa, Homo sapiens [sequence omitted]

SEQ ID NO: 14283 - protein, 533 aa, Homo sapiens [sequence omitted]

SEQ ID NO: 14284 - protein, 421 aa, Homo sapiens
MASSSVPPATVSAATAGPGPGFGFASKTKKKHFVQQKVKVFRAADPLVGVFLWGVAHSINELSQVPPPVMLLPDDFKASSKIKVNNHLFHRENLPSHFKFKEYCPQVFRNLRDRFGIDDQDYLVSLTRNPPSESEGSDGRFLISYDRTLVIKEVSSEDIADMHSNLSNYHQYIVKCHGNTLLPQFLGMYRVSVDNEDSYMLVMRNMFSHRLPVHRKYDLKGSLVSREASDKEKVKELPTLKDMDFLNKNQKVYIGEEEKKIFLEKLKRDVEFLVQLKIMDYSLLLGIHDIIRGSEPEEEAPVREDESEVDGDCSLTGPPALVGSYGTSPEGIGGYIHSHRPLGPGEFESFIDVYAIRSAEGAPQKEVYFMGLIDILTQYDAKKKAAHAAKTVKHGAGAEISTVHPEQYAKRFLDFITNIFA

SEQ ID NO: 14285 - protein, 234 aa, Homo sapiens
MYRVSVDNEDSYMLVMRNMFSHRLPVHRKYDLKGSLVSREASDKEKVKELPTLKDMDFLNKNQKVYIGEEEKKIFLEKLKRDVEFLVQLKIMDYSLLLGIHDIIRGSEPEEEAPVREDESEVDGDCSLTGPPALVGSYGTSPEGIGGYIHSHRPLGPGEFESFIDVYAIRSAEGAPQKEVYFMGLIDILTQYDAKKKAAHAAKTVKHGAGAEISTVHPEQYAKRFLDFITNIFA

SEQ ID NO: 14286 - protein, 204 aa, Homo sapiens
MAGYLSESDFVMVEEGFSTRDLLKELTLGASQATTDEVAAFFVADLGAIVRKHFCFLKCLPRVRPFYAVKCNSSPGVLKVLAQLGLGFSCANKIASVINSALDLYFPEGCGVDIFAELGRYYVTSAFTVAVSIIAKKEVLLDQPGREEENGSTSKTIVYHLDEGVYGIFNSVLFDNICPTPILQKSKNHSPCYMSLESIHFIAV

SEQ ID NO: 14287 - protein, 211 aa, Homo sapiens
MVLCIATDDSHSLSCLSLKFGVSLKSCRHLLENAKKHHVEVVGVSFHIGSGCPDPQAYAQSIADARLVFEMGTELGHKMHVLDLGGGFPGTEGAKVRFEEIASVINSALDLYFPEGCGVDIFAELGRYYVTSAFTVAVSIIAKKEVLLDQPGREEENGSTSKTIVYHLDEGVYGIFNSVLFDNICPTPILQKSKNHSPCYMSLESIHFIAV

SEQ ID NO: 14288 - protein, 362 aa, Homo sapiens
MAGYLSESDFVMVEEGFSTRDLLKELTLGASQATTDEVAAFFVADLGAIVRKHFCFLKCLPRVRPFYAVKCNSSPGVLKVLAQLGLGFSCANKAEMELVQHIGIPASKIICANPCKQIAQIKYAAKHGIQLLSFDNEMELAKVVKSHPSAKMVLCIATDDSHSLSCLSLKFGVSLKSCRHLLENAKKHHVEVVGVSFHIGSGCPDPQAYAQSIADARLVFEMGTELGHKMHVLDLGGGFPGTEGAKVRFEEIASVINSALDLYFPEGCGVDIFAELGRYYVTSAFTVAVSIIAKKEVLLDQPGREEENGSTSKTIVYHLDEGVYGIFNSVLFDNICPTPILQKSKNHSPCYMSLESIHFIAV

SEQ ID NO: 14289 - protein, 480 aa, Homo sapiens
MAGYLSESDFVMVEEGFSTRDLLKELTLGASQATTDEVAAFFVADLGAIVRKHFCFLKCLPRVRPFYAVKCNSSPGVLKVLAQLGLGFSCANKAEMELVQHIGIPASKIICANPCKQIAQIKYAAKHGIQLLSFDNEMELAKVVKSHPSAKMVLCIATDDSHSLSCLSLKFGVSLKSCRHLLENAKKHHVEVVGVSFHIGSGCPDPQAYAQSIADARLVFEMGTELGHKMHVLDLGGGFPGTEGAKVRFEEIASVINSALDLYFPEGCGVDIFAELGRYYVTSAFTVAVSIIAKKEVLLDQPGREAPLPPPHIATCAASEPSPPAEENGSTSKTIVYHLDEGVYGIFNSVLFDNICPTPILQKKPSTEQPLYSSSLWGPAVDGCDCVAEGLWLPQLHVGDWLVFDNMGAYTVGMGSPFWGTQACHITYAMSRVAWEALRRQLMAAEQEDDVEGVCKPLSCGWEITDTLCVGPVFTPASIM

SEQ ID NO: 14290 - protein, 460 aa, Homo sapiens
MAGYLSESDFVMVEEGFSTRDLLKELTLGASQATTDEVAAFFVADLGAIVRKHFCFLKCLPRVRPFYAVKCNSSPGVLKVLAQLGLGFSCANKAEMELVQHIGIPASKIICANPCKQIAQIKYAAKHGIQLLSFDNEMELAKVVKSHPSAKMVLCIATDDSHSLSCLSLKFGVSLKSCRHLLENAKKHHVEVVGVSFHIGSGCPDPQAYAQSIADARLVFEMGTELGHKMHVLDLGGGFPGTEGAKVRFEEIASVINSALDLYFPEGCGVDIFAELGRYYVTSAFTVAVSIIAKKEVLLDQPGREEENGSTSKTIVYHLDEGVYGIFNSVLFDNICPTPILQKKPSTEQPLYSSSLWGPAVDGCDCVAEGLWLPQLHVGDWLVFDNMGAYTVGMGSPFWGTQACHITYAMSRVAWEALRRQLMAAEQEDDVEGVCKPLSCGWEITDTLCVGPVFTPASIM

SEQ ID NO: 14291 - protein, 483 aa, Homo sapiens [sequence omitted]

SEQ ID NO: 14292 - protein, 528 aa, Homo sapiens [sequence omitted]

SEQ ID NO: 14293 - protein, 437 aa, Homo sapiens
MGSHIHPLLVIQDEVAAFFVADLGAIVRKHFCFLKCLPRVRPFYAVKCNSSPGVLKVLAQLGLGFSCANKAEMELVQHIGIPASKIICANPCKQIAQIKYAAKHGIQLLSFDNEMELAKVVKSHPSAKMVLCIATDDSHSLSCLSLKFGVSLKSCRHLLENAKKHHVEVVGVSFHIGSGCPDPQAYAQSIADARLVFEMGTELGHKMHVLDLGGGFPGTEGAKVRFEEIASVINSALDLYFPEGCGVDIFAELGRYYVTSAFTVAVSIIAKKEVLLDQPGREEENGSTSKTIVYHLDEGVYGIFNSVLFDNICPTPILQKKPSTEQPLYSSSLWGPAVDGCDCVAEGLWLPQLHVGDWLVFDNMGAYTVGMGSPFWGTQACHITYAMSRVAWEALRRQLMAAEQEDDVEGVCKPLSCGWEITDTLCVGPVFTPASIM

SEQ ID NO: 14294 - protein, 352 aa, Homo sapiens
MHPLSHSDPGPAPLLSAALRAWKRIFWRQILLTLGLLGLFLYGLPKFRHLEALIPMGVCPSATMSQLRDNFTGALRPWARPEVLTCTPWGAPIIWDGSFDPDVAKQEARQQNLTIGLTIFAVGRYLEKYLERFLETAEQHFMAGQSVMYYVFTELPGAVPRVALGPGRRLPVERVARERRWQDVSMARMRTLHAALGGLPGREAHFMFCMDVDQHFSGTFGPEALAESVAQLHSWHYHWPSWLLPFERDAHSAAAMAWGQGDFYNHAAVFGGSVAALRGLTAHCAGGLDWDRARGLEARWHDESHLNKFFWLHKPAKVLSPEFCWSPDIGPRAEIRRPRLLWAPKGYRLLRN

SEQ ID NO: 14295 - protein, 528 aa, Homo sapiens
MGDAPSPEEKLHLITRNLQEVLGEEKLKEILKERELKIYWGTATTGKPHVAYFVPMSKIADFLKAGCEVTILFADLHAYLDNMKAPWELLELRVSYYENVIKAMLESIGVPLEKLKFIKGTDYQLSKEYTLDVYRLSSVVTQHDSKKAGAEVVKQVEHPLLSGLLYPGLQALDEEYLKVDAQFGGIDQRKIFTFAEKYLPALGYSKRVHLMNPMVPGLTGSKMSSSEEESKIDLLDRKEDVKKKLKKAFCEPGNVENNGVLSFIKHVLFPLKSEFVILRDEKWGGNKTYTAYVDLEKDFAAEVVHPGDLKNSVEVALNKLLDPIREKFNTPALKKLASAAYPDPSKQKPMAKGPAKNSEPEEVIPSRLDIRVGKIITVEKHPDADSLYVEKIDVGEAEPRTVVSGLVQFVPKEELQDRLVVVLCNLKPQKMRGVESQGMLLCASIEGINRQVEPLDPPAGSAPGEHVFVKGYEKGQPDEELKPKKKVFEKLQADFKISEECIAQWKQTNFMTKLGSISCKSLKGGNIS

SEQ ID NO: 14296 - protein, 246 aa, Homo sapiens
MGDAPSPEEKLHLITRNLQEVLGEEKLKEILKERELKIYWGTATTGKPHVAYFVPMSKIADFLKAGCEVTILFADLHAYLDNMKAPWELLELRVSYYENVIKAMLESIGVPLEKLKFIKGTDYQLSKEYTLDVYRLSSVVTQHDSKKAGAEVVKQVEHPLLSGLLYPGLQALDEEYLKVDAQFGGIDQRKIFTFAEKYLPALGYSKRVHLMNPMVPGLTGSKMSSSEEVSCQLRLEFRNLQPQWRD

SEQ ID NO: 14297 - protein, 528 aa, Homo sapiens; identical to SEQ ID NO: 14295

SEQ ID NO: 14298 - protein, 130 aa, Homo sapiens
MAAVLGALGATRRLLAALRGQSLGLAAMSSGTHRLTAEERNQAILDLKAAGWSELSERDAIYKEFSFHNFNQAFGFMSRVALQAEKMNHHPEWFNVYNKVQITLTSHDCGELTKKDVKLAKFIEKAAASV

SEQ ID NO: 14299 - protein, 159 aa, Homo sapiens
MPSTKNSPSTILIRRNDDECRAFVKRVIMSRFFKIIMISTVTSNAFFMALWTSYDIRYRLFRLLEFSEIFFVSICTSELSMKVYVDPINYWKNGYNLLDVIIIIVMFLPYALRQLMGKQFTYLYIADGMQSLRILKLIGYSQGIRVSALGVSWCWEGRP

SEQ ID NO: 14300 - protein, 130 aa, Homo sapiens; identical to SEQ ID NO: 14298

SEQ ID NO: 14301 - protein, 560 aa, Homo sapiens [sequence omitted]

SEQ ID NO: 14302 - protein, 560 aa, Homo sapiens [sequence omitted]

SEQ ID NO: 14303 - protein, 559 aa, Homo sapiens
MNDYGFIYQGSKNWIRPCPWNYGQFEDKIIDICLKLLDKSLHFQTDPATDCALRGSPVYVSRVVCAMINSNDDNGVLNGNWSENYTDGANPAEWTGSVAILKQWNATGCQPVRYGQCWVFAAVMCTVMRCLGIPTRVITNFDSGHDTDGNLIIDEYYDNTGRILGNKKKDTIWNFHVWNECWMARKDLPPAYGGWQVLDATPQEMSNGVYCCGPASVRAIKEGEVDLNYDTPFVFSMVNADCMSWLVQGGKEQKLHQDTSSVGNFISTKSIQSDERDDITENYKYEEGSLQERQVFLKALQKLKARSFHGSQRGAELQPSRPTSLSQDSPRSLHTPSLRPSDVVQVSLKFKLLDPPNMGQDICFVLLALNMSSQFKDLKVNLSAQSLLHDGSPLSPFWQDTAFITLSPKEAKTYPCKISYSQYSQYLSTDKLIRISALGEEKSSPEKILVNKIITLSYPSITINVLGAAVVNQPLSIQVIFSNPLSEQVEDCVLTVEGSGLFKKQQKVFLGVLKPQHQASIILETVPFKSGQRQIQANMRSNKFKDIKGYRNVYVDFAL

SEQ ID NO: 14304 - protein, 559 aa, Homo sapiens; identical to SEQ ID NO: 14303

SEQ ID NO: 14305 - protein, 105 aa, Homo sapiens [sequence omitted]

SEQ ID NO: 14306 - protein, 620 aa, Homo sapiens
MAPDSDPFPEGPLLKLLPLDARDRGTQRCRLGPAALHALGARLGSAVKISLPDGGSCLCTAWPRRDGADGFVQLDPLCASPGAAVGASRSRRSLSLNRLLLVPCPPLRRVAVWPVLRERAGAPGARNTAAVLEAAQELLRNRPISLGHVVVAPPGAPGLVAALHIVGGTPSPDPAGLVTPRTRVSLGGEPPSEAQPQPEVPLGGLSEAADSLRELLRLPLRYPRALTALGLAVPRGVLLAGPPGVGKTQLVRAVAREAGAELLAVSAPALQGSRPGETEENVRRVFQRARELASRGPSLLFLDEMDALCPQRGSRAPESRVVAQVLTLLDGASGDREVVVVGATNRPDALDPALRRPGRFDREVVIGTPTLKQRKEILQVITSKMPISSHVDLGLLAEMTVGYVGADLTALCREAAMHALLHSEKNQDNPVIDEIDFLEAFKNIQPSSFRSVIGLMDIKPVDWEEIGGLEDVKLKLKQSIEWPLKFPWEFVRMGLTQPKGVLLYGPPGCAKTTLVRALATSCHCSFVSVSGADLFSPFVGDSEKVLSQIFRQARASTPAILFLDEIDSILGARSASKTGCDVQERVLSVLLNELDGVGLKTIERRGSKSSQQGKYKELKK

SEQ ID NO: 14307 - protein, 753 aa, Homo sapiens
MAPDSDPFPEGPLLKLLPLDARDRGTQRCRLGPAALHALGARLGSAVKISLPDGGSCLCTAWPRRDGADGFVQLDPLCASPGAAVGASRSRRSLSLNRLLLVPCPPLRRVAVWPVLRERAGAPGARNTAAVLEAAQELLRNRPISLGHVVVAPPGAPGLVAALHIVGGTPSPDPAGLVTPRTRVSLGGEPPSEAQPQPEVPLGGLSEAADSLRELLRLPLRYPRALTALGLAVPRGVLLAGPPGVGKTQLVRAVAREAGAELLAVSAPALQGSRPGETEENVRRVFQRARELASRGPSLLFLDEMDALCPQRGSRAPESRVVAQVLTLLDGASGDREVVVVGATNRPDALDPALRRPGRFDREVVIGTPTLKQRKEILQVITSKMPISSHVDLGLLAEMTVGYVGADLTALCREAAMHALLHSEKNQDNPVIDEIDFLEAFKNIQPSSFRSVIGLMDIKPVDWEEIGGLEDVKLKLKQSIEWPLKFPWEFVRMGLTQPKGVLLYGPPGCAKTTLVRALATSCHCSFVSVSGADLFSPFVGDSEKVLSQIFRQARASTPAILFLDEIDSILGARSASKTGCDVQERVLSVLLNELDGVGLKTIERRGSKSSQQEFQEVFNRSVMIIAATNRPDVLDTALLRPGRLDKIIYIPPPDHKGRLSILKVCTKTMPIGPDVSLENLAAETCFFSGADLRNLCTEAALLALQENGLDATTVKQEHFLKSLKTVKPSLSCKDLALYENLFKKEGFSNVEGI

SEQ ID NO: 14308 - protein, 1009 aa, Homo sapiens
MGRGAGREYSPAATTAENGGGKKKQKEKELDELKKEVAMDDHKLSLDELGRKYQVDLSKGLTNQRAQDVLARDGPNALTPPPTTPEWVKFCRQLFGGFSILLWIGAILCFLAYGIQAAMEDEPSNDNLYLGVVLAAVVIVTGCFSYYQEAKSSKIMDSFKNMVPQQALVIREGEKMQINAEEVVVGDLVEVKGGDRVPADLRIISSHGCKVDNSSLTGESEPQTRSPEFTHENPLETRNICFFSTNCVEGTARGIVIATGDRTVMGRIATLASGLEVGRTPIAMEIEHFIQLITGVAVFLGVSFFVLSLILGYSWLEAVIFLIGIIVANVPEGLLATVTVCLTLTAKRMARKNCLVKNLEAVETLGSTSTICSDKTGTLTQNRMTVAHMWFDNQIHEADTTEDQSGATFDKRSPTWTALSRIAGLCNRAVFKAGQENISVSKVGAGDASESALLKCIELSCGSVRKMRDRNPKVAEIPFNSTNKYQLSIHEREDSPQSHVLVMKGAPERILDRCSTILVQGKEIPLDKEMQDAFQNAYMELGGLGERVLGFCQLNLPSGKFPRGFKFDTDELNFPTEKLCFVGLMSMIDPPRAAVPDAVGKCRSAGIKVIMVTGDHPITAKAIAKGVGIISEGVSCLCPHPPSREAKACVVHGSDLKDMTSEQLDEILKNHTEIVFARTSPQQKLIIVEGCQRQGAIVAVTGDGVNDSPALKKADIGIAMGISGSDVSKQAADMILLDDNFASIVTGVEEGRLIFDNLKKSIAYTLTSNIPEITPFLLFIIANIPLPLGTVTILCIDLGTDMVPAISLAYEAAESDIMKRQPRNSQTDKLVNERLISMAYGQIGMIQALGGFFTYFVILAENGFLPSRLLGIRLDWDDRTMNDLEDSYGQEWTYEQRKVVEFTCHTAFFASIVVVQWADLIICKTRRNSVFQQGMKNKILIFGLLEETALAAFLSYCPGMGVALRMYPLKVTWWFCAFPYSLLIFIYDEVRKLILRRYPGGWVEKETYY

SEQ ID NO: 14309 - protein, 1020 aa, Homo sapiens
MGRGAGREYSPAATTAENGGGKKKQKEKELDELKKEVAMDDHKLSLDELGRKYQVDLSKGLTNQRAQDVLARDGPNALTPPPTTPEWVKFCRQLFGGFSILLWIGAILCFLAYGIQAAMEDEPSNDNLYLGVVLAAVVIVTGCFSYYQEAKSSKIMDSFKNMVPQQALVIREGEKMQINAEEVVVGDLVEVKGGDRVPADLRIISSHGCKVDNSSLTGESEPQTRSPEFTHENPLETRNICFFSTNCVEGTARGIVIATGDRTVMGRIATLASGLEVGRTPIAMEIEHFIQLITGVAVFLGVSFFVLSLILGYSWLEAVIFLIGIIVANVPEGLLATVTVCLTLTAKRMARKNCLVKNLEAVETLGSTSTICSDKTGTLTQNRMTVAHMWFDNQIHEADTTEDQSGATFDKRSPTWTALSRIAGLCNRAVFKAGQENISVSKRDTAGDASESALLKCIELSCGSVRKMRDRNPKVAEIPFNSTNKYQLSIHEREDSPQSHVLVMKGAPERILDRCSTILVQGKEIPLDKEMQDAFQNAYMELGGLGERVLGFCQLNLPSGKFPRGFKFDTDELNFPTEKLCFVGLMSMIDPPRAAVPDAVGKCRSAGIKVIMVTGDHPITAKAIAKGVGIISEGNETVEDIAARLNIPMSQVNPREAKACVVHGSDLKDMTSEQLDEILKNHTEIVFARTSPQQKLIIVEGCQRQGAIVAVTGDGVNDSPALKKADIGIAMGISGSDVSKQAADMILLDDNFASIVTGVEEGRLIFDNLKKSIAYTLTSNIPEITPFLLFIIANIPLPLGTVTILCIDLGTDMVPAISLAYEAAESDIMKRQPRNSQTDKLVNERLISMAYGQIGMIQALGGFFTYFVILAENGFLPSRLLGIRLDWDDRTMNDLEDSYGQEWTYEQRKVVEFTCHTAFFASIVVVQWADLIICKTRRNSVFQQGMKNKILIFGLLEETALAAFLSYCPGMGVALRMYPLKVTWWFCAFPYSLLIFIYDEVRKLILRRYPGGWVEKETYY

SEQ ID NO: 14310 - protein, 1020 aa, Homo sapiens; identical to SEQ ID NO: 14309

SEQ ID NO: 14311 - protein, 174 aa, Homo sapiens
LAAGARRTPREAGISKAVRPEARPRLRTKTELEDLQKKPPPYLRNLSSDDANVLVWHALLLPDQPPYHLKAFNLRISFPPEYPFKPPMIKFTTKIYHPNVDENGQICLPIISSENWKPCTKTCQVLEALNVLVNRPNIREPLRMDLADLLTQNPELFRKNAEEFTLRFGVDRPS

SEQ ID NO: 14312 - protein, 153 aa, Homo sapiens
MMASMRVVKELEDLQKKPPPYLRNLSSDDANVLVWHALLLPDQPPYHLKAFNLRISFPPEYPFKPPMIKFTTKIYHPNVDENGQICLPIISSENWKPCTKTCQVLEALNVLVNRPNIREPLRMDLADLLTQNPELFRKNAEEFTLRFGVDRPS

SEQ ID NO: 14313 - protein, 144 aa, Homo sapiens
NCGFAQPKLQVAYYLKSSGYLDLRGLEDKWLSQKPCYWKWLQPGFGPIPLPDGERLGVHLLSCHGWVLGEHGDSSVPVWSGVNVACVFLKILHPDLGTDTDKKQWKEVHKQVVENAYEVIKLKGYTSWAIGLCSRFGREYNEES

SEQ ID NO: 14314 - protein, 967 aa, Homo sapiens [sequence omitted]

SEQ ID NO: 14315 - protein, 963 aa, Homo sapiens [sequence omitted]

SEQ ID NO: 14316 - protein, 662 aa, Homo sapiens
MMEPEEYRERGREMVDYICQYLSTVRERRVTPDVQPGYLRAQLPESAPEDPDSWDSIFGDIERIIMPGVVHWQSPHMHAYYPALTSWPSLLGDMLADAINCLGFTWASSPACTELEMNVMDWLAKMLGLPEHFLHHHPSSQGGGVLQSTVSESTLIALLAARKNKILEMKTSEPDADESCLNARLVAYASDQAHSSVEKAGLISLVKMKFLPVDDNFSLRGEALQKAIEEDKQRGLVPVFVCATLGTTGVCAFDCLSELGPICAREGLWLHIDAAYAGTAFLCPEFRGFLKGIEYADSFTFNPSKWMMVHFDCTGFWVKDKYKLQQTFSVNPIYLRHANSGVATDFMHWQIPLSRRFRSVKLWFVIRSFGVKNLQAHVRHGTEMAKYFESLVRNDPSFEIPAKRHLGLVVFRLKGPNCLTENVLKEIAKAGRLFLIPATIQDKLIIRFTVTSQFTTRDDILRDWNLIRDAATLILSQHCTSQPSPRVGNLISQIRGARAWACGTSLQSVSGAGDDPVQARKIIKQPQRVGAGPMKRENGLHLETLLDPVDDCFSEEAPDATKHKLSSFLFSYLSVQTKKKTVRSLSCNSVPVSAQKPLPTEASVKNGGSSRVRIFSRFPEDMMMLKKSAFKKLIKFYSVPSFPECSSQCGLQLPCCPLQAMV

SEQ ID NO: 14317 - protein, 620 aa, Homo sapiens
MLSAIYTVLAGLLFLPLLVNLCCPYFFQDIGYFLKVAAVGRRVRSYGQRRPARTILRAFLEKARQTPHKPFLLFRDETLTYAQVDRRSNQVARALHDHLGLRQGDCVALLMGNEPAYVWLWLGLVKLGCAMACLNYNIRAKSLLHCFQCCGAKVLLVSPELQAAVEEILPSLKKDDVSIYYVSRTSNTDGIDSFLDKVDEVSTEPIPESWRSEVTFSTPALYIYTSGTTGLPKAAMITHQRIWYGTGLTFVSGLKADDVIYITLPFYHSAALLIGIHGCIVAGATLALRTKFSASQFWDDCRKYNVTVIQYIGELLRYLCNSPQKPNDRDHKVRLALGNGLRGDVWRQFVKRFGDICIYEFYAATEGNIGFMNYARKVGAVGRVNYLQKKIITYDLIKYDVEKDEPVRDENGYCVRVPKGEVGLLVCKITQLTPFNGYAGAKAQTEKKKLRDVFKKGDLYFNSGDLLMVDHENFIYFHDRVGDTFRWKGENVATTEVADTVGLVDFVQEVNVYGVHVPDHEGRIGMASIKMKENHEFDGKKLFQHIADYLPSYARPRFLRIQDTIEITGTFKHRKMTLVEEGFNPAVIKDALYFLDDTAKMYVPMTEDIYNAISAKTLKL

SEQ ID NO: 14318 - protein, 683 aa, Homo sapiens
MLFIFNFLFSPLPTPALICILTFGAAIFLWLITRPQPVLPLLDLNNQSVGIEGGARKGVSQKNNDLTSCCFSDAKTMYEVFQRGLAVSDNGPCLGYRKPNQPYRWLSYKQVSDRAEYLGSCLLHKGYKSSPDQFVGIFAQNRPEWIISELACYTYSMVAVPLYDTLGPEAIVHIVNKADIAMVICDTPQKALVLIGNVEKGFTPSLKVIILMDPFDDDLKQRGEKSGIEILSLYDAENLGKEHFRKPVPPSPEDLSVICFTSGTTGDPKGAMITHQNIVSNAAAFLKCVEHAYEPTPDDVAISYLPLAHMFERIVQAVVYSCGARVGFFQGDIRLLADDMKTLKPTLFPAVPRLLNRIYDKVQNEAKTPLKKFLLKLAVSSKFKELQKGIIRHDSFWDKLIFAKIQDSLGGRVRVIVTGAAPMSTSVMTFFRAAMGCQVYEAYGQTECTGGCTFTLPGDWTSGHVGVPLACNYVKLEDVADMNYFTVNNEGEVCIKGTNVFKGYLKDPEKTQEALDSDGWLHTGDIGRWLPNGTLKIIDRKKNIFKLAQGEYIAPEKIENIYNRSQPVLQIFVHGESLRSSLVGVVVPDTDVLPSFAAKLGVKGSFEELCQNQVVREAILEDLQKIGKESGLKTFEQVKAIFLHPEPFSIENGLLTPTLKAKRGELSKYFRTQIDSLYEHIQD

SEQ ID NO: 14319 - protein, 649 aa, Homo sapiens
MLFIFNFLFSPLPTPALICILTFGAAIFLWLITRPQPVLPLLDLNNQSVGIEGGARKGVSQKNNDLTSCCFSDAKTMYEVFQRGLAVSDNGPCLGYRKPNQPYRWLSYKQWIISELACYTYSMVAVPLYDTLGPEAIVHIVNKADIAMVICDTPQKALVLIGNVEKGFTPSLKVIILMDPFDDDLKQRGEKSGIEILSLYDAENLGKEHFRKPVPPSPEDLSVICFTSGTTGDPKGAMITHQNIVSNAAAFLKCVEHAYEPTPDDVAISYLPLAHMFERIVQAVVYSCGARVGFFQGDIRLLADDMKTLKPTLFPAVPRLLNRIYDKVQNEAKTPLKKFLLKLAVSSKFKELQKGIIRHDSFWDKLIFAKIQDSLGGRVRVIVTGAAPMSTSVMTFFRAAMGCQVYEAYGQTECTGGCTFTLPGDWTSGHVGVPLACNYVKLEDVADMNYFTVNNEGEVCIKGTNVFKGYLKDPEKTQEALDSDGWLHTGDIGRWLPNGTLKIIDRKKNIFKLAQGEYIAPEKIENIYNRSQPVLQIFVHGESLRSSLVGVVVPDTDVLPSFAAKLGVKGSFEELCQNQVVREAILEDLQKIGKESGLKTFEQVKAIFLHPEPFSIENGLLTPTLKAKRGELSKYFRTQIDSLYEHIQD

SEQ ID NO: 14320 - protein, 719 aa, Homo sapiens
MDALKPPCLWRNHERGKKDRDSCGRKNSEPGSPHSLEALRDAAPSQGLNFLLLFTKMLFIFNFLFSPLPTPALICILTFGAAIFLWLITRPQPVLPLLDLNNQSVGIEGGARKGVSQKNNDLTSCCFSDAKTMYEVFQRGLAVSGKPGGLSLPEEDKVSDRAEYLGSCLLHKGYKSSPDQFVGIFAQNRPEWIISELACYTYSMVAVPLYDTLGPEAIVHIVNKADIAMVICDTPQKALVLIGNVEKGFTPSLKVIILMDPFDDDLKQRGEKSGIEILSLYDAEPPSPEDLSVICFTSGTTGDPKGAMITHQNIVSNAAAFLKCVEHAYEPTPDDVAISYLPLAHMFERIVQAVVYSCGARVGFFQGDIRLLADDMKTLKPTLFPAVPRLLNRIYDKVQNEAKTPLKKFLLKLAVSSKFKELQKGIIRHDSFWDKLIFAKIQDSLGGRVRVIVTGAAPMSTSVMTFFRAAMGCQVYEAYGQTECTGGCTFTLPGDWTSGHVGVPLACNYVKLEDVADMNYFTVNNEGEVCIKGTNVFKGYLKDPEKTQEALDSDGWLHTGDIGRWLPNGTLKIIDRKKNIFKLAQGEYIAPEKIENIYNRSQPVLQIFVHGESLRSSLVGVVVPDTDVLPSFAAKLGVKGSFEELCQNQVVREAILEDLQKIGKESGLKTFEQVKAIFLHPEPFSIENGLLTPTLKAKRGELSKYFRTQIDSLYEHIQD

SEQ ID NO: 14321 - protein, 739 aa, Homo sapiens
MDALKPPCLWRNHERGKKDRDSCGRKNSEPGSPHSLEALRDAAPSQGLNFLLLFTKMLFIFNFLFSPLPTPALICILTFGAAIFLWLITRPQPVLPLLDLNNQSVGIEGGARKGVSQKNNDLTSCCFSDAKTMYEVFQRGLAVSDNGPCLGYRKPNQPYRWLSYKQVSDRAEYLGSCLLHKGYKSSPDQFVGIFAQNRPEWIISELACYTYSMVAVPLYDTLGPEAIVHIVNKADIAMVICDTPQKALVLIGNVEKGFTPSLKVIILMDPFDDDLKQRGEKSGIEILSLYDAENLGKEHFRKPVPPSPEDLSVICFTSGTTGDPKGAMITHQNIVSNAAAFLKCVEHAYEPTPDDVAISYLPLAHMFERIVQAVVYSCGARVGFFQGDIRLLADDMKTLKPTLFPAVPRLLNRIYDKVQNEAKTPLKKFLLKLAVSSKFKELQKGIIRHDSFWDKLIFAKIQDSLGGRVRVIVTGAAPMSTSVMTFFRAAMGCQVYEAYGQTECTGGCTFTLPGDWTSGHVGVPLACNYVKLEDVADMNYFTVNNEGEVCIKGTNVFKGYLKDPEKTQEALDSDGWLHTGDIGRWLPNGTLKIIDRKKNIFKLAQGEYIAPEKIENIYNRSQPVLQIFVHGESLRSSLVGVVVPDTDVLPSFAAKLGVKGSFEELCQNQVVREAILEDLQKIGKESGLKTFEQVKAIFLHPEPFSIENGLLTPTLKAKRGELSKYFRTQIDSLYEHIQD

SEQ ID NO: 14322 - protein, 683 aa, Homo sapiens; identical to SEQ ID NO: 14318

SEQ ID NO: 14323 - protein, 663 aa, Homo sapiens
MLFIFNFLFSPLPTPALICILTFGAAIFLWLITRPQPVLPLLDLNNQSVGIEGGARKGVSQKNNDLTSCCFSDAKTMYEVFQRGLAVSGKPGGLSLPEEDKVSDRAEYLGSCLLHKGYKSSPDQFVGIFAQNRPEWIISELACYTYSMVAVPLYDTLGPEAIVHIVNKADIAMVICDTPQKALVLIGNVEKGFTPSLKVIILMDPFDDDLKQRGEKSGIEILSLYDAEPPSPEDLSVICFTSGTTGDPKGAMITHQNIVSNAAAFLKCVEHAYEPTPDDVAISYLPLAHMFERIVQAVVYSCGARVGFFQGDIRLLADDMKTLKPTLFPAVPRLLNRIYDKVQNEAKTPLKKFLLKLAVSSKFKELQKGIIRHDSFWDKLIFAKIQDSLGGRVRVIVTGAAPMSTSVMTFFRAAMGCQVYEAYGQTECTGGCTFTLPGDWTSGHVGVPLACNYVKLEDVADMNYFTVNNEGEVCIKGTNVFKGYLKDPEKTQEALDSDGWLHTGDIGRWLPNGTLKIIDRKKNIFKLAQGEYIAPEKIENIYNRSQPVLQIFVHGESLRSSLVGVVVPDTDVLPSFAAKLGVKGSFEELCQNQVVREAILEDLQKIGKESGLKTFEQVKAIFLHPEPFSIENGLLTPTLKAKRGELSKYFRTQIDSLYEHIQD

SEQ ID NO: 14324 - protein, 683 aa, Homo sapiens; identical to SEQ ID NO: 14318

SEQ ID NO: 14325 - protein, 227 aa, Homo sapiens [sequence omitted]

SEQ ID NO: 14326 - protein, 604 aa, Homo sapiens
MLARALLLCAVLALSHTANPCCSHPCQNRGVCMSVGFDQYKCDCTRTGFYGENCSTPEFLTRIKLFLKPTPNTVHYILTHFKGFWNVVNNIPFLRNAIMSYVLTSRSHLIDSPPTYNADYGYKSWEAFSNLSYYTRALPPVPDDCPTPLGVKGKKQLPDSNEIVEKLLLRRKFIPDPQGSNMMFAFFAQHFTHQFFKTDHKRGPAFTNGLGHGVDLNHIYGETLARQRKLRLFKDGKMKYQIIDGEMYPPTVKDTQAEMIYPPQVPEHLRFAVGQEVFGLVPGLMMYATIWLREHNRVCDVLKQEHPEWGDEQLFQTSRLILIGETIKIVIEDYVQHLSGYHFKLKFDPELLFNKQFQYQNRIAAEFNTLYHWHPLLPDTFQIHDQKYNYQQFIYNNSILLEHGITQFVESFTRQIAGRVAGGRNVPPAVQKVSQASIDQSRQMKYQSFNEYRKRFMLKPYESFEELTGEKEMSAELEALYGDIDAVELYPALLVEKPRPDAIFGETMVEVGAPFSLKGLMGNVICSPAYWKPSTFGGEVGFQIINTASIQSLICNNVKGCPFTSFSVPDPELIKTVTINASSSRSGLDDINPTVLLKERSTEL

SEQ ID NO: 14327 - protein, 572 aa, Homo sapiens
MSYQGKKSIPHITSDRLLIKGGRIINDDQSLYADVYLEDGLIKQIGENLIVPGGVKTIEANGRMVIPGGIDVNTYLQKPSQGMTAADDFFQGTRAALVGGTTMIIDHVVPEPGSSLLTSFEKWHEAADTKSCCDYSLHVDITSWYDGVREELEVLVQDKGVNSFQVYMAYKDVYQMSDSQLYEAFTFLKGLGAVILVHAENGDLIAQEQKRILEMGITGPEGHALSRPEELEAEAVFRAITIAGRINCPVYITKVMSKSAADIIALARKKGPLVFGEPIAASLGTDGTHYWSKNWAKAAAFVTSPPLSPDPTTPDYLTSLLACGDLQVTGSGHCPYSTAQKAVGKDNFTLIPEGVNGIEERMTVVWDKAVATGKMDENQFVAVTSTNAAKIFNLYPRKGRIAVGSDADVVIWDPDKLKTITAKSHKSAVEYNIFEGMECHGSPLVVISQGKIVFEDGNINVNKGMGRFIPRKAFPEHLYQRVKIRNKVFGLQGVSRGMYDGPVYEVPATPKYATPAPSAKSSPSKHQPPPIRNLHQSNFSLSGAQIDDNNPRRTGHRIVAPPGGRSNITSLG

SEQ ID NO: 14328 - protein, 503 aa, Homo sapiens
MVIPGGIDVNTYLQKPSQGMTAADDFFQGTRAALVGGTTMIIDHVVPEPGSSLLTSFEKWHEAADTKSCCDYSLHVDITSWYDGVREELEVLVQDKGVNSFQVYMAYKDVYQMSDSQLYEAFTFLKGLGAVILVHAENGDLIAQEQKRILEMGITGPEGHALSRPEELEAEAVFRAITIAGRINCPVYITKVMSKSAADIIALARKKEPIAASLGTDGTHYWSKNWAKAAAFVTSPPLSPDPTTPDYLTSLLACGDLQVTGSGHCPYSTAQKAVGKDNFTLIPEGVNGIEERMTVVWDKAVATGKMDENQFVAVTSTNAAKIFNLYPRKGRIAVGSDADVVIWDPDKLKTITAKSHKSAVEYNIFEGMECHGSPLVVISQGKIVFEDGNINVNKGMGRFIPRKAFPEHLYQRVKIRNKVFGLQGVSRGMYDGPVYEVPATPKYATPAPSAKSSPSKHQPPPIRNLHQSNFSLSGAQIDDNNPRRTGHRIVAPPGGRSNITSLG

SEQ ID NO: 14329 - protein, 992 aa, Homo sapiens [sequence omitted]

SEQ ID NO: 14330 - protein, 873 aa, Homo sapiens
MSFIMKLHRHFQRTVILLATFCMVSIIISAYYLYSGYKQENELSETASEVDCGDLQHLPYQLMEVKAMKLFDASRTDPTVLVFVESQYSSLGQDIIMILESSRFQYHIEIAPGKGDLPVLIDKMKGKYILIIYENILKYINMDSWNRSLLDKYCVEYGVGVIGFHKTSEKSVQSFQLKGFPFSIYGNLAVKDCCINPHSPLIRVTKSSKLEKGSLPGTDWTVFQINHSAYQPVIFAKVKTPENLSPSISKGAFYATIIHDLGLHDGIQRVLFGNNLNFWLHKLIFIDAISFLSGKRLTLSLDRYILVDIDDIFVGKEGTRMNTNDVKALLDTQNLLRAQITNFTFNLGFSGKFYHTGTEEEDEGDDCLLGSVDEFWWFPHMWSHMQPHLFHNESSLVEQMILNKKFALEHGIPTDMGYAVAPHHSGVYPVHVQLYEAWKKVWNIKITSTEEYPHLKPARYRRGFIHKNIMVLPRQTCGLFTHTIFYKEYPGGPKELDKSIQGGELFFTVVLNPISIFMTHLSNYGNDRLGLYTFVNLANFVKSWTNLRLQTLPPVQLAHKYFELFPDQKDPLWQNPCDDKRHRDIWSKEKTCDRLPKFLVIGPQKTGTTALYLFLVMHPSILSNSPSPKTFEEVQFFNRNNYHRGIDWYMDFFPVPSNVTTDFLFEKSANYFHSEEAPKRAASLVPKAKIITILIDPSDRAYSWYQHQRSHEDPAALKFSFYEVISAGPRAPSELRALQKRCLVPGWYASHIERWLVYFPPFQLLIIDGQQLRTDPATVMDEVQKFLGVLPHYNYSEALTFDSHKGFWCQLLEEGKTKCLGKSKGRKYPPMDSDSRTFLSSYYRDHNVELSKLLHKLGQPLPSWLRQELQKVR

SEQ ID NO: 14331 - protein, 466 aa, Homo sapiens
MVLDLDLFRVDKGGDPALIRETQEKRFKDPGLVDQLVKADSEWRRCRFRADNLNKLKNLCSKTIGEKMKKKEPVGDDESVPENVLSFDDLTADALANLKVSQIKKVRLLIDEAILKCDAERIKLEAERFENLREIGNLLHPSVPISNDEGVLVFLEQALIQYALRTLGSRGYIPIYTPFFMRKEVMQEVAQLSQFDEELYKVIGKGSEKSDDNSYDEKYLIATSEQPIAALHRDEWLRPEDLPIKYAGLSTCFRQEVGSHGRDTRGIFRVHQFEKIEQFVYSSPHDNKSWEMFEEMITTAEEFYQSLGIPYHIVNIVSGSLNHAASKKLDLEAWFPGSGAFRELVSCSNCTDYQARRLRIRYGQTKKMMDKVEFVHMLNATMCATTRTICAILENYQTEKGITVPEKLKEFMPPGLQELIPFVKPAPIEQEPSKKQKKQHEGSKKKAAARDVTLENRLQNMEVTDA

SEQ ID NO: 14332 - protein, 421 aa, Homo sapiens
MVLDLDLFRVDKGGDPALIRETQEKRFKDPGLVDQLVKADSEWRRFLDSLFLGRFRADNLNKLKNLCSKTIGEKMKKKEPVGDDESVPENVLSFDDLTADALANLKVSQIKKVRLLIDEAILKCDAERIKLEAERFENLREIGNLLHPSVPISNDEVIGKGSEKSDDNSYDEKYLIATSEQPIAALHRDEWLRPEDLPIKYAGLSTCFRQEVGSHGRDTRGIFRVHQFEKIEQFVYSSPHDNKSWEMFEEMITTAEEFYQSLGIPYHIVNIVSGSLNHAASKKLDLEAWFPGSGAFRELVSCSNCTDYQARRLRIRYGQTKKMMDKVEFVHMLNATMCATTRTICAILENYQTEKGITVPEKLKEFMPPGLQELIPFVKPAPIEQEPSKKQKKQHEGSKKKAAARDVTLENRLQNMEVTDA

SEQ ID NO: 14333 - protein, 539 aa, Homo sapiens
MVLDLDLFRVDKGGDPALIRETQEKRFKDPGLVDQLVKADSEWRRCRFRADNLNKLKNLCSKTIGEKMKKKEPVGDDESVPENVLSFDDLTADALANLKVSQIKKVRLLIDEAILKCDAERIKLEAERFENLREIGNLLHPSVPISNDEDVDNKVERIWGDCTVRKKYSHVDLVVMVDGFEGEKGAVVAGSRGYFLKGVLVFLEQALIQYALRTLGSRGYIPIYTPFFMRKEVMQEVAQLSQFDEELYKVIGKGSEKSDDNSYDEKYLIATSEQPIAALHRDEWLRPEDLPIKYAGLSTCFRQEVGSHGRDTRGIFRVHQFEKIEQFVYSSPHDNKSWEMFEEMITTAEEFYQSLGIPYHIVNIVSGSLNHAASKKLDLEAWFPGSGAFRELVSCSNCTDYQARRLRIRYGQTKKMMDKRKNNLHLSTQNKLEASLFSPKKVWVVEFVHMLNATMCATTRTICAILENYQTEKGITVPEKLKEFMPPGLQELIPFVKPAPIEQEPSKKQKKQHEGSKKKAAARDVTLENRLQNMEVTDA

SEQ ID NO: 14334 - protein, 447 aa, Homo sapiens
MKKKEPVGDDESVPENVLSFDDLTADALANLKVSQIKKVRLLIDEAILKCDAERIKLEAERFENLREIGNLLHPSVPISNDEDVDNKVERIWGDCTVRKKYSHVDLVVMVDGFEGEKGAVVAGSRGYFLKGVLVFLEQALIQYALRTLGSRGYIPIYTPFFMRKEVMQEVAQLSQFDEELYKVIGKGSEKSDDNSYDEKYLIATSEQPIAALHRDEWLRPEDLPIKYAGLSTCFRQEVGSHGRDTRGIFRVHQFEKIEQFVYSSPHDNKSWEMFEEMITTAEEFYQSLGIPYHIVNIVSGSLNHAASKKLDLEAWFPGSGAFRELVSCSNCTDYQARRLRIRYGQTKKMMDKVEFVHMLNATMCATTRTICAILENYQTEKGITVPEKLKEFMPPGLQELIPFVKPAPIEQEPSKKQKKQHEGSKKKAAARDVTLENRLQNMEVTDA

SEQ ID NO: 14335 - protein, 209 aa, Homo sapiens
MVLDLDLFRVDKGGDPALIRETQEKRFKDPGLVDQLVKADSEWRRCRFRADNLNKLKNLCSKTIGEKMKKKEPVGDDESVPENVLSFDDLTADALANLKVSQIKKVRLLIDEAILKCDAERIKLEAERFENLREIGNLLHPSVPISNDEKLKEFMPPGLQELIPFVKPAPIEQEPSKKQKKQHEGSKKKAAARDVTLENRLQNMEVTDA

SEQ ID NO: 14336 - protein, 212 aa, Homo sapiens
MEISMPPPQIYVEKTLAIIKPDIVDKEEEIQDIILRSGFTIVQRRKLRLSPEQCSNFYVEKYGKMFFPNLTAYMSSGPLVAMILARHKAISYWLELLGPNNSLVAKETHPDSLRAIYGTDDLRNALHGSNDFAAAEREIRFMFPEVIVEPIPIGQAAKDYLNLHIMPTLLEGLTELCKQKPADPLIWLADWLLKNNPNKPKLCHHPIVEEPY

SEQ ID NO: 14337 - protein, 254 aa, Homo sapiens
MEISMPPPQIYVEKTLAIIKPDIVDKEEEIQDIILRSGFTIVQRRKLRLSPEQCSNFYVEKYGKMFFPNLTAYMSSGPLVAMILARHKAISYWLELLGPNNSLVAKETHPDSLRAIYGTDDLRNALHGSNDFAAAEREIRFMFPEVIVEPIPIGQAAKDYLNLHIMPTLLEGLTELCKQKPADPLFWYMCCRREHWTLRSILLVCMSGIRMSLPHCADYCSFVEGFEIWLADWLLKNNPNKPKLCHHPIVEEPY

SEQ ID NO: 14338 - protein, 212 aa, Homo sapiens; identical to SEQ ID NO: 14336

SEQ ID NO: 14339 - protein, 67 aa, Homo sapiens
MGLELYLDLLSQPCRAVYIFAKKNDIPFELRIVDLIKGQHLSDAFAQVNPLKKVPALKDGDFTLTER

SEQ ID NO: 14340 - protein, 45 aa, Homo sapiens
MGLELYLDLLSQPCRAVYIFAKKNDIPFELRIVDLIKGDVPCFPG

SEQ ID NO: 14341 - protein, 44 aa, Homo sapiens
MGLELYLDLLSQPCRAVYIFAKKNDIPFELRIVDLIKVWPSCST

SEQ ID NO: 14342 - protein, 97 aa, Homo sapiens
MGLELYLDLLSQPCRAVYIFAKKNDIPFELRIVDLIKGQHLSDAFAQVNPLKKVPALKDGDFTLTERTCRPVPVWMSTWHGSTRLCGEAASGPCGIR

SEQ ID NO: 14343 - protein, 240 aa, Homo sapiens
MGLELYLDLLSQPCRAVYIFAKKNDIPFELRIVDLIKGQHLSDAFAQVNPLKKVPALKDGDFTLTESVAILLYLTRKYKVPDYWYPQDLQARARVDEYLAWQHTTLRRSCLRALWHKVMFPVFLGEPVSPQTLAATLAELDVTLQLLEDKFLQNKAFLTGPHISLADLVAITELMHPVGAGCQVFEGRPKLATWRQRVEAAVGEDLFQEAHEVILKAKDFPPADPTIKQKLMPWVLAMIR

SEQ ID NO: 14344 - protein, 114 aa, Homo sapiens
MGLELYLDLLSQPCRAVYIFAKKNDIPFELRIVDLIKDGVSLCRPGWSAVAGSQLTATSAARNLVLCLLFLLGRSALKRCLCPGEPPQEGASLEGRGLHLDGECGHPALPDAQI

SEQ ID NO: 14345 - protein, 105 aa, Homo sapiens
MGLELYLDLLSQPCRAVYIFAKKNDIPFELRIVDLIKGQHLSDAFAQVNPLKKVPALKDGDFTLTESPWVLAAKSSKADPSWPHGGSAWRQQWGRTSSRRPMRSF

SEQ ID NO: 14346 - protein, 416 aa, Homo sapiens
MSGHRSTRKRCGDSHPESPVGFGHMSTTGCVLNKLFQLPTPPLSRHQLKRLEEHRYQSAGRSLLEPLMQGYWEWLVRRVPSWIAPNLITIIGLSINICTTILLVFYCPTATEQAPLWAYIACACGLFIYQSLDAIDGKQARRTNSSSPLGELFDHGCDSLSTVFVVLGTCIAVQLGTNPDWMFFCCFAGTFMFYCAHWQTYVSGTLRFGIIDVTEVQIFIIIMHLLAVIGGPPFWQSMIPVLNIQMKIFPALCTVAGTIFSCTNYFRVIFTGGVGKNGSTIAGTSVLSPFLHIGSVITLAAMIYKKSAVQLFEKHPCLYILTFGFVSAKITNKLVVAHMTKSEMHLHDTAFIGPALLFLDQYFNSFIDEYIVLWIALVFSFFDLIRYCVSVCNQIASHLHIHVFRIKVSTAHSNHH

SEQ ID NO: 14347 - protein, 416 aa, Homo sapiens
MSGHRSTRKRCGDSHPESPVGFGHMSTTGCVLNKLFQLPTPPLSRHQLKRLEEHRYQSAGRSLLEPLMQGYWEWLVRRVPSWIAPNLITIIGLSINICTTILLVFYCPTATEQAPLWAYIACACGLFIYQSLDAIDGKQARRTNSSSPLGELFDHGCDSLSTVFVVLGTCIAVQLGTNPDWMFFCCFAGTFMFYCAHWQTYVSGTLRFGIFDVTESQIIIIICQLLTGTLGPWFWNFTIPVLNIQMKIFPALCTVAGTIFSCTNYFRVIFTGGVGKNGSTIAGTSVLSPFLHIGSVITLAAMIYKKSAVQLFEKHPCLYILTFGFVSAKITNKLVVAHMTKSEMHLHDTAFIGPALLFLDQYFNSFIDEYIVLWIALVFSFFDLIRYCVSVCNQIASHLHIHVFRIKVSTAHSNHH

SEQ ID NO: 14348 - protein, 416 aa, Homo sapiens; identical to SEQ ID NO: 14346

SEQ ID NO: 14349 - protein, 416 aa, Homo sapiens; identical to SEQ ID NO: 14346

SEQ ID NO: 14350 - protein, 416 aa, Homo sapiens; identical to SEQ ID NO: 14346

SEQ ID NO: 14351 - protein, 128 aa, Homo sapiens
MTITPRGTTVTPTKETVSLGKHTVTVPSRNISVTPEGQTMPLRGENLTSEVGTHPRMGNLGLQMEAENRMMLSSSPVIQLPEQTPLAFDNRFVPIYGNHSSVNSVTPQTSPLSLKKEIPENSAVDEEA

SEQ ID NO: 14352 - protein, 678 aa, Homo sapiens [sequence omitted]

SEQ ID NO: 14353 - protein, 256 aa, Homo sapiens
MLSRVVLSAAATAAPSLKNAAFLGPGVLQATRTFHTGQPHLVPVPPLPEYGGKVRYGLIPEEFFQFLYPKTGVTGPYVLGTGLILYALSKEIYVISAETFTALSVLGVMVYGIKKYGPFVADFADKLNEQKLAQLEEAKQASIQHIQNAIDTEKSQQALVQKRHYLFDVQRNNIAMALEVTYRERLYRVYKEVKNRLDYHISVQNMMRRKEQEHMINWVEKHVVQSISTQQEKETIAKCIADLKLLAKKAQAQPVM

SEQ ID NO: 14354 - protein, 256 aa, Homo sapiens; identical to SEQ ID NO: 14353

SEQ ID NO: 14355 - protein, 256 aa, Homo sapiens; identical to SEQ ID NO: 14353

SEQ ID NO: 14356 - protein, 368 aa, Homo sapiens [sequence omitted]

SEQ ID NO: 14357 - protein, 476 aa, Homo sapiens [sequence omitted]

SEQ ID NO: 14358 - protein, 342 aa, Homo sapiens
MRKETPPPLVPPAAREWNLPPNAPACMERQLEAARYRSDGALLLGASSLSGRCWAGSLWLFKDPCAAPNEGFCSAGVQTEAGVADLTWVGERGILVASDSGAVELWELDENETLIVSKFCKYEHDDIVSTVSVLSSGTQAVSGSKDICIKVWDLAQQVVLSSYRAHAAQVTCVAASPHKDSVFLSCSEDNRILLWDTRCPKPASQIGCSAPGYLPTSLAWHPQQSEVFVFGDENGTVSLVDTKSTSCVLSSAVHSQCVTGLVFSPHSVPFLASLSEDCSLAVLDSSLSELFRSQAHRDFVRDATWSPLNHSLLTTVGWDHQVVHHVVPTEPLPAPGPASVTE

SEQ ID NO: 14359 - protein, 342 aa, Homo sapiens; identical to SEQ ID NO: 14358

SEQ ID NO: 14360 - protein, 509 aa, Homo sapiens [sequence omitted]

SEQ ID NO: 14361 - protein, 161 aa, Homo sapiens [sequence omitted]

SEQ ID NO: 14362 - protein, 288 aa, Homo sapiens
MERPQPDSMPQDLSEALKEATKEVHTQAENAEFMRNFQKGQVTRDGFKLVMASLYHIYVALEEEIERNKESPVFAPVYFPEELHRKAALEQDLAFWYGPRWQEVIPYTPAMQRYVKRLHEVGRTEPELLVAHAYTRYLGDLSGGQVLKKIAQKALDLPSSGEGLAFFTFPNIASATKFKQLYRSRMNSLEMTPAVRQRVIEEAKTAFLLNIQLFEELQELLTHDTKDQSPSRAPGLRQRASNKVQDSAPVETPRGKPPLNTRSQAPLLRWVLTLSFLVATVAVGLYAM

SEQ ID NO: 14363 - protein, 288 aa, Homo sapiens; identical to SEQ ID NO: 14362

SEQ ID NO: 14364 - protein, 554 aa, Homo sapiens
MRRPLSKCGMEPGGGDASLTLHGLQNRSHGKIKLRKRKSTLYFNTQEKSARRRGDLLGENIYLLLFTIALRILNCFLVQTSFVPDEYWQSLEVSHHMVFNYGYLTWEWTERLRSYTYPLIFASIYKILHLLGKDSVQLLIWIPRLAQALLSAVADVRLYSLMKQLENQEVARWVFFCQLCSWFTWYCCTRTLTNTMETVLTIIALFYYPLEGSKSMNSVKYSSLVALAFIIRPTAVILWTPLLFRHFCQEPRKLDLILHHFLPVGFVTLSLSLMIDRIFFGQWTLVQFNFLKFNVLQNWGTFYGSHPWHWYFSQGFPVILGTHLPFFIHGCYLAPKRYRILLVTVLWTLLVYSMLSHKEFRFIYPVLPFCMVFCGYSLTHLKTWKKPALSFLFLSNLFLALYTGLVHQRGTLDVMSHIQKVCYNNPNKSSASIFIMMPCHSTPYYSHVHCPLPMRFLQCPPDLTGKSHYLDEADVFYLNPLNWLHREFHDDASLPTHLITFSILEEEISAFLISSNYKRTAVFFHTHLPEGRIGSHIYVYERKLKGKFNMKMKF

SEQ ID NO: 14365 - protein, 900 aa, Homo sapiens [sequence omitted]

SEQ ID NO: 14366 - protein, 900 aa, Homo sapiens [sequence omitted]

SEQ ID NO: 14367 - protein, 194 aa, Homo sapiens [sequence omitted]

SEQ ID NO: 14368 - protein, 425 aa, Homo sapiens
MAAGGDHGSPDSYRSPLASRYASPEMCFVFSDRYKFRTWRQLWLWLAEAEQTLGLPITDEQIQEMKSNLENIDFKMAAEEEKRLRHDVMAHVHTFGHCCPKAAGIIHLGATSCYVGDNTDLIILRNALDLLLPKLARVISRLADFAKERASLPTLGFTHFQPAQLTTVGKRCCLWIQDLCMDLQNLKRVRDDLRFRGVKGTTGTQASFLQLFEGDDHKVEQLDKMVTEKAGFKRAFIITGQTYTRKVDIEVLSVLASLGASVHKICTDIRLLANLKEMEEPFEKQQIGSSAMPYKRNPMRSERCCSLARHLMTLVMDPLQTASVQWFERTLDDSANRRICLAEAFLTADTILNTLQNISEGLVVYPKVIERRIRQELPFMATENIIMAMVKAGGSRQVQRFLEEEVYPLLKPYESVMKVKAELCL

SEQ ID NO: 14369 - protein, 484 aa, Homo sapiens
MAAGGDHGSPDSYRSPLASRYASPEMCFVFSDRYKFRTWRQLWLWLAEAEQTLGLPITDEQIQEMKSNLENIDFKMAAEEEKRLRHDVMAHVHTFGHCCPKAAGIIHLGATSCYVGDNTDLIILRNALDLLLPKLARVISRLADFAKERASLPTLGFTHFQPAQLTTVGKRCCLWIQDLCMDLQNLKRVRDDLRFRGVKGTTGTQASFLQLFEGDDHKVEQLDKMVTEKAGFKRAFIITGQTYTRKVDIEVLSVLASLGASVHKICTDIRLLANLKEMEEPFEKQQIGSSAMPYKRNPMRSERCCSLARHLMTLVMDPLQTASVQWFERTLDDSANRRICLAEAFLTADTILNTLQNISEGLVVYPKVIERRIRQELPFMATENIIMAMVKAGGSRQDCHEKIRVLSQQAASVVKQEGGDNDLIERIQVDAYFSPIHSQLDHLLDPSSFTGRASQQVQRFLEEEVYPLLKPYESVMKVKAELCL

SEQ ID NO: 14370 - protein, 410 aa, Homo sapiens
MAAGGDHGSPDSYRSPLASRYASPEMCFVFSDRYKFRTWRQLWLWLAEAEQTLGLPITDEQIQEMKSNLENIDFKMAAEEEKRLRHDVMAHVHTFGHCCPKAAGIIHLGATSCYVGDNTLARVISRLADFAKERASLPTLGFTHFQPAQLTTVGKRCCLWIQDLCMDLQNLKRVRDDLRFRGVKGTTGTQASFLQLFEGDDHKVEQLDKMVTEKAGFKRAFIITGQTYTRKVDIEVLSVLASLGASVHKICTDIRLLANLKEMEEPFEKQQIGSSAMPYKRNPMRSERCCSLARHLMTLVMDPLQTASVQWFERTLDDSANRRICLAEAFLTADTILNTLQNISEGLVVYPKVIERRIRQELPFMATENIIMAMVKAGGSRQVQRFLEEEVYPLLKPYESVMKVKAELCL

SEQ ID NO: 14371 - protein, 709 aa, Homo sapiens [sequence omitted]

SEQ ID NO: 14372 - protein, 727 aa, Homo sapiens
MAFQKAVKGTILVGGGALATVLGLSQFAHYRRKQMNLAYVKAADCISEPVNREPPSREAQLLTLQNTSEFDILVIGGGATGSGCALDAVTRGLKTALVERDDFSSGTSSRSTKLIHGGVRYLQKAIMKLDIEQYRMVKEALHERANLLEIAPHLSAPLPIMLPVYKWWQLPYYWVGIKLYDLVAGSNCLKSSYVLSKSRALEHFPMLQKDKLVGAIVYYDGQHNDARMNLAIALTAARYGAATANYMEVVSLLKKTDPQTGKVHVSGARCKDVLTGQEFDVRAKCVINATGPFTDSVRKMDDKDAAAICQPSAGVHIVMPGYYSPESMGLLDPATSDGRVIFFLPWQKMTIAGTTDTPTDVTHHPIPSEEDINFILNEVRNYLSCDVEVRRGDVLAAWSGIRPLVTDPKSADTQSISRNHVVDISESGLITIAGGKWTTYRSMAEDTINAAVKTHNLKAGPSRTVGLFLQGGKDWSPTLYIRLVQDYGLESEVAQHLAATYGDKAFEVAKMASVTGKRWPIVGVRLVSEFPYIEAEVKYGIKEYACTAVDMISRRTRLAFLNVQAAEEALPRIVELMGRELNWDDYKKQEQLETARKFLYYEMGYKSRSEQLTDRSEISLLPSDIDRYKKRFHKFDADQKGFITIVDVQRVLESINVQMDENTLHEILNEVDLNKNGQVELNEFLQLMSAIQKGRVSGSRLAILMKTAEENLDRRVPIPVDRSCGGL

SEQ ID NO: 14373 - protein, 727 aa, Homo sapiens; identical to SEQ ID NO: 14372

SEQ ID NO: 14374 - protein, 727 aa, Homo sapiens; identical to SEQ ID NO: 14372

SEQ ID NO: 14375 - protein, 396 aa, Homo sapiens
MAFAPMGPEASFFDVLDRHRESLLAALRRGGREPPTGGSRLASSSEVLASIENIIQDIITSLARNEAPAFTIDNRSSWENIKFEDSVGLQMVSHCTTRKIKSDSPKSAQKFSLILKILSMIYKLVQSNTYATKRDIYYTDSQLFGNQTVVDNIINDISCMLKVSRRSLHILSTSKGLIAGNLRYIEEDGTKVNCTCGATAVAVPSNIQGIRNLVTDAKFVLIVEKDATFQRLLDDNFCNKLSPCIMITGKGVPDLNTRLLVKKLWDTFHVPVFTLVDADPHGIEIMCIYKYGSMSMSFEAHHLTVPAIRWLGLLPSDLKRLNVPKDSLIPLTKRDQMKLDSILRRPYVTCQPFWRKEMEIMADSKMKAEIQALTFLSSDYLSRVYLPNKLKFGGWI

SEQ ID NO: 14376 - protein, 358 aa, Homo sapiens
MAFAPMGPEASFFDVLDRHRESLLAALRRGGREPPTGGSRLASRFEDSVGLQMVSHCTTRKIKSDSPKSAQKFSLILKILSMIYKLVQSNTYATKRDIYYTDSQLFGNQTVVDNIINDISCMLKVSRRSLHILSTSKGLIAGNLRYIEEDGTKVNCTCGATAVAVPSNIQGIRNLVTDAKFVLIVEKDATFQRLLDDNFCNKLSPCIMITGKGVPDLNTRLLVKKLWDTFHVPVFTLVDADPHGIEIMCIYKYGSMSMSFEAHHLTVPAIRWLGLLPSDLKRLNVPKDSLIPLTKRDQMKLDSILRRPYVTCQPFWRKEMEIMADSKMKAEIQALTFLSSDYLSRVYLPNKLKFGGWI

SEQ ID NO: 14377 - protein, 607 aa, Homo sapiens
MEAPAAGLFLLLLLGTWAPAPGSASSEAPPLINEDVKRTVDLSSHLAKVTAEVVLAHLGGGSTSRATSFLLALEPELEARLAHLGVQVKGEDEEENNLEVRETKIKGKSGRFFTVKLPVALDPGAKISVIVETVYTHVLHPYPTQITQSEKQFVVFEGNHYFYSPYPTKTQTMRVKLASRNVESYTKLGNPTRSEDLLDYGPFRDVPAYSQDTFKVHYENNSPFLTITSMTRVIEVSHWGNIAVEENVDLKHTGAVLKGPFSRYDYQRQPDSGISSIRSFKTILPAAAQDVYYRDEIGNVSTSHLLILDDSVEMEIRPRFPLFGGWKTHYIVGYNLPSYEYLYNLGDQYALKMRFVDHVFDEQVIDSLTVKIILPEGAKNIEIDSPYEISRAPDELHYTYLDTFGRPVIVAYKKNLVEQHIQDIVVHYTFNKVLMLQEPLLVVAAFYILFFTVIIYVRLDFSITKDPAAEARMKVACITEQVLTLVNKRIGLYRHFDETVNRYKQSRDISTLNSGKKSLETEHKALTSEIALLQSRLKTEGSDLCDRVSEMQKLDAQVKELVLKSAVEAERLVAGKLKKDTYIENEKLISGKRQELVTKIDHILDAL

SEQ ID NO: 14378 - protein, 607 aa, Homo sapiens; identical to SEQ ID NO: 14377

SEQ ID NO: 14379 - protein, 404 aa, Homo sapiens
MKIEEVKSTTKTQRIASHSHVKGLGLDESGLAKQAASGLVGQENAREACGVIVELIKSKKMAGRAVLLAGPPGTGKTALALAIAQELGSKVPFCPMVGSEVYSTEIKKTEVLMENFRRAIGLRIKETKEVYEGEVTELTPCETENPMGGYGKTISHVIIGLKTAKGTKQLKLDPSIFESLQKERVEAGDVIYIEANSGAVKRQGRCDTYATEFDLEAEEYVPLPKGDVHKKKEIIQDVTLHDLDVANARPQGGQDILSMMGQLMKPKKTEITDKLRGEINKVVNKYIDQGIAELVPGVLFVDEVHMLDIECFTYLHRALESSIAPIVIFASNRGNCVIRGTEDITSPHGIPLDLLDRVMIIRTMLYTPQEMKQIIKIRAQTEGINISEEALNHLGEIGTKTTLR

SEQ ID NO: 14380 - protein, 404 aa, Homo sapiens
  VARIANT (1)...(404): Xaa = Any Amino Acid
MKIEEVKSTTKTQRIASHSHVKGLGLDESGLAKQAASGLVGQENAREACGVIVELIKSKKMAGRAVLLAGPPGTGKTALALAIAQELGSKVPFCPMVGSEVYSTEIKKTEVLMENFRRAIGLRIKETKEVYEGEVTELTPCETENPMGGYGKTISHVIIGLKTAKGTKQLKLDPSIFESLQKERVEAGDVIYIEANSGAVKRQGRCDTYATEFDLEAEEYVPLPKGDVHKKKEIIQDVTLHDLDVANARPQGGQDILSMMGQLMKPKKTEITDKLRGEINKVVNKYIDQGIAELVPGVLFVDEVHMLDIECFTYLHRALESSIAPIVIFASNRGNCVIRGTEDITSPHGIPLDLLDRVMIIRTMLYTPQEMKQIIKIRAQTEGINISEEALNHLGEIGTKTTLX

SEQ ID NO: 14381 - protein, 264 aa, Homo sapiens
MCPRAARAPATLLLALGAVLWPAAGAWELTILHTNDVHSRLEQTSEDSSKCVNASRCMGGVARLFTKVQQIRRAEPNVLLLDAGDQYQGTIWFTVYKGAEVAHFMNALRYDAMALGNHEFDNGVEGLIEPLLKEAKFPILSANIKAKGPLASQISGLYLPYKVLPVGDEVVGIVGYTSKETPFLSNPGTNLVFEDEITALQPEVDKLKTLNVNKIIALGHSGFEMDKLIAQKVRGVDVVVGGHSNTFLYTGNCFKRIAWARMSR

SEQ ID NO: 14382 - protein, 574 aa, Homo sapiens [sequence omitted]

SEQ ID NO: 14383 - protein, 542 aa, Homo sapiens
MDLGAITKYSALHAKPNGLILQYGTAGFRTKAEHLDHVMFRMGLLAVLRSKQTKSTIGVMVTASHNPEEDNGVKLVDPLGEMLAPSWEEHATCLANAEEQDMQRVLIDISEKEAVNLQQDAFVVIGRDTRPSSEKLSQSVIDGVTVLGGQFHDYGLLTTPQLHYMVYCRNTGGRYGKATIEGYYQKLSKAFVELTKQASCSGDEYRSLKVDCANGIGALKLREMEHYFSQGLSVQLFNDGSKGKLNHLCGADFVKSHQKPPQGMEIKSNERCCSFDGDADRIVYYYHDADGHFHLIDGDKIATLISSFLKELLVEIGESLNIGVVQTAYANGSSTRYLEEVMKVPVYCTKTGVKHLHHKAQEFDIGVYFEANGHGTALFSTAVEMKIKQSAEQLEDKKRKAAKMLENIIDLFNQAAGDAISDMLVIEAILALKGLTVQQWDALYTDLPNRQLKVQVADRRVISTTDAERQAVTPPGLQEAINDLVKKYKLSRAFVRPSGTEDVVRVYAEADSQESADHLAHEVSLAVFQLAGGIGERPQPGF

SEQ ID NO: 14384 - protein, 454 aa, Homo sapiens
MDLGAITKYSALHAKPNGLILQYGTAGFRTKAEHLDHVMFRMGLLAVLRSKQTKSTIGVMVTASHNPEEDNGVKLVDPLGEMLAPSWEEHATCLANAEEQDMQRVLIDISEKEAVNLQQDAFVVIGRDTRPSSEKLSQSVIDGVTVLGGQFHDYGLLTTPQLHYMVYCRNTGGRYGKATIEGYYQKLSKAFVELTKQASCSGDEYRSLKVDCANGIGALKLREMEHYFSQGLSVQLFNDGSKGKLNHLCGADFVKSHQKPPQGMEIKSNERCCSFDGDADRIVYYYHDADGHFHLIDGDKIATLISSFLKELLVEIGESLNIGVVQTAYANGSSTRYLEEVMKVPVYCTKTGVKHLHHKAQEFDIGVYFEANGHGTALFSTAVEMKIKQSAEQLEDKKRKAAKMLENIIDLFNQVRTDGAVDSWLPLHYSEDGQNRVWVHTKLKWRRPGLVASF

SEQ ID NO: 14385 - protein, 423 aa, Homo sapiens
MLAPSWEEHATCLANAEEQDMQRVLIDISEKEAVNLQQDAFVVIGRDTRPSSEKLSQSVIDGVTVLGGQFHDYGLLTTPQLHYMVYCRNTGGRYGKATIEGYYQKLSKAFVELTKQASCSGDEYRSLKVDCANGIGALKLREMEHYFSQGLSVQLFNDGSKGKLNHLCGADFVKSHQKPPQGMEIKSNERCCSFDGDADRIVYYYHDADGHFHLIDGDKIATLISSFLKELLVEIGESLNIGVVQTAYANGSSTRYLEEVMKVPVYCTKTGVKHLHHKAQEFDIGVYFEANGHGTAAGDAISDMLVIEAILALKGLTVQQWDALYTDLPNRQLKVQVADRRVISTTDAERQAVTPPGLQEAINDLVKKYKLSRAFVRPSGTEDVVRVYAEADSQESADHLAHEVSLAVFQLAGGIGERPQPGF

SEQ ID NO: 14386 - protein, 542 aa, Homo sapiens; identical to SEQ ID NO: 14383

SEQ ID NO: 14387 - protein, 2356 aa, Homo sapiens
MNTEELELLSDSKYRNYVAAIDKALKNFEYSSEWADLISALGKLNKVLQNNAKYQVVPKKLTIGKRLAQCLHPALPGGVHRKALETYEIIFKIIGPKRLAKDLFLYSSGLFPLLANAAMSVKPTLLSLYEIYYLPLGKTLKPGLQGLLTGILPGLEEGSEYYERTNMLLEKVAAAVDQSAFYSALWGSLLTSPAVRLPGITYVLAHLNRKLSMEDQLYIIGSDIELMAMVGILQVNGFGEENTLMQDLKPFRILISLLDKPELGPVILEDVLIEVFRTLYSQCKAELDLQTEPPFSKDHAQLSSKLRENKKTAELIKTANLLFNSFEPYYMWDYVARWFEECCRRTLHVRLQIGPGDSNDSSELQLTNFCLLVDFLLDIVSLETYIEIQTEHLPQLLLRMISALTSHLQTLHLSELTDSLRLCSKILSKVQPPLLSASTGGVLQFPSGQNNSVKEWEDKKVILTIIFVSHENPTEVFEDGENPPSSRSSESGFTEFIQYQADRTDDIDRELSEGQGAAAIPIGSTSSETETASTVGSEETIIQTPSVVTQGTATRSRKTAQKTAMQCCLEYVQQFLTRLINLYIIQNNSFSQSLATEHQGDLGREQGETSKWDRNSQGDVKEKNISKQKTSKEYLSAFLAACQLFLECSSFPVYIAEGNHTSELRSEKLETDCEHVQPPQWLQTLMNACSQASDFSVQSVAISLVMDLVGLTQSVAMVTGENINSVEPAQPLSPNQGRVAVVIRPPLTQGNLRYIAEKTEFFKHVALTLWDQLGDGTPQHHQKSVELFYQLHNLVPSSSICEDVISQQLTHKDKKIRMEAHAKFAVLWHLTRDLHINKSSSFVRSFDRSLFIMLDSLNSLDGSTSSVGQAWLNQVLQRHDIARVLEPLLLLLLHPKTQRVSVQRVQAERYWNKSPCYPGEESDKHFMQNFACSNVSQVQLITSKGNGEKPLTMDEIENFSLTVNPLSDRLSLLSTSSETIPMVVSDFDLPDQQIEILQSSDSGCSQSSAGDNLSYEVDPETVNAQEDSQMPKESSPDDDVQQVVFDLICKVVSGLEVESASVTSQLEIEAMPPKCSDIDPDEETIKIEDDSIQQSQNALLSNESSQFLSVSAEGGHECVANGISRNSSSPCISGTTHTLHDSSVASIETKSRQRSHSSIQFSFKEKLSEKVSEKETIVKESGKQPGAKPKVKLARKKDDDKKKSSNEKLKQTSVFFSDGLDLENWYSCGEGDISEIESDMGSPGSRKSPNFNIHPLYQHVLLYLQLYDSSRTLYAFSAIKAILKTNPIAFVNAISTTSVNNAYTPQLSLLQNLLARHRISVMGKDFYSHIPVDSNHNFRSSMYIEILISLCLYYMRSHYPTHVKVTAQDLIGNRNMQMMSIEILTLLFTELAKVIESSAKGFPSFISDMLSKCKVQKVILHCLLSSIFSAQKWHSEKMAGKNLVAVEEGFSEDSLINFSEDEFDNGSTLQSQLLKVLQRLIVLEHRVMTIPEENETGFDFVVSDLEHISPHQPMTSLQYLHAQPITCQGMFLCAVIRALHQHCACKMHPQWIGLITSTLPYMGKVLQRVVVSVTLQLCRNLDNLIQQYKYETGLSDSRPLWMASIIPPDMILTLLEGITAIIHYCLLDPTTQYHQLLVSVDQKHLFEARSGILSILHMIMSSVTLLWSILHQADSSEKMTIAASASLTTINLGATKNLRQQILELLGPISMNHGVHFMAAIAFVWNERRQNKTTTRTKVIPAASEEQLLLVELVRSISVMRAETVIQTVKEVLKQPPAIAKDKKHLSLEVCMLQFFYAYIQRIPVPNLVDSWASLLILLKDSIQLSLPAPGQFLILGVLNEFIMKNPSLENKKDQRDLQDVTHKIVDAIGAIAGSSLEQTTWLRRNLEVKPSPKIMVDGTNLESDVEDMLSPAMETANITPSVYSVHALTLLSEVLAHLLDMVFYSDEKERVIPLLVNIMHYVVPYLRNHSAHNAPSYRACVQLLSSLSGYQYTRRAWKKEAFDLFMDPSFFQMDASCVNHWRAIMDNLMTHDKTTFRDLMTRVAVAQSSSLNLFANRDVELEQRAMLLKRLAFAIFSSEIDQYQKYLPDIQERLVESLRLPQVPTLHSQVFLFFRVLLLRMSPQHLTSLWPTMITELVQVFLLMEQELTADEDISRTSGPSVAGLETTYTGGNGFSTSYNSQRWLNLYLSACKFLDLALALPSENLPQFQMYRWAFIPEASDDSGLEVRRQGIHQREFKPYVVRLAKLLRKRAKKNPEEDNSGRTLGWEPGHLLLTICTVRSMEQLLPFFNVLSQVFNSKVTSRCGGHSGSPILYSNAFPNKDMKLENHKPCSSKARQKIEEMVEKDFLEGMIKT

SEQ ID NO: 14388 - protein, 2275 aa, Homo sapiens
MNTEELELLSDSKYRNYVAAIDKALKNFEYSSEWADLISALGKLNKVLQNNAKYQVVPKKLTIGKRLAQCLHPALPGGVHRKALETYEIIFKIIGPKRLAKDLFLYSSGLFPLLANAAMSVKPTLLSLYEIYYLPLGKTLKPGLQGLLTGILPGLEEGSEYYERTNMLLEKVAAAVDQSAFYSALWGSLLTSPAVRLPGITYVLAHLNRKLSMEDQLYIIGSDIELMAMVGILQVNGFGEENTLMQDLKPFRILISLLDKPELGPVILEDVLIEVFRTLYSQCKAELDLQTEPPFSKDHAQLSSKLRENKKTAELIKTANLLFNSFEPYYMWDYVARWFEECCRRTLHVRLQIGPGDSNDSSELQLTNFCLLVDFLLDIVSLETYIEIQTEHLPQLLLRMISALTSHLQTLHLSELTDSLRLCSKILSKVQPPLLSASTGGVLQFPSGQNNSVKEWEDKKVSSVSHENPTEVFEDGENPPSSRSSESGFTEFIQYQADRTDDIDRELSEGQGAAAIPIGSTSSETETASTVGSEETIIQTPSVVTQGTATRSRKTAQKTAMQCCLEYVQQFLTRLINLYIIQNNSFSQSLATEHQGDLGREQGETSKWDRNSQGDVKEKNISKQKTSKEYLSAFLAACQLFLECSSFPVYIAEGNHTSELRSEKLETDCEHVQPPQWLQTLMNACSQASDFSVQSVAISLVMDLVGLTQSVAMVTGENINSVEPAQPLSPNQGRVAVVIRPPLTQGNLRYIAEKTEFFKHVALTLWDQLGDGTPQHHQKSVELFYQLHNLVPSSSICEDVISQQLTHKDKKIRMEAHAKFAVLWHLTRDLHINKSSSFVRSFDRSLFIMLDSLNSLDGSTSSVGQAWLNQVLQRHDIARVLEPLLLLLLHPKTQRVSVQRVQAERYWNKSPCYPGEESDKHFMQNFACSNVSQVQLITSKGNGEKPLTMDEIENFSLTVNPLSDRLSLLSTSSETIPMVVSDFDLPDQQIEILQSSDSGCSQSSAGDNLSYEVDPETVNAQEDSQMPKESSPDDDVQQVVFDLICKVVSGLEVESASVTSQLEIEAMPPKCSDIDPDEETIKIEDDSIQQSQNALLSNESSQFLSVSAEGGHECVANGISRNSSSPCISGTTHTLHDSSVASIETKSRQRSHSSIQFSFKEKLSEKVSEKETIVKESGKQPGAKPKVKLARKKDDDKKKSSNEKLKQTSVFFSDGLDLENWYSCGEGDISEIESDMGSPGSRKSPNFNIHPLYQHVLLYLQLYDSSRTLYAFSAIKAILKTNPIAFVNAISTTSVNNAYTPQLSLLQNLLARHRISVMGKDFYSHIPVDSNHNFRSSMYIEILISLCLYYMRSHYPTHVKVTAQDLIGNRNMQMMSIEILTLLFTELAKVIESSAKGFPSFISDMLSKCKVQKVILHCLLSSIFSAQKWHSEKMAGKNLVAVEEGFSEDSLINFSEDEFDNGSTLQSQLLKVLQRLIVLEHRVMTIPEENETGFDFVVSDLEHISPHQPMTSLQYLHAQPITCQGMFLCAVIRALHQHCACKMHPQWIGLITSTLPYMGKVLQRVVVSVTLQLCRNLDNLIQQYKYETGLSDSRPLWMASIIPPDMILTLLEGITAIIHYCLLDPTTQYHQLLVSVDQKHLFEARSGILSILHMIMSSVTLLWSILHQADSSEKMTIAASASLTTINLGATKNLRQQILELLGPISMNHGVHFMAAIAFVWNERRQNKTTTRTKVIPAASEEQLLLVELVRSISVMRAETVIQTVKEVLKQPPAIAKDKKHLSLEVCMLQFFYAYIQRVLNEFIMKNPSLENKKDQRDLQDVTHKIVDAIGAIAGSSLEQTTWLRRNLEVKPSPKIMVDGTNLESDVEGILVKHLGLLSVLAHLLDMVFYSDEKERVIPLLVNIMHYVVPYLRNHSAHNAPSYRACVQLLSSLSGYQYTRRAWKKEAFDLFMDPSFFQMDASCVNHWRAIMDNLMTHDKTTFRDLMTRVAVAQSSSLNLFANRDVELEQRAMLLKRLAFAIFSSEIDQYQKYLPDIQGIPVSKWVQLLTALSPAYRTSGPSVAGLETTYTGGNGFSTSYNSQRWLNLYLSACKFLDLALALPSENLPQFQMYRWAFIPEASDDSGLEVRRQGIHQREFKPYVVRLAKLLRKRAKDKEEDFKTVILEGLEMAKHQKNPEEDNSGRTLGWEPGHLLLTICTVRSMEQLLPFFNVLSQVFNSKVTSRCGGHSGSPILYSNAFPNKDMKLENHKPCSSKARQKIEEMVEKDFLEGMIKT

SEQ ID NO: 14389 - protein, 2352 aa, Homo sapiens
MNTEELELLSDSKYRNYVAAIDKALKNFEYSSEWADLISALGKLNKVLQNNAKYQVVPKKLTIGKRLAQCLHPALPGGVHRKALETYEIIFKIIGPKRLAKDLFLYSSGLFPLLANAAMSVKPTLLSLYEIYYLPLGKTLKPGLQGLLTGILPGLEEGSEYYERTNMLLEKVAAAVDQSAFYSALWGSLLTSPAVRLPGITYVLAHLNRKLSMEDQLYIIGSDIELMAMVGILQVNGFGEENTLMQDLKPFRILISLLDKPELGPVILEDVLIEVFRTLYSQCKAELDLQTEPPFSKDHAQLSSKLRENKKTAELIKTANLLFNSFEPYYMWDYVARWFEECCRRTLHVRLQIGPGDSNDSSELQLTNFCLLVDFLLDIVSLETYIEIQTEHLPQLLLRMISALTSHLQTLHLSELTDSLRLCSKILSKVQPPLLSASTGGVLQFPSGQNNSVKEWEDKKVSSVSHENPTEVFEDGENPPSSRSSESGFTEFIQYQADRTDDIDRELSEGQGAAAIPIGSTSSETETASTVGSEETIIQTPSVVTQGTATRSRKTAQKTAMQCCLEYVQQFLTRLINLYIIQNNSFSQSLATEHQGDLGREQGETSKWDRNSQGDVKEKNISKQKTSKEYLSAFLAACQLFLECSSFPVYIAEGNHTSELRSEKLETDCEHVQPPQWLQTLMNACSQASDFSVQSVAISLVMDLVGLTQSVAMVTGENINSVEPAQPLSPNQGRVAVVIRPPLTQGNLRYIAEKTEFFKHVALTLWDQLGDGTPQHHQKSVELFYQLHNLVPSSSICEDVISQQLTHKDKKIRMEAHAKFAVLWHLTRDLHINKSSSFVRSFDRSLFIMLDSLNSLDGSTSSVGQAWLNQVLQRHDIARVLEPLLLLLLHPKTQRVSVQRVQAERYWNKSPCYPGEESDKHFMQNFACSNVSQVQLITSKGNGEKPLTMDEIENFSLTVNPLSDRLSLLSTSSETIPMVVSDFDLPDQQIEILQSSDSGCSQSSAGDNLSYEVDPETVNAQEDSQMPKESSPDDDVQQVVFDLICKVVSGLEVESASVTSQLEIEAMPPKCSDIDPDEETIKIEDDSIQQSQNALLSNESSQFLSVSAEGGHECVANGISRNSSSPCISGTTHTLHDSSVASIETKSRQRSHSSIQFSFKEKLSEKVSEKETIVKESGKQPGAKPKVKLARKKDDDKKKSSNEKLKQTSVFFSDGLDLENWYSCGEGDISEIESDMGSPGSRKSPNFNIHPLYQHVLLYLQLYDSSRTLYAFSAIKAILKTNPIAFVNAISTTSVNNAYTPQLSLLQNLLARHRISVMGKDFYSHIPVDSNHNFRSSMYIEILISLCLYYMRSHYPTHVKVTAQDLIGNRNMQMMSIEILTLLFTELAKVIESSAKGFPSFISDMLSKCKVQKVILHCLLSSIFSAQKWHSEKMAGKNLVAVEEGFSEDSLINFSEDEFDNGSTLQSQLLKVLQRLIVLEHRVMTIPEENETGFDFVVSDLEHISPHQPMTSLQYLHAQPITCQGMFLCAVIRALHQHCACKMHPQWIGLITSTLPYMGKVLQRVVVSVTLQLCRNLDNLIQQYKYETGLSDSRPLWMASIIPPDMILTLLEGITAIIHYCLLDPTTQYHQLLVSVDQKHLFEARSGILSILHMIMSSVTLLWSILHQADSSEKMTIAASASLTTINLGATKNLRQQILELLGPISMNHGVHFMAAIAFVWNERRQNKTTTRTKVIPAASEEQLLLVELVRSISVMRAETVIQTVKEVLKQPPAIAKDKKHLSLEVCMLQFFYAYIQRIPVPNLVDSWASLLILLKDSIQLSLPAPGQFLILGVLNEFIMKNPSLENKKDQRDLQDVTHKIVDAIGAIAGSSLEQTTWLRRNLEVKPSPKIMVDGTNLESDVEDMLSPAMETANITPSVYSVHALTLLSEVLAHLLDMVFYSDEKERVIPLLVNIMHYVVPYLRNHSAHNAPSYRACVQLLSSLSGYQYTRRAWKKEAFDLFMDPSFFQMDASCVNHWRAIMDNLMTHDKTTFRDLMTRVAVAQSSSLNLFANRDVELEQRAMLLKRLAFAIFSSEIDQYQKYLPDIQERLVESLRLPQVPTLHSQVFLFFRVLLLRMSPQHLTSLWPTMITELVQVFLLMEQELTADEDISRTSGPSVAGLETTYTGGNGFSTSYNSQRWLNLYLSACKFLDLALALPSENLPQFQMYRWAFIPEASDDSGLEVRRQGIHQREFKPYVVRLAKLLRKRAKKNPEEDNSGRTLGWEPGHLLLTICTVRSMEQLLPFFNVLSQVFNSKVTSRCGGHSGSPILYSNAFPNKDMKLENHKPCSSKARQKIEEMVEKDFLEGMIKT

SEQ ID NO: 14390 - protein, 2356 aa, Homo sapiens; identical to SEQ ID NO: 14387

SEQ ID NO: 14391 - protein, 2275 aa, Homo sapiens; identical to SEQ ID NO: 14388

SEQ ID NO: 14392 - protein, 135 aa, Homo sapiens [sequence omitted]

SEQ ID NO: 14393 - protein, 487 aa, Homo sapiens [sequence omitted]

SEQ ID NO: 14394 - protein, 157 aa, Homo sapiens
MCSRPRGLYKARVSDLLELVKIARELAAAFRPALRRHGERGRRRGYREWSCGVRGHRRPYAARGRGLRVGFPALLCASQLPPSLPPAPPQLLPSNSPSPTARCQRSASVDSPGSGLTSPLRALCSPIPQIRRLLETLGGRRRQERRGDAEPRRGGGE

SEQ ID NO: 14395 - protein, 282 aa, Homo sapiens
MPRVPRVNNLLPCTQHFRSHVGKKAGPSFWYICLYYRKCQLISKEDVTHDTRLFCLMLPPSTHLQVPIGQHVYLKLPITGTEIVKPYTPVSGSLLSEFKEPVLPNNKYIYFLIKIYPTGLFTPELDRLQIGDFVSVSSPEGNFKISKFQELEDLFLLAAGTGFTPMVKILNYALTDIPSLRKVKLMFFNKTEDDIIWRSQLEKLAFKDKRLDVEFVLSAPISEWNGKQGHISPALLSEFLKRNLDKSKVLVCICGPVPFTEQGVRLLHDLNFSKNEIHSFTA

SEQ ID NO: 14396 - protein, 128 aa, Homo sapiens
MENAGGAEGTESGAAACAATDGPTRRAGADSGYAGFWRPWVDAGGKKEEETPNHAAEAMPDGPGMTAASGKLYQFRHPVRLFWPKSKCYDYLYQEAEALLKNFPIQATISFYEDSDSEDEIEDLTCEN

SEQ ID NO: 14397 - protein, 521 aa, Homo sapiens [sequence omitted]

SEQ ID NO: 14398 - protein, 309 aa, Homo sapiens [sequence omitted]

SEQ ID NO: 14399 - protein, 79 aa, Homo sapiens
MLLEKCEVNAPSDDATELMTDPKLITWSPVCRNDVAWNFFEKFLVGPDGVPVCRYSCRFQTIDIEPDIEALLSQGPRCA

SEQ ID NO: 14400 - protein, 186 aa, Homo sapiens
MAGENFATPFHGHVGRGAFSDVYEPAEDTFLLLDALEAAAAELAGVEICLEVGSGSGVVSAFLASMIGPQALYMCTDINPEAAACTLETARCNKVHIQPVITDLVGSHGIEAAWAGGRNGREVMDRFFPLVPDLLSPRGLFYLVTIKENNPEEILKIMKTKGLQGTTALSRQAGQETLSVLKFTKS

SEQ ID NO: 14401 - protein, 214 aa, Homo sapiens
MAGENFATPFHGHVGRGAFSDVYEPAEDTFLLLDALEAAAAELAGVEICLEVGSGSGVVSAFLASMIGPQALYMCTDINPEAAACTLETARCNKVHIQPVITDLVKGLLPRLTEKVDLLVFNPPYVVTPPQEVGSHGIEAAWAGGRNGREVMDRFFPLVPDLLSPRGLFYLVTIKENNPEEILKIMKTKGLQGTTALSRQAGQETLSVLKFTKS

SEQ ID NO: 14402 - protein, 214 aa, Homo sapiens; identical to SEQ ID NO: 14401

SEQ ID NO: 14403 - protein, 1010 aa, Homo sapiens
MAARVLIIGSGGREHTLAWKLAQSHHVKQVLVAPGNAGTACSEKISNTAISISDHTALAQFCKEKKIEFVVVGPEAPLAAGIVGNLRSAGVQCFGPTAEAAQLESSKRFAKEFMDRHGIPTAQWKAFTKPEEACSFILSADFPALVVKASGLAAGKGVIVAKSKEEACKAVQEIMQEKAFGAAGETIVIEELLDGEEVSCLCFTDGKTVAPMPPAQDHKRLLEGDGGPNTGGMGAYCPAPQVSNDLLLKIKDTVLQRTVDGMQQEGTPYTGILYAGIMLTKNGPKVLEFNCRFGDPECQVILPLLKSDLYEVIQSTLDGLLCTSLPVWLENHTALTVVMASKGYPGDYTKGVEITGFPEAQALGLEVFHAGTALKNGKVVTHGGRVLAVTAIRENLISALEEAKKGLAAIKFEGAIYRKDVGFRAIAFLQQPRSLTYKESGVDIAAGNMLVKKIQPLAKATSRSGCKVDLGGFAGLFDLKAAGFKDPLLASGTDGVGTKLKIAQLCNKHDTIGQDLVAMCVNDILAQGAEPLFFLDYFSCGKLDLSVTEAVVAGIAKACGKAGCALLGGETAEMPDMYPPGEYDLAGFAVGAMERDQKLPHLERITEGDVVVGIASSGLHSNGFSLVRKIVAKSSLQYSSPAPDGCGDQTLGDLLLTPTRIYSHSLLPVLRSGHVKAFAHITGGGLLENIPRVLPEKLGVDLDAQTWRIPRVFSWLQQEGHLSEEEMARTFNCGVGAVLVVSKEQTEQILRDIQQHKEEAWVIGSVVARAEGSPRVKVKNLIESMQINGSVLKNGSLTNHFSFEKKKARVAVLISGTGSNLQALIDSTREPNSSAQIDIVISNKAAVAGLDKAERAGIPTRVINHKLYKNRVEFDSAIDLVLEEFSIDIVCLAGFMRILSGPFVQKWNGKMLNIHPSLLPSFKGSNAHEQALETGVTVTGCTVHFVAEDVDAGQIILQEAVPVKRGDTVATLSERVKLAEHKIFPAALQLVASGTVQLGENGKICWVKEE

SEQ ID NO: 14404 - protein, 1010 aa, Homo sapiens; identical to SEQ ID NO: 14403

SEQ ID NO: 14405 - protein, 433 aa, Homo sapiens
MAARVLIIGSGGREHTLAWKLAQSHHVKQVLVAPGNAGTACSEKISNTAISISDHTALAQFCKEKKIEFVVVGPEAPLAAGIVGNLRSAGVQCFGPTAEAAQLESSKRFAKEFMDRHGIPTAQWKAFTKPEEACSFILSADFPALVVKASGLAAGKGVIVAKSKEEACKAVQEIMQEKAFGAAGETIVIEELLDGEEVSCLCFTDGKTVAPMPPAQDHKRLLEGDGGPNTGGMGAYCPAPQVSNDLLLKIKDTVLQRTVDGMQQEGTPYTGILYAGIMLTKNGPKVLEFNCRFGDPECQVILPLLKSDLYEVIQSTLDGLLCTSLPVWLENHTALTVVMASKGYPGDYTKGVEITGFPEAQALGLEVFHAGTALKNGKVVTHGGRVLAVTAIRENLISALEEAKKGLAAIKFEGAIYRKDVGFRAIAFLQQPR

SEQ ID NO: 14406 - protein, 514 aa, Homo sapiens
MAARVLIIGSGGREHTLAWKLAQSHHVKQVLVAPGNAGTACSEKISNTAISISDHTALAQFCKEKKIEFVVVGPEAPLAAGIVGNLRSAGVQCFGPTAEAAQLESSKRFAKEFMDRHGIPTAQWKAFTKPEEACSFILSADFPALVVKASGLAAGKGVIVAKSKEEACKAVQEIMQEKAFGAAGETIVIEELLDGEEVSCLCFTDGKTVAPMPPAQDHKRLLEGDGGPNTGGMGAYCPAPQVSNDLLLKIKDTVLQRTVDGMQQEGTPYTGILYAGIMLTKNGPKVLEFNCRFGDPECQVILPLLKSDLYEVIQSTLDGLLCTSLPVWLENHTALTVVMASKGYPGDYTKGVEITGFPEAQALGLEVFHAGTALKNGKVVTHGGRVLAVTAIRENLISALEEAKKGLAAIKFEGAIYRKDVGFRAIAFLQQPRSLTYKESGVDIAAGNMLVKKIQPLAKATSRSGCKVDLGGFAGLFDLKAAGFKDPLLASGTDGVGTKLKVLRAANQMDKIQF

SEQ ID NO: 14407 - protein, 433 aa, Homo sapiens; identical to SEQ ID NO: 14405

SEQ ID NO: 14408 - protein, 1010 aa, Homo sapiens; identical to SEQ ID NO: 14403

SEQ ID NO: 14409 - protein, 1010 aa, Homo sapiens; identical to SEQ ID NO: 14403

SEQ ID NO: 14410 - protein, 268 aa, Homo sapiens
MGLSPSAPAVAVQASNASASPPSGCPMHEGKMKGCPVNTEPSGPTCEKKTYSVPAHQERAYEYVECPIRGTAAENKENLDPSNLMPPPNQTPAPDQPFALSTVREESSIPRADSEKKWVYPSEQMFWNAMLKKGWKWKDEDISQKDMYNIIRIHNQNNEQAWKEILKWEALHAAECPCGPSLIRFGGKAKEYSPRARIRSWMGYELPFDRHDWIINRCGTEVRYVIDYYDGGEVNKDYQFTILDVRPALDSLSAVWDRMKVAWWRWTS

SEQ ID NO: 14411 - protein, 268 aa, Homo sapiens; identical to SEQ ID NO: 14410

SEQ ID NO: 14412 - protein, 1573 aa, Homo sapiens
MAFSKGFRIYHKLDPPPFSLIVETRHKEECLMFESGAVAVLSSAEKEAIKGTYSKVLDAYGLLGVLRLNLGDTMLHYLVLVTGCMSVGKIQESEVFRVTSTEFISLRIDSSDEDRISEVRKVLNSGNFYFAWSASGISLDLSLNAHRSMQEQTTDNRFFWNQSLHLHLKHYGVNCDDWLLRLMCGGVEIRTIYAAHKQAKACLISRLSCERAGTRFNVRGTNDDGHVANFVETEQVVYLDDSVSSFIQIRGSVPLFWEQPGLQVGSHRVRMSRGFEANAPAFDRHFRTLKNLYGKQIIVNLLGSKEGEHMLSKAFQSHLKASEHAADIQMVNFDYHQMVKGGKAEKLHSVLKPQVQKFLDYGFFYFNGSEVQRCQSGTVRTNCLDCLDRTNSVQAFLGLEMLAKQLEALGLAEKPQLVTRFQEVFRSMWSVNGDSISKIYAGTGALEGKAKLKDGARSVTRTIQNNFFDSSKQEAIDVLLLGNTLNSDLADKARALLTTGSLRVSEQTLQSASSKVLKSMCENFYKYSKPKKIRVCVGTWNVNGGKQFRSIAFKNQTLTDWLLDAPKLAGIQEFQDKRSKPTDIFAIGFEEMVELNAGNIVSASTTNQKLWAVELQKTISRDNKYVLLASEQLVGVCLFVFIRPQHAPFIRDVAVDTVKTGMGGATGNKGAVAIRMLFHTTSLCFVCSHFAAGQSQVKERNEDFIEIARKLSFPMGRMLFSHDYVFWCGDFNYRIDLPNEEVKELIRQQNWDSLIAGDQLINQKNAGQVFRGFLEGKVTFAPTYKYDLFSDDYDTSEKCRTPAWTDRVLWRRRKWPFDRSAEDLDLLNASFQDESKILYTWTPGTLLHYGRAELKTSDHRPVVALIDIDIFEVEAEERQNIYKEVIAVQGPPDGTVLVSIKSSLPENNFFDDALIDELLQQFASFGEVILIRFVEDKMWVTFLEGSSALNVLSLNGKELLNRTITIALKSPDWIKNLEEEMSLEKISIALPSSTSSTLLGEDAEVAADFDMEGDVDDYSAEVEELLPQHLQPSSSSGLGTSPSSSPRTSPCQSPTISEGPVPSLPIRPSRAPSRTPGPPSAQSSPIDAQPATPLPQKDPAQPLEPKRPPPPRPVAPPTRPAPPQRPPPPSGARSPAPTRKEFGGIGAPPSPGVARREMEAPKSPGTTRKDNIGRSQPSPQAGLAGPGPAGYSTARPTIPPRAGVISAPQSHARASAGRLTPESQSKTSETSKGSTFLPEPLKPQAAFPPQSSLPPPAQRLQEPLVPVAAPMPQSGPQPNLETPPQPPPRSRSSHSLPSEASSQPQVKTNGISDGKRESPLKIDPFEDLSFNLLAVSKAQLSVQTSPVPTPDPKRLIQLPSATQSNVLSSVSCMPTMPPIPARSQSQENMRSSPNPFITGLTRTNPFSDRTAAPGNPFRAKSEESEATSWFSKEEPVTISPFPSLQPLGHNKSRASSSLDGFKDSFDLQGQSTLKISNPKGWVTFEEEEDFGVKGKSKSACSDLLGNQPSSFSGSNLTLNDDWNKGTNVSFCVLPSRRPPPPPVPLLPPGTSPPVDPFTTLASKASPTLDFTER

SEQ ID NO: 14413 - protein, 1573 aa, Homo sapiens; identical to SEQ ID NO: 14412

SEQ ID NO: 14414 - protein, 1576 aa, Homo sapiens
MAFSKGFRIYHKLDPPPFSLIVETRHKEECLMFESGAVAVLSSAEKEAIKGTYSKVLDAYGLLGVLRLNLGDTMLHYLVLVTGCMSVGKIQESEVFRVTSTEFISLRIDSSDEDRISEVRKVLNSGNFYFAWSASGISLDLSLNAHRSMQEQTTDNRFFWNQSLHLHLKHYGVNCDDWLLRLMCGGVEIRTIYAAHKQAKACLISRLSCERAGTRFNVRGTNDDGHVANFVETEQVVYLDDSVSSFIQIRGSVPLFWEQPGLQVGSHRVRMSRGFEANAPAFDRHFRTLKNLYGKQIIVNLLGSKEGEHMLSKAFQSHLKASEHAADIQMVNFDYHQMVKGGKAEKLHSVLKPQVQKFLDYGFFYFNGSEVQRCQSGTVRTNCLDCLDRTNSVQAFLGLEMLAKQLEALGLAEKPQLVTRFQEVFRSMWSVNGDSISKIYAGTGALEGKAKAGKLKDGARSVTRTIQNNFFDSSKQEAIDVLLLGNTLNSDLADKARALLTTGSLRVSEQTLQSASSKVLKSMCENFYKYSKPKKIRVCVGTWNVNGGKQFRSIAFKNQTLTDWLLDAPKLAGIQEFQDKRSKPTDIFAIGFEEMVELNAGNIVSASTTNQKLWAVELQKTISRDNKYVLLASEQLVGVCLFVFIRPQHAPFIRDVAVDTVKTGMGGATGNKGAVAIRMLFHTTSLCFVCSHFAAGQSQVKERNEDFIEIARKLSFPMGRMLFSHDYVFWCGDFNYRIDLPNEEVKELIRQQNWDSLIAGDQLINQKNAGQVFRGFLEGKVTFAPTYKYDLFSDDYDTSEKCRTPAWTDRVLWRRRKWPFDRSAEDLDLLNASFQDESKILYTWTPGTLLHYGRAELKTSDHRPVVALIDIDIFEVEAEERQNIYKEVIAVQGPPDGTVLVSIKSSLPENNFFDDALIDELLQQFASFGEVILIRFVEDKMWVTFLEGSSALNVLSLNGKELLNRTITIALKSPDWIKNLEEEMSLEKISIALPSSTSSTLLGEDAEVAADFDMEGDVDDYSAEVEELLPQHLQPSSSSGLGTSPSSSPRTSPCQSPTISEGPVPSLPIRPSRAPSRTPGPPSAQSSPIDAQPATPLPQKDPAQPLEPKRPPPPRPVAPPTRPAPPQRPPPPSGARSPAPTRKEFGGIGAPPSPGVARREMEAPKSPGTTRKDNIGRSQPSPQAGLAGPGPAGYSTARPTIPPRAGVISAPQSHARASAGRLTPESQSKTSETSKGSTFLPEPLKPQAAFPPQSSLPPPAQRLQEPLVPVAAPMPQSGPQPNLETPPQPPPRSRSSHSLPSEASSQPQVKTNGISDGKRESPLKIDPFEDLSFNLLAVSKAQLSVQTSPVPTPDPKRLIQLPSATQSNVLSSVSCMPTMPPIPARSQSQENMRSSPNPFITGLTRTNPFSDRTAAPGNPFRAKSEESEATSWFSKEEPVTISPFPSLQPLGHNKSRASSSLDGFKDSFDLQGQSTLKISNPKGWVTFEEEEDFGVKGKSKSACSDLLGNQPSSFSGSNLTLNDDWNKGTNVSFCVLPSRRPPPPPVPLLPPGTSPPVDPFTTLASKASPTLDFTER

SEQ ID NO: 14415 - protein, 254 aa, Homo sapiens
MGKVKVGVNGFGCIGRLVIRAACNSGKVDIIAINDPFIDLSYMVYMFQYDPTHGKFHGTVKAENGKLVINGNPITIFQEPDPSKIKWGDAGTEYVMESTGIFTTMENAGAHLQWGAKRPQGSPEHHPCHYWAAKAVRKVIPELNGKLTGMALRVPTANVSVVDLTYHLEKPAKYDDIKKVVKQASEGPLKGILGYTGHQVVSSDFNSDTHSSTFNAGAGTALNDHFVKLISWYDNEFGYNNRVVDLMAHMASKE

SEQ ID NO: 14416 - protein, 151 aa, Homo sapiens [sequence omitted]

SEQ ID NO: 14417 - protein, 310 aa, Homo sapiens
MAFPKMRLMYICLLVLGALCLYFSMYSLNPFKEQSFVYKKDGNFLKLPDTDCRQTPPFLVLLVTSSHKQLAERMAIRQTWGKERTVKGKQLKTFFLLGTTSSAAETKEVDQESQRHGDIIQKDFLDVYYNLTLKTMMGIEWVHRFCPQAAFVMKTDSDMFINVDYLTELLLKKNRTTRFFTGFLKLNEFPIRQPFSKWFVSKSEYPWDRYPPFCSGTGYVFSGDVASQVYNVSKSVPYIKLEDVFVGLCLERLNIRLEELHSQPTFFPGGLRFSVCLFRRIVACHFIKPRTLLDYWQALENSRGEDCPPV

SEQ ID NO: 14418 - protein, 310 aa, Homo sapiens; identical to SEQ ID NO: 14417

SEQ ID NO: 14419 - protein, 314 aa, Homo sapiens [sequence omitted]

SEQ ID NO: 14420 - protein, 310 aa, Homo sapiens; identical to SEQ ID NO: 14417

SEQ ID NO: 14421 - protein, 310 aa, Homo sapiens; identical to SEQ ID NO: 14417

SEQ ID NO: 14422 - protein, 652 aa, Homo sapiens
MTFYVGLQAEDGHWTGDYGGPLFLLPGLLITCHVARIPLPAGYREEIVRYLRSVQLPDGGWGLHIEDKSTVFGTALNYVSLRILGVGPDDPDLVRARNILHKKGGAVAIPSWGKFWLAVLNVYSWEGLNTLFPEMWLFPDWAPAHPSTLWCHCRQVYLPMSYCYAVRLSAAEDPLVQSLRQELYVEDFASIDWLAQRNNVAPDELYTPHSWLLRVVYALLNLYEHHHSAHLRQRAVQKLYEHIVADDRFTKSISIGPISKTINMLVRWYVDGPASTAFQEHVSRIPDYLWMGLDGMKMQGTNGSQIWDTAFAIQALLEAGGHHRPEFSSCLQKAHEFLRLSQVPDNPPDYQKYYRQMRKGGFSFSTLDCGWIVSDCTAEALKAVLLLQEKCPHVTEHIPRERLCDAVAVLLNMRNPDGGFATYETKRGGHLLELLNPSEVFGDIMIDYTYVECTSAVMQALKYFHKRFPEHRAAEIRETLTQGLEFCRRQQRADGSWEGSWGVCFTYGTWFGLEAFACMGQTYRDGTACAEVSRACDFLLSRQMADGGWGEDFESCEERRYLQSAQSQIHNTCWAMMGLMAVRHPDIEAQERGVRCLLEKQLPNGDWPQENIAGVFNKSCAISYTSYRNIFPIWALGRFSQLYPERALAGHP

SEQ ID NO: 14423 - protein, 733 aa, Homo sapiens
MRGGPRCLRRRGGPYKTEPATDLGRWRLNCERGRQTWTYLQDERAGREQTGLEAYALGLDTKNYFKDLPKAHTAFEGALNGMTFYVGLQAEDGHWTGDYGGPLFLLPGLLITCHVARIPLPAGYREEIVRYLRSVQLPDGGWGLHIEDKSTVFGTALNYVSLRILGVGPDDPDLVRARNILHKKGGAVAIPSWGKFWLAVLNVYSWEGLNTLFPEMWLFPDWAPAHPSTLWCHCRQVYLPMSYCYAVRLSAAEDPLVQSLRQELYVEDFASIDWLAQRNNVAPDELYTPHSWLLRVVYALLNLYEHHHSAHLRQRAVQKLYEHIVADDRFTKSISIGPISKTINMLVRWYVDGPASTAFQEHVSRIPDYLWMGLDGMKMQGTNGSQIWDTAFAIQALLEAGGHHRPEFSSCLQKAHEFLRLSQVPDNPPDYQKYYRQMRKGGFSFSTLDCGWIVSDCTAEALKAVLLLQEKCPHVTEHIPRERLCDAVAVLLNMRNPDGGFATYETKRGGHLLELLNPSEVFGDIMIDYTYVECTSAVMQALKYFHKRFPEHRAAEIRETLTQGLEFCRRQQRADGSWEGSWGVCFTYGTWFGLEAFACMGQTYRDGTACAEVSRACDFLLSRQMADGGWGEDFESCEERRYLQSAQSQIHNTCWAMMGLMAVRHPDIEAQERGVRCLLEKQLPNGDWPQENIAGVFNKSCAISYTSYRNIFPIWALGRFSQLYPERALAGHP

SEQ ID NO: 14424 - protein, 732 aa, Homo sapiens
MTEGTCLRRRGGPYKTEPATDLGRWRLNCERGRQTWTYLQDERAGREQTGLEAYALGLDTKNYFKDLPKAHTAFEGALNGMTFYVGLQAEDGHWTGDYGGPLFLLPGLLITCHVARIPLPAGYREEIVRYLRSVQLPDGGWGLHIEDKSTVFGTALNYVSLRILGVGPDDPDLVRARNILHKKGGAVAIPSWGKFWLAVLNVYSWEGLNTLFPEMWLFPDWAPAHPSTLWCHCRQVYLPMSYCYAVRLSAAEDPLVQSLRQELYVEDFASIDWLAQRNNVAPDELYTPHSWLLRVVYALLNLYEHHHSAHLRQRAVQKLYEHIVADDRFTKSISIGPISKTINMLVRWYVDGPASTAFQEHVSRIPDYLWMGLDGMKMQGTNGSQIWDTAFAIQALLEAGGHHRPEFSSCLQKAHEFLRLSQVPDNPPDYQKYYRQMRKGGFSFSTLDCGWIVSDCTAEALKAVLLLQEKCPHVTEHIPRERLCDAVAVLLNMRNPDGGFATYETKRGGHLLELLNPSEVFGDIMIDYTYVECTSAVMQALKYFHKRFPEHRAAEIRETLTQGLEFCRRQQRADGSWEGSWGVCFTYGTWFGLEAFACMGQTYRDGTACAEVSRACDFLLSRQMADGGWGEDFESCEERRYLQSAQSQIHNTCWAMMGLMAVRHPDIEAQERGVRCLLEKQLPNGDWPQENIAGVFNKSCAISYTSYRNIFPIWALGRFSQLYPERALAGHP

SEQ ID NO: 14425 - protein, 732 aa, Homo sapiens; identical to SEQ ID NO: 14424

SEQ ID NO: 14426 - protein, 732 aa, Homo sapiens; identical to SEQ ID NO: 14424

SEQ ID NO: 14427 - protein, 167 aa, Homo sapiens
  VARIANT (1)...(167): Xaa = Any Amino Acid
MATSGDCPRSESQGEEPAECSEAGLLQEGVQPEEFVAIADYAATDETQLSFLRGEKILILRQTTADWWWGERAGCCGYIPANHVGKHVDEYDPEDTWQDEEYFGSYGTLKLHLEMLADQPRTTKYHSVILQNKESLTDKVILDVGCGTGIISLFCAHYARPRAVSGX

SEQ ID NO: 14428 - protein, 375 aa, Homo sapiens
MATSGDCPRSESQGEEPAECSEAGLLQEGVQPEEFVAIADYAATDETQLSFLRGEKILILRQTTADWWWGERAGCCGYIPANHVGKHVDEYDPEDTWQDEEYFGSYGTLKLHLEMLADQPRTTKYHSVILQNKESLTDKVILDVGCGTGIISLFCAHYARPRAVYAVEASEMAQHTGQLVLQNGFADIITVYQQKVEDVVLPEKVDVLVSEWMGTCLLFEFMIESILYARDAWLKEDGVIWPTMAALHLVPCSADKDYRSKVLFWDNAYEFNLSALKSLAVKEFFSKPKYNHILKPEDCLSEPCTILQLDMRTVQISDLETLRGELRFDIRKAGTLHGFTAWFSVHFQSLQEGQPPQCSAPGPSTPPHTGSRRCS

SEQ ID NO: 14429 - protein, 375 aa, Homo sapiens; identical to SEQ ID NO: 14428

SEQ ID NO: 14430 - protein, 374 aa, Homo sapiens
MATSGDCPRSESQGEEPAECSEAGLLQEGVQPEEFVAIADYAATDETQLSFLRGEKILILRQTTADWWWGERAGCCGYIPANHVGKHVDEYDPEDTWQDEEYFGSYGTLKLHLEMLADQPRTTKYHSVILQNKESLTDKVILDVGCGTGIISLFCAHYARPRAYAVEASEMAQHTGQLVLQNGFADIITVYQQKVEDVVLPEKVDVLVSEWMGTCLLFEFMIESILYARDAWLKEDGVIWPTMAALHLVPCSADKDYRSKVLFWDNAYEFNLSALKSLAVKEFFSKPKYNHILKPEDCLSEPCTILQLDMRTVQISDLETLRGELRFDIRKAGTLHGFTAWFSVHFQSLQEGQPPQCSAPGPSTPPHTGSRRCS

SEQ ID NO: 14431 - protein, 277 aa, Homo sapiens
MATSGDCPRSESQGEEPAECSEAGLLQEGVQPEEFVAIADYAATDETQLSFLRGEKILILRQTTADWWWGERAGCCGYIPANHVGKHVDEYDPEDTWQDEEYFGSYGTLKLHLEMLADQPRTTKYHSVILQNKESLTDKVILDVGCGTGIISLFCAHYARPRAVYAVEASEMAQHTGQLVLQNGFADIITVYQQKVEDVVLPEKVDVLVSEWMGTCLLFEFMIESILYARDAWLKEDGVIWPTMAALHLVPCSADKDYRSKVLFWDNAYEFNLSALK

SEQ ID NO: 14432 - protein, 375 aa, Homo sapiens; identical to SEQ ID NO: 14428

SEQ ID NO: 14433 - protein, 612 aa, Homo sapiens
MRSRWGGAAGERIKALAAAAEHWPCPSICPERSIWIKVLAMSQLVECVPNFSEGKNQEVIDAISGAITQTPGCVLLDVDAGPSTNRTVYTFVGPPECVVEGALNAARVASRLIDMSRHQGEHPRMGALDVCPFIPVRGVSVDECVLCAQAFGQRLAEELDVPVYLYGEAARMDSRRTLPAIRAGEYEALPKKLQQADWAPDFGPSSFVPSWGATATGARKFLIAFNINLLGTKEQAHRIALNLREQGRGKDQPGRLKKVQGIGWYLDEKNLAQVSTNLLDFEVTALHTVYEETCREAQELSLPVVGSQLVGLVPLKALLDAAAFYCEKENLFILEEEQRIRLVVSRLGLDSLCPFSPKERIIEYLVPERGPERGLGSKSLRAFVGEVGARSAAPGGGSVAAAAAAMGAALGSMVGLMTYGRRQFQSLDTTMRRLIPPFREASAKLTTLVDADAEAFTAYLEAMRLPKNTPEEKDRRTAALQEGLRRAVSVPLTLAETVASLWPALQELARCGNLACRSDLQVAAKALEMGVFGAYFNVLINLRDITDEAFKDQPPAGSQDPGCTGAGLLGDPAGVTVREASPGSVAPPSPIPRGQSCDLETPGTAGPSTLEG

SEQ ID NO: 14434 - protein, 272 aa, Homo sapiens
MRSRWGGAAGERIKALAAAAEHWPCPSICPERSIWIKVLAMSQLVECVPNFSEGKNQEVIDAISGAITQTPGCVLLDVDAGPSTNRTVYTFVGPPECVVEGALNAARVASRLIDMSRHQGEHPRMGALDVCPFIPVRGVSVDECVLCAQAFGQRLAEELDVPVYLYGEAARMDSRRTLPAIRAGEYEALPKKLQQADWAPDFGPSSFVPSWGATATGARKFLIAFNINLLGTKEQAHRIALNLREQGRGKDQVTPFTDPMEPHPAPRERVRG

SEQ ID NO: 14435 - protein, 392 aa, Homo sapiens [sequence omitted]

SEQ ID NO: 14436 - protein, 581 aa, Homo sapiens
MRSRWGGAAGERIKALAAAAEHWPCPSICPERSIWIKVLAMSQLVECVPNFSEGKNQEVIDAISGAITQTPGCVLLDVDAGPSTNRTVYTFVGPPECVVEGALNAARVASRLIDMSRHQGEHPRMGALDVCPFIPVRGVSVDECVLCAQAFGQRLAEELDVPVYLYGEAARMDSRRTLPAIRAGEYEALPKKLQQADWAPDFGPSSFVPSWGATATGARKFLIAFNINLLGTKEQAHRIALNLREQGRGKDQPGRLKKVQGIGWYLDEKNLAQVSTNLLDFEVTALHTVYEETCREAQELSLPVVGSQLVGLVPLKALLDAAAFYCEKENLFILEEEQRIRLVVSRLGLDSLCPFSPKERIIEYLVPERGPERGLGSKSLRAFVGEVGARSAAPGGGSVAAAAAAMGAALGSMVGLMTYGRRQFQSLDTTMRRLIPPFREASAKLTTLVDADAEAFTAYLEAMRLPKNTPEEKDRRTAALQEGLRRAVSVPLTLAETVASLWPALQELARCGNLACRSDLQVAAKALEMGVFGAYFNVLINLRDITDEAFKDQIHHRVSSLLQEAKTQAALVLDCLETRQE

SEQ ID NO: 14437 - protein, 535 aa, Homo sapiens
MRSRWGGAAGERIKALAAAAEHWPCPSICPERSIWIKVLAMSQLVECVPNFSEGKNQEVIDAISGAITQTPGCVLLDVDAGPSTNRTVYTFVGPPECVVEGALNAARVASRLIDMSRHQGEHPRMGALDVCPFIPVRGVSVDECVLCAQAFGQRLAEELDVPVYLYGEAARMDSRRTLPAIRAGEYEALPKKLQQADWAPDFGPSSFVPSWGATATGARKFLIAFNINLLGTKEQAHRIALNLREQGRGKDQPGRLKKVQGIGWYLDEKNLAQVSTNLLDFEVTALHTVYEETCREAQELSLPVVGSQLVGLVPLKALLDAAAFYCEKENLFILEEEQRIRLVVSRLGLDSLCPFSPKERIIEYLVPERGPERGLGSKSLRAFVGEVGARSAAPGGGSVAAAAAAMGAALGSMVGLMTYGRRQFQSLDTTMRRLIPPFREASAKLTTLVDADAEAFTAYLAHGGPTGGSEAGSLCAADAGGDGGLAVAGAAGTGPVWEPGLPVRPPGGGQSPGDGRVWRIFQRAHQPEGHHRRGI

SEQ ID NO: 14438 - protein, 91 aa, Homo sapiens
MGVLGVDEHRGAPETMSAPGVQAPPGTNAGPTGCLEGLPEGSTGSRGSPAVAQGGLVTTGFQPGWPDAPGGPRHMPLHPGMCFFSGNPHSG

SEQ ID NO: 14439 - protein, 581 aa, Homo sapiens; identical to SEQ ID NO: 14436

SEQ ID NO: 14440 - protein, 581 aa, Homo sapiens; identical to SEQ ID NO: 14436

SEQ ID NO: 14441 - protein, 465 aa, Homo sapiens
MGSGSSSYRPKAIYLDIDGRIQKHSVQSETCGHQATLRAFKINELKAEVANHLAVLEKRVELEGLKVVEIEKCKSDIKKMREELAARSSRTNCPCKYSFLDNHKKLTPRRDVPTYPKYLLSPETIEALRKPTFDVWLWEPNEMLSCLEHMYHDLGLVRDFSINPVTLRRWLFCVHDNYRNNPFHNFRHCFCVAQMMYSMVWLCSLQEKFSQTDILILMTAAICHDLDHPGYNNTYQINARTELAVRYNDISPLENHHCAVAFQILAEPECNIFSNIPPDGFKQIRQGMITLILATDMARHAEIMDSFKEKMENFDYSNEEHMTLLKMILIKCCDISNEVRPMEVAEPWVDCLLEEYFMQSDREKSEGLPVAPFMDRDKVTKATAQIGFIKFVLIPMFETVTKLFPMVEEIMLQPLWESRDRYEELKRIDDAMKELQKKTDSLTSGATEKSRERSRDVKNSEGDCA

SEQ ID NO: 14442 - protein, 533 aa, Homo sapiens
MGSGSSSYRPKAIYLDIDGRIQKVIFSKYCNSSDIMDLFCIATGLPRNTTISLLTTDDAMVSIDPTMPANSERTPYKVRPVAIKQLSEREELIQSVLAQVAEQFSRAFKINELKAEVANHLAVLEKRVELEGLKVVEIEKCKSDIKKMREELAARSSRTNCPCKYSFLDNHKKLTPRRDVPTYPKYLLSPETIEALRKPTFDVWLWEPNEMLSCLEHMYHDLGLVRDFSINPVTLRRWLFCVHDNYRNNPFHNFRHCFCVAQMMYSMVWLCSLQEKFSQTDILILMTAAICHDLDHPGYNNTYQINARTELAVRYNDISPLENHHCAVAFQILAEPECNIFSNIPPDGFKQIRQGMITLILATDMARHAEIMDSFKEKMENFDYSNEEHMTLLKMILIKCCDISNEVRPMEVAEPWVDCLLEEYFMQSDREKSEGLPVAPFMDRDKVTKATAQIGFIKFVLIPMFETVTKLFPMVEEIMLQPLWESRDRYEELKRIDDAMKELQKKTDSLTSGATEKSRERSRDVKNSEGDCA

SEQ ID NO: 14443 - protein, 593 aa, Homo sapiens
MGSGSSSYRPKAIYLDIDGRIQKVIFSKYCNSSDIMDLFCIATGLPRNTTISLLTTDDAMVSIDPTMPANSERTPYKVRPVAIKQLSAGVEDKRTTSRGQSAERPLRDRRVVGLEQPRREGAFESGQVEPRPREPQGCYQEGQRIPPEREELIQSVLAQVAEQFSRAFKINELKAEVANHLAVLEKRVELEGLKVVEIEKCKSDIKKMREELAARSSRTNCPCKYSFLDNHKKLTPRRDVPTYPKYLLSPETIEALRKPTFDVWLWEPNEMLSCLEHMYHDLGLVRDFSINPVTLRRWLFCVHDNYRNNPFHNFRHCFCVAQMMYSMVWLCSLQEKFSQTDILILMTAAICHDLDHPGYNNTYQINARTELAVRYNDISPLENHHCAVAFQILAEPECNIFSNIPPDGFKQIRQGMITLILATDMARHAEIMDSFKEKMENFDYSNEEHMTLLKMILIKCCDISNEVRPMEVAEPWVDCLLEEYFMQSDREKSEGLPVAPFMDRDKVTKATAQIGFIKFVLIPMFETVTKLFPMVEEIMLQPLWESRDRYEELKRIDDAMKELQKKTDSLTSGATEKSRERSRDVKNSEGDCA

SEQ ID NO: 14444 - protein, 741 aa, Homo sapiens
MDIEDEENMSSSSTDVKENRNLDNVSPKDGSTPGPGEGSQLSNGGGGGPGRKRPLEEGSNGHSKYRLKKRRKTPGPVLPKNALMQLNEIKPGLQYTLLSQTGPVHAPLFVMSVEVNGQVFEGSGPTKKKAKLHAAEKALRSFVQFPNASEAHLAMGRTLSVNTDFTSDQADFPDTLFNGFETPDKAEPPFYVGSNGDDSFSSSGDLSLSASPVPASLAQPPLPVLPPFPPPSGKNPVMILNELRPGLKYDFLSESGESHAKSFVMSVVVDGQFFEGSGRNKKLAKARAAQSALAAIFNLHLDQTPSRQPIPSEGLQLHLPQVLADAVSRLVLGKFGDLTDNFSSPHARRKVLAGVVMTTGTDVKDAKVISVSTGTKCINGEYMSDRGLALNDCHAEIISRRSLLRFLYTQLELYLNNKDDQKRSIFQKSERGGFRLKENVQFHLYISTSPCGDARIFSPHEPILEGSRSYTQAGVQWCNHGSLQPRPPGLLSDPSTSTFQGAGTTEPADRHPNRKARGQLRTKIESGEGTIPVRSNASIQTWDGVLQGERLLTMSCSDKIARWNVVGIQGSLLSIFVEPIYFSSIILGSLYHGDHLSRAMYQRISNIEDLPPLYTLNKPLLSGISNAEARQPGKAPNFSVNWTVGDSAIEVINATTGKDELGRASRLCKHALYCRWMRVHGKVPSHLLRSKITKPNVYHESKLAAKEYQAAKARLFTAFIKAGLGAWVEKPTEQDQFSLTP

SEQ ID NO: 14445 - protein, 700 aa, Homo sapiens
MDIEDEENMSSSSTDVKENRNLDNVSPKDGSTPGPGEGSQLSNGGGGGPGRKRPLEEGSNGHSKYRLKKRRKTPGPVLPKNALMQLNEIKPGLQYTLLSQTGPVHAPLFVMSVEVNGQVFEGSGPTKKKAKLHAAEKALRSFVQFPNASEAHLAMGRTLSVNTDFTSDQADFPDTLFNGFETPDKAEPPFYVGSNGDDSFSSSGDLSLSASPVPASLAQPPLPVLPPFPPPSGKNPVMILNELRPGLKYDFLSESGESHAKSFVMSVVVDGQFFEGSGRNKKLAKARAAQSALAAIFNLHLDQTPSRQPIPSEGLQLHLPQVLADAVSRLVLGKFGDLTDNFSSPHARRKVLAGVVMTTGTDVKDAKVISVSTGTKCINGEYMSDRGLALNDCHAEIISRRSLLRFLYTQLELYLNNKDDQKRSIFQKSERGGFRLKENVQFHLYISTSPCGDARIFSPHEPILEEPADRHPNRKARGQLRTKIESGEGTIPVRSNASIQTWDGVLQGERLLTMSCSDKIARWNVVGIQGSLLSIFVEPIYFSSIILGSLYHGDHLSRAMYQRISNIEDLPPLYTLNKPLLSISNAEARQPGKAPNFSVNWTVGDSAIEVINATTGKDELGRASRLCKHALYCRWMRVHGKVPSHLLRSKITKPNVYHESKLAAKEYQAAKARLFTAFIKAGLGAWVEKPTEQDQFSLTP

SEQ ID NO: 14446 - protein, 565 aa, Homo sapiens
MPSETPQAEVGPTGCPHRSGPHSAKGSLEKGSPEDKEAKEPLWIRPDAPSRCTWQLGRPASESPHHHTAPAKSPKILPDILKKIGDTPMVRINKIGKKFGLKCELLAKCEFFNAGGSVKDRISLRMIEDAERDGTLKPGDTIIEPTSGNTGIGLALAAAVRGYRCIIVMPEKMSSEKVDVLRALGAEIVRTPTNARFDSPESHVGVAWRLKNEIPNSHILDQYRNASNPLAHYDTTADEILQQCDGKLDMLVASVGTGGTITGIARKLKEKCPGCRIIGVDPEGSILAEPEELNQTEQTTYEVEGIGYDFIPTVLDRTVVDKWFKSNDEEAFTFARMLIAQEGLLCGGSAGSTVAVAVKAAQELQEGQRCVVILPDSVRNYMTKFLSDRWMLQKGFLKEEDLTEKKPWWWHLRVQELGLSAPLTVLPTITCGHTIEILREKGFDQAPVVDEAGVILGMVTLGNMLSSLLAGKVQPSDQVGKVIYKQFKQIRLTDTLGRLSHILEMDHFALVVHEQIQSQDQAWAGVVGGPADHSTGKSSQRQMVFGVVTAIDLLNFVAAQERDQK

SEQ ID NO: 14447 - protein, 551 aa, Homo sapiens
MPSETPQAEVGPTGCPHRSGPHSAKGSLEKGSPEDKEAKEPLWIRPDAPSRCTWQLGRPASESPHHHTAPAKSPKILPDILKKIGDTPMVRINKIGKKFGLKCELLAKCEFFNAGGSVKDRISLRMIEDAERDGTLKPGDTIIEPTSGNTGIGLALAAAVRGYRCIIVMPEKMSSEKVDVLRALGAEIVRTPTNARFDSPESHVGVAWRLKNEIPNSHILDQYRNASNPLAHYDTTADEILQQCDGKLDMLVASVGTGGTITGIARKLKEKCPGCRIIGVDPEGSILAEPEELNQTEQTTYEVEGIGYDFIPTVLDRTVVDKWFKSNDEEAFTFARMLIAQEGLLCGGSAGSTVAVAVKAAQELQEGQRCVVILPDSVRNYMTKFLSDRWMLQKGFLKEEDLTEKKPWWWHLRVQELGLSAPLTVLPTITCGHTIEILREKGFDQAPVVDEAGVILGMVTLGNMLSSLLAGKVQPSDQVGKVIYKQFKQIRLTDTLGRLSHILEMDHFALVVHEQIQYHSTGKSSQRQMVFGVVTAIDLLNFVAAQERDQK

SEQ ID NO: 14448 - protein, 446 aa, Homo sapiens
MAKCEFFNAGGSVKDRISLRMIEDAERDGTLKPGDTIIEPTSGNTGIGLALAAAVRGYRCIIVMPEKMSSEKVDVLRALGAEIVRTPTNARFDSPESHVGVAWRLKNEIPNSHILDQYRNASNPLAHYDTTADEILQQCDGKLDMLVASVGTGGTITGIARKLKEKCPGCRIIGVDPEGSILAEPEELNQTEQTTYEVEGIGYDFIPTVLDRTVVDKWFKSNDEEAFTFARMLIAQEGLLCGGSAGSTVAVAVKAAQELQEGQRCVVILPDSVRNYMTKFLSDRWMLQKGFLKEEDLTEKKPWWWHLRVQELGLSAPLTVLPTITCGHTIEILREKGFDQAPVVDEAGVILGMVTLGNMLSSLLAGKVQPSDQVGKVIYKQFKQIRLTDTLGRLSHILEMDHFALVVHEQIQYHSTGKSSQRQMVFGVVTAIDLLNFVAAQERDQK

SEQ ID NO: 14449 - protein, 292 aa, Homo sapiens
  VARIANT (1)...(292): Xaa = Any Amino Acid
MPSETPQAEVGPTGCPHRSGPHSAKGSLEKGSPEDKEAKEPLWIRPDAPSRCTWQLGRPASESPHHHTAPAKSPKILPDILKKIGDTPMVRINKIGKKFGLKCELLAKCEFFNAGGSVKDRISLRMIEDAERDGTLKPGDTIIEPTSGNTGIGLALAAAVRGYRCIIVMPEKMSSEKVDVLRALGAEIVRTPTNARFDSPESHVGVAWRLKNEIPNSHILDQYRNASNPLAHYDTTADEILQQCDGKLDMLVASVGTGGTITGIARKLKEKCPGCIIGVDPEGSILAEPEEX

SEQ ID NO: 14450 - protein, 570 aa, Homo sapiens
MPSETPQAEVGPTGCPHRSGPHSAKGSLEKGSPEDKEAKEPLWIRPDAPSRCTWQLGRPASESPHHHTAPAKSPKILPDILKKIGDTPMVRINKIGKKFGLKCELLAKCEFFNAGGSVKDRISLRMIEDAERDGTLKPGDTIIEPTSGNTGIGLALAAAVRGYRCIIVMPEKMSSEKVDVLRALGAEIVRTPTNARFDSPESHVGVAWRLKNEIPNSHILDQYRNASNPLAHYDTTADEILQQCDGKLDMLVASVGTGGTITGIARKLKEKCPGCRIIGVDPEGSILAEPEELNQTEQTTYEVEGIGYDFIPTVLDRTVVDKWFKSNDEEAFTFARMLIAQEGLLCGGSAGSTVAVAVKAAQELQEGQRCVVILPDSVRNYMTKFLSDRWMLQKGFLKEEDLTEKKPWWWHLRVQELGLSAPLTVLPTITCGHTIEILREKGFDQAPVVDEAGVILGMVTLGNMLSSLLAGKVQPSDQVGKVIYKQFKQIRLTDTLGRLSHILEMDHFALVVHEQIQSQDQAWAGVVGGPAGSPNQVFLEHVHACHHRLWLLSSTSGLRAHNRDGTAPKT

SEQ ID NO: 14451 - protein, 551 aa, Homo sapiens; identical to SEQ ID NO: 14447

SEQ ID NO: 14452 - protein, 551 aa, Homo sapiens; identical to SEQ ID NO: 14447

SEQ ID NO: 14453 - protein, 312 aa, Homo sapiens
MEEECRVLSIQSHVIRGYVGNRAATFPLQVLGFEIDAVNSVQFSNHTGYAHWKGQVLNSDELQELYEGLRLNNMNKYDYVLTGYTRDKSFLAMVVDIVQELKQQNPRLVYVCDPVLGDKWDGEGSMYVPEDLLPVYKEKVVPLADIITPNQFEAELLSGRKIHSQEEALRVMDMLHSMGPDTVVITSSDLPSPQGSNYLIVLGSQRRRNPAGSVVMERIRMDIRKVDAVFVGTGDLFAAMLLAWTHKHPNNLKVACEKTVSTLHHVLQRTIQCAKAQAGEGVRPSPMQLELRMVQSKRDIEDPEIVVQATVL

SEQ ID NO: 14454 - protein, 780 aa, Homo sapiens
MAAVDLEKLRASGAGKAIGVLTSGGDAQGMNAAVRAVTRMGIYVGAKVFLIYEGYEGLVEGGENIKQANWLSVSNIIQLGGTIIGSARCKAFTTREGRRAAAYNLVQHGITNLCVIGGDGSLTGANIFRSEWGSLLEELVAEGKISETTARTYSHLNIAGLVGSIDNDFCGTDMTIGTDSALHRIMEVIDAITTTAQSHQRTFVLEVMGRHCGYLALVSALASGADWLFIPEAPPEDGWENFMCERLGETRSRGSRLNIIIIAEGAIDRNGKPISSSYVKDLVVQRLGFDTRVTVLGHVQRGGTPSAFDRILSSKMGMEAVMALLEATPDTPACVVTLSGNQSVRLPLMECVQMTKEVQKAMDDKRFDEATQLRGGSFENNWNIYKLLAHQKPPKEKSNFSLAILNVGAPAAGMNAAVRSAVRTGISHGHTVYVVHDGFEGLAKGQVQEVGWHDVAGWLGRGGSMLGTKRTLPKGQLESIVENIRIYGIHALLVVGGFEAYEGVLQLVEARGRYEELCIVMCVIPATISNNVPGTDFSLGSDTAVNAAMESCDRIKQSASGTKRRVFIVETMGGYCGYLATVTGIAVGADAAYVFEDPFNIHDLKVNVEHMTEKMKTDIQRGLVLRNEKCHDYYTTEFLYNLYSSEGKGVFDCRTNVLGHLQQGGAPTPFDRNYGTKLGVKAMLWLSEKLREVYRKGRVFANAPDSACVIGLKKKAVAFSPVTELKKDTDFEHRMPREQWWLSLRLMLKMLAQYRISMAAYVSGELEHVTRRTLSMDKGF

SEQ ID NO: 14455 - protein, 830 aa, Homo sapiens
MRSMCNQGRGRESSRGGLHVQGSCRGLSRSPQQETGFAKAPAGTDCFFHCSPGSRGQGDRKEEVTSEPGGTSIMSRLGGMNAAVRAVTRMGIYVGAKVFLIYEGYEGLVEGGENIKQANWLSVSNIIQLGGTIIGSARCKAFTTREGRRAAAYNLVQHGITNLCVIGGDGSLTGANIFRSEWGSLLEELVAEGKISETTARTYSHLNIAGLVGSIDNDFCGTDMTIGTDSALHRIMEVIDAITTTAQSHQRTFVLEVMGRHCGYLALVSALASGADWLFIPEAPPEDGWENFMCERLGETRSRGSRLNIIIIAEGAIDRNGKPISSSYVKDLVVQRLGFDTRVTVLGHVQRGGTPSAFDRILSSKMGMEAVMALLEATPDTPACVVTLSGNQSVRLPLMECVQMTKEVQKAMDDKRFDEATQLRGGSFENNWNIYKLLAHQKPPKEKSNFSLAILNVGAPAAGMNAAVRSAVRTGISHGHTVYVVHDGFEGLAKGQVQEVGWHDVAGWLGRGGSMLGTKRTLPKGQLESIVENIRIYGIHALLVVGGFEAYEGVLQLVEARGRYEELCIVMCVIPATISNNVPGTDFSLGSDTAVNAAMESCDRIKQSASGTKRRVFIVETMGGYCGYLATVTGIAVGADAAYVFEDPFNIHDLKVNVEHMTEKMKTDIQRGLVLRNEKCHDYYTTEFLYNLYSSEGKGVFDCRTNVLGHLQQGGAPTPFDRNYGTKLGVKAMLWLSEKLREVYRKGRVFANAPDSACVIGLKKKAVAFSPVTELKKDTDFEHRMPREQWWLSLRLMLKMLAQYRISMAAYVSGELEHVTRRTLSMDKGF

SEQ ID NO: 14456 - protein, 387 aa, Homo sapiens
MAAIPALDPEAEPSMDVILVGSSELSSSVSPGTGRDLIAYEVKANQRNIEDICICCGSLQVHTQHPLFEGGICAPCKDKFLDALFLYDDDGYQSYCSICCSGETLLICGNPDCTRCYCFECVDSLVGPGTSGKVHAMSNWVCYLCLPSSRSGLLQRRRKWRSQLKAFYDRESENPLEMFETVPVWRRQPVRVLSLFEDIKKELTSLGFLESGSDPGQLKHVVDVTDTVRKDVEEWGPFDLVYGATPPLGHTCDRPPSWYLFQFHRLLQYARPKPGSPRPFFWMFVDNLVLNKEDLDVASRFLEMEPVTIPDVHGGSLQNAVRVWSNIPAIRSSRHWALVSEEELSLLAQNKQSSKLAAKWPTKLVKNCFLPLREYFKYFSTELTSSL

SEQ ID NO: 14457 - protein, 387 aa, Homo sapiens; identical to SEQ ID NO: 14456

SEQ ID NO: 14458 - protein, 105 aa, Homo sapiens
MSALTRLASFARVGGRLFRSGCARTAGDGGVRHAGGGVHIEPRYRQFPQLTRSQVFQSEFFSGLMWFWILWRFWHDSEEVLGHFPYPDPSQWTDEELGIPPDDED

SEQ ID NO: 14459 - protein, 105 aa, Homo sapiens; identical to SEQ ID NO: 14458

SEQ ID NO: 14460 - protein, 95 aa, Homo sapiens
MESHERQPLVLHEEMGECRSSLSAGGGVHIEPRYRQFPQLTRSQVFQSEFFSGLMWFWILWRFWHDSEEVLGHFPYPDPSQWTDEELGIPPDDED

SEQ ID NO: 14461 - protein, 105 aa, Homo sapiens; identical to SEQ ID NO: 14458

SEQ ID NO: 14462 - protein, 105 aa, Homo sapiens; identical to SEQ ID NO: 14458

SEQ ID NO: 14463 - protein, 640 aa, Homo sapiens
MAALYRPGLRLNWHGLSPLGWPSCRSIQTLRVLSGDLGQLPTGIRDFVEHSARLCQPEGIHICDGTEAENTATLTLLEQQGLIRKLPKYNNCWLARTDPKDVARVESKTVIVTPSQRDTVPLPPGGARGQLGNWMSPADFQRAVDERFPGCMQGRTMYVLPFSMGPVGSPLSRIGVQLTDSAYVVASMRIMTRLGTPVLQALGDGDFVKCLHSVGQPLTGQGEPVSQWPCNPEKTLIGHVPDQREIISFGSGYGGNSLLGKKCFALRIASRLARDEGWLAEHMLILGITSPAGKKRYVAAAFPSACGKTNLAMMRPALPGWKVECVGDDIAWMRFDSEGRLRAINPENGFFGVAPGTSATTNPNAMATIQSNTIFTNVAETSDGGVYWEGIDQPLPPGVTVTSWLGKPWKPGDKEPCAHPNSRFCAPARQCPIMDPAWEAPEGVPIDAIIFGGRRPKGVPLVYEAFNWRHGVFVGSAMRSESTAAAEHKGKIIMHDPFAMRPFFGYNFGHYLEHWLSMEGRKGAQLPRIFHVNWFRRDEAGHFLWPGFGENARVLDWICRRLEGEDSARETPIGLVPKEGALDLSGLRAIDTTQLFSLPKDFWEQEVRDIRSYLTEQVNQDLPKEVLAELEALERRVHKM

SEQ ID NO: 14464 - protein, 297 aa, Homo sapiens
MEILLLMVDDSPLIVEWRTPDGRNRPSHVWLCDLPAASLNDQLPQHTFRVIWTAGDVQKECVLLKGRQEGWCRDSTTDEQLFRCELSVEKSTVLQSELESCKELQELEPENKWCLLTIILLMRALDPLLYEKETLQYFQTLKAVDPMRATYLDDLRSKFLLENSVLKMEYAEVRVLHLAHKDLTVLCHLEQLLLVTHLDLSHNRLRTLPPALAALRCLEVLQASDNAIESLDGVTNLPRLQELLLCNNRLQQPAVLQPLASCPRLVLLNLQGNPLCQAVGILEQLAELLPSVSSVLT

SEQ ID NO: 14465 - protein, 567 aa, Homo sapiens
MHGRLKVKTSEEQAEAKRLEREQKLKLYQSATQAVFQKRQAGELDESVLELTSQILGANPDFATLWNCRREVLQQLETQKSPEELAALVKAELGFLESCLRVNPKSYGTWHHRCWLLGRLPEPNWTRELELCARFLEVDERNFHCWDYRRFVATQAAVPPAEELAFTDSLITRNFSNYSSWHYRSCLLPQLHPQPDSGPQGRLPEDVLLKELELVQNAFFTDPNDQSAWFYHRWLLGRADPQDALRCLHVSRDEACLTVSFSRPLLVGSRMEILLLMVDDSPLIVEWRTPDGRNRPSHVWLCDLPAASLNDQLPQHTFRVIWTAGDVQKECVLLKGRQEGWCRDSTTDEQLFRCELSVEKSTVLQSELESCKELQELEPENKWCLLTIILLMRALDPLLYEKETLQYFQTLKAVDPMRATYLDDLRSKFLLENSVLKMEYAEVRVLHLAHKDLTVLCHLEQLLLVTHLDLSHNRLRTLPPALAALRCLEVLQASDNAIESLDGVTNLPRLQELLLCNNRLQQPAVLQPLASCPRLVLLNLQGNPLCQAVGILEQLAELLPSVSSVLT

SEQ ID NO: 14466 - protein, 420 aa, Homo sapiens
MHGRLKVKTSEEQAEAKRLEREQKLKLYQSATQAVFQKRQAGELDESVLELTSQILGANPDFATLWNCRREVLQQLETQKSPEELAALVKAELGFLESCLRVNPKSYGTWHHRCWLLGRLPEPNWTRELELCARFLEVDERNFHCWDYRRFVATQAAVPPAEELAFTDSLITRNFSNYSSWHYRSCLLPQLHPQPDSGPQGRLPEDVLLKELELVQNAFFTDPNDQSAWFYHRWLLGRADPQDALRCLHVSRDEACLTVSFSRPLLVGSRMEILLLMVDDSPLIVEWRTPDGRNRPSHVWVSQDWWGRSWGLGQGWVGQSKKWLGWGISLTQYSQLCDLPAASLNDQLPQHTFRVIWTAGDVQKECVLLKGDGTCSLHPLQQPPSLFSSQGCTLQPPTLSPGRQEGWCRDSTTDEQLFRW

SEQ ID NO: 14467 - protein, 567 aa, Homo sapiens; identical to SEQ ID NO: 14465

SEQ ID NO: 14468 - protein, 313 aa, Homo sapiens
MAAPMNGQVCVVTGASRGIGRGIALQLCKAGATVYITGRHLDTLRVVAQEAQSLGGQCVPVVCDSSQESEVRSLFEQVDREQQGRLDVLVNNAYAGVQTILNTRNKAFWETPASMWDDINNVGLRGHYFCSVYGARLMVPAGQGLIVVISSPGSLQYMFNVPYGVGKAACDKLAADCAHELRRHGVSCVSLWPGIVQTELLKEHMAKEEVLQDPVLKQFKSAFSSAETTELSGKCVVALATDPNILSLSGKVLPSCDLARRYGLRDVDGRPVQDYLSLSSVLSHVSGLGWLASYLPSFLRVPKWIIALYTSKF

SEQ ID NO: 14469 - protein, 313 aa, Homo sapiens; identical to SEQ ID NO: 14468

SEQ ID NO: 14470 - protein, 348 aa, Homo sapiens
MPHIDNDVKLDFKDVLLRPKRSTLKSRSEVDLTRSFSFRNSKQTYSGVPIIAANMDTVGTFEMAKVLCKFSLFTAVHKHYSLVQWQEFAGQNPDCLEHLAASSGTGSSDFEQLEQILEAIPQVKYICLDVANGYSEHFVEFVKDVRKRFPQHTIMAGNVVTGEMVEELILSGADIIKVGIGPGSVCTTRKKTGVGYPQLSAVMECADAAHGLKGHIISDGGCSCPGDVAKAFGAGADFVMLGGMLAGHSESGGELIERDGKKYKLFYGMSSEMAMKKYAGGVAEYRASEGKTVEVPFKGDVEHTIRDILGGIRSTCTYVGAAKLKELSRRTTFIRVTQQVNPIFSEAC

SEQ ID NO: 14471 - protein, 348 aa, Homo sapiens; identical to SEQ ID NO: 14470

SEQ ID NO: 14472 - protein, 348 aa, Homo sapiens; identical to SEQ ID NO: 14470

SEQ ID NO: 14473 - protein, 348 aa, Homo sapiens; identical to SEQ ID NO: 14470

SEQ ID NO: 14474 - protein, 366 aa, Homo sapiens
MTSCLPALRFIATPRLSAMPHIDNDVKLDFKDVLLRPKRSTLKSRSEVDLTRSFSFRNSKQTYSGVPIIAANMDTVGTFEMAKVLCKFSLFTAVHKHYSLVQWQEFAGQNPDCLEHLAASSGTGSSDFEQLEQILEAIPQVKYICLDVANGYSEHFVEFVKDVRKRFPQHTIMAGNVVTGEMVEELILSGADIIKVGIGPGSVCTTRKKTGVGYPQLSAVMECADAAHGLKGHIISDGGCSCPGDVAKAFGAGADFVMLGGMLAGHSESGGELIERDGKKYKLFYGMSSEMAMKKYAGGVAEYRASEGKTVEVPFKGDVEHTIRDILGGIRSTCTYVGAAKLKELSRRTTFIRVTQQVNPIFSEAC

SEQ ID NO: 14475 - protein, 817 aa, Homo sapiens
MMDGPRSDVGRWGGNPLQPPTTPSPEPEPEPDGRSRRGGGRSFWARCCGCCSCRNAADDDWGPEPSDSRGRGSSSGTRRPGSRGSDSRRPVSRGSGVNAAGDGTIREGMLVVNGVDLLSSRSDQNRREHHTDEYEYDELIVRRGQPFHMLLLLSRTYESSDRITLELLIGNNPEVGKGTHVIIPVGKGGSGGWKAQVVKASGQNLNLRVHTSPNAIIGKFQFTVRTQSDAGEFQLPFDPRNEIYILFNPWCPEDIVYVDHEDWRQEYVLNESGRIYYGTEAQIGERTWNYGQFDHGVLDACLYILDRRGMPYGGRGDPVNVSRVISAMVNSLDDNGVLIGNWSGDYSRGTNPSAWVGSVEILLSYLRTGYSVPYGQCWVFAGVTTTVLRCLGLATRTVTNFNSAHDTDTSLTMDIYFDENMKPLEHLNHDSVWNFHVWNDCWMKRPDLPSGFDGWQVVDATPQETSSGIFCCGPCSVESIKNGLVYMKYDTPFIFAEVNSDKVYWQRQDDGSFKIVYVEEKAIGTLIVTKAISSNMREDITYLYKHPEGSDAERKAVETAAAHGSKPNVYANRGSAEDVAMQVEAQDAVMGQDLMVSVMLINHSSSRRTVKLHLYLSVTFYTGVSGTIFKETKKEVELAPGASDRVTMPVAYKEYRPHLVDQGAMLLNVSGHVKESGQVLAKQHTFRLRTPDLSLTLLGAAVVGQECEVQIVFKNPLPVTLTNVVFRLEGSGLQRPKILNVGDIGGNETVTLRQSFVPVRPGPRQLIASLDSPQLSQVHGVIQVDVAPAPGDGGFFSDAGGDSHLGETIPMASRGGA

SEQ ID NO: 14476 - protein, 583 aa, Homo sapiens
MPGRTWELCLLLLLGLGLGSQEALPPPCESEIYCHGELLNQVQMAKLYQDDKQFVDMPLSIAPEQVLQTFTELSRDHNHSIPREQLQAFVHEHFQAKGQELQPWTPADWKDSPQFLQKISDAKLRAWAGQLHQLWKKLGKKMKPEVLSHPERFSLIYSEHPFIVPGGRFVEFYYWDSYWVMEGLLLSEMAETVKGMLQNFLDLVKTYGHVPNGGRVYYLQRSQPPLLTLMMDCYLTHTNDTAFLQENIETLALELDFWTKNRTVSVSLEGKNYLLNRYYVPYGGPRPESYSKDVELADTLPEGDREALWAELKAGAESGWDFSSRWLIGGPNPNSLSGIRTSKLVPVDLNAFLCQAEELMSNFYSRLGNDSQATKYRILRSQRLAALNTVLWDEQTGAWFDYDLEKKKKNREFYPSNLTPLWAGCFSDPGVADKALKYLEDNRILTYQYGIPTSLQKTGQQWDFPNAWAPLQDLVIRGLAKAPLRRAQEVAFQLAQNWIRTNFDVYSQKSAMYEKYDVSNGGQPGGGGEYEVQEGFGWTNGVVLMLLDRYGDRLTSGAKLAFLEPHCLAATLLPSLLLSLLPW

SEQ ID NO: 14477 - protein, 225 aa, Homo sapiens
MSCESSMVLGYWDIRGLAHAIRLLLEFTDTSYEEKRYTCGEAPDYDRSQWLDVKFKLDLDFPNLPYLLDGKNKITQSNAILRYIARKHNMCGETEEEKIRVDIIENQVMDFRTQLIRLCYSSDHEKLKPQYLEELPGQLKQFSMFLGKFSWFAGEKLTFVDFLTYDILDQNRIFDPKCLDEFPNLKAFMCRFEALEKIAAYLQSDQFCKMPINNKMAQWGNKPVC

SEQ ID NO: 14478 - protein, 225 aa, Homo sapiens; identical to SEQ ID NO: 14477

SEQ ID NO: 14479 - protein, 225 aa, Homo sapiens; identical to SEQ ID NO: 14477

SEQ ID NO: 14480 - protein, 225 aa, Homo sapiens; identical to SEQ ID NO: 14477

SEQ ID NO: 14481 - protein, 218 aa, Homo sapiens
MPMTLGYWDIRGLAHAIRLLLEYTDSSYVEKKYTLGDAPDYDRSQWLNEKFKLGLDFPNLPYLIDGAHKITQSNAILRYIARKHNLCGETEEEKIRVDILENQVMDNHMELVRLCYDPDFEKLKPKYLEELPEKLKLYSEFLGKRPWFAGDKITFVDFLAYDVLDMKRIFEPKCLDAFLNLKDFISRFEGLKKISAYMKSSQFLRGLLFGKSATWNSK

SEQ ID NO: 14482 - protein, 804 aa, Homo sapiens
MWQSQAPAGAAQTPPLSPPWSQPWHPIHLALASPRPNIPLRSGPACRPPLQLQELFTRSLAESELRSAPYEFPEESPIEQLEERRQRLERQISQDVKLEPDILLRAKQDFLKTDSDSDLQLYKEQGEGQGDRSLRERDVLEREFQRVTISGEEKCGVPFTDLLDAAKSVVRALFIREKYMALSLQSFCPTTRRYLQQLAEKPLETRTYEQGPDTPVSADAPVHPPALEQHPYEHCEPSTMPGDLGLGLRMVRGVVHVYTRREPDEHCSEVELPYPDLQEFVADVNVLMALIINGPIKSFCYRRLQYLSSKFQMHVLLNEMKELAAQKKVPHRDFYNIRKVDTHIHASSCMNQKHLLRFIKRAMKRHLEEIVHVEQGREQTLREVFESMNLTAYDLSVDTLDVHADRNTFHRFDKFNAKYNPIGESVLREIFIKTDNRVSGKYFAHIIKEVMSDLEESKYQNAELRLSIYGRSRDEWDKLARWAVMHRVHSPNVRWLVQVPRLFDVYRTKGQLANFQEMLENIFLPLFEATVHPASHPELHLFLEHVDGFDSVDDESKPENHVFNLESPLPEAWVEEDNPPYAYYLYYTFANMAMLNHLRRQRGFHTFVLRPHCGEAGPIHHLVSAFMLAENISHGLLLRKAPVLQYLYYLAQIGIAMSPLSNNSLFLSYHRNPLPEYLSRGLMVSLSTDDPLQFHFTKEPLMEEYSIATQVWKLSSCDMCELARNSVLMSGFSHKVKSHWLGPNYTKEGPEGNDIRRTNVPDIRVGYRYETLCQELALITQAVQSEMLETIPEEAGITMSPGPQ

SEQ ID NO: 14483 - protein, 471 aa, Homo sapiens
MASEARGGLGAPPLQSARSLPGPAPCLKHFPLDLRTSMDGKCKEIAEELFTRSLAESELRSAPYEFPEESPIEQLEERRQRLERQISQDVKLEPDILLRAKQDFLKTDSDSDLQLYKEQGEGQGDRSLRERDVLEREFQRVTISGEEKCGVPFTDLLDAAKSVVRALFIREKYMALSLQSFCPTTRRYLQQLAEKPLETRTYEQGPDTPVSADAPVHPPALEQHPYEHCEPSTMPGDLGLGLRMVRGVVHVYTRREPDEHCSEVELPYPDLQEFVADVNVLMALIINGPIKSFCYRRLQYLSSKFQMHVLLNEMKELAAQKKVPHRDFYNIRKVDTHIHASSCMNQKHLLRFIKRAMKRHLEEIVHVEQGREQTLREVFESMNLTAYDLSVDTLDVHAVCASGVGCGTESVRGPGVTGDLSLPMSPRTGTLSIALTSLMPNTTLLGSPSSERSSSRRTTGYLGSTLLTSSR

SEQ ID NO: 14484 - protein, 879 aa, Homo sapiens
MRNRGQGLFRLRSRCFLHQSLPLGAGRRKGLDVAEPGPSRCRSDSPAVAAVVPAMASYPSGSGKPKAKYPFKKRASLQASTAAPEARGGLGAPPLQSARSLPGPAPCLKHFPLDLRTSMDGKCKEIAEELFTRSLAESELRSAPYEFPEESPIEQLEERRQRLERQISQDVKLEPDILLRAKQDFLKTDSDSDLQLYKEQGEGQGDRSLRERDVLEREFQRVTISGEEKCGVPFTDLLDAAKSVVRALFIREKYMALSLQSFCPTTRRYLQQLAEKPLETRTYEQGPDTPVSADAPVHPPALEQHPYEHCEPSTMPGDLGLGLRMVRGVVHVYTRREPDEHCSEVELPYPDLQEFVADVNVLMALIINGPIKSFCYRRLQYLSSKFQMHVLLNEMKELAAQKKVPHRDFYNIRKVDTHIHASSCMNQKHLLRFIKRAMKRHLEEIVHVEQGREQTLREVFESMNLTAYDLSVDTLDVHADRNTFHRFDKFNAKYNPIGESVLREIFIKTDNRVSGKYFAHIIKEVMSDLEESKYQNAELRLSIYGRSRDEWDKLARWAVMHRVHSPNVRWLVQVPRLFDVYRTKGQLANFQEMLENIFLPLFEATVHPASHPELHLFLEHVDGFDSVDDESKPENHVFNLESPLPEAWVEEDNPPYAYYLYYTFANMAMLNHLRRQRGFHTFVLRPHCGEAGPIHHLVSAFMLAENISHGLLLRKAPVLQYLYYLAQIGIAMSPLSNNSLFLSYHRNPLPEYLSRGLMVSLSTDDPLQFHFTKEPLMEEYSIATQVWKLSSCDMCELARNSVLMSGFSHKVKSHWLGPNYTKEGPEGNDIRRTNVPDIRVGYRYETLCQELALITQAVQSEMLETIPEEAGITMSPGPQ

SEQ ID NO: 14485 - protein, 760 aa, Homo sapiens
MLTFLPSPQELFTRSLAESELRSAPYEFPEESPIEQLEERRQRLERQISQDVKLEPDILLRAKQDFLKTDSDSDLQLYKEQGEGQGDRSLRERDVLEREFQRVTISGEEKCGVPFTDLLDAAKSVVRALFIREKYMALSLQSFCPTTRRYLQQLAEKPLETRTYEQGPDTPVSADAPVHPPALEQHPYEHCEPSTMPGDLGLGLRMVRGVVHVYTRREPDEHCSEVELPYPDLQEFVADVNVLMALIINGPIKSFCYRRLQYLSSKFQMHVLLNEMKELAAQKKVPHRDFYNIRKVDTHIHASSCMNQKHLLRFIKRAMKRHLEEIVHVEQGREQTLREVFESMNLTAYDLSVDTLDVHADRNTFHRFDKFNAKYNPIGESVLREIFIKTDNRVSGKYFAHIIKEVMSDLEESKYQNAELRLSIYGRSRDEWDKLARWAVMHRVHSPNVRWLVQVPRLFDVYRTKGQLANFQEMLENIFLPLFEATVHPASHPELHLFLEHVDGFDSVDDESKPENHVFNLESPLPEAWVEEDNPPYAYYLYYTFANMAMLNHLRRQRGFHTFVLRPHCGEAGPIHHLVSAFMLAENISHGLLLRKAPVLQYLYYLAQIGIAMSPLSNNSLFLSYHRNPLPEYLSRGLMVSLSTDDPLQFHFTKEPLMEEYSIATQVWKLSSCDMCELARNSVLMSGFSHKVKSHWLGPNYTKEGPEGNDIRRTNVPDIRVGYRYETLCQELALITQAVQSEMLETIPEEAGITMSPGPQ

SEQ ID NO: 14486 - protein, 879 aa, Homo sapiens; identical to SEQ ID NO: 14484

SEQ ID NO: 14487 - protein, 798 aa, Homo sapiens
MASEARGGLGAPPLQSARSLPGPAPCLKHFPLDLRTSMDGKCKEIAEELFTRSLAESELRSAPYEFPEESPIEQLEERRQRLERQISQDVKLEPDILLRAKQDFLKTDSDSDLQLYKEQGEGQGDRSLRERDVLEREFQRVTISGEEKCGVPFTDLLDAAKSVVRALFIREKYMALSLQSFCPTTRRYLQQLAEKPLETRTYEQGPDTPVSADAPVHPPALEQHPYEHCEPSTMPGDLGLGLRMVRGVVHVYTRREPDEHCSEVELPYPDLQEFVADVNVLMALIINGPIKSFCYRRLQYLSSKFQMHVLLNEMKELAAQKKVPHRDFYNIRKVDTHIHASSCMNQKHLLRFIKRAMKRHLEEIVHVEQGREQTLREVFESMNLTAYDLSVDTLDVHADRNTFHRFDKFNAKYNPIGESVLREIFIKTDNRVSGKYFAHIIKEVMSDLEESKYQNAELRLSIYGRSRDEWDKLARWAVMHRVHSPNVRWLVQVPRLFDVYRTKGQLANFQEMLENIFLPLFEATVHPASHPELHLFLEHVDGFDSVDDESKPENHVFNLESPLPEAWVEEDNPPYAYYLYYTFANMAMLNHLRRQRGFHTFVLRPHCGEAGPIHHLVSAFMLAENISHGLLLRKAPVLQYLYYLAQIGIAMSPLSNNSLFLSYHRNPLPEYLSRGLMVSLSTDDPLQFHFTKEPLMEEYSIATQVWKLSSCDMCELARNSVLMSGFSHKVKSHWLGPNYTKEGPEGNDIRRTNVPDIRVGYRYETLCQELALITQAVQSEMLETIPEEAGITMSPGPQ

SEQ ID NO: 14488 - protein, 1025 aa, Homo sapiens [sequence omitted]

SEQ ID NO: 14489 - protein, 1220 aa, Homo sapiens [sequence omitted]

SEQ ID NO: 14490 - protein, 1219 aa, Homo sapiens
MLRRVTVAAVCATRRKLCEAGRELAALWGIETRGRCEDSAAARPFPILAMPGRNKAKSTCSCPDLQPNGQDLGENSRVARLGADESEEEGRRGSLSNAGDPEIVKSPSDPKQYRYIKLQNGLQALLISDLSNMEGKTGNTTDDEEEEEVEEEEEDDDEDSGAEIEDDDEEGFDDEDEFDDEHDDDLDTEDNELEELEERAEARKKTTEKQQLQSLFLLWSKLTDRLWFKSTYSKMSSTLLVETRNLYGVVGAESRSAPVQHLAGWQAEEQQGETDTVLSAAALCVGVGSFADPDDLPGLAHFLEHMVFMGSLKYPDENGFDAFLKKHGGSDNASTDCERTVFQFDVQRKYFKEALDRWAQFFIHPLMIRDAIDREVEAVDSEYQLARPSDANRKEMLFGSLARPGHPMGKFFWGNAETLKHEPRKNNIDTHARLREFWMRYYSSHYMTLVVQSKETLDTLEKWVTEIFSQIPNNGLPRPNFGHLTDPFDTPAFNKLYRVVPIRKIHALTITWALPPQQQHYRVKPLHYISWLVGHEGKGSILSFLRKKCWALALFGGNGETGFEQNSTYSVFSISITLTDEGYEHFYEVAYTVFQYLKMLQKLGPEKRIFEEIRKIEDNEFHYQEQTDPVEYVENMCENMQLYPLQDILTGDQLLFEYKPEVIGEALNQLVPQKANLVLLSGANEGKCDLKEKWFGTQYSIEDIENSWAELWNSNFELNPDLHLPAENKYIATDFTLKAFDCPETEYPVKIVNTPQGCLWYKKDNKFKIPKAYIRFHLISPLIQKSAANVVLFDIFVNILTHNLAEPAYEADVAQLEYKLVAGEHGLIIRVKGFNHKLPLLFQLIIDYLAEFNSTPAVFTMITEQLKKTYFNILIKPETLAKDVRLLILEYARWSMIDKYQALMDGLSLESLLSFVKEFKSQLFVEGLVQGNVTSTESMDFLKYVVDKLNFKPLEQEMPVQFQVVELPSGHHLCKVKALNKGDANSEVTVYYQSGTRSLREYTLMELLVMHMEEPCFDFLRTKQTLGYHVYPTCRNTSGILGFSVTVGTQATKYNSEVVDKKIEEFLSSFEEKIENLTEEAFNTQVTALIKLKECEDTHLGEEVDRNWNEVVTQQYLFDRLAHEIEALKSFSKSDLVNWFKAHRGPGSKMLSVHVVGYGKYELEEDGTPSSEDSNSSCEVMQLTYLPTSPLLADCIIPITDIRAFTTTLNLLPYHKIVK

SEQ ID NO: 14491 - protein, 1152 aa, Homo sapiens
MLRRVTVAAVCATRRKLCEAGRELAALWGIETRGRCEDSAAARPFPILAMPGRNKAKSTCSCPDLQPNGQDLGENSRVARLGADESEEEGRRGSLSNAGDPEIVKSPSDPKQYRYIKLQNGLQALLISDLSNMEGKTGNTTDDEEEEEVEEEEEDDDEDSGAEIEDDDEEGFDDEDEFDDEHDDDLDTEDNELEELEERAEARKKTTEKQSAAALCVGVGSFADPDDLPGLAHFLEHMVFMGSLKYPDENGFDAFLKKHGGSDNASTDCERTVFQFDVQRKYFKEALDRWAQFFIHPLMIRDAIDREVEAVDSEYQLARPSDANRKEMLFGSLARPGHPMGKFFWGNAETLKHEPRKNNIDTHARLREFWMRYYSSHYMTLVVQSKETLDTLEKWVTEIFSQIPNNGLPRPNFGHLTDPFDTPAFNKLYRVVPIRKIHALTITWALPPQQQHYRVKPLHYISWLVGHEGKGSILSFLRKKQCWALALFGGNGETGFEQNSTYSVFSISITLTDEGYEHFYEVAYTVFQYLKMLQKLGPEKRIFEEIRKIEDNEFHYQEQTDPVEYVENMCENMQLYPLQDILTGDQLLFEYKPEVIGEALNQLVPQKANLVLLSGANEGKCDLKEKWFGTQYSIEDIENSWAELWNSNFELNPDLHLPAENKYIATDFTLKAFDCPETEYPVKIVNTPQGCLWYKKDNKFKIPKAYIRFHLISPLIQKSAANVVLFDIFVNILTHNLAEPAYEADVAQLEYKLVAGEHGLIIRVKGFNHKLPLLFQLIIDYLAEFNSTPAVFTMITEQLKKTYFNILIKPETLAKDVRLLILEYARWSMIDKYQALMDGLSLESLLSFVKEFKSQLFVEGLVQGNVTSTESMDFLKYVVDKLNFKPLEQEMPVQFQVVELPSGHHLCKVKALNKGDANSEVTVYYQVSTRSLREYTLMELLVMHMEEPCFDFLRTKQTLGYHVYPTCRNTSGILGFSVTVGTQATKYNSEVVDKKIEEFLSSFEEKIENLTEEAFNTQVTALIKLKECEDTHLGEEVDRNWNEVVTQQYLFDRLAHEIEALKSFSKSDLVNWFKAHRGPGSKMLSVHVVGYGKYELEEDGTPSSEDSNSSCEVMQLTYLPTSPLLADCIIPITDIRAFTTTLNLLPYHKIVK

SEQ ID NO: 14492 - protein, 1151 aa, Homo sapiens
MLRRVTVAAVCATRRKLCEAGRELAALWGIETRGRCEDSAAARPFPILAMPGRNKAKSTCSCPDLQPNGQDLGENSRVARLGADESEEEGRRGSLSNAGDPEIVKSPSDPKQYRYIKLQNGLQALLISDLSNMEGKTGNTTDDEEEEEVEEEEEDDDEDSGAEIEDDDEEGFDDEDEFDDEHDDDLDTEDNELEELEERAEARKKTTEKQSAAALCVGVGSFADPDDLPGLAHFLEHMVFMGSLKYPDENGFDAFLKKHGGSDNASTDCERTVFQFDVQRKYFKEALDRWAQFFIHPLMIRDAIDREVEAVDSEYQLARPSDANRKEMLFGSLARPGHPMGKFFWGNAETLKHEPRKNNIDTHARLREFWMRYYSSHYMTLVVQSKETLDTLEKWVTEIFSQIPNNGLPRPNFGHLTDPFDTPAFNKLYRVVPIRKIHALTITWALPPQQQHYRVKPLHYISWLVGHEGKGSILSFLRKKCWALALFGGNGETGFEQNSTYSVFSISITLTDEGYEHFYEVAYTVFQYLKMLQKLGPEKRIFEEIRKIEDNEFHYQEQTDPVEYVENMCENMQLYPLQDILTGDQLLFEYKPEVIGEALNQLVPQKANLVLLSGANEGKCDLKEKWFGTQYSIEDIENSWAELWNSNFELNPDLHLPAENKYIATDFTLKAFDCPETEYPVKIVNTPQGCLWYKKDNKFKIPKAYIRFHLISPLIQKSAANVVLFDIFVNILTHNLAEPAYEADVAQLEYKLVAGEHGLIIRVKGFNHKLPLLFQLIIDYLAEFNSTPAVFTMITEQLKKTYFNILIKPETLAKDVRLLILEYARWSMIDKYQALMDGLSLESLLSFVKEFKSQLFVEGLVQGNVTSTESMDFLKYVVDKLNFKPLEQEMPVQFQVVELPSGHHLCKVKALNKGDANSEVTVYYQSGTRSLREYTLMELLVMHMEEPCFDFLRTKQTLGYHVYPTCRNTSGILGFSVTVGTQATKYNSEVVDKKIEEFLSSFEEKIENLTEEAFNTQVTALIKLKECEDTHLGEEVDRNWNEVVTQQYLFDRLAHEIEALKSFSKSDLVNWFKAHRGPGSKMLSVHVVGYGKYELEEDGTPSSEDSNSSCEVMQLTYLPTSPLLADCIIPITDIRAFTTTLNLLPYHKIVK

SEQ ID NO: 14493 - protein, 130 aa, Homo sapiens
MLRRVTVAAVCATRRKLCEAGRELAALWGIETRGRCEDSAAARPFPILAMPGRNKAKSTCSCPDLQPNGQDLGENSRVARLGADESEEEGRRGSLSNAGDPEIVKSPSDPKQYREMISLCHPGCTAVVPS

SEQ ID NO: 14494 - protein, 330 aa, Homo sapiens
MAAVDSFYLLYREIARSCNCYMEALALVGAWYTARKSITVICDFYSLIRLHFIPRLGSRADLIKQYGRWAVVSGATDGIGKAYAEELASRGLNIILISRNEEKLQVVAKDIADTYKVETDIIVADFSSGREIYLPIREALKDKDVGILVNNVGVFYPYPQYFTQLSEDKLWDIINVNIAAASLMVHVVLPGMVERKKGAIVTISSGSCCKPTPQLAAFSASKAYLDHFSRALQYEYASKGIFVQSLIPFYVATSMTAPSNFLHRCSWLVPSPKVYAHHAVSTLGISKRTTGYWSHSIQFLFAQYMPEWLWVWGANILNRSLRKEALSCTA

SEQ ID NO: 14495 - protein, 330 aa, Homo sapiens; identical to SEQ ID NO: 14494

SEQ ID NO: 14496 - protein, 330 aa, Homo sapiens; identical to SEQ ID NO: 14494

SEQ ID NO: 14497 - protein, 493 aa, Homo sapiens
MRGFGPGLTARRLLPLRLPPRPPGPRLASGQAAGALERAMDELLRRAVPPTPAYELREKTPAPAEGQCADFVSFYGGLAETAQRAELLGRLARGFGVDHGQVAEQSAGVLHLRQQQREAAVLLQAEDRLRYALVPRYRGLFHHISKLDGGVRFLVQLRADLLEAQALKLVEGPDVREMNGVLKGMLSEWFSSGFLNLERVTWHSPCEVLQKISEAEAVHPVKNWMDMKRRVGPYRRCYFFSHCSTPGEPLVVLHVALTGDISSNIQAIVKEHPPSETEEKNKITAAIFYSISLTQQGLQGVELGTFLIKRVVKELQREFPHLGVFSSLSPIPGFTKWLLGLLNSQTKEHGRNELFTDSECKEISEITGGPINETLKLLLSSSEWVQSEKLVRALQTPLMRLCAWYLYGEKHRGYALNPVANFHLQNGAVLWRINWMADVSLRGITGSCGLMANYRYFLEETGPNSTSYLGSKIIKASEQVLSLVAQFQKNSKL

SEQ ID NO: 14498 - protein, 454 aa, Homo sapiens
MDELLRRAVPPTPAYELREKTPAPAEGQCADFVSFYGGLAETAQRAELLGRLARGFGVDHGQVAEQSAGVLHLRQQQREAAVLLQAEDRLRYALVPRYRGLFHHISKLDGGVRFLVQLRADLLEAQALKLVEGPDVREMNGVLKGMLSEWFSSGFLNLERVTWHSPCEVLQKISEAEAVHPVKNWMDMKRRVGPYRRCYFFSHCSTPGEPLVVLHVALTGDISSNIQAIVKEHPPSETEEKNKITAAIFYSISLTQQGLQGVELGTFLIKRVVKELQREFPHLGVFSSLSPIPGFTKWLLGLLNSQTKEHGRNELFTDSECKEISEITGGPINETLKLLLSSSEWVQSEKLVRALQTPLMRLCAWYLYGEKHRGYALNPVANFHLQNGAVLWRINWMADVSLRGITGSCGLMANYRYFLEETGPNSTSYLGSKIIKASEQVLSLVAQFQKNSKL

SEQ ID NO: 14499 - protein, 202 aa, Homo sapiens
MIHGNPSGVDNAVSTWGGALRYHQGKISSLKRSPALQILLTNTKVPRNTRALVAGVRNRLLKFPEIVAPLLTSIDAISLECERVLGEMGEAPAPEQYLVLEELIDMNQHHLNALGVGHASLDQLCQVTRARGLHSKLTGAGGGGCGITLLKPGLEQPEVEATKQALTSCGFDCLETSIGAPGVSIHSATSLDSRVQQALDGL

SEQ ID NO: 14500 - protein, 396 aa, Homo sapiens
MLSEVLLVSAPGKVILHGEHAVVHGKVALAVSLNLRTFLRLQPHSNGKVDLSLPNIGIKRAWDVARLQSLDTSFLEQGDVTTPTSEQVEKLKEVAGLPDDCAVTERLAVLAFLYLYLSICRKQRALPSLDIVVWSELPPGAGLGSSAAYSVCLAAALLTVCEEIPNPLKDGDCVNRWTKEDLELINKWAFQGERMIHGNPSGVDNAVSTWGGALRYHQGKISSLKRSPALQILLTNTKVPRNTRALVAGVRNRLLKFPEIVAPLLTSIDAISLECERVLGEMGEAPAPEQYLVLEELIDMNQHHLNALGVGHASLDQLCQVTRARGLHSKLTGAGGGGCGITLLKPGLEQPEVEATKQALTSCGFDCLETSIGAPGVSIHSATSLDSRVQQALDGL

SEQ ID NO: 14501 - protein, 1068 aa, Homo sapiens
MFTLSQTSRAWFIDRARQAREERLVQKERERAAVVIQAHVRSFLCRSRLQRDIRREIDDFFKADDPESTKRSALCIFKIARKLLFLFRIKEDNERFEKLCRSILSSMDAENEPKVWYVSLACSKDLTLLWIQQIKNILWYCCDFLKQLKPEILQDSRLITLYLTMLVTFTDTSTWKILRGKGESLRPAMNHICANIMGHLNQHGFYSVLQILLTRGLARPRPCLSKGTLTAAFSLALRPVIAAQFSDNLIRPFLIHIMSVPALVTHLSTVTPERLTVLESHDMLRKFIIFLRDQDRCRDVCESLEGCHTLCLMGNLLHLGSLSPRVLEEETDGFVSLLTQTLCYCRKYVSQKKSNLTHWHPVLGWFSQSVDYGLNESMHLITKQLQFLWGVPLIRIFFCDILSKKLLESQEPAHAQPASPQNVLPVKSLLKRAFQKSASVRNILRPVGGKRVDSAEVQKVCNICVLYQTSLTTLTQIRLQILTGLTYLDDLLPKLWAFICELGPHGGLKLFLECLNNDTEESKQLLAMLMLFCDCSRHLITILDDIEVYEEQISFKLEELVTISSFLNSFVFKMIWDGIVENAKGETLELFQSVHGWLMVLYERDCRRRFTPEDHWLRKDLKPSVLFQELDRDRKRAQLILQYIPHVIPHKNRVLLFRTMVTKEKEKLGLVETSSASPHVTHITIRRSRMLEDGYEQLRQLSQHAMKGVIRVKFVNDLGVDEAGIDQDGVFKEFLEEIIKRVFDPALNLFKTTSGDERLYPSPTSYIHENYLQLFEFVGKMLGKAVYEGIVVDVPFASFFLSQLLGHHHSVFYSSVDELPSLDSEFYKNLTSIKRYDGDITDLGLTLSYDEDVMGQLVCHELIPGGKTIPVTNENKISYIHLMAHFRMHTQIKNQTAALISGFRSIIKPEWIRMFSTPELQRLISGDNAEIDLEDLKKHTVYYGGFHGSHRVIIWLWDILASDFTPDERAMFLKFVTSCSRPPLLGFAYLKPPFSIRCVEVSDDQDTGDTLGSVLRGFFTIRKREPGGRLPTSSTCFNLLKLPNYSKKSVLREKLRYAISMNTGFELS

SEQ ID NO: 14502 - protein, 1072 aa, Homo sapiens
MITWHFCDTGRSSAWFIDRARQAREERLVQKERERAAVVIQAHVRSFLCRSRLQRDIRREIDDFFKADDPESTKRSALCIFKIARKLLFLFRIKEDNERFEKLCRSILSSMDAENEPKVWYVSLACSKDLTLLWIQQIKNILWYCCDFLKQLKPEILQDSRLITLYLTMLVTFTDTSTWKILRGKGESLRPAMNHICANIMGHLNQHGFYSVLQILLTRGLARPRPCLSKGTLTAAFSLALRPVIAAQFSDNLIRPFLIHIMSVPALVTHLSTVTPERLTVLESHDMLRKFIIFLRDQDRCRDVCESLEGCHTLCLMGNLLHLGSLSPRVLEEETDGFVSLLTQTLCYCRKYVSQKKSNLTHWHPVLGWFSQSVDYGLNESMHLITKQLQFLWGVPLIRIFFCDILSKKLLESQEPAHAQPASPQNVLPVKSLLKRAFQKSASVRNILRPVGGKRVDSAEVQKVCNICVLYQTSLTTLTQIRLQILTGLTYLDDLLPKLWAFICELGPHGGLKLFLECLNNDTEESKQLLAMLMLFCDCSRHLITILDDIEVYEEQISFKLEELVTISSFLNSFVFKMIWDGIVENAKGETLELFQSVHGWLMVLYERDCRRRFTPEDHWLRKDLKPSVLFQELDRDRKRAQLILQYIPHVIPHKNRVLLFRTMVTKEKEKLGLVETSSASPHVTHITIRRSRMLEDGYEQLRQLSQHAMKGVIRVKFVNDLGVDEAGIDQDGVFKEFLEEIIKRVFDPALNLFKTTSGDERLYPSPTSYIHENYLQLFEFVGKMLGKAVYEGIVVDVPFASFFLSQLLGHHHSVFYSSVDELPSLDSEFYKNLTSIKRYDGDITDLGLTLSYDEDVMGQLVCHELIPGGKTIPVTNENKISYIHLMAHFRMHTQIKNQTAALISGFRSIIKPEWIRMFSTPELQRLISGDNAEIDLEDLKKHTVYYGGFHGSHRVIIWLWDILASDFTPDERAMFLKFVTSCSRPPLLGFAYLKPPFSIRCVEVSDDQDTGDTLGSVLRGFFTIRKREPGGRLPTSSTCFNLLKLPNYSKKSVLREKLRYAISMNTGFELS

SEQ ID NO: 14503 - protein, 545 aa, Homo sapiens [sequence omitted]

SEQ ID NO: 14504 - protein, 250 aa, Homo sapiens [sequence omitted]

SEQ ID NO: 14505 - protein, 149 aa, Homo sapiens
MAPAGNNKFSSKAMAETFYLSNIVPQDFDNNSGYWNRIEMYCRELTERFEDVWVVSGPLTLPQTRGDGKKIVSYQVIGEDNVAVPSHLYKDHAGCCVESPLGTRTSEEATARIQERDDGGSDQRSGLVELGIYFEGRANRISGRIGCRV

SEQ ID NO: 14506 - protein, 368 aa, Homo sapiens
MAIKSIASRLRGSRRFLSGFVAGAVVGAAGAGLAALQFFRSQGAEGALTGKQPDGSAEKAVLEQFGFPLTGTEARCYTNHALSYDQAKRVPRWVLEHISKSKIMGDADRKHCKFKPDPNIPPTFSAFNEDYVGSGWSRGHMAPAGNNKFSSKAMAETFYLSNIVPQDFDNNSGYWNRIEMYCRELTERFEDVWVVSGPLTLPQTRGDGKKIVSYQVIGEDNVAVPSHLYKVILARRSSVSTEPLALGAFVVPNEAIGFQPQLTEFQVSLQDLEKLSGLVFFPHLDRTSDIRNICSVDTCKLLDFQEFTLYLSTRKIEGARSVLRLEKIMENLKNAEIEPDDYFMSRYEKKLEELKAKEQSGTQIRKPS

SEQ ID NO: 14507 - protein, 149 aa, Homo sapiens; identical to SEQ ID NO: 14505

SEQ ID NO: 14508 - protein, 368 aa, Homo sapiens; identical to SEQ ID NO: 14506

SEQ ID NO: 14509 - protein, 174 aa, Homo sapiens
MVTLRKRTLKVLTFLVLFIFLTSFLNYSHAMVATTWFPKKMVLELLENLKRLIKHRPCTCTHCIRQHGLSAWFDERFNQIVQLLLTAQNALLEDNTYQWWLRLQQEKKPNIINNTIKEFRAVPGNVDPMLEKRSVGCWHCAVVGNSGNLRQLSYRPAIESQFYAQDEQGTHGRV

SEQ ID NO: 14510 - protein, 1086 aa, Homo sapiens
MERLEEVNKEIDTTSTYQLKDTELIYGAKHAWRNASRCVGRIQWSKLQVFDARDCTTAHGMFNYICNHVKYATNKGNLRSAITIFPQRTDGKHDFRVWNSQLIRYAGYKQPDGSTLGDPANVQFTEICIQQGWKPPRGRFDVLPLLLQANGNDPELFQIPPELVLEVPIRHPKFEWFKDLGLKWYGLPAVSNMLLEIGGLEFSACPFSGWYMGTEIGVRDYCDNSRYNILEEVAKKMNLDMRKTSSLWKDQALVEINIAVLYSFQSDKVTIVDHHSATESFIKHMENEYRCRGGCPADWVWIVPPMSGSITPVFHQEMLNYRLTPSFEYQPDPWNTHVWKGTNGTPTKRRAIGFKKLAEAVKFSAKLMGQAMAKRVKATILYATETGKSQAYAKTLCEIFKHAFDAKVMSMEEYDIVHLEHETLVLVVTSTFGNGDPPENGEKFGCALMEMRHPNSVQEERKYPEPLRFFPRKGPPLPNGDTEVHGLAAARDSQHRSYKVRFNSVSSYSDSQKSSGDGPDLRDNFESAGPLANVRFSVFGLGSRAYPHFCAFGHAVDTLLEELGGERILKMREGDELCGQEEAFRTWAKKVFKAACDVFCVGDDVNIEKANNSLISNDRSWKRNKFRLTFVAEAPELTQGLSNVHKKRVSAARLLSRQNLQSPKSSRSTIFVRLHTNGSQELQYQPGDHLGVFPGNHEDLVNALIERLEDAPPVNQMVKVELLEERNTALGVISNWTDELRLPPCTIFQAFKYYLDITTPPTPLQLQQFASLATSEKEKQRLLVLSKGLQEYEEWKWGKNPTIVEVLEEFPSIQMPATLLLTQLSLLQPRYYSISSSPDMYPDEVHLTVAIVSYRTRDGEGPIHHGVCSSWLNRIQADELVPCFVRGAPSFHLPRNPQVPCILVGPGTGIAPFRSFWQQRQFDIQHKGMNPCPMVLVFGCRQSKIDHIYREETLQAKNKGVFRELYTAYSREPDKPKKYVQDILQEQLAESVYRALKEQGGHIYVCGDVTMAADVLKAIQRIMTQQGKLSAEDAGVFISRMRDDNRYHEDIFGVTLRTYEVTNRLRSESIAFIEESKKDTDEVFSS

SEQ ID NO: 14511 - protein, 67 aa, Homo sapiens
HPNSVQEERKYPEPLRFFPRKGPPLPNGDTEVHGLAAARDSQHRSYKVRFNSVSSYSDSQKSSGDGP

SEQ ID NO: 14512 - protein, 1052 aa, Homo sapiens
MERLEEVNKEIDTTSTYQLKDTELIYGAKHAWRNASRCVGRIQWSKLQVFDARDCTTAHGMFNYICNHVKYATNKGNLRSAITIFPQRTDGKHDFRVWNSQLIRYAGYKQPDGSTLGDPANVQFTEICIQQGWKPPRGRFDVLPLLLQANGNDPELFQIPPELVLEVPIRHPKFEWFKDLGLKWYGLPAVSNMLLEIGGLEFSACPFSGWYMGTEIGVRDYCDNSRYNILEEVAKKMNLDMRKTSSLWKDQALVEINIAVLYSFQSDKVTIVDHHSATESFIKHMENEYRCRGGCPADWVWIVPPMSGSITPVFHQEMLNYRLTPSFEYQPDPWNTHVWKGTNGTPTKRRAIGFKKLAEAVKFSAKLMGQAMAKRVKATILYATETGKSQAYAKTLCEIFKHAFDAKVMSMEEYDIVHLEHETLVLVVTSTFGNGDPPENGEKFGCALMEMRHPNSVQEERKSYKVRFNSVSSYSDSQKSSGDGPDLRDNFESAGPLANVRFSVFGLGSRAYPHFCAFGHAVDTLLEELGGERILKMREGDELCGQEEAFRTWAKKVFKAACDVFCVGDDVNIEKANNSLISNDRSWKRNKFRLTFVAEAPELTQGLSNVHKKRVSAARLLSRQNLQSPKSSRSTIFVRLHTNGSQELQYQPGDHLGVFPGNHEDLVNALIERLEDAPPVNQMVKVELLEERNTALGVISNWTDELRLPPCTIFQAFKYYLDITTPPTPLQLQQFASLATSEKEKQRLLVLSKGLQEYEEWKWGKNPTIVEVLEEFPSIQMPATLLLTQLSLLQPRYYSISSSPDMYPDEVHLTVAIVSYRTRDGEGPIHHGVCSSWLNRIQADELVPCFVRGAPSFHLPRNPQVPCILVGPGTGIAPFRSFWQQRQFDIQHKGMNPCPMVLVFGCRQSKIDHIYREETLQAKNKGVFRELYTAYSREPDKPKKYVQDILQEQLAESVYRALKEQGGHIYVCGDVTMAADVLKAIQRIMTQQGKLSAEDAGVFISRMRDDNRYHEDIFGVTLRTYEVTNRLRSESIAFIEESKKDTDEVFSS

SEQ ID NO: 14513 - protein, 1434 aa, Homo sapiens
MEDHMFGVQQIQPNVISVRLFKRKVGGLGFLVKERVSKPPVIISDLIRGGAAEQSGLIQAGDIILAVNGRPLVDLSYDSALEVLRGIASETHVVLILRGPEGFTTHLETTFTGDGTPKTIRVTQPLGPPTKAVDLSHQPPAGKEQPLAVDGASGPGNGPQHAYDDGQEAGSLPHANGLAPRPPGQDPAKKATRVSLQGRGENNELLKEIEPVLSLLTSGSRGVKGGAPAKAEMKDMGIQVDRDLDGKSHKPLPLGVENDRVFNDLWGKGNVPVVLNNPYSEKEQPPTSGKQSPTKNGSPSKCPRFLKVKNWETEVVLTDTLHLKSTLETGCTEYICMGSIMHPSQHARRPEDVRTKGQLFPLAKEFIDQYYSSIKRFGSKAHMERLEEVNKEIDTTSTYQLKDTELIYGAKHAWRNASRCVGRIQWSKLQVFDARDCTTAHGMFNYICNHVKYATNKGNLRSAITIFPQRTDGKHDFRVWNSQLIRYAGYKQPDGSTLGDPANVQFTEICIQQGWKPPRGRFDVLPLLLQANGNDPELFQIPPELVLEVPIRHPKFEWFKDLGLKWYGLPAVSNMLLEIGGLEFSACPFSGWYMGTEIGVRDYCDNSRYNILEEVAKKMNLDMRKTSSLWKDQALVEINIAVLYSFQSDKVTIVDHHSATESFIKHMENEYRCRGGCPADWVWIVPPMSGSITPVFHQEMLNYRLTPSFEYQPDPWNTHVWKGTNGTPTKRRAIGFKKLAEAVKFSAKLMGQAMAKRVKATILYATETGKSQAYAKTLCEIFKHAFDAKVMSMEEYDIVHLEHETLVLVVTSTFGNGDPPENGEKFGCALMEMRHPNSVQEERKSYKVRFNSVSSYSDSQKSSGDGPDLRDNFESAGPLANVRFSVFGLGSRAYPHFCAFGHAVDTLLEELGGERILKMREGDELCGQEEAFRTWAKKVFKAACDVFCVGDDVNIEKANNSLISNDRSWKRNKFRLTFVAEAPELTQGLSNVHKKRVSAARLLSRQNLQSPKSSRSTIFVRLHTNGSQELQYQPGDHLGVFPGNHEDLVNALIERLEDAPPVNQMVKVELLEERNTALGVISNWTDELRLPPCTIFQAFKYYLDITTPPTPLQLQQFASLATSEKEKQRLLVLSKGLQEYEEWKWGKNPTIVEVLEEFPSIQMPATLLLTQLSLLQPRYYSISSSPDMYPDEVHLTVAIVSYRTRDGEGPIHHGVCSSWLNRIQADELVPCFVRGAPSFHLPRNPQVPCILVGPGTGIAPFRSFWQQRQFDIQHKGMNPCPMVLVFGCRQSKIDHIYREETLQAKNKGVFRELYTAYSREPDKPKKYVQDILQEQLAESVYRALKEQGGHIYVCGDVTMAADVLKAIQRIMTQQGKLSAEDAGVFISRMRDDNRYHEDIFGVTLRTYEVTNRLRSESIAFIEESKKDTDEVFSS

SEQ ID NO: 14514 - protein, 327 aa, Homo sapiens [sequence omitted]

SEQ ID NO: 14515 - protein, 399 aa, Homo sapiens
  VARIANT (1)...(399): Xaa = Any Amino Acid
MMDLRNTPAKSLDKFIEDYLLPDTCFRMQINHAIDIICGFLKERCFRGSSYPVCVSKVVKGGSSGKGTTLRGRSDADLVVFLSPLTTFQDQLNRRGEFIQEIRRQLEACQRERAFSVKFEVQAPRWGNPRALSFVLSSLQLGEGVEFDVLPAFDALGQLTGGYKPNPQIYVKLIEECTDLQKEGEFSTCFTELQRDFLKQRPTKLKSLIRLVKHWYQNCKKKLGKLPPQYALELLTVYAWERGSMKTHFNTAQGFRTVLELVINYQQLCIYWTKYYDFKNPIIEKYLRRQLTKPRPVILDPADPTGNLGGGDPKGWRQLAQEAEAWLNYPCFKNWDGSPVSSWILLKATVQTMRPTIPGRIRNMVTLEHMSTLISLIDPAHSRQHPPHRQKRTGPAPSX

SEQ ID NO: 14516 - protein, 414 aa, Homo sapiens [sequence omitted]

SEQ ID NO: 14517 - protein, 364 aa, Homo sapiens
MMDLRNTPAKSLDKFIEDYLLPDTCFRMQINHAIDIICGFLKERCFRGSSYPVCVSKVVKGGSSGKGTTLRGRSDADLVVFLSPLTTFQDQLNRRGEFIQEIRRQLEACQRERAFSVKFEVQAPRWGNPRALSFVLSSLQLGEGVEFDVLPAFDALGQLTGGYKPNPQIYVKLIEECTDLQKEGEFSTCFTELQRDFLKQRPTKLKSLIRLVKHWYQNCKKKLGKLPPQYALELLTVYAWERGSMKTHFNTAQGFRTVLELVINYQQLCIYWTKYYDFKNPIIEKYLRRQLTKPRPVILDPADPTGNLGGGDPKGWRQLAQEAEAWLNYPCFKNWDGSPVSSWILLVRPPASSLPFIPAPLHEA

SEQ ID NO: 14518 - protein, 459 aa, Homo sapiens
MMDLRNTPAKSLDKFIEDYLLPDTCFRMQINHAIDIICGFLKERCFRGSSYPVCVSKVVKGGSSGKGTTLRGRSDADLVVFLSPLTTFQDQLNRRGEFIQEIRRQLEACQRERAFSVKFEVQAPRWGNPRALSFVLSSLQLGEGVEFDVLPAFDALGQLTGGYKPNPQIYVKLIEECTDLQKEGEFSTCFTELQRDFLKQRPTKLKSLIRLVKHWYQNCKKKLGKLPPQYALELLTVYAWERGSMKTHFNTAQGFRTVLELVINYQQLCIYWTKYYDFKNPIIEKYLRRQLTKPRPVILDPADPTGNLGGGDPKGWRQLAQEAEAWLNYPCFKNWDGSPVSSWILLLKATVQTMRPTIPGRIRNMVTLEHMSTLISLIDPAHSRQHPPHRQKRTGPAPSSECQCILGERAPVLSGPVPSFSGGTLDPEKTKLLSELVYNPGQNPGLLTPGLLCPLSYHR

SEQ ID NO: 14519 - protein, 215 aa, Homo sapiens
MKTHFNTAQGFRTVLELVINYQQLCIYWTKYYDFKNPIIEKYLRRQLTKPRPVILDPADPTGNLGGGDPKGWRQLAQEAEAWLNYPCFKNWDGSPVSSWILLLKATVQTMRPTIPGRIRNMVTLEHMSTLISLIDPAHSRQHPPHRQKRTGPAPSSECQCILGERAPVLSGPVPSFSGGTLDPEKTKLLSELVYNPGQNPGLLTPGLLCPLSYHR

SEQ ID NO: 14520 - protein, 328 aa, Homo sapiens
MMSGEPLHVKTPIRDSMALSKMAGTSVYLKMDSAQPSGSFKIRGIGHFCKRWAKQGCAHFVCSSAGNAGMAAAYAARQLGVPATIVVPSTTPALTIERLKNEGATVKVVGELLDEAFELAKALAKNNPGWVYIPPFDDPLIWEGHASIVKELKETLWEKPGAIALSVGGGGLLCGVVQGLQEVGWGDVPVIAMETFGAHSFHAATTAGKLVSLPKITSVAKALGVKTVGAQALKLFQEHPIFSEVISDQEAVAAIEKFVDDEKILVEPACGAALAAVYSHVIQKLQLEGNLRTPLPSLVVIVCGGSNISLAQLRALKEQLGMTNRLPK

SEQ ID NO: 14521 - protein, 124 aa, Homo sapiens
MMSGEPLHVKTPIRDSMALSKMAGTSVYLKMDSAQPSGSFKIRGIGHFCKRWAKQGCAHFVCSSAGNAGMAAVYSHVIQKLQLEGNLRTPLPSLVVIVCGGSNISLAQLRALKEQLGMTNRLPK

SEQ ID NO: 14522 - protein, 422 aa, Homo sapiens [sequence omitted]

SEQ ID NO: 14523 - protein, 1087 aa, Homo sapiens [sequence omitted]

SEQ ID NO: 14524 - protein, 1087 aa, Homo sapiens [sequence omitted]

SEQ ID NO: 14525 - protein, 329 aa, Homo sapiens
MDGPVAEHAKQEPFHVVTPLLESWALSQVAGMPVFLKCENVQPSGSFKIRGIGHFCQEMAKKGCRHLVCSSGGNAGIAAAYAARKLGIPATIVLPESTSLQVVQRLQGEGAEVQLTGKVWDEANLRAQELAKRDGWENVPPFDHPLIWKGHASLVQELKAVLRTPPGALVLAVGGGGLLAGVVAGLLEVGWQHVPIIAMETHGAHCFNAAITAGKLVTLPDITSVAKSLGAKTVAARALECMQVCKIHSEVVEDTEAVSAVQQLLDDERMLVEPACGAALAAIYSGLLRRLQAEGCLPPSLTSVVVIVCGGNNINSRELQALKTHLGQV

SEQ ID NO: 14526 - protein, 329 aa, Homo sapiens; identical to SEQ ID NO: 14525

SEQ ID NO: 14527 - protein, 299 aa, Homo sapiens
MDGPVAEHAKQEPFHVVTPLLESWALSQMAKKGCRHLVCSSGGNAGIAAAYAARKLGIPATIVLPESTSLQVVQRLQGEGAEVQLTGKVWDEANLRAQELAKRDGWENVPPFDHPLIWKGHASLVQELKAVLRTPPGALVLAVGGGGLLAGVVAGLLEVGWQHVPIIAMETHGAHCFNAAITAGKLVTLPDITSVAKSLGAKTVAARALECMQVCKIHSEVVEDTEAVSAVQQLLDDERMLVEPACGAALAAIYSGLLRRLQAEGCLPPSLTSVVVIVCGGNNINSRELQALKTHLGQV

SEQ ID NO: 14528 - protein, 169 aa, Homo sapiens
MGWSQDLFRALWRSLSREVKEHVGTDQFGNKYYYIPQYKNWRGQTIREKRIVEAANKKEVDYEAGDIPTEWEAWIRRTRKTPPTMEEILKNEKHREEIKIKSQDFYEKEKLLSKETSEELLPPPVQTQIKGHASAPYFGKEEPSVAPSSTGKTFQPGSWMPRDGKSHNQ

SEQ ID NO: 14529 - protein, 2511 aa, Homo sapiens [sequence omitted]

SEQ ID NO: 14530 - protein, 2511 aa, Homo sapiens [sequence omitted]

SEQ ID NO: 14531 - protein, 555 aa, Homo sapiens [sequence omitted]

SEQ ID NO: 14532 - protein, 555 aa, Homo sapiens
MAAAAWLQVLPVILLLLGAHPSPLSFFSAGPATVAAADRSKWHIPIPSGKNYFSFGKILFRNTTIFLKFDGEPCDLSLNITWYLKSADCYNEIYNFKAEEVELYLEKLKEKRGLSGKYQTSSKLFQNCSELFKTQTFSGDFMHRLPLLGEKQEAKENGTNLTFIGDKTAMHEPLQTWQDAPYIFIVHIGISSSKESSKENSLSNLFTMTVEVKGPYEYLTLEDYPLMIFFMVMCIVYVLFGVLWLAWSACYWRDLLRIQFWIGAVIFLGMLEKAVFYAEFQNIRYKGESVQGALILAELLSAVKRSLARTLVIIVSLGYGIVKPRLGVTLHKVVVAGALYLLFSGMEGVLRVTGAQTDLASLAFIPLAFLDTALCWWIFISLTQTMKLLKLRRNIVKLSLYRHFTNTLILAVAASIVFIIWTTMKFRIVTCQSDWRELWVDDAIWRLLFSMILFVIMVLWRPSANNQRFAFSPLSEEEEEDEQKEPMLKESFEGMKMRSTKQEPNGNSKVNKAQEDDLKWVEENVPSSVTDVALPALLDSDEERMITHFERSKME

SEQ ID NO: 14533 - protein, 181 aa, Homo sapiens
MAAAAWLQVLPVILLLLGAHPSPLSFFSAGPATVAAADRSKWHIPIPSGKNYFSFGKILFRNTTIFLKFDGEPCDLSLNITWYLKSADCYNEIYNFKAEEVELYLEKLKEKRGLSGKYQTSSKLFQNCSELFKTQTFSGDFMHRLPLLGEKQEAKENGTNLTFIGDKTIQMPFLKKHFLDC

SEQ ID NO: 14534 - protein, 150 aa, Homo sapiens
GTTTRDFTQLNELQCRFPRRLVVLGFPCNQFGHQENCQNEEILNSLKYVRPGGGYQPTFTLVQKCEVNGQNEHPVFAYLKDKLPYPYDDPFSLMTDPKLIIWSPVRRSDVAWNFEKFLIGPEGEPFRRYSRTFPTINIEPDIKRLLKVAI

SEQ ID NO: 14535 - protein, 150 aa, Homo sapiens; identical to SEQ ID NO: 14534

SEQ ID NO: 14536 - protein, 97 aa, Homo sapiens
MVCVFQYDFVCGKFHGTAKAENGKLVINENPITIFQERDPSKIRWGNAGAEYIMESTGVFTTMEKAGTHLQRGAKRVIISAPSADTPMSVMGMKHEK

SEQ ID NO: 14537 - protein, 222 aa, Homo sapiens
MAFESGALHLPAPQSAALPRTPLTWGPQALPPPLFPRTPSPQRHSPGVSAFSLSLGRCEPRQCLSSYLPLVPKQTPQLPSHLRWLPHGNPEHPPPQGLGAALRPLQFRTSSWSRPVRDSSSSAVGLLCTQNKRGKLPCPPLPIHDITSPTRDRKQTQKQQGTPSPRATGGCQATSSAELRVSWNPAALRARGRGQGLCAAAGSTGPKHLAEGTLGRGCKKML

SEQ ID NO: 14538 - protein, 222 aa, Homo sapiens; identical to SEQ ID NO: 14537

SEQ ID NO: 14539 - protein, 529 aa, Homo sapiens
MTSSRLWFSLLLAAAFAGRATALWPWPQNFQTSDQRYVLYPNNFQFQYDVSSAAQPGCSVLDEAFQRYRDLLFGSGSWPRPYLTGKRHTLEKNVLVVSVVTPGCNQLPTLESVENYTLTINDDQCLLLSETVWGALRGLETFSQLVWKSAEGTFFINKTEIEDFPRFPHRGLLLDTSRHYLPLSSILDTLDVMAYNKLNVFHWHLVDDPSFPYESFTFPELMRKGSYNPVTHIYTAQDVKEVIEYARLRGIRVLAEFDTPGHTLSWGPGIPGLLTPCYSGSEPSGTFGPVNPSLNNTYEFMSTFFLEVSSVFPDFYLHLGGDEVDFTCWKSNPEIQDFMRKKGFGEDFKQLESFYIQTLLDIVSSYGKGYVVWQEVFDNKVKIQPDTIIQVWREDIPVNYMKELELVTKAGFRALLSAPWYLNRISYGPDWKDFYVVEPLAFEGTPEQKALVIGGEACMWGEYVDNTNLVPRLWPRAGAVAERLWSNKLTSDLTFAYERLSHFRCELLRRGVQAQPLNVGFCEQEFEQT

SEQ ID NO: 14540 - protein, 359 aa, Homo sapiens
MLSAASRVVSRAAVHCALRSPPPEARALAMSRPPPPRVASVLGTMEMGRRMDAPASAAAVRAFLERGHTELDTAFMYSDGQSETILGGLGLGLGGGDCRVKIATKANPWDGKSLKPDSVRSQLETSLKRLQCPQVDLFYLHAPDHGTPVEETLHACQRLHQEGKFVELGLSNYASWEVAEICTLCKSNGWILPTVYQGMYNATTRQVETELFPCLRHFGLRFYAYNPLAGGLLTGKYKYEDKDGKQPVGRFFGNSWAETYRNRFWKEHHFEAIALVEKALQAAYGASAPSVTSAALRWMYHHSQLQGAHGDAVILGMSSLEQLEQNLAATEEGPLEPAVVDAFNQAWHLVAHECPNYFR

SEQ ID NO: 14541 - protein, 318 aa, Homo sapiens
MPKRGKKGAVAEDGDELRTEPEAKKSKTAAKKNDKEAAGEGPALYEDPPDQKTSPSGKPATLKICSWNVDGLRAWIKKKGLDWVKEEAPDILCLQETKCSENKLPAELQELPGLSHQYWSAPSDKEGYSGVGLLSRQCPLKVSYGIGDEEHDQEGRVIVAEFDSFVLVTAYVPNAGRGLVRLEYRQRWDEAFRKFLKGLASRKPLVLCGDLNVAHEEIDLRNPKGNKKNAGFTPQERQGFGELLQAVPLADSFRHLYPNTPYAYTFWTYMMNARSKNVGWRLDYFLLSHSLLPALCDSKIRSKALGSDHCPITLYLAL

SEQ ID NO: 14542 - protein, 318 aa, Homo sapiens; identical to SEQ ID NO: 14541

SEQ ID NO: 14543 - protein, 318 aa, Homo sapiens; identical to SEQ ID NO: 14541

SEQ ID NO: 14544 - protein, 318 aa, Homo sapiens; identical to SEQ ID NO: 14541

SEQ ID NO: 14545 - protein, 318 aa, Homo sapiens; identical to SEQ ID NO: 14541

SEQ ID NO: 14546 - protein, 318 aa, Homo sapiens; identical to SEQ ID NO: 14541

SEQ ID NO: 14547 - protein, 289 aa, Homo sapiens
MENGYTYEDYKNTAEWLLSHTKHRPQVAIICGSGLGGLTDKLTQAQIFDYGEIPNFPRSTVPGHAGRLVFGFLNGRACVMMQGRFHMYEGYPLWKVTFPVRVFHLLGVDTLVVTNAAGGLNPKFEVGDIMLIRDHINLPGFSGQNPLRGPNDERFGDRFPAMSDAYDRTMRQRALSTWKQMGEQRELQEGTYVMVAGPSFETVAECRVLQKLGADAVGMSTVPEVIVARHCGLRVFGFSLITNKVIMDYESLEKANHEEVLAAGKQAAQKLEQFVSILMASIPLPDKAS

SEQ ID NO: 14548 - protein, 289 aa, Homo sapiens; identical to SEQ ID NO: 14547

SEQ ID NO: 14549 - protein, 147 aa, Homo sapiens
MVMGLGVLLLVFVLGLGLTPPTLAQDNSRYTHFLTQHYDAKPQGRDDRYCESIMRRRGLTSPCKDINTFIHGNKRSIKAICENKNGNPHRENLRISKSSFQVTTCKLHGGSPWPPCQYRATAGFRNVVVACENGLPVHLDQSIFRRP

SEQ ID NO: 14550 - protein, 310 aa, Homo sapiens
RAAWQLGAEASFPPSALRGGSALAAAARWGPAEEGARIPGSFFAWAAPAAPGAGAAAAPAPRADPGGRGLLGEAGRGPNYAEAGTPTLHTSPRPHLRPCTHTHTRTPTPPRCKAGFKRTSLRFLPAPHHRTREEEAGEKQNFFPLSCPFLRTCSEAEEPVLEEMVMGLGVLLLVFVLGLGLTPPTLAQDNSRYTHFLTQHYDAKPQGRDDRYCESIMRRRGLTSPCKDINTFIHGNKRSIKAICENKNGNPHRENLRISKSSFQVTTCKLHGGSPWPPCQYRATAGFRNVVVACENGLPVHLDQSIFRRP

SEQ ID NO: 14551 - protein, 147 aa, Homo sapiens; identical to SEQ ID NO: 14549

SEQ ID NO: 14552 - protein, 160 aa, Homo sapiens
MVPKLFTSQICLLLLLGLMGVEGSLHARPPQFTRAQWFAIQHISLNPPRCTIAMRAINNYRWRCKNQNTFLRTTFANVVNVCGNQSIRCPHNRTLNNCHRSRFRVPLLHCDLINPGAQNISNCRYADRPGRRFYVVACDNRDPRDSPRYPVVPVHLDTTI

SEQ ID NO: 14553 - protein, 583 aa, Homo sapiens
MAARRRRSTGGGRARALNESKRVNNGNTAPEDSSPAKKTRRCQRQESKKMPVAGGKANKDRTEDKQDGMPGRSWASKRVSESVKALLLKGKAPVDPECTAKVGKAHVYCEGNDVYDVMLNQTNLQFNNNKYYLIQLLEDDAQRNFSVWMRWGRVGKMGQHSLVACSGNLNKAKEIFQKKFLDKTKNNWEDREKFEKVPGKYDMLQMDYATNTQDEEETKKEESLKSPLKPESQLDLRVQELIKLICNVQAMEEMMMEMKYNTKKAPLGKLTVAQIKAGYQSLKKIEDCIRAGQHGRALMEACNEFYTRIPHDFGLRTPPLIRTQKELSEKIQLLEALGDIEIAIKLVKTELQSPEHPLDQHYRNLHCALRPLDHESYEFKVISQYLQSTHAPTHSDYTMTLLDLFEVEKDGEKEAFREDLHNRMLLWHGSRMSNWVGILSHGLRIAPPEAPITGYMFGKGIYFADMSSKSANYCFASRLKNTGLLLLSEVALGQCNELLEANPKAEGLLQGKHSTKGLGKMAPSSAHFVTLNGSTVPLGPASDTGILNPDGYTLNYNEYIVYNPNQVRMRYLLKVQFNFLQLW

SEQ ID NO: 14554 - protein, 570 aa, Homo sapiens
MAARRRRSTGGGRARALNESKRVNNGNTAPEDSSPAKKTRRCQRQESKKMPVAGGKANKDRTEDKQDESVKALLLKGKAPVDPECTAKVGKAHVYCEGNDVYDVMLNQTNLQFNNNKYYLIQLLEDDAQRNFSVWMRWGRVGKMGQHSLVACSGNLNKAKEIFQKKFLDKTKNNWEDREKFEKVPGKYDMLQMDYATNTQDEEETKKEESLKSPLKPESQLDLRVQELIKLICNVQAMEEMMMEMKYNTKKAPLGKLTVAQIKAGYQSLKKIEDCIRAGQHGRALMEACNEFYTRIPHDFGLRTPPLIRTQKELSEKIQLLEALGDIEIAIKLVKTELQSPEHPLDQHYRNLHCALRPLDHESYEFKVISQYLQSTHAPTHSDYTMTLLDLFEVEKDGEKEAFREDLHNRMLLWHGSRMSNWVGILSHGLRIAPPEAPITGYMFGKGIYFADMSSKSANYCFASRLKNTGLLLLSEVALGQCNELLEANPKAEGLLQGKHSTKGLGKMAPSSAHFVTLNGSTVPLGPASDTGILNPDGYTLNYNEYIVYNPNQVRMRYLLKVQFNFLQLW

SEQ ID NO: 14555 - protein, 469 aa, Homo sapiens
MAFPAGFGWAAATAAYQVEGGWDADGKGPCVWDTFTHQGGERVFKNQTGDVACGSYTLWEEDLKCIKQLGLTHYRFSLSWSRLLPDGTTGFINQKGIDYYNKIIDDLLKNGVTPIVTLYHFDLPQTLEDQGGWLSEAIIESFDKYAQFCFSTFGDRVKQWITINEANVLSVMSYDLGMFPPGIPHFGTGGYQAAHNLIKAHARSWHSYDSLFRKKQKGMVSLSLFAVWLEPADPNSVSDQEAAKRAITFHLDLFAKPIFIDGDYPEVVKSQIASMSQKQGYPSSRLPEFTEEEKKMIKGTADFFAVQYYTTRLIKYQENKKGELGILQDAEIEFFPDPSWKNVDWIYVVPWGVCKLLKYIKDTYNNPVIYITENGFPQSDPAPLDDTQRWEYFRQTFQELFKAIQLDKVNLQVYCAWSLLDNFEWNQGYSSRFGLFHVDFEDPARPRVPYTSAKEYAKIIRNNGLEAHL

SEQ ID NO: 14556 - protein, 298 aa, Homo sapiens
MSYDLGMFPPGIPHFGTGGYQAAHNLIKAHARSWHSYDSLFRKKQKGMVSLSLFAVWLEPADPNSVSDQEAAKRAITFHLDLFAKPIFIDGDYPEVVKSQIASMSQKQGYPSSRLPEFTEEEKKMIKGTADFFAVQYYTTRLIKYQENKKGELGILQDAEIEFFPDPSWKNVDWIYVVPWGVCKLLKYIKDTYNNPVIYITENGFPQSDPAPLDDTQRWEYFRQTFQELFKAIQLDKVNLQVYCAWSLLDNFEWNQGYSSRFGLFHVDFEDPARPRVPYTSAKEYAKIIRNNGLEAHL

SEQ ID NO: 14557 - protein, 380 aa, Homo sapiens [sequence omitted]

SEQ ID NO: 14558 - protein, 381 aa, Homo sapiens
MGITLIWCLALVLIKWITSKRRGAISYDSSDQTALYIRMLGDVRVRSRAGFESERRGSHPYIDFRIFHSQSEIEVSVSARNIRRLLSFQRYLRSSRFFRGTAVSNSLNILDDDYNGQAKCMLEKVGNWNFDIFLFDRLTNGNSLVSLTFHLFSLHGLIEYFHLDMMKLRRFLVMIQEDYHSQNPYHNAVHAADVTQAMHCYLKEPKLANSVTPWDILLSLIAAATHDLDHPGVNQPFLIKTNHYLATLYKNTSVLENHHWRSAVGLLRESGLFSHLPLESRQQMETQIGALILATDISRQNEYLSLFRSHLDRGDLCLEDTRHRHLVLQMALKCADICNPCRTWELSKQWSEKVTEEFFHQGKRYRKKISFGCESTLRSSH

SEQ ID NO: 14559 - protein, 407 aa, Homo sapiens
MEVCYQLPVLPLDRPVPQHVLSRRGAISFSSSSALFGCPNPRQLSQRRGAISYDSSDQTALYIRMLGDVRVRSRAGFESERRGSHPYIDFRIFHSQSEIEVSVSARNIRRLLSFQRYLRSSRFFRGTAVSNSLNILDDDYNGQAKCMLEKVGNWNFDIFLFDRLTNGNSLVSLTFHLFSLHGLIEYFHLDMMKLRRFLVMIQEDYHSQNPYHNAVHAADVTQAMHCYLKEPKLANSVTPWDILLSLIAAATHDLDHPGVNQPFLIKTNHYLATLYKNTSVLENHHWRSAVGLLRESGLFSHLPLESRQQMETQIGALILATDISRQNEYLSLFRSHLDRGDLCLEDTRHRHLVLQMALKCADICNPCRTWELSKQWSEKVTEEFFHQGKRYRKKISFGCESTLRSSH

SEQ ID NO: 14560 - protein, 407 aa, Homo sapiens; identical to SEQ ID NO: 14559

SEQ ID NO: 14561 - protein, 732 aa, Homo sapiens
MSRRKISSESFSSLGSDYLETSPEEEGECPLSRLCWNGSRSPPGPLEPSPAAAAAAAAPAPTPAASAAAAAATAGARRVQRRRRVNLDSLGESISRLTAPSPQTIQQTLKRTLQYYEHQVIGYRDAEKNFHNISNRCSYADHSNKEEIEDVSGILQCTANILGLKFEEIQKRFGEEFFNICFHENERVLRAVGGTLQDFFNGFDALLEHIRTSFGKQATLESPSFLCKELPEGTLMLHYFHPHHIVGFAMLGMIKAAGKKIYRLDVEVEQVANEKLCSDVSNPGNCSCLTFLIKECENTNIMKNLPQGTSQVPADLRISINTFCRAFPFHLMFDPSMSVLQLGEGLRKQLRCDTHKVLKFEDCFEIVSPKVNATFERVLLRLSTPFVIRTKPEASGSENKDKVMEVKGQMIHVPESNSILFLGSPCVDKLDELMGRGLHLSDIPIHDATRDVILVGEQAKAQDGLKKRMDKLKATLERTHQALEEEKKKTVDLLYSIFPGDVAQQLWQGQQVQARKFDDVTMLFSDIVGFTAICAQCTPMQVISMLNELYTRFDHQCGFLDIYKVETIGDAYCVAAGLHRKSLCHAKPIALMALKMMELSEEVLTPDGRPIQMRIGIHSGSVLAGVVGVRMPRYCLFGNNVTLASKFESGSHPRRINVSPTTYQLLKREESFTFIPRSREELPDNFPKEIPGICYFLEVRTGPKPPKPSLSSSRIKKVSYNIGTMFLRETSL

SEQ ID NO: 14562 - protein, 302 aa, Homo sapiens
MHYPTALLFLILANGAQAFRICAFNAQRLTLAKVAREQVMDTLVRILARCDIMVLQEVVDSSGSAIPLLLRELNRFDGSGPYSTLSSPQLGRSTYMETYVYFYRSHKTQVLSSYVYNDEDDVFAREPFVAQFSLPSNVLPSLVLVPLHTTPKAVEKELNALYDVFLEVSQHWQSKDVILLGDFNADCASLTKKRLDKLELRTEPGFHWVIADGEDTTVRASTHCTYDRVVLHGERCRSLLHTAAAFDFPTSFQLTEEEALNISDHYPVEVELKLSQAHSVQPLSLTVLLLLSLLSPQLCPAA

SEQ ID NO: 14563 - protein, 302 aa, Homo sapiens; identical to SEQ ID NO: 14562

SEQ ID NO: 14564 - protein, 302 aa, Homo sapiens; identical to SEQ ID NO: 14562

SEQ ID NO: 14565 - protein, 302 aa, Homo sapiens; identical to SEQ ID NO: 14562

SEQ ID NO: 14566 - protein, 302 aa, Homo sapiens; identical to SEQ ID NO: 14562

SEQ ID NO: 14567 - protein, 232 aa, Homo sapiens
MELFLAGRRVLVTGAGKGIGRGTVQALHATGARVVAVSRTQADLDSLVRECPGIEPVCVDLGDWEATERALGSVGPVDLLVNNAAVALLQPFLEVTKEAFDRSFEVNLRAVIQVSQIVARGLIARGVPGAIVNVSSQCSQRAVTNHSVYCSTKGALDMLTKVMALELGPHKIRVNAVNPTVVMTSMGQATWSDPHKAKTMLNRIPLGKFAGPTDVHNRGAEKTVVYAEISRK

SEQ ID NO: 14568 - protein, 244 aa, Homo sapiens
MELFLAGRRVLVTGAGKGIGRGTVQALHATGARVVAVSRTQADLDSLVRECPGIEPVCVDLGDWEATERALGSVGPVDLLVNNAAVALLQPFLEVTKEAFDRSFEVNLRAVIQVSQIVARGLIARGVPGAIVNVSSQCSQRAVTNHSVYCSTKGALDMLTKVMALELGPHKIRVNAVNPTVVMTSMGQATWSDPHKAKTMLNRIPLGKFAEVEHVVNAILFLLSDRSGMTTGSTLPVEGGFWAC

SEQ ID NO: 14569 - protein, 219 aa, Homo sapiens
MELFQAKDHYILQQGERALWCSRRDGGLQLRPATDLLLAWNPICLGLVEGVIGKIQLHSDLPWWLILIRQKALVGKLPGDHEVCKVTKIAVLSLSEMEPQDLELELCKKHHFGINKPEKIIPSPDDSKFLLKTFTHIKSNVSAPNKKKVKESKEKEKLERRLLEELLKMFMDSESFYYSLTYDLTNSVQRQSTGERDGRPLWQKVPLTARRAGFALGKK

SEQ ID NO: 14570 - protein, 1132 aa, Homo sapiens
MELFQAKDHYILQQGERALWCSRRDGGLQLRPATDLLLAWNPICLGLVEGVIGKIQLHSDLPWWLILIRQKALVGKLPGDHEVCKVTKIAVLSLSEMEPQDLELELCKKHHFGINKPEKIIPSPDDSKFLLKTFTHIKSNVSAPNKKKVKESKEKEKLERRLLEELLKMFMDSESFYYSLTYDLTNSVQRQSTGERDGRPLWQKVDDRFFWNKYMIQDLTEIGTPDVDFWIIPMIQGFVQIEELVVNYTESSDDEKSSPETPPQESTCVDDIHPRFLVALISRRSRHRAGMRYKRRGVDKNGNVANYVETEQLIHVHNHTLSFVQTRGSVPVFWSQVGYRYNPRPRLDRSEKETVAYFCAHFEEQLNIYKKQVIINLVDQAGREKIIGDAYLKQVLLFNNSHLTYVSFDFHEHCRGMKFENVQTLTDAIYDIILDMKWCWVDEAGVICKQEGIFRVNCMDCLDRTNVVQAAIARVVMEQQLKKLGVMPPEQPLPVKCNRIYQIMWANNGDSISRQYAGTAALKGDFTRTGERKLAGVMKDGVNSANRYYLNRFKDAYRQAVIDLMQGIPVTEDLYSIFTKEKEHEALHKENQRSHQELISQLLQSYMKLLLPDDEKFHGGWALIDCDPSLIDATHRDVDVLLLLSNSAYYVAYYDDEVDKVNQYQRLSLENLEKIEIGPEPTLFGKPKFSCMRLHYRYKEASGYFHTLRAVMRNPEEDGKDTLQCIAEMLQITKQAMGSDLPIIEKKLERKSSKPHEDIIGIRSQNQGSLAQGKNFLMSKFSSLNQKVKQTKSNVNIGNLRKLGNFTKPEMKVNFLKPNLKVNLWKSDSSLETMENTGVMDKVQAESDGDMSSDNDSYHSDEFLTNSKSDEDRQLANSLESVGPIDYVLPSCGIIASAPRLGSRSQSLSSTDSSVHAPSEITVAHGSGLGKGQESPLKKSPSAGDVHILTGFAKPMDIYCHRFVQDAQNKVTHLSETRSVSQQASQERNQMTNQVSNETQSESTEQTPSRPSQLDVSLSATGPQFLSVEPAHSVASQKTPTSASSMLELETGLHVTPSPSESSSSRAVSPFAKIRSSMVQVASITQAGLTHGINFAVSKVQKSPPEPEIINQVQQNELKKMFIQCQTRIIQI

SEQ ID NO: 14571 - protein, 1132 aa, Homo sapiens; identical to SEQ ID NO: 14570

SEQ ID NO: 14572 - protein, 780 aa, Homo sapiens
MEQVEILRKFIQRVQAMKSPDHNGEDNFARDFMRLRRLSTKYRTEKIYPTATGEKEENVKKNRYKDILPFDHSRVKLTLKTPSQDSDYINANFIKGVYGPKAYVATQGPLANTVIDFWRMIWEYNVVIIVMACREFEMGRKKCERYWPLYGEDPITFAPFKISCEDEQARTDYFIRTLLLEFQNESRRLYQFHYVNWPDHDVPSSFDSILDMISLMRKYQEHEDVPICIHCSAGCGRTGAICAIDYTWNLLKAGKIPEEFNVFNLIQEMRTQRHSAVQTKEQYELVHRAIAQLFEKQLQLYEIHGAQKIADGVNEINTENMVSSIEPEKQDSPPPKPPRTRSCLVEGDAKEEILQPPEPHPVPPILTPSPPSAFPTVTTVWQDNDRYHPKPVLHMVSSEQHSADLNRNYSKSTELPGKNESTIEQIDKKLERNLSFEIKKVPLQEGPKSFDGNTLLNRGHAIKIKSASPCIADKISKPQELSSDLNVGDTSQNSCVDCSVTQSNKVSVTPPEESQNSDTPPRPDRLPLDEKGHVTWSFHGPENAIPIPDLSEGNSSDINYQTRKTVSLTPSPTTQVETPDLVDHDNTSPLFRTPLSFTNPLHSDDSDSDERNSDGAVTQNKTNISTASATVSAATSTESISTRKVLPMSIARHNIAGTTHSGAEKDVDVSEDSPPPLPERTPESFVLASEHNTPVRSEWSELQSQERSEQKKSEGLITSENEKCDHPAGGIHYEMCIECPPTFSDKREQISENPTEATDIGFGNRCGKPKGPRDPPSEWT

SEQ ID NO: 14573 - protein, 780 aa, Homo sapiens; identical to SEQ ID NO: 14572

SEQ ID NO: 14574 - protein, 780 aa, Homo sapiens; identical to SEQ ID NO: 14572

SEQ ID NO: 14575 - protein, 310 aa, Homo sapiens
MRPARHWETRFGARDFGGFQDCFFRDRLMDTARIAVVGAGVVGLSTAVCISKLVPRCSVTIISDKFTPDTTSDVAAGMLIPHTYPDTPIHTQKQWFRETFNHLFAIANSAEAGDAGVHLVSGIKGSGGWTLTRRIEDLWELHPSFDIVVNCSGLGSRQLAGDSKIFPVRGQVLQVQAPWVEHFIRDGSGLTYIYPGTSHVTLGGTRQKGDWNLSPDAENSREILSRCCALEPSLHGACNIREKVGLRPYRPGVRLQTELLARDGQRLPVVHHYGHGSGGISVHWGTALEAARLVSECVHALRTPIPKSNL

SEQ ID NO: 14576 - protein, 369 aa, Homo sapiens
MRPARHWETRFGARDFGGFQDCFFRDRLMDTARIAVVGAGVVGLSTAVCISKLVPRCSVTIISDKFTPDTTSDVAAGMLIPHTYPDTPIHTQKQWFRETFNHLFAIANSAEAGDAGVHLVSGWQIFQSTPTEEVPFWADVVLGFRKMTEAELKKFPQYVFGQAFTTLKCECPAYLPWLEKRIKGSGGWTLTRRIEDLWELHPSFDIVVNCSGLGSRQLAGDSKIFPVRGQVLQVQAPWVEHFIRDGSGLTYIYPGTSHVTLGGTRQKGDWNLSPDAENSREILSRCCALEPSLHGACNIREKVGLRPYRPGVRLQTELLARDGQRLPVVHHYGHGSGGISVHWGTALEAARLVSECVHALRTPIPKSNL

SEQ ID NO: 14577 - protein, 418 aa, Homo sapiens
MRPARHWETRFGARDFGGFQDCFFRDRLMDTARIAVVGAGVVGLSTAVCISKLVPRCSVTIISDKFTPDTTSDVAAGMLIPHTYPDTPIHTQKQWFRETFNHLFAIANSAEAGDAGVHLVSGWQIFQSTPTEEVPFWADVVLGFRKMTEAELKKFPQYVFGQAFTTLKCECPAYLPWLEKRLAPCSPEPASDQAGGGTRPRVPFPPSGGFAARDSSQPKSGLSGRAFQAGIKGSGGWTLTRRIEDLWELHPSFDIVVNCSGLGSRQLAGDSKIFPVRGQVLQVQAPWVEHFIRDGSGLTYIYPGTSHVTLGGTRQKGDWNLSPDAENSREILSRCCALEPSLHGACNIREKVGLRPYRPGVRLQTELLARDGQRLPVVHHYGHGSGGISVHWGTALEAARLVSECVHALRTPIPKSNL

SEQ ID NO: 14578 - protein, 341 aa, Homo sapiens
MDTARIAVVGAGVVGLSTAVCISKLVPRCSVTIISDKFTPDTTSDVAAGMLIPHTYPDTPIHTQKQWFRETFNHLFAIANSAEAGDAGVHLVSGWQIFQSTPTEEVPFWADVVLGFRKMTEAELKKFPQYVFGQAFTTLKCECPAYLPWLEKRIKGSGGWTLTRRIEDLWELHPSFDIVVNCSGLGSRQLAGDSKIFPVRGQVLQVQAPWVEHFIRDGSGLTYIYPGTSHVTLGGTRQKGDWNLSPDAENSREILSRCCALEPSLHGACNIREKVGLRPYRPGVRLQTELLARDGQRLPVVHHYGHGSGGISVHWGTALEAARLVSECVHALRTPIPKSNL

SEQ ID NO: 14579 - protein, 282 aa, Homo sapiens
MDTARIAVVGAGVVGLSTAVCISKLVPRCSVTIISDKFTPDTTSDVAAGMLIPHTYPDTPIHTQKQWFRETFNHLFAIANSAEAGDAGVHLVSGIKGSGGWTLTRRIEDLWELHPSFDIVVNCSGLGSRQLAGDSKIFPVRGQVLQVQAPWVEHFIRDGSGLTYIYPGTSHVTLGGTRQKGDWNLSPDAENSREILSRCCALEPSLHGACNIREKVGLRPYRPGVRLQTELLARDGQRLPVVHHYGHGSGGISVHWGTALEAARLVSECVHALRTPIPKSNL

SEQ ID NO: 14580 - protein, 459 aa, Homo sapiens
MVLDFVVPSPQGTSWGLGGTCVNVGCIPKKLMHQAALLGQALCDSRKFGWEYNQQVRHNWETMTKAIQNHISSLNWGYRLSLREKAVAYVNSYGEFVEHHKIKATNKKGQETYYTAAQFVIATGERPRYLGIQGDKEYCITSDDLFSLPYCPGKTLVVGASYVALECAGFLAGFGLDVTVMVRSILLRGFDQEMAEKVGSYMEQHGVKFLRKFIPVMVQQLEKGSPGKLKVLAKSTEGTETIEGVYNTVLLAIGRDSCTRKIGLEKIGVKINEKSGKIPVNDVEQTNVPYVYAVGDILEDKPELTPVAIQSGKLLAQRLFGASLEKCDYINVPTTVFTPLEYGCCGLSEEKAIEVYKKENLEIYHTLFWPLEWTVAGRENNTCYAKIICNKFDHDRVIGFHILGPNAGEVTQGFAAAMKCGLTKQLLDDTIGIHPTCGEVFTTLEITKSSGLDITQKGC

SEQ ID NO: 14581 - protein, 330 aa, Homo sapiens [sequence omitted]

SEQ ID NO: 14582 - protein, 510 aa, Homo sapiens
MYRALRLLARSRPLVRAPAAALASAPGLGGAAVPSFWPPNAARMASQNSFRIEYDTFGELKVPNDKYYGAQTVRSTMNFKIGGVTERMPTPVIKAFGILKRAAAEVNQDYGLDPKIANAIMKAADEVAEGKLNDHFPLVVWQTGSGTQTNMNVNEVISNRAIEMLGGELGSKIPVHPNDHVNKSQSSNDTFPTAMHIAAAIEVHEVLLPGLQKLHDALDAKSKEFAQIIKIGRTHTQDAVPLTLGQEFSGYVQQVKYAMTRIKAAMPRIYELAAGGTAVGTGLNTRIGFAEKVAAKVAALTGLPFVTAPNKFEALAAHDALVELSGAMNTTACSLMKIANDIRFLGSGPRSGLGELILPENEPGSSIMPGKVNPTQCEAMTMVAAQVMGNHVAVTVGGSNGHFELNVFKPMMIKNVLHSARLLGDASVSFTENCVVGIQANTERINKLMNESLMLVTALNPHIGYDKAAKIAKTAHKNGSTLKETAIELGYLTAEQFDEWVKPKDMLGPK

SEQ ID NO: 14583 - protein, 511 aa, Homo sapiens
MYRALRLLARSRPLVRAPAAALASAPGLGGAAVPSFWPPNAARMASQNSFRIEYDTFGELKVPNDKYYGAQTVRSTMNFKIGGVTERMPTPVIKAFGILKRAAAEVNQDYGLDPKIANAIMKAADEVGAEGKLNDHFPLVVWQTGSGTQTNMNVNEVISNRAIEMLGGELGSKIPVHPNDHVNKSQSSNDTFPTAMHIAAAIEVHEVLLPGLQKLHDALDAKSKEFAQIIKIGRTHTQDAVPLTLGQEFSGYVQQVKYAMTRIKAAMPRIYELAAGGTAVGTGLNTRIGFAEKVAAKVAALTGLPFVTAPNKFEALAAHDALVELSGAMNTTACSLMKIANDIRFLGSGPRSGLGELILPENEPGSSIMPGKVNPTQCEAMTMVAAQVMGNHVAVTVGGSNGHFELNVFKPMMIKNVLHSARLLGDASVSFTENCVVGIQANTERINKLMNESLMLVTALNPHIGYDKAAKIAKTAHKNGSTLKETAIELGYLTAEQFDEWVKPKDMLGPK

SEQ ID NO: 14584 - protein, 493 aa, Homo sapiens
MYRALRLLARSRPLVRAPAAALASAPGLGGAAVPSFWPPNAARMVPNDKYYGAQTVRSTMNFKIGGVTERMPTPVIKAFGILKRAAAEVNQDYGLDPKIANAIMKAADEVAEGKLNDHFPLVVWQTGSGTQTNMNVNEVISNRAIEMLGGELGSKIPVHPNDHVNKSQSSNDTFPTAMHIAAAIEVHEVLLPGLQKLHDALDAKSKEFAQIIKIGRTHTQDAVPLTLGQEFSGYVQQVKYAMTRIKAAMPRIYELAAGGTAVGTGLNTRIGFAEKVAAKVAALTGLPFVTAPNKFEALAAHDALVELSGAMNTTACSLMKIANDIRFLGSGPRSGLGELILPENEPGSSIMPGKVNPTQCEAMTMVAAQVMGNHVAVTVGGSNGHFELNVFKPMMIKNVLHSARLLGDASVSFTENCVVGIQANTERINKLMNESLMLVTALNPHIGYDKAAKIAKTAHKNGSTLKETAIELGYLTAEQFDEWVKPKDMLGPK

SEQ ID NO: 14585 - protein, 434 aa, Homo sapiens
MNFKIGGVTERMPTPVIKAFGILKRAAAEVNQDYGLDPKIANAIMKAADEVAEGKLNDHFPLVVWQTGSGTQTNMNVNEVISNRAIEMLGGELGSKIPVHPNDHVNKSQSSNDTFPTAMHIAAAIEVHEVLLPGLQKLHDALDAKSKEFAQIIKIGRTHTQDAVPLTLGQEFSGYVQQVKYAMTRIKAAMPRIYELAAGGTAVGTGLNTRIGFAEKVAAKVAALTGLPFVTAPNKFEALAAHDALVELSGAMNTTACSLMKIANDIRFLGSGPRSGLGELILPENEPGSSIMPGKVNPTQCEAMTMVAAQVMGNHVAVTVGGSNGHFELNVFKPMMIKNVLHSARLLGDASVSFTENCVVGIQANTERINKLMNESLMLVTALNPHIGYDKAAKIAKTAHKNGSTLKETAIELGYLTAEQFDEWVKPKDMLGPK

SEQ ID NO: 14586 - protein, 526 aa, Homo sapiens
MNALGLGQYKNSEKSVCRRHRNQCHSVTEATIIVKNTSAVMDSSVIQRKKVAVIGGGLVGSLQACFLAKRNFQIDVYEAREDTRVATFTRGRSINLALSHRGRQALKAVGLEDQIVSQGIPMRARMIHSLSGKKSAIPYGTKSQYILSVSRENLNKDLLTAAEKYPNVKMHFNHRLLKCNPEEGMITVLGSDKVPKDVTCDLIVGCDGAYSTVRSHLMKKPRFDYSQQYIPHGYMELTIPPKNGDYAMEPNYLHIWPRNTFMMIALPNMNKSFTCTLFMPFEEFEKLLTSNDVVDFFQKYFPDAIPLIGEKLLVQDFFLLPAQPMISVKCSSFHFKSHCVLLGDAAHAIVPFFGQGMNAGFEDCLVFDELMDKFSNDLSLCLPVFSRLRIPDDHAISDLSMYNYIEMRAHVNSSWFIFQKNMERFLHAIMPSTFIPLYTMVTFSRIRYHEAVQRWHWQKKVINKGLFFLGSLIAISSTYLLIHYMSPRSFLRLRRPWNWIAHFRNTTCFPAKAVDSLEQISNLISR

SEQ ID NO: 14587 - protein, 513 aa, Homo sapiens
MNALGLGQYKNSEKSVCRRHRNQCHSVTEATIIVKNTSAVMDSSVIQRKKVAVIGGGLVGSLQACFLAKRNFQIDVYEAREDTRVATFTRGRSINLALSHRGRQALKAVGLEDQIVSQGIPMRARMIHSLSGKKSAIPYGTKSQYILSVSRENLNKDLLTAAEKYPNVKMHFNHRLLKCNPEEGMITVLGSDKVPKDVTCDLIVGCDGAYSTVRSHLMKKPRFDYSQQYIPHGYMELTIPPKNGDYAMEPNYLHIWPRNTFMMIALPNMNKSFTCTLFMPFEEFEKLLTSNDVVDFFQKYFPDAIPLIGEKLLVQDFFLLPAQPMISVKCSSFHFKSHCVLLGDAAHAIVPFFGQGMNAGFEDCLVFDELMDKFSNDLSLCLPVFSRLRIPDDHAISDLSMYNYIEKNMERFLHAIMPSTFIPLYTMVTFSRIRYHEAVQRWHWQKKVINKGLFFLGSLIAISSTYLLIHYMSPRSFLRLRRPWNWIAHFRNTTCFPAKAVDSLEQISNLISR

SEQ ID NO: 14588 - protein, 526 aa, Homo sapiens; identical to SEQ ID NO: 14586

SEQ ID NO: 14589 - protein, 113 aa, Homo sapiens
MSASVVSVISRFLEEYLSSTPQRLKLLDAYLLYILLTGALQFGYCLLVGTFPFNSFLSGFISCVGSFILAVCLRIQINPQNKADFQGISPERAFADFLFASTILHLVVMNFVG

SEQ ID NO: 14590 - protein, 113 aa, Homo sapiens; identical to SEQ ID NO: 14589

SEQ ID NO: 14591 - protein, 526 aa, Homo sapiens [sequence omitted]

SEQ ID NO: 14592 - protein, 208 aa, Homo sapiens
  VARIANT (1)...(208): Xaa = Any Amino Acid
MSLVEAISLWNEGVLAADKKDWKGALDAFSAVQDPHSRICFNIGCMYTILKNMTEAEKAFTRSINRDKHLAVAYFQRGMLYYQTEKYDLAIKDLKEALIQLRGNQLIDYKILGLQFKLFACEVLYNIAFMYAKKEEWKKAEEQLALATSMKSEPRHSKIDKAMECVWKQKLYEPVVIPVGRLFRPNERQVAQLAKKDYLGKATVGGIX

SEQ ID NO: 14593 - protein, 200 aa, Homo sapiens
MAAGRLFLSRLRAPFSSMAKSPLEGVSSSRGLHAGRGPRRLSIEGNIAVGKSTFVKLLTKTYPEWHVATEPVATWQNIQAAGTQKACTAQSLGNLLDMMYREPARWSYTFQTFSFLSRLKVQLEPFPEKLLQARKPVQIFERSVYSDRYIFAKNLFENGSLSDIEWHIYQDWHSFLLWEFASRITLHGFIYLQASPQAPL

SEQ ID NO: 14594 - protein, 89 aa, Homo sapiens
MAAGRLFLSRLRAPFSSMAKSPLEGVSSSRGLHAGRGPRRLSIEGNIGLHCPKSWKLAGYDVPGASTMVLHIPDIFLFEPPESTAGALP

SEQ ID NO: 14595 - protein, 180 aa, Homo sapiens
MMYREPARWSYTFQTFSFLSRLKVQLEPFPEKLLQARKPVQIFERSVYSDRYIFAKNLFENGSLSDIEWHIYQDWHSFLLWEFASRITLHGFIYLQASPQVCLKRLYQRAREEEKGIELAYLEQLHGQHEAWLIHKTTKLHFEALMNIPVLVLDVNDDFSEEVTKQEDLMREVNTFVKNL

SEQ ID NO: 14596 - protein, 180 aa, Homo sapiens; identical to SEQ ID NO: 14595

SEQ ID NO: 14597 - protein, 277 aa, Homo sapiens
MAAGRLFLSRLRAPFSSMAKSPLEGVSSSRGLHAGRGPRRLSIEGNIAVGKSTFVKLLTKTYPEWHVATEPVATWQNIQAAGTQKACTAQSLGNLLDMMYREPARWSYTFQTFSFLSRLKVQLEPFPEKLLQARKPVQIFERSVYSDRYIFAKNLFENGSLSDIEWHIYQDWHSFLLWEFASRITLHGFIYLQASPQVCLKRLYQRAREEEKGIELAYLEQLHGQHEAWLIHKTTKLHFEALMNIPVLVLDVNDDFSEEVTKQEDLMREVNTFVKNL

SEQ ID NO: 14598 - protein, 56 aa, Homo sapiens
  VARIANT (1)...(56): Xaa = Any Amino Acid
MLCLPTTFPSPAPLIPGALCRSRAGLLIIVRLCHCFLLYLKHFENKVYLSYACFSX

SEQ ID NO: 14599 - protein, 189 aa, Homo sapiens
MAAGRLFLSRLRAPFSSMAKSPLEGVSSSRGLHAGRGPRRLSIEGNIAVGKSTFVKLLTKTYPEWHVATEPVATWQNIQAAGTQKACTAQSLGNLLDMMYREPARWSYTFQTFSFLSRLKVQLEPFPEKLLQARKPVQIFERSVYSDRLHFEALMNIPVLVLDVNDDFSEEVTKQEDLMREVNTFVKNL

SEQ ID NO: 14600 - protein, 89 aa, Homo sapiens; identical to SEQ ID NO: 14594

SEQ ID NO: 14601 - protein, 89 aa, Homo sapiens; identical to SEQ ID NO: 14594

SEQ ID NO: 14602 - protein, 350 aa, Homo sapiens
MAATSLMSALAARLLQPAHSCSLRLRPFHLAAVRNEAVVISGRKLAQQIKQEVRQEVEEWVASGNKRPHLSVILVGENPASHSYVLNKTRAAAVVGINSETIMKPASISEEELLNLINKLNNDDNVDGLLVQLPLPEHIDERRICNAVSPDKDVDGFHVINVGRMCLDQYSMLPATPWGVWEIIKRTGIPTLGKNVVVAGRSKNVGMPIAMLLHTDGAHERPGGDATVTISHRYTPKEQLKKHTILADIVISAAGIPNLITADMIKEGAAVIDVGINRVHDPVTAKPKLVGDVDFEGVRQKAGYITPVPGGVGPMTVAMLMKNTIIAAKKVLRLEEREVLKSKELGVATN

SEQ ID NO: 14603 - protein, 334 aa, Homo sapiens
MAATSLMSALAARLLQPAHSCSLRLRPFHLAAVRNEAVVISGRKLAQQIKQEVRQEVEEWVASGNKRPHLSVILVGENPASHSYVLNKTRAAAVVGINSETIMKPASISEEELLNLINKLNNDDNVDGLLVQLPLPEHIDERRICNAVSPDKDVDGFHVINVGRMCLDQYSMLPATPWGVWEIIKRTGIPTLGKNVVVAGRSKNVGMPIAMLLHTDGAHERPGGDATVTISHRYTPKEQLKKHTILADIVISAAGIPNLITADMIKEGAAVIDVGINRVHDPVTAKPKLVGDVDFEGVRQKAGYITPVPGGVGPMTVAMLMKNTIIAGRGGSHL

SEQ ID NO: 14604 - protein, 248 aa, Homo sapiens
MKPASISEEELLNLINKLNNDDNVDGLLVQLPLPEHIDERRICNAVSPDKDVDGFHVINVGRMCLDQYSMLPATPWGVWEIIKRTGIPTLGKNVVVAGRSKNVGMPIAMLLHTDGAHERPGGDATVTISHRYTPKEQLKKHTILADIVISAAGIPNLITADMIKEGAAVIDVGINRVHDPVTAKPKLVGDVDFEGVRQKAGYITPVPGGVGPMTVAMLMKNTIIAAKKVLRLEEREVLKSKELGVATN

SEQ ID NO: 14605 - protein, 248 aa, Homo sapiens; identical to SEQ ID NO: 14604

SEQ ID NO: 14606 - protein, 350 aa, Homo sapiens; identical to SEQ ID NO: 14602

SEQ ID NO: 14607 - protein, 677 aa, Homo sapiens
MWAQQGTTPGTPKLRHTCEQGDGVGPYGWEFHDGLSFGRQHIQDGALRLTTEFVKRPGGQHGGDWSWRVTVEPQDSGTSALPLVSLFFYVVTDGKEVLLPEVGAKGQLKFISGHTSELGDFRFTLLPPTSPGDTAPKYGSYNVFWTSNPGLPLLTEMVKSRLNSWFQHRPPGAPPERYLGLPGSLKWEDRGPSGQGQGQFLIQQVTLKIPISIEFVFESGSAQAGGNQALPRLAGSLLTQALESHAEGFRERFEKTFQLKEKGLSSGEQVLGQAALSGLLGGIGYFYGQGLVLPDIGVEGSEQKVDPALFPPVPLFTAVPSRSFFPRGFLWDEGFHQLVVQRWDPSLTREALGHWLGLLNADGWIGREQILGDEARARVPPEFLVQRAVHANPPTLLLPVAHMLEVGDPDDLAFLRKALPRLHAWFSWLHQSQAGPLPLSYRWRGRDPALPTLLNPKTLPSGLDDYPRASHPSVTERHLDLRCWVALGARVLTRLAEHLGEAEVAAELGPLAASLEAAESLDELHWAPELGVFADFGNHTKAVQLKPRPPQGLVRVVGRPQPQLQYVDALGYVSLFPLLLRLLDPTSSRLGPLLDILADSRHLWSPFGLRSLAASSSFYGQRNSEHDPPYWRGAVWLNVNYLALGALHHYGHLEGPHQARAAKLHGVSLLSSHIALG

SEQ ID NO: 14608 - protein, 837 aa, Homo sapiens
MARGERRRRAVPAEGVRTAERAARGGPGRRDGRGGGPRSTAGGVALAVVVLSLALGMSGRWVLAWYRARRAVTLHSAPPVLPADSSSPAVAPDLFWGTYRPHVYFGMKTRSPKPLLTGLMWAQQGTTPGTPKLRHTCEQGDGVGPYGWEFHDGLSFGRQHIQDGALRLTTEFVKRPGGQHGGDWSWRVTVEPQDSGTSALPLVSLFFYVVTDGKEVLLPEVGAKGQLKFISGHTSELGDFRFTLLPPTSPGDTAPKYGSYNVFWTSNPGLPLLTEMVKSRLNSWFQHRPPGAPPERYLGLPGSLKWEDRGPSGQGQGQFLIQQVTLKIPISIEFVFESGSAQAGGNQALPRLAGSLLTQALESHAEGFRERFEKTFQLKEKGLSSGEQVLGQAALSGLLGGIGYFYGQGLVLPDIGVEGSEQKVDPALFPPVPLFTAVPSRSFFPRGFLWDEGFHQLVVQRWDPSLTREALGHWLGLLNADGWIGREQILGDEARARVPPEFLVQRAVHANPPTLLLPVAHMLEVGDPDDLAFLRKALPRLHAWFSWLHQSQAGPLPLSYRWRGRDPALPTLLNPKTLPSGLDDYPRASHPSVTERHLDLRCWVALGARVLTRLAEHLGEAEVAAELGPLAASLEAAESLDELHWAPELGVFADFGNHTKAVQLKPRPPQGLVRVVGRPQPQLQYVDALGYVSLFPLLLRLLDPTSSRLGPLLDILADSRHLWSPFGLRSLAASSSFYGQRNSEHDPPYWRGAVWLNVNYLALGALHHYGHLEGPHQARAAKLHGELRANVVGNVWRQYQATGFLWEQYSDRDGRGMGCRPFHGWTSLVLLAMAEDY

SEQ ID NO: 14609 - protein, 588 aa, Homo sapiens
MEMQSPIVQRQERQVRDRGVTRSKAEKVRPPTVPVPQVDIVPGRLSEAEWMALTALEEGEDVVGDILADLLARVMDSAFKVYLTQQCIPFTISQAREAMLQITEWRFLARDEGESAVAEDPTWGEDEEPSACTTDSWAQGSVPVLHASTSEGLENFQGEDPGGVDRIPLGRSWMGRGSQEQMESWEPSPQLRVTSAPPPTSELFQEAGPGGPVEEADGQSRGLSSAGSLSASFQLSVEEAPADDADPSLDPYLVASPQASTGRGHPLGFHLSLEDLYCCMPQLDAAGDRLELRSEGVPCIASGVLVSYPSVGGATRPSASCQQQRAGHSDVRLSAHHHRMRRKAAVKRLDPARLPCHWVRPLAEVLVPDSQTRPLEAYRGRQRGEKTKARAEPQALGPGTRVSPAAFFPLRPGIPFRDLDSGPALLFPTLNLGLSSPSLESKLPLPNSRIRFLTTHPVLPDVARSRSPKLWPSVRWPSGWEGKAELLGELWAGRTRVPPQGLELADREGQDPGRWPRTTPPVLEATSQVMWKPVLLPEALKLAPGVSMWNRSTQVLLSSGVPEQEDKEGSTFPPVEQHPIQTGAPKPR

SEQ ID NO: 14610 - protein, 784 aa, Homo sapiens
MEMQSPIVQRQERQVRDRGVTRSKAEKVRPPTVPVPQVDIVPGRLSEAEWMALTALEEGEDVVGDILADLLARVMDSAFKVYLTQQCIPFTISQAREAMLQITEWRFLARDEGESAVAEDPTWGEDEEPSACTTDSWAQGSVPVLHASTSEGLENFQGEVHSSGASPDSSAIAPALPFPTSHCPSAFPQDPGGVDRIPLGRSWMGRGSQEQMESWEPSPQLRVTSAPPPTSELFQEAGPGGPVEEADGQSRGLSSAGSLSASFQLSVEEAPADDADPSLDPYLVASPQASTGRGHPLGFHLSLEDLYCCMPQLDAAGDRLELRSEGVPCIASGVLVSYPSVGGATRPSASCQQQRAGHSDVRLSAHHHRMRRKAAVKRLDPARLPCHWVRPLAEVLVPDSQTRPLEAYRGRQRGEKTKARAEPQALGPGTRVSPAAFFPLRPGIPFRDLDSGPALLFPTLNLGLSSPSLESKLPLPNSRIRFLTTHPVLPDVARSRSPKLWPSVRWPSGWEGKAELLGELWAGRTRVPPQGLELADREGQDPGRWPRTTPPVLEATSQVMWKPVLLPEALKLAPGVSMWNRSTQVLLSSGVPEQEDKEGSTFPPVEQHPIQTGIGKVVSQDLARCGAQVILTCQSRECGQQALAEIQAASNSNRLLLGEVDLSSMTSIRSFARRLLQENPEIHLLVNNAGVSGFRRHLPQGAWISPLSLTMLGPFCSQIYSKDLKQGVLPVLYLSLAEEPGGISGKYFSSSCVITLPVKASRDPHVAQSLWNASVRLTSLVKMD

SEQ ID NO: 14611 - protein, 318 aa, Homo sapiens
MLSESSSFLKGVMLGSIFCALITMLGHIRIGHGNRMHHHEHHHLQAPNKEDILKISEDERMELSKSFRVYCIILVKPKDVSLWAAVKETWTKHCDKAEFFSSENVKVFESINMDTNDMWLMMRKAYKYAFDKYRDQYNWFFLARPTTFAIIENLKYFLLKKDPSQPFYLGHTIKSGDLEYVGMEGGIVLSVESMKRLNSLLNIPEKCPEQGGMIWKISEDKQLAVCLKYAGVFAENAEDADGKDVFNTKSVGLSIKEAMTYHPNQVVEGCCSDMAVTFNGLTPNQMHVMMYGVYRLRAFGHIFNDALVFLPPNGSDND

SEQ ID NO: 14612 - protein, 355 aa, Homo sapiens
MGQRPGGVGVPRAAAMEQLRAAARLQIVLGHLGRPSAGAVVAHPTSGTISSASFHPQQFQYTLDNNVLTLEQRKFYEENGFLVIKNLVPDADIQRFRNEFEKICRKEVKPLGLTVMRDVTISKSEYAPSEKMITKVQDFQEDKELFRYCTLPEILKYVECFTGPNIMAMHTMLINKPPDSGNCKKTSRHPLHQDLHYFPFRPSDLIVCAWTAMEHISRNNGCLVVLPGTHKGSLKPHDYPKWEGGVNKMFHGIQDYEENKARVHLVMEKGDTVFFHPLLIHGSGQNKTQGFRKAISCHFASADCHYIDVKGTSQENIEKEVVGIAHKFFGAENSVNLKDIWMFRARLVKGERTNL

SEQ ID NO: 14613 - protein, 353 aa, Homo sapiens
MGQRPGGVGVPRAAAMEQLRAAARLQIVLGHLGRPSAGAVVAHPTSGTISSASFHPQQFQYTLDNNVLTLEQRKFYEENGFLVIKNLVPDADIQRFRNEFEKICRKEVKPLGLTVMRDVTISKSEYAPSEKMITKVQDFQEDKELFRYCTLPEILKYVECFTGPNIMAMHTMLINKPPDSGKKTSRHPLHQDLHYFPFRPSDLIVCAWTAMEHISRNNGCLVVLPGTHKGSLKPHDYPKWEGGVNKMFHGIQDYEENKARVHLVMEKGDTVFFHPLLIHGSGQNKTQGFRKAISCHFASADCHYIDVKGTSQENIEKEVVGIAHKFFGAENSVNLKDIWMFRARLVKGERTNL

SEQ ID NO: 14614 - protein, 512 aa, Homo sapiens [sequence omitted]

SEQ ID NO: 14615 - protein, 512 aa, Homo sapiens [sequence omitted]

SEQ ID NO: 14616 - protein, 522 aa, Homo sapiens
MLAKGLPPRSVLVKGCQTFLSAPREGLGRLRVPTGEGAGISTRSPRPFNEIPSPGDNGWLNLYHFWRETGTHKVHLHHVQNFQKYGPIYREKLGNVESVYVIDPEDVALLFKSEGPNPERFLIPPWVAYHQYYQRPIGVLLKKSAAWKKDRVALNQEVMAPEATKNFLPLLDAVSRDFVSVLHRRIKKAGSGNYSGDISDDLFRFAFESITNVIFGERQGMLEEVVNPEAQRFIDAIYQMFHTSVPMLNLPPDLFRLFRTKTWKDHVAAWDVIFSKADIYTQNFYWELRQKGSVHHDYRGILYRLLGDSKMSFEDIKANVTEMLAGGVDTTSMTLQWHLYEMARNLKVQDMLRAEVLAARHQAQGDMATMLQLVPLLKASIKETLRQLHPISVTLQRYLVNDLVLRDYMIPAKTLVQVAIYALGREPTFFFDPENFDPTRWLSKDKNITYFRNLGFGWGVRQCLGRRIAELEMTIFLINMLENFRVEIQHLSDVGTTFNLILMPEKPISFTFWPFNQEATQQ

SEQ ID NO: 14617 - protein, 521 aa, Homo sapiens
MLAKGLPPRSVLVKGCQTFLSAPREGLGRLRVPTGEGAGISTRSPRPFNEIPSPGDNGWLNLYHFWRETGTHKVHLHHVQNFQKYGPIYREKLGNVESVYVIDPEDVALLFKSEGPNPERFLIPPWVAYHQYYQRPIGVLLKKSAAWKKDRVALNQEVMAPEATKNFLPLLDAVSRDFVSVLHRRIKKAGSGNYSGDISDDLFRFAFESITNVIFGERQGMLEEVVNPEAQRFIDAIYQMFHTSVPMLNLPPDLFRLFRTKTWKDHVAAWDVIFSKADIYTQNFYWELRQKGSVHHDYRGILYRLLGDSKMSFEDIKANVTEMLAGGVDTTSMTLQWHLYEMARNLKVQDMLRAEVLAARHQAQGDMATMLQLVPLLKASIKETLRLHPISVTLQRYLVNDLVLRDYMIPAKTLVQVAIYALGREPTFFFDPENFDPTRWLSKDKNITYFRNLGFGWGVRQCLGRRIAELEMTIFLINMLENFRVEIQHLSDVGTTFNLILMPEKPISFTFWPFNQEATQQ

SEQ ID NO: 14618 - protein, 516 aa, Homo sapiens
MALSQSVPFSATELLLASAIFCLVFWVLKGLRPRVPKGLKSPPEPWGWPLLGHVLTLGKNPHLALSRMSQRYGDVLQIRIGSTPVLVLSRLDTIRQALVRQGDDFKGRPDLYTSTLITDGQSLTFSTDSGPVWAARRRLAQNALNTFSIASDPASSSSCYLEEHVSKEAKALISRLQELMAGPGHFDPYNQVVVSVANVIGAMCFGQHFPESSDEMLSLVKNTHEFVETASSGNPLDFFPILRYLPNPALQRFKAFNQRFLWFLQKTVQEHYQDFDKNSVRDITGALFKHSKKGPRASGNLIPQEKIVNLVNDIFGAGFDTVTTAISWSLMYLVTKPEIQRKIQKELDTVIGRERRPRLSDRPQLPYLEAFILETFRHSSFLPFTIPHSTTRDTTLNGFYIPKKCCVFVNQWQVNHDPELWEDPSEFRPERFLTADGTAINKPLSEKMMLFGMGKRRCIGEVLAKWEIFLFLAILLQQLEFSVPPGVKVDLTPIYGLTMKHARCEHVQARLRFSIN

SEQ ID NO: 14619 - protein, 410 aa, Homo sapiens
SSGRTTGRCTACSTRAQSTCRPDLSAPRVAPGCCWPARPRPSSGAATGAPGVGRRRPCPCRGAWARTPCAARRGTHSALARCPTTGARWPSGTARAWPGPAPPSPSNGTGAPPPRSRLRPSPAPTASSPPTRSSSPTRRRPSSASTRTTTPRRGPTTRVSCTTGPRAAAWARGRRPWPRRGSSTPTSPGRATRSTAAAKSCPSGLPDLVPDPNYVQASTYVQRAHLYSLRCAAEEKCLASTAYAPEATDYDVRVLLRFPQRVKNQGTADFLPNRPRHTWEWHSCHQHYHSMDEFSHYDLLDAATGKKVAEGHKASFCLEDSTCDFGNLKRYACTSHTQGLSPGCYDTYNADIDCQWIDITDVQPGNYILKVHVNPKYIVLESDFTNNVVRCNIHYTGRYVSATNCKIVQS

SEQ ID NO: 14620 - protein, 313 aa, Homo sapiens
METGPEDPSSMPEESSPRRTPQSIPYQDLPHLVNADGQYLFCRYWKPTGTPKALIFVSHGAGEHSGRYEELARMLMGLDLLVFAHDHVGHGQSEGERMVVSDFHVFVRDVLQHVDSMQKDYPGLPVFLLGHSMGGAIAILTAAERPGHFAGMVLISPLVLANPESATTFKVLAAKVLNLVLPNLSLGPIDSSVLSRNKTEVDIYNSDPLICRAGLKVCFGIQLLNAVSRVERALPKLTVPFLLLQGSADRLCDSKGAYLLMELAKSQDKTLKIYEGAYHVLHKELPEVTNSVFHEINMWVSQRTATAGTASPP

SEQ ID NO: 14621 - protein, 313 aa, Homo sapiens; identical to SEQ ID NO: 14620

SEQ ID NO: 14622 - protein, 303 aa, Homo sapiens
MPEESSPRRTPQSIPYQDLPHLVNADGQYLFCRYWKPTGTPKALIFVSHGAGEHSGRYEELARMLMGLDLLVFAHDHVGHGQSEGERMVVSDFHVFVRDVLQHVDSMQKDYPGLPVFLLGHSMGGAIAILTAAERPGHFAGMVLISPLVLANPESATTFKVLAAKVLNLVLPNLSLGPIDSSVLSRNKTEVDIYNSDPLICRAGLKVCFGIQLLNAVSRVERALPKLTVPFLLLQGSADRLCDSKGAYLLMELAKSQDKTLKIYEGAYHVLHKELPEVTNSVFHEINMWVSQRTATAGTASPP

SEQ ID NO: 14623 - protein, 380 aa, Homo sapiens
MGIQGLAKLIADVAPSAIRENDIKSYFGRKVAIDASMSIYQFLIAVRQGGDVLQNEEGETTSHLMGMFYRTIRMMENGIKPVYVFDGKPPQLKSGELAKRSERRAEAEKQLQQAQAAGAEQEVEKFTKRLVKVTKQHNDECKHLLSLMGIPYLDAPSEAEASCAALVKAGKVYAAATEDMDCLTFGSPVLMRHLTASEAKKLPIQEFHLSRILQELGLNQEQFVDLCILLGSDYCESIRGIGPKRAVDLIQKHKSIEEIVRRLDPNKYPVPENWLHKEAHQLFLEPEVLDPESVELKWSEPNEEELIKFMCGEKQFSEERIRSGVKRLSKSRQGSTQGRLDDFFKVTGSLSSAKRKEPEPKGSTKKKAKTGAAGKFKRGK

SEQ ID NO: 14624 - protein, 501 aa, Homo sapiens
MGTRAARPAGLPCGAENPARRRLALGARQQIHSWSPRTPSTRLTAPAGPARGVARPAMAPDPVAAETAAQGPTPRYFTWDEVAQRSGCEERWLVIDRKVYNISEFTRRHPGGSRVISHYAGQDATDPFVAFHINKGLVKKYMNSLLIGELSPEQPSFEPTKNKELTDEFRELRATVERMGLMKANHVFFLLYLLHILLLDGAAWLTLWVFGTSFLPFLLCAVLLSAVQAQAGWLQHDFGHLSVFSTSKWNHLLHHFVIGHLKGAPASWWNHMHFQHHAKPNCFRKDPDINMHPFFFALGKILSVELGKQKKKYMPYNHQHKYFFLIGPPALLPLYFQWYIFYFVIQRKKWVDLAWMITFYVRFFLTYVPLLGLKAFLGLFFIVRFLESNWFVWVTQMNHIPMHIDHDRNMDWVSTQLQATCNVHKSAFNDWFSGHLNFQIEHHLFPTMPRHNYHKVAPLVQSLCAKHGIEYQSKPLLSAFADIIHSLKESGQLWLDAYLHQ

SEQ ID NO: 14625 - protein, 501 aa, Homo sapiens; identical to SEQ ID NO: 14624

SEQ ID NO: 14626 - protein, 445 aa, Homo sapiens
MGGVGEPGPREGPAQPGAPLPTFCWEQIRAHDQPGDKWLVIERRVYDISRWAQRHPGGSRLIGHHGAEDATDAFRAFHQDLNFVRKFLQPLLIGELAPEEPSQDGPLNAQLVEDFRALHQAAEDMKLFDASPTFFAFLLGHILAMEVLAWLLIYLLGPGWVPSALAAFILAISQAQSWCLQHDLGHASIFKKSWWNHVAQKFVMGQLKGFSAHWWNFRHFQHHAKPNIFHKDPDVTVAPVFLLGESSVEYGKKKRRYLPYNQQHLYFFLIGPPLLTLVNFEVENLAYMLVCMQWADLLWAASFYARFFLSYLPFYGVPGVLLFFVAVRVLESHWFVWITQMNHIPKEIGHEKHRDWVSSQLAATCNVEPSLFTNWFSGHLNFQIEHHLFPRMPRHNYSRVAPLVKSLCAKHGLSYEVKPFLTALVDIVRSLKKSGDIWLDAYLHQ

SEQ ID NO: 14627 - protein, 325 aa, Homo sapiens
MKLFDASPTFFAFLLGHILAMEVLAWLLIYLLGPGWVPSALAAFILAISQAQSWCLQHDLGHASIFKKSWWNHVAQKFVMGQLKGFSAHWWNFRHFQHHAKPNIFHKDPDVTVAPVFLLGESSVEYGKKKRRYLPYNQQHLYFFLIGPPLLTLVNFEVENLAYMLVCMQWADLLWAASFYARFFLSYLPFYGGPGKPLVRVDHTDEPHPQGDRPREAPGLGQLSAGSHLQRGALTFHQLVQRAPQLPDRAPPLPQDAETQLQPGGPAGQVAVCQARPQLRSEALPHRAGGHRQVRLQPGPSVLVASPGPMPTLVQVSLMLSPQGP

SEQ ID NO: 14628 - protein, 445 aa, Homo sapiens; identical to SEQ ID NO: 14626

SEQ ID NO: 14629 - protein, 575 aa, Homo sapiens
MTSKKLVNSVAGCADDALAGLVACNPNLQLLQGHRVALRSDLDSLKGRVALLSGGGSGHEPAHAGFIGKGMLTGVIAGAVFTSPAVGSILAAIRAVAQAGTVGTLLIVKNYTGDRLNFGLAREQARAEGIPVEMVVIGDDSAFTVLKKAGRRGLCGTVLIHKVAGALAEAGVGLEEIAKQVNVVTKAMGTLGVSLSSCSVPGSKPTFELSADEVELGLGIHGEAGVRRIKMATADEIVKLMLDHMTNTTNASHVPVQPGSSVVMMVNNLGGLSFLELGIIADATVRSLEGRGVKIARALVGTFMSALEMPGISLTLLLVDEPLLKLIDAETTAAAWPNVAAVSITGRKRSRVAPAEPQEAPDSTAAGGSASKRMALVLERVCSTLLGLEEHLNALDRAAGDGDCGTTHSRAARAIQEWLKEGPPPASPAQLLSKLSVLLLEKMGGSSGALYGLFLTAAAQPLKAKTSLPAWSAAMDAGLEAMQKYGKAAPGDRTMLDSLWAAGQELQAWKSPGADLLQVLTKAVKSAEAAAEATKNMEAGAGRASYISSARLEQPDPGAVAAAAILRAILEVLQS

SEQ ID NO: 14630 - protein, 575 aa, Homo sapiens; identical to SEQ ID NO: 14629

SEQ ID NO: 14631 - protein, 272 aa, Homo sapiens [sequence omitted]

SEQ ID NO: 14632 - protein, 93 aa, Homo sapiens
MEVAVAAAGRALRRAGEDSPEHGPGSCEVLQEWPKQEEALCLGSRRASLPGKDPGNCLICEDLFAAEEGVQGDAVEGIGVTTGEPYSAGFRQQ

SEQ ID NO: 14633 - protein, 1042 aa, Homo sapiens
MPGIVVFRRRWSVGSDDLVLPAIFLFLLHTTWFVILSVVLFGLVYNPHEACSLNLVDHGRGYLGILLSCMIAEMAIIWLSMRGGILYTEPRDSMQYVLYVRLAILVIEFIYAIVGIVWLTQYYTSCNDLTAKNVTLGMVVCNWVVILSVCITVLCVFDPTGRTFVKLRATKRRQRNLRTYNLRHRLEEGQATSWSRRLKVFLCCTRTKDSQSDAYSEIAYLFAEFFRDLDIVPSDIIAGLVLLRQRQRAKRNAVLDEANNDILAFLSGMPVTRNTKYLDLKNSQEMLRYKEVCYYMLFALAAYGWPMYLMRKPACGLCQLARSCSCCLCPARPRFAPGVTIEEDNCCGCNAIAIRRHFLDENMTAVDIVYTSCHDAVYETPFYVAVDHDKKKVVISIRGTLSPKDALTDLTGDAERLPVEGHHGTWLGHKGMVLSAEYIKKKLEQEMVLSQAFGRDLGRGTKHYGLIVVGHSLGAGTAAILSFLLRPQYPTLKCFAYSPPGGLLSEDAMEYSKEFVTAVVLGKDLVPRIGLSQLEGFRRQLLDVLQRSTKPKWRIIVGATKCIPKSELPEEVEVTTLASTRLWTHPSDLTIALSASTPLYPPGRIIHVVHNHPAEQCCCCEQEEPTYFAIWGDNKAFNEVIISPAMLHEHLPYVVMEGLNKVLENYNKGKTALLSAAKVMVSPTEVDLTPELIFQQQPLPTGPPMPTGLALELPTADHRNSSVRSKSQSEMSLEGFSEGRLLSPVVAAAARQDPVELLLLSTQERLAAELQARRAPLATMESLSDTESLYSFDSRRSSGFRSIRGSPSLHAVLERDEGHLFYIDPAIPEENPSLSSRTELLAADSLSKHSQDTQPLEAALGSGGVTPERPPSAAANDEEEEVGGGGGGPASRGELALHNGRLGDSPSPQVLEFAEFIDSLFNLDSKSSSFQDLYCMVVPESPTSDYAEGPKSPSQQEILLRAQFEPNLVPKPPRLFAGSADPSSGISLSPSFPLSSSGELMDLTPTGLSSQECLAADKIRTSTPTGHGASPAKQDELVISAR

SEQ ID NO: 14634 - protein, 1042 aa, Homo sapiens; identical to SEQ ID NO: 14633

SEQ ID NO: 14635 - protein, 612 aa, Homo sapiens
MRGLTKKTTGAEASLSATGKKGKDPGACSFTSAERLTRYHSPAATVNSWNLTTTKACAKESRTCLPAQRGQTATCWGSWQPRQPPEPDPALHLTLCELLGDREGAAIPAVGSSVLPQPNCHPRCPSPPSCPIVSNPNLKLEVSTRPTEPLQSHQPCPGSWCSGGAGLWAVMTSSYRPSSSFSCIPPGIRCQVDNGLMEEVPAASPPSTESGLGKGLPASSISRFVILSVVLFGLVYNPHEACSLNLVDHGRGYLGILLSCMIAEMAIIWLSMRGGILYTEPRDSMQYVLYVRLAILVIEFIYAIVGIVWLTQYYTSCNDLTAKNVTLGMVVCNWVVILSVCITVLCVFDPTGRTFVKLRATKRRQRNLRTYNLRHRLEEGQATSWSRRLKVFLCCTRTKDSQSDAYSEIAYLFAEFFRDLDIVPSDIIAGLVLLRQRQRAKRNAVLDEAFRDYYSRDFLGRAWLPLGLALKGLLTTGLVDVANNDILAFLSGMPVTRNTKYLDLKNSQEMLRYKEVCYYMLFALAAYGWPMYLMRKPACGLCQLARSCSSSQPMQSTASQACFWLGPSPALDEPQGPPIRGAGPAPLTGPPGPHITDSEAALSPEKRGATRY

SEQ ID NO: 14636 - protein, 403 aa, Homo sapiens
MPPISDAMSTKGSVVLAYSGSLDTSCTLLWLKEQGYDVIAYLANIGQKEDFEEARKNALKFGAKKVFIEDVGREFVEEFIWPAIQSSALYEDRYLLGTSRQALHRLQTNGNHPVEGGQVYVPQHHGKWEQSAPQIKVIAPWRMPKFYNQLKGLNDLMEYAKQHRIPIPVTPKNSWSMDENLMHISYESGILENPKNQAPPDQDPAKAPNTPDILEIEFKKGVPVKVTNVKDGTTHQTSLELFMYLNEVVGKQGVGCIDIMENRFIGMKSRGIYQAPASTILYLAHLDTKAFTMGQEVRKIKQGLGLKFVELVDTGFWYSPECEFVCHCIAKSQEQVEGKVQVSVLEGQVYILGQESPLSLYKEEPVSMNVQGDYQPIDATGFININSLRLKEYHRLQSKVTAK

SEQ ID NO: 14637 - protein, 213 aa, Homo sapiens
MSTKGSVVLAYSGSLDTSCTLLWLKEQGYDVIAYLANIGQKEDFEEARKNALKFGAKKVFIEDVGREFVEEFIWPAIQSSALYEDRYLLGTSRQALHRLQTNGNHPVEGGQVYVPQHHGKWVIAPWRMPKFYNQLKGLNDLMEYAKQHRIPIPVTPKNSWSMDENLMHISYESGILENPKNQAPPGLYTKTRTRPKPPTPLTFSRSSSKKESL

SEQ ID NO: 14638 - protein, 161 aa, Homo sapiens
MYLNEVVGKQGVGCIDIMENRFIGMKSRGIYQAPASTILYLAHLDTKAFTMGQEVRKIKQGLGLKFVELVDTGFWYSPECEFVCHCIAKSQEQVEGKVQVSVLEGQVYILGQESPLSLYKEEPVSMNVQGDYQPIDATGFININSLRLKEYHRLQSKVTAK

SEQ ID NO: 14639 - protein, 144 aa, Homo sapiens [sequence omitted]

SEQ ID NO: 14640 - protein, 527 aa, Homo sapiens
MRSDKSALVFLLLQLFCVGCGFCGKVLVWPCDMSHWLNVKVILEELIVRGHEVTVLTHSKPSLIDYRKPSALKFEVVHMPQDRTEENEIFVDLALNVLPGLSTWQSVIKLNDFFVEIRGTLKMMCESFIYNQTLMKKLQETNYDVMLIDPVIPCGDLMAELLAVPFVLTLRISVGGNMERSCGKLPAPLSYVPVPMTGLTDRMTFLERVKNSMLSVLFHFWIQDYDYHFWEEFYSKALGRPTTLCETVGKAEIWLIRTYWDFEFPQPYQPNFEFVGGLHCKPAKALPKEMENFVQSSGEDGIVVFSLGSLFQNVTEEKANIIASALAQIPQKVLWRYKGKKPSTLGANTRLYDWIPQNDLLGHPKTKAFITHGGMNGIYEAIYHGVPMVGVPIFGDQLDNIAHMKAKGAAVEINFKTMTSEDLLRALRTVITDSSYKENAMRLSRIHHDQPVKPLDRAVFWIEFVMRHKGAKHLRSAAHDLTWFQHYSIDVIGFLLACVATAIFLFTKCFLFSCQKFNKTRKIEKRE

SEQ ID NO: 14641 - protein, 306 aa, Homo sapiens
MRSDKSALVFLLLQLFCVGCGFCGKVLVWPCDMSHWLNVKVILEELIVRGHEVTVLTHSKPSLIDYRKPSALKFEVVHMPQDRTEENEIFVDLALNVLPGLSTWQSVIKLNDFFVEIRGTLKMMCESFIYNQTLMKKLQETNYDVMLIDPVIPCGDLMAELLAVPFVLTLRISVGGNMERSCGKLPAPLSYVPVPMTGLTDRMTFLERVKNSMLSVLFHFWIQDYDYHFWEEFYSKALGRPTTLCETVGKAEIWLIRTYWDFEFPQPYQPNFEFVGGLHCKPAKALPKESYTRKPSSLKPWHLYLK

SEQ ID NO: 14642 - protein, 334 aa, Homo sapiens
MGWSGRSGKGKLRRRSVSGNMASRSKRRAVESGVPQPPDPPVQRDEEEEKEVENEDEDDDDSDKEKDEEDEVIDEEVNIEFEAYSLSDNDYDGIKKLLQQLFLKAPVNTAELTDLLIQQNHIGSVIKQTDVSEDSNDDMDEDEVFGFISLLNLTERKGTQCVEQIQELVLRFCEKNCEKSMVEQLDKFLNDTTKPVGLLLSERFINVPPQIALPMYQQLQKELAGAHRTNKPCGKCYFYLLISKTFVEAGKNNSKKKPSNKKKAALMFANAEEEFFYEKAILKFNYSVQEESDTCLGGKWSFDDVPMTPLRTVMLIPGDKMNEIMDKLKEYLSV

SEQ ID NO: 14643 - protein, 312 aa, Homo sapiens
MGWSGRSGKGKLRRRSVSGNMASRSKRRAVESGVPQPPDPPVQRDEEEEKEVENEDEDDDDSDKEKDEEDEVIDEEVNIEFEAYSLSDNDYDGIKKLLQQLFLKAPVNTAELTDLLIQQNHIGSVIKQTDVSEDSNDDMDEDEVFGFISLLNLTERKGTQCVEQIQELVLRFCEKNCEKSMVEQLDKFLNDTTKPVGLLLSERFINVPPQIALPMYQQLQKELAGAHRTNKPCGKCYFYLLISKTFVEAGKNNSKKKPSNKKKAALMFANAEEEFFYEEQGKPEVLGGPDTRRGLEPVPIQHNGWSVPPVLE

SEQ ID NO: 14644 - protein, 743 aa, Homo sapiens
MEEEGLECPNSSSEKRYFPESLDSSDGDEEEVLACEDLELNPFDGLPYSSRYYKLLKEREDLPIWKEKYSFMENLLQNQIVIVSGDAKCGKSAQVPQWCAEYCLSIHYQHGGVICTQVHKQTVVQLALRVADEMDVNIGHEVGYVIPFENCCTNETILRYCTDDMLQREMMSNPFLGSYGVIILDDIHERSIATDVLLGLLKDVLLARPELKLIINSSPHLISKLNSYYGNVPVIEVKNKHPVEVVYLSEAQKDSFESILRLIFEIHHSGEKGDIVVFLACEQDIEKVCETVYQGSNLNPDLGELVVVPLYPKEKCSLFKPLDETEKRCQVYQRRVVLTTSSGEFLIWSNSVRFVIDVGVERRKVYNPRIRANSLVMQPISQSQAEIRKQILGSSSSGKFFCLYTEEFASKDMTPLKPAEMQEANLTSMVLFMKRIDIAGLGHCDFMNRPAPESLMQALEDLDYLAALDNDGNLSEFGIIMSEFPLDPQLSKSILASCEFDCVDEVLTIAAMVTAPNCFSHVPHGAEEAALTCWKTFLHPEGDHFTLISIYKAYQDTTLNSSSEYCVEKWCRDYFLNCSALRMADVIRAELLEIIKRIELPYAEPAFGSKENTLNIKKALLSGYFMQIARDVDGSGNYLMLTHKQVAQLHPLSGYSITKKMPEWVLFHKFSISENNYIRITSEISPELFMQLVPQYYFSNLPPSESKDILQQVVDHLSPVSTMNKEQQMCETCPETEQRCTLQ

SEQ ID NO: 14645 - protein, 743 aa, Homo sapiens; identical to SEQ ID NO: 14644

SEQ ID NO: 14646 - protein, 480 aa, Homo sapiens
MVWEQKSATIVMLTNLKERKEEKCHQYWPDQGCWTYGNIRVCVEDCVVLVDYTIRKFCIQPQLPDGCKAPRLVSQLHFTSWPDFGVPFTPIGMLKFLKKVKTLNPVHAGPIVVHCSAGVGRTGTFIVIDAMMAMMHAEQKVDVFEFVSRIRNQRPQMVQTDMQYTFIYQALLEYYLYGDTELDVSSLEKHLQTMHGTTTHFDKIGLEEEFRKLTNVRIMKENMRTGNLPANMKKARVIQIIPYDFNRVILSMKRGQEYTDYINASFIDGYRQKDYFIATQGPLAHTVEDFWRMIWEWKSHTIVMLTEVQEREQDKCYQYWPTEGSVTHGEITIEIKNDTLSEAISIRDFLVTLNQPQARQEEQVRVVRQFHFHGWPEIGIPAEGKGMIDLIAAVQKQQQQTGNHPITVHCSAGAGRTGTFIALSNILERVKAEGLLDVFQAVKSLRLQRPHMVQTLEQYEFCYKVVQDFIDIFSDYANFK

SEQ ID NO: 14647 - protein, 700 aa, Homo sapiens
MEPLCPLLLVGFSLPLARALRGNETTADSNETTTTSGPPDPGASQPLLAWLLLPLLLLLLVLLLAAYFFRFRKQRKAVVSTSDKKMPNGILEEQEQQRVMLLSRSPSGPKKYFPIPVEHLEEEIRIRSADDCKQFREEFNSLPSGHIQGTFELANKEENREKNRYPNILPNDHSRVILSQLDGIPCSDYINASYIDGYKEKNKFIAAQGPKQETVNDFWRMVWEQKSATIVMLTNLKERKEEKCHQYWPDQGCWTYGNIRVCVEDCVVLVDYTIRKFCIQPQLPDGCKAPRLVSQLHFTSWPDFGVPFTPIGMLKFLKKVKTLNPVHAGPIVVHCSAGVGRTGTFIVIDAMMAMMHAEQKVDVFEFVSRIRNQRPQMVQTDMQYTFIYQALLEYYLYGDTELDVSSLEKHLQTMHGTTTHFDKIGLEEEFRKLTNVRIMKENMRTGNLPANMKKARVIQIIPYDFNRVILSMKRGQEYTDYINASFIDGYRQKDYFIATQGPLAHTVEDFWRMIWEWKSHTIVMLTEVQEREQDKCYQYWPTEGSVTHGEITIEIKNDTLSEAISIRDFLVTLNQPQARQEEQVRVVRQFHFHGWPEIGIPAEGKGMIDLIAAVQKQQQQTGNHPITVHCSAGAGRTGTFIALSNILERVKAEGLLDVFQAVKSLRLQRPHMVQTLEQYEFCYKVVQDFIDIFSDYANFK

SEQ ID NO: 14648 - protein, 536 aa, Homo sapiens
MSNRSSFSRLTWFRKQRKAVVSTSDKKMPNGILEEQEQQRVMLLSRSPSGPKKYFPIPVEHLEEEIRIRSADDCKQFREEFNSLPSGHIQGTFELANKEENREKNRYPNILPNDHSRVILSQLDGIPCSDYINASYIDGYKEKNKFIAAQGPKQETVNDFWRMVWEQKSATIVMLTNLKERKEEKCHQYWPDQGCWTYGNIRVCVEDCVVLVDYTIRKFCIQPQLPDGCKAPRLVSQLHFTSWPDFGVPFTPIGMLKFLKKVKTLNPVHAGPIVVHCSAGVGRTGTFIVIDAMMAMMHAEQKVDVFEFVSRIRNQRPQMVQTDMQYTFIYQALLEYYLYGDTELDVSSLEKHLQTMHGTTTHFDKIGLEEEFRKLTNVRIMKENMRTGNLPANMKKARVIQIIPCKAPVAWLGQGWGGAGAGGFHPGEAIDRLPLCTRVKSRVSSGLRLRAPVCCTKCQVEKTPVKHQLTQTVLHGSQASCFGYELADAGGQPRLISGEGFTEAGDLRQARLGIPCLIPCLPKPGQRPASPLHRGA

SEQ ID NO: 14649 - protein, 700 aa, Homo sapiens; identical to SEQ ID NO: 14647

SEQ ID NO: 14650 - protein, 642 aa, Homo sapiens
MSNRSSFSRLTWFRKQRKAVVSTSDKKMPNGILEEQEQQRVMLLSRSPSGPKKYFPIPVEHLEEEIRIRSADDCKQFREEFNSLPSGHIQGTFELANKEENREKNRYPNILPNDHSRVILSQLDGIPCSDYINASYIDGYKEKNKFIAAQGPKQETVNDFWRMVWEQKSATIVMLTNLKERKEEKCHQYWPDQGCWTYGNIRVCVEDCVVLVDYTIRKFCIQPQLPDGCKAPRLVSQLHFTSWPDFGVPFTPIGMLKFLKKVKTLNPVHAGPIVVHCSAGVGRTGTFIVIDAMMAMMHAEQKVDVFEFVSRIRNQRPQMVQTDMQYTFIYQALLEYYLYGDTELDVSSLEKHLQTMHGTTTHFDKIGLEEEFRKLTNVRIMKENMRTGNLPANMKKARVIQIIPYDFNRVILSMKRGQEYTDYINASFIDGYRQKDYFIATQGPLAHTVEDFWRMIWEWKSHTIVMLTEVQEREQDKCYQYWPTEGSVTHGEITIEIKNDTLSEAISIRDFLVTLNQPQARQEEQVRVVRQFHFHGWPEIGIPAEGKGMIDLIAAVQKQQQQTGNHPITVHCSAGAGRTGTFIALSNILERVKAEGLLDVFQAVKSLRLQRPHMVQTLEQYEFCYKVVQDFIDIFSDYANFK

SEQ ID NO: 14651 - protein, 102 aa, Homo sapiens [sequence omitted]

SEQ ID NO: 14652 - protein, 467 aa, Homo sapiens
MLIFWTITLFLLGAAKGKEVCYEDLGCFSDTEPWGGTAIRPLKILPWSPEKIGTRFLLYTNENPNNFQILLLSDPSTIEASNFQMDRKTRFIIHGFIDKGDESWVTDMCKKLFEVEEVNCICVDWKKGSQATYTQAANNVRVVGAQVAQMLDILLTEYSYPPSKVHLIGHSLGAHVAGEAGSKTPGLSRITGLDPVEASFESTPEEVRLDPSDADFVDVIHTDAAPLIPFLGFGTNQQMGHLDFFPNGGESMPGCKKNALSQIVDLDGIWAGTRDFVACNHLRSYKYYLESILNPDGFAAYPCTSYKSFESDKCFPCPDQGCPQMGHYADKFAGRTSEEQQKFFLNTGEASNFARWRYGVSITLSGRTATGQIKVALFGNKGNTHQYSIFRGILKPGSTHSYEFDAKLDVGTIEKVKFLWNNNVINPTLPKVGATKITVQKGEEKTVYNFCSEDTVREDTLLTLTPC

SEQ ID NO: 14653 - protein, 467 aa, Homo sapiens; identical to SEQ ID NO: 14652

SEQ ID NO: 14654 - protein, 832 aa, Homo sapiens [sequence omitted]

SEQ ID NO: 14655 - protein, 724 aa, Homo sapiens
MGDEDWEAEINPHMSSYVPIFEKDRYSGENGDNFNRTPASSSEMDDGPSRRDHFMKSGFASGRNFGNRDAGECNKRDNTSTMGGFGVGKSFGNRGFSNSRFEDGDSSGFWRESSNDCEDNPTRNRGFSKRGGYRDGNNSEASGPYRRGGRGSFRGCRGGFGLGSPNNDLDPDECMQRTGGLFGSRRPVLSGTGNGDTSQSRSGSGSERGGYKGLNEEVITGSGKNSWKSEAEGGESSDTQGPKVTYIPPPPPEDEDSIFAHYQTGINFDKYDTILVEVSGHDAPPAILTFEEANLCQTLNNNIAKAGYTKLTPVQKYSIPIILAGRDLMACAQTGSGKTAAFLLPILAHMMHDGITASRFKELQEPECIIVAPTRELVNQIYLEARKFSFGTCVRAVVIYGGTQLGHSIRQIVQGCNILCATPGRLMDIIGKEKIGLKQIKYLVLDEADRMLDMGFGPEMKKLISCPGMPSKEQRQTLMFSATFPEEIQRLAAEFLKSNYLFVAVGQVGGACRDVQQTVLQVGQFSKREKLVEILRNIGDERTMVFVETKKKADFIATFLCQEKISTTSIHGDREQREREQALGDFRFGKCPVLVATSVAARGLDIENVQHVINFDLPSTIDEYVHRIGRTGRCGNTGRAISFFDLESDNHLAQPLVKVLTDAQQDVPAWLEEIAFSTYIPGFSGSTRGNVFASVDTRKGKSTLNTAGFSSSQAPNPVDDESWD

SEQ ID NO: 14656 - protein, 724 aa, Homo sapiens; identical to SEQ ID NO: 14655

SEQ ID NO: 14657 - protein, 724 aa, Homo sapiens; identical to SEQ ID NO: 14655

SEQ ID NO: 14658 - protein, 724 aa, Homo sapiens; identical to SEQ ID NO: 14655

SEQ ID NO: 14659 - protein, 1042 aa, Homo sapiens
MADAFGDELFSVFEGDSTTAAGTKKDKEKDKGKWKGPPGSADKAGKRFDGKLQSESTNNGKNKRDVDFEGTDEPIFGKKPRIEESITEDLSLADLMPRVKVQSVETVEGCTHEVALPAEEDYLPLKPRVGKAAKEYPFILDAFQREAIQCVDNNQSVLVSAHTSAGKTVCAEYAIALALREKQRVIFTSPIKALSNQKYREMYEEFQDVGLMTGDVTINPTASCLVMTTEILRSMLYRGSEVMREVAWVIFDEIHYMRDSERGVVWEETIILLPDNVHYVFLSATIPNARQFAEWICHLHKQPCHVIYTDYRPTPLQHYIFPAGGDGLHLVVDENGDFREDNFNTAMQVLRDAGDLAKGDQKGRKGGTKGPSNVFKIVKMIMERNFQPVIIFSFSKKDCEAYALQMTKLDFNTDEEKKMVEEVFSNAIDCLSDEDKKLPQVEHVLPLLKRGIGIHHGGLLPILKETIEILFSEGLIKALFATETFAMGINMPARTVLFTNARKFDGKDFRWISSGEYIQMSGRAGRRGMDDRGIVILMVDEKMSPTIGKQLLKGSADPLNSAFHLTYNMVLNLLRVEEINPEYMLEKSFYQFQHYRAIPGVVEKVKNSEEQYNKIVIPNEESVVIYYKIRQQLAKLGKEIEEYIHKPKYCLPFLQPGRLVKVKNEGDDFGWGVVVNFSKKSNVKPNSGELDPLYVVEVLLRCSKESLKNSATEAAKPAKPDEKGEMQVVPVLVHLLSAISSVRLYIPKDLRPVDNRQSVLKSIQEVQKRFPDGIPLLDPIDDMGIQDQGLKKVIQKVEAFEHRMYSHPLHNDPNLETVYTLCEKKAQIAIDIKSAKRELKKARTVLQMDELKCRKRVLRRLGFATSSDVIEMKGRVACEISSADELLLTEMMFNGLFNDLSAEQATALLSCFVFQENSSEMPKLTEQLAGPLRQMQECAKRIAKVSAEAKLEIDEETYLSSFKPHLMDVVYTWATGATFAHICKMTDVFEGSIIRCMRRLEELLRQMCQAAKAIGNTELENKFAEGITKIKRDIVFAASLYL

SEQ ID NO: 14660 - protein, 1042 aa, Homo sapiens; identical to SEQ ID NO: 14659

SEQ ID NO: 14661 - protein, 513 aa, Homo sapiens
MAMEIDSRPGGLPGSSCNLGAAREHMQAVTRNYITHPRVTYRTVCSVNGPLVVLDRVKFAQYAEIVHFTLPDGTQRSGQVLEVAGTKAIVQVFEGTSGIDARKTTCEFTGDILRTPVSEDMLGRVFNGSGKPIDKGPVVMAEDFLDINGQPINPHSRIYPEEMIQTGISPIDVMNSIARGQKIPIFSAAGLPHNEIAAQICRQAGLVKKSKAVLDYHDDNFAIVFAAMGVNMETARFFKSDFEQNGTMGNVCLFLNLANDPTIERIITPRLALTTAEFLAYQCEKHVLVILTDMSSYAEALREVSAAREEVPGRRGFPGYMYTDLATIYERAGRVEGRGGSITQIPILTMPNDDITHPIPDLTGFITEGQIYVDRQLHNRQIYPPINVLPSLSRLMKSAIGEGMTRKDHGDVSNQLYACYAIGKDVQAMKAVVGEEALTSEDLLYLEFLQKFEKNFINQGPYENRSVFESLDLGWKLLRIFPKEMLKRIPQAVIDEFYSREGALQDLAPDTAL

SEQ ID NO: 14662 - protein, 390 aa, Homo sapiens
MRTRTGSQLAAREVTGSGAVPRQLEGRRCQAGRDANGGTSSDGSSSMAAIYGGVEGGGTRSEVLLVSEDGKILAEADGLSTNHWLIGTDKCVERINEMVNRAKRKAGVDPLVPLRSLGLSLSGGDQEDAGRILIEELRDRFPYLSESYLITTDAAGSIATATPDGGVVLISGTGSNCRLINPDGSESGCGGWGHMMGDEGSAYWIAHQAVKIVFDSIDNLEAAPHDIGYVKQAMFHYFQVPDRLGILTHLYRDFDKCRFAGFCRKIAEGAQQGDPLSRYIFRKAGEMLGRHIVAVLPEIDPVLFQGKIGLPILCVGSVWKSWELLKEGFLLALTQGREIQAQNFFSSFTLMKLRHSSALGGASLGARHIGHLLPMDYSANAIAFYSYTFS

SEQ ID NO: 14663 - protein, 390 aa, Homo sapiens; identical to SEQ ID NO: 14662

SEQ ID NO: 14664 - protein, 302 aa, Homo sapiens
MALVASVRVPARVLLRAGARLPGAALGRTERAAGGGDGARRFGSQRVLVEPDAGAGVAVMKFKNPPVNSLSLEFLTELVISLEKLENDKSFRGVILTSDRPGVFSAGLDLTEMCGRSPAHYAGYWKAVQELWLRLYQSNLVLVSAINGACPAGGCLVALTCDYRILADNPRYCIGLNETQLGIIAPFWLKDTLENTIGHRAAERALQLGLLFPPAEALQVGIVDQVVPEEQVQSTALSAIAQWMAIPDHARQLTKAMMRKATASRLVTQRDADVQNFVSFISKDSIQKSLQMYLERLKEEKG

SEQ ID NO: 14665 - protein, 285 aa, Homo sapiens
MALVASVRVPARVLLRAGARLPGAALGRTERAAGGGDGARRFGSQRVLVEPDAGAGVAVMKFKNPPVNSLSLEFLTELVISLEKLENDKSFRGVILTSDRPGVFSAGLDLTEMCGRSPAHYAGYWKAVQELWLRLYQSNLVLVSAINGACPAGGCLVALTCDYRILADNPRLKDTLENTIGHRAAERALQLGLLFPPAEALQVGIVDQVVPEEQVQSTALSAIAQWMAIPDHARQLTKAMMRKATASRLVTQRDADVQNFVSFISKDSIQKSLQMYLERLKEEKG

SEQ ID NO: 14666 - protein, 321 aa, Homo sapiens
MAAAEAGGDDARCVRLSAERAQALLADVDTLLFDCDGVLWRGETAVPGAPEALRALRARGKRLGFITNNSSKTRAAYAEKLRRLGFGGPAGPGASLEVFGTAYCTALYLRQRLAGAPAPKAYVLGSPALAAELEAVGVASVGVGPEPLQGEGPGDWLHAPLEPDVRAVVVGFDPHFSYMKLTKALRYLQQPGCLLVGTNMDNRLPLENGRFIAGTGCLVRAVEMAAQRQADIIGKPSRFIFDCVSQEYGINPERTVMVGDRLDTDILLGATCGLKTILTLTGVSTLGDVKNNQESDCVSKKKMVPDFYVDSIADLLPALQG

SEQ ID NO: 14667 - protein, 162 aa, Homo sapiens
MMTTSLIWGIAIAACCCLWLILGIRRRQTGEPPLENGLIPYLGCALQFGANPLEFLRANQRKHGHVFTCKLMGKYVHFITNPLSYHKVLCHGKYFDWKKFHFATSAKAFGHRSIDPMDGNTTENINDTFIKTLQGHALNSLTESMICLGDRRDVFFLLPSDV

SEQ ID NO: 14668 - protein, 352 aa, Homo sapiens
MRPPVSSNSKTAAWVTEGMYSFCYRVMFEAGYLTIFGRDLTRRDTQKAHILNNLDNFKQFDKVFPALVAGLPIHMFRTAHNAREKLAESLRHENLQKRESISELISLRMFLNDTLSTFDDLEKAKTHLVVLWASQANTIPATFWSLFQMIRNPEAMKAATEEVKRTLENAGQKVSLEGNPICLSQAELNDLPVLDSIIKESLRLSSASLNIRTAKEDFTLHLEDGSYNIRKDDIIALYPQLMHLDPEIYPDPLTFKYDRYLDENGKTKTTFYCNGLKLKYYYMPFGSGATICPGRLFAIHEIKQFLILMLSYFELELIEGQAKCPPLDQSRAGLGILPPLNDIEFKYKFKHL

SEQ ID NO: 14669 - protein, 327 aa, Homo sapiens
MMFEAGYLTIFGRDLTRRDTQKAHILNNLDNFKQFDKVFPALVAGLPIHMFRTAHNAREKLAESLRHENLQKRESISELISLRMFLNDTLSTFDDLEKAKTHLVVLWASQANTIPATFWSLFQMIRNPEAMKAATEEVKRTLENAGQKVSLEGNPICLSQAELNDLPVLDSIIKESLRLSSASLNIRTAKEDFTLHLEDGSYNIRKDDIIALYPQLMHLDPEIYPDPLTFKYDRYLDENGKTKTTFYCNGLKLKYYYMPFGSGATICPGRLFAIHEIKQFLILMLSYFELELIEGQAKCPPLDQSRAGLGILPPLNDIEFKYKFKHL

SEQ ID NO: 14670 - protein, 486 aa, Homo sapiens
MMTTSLIWGIAIAACCCLWLILGIRRRQTGEPPLENGLIPYLGCALQFGANPLEFLRANQRKHGHVFTCKLMGKYVHFITNPLSYHKVLCHGKYFDWKKFHFATSAKAFGHRSIDPMDGNTTENINDTFIKTLQGHALNSLTESTAAWVTEGMYSFCYRVMFEAGYLTIFGRDLTRRDTQKAHILNNLDNFKQFDKVFPALVAGLPIHMFRTAHNAREKLAESLRHENLQKRESISELISLRMFLNDTLSTFDDLEKAKTHLVVLWASQANTIPATFWSLFQMIRNPEAMKAATEEVKRTLENAGQKVSLEGNPICLSQAELNDLPVLDSIIKESLRLSSASLNIRTAKEDFTLHLEDGSYNIRKDDIIALYPQLMHLDPEIYPDPLTFKYDRYLDENGKTKTTFYCNGLKLKYYYMPFGSGATICPGRLFAIHEIKQFLILMLSYFELELIEGQAKCPPLDQSRAGLGILPPLNDIEFKYKFKHL

SEQ ID NO: 14671 - protein, 141 aa, Homo sapiens
MMTTSLIWGIAIAACCCLWLILGIRRRQTGEPPLENGLIPYLGCALQFGANPLEFLRANQRKHGHVFTCKLMGKYVHFITNPLSYHKVLCHGKYFDWKKFHFATSAKAFGHRSIDPMDGNTTENGKHDGKPPTYHETSSLL

SEQ ID NO: 14672 - protein, 486 aa, Homo sapiens
MMTTSLIWGIAIAACCCLWLILGIRRRQTGEPPLENGLIPYLGCALQFGANPLEFLRANQRKHGHVFTCKLMGKYVHFITNPLSYHKVLCHGKYFDWKKFHFATSAKAFGHRSIDPMDGNTTENINDTFIKTLQGHALNSLTESMMENLQRIMRPPVSSNSKTAAWVTEGMYSFCYRVMFEAGYLTIFGRDLTRRDTQKAHILNNLDNFKQFDKVFPALVAGLPIHMFRTAHNAREKLAESLRHENLQKRESISELISLRMFLNDTLSTFDDLEKAKTHLVVLWASQANTIPATFWSLFQMIRNPEAMKAATEEVKRTLENAGQKVSLEGNPICLSQAELNDLPVLDSIIKESLRLSSASLNIRTAKEDFTLHLEDGSYNIRKDDIIALYPQLMHLDPEIYPDPLTFKYDRYLYYYMPFGSGATICPGRLFAIHEIKQFLILMLSYFELELIEGQAKCPPLDQSRAGLGILPPLNDIEFKYKFKHL

SEQ ID NO: 14673 - protein, 504 aa, Homo sapiens
MMTTSLIWGIAIAACCCLWLILGIRRRQTGEPPLENGLIPYLGCALQFGANPLEFLRANQRKHGHVFTCKLMGKYVHFITNPLSYHKVLCHGKYFDWKKFHFATSAKAFGHRSIDPMDGNTTENINDTFIKTLQGHALNSLTESMMENLQRIMRPPVSSNSKTAAWVTEGMYSFCYRVMFEAGYLTIFGRDLTRRDTQKAHILNNLDNFKQFDKVFPALVAGLPIHMFRTAHNAREKLAESLRHENLQKRESISELISLRMFLNDTLSTFDDLEKAKTHLVVLWASQANTIPATFWSLFQMIRNPEAMKAATEEVKRTLENAGQKVSLEGNPICLSQAELNDLPVLDSIIKESLRLSSASLNIRTAKEDFTLHLEDGSYNIRKDDIIALYPQLMHLDPEIYPDPLTFKYDRYLDENGKTKTTFYCNGLKLKYYYMPFGSGATICPGRLFAIHEIKQFLILMLSYFELELIEGQAKCPPLDQSRAGLGILPPLNDIEFKYKFKHL

SEQ ID NO: 14674 - protein, 469 aa, Homo sapiens
MMTTSLIWGIAIAACCCLWLILGIRRRQTGEPPLENGLIPYLGCALQFGANPLEFLRANQRKHGHVFTCKLMGKYVHFITNPLSYHKVLCHGKYFDWKKFHFATSAKAFGHRSIDPMDGNTTSLTESMMENLQRIMRPPVSSNSKTAAWVTEGMYSFCYRVMFEAGYLTIFGRDLTRRDTQKAHILSLPIHMFRTAHNAREKLAESLRHENLQKRESISELISLRMFLNDTLSTFDDLEKAKTHLVVLWASQANTIPATFWSLFQMIRNPEAMKAATEEVKRTLENAGQKVSLEGNPICLSQAELNDLPVLDSIIKESLRLSSASLNIRTAKEDFTLHLEDGSYNIRKDDIIALYPQLMHLDPEIYPDPLTFKYDRYLDENGKTKTTFYCNGLKLKYYYMPFGSGATICPGRLFAIHEIKQFLILMLSYFELELIEGQAKCPPLDQSRAGLGILPPLNDIEFKYKFKHL

SEQ ID NO: 14675 - protein, 440 aa, Homo sapiens
MMTTSLIWGIAIAACCCLWLILGIRRRQTGEPPLENGLIPYLGCALQFGANPLEFLRANQRKHGHVFTCKLMGKYVHFITNPLSYHKVLCHGKYFDWKKFHFATSAKAFGHRSIDPMDGNTTENINDTFIKTLQGHALNSLTESMMENLQRIMRPPVSSNSKTAAWVTEGMYSFCYRVMFEAGYLTIFGRDLTRRDTQKAHILNNLDNFKQFDKVFPALVAGLPIHMFRTAHNAREKLAESLRHENLQKRESISELISLRMFLNDTLSTFDDLEKAKTHLVVLWASQANTIPATFWSLFQMIRNPEAMKAATEEVKRTLENAGQKVSLEGNPICLSQAELNDLPVLDSIIKESLRLSSASLNIRTAKEDFTLHLEDGSYNIRKDDIIALYPQLMHLDPEIYPDPLTFKYDRYLDENTCPLDRELQYVLEDCSLSTKSSNF

SEQ ID NO: 14676 - protein, 164 aa, Homo sapiens
MIWRRAALAGTRLVWSRSGSAGWLDRAAGAAGAAAAAASGMESNTSSSLENLATAPVNQIQETISDNCVVIFSKTSCSYCTMAKKLFHDMNVNYKVVELDLLEYGNQFQDALYKMTGERTVPRIFVNGTFIGGATDTHRLHKEGKLLPLVHQCYLKKSKRKEFQ

SEQ ID NO: 14677 - protein, 165 aa, Homo sapiens [sequence omitted]

SEQ ID NO: 14678 - protein, 422 aa, Homo sapiens
MLQWRRRHCCFAKMTWNAKRSLFRTHLIGVLSLVFLFAMFLFFNHHDWLPGRAGFKENPVTYTFRGFRSTKSETNHSSLRNIWKETVPQTLRPQTATNSNNTDLSPQGVTGLENTLSANGSIYNEKGTGHPNSYHFKYIINEPEKCQEKSPFLILLIAAEPGQIEARRAIRQTWGNESLAPGIQITRIFLLGLSIKLNGYLQRAILEESRQYHDIIQQEYLDTYYNLTIKTLMGMNWVATYCPHIPYVMKTDSDMFVNTEYLINKLLKPDLPPRHNYFTGYLMRGYAPNRNKDSKWYMPPDLYPSERYPVFCSGTGYVFSGDLAEKIFKVSLGIRRLHLEDVYVGICLAKLRIDPVPPPNEFVFNHWRVSYSSCKYSHLITSHQFQPSELIKYWNHLQQNKHNACANAAKEKAGRYRHRKLH

SEQ ID NO: 14679 - protein, 701 aa, Homo sapiens [sequence omitted]

SEQ ID NO: 14680 - protein, 717 aa, Homo sapiens
MTSQPLRLAEEYGPSPGESELAVNPFDGLPFSSRYYELLKQRQALPIWAARFTFLEQLESNPTGVVLVSGEPGSGKSTQIPQWCAEFALARGFQKGQVTVTQPYPLAARSLALRVADEMDLTLGHEVGYSIPQEDCTGPNTLLRFCWDRLLLQEVASTRGTGAWGVLVLDEAQERSVASDSLQGLLQDARLEKLPGDLRVVVVTDPALEPKLRAFWGNPPIVHIPREPGERPSPIYWDTIPPDRVEAACQAVLELCRKELPGDVLVFLPSEEEISLCCESLSREVESLLLQGLPPRVLPLHPDCGRAVQAVYEDMDARKVVVTHWLADFSFSLPSIQHVIDSGLELRSVYNPRIRAEFQVLRPISKCQAEARRLRARGFPPGSCLCLYPKSFLELEAPPLPQPRVCEENLSSLVLLLKRRQIAEPGECHFLDQPAPEALMQALEDLDYLAALDDDGDLSDLGVILSEFPLAPELAKALLASCEFDCVDEMLTLAAMLTAAPGFTRPPLSAEEAALRRALEHTDGDHSSLIQVYEAFIQSGADEAWCQARGLNWAALCQAHKLRGELLELMQRIELPLSLPAFGSEQNRRDLQKALVSGYFLKVARDTDGTGNYLLLTHKHVAQLSSYCCYRSRRAPARPPPWVLYHNFTISKDNCLSIVSEIQPQMLVELAPPYFLSNLPPSESRDLLNQLREGMADSTAGSKSSSAQEFRDPCVLQ

SEQ ID NO: 14681 - protein, 792 aa, Homo sapiens [sequence omitted]

SEQ ID NO: 14682 - protein, 917 aa, Homo sapiens
MIASHLLAYFFTELNHDQVQKVDQYLYHMRLSDETLLEISKRFRKEMEKGLGATTHPTAAVKMLPTFVRSTPDGTEHGEFLALDLGGTNFRVLWVKVTDNGLQKVEMENQIYAIPEDIMRGSGTQLFDHIAECLANFMDKLQIKDKKLPLGFTFSFPCHQTKLDESFLVSWTKGFKSSGVEGRDVVALIRKAIQRRGDFDIDIVAVVNDTVGTMMTCGYDDHNCEIGLIVGTGSNACYMEEMRHIDMVEGDEGRMCINMEWGAFGDDGSLNDIRTEFDQEIDMGSLNPGKQLFEKMISGMYMGELVRLILVKMAKEELLFGGKLSPELLNTGRFETKDISDIEGEKDGIRKAREVLMRLGLDPTQEDCVATHRICQIVSTRSASLCAATLAAVLQRIKENKGEERLRSTIGVDGSVYKKHPHFAKRLHKTVRRLVPGCDVRFLRSEDGSGKGAAMVTAVAYRLADQHRARQKTLEHLQLSHDQLLEVKRRMKVEMERGLSKETHASAPVKMLPTYVCATPDGTEKGDFLALDLGGTNFRVLLVRVRNGKWGGVEMHNKIYAIPQEVMHGTGDELFDHIVQCIADFLEYMGMKGVSLPLGFTFSFPCQQNSLDESILLKWTKGFKASGCEGEDVVTLLKEAIHRREEFDLDVVAVVNDTVGTMMTCGFEDPHCEVGLIVGTGSNACYMEEMRNVELVEGEEGRMCVNMEWGAFGDNGCLDDFRTEFDVAVDELSLNPGKQRFEKMISGMYLGEIVRNILIDFTKRGLLFRGRISERLKTRGIFETKFLSQIESDCLALLQVRAILQHLGLESTCDDSIIVKEVCTVVARRAAQLCGAGMAAVVDRIRENRGLDALKVTVGVDGTLYKLHPHFAKVMHETVKDLAPKCDVSFLQSEDGSGKGAALITAVACRIREAGQR

SEQ ID NO: 14683 - protein, 917 aa, Homo sapiens; identical to SEQ ID NO: 14682

SEQ ID NO: 14684 - protein, 355 aa, Homo sapiens
MSRQLSRARPATVLGAMEMGRRMDAPTSAAVTRAFLERGHTEIDTAFVYSEGQSETILGGLGLRLGGSDCRVKIDTKAIPLFGNSLKPDSLRFQLETSLKRLQCPRVDLFYLHMPDHSTPVEETLRACHQLHQEGKFVELGLSNYAAWEVAEICTLCKSNGWILPTVYQGMYNAITRQVETELFPCLRHFGLRFYAFNPLADQSPEGCGSFWGTLGPGADCCFPSGGLLTGKYKYEDKDGKQPVGRFFGNTWAEMYRNRYWKEHHFEGIALVEKALQAAYGASAPSMTSATLRWMYHHSQLQGAHGDAVILGMSSLEQLEQNLAAAEEGPLEPAVVDAFNQAWHLVAHECPNYFR

SEQ ID NO: 14685 - protein, 331 aa, Homo sapiens [sequence omitted]

SEQ ID NO: 14686 - protein, 161 aa, Homo sapiens [sequence omitted]

SEQ ID NO: 14687 - protein, 442 aa, Homo sapiens
MARGYGATVSLVLLGLGLALAVIVLAVVLSRHQAPCGPQAFAHAAVAADSKVCSDIGRAILQQQGSPVDATIAALVCTSVVNPQSMGLGGGVIFTIYNVTTGAQWIGVPGELRGYAEAHRRHGRLPWAQLFQPTIALLRGGHVVAPVLSRFLHNSILRPSLQASTLRQLFFNGTEPLRPQDPLPWPALATTLETVATEGVEVFYTGRLGQMLVEDIAKEGSQLTLQDLAKFQPEVVDALEVPLGDYTLYSPPPPAGGAILSFILNVLRGFNFSTESMARPEGRVNVYHHLVETLKFAKGQRWRLGDPRSHPKLQNASRDLLGETLAQLIRQQIDGRGDHQLSHYSLAEAWGHGTGTSHVSVLGEDGSAVAATSTINTPFGAMVYSPRTGIILNNELLDLCERCPRGSGTTPSPVETGWVELPEGAGPQFQASVPHPPWCPPS

SEQ ID NO: 14688 - protein, 586 aa, Homo sapiens
MARGYGATVSLVLLGLGLALAVIVLAVVLSRHQAPCGPQAFAHAAVAADSKVCSDIGRAILQQQGSPVDATIAALVCTSVVNPQSMGLGGGVIFTIYNVTTGKVEVINARETVPASHAPSLLDQCAQALPLGTGAQWIGVPGELRGYAEAHRRHGRLPWAQLFQPTIALLRGGHVVAPVLSRFLHNSILRPSLQASTLRQLFFNGTEPLRPQDPLPWPALATTLETVATEGVEVFYTGRLGQMLVEDIAKEGSQLTLQDLAKFQPEVVDALEVPLGDYTLYSPPPPAGGAILSFILNVLRGFNFSTESMARPEGRVNVYHHLVETLKFAKGQRWRLGDPRSHPKLQNASRDLLGETLAQLIRQQIDGRGDHQLSHYSLAEAWGHGTGTSHVSVLGEDGSAVAATSTINTPFGAMVYSPRTGIILNNELLDLCERCPRGSGTTPSPVSGDRVGGAPGRCWPPVPGERSPSSMVPSILINKAQGSKLVIGGAGGELIISAVAQAIMSKLWLGFDLRAAIAAPILHVNSKGCVEYEPNFSQEVQRGLQDRGQNQTQRPFFLNVVQAVSQEGACVYAVSDLRKSGEAAGY

SEQ ID NO: 14689 - protein, 244 aa, Homo sapiens
MGLELFLDLVSQPSRAVYIFAKKNGIPLELRTVDLVKGQHKSKEFLQINSLGKLPTLKDGDFILTESSAILIYLSCKYQTPDHWYPSDLQARARVHEYLGWHADCIRGTFGIPLWVQVLGPLIGVQVPEEKVERNRTAMDQALQWLEDKFLGDRPFLAGQQVTLADLMALEELMQPVALGYELFEGRPRLAAWRGRVEAFLGAELCQEAHSIILSILEQAAKKTLPTPSPEAYQAMLLRIARIP

SEQ ID NO: 14690 - protein, 582 aa, Homo sapiens
MGFTRCLATENYQQELTEKMKFSAQECPEKVPEDKSALCSGPLQQTMDRKQLRTSGEGLSNSWRQNDIPFELWMVEEHLKPEFLKVNPLGKVPALRDGDFLLAKRLEKRSLTPPAHSMVIVLYLSRKYQIRGHWYPPELQARTCVDEYLAWKHVTIQLPATNVYLCKPADAAQLERLLGRLMPALQHLDWGVLVARPFLAMEQISLEDLVLTEVMQARVAAALGTELLLEAHKLILQPLNHSEAWRDPQLAQKQAQVCGWPTAAVGPGMCLNMALELYMDLLSAPCRAVYIFSKKHDIQFNFQFVDLLKGHHHSKGYIDINPLRKLPSLKDGKFILSESPQLLLTPQGSFPALTDCQTDSSGEGLSRGRLGSSLLWKPQQLGPGHTGVVDVVALRKARAVPLTGPFCSAAILYYLCRKYSAPSHWCPPDPHARARVDEFVAWQHTAFQLPMKKIVWLKLLIPKITGEEVSAEKMEHAVEEVKNSLQLFEEYFLQDKMFITGNQISLADLVAVVEMMQPMAANYNVFLNSSKLAEWRMRVELNIGCGLFREAHDRLMQLADWDFSTLDPMVTRKICEFREKYL

SEQ ID NO: 14691 - protein, 340 aa, Homo sapiens
MGFTRCLATENYQQELTEKMKFSAQECPEKVPEDKSALCSGPLQQTMDRKQLRTSGEGLSNSWRQNDIPFELWMVEEHLKPEFLKVNPLGKVPALRDGDFLLAKRLEKRSLTPPAHSMVIVLYLSRKYQIRGHWYPPELQARTCVDEYLAWKHVTIQLPATNVYLCKPADAAQLERLLGRLMPALQHLDWGVLVARPFLAMEQISLEDLVLTEVMQARVAAALGTELLLEAHKLILQPLNHSEAWRDPQLAQKQAQVCGWPTAAVGPGMCLNMALELYMDLLSAPCRAVYIFSKKHDIQFNFQFVDLLKGHHHSKGYIDINPLRKLPSLKDGKFILSESC

SEQ ID NO: 14692 - protein, 107 aa, Homo sapiens
MPFLELDTNLPANRVPAGLEKRLCAAAASILGKPADRVNVTVRPGLAMALSGSTEPCAQLSISSIGVVGTAEDNRSHSAHFFEFLTKELALGQDRQVPGEVHGRLTE

SEQ ID NO: 14693 - protein, 118 aa, Homo sapiens
MPFLELDTNLPANRVPAGLEKRLCAAAASILGKPADRVNVTVRPGLAMALSGSTEPCAQLSISSIGVVGTAEDNRSHSAHFFEFLTKELALGQDRILIRFFPLESWQIGKIGTVMTFL

SEQ ID NO: 14694 - protein, 2414 aa, Homo sapiens
MAENVVEPGPPSAKRPKLSSPALSASASDGTDFGSLFDLEHDLPDELINSTELGLTNGGDINQLQTSLGMVQDAASKHKQLSELLRSGSSPNLNMGVGGPGQVMASQAQQSSPGLGLINSMVKSPMTQAGLTSPNMGMGTSGPNQGPTQSTGMMNSPVNQPAMGMNTGMNAGMNPGMLAAGNGQGIMPNQVMNGSIGAGRGRQNMQYPNPGMGSAGNLLTEPLQQGSPQMGGQTGLRGPQPLKMGMMNNPNPYGSPYTQNPGQQIGASGLGLQIQTKTVLSNNLSPFAMDKKAVPGGGMPNMGQQPAPQVQQPGLVTPVAQGMGSGAHTADPEKRKLIQQQLVLLLHAHKCQRREQANGEVRQCNLPHCRTMKNVLNHMTHCQSGKSCQVAHCASSRQIISHWKNCTRHDCPVCLPLKNAGDKRNQQPILTGAPVGLGNPSSLGVGQQSAPNLSTVSQIDPSSIERAYAALGLPYQVNQMPTQPQVQAKNQQNQQPGQSPQGMRPMSNMSASPMGVNGGVGVQTPSLLSDSMLHSAINSQNPMMSENASVPSLGPMPTAAQPSTTGIRKQWHEDITQDLRNHLVHKLVQAIFPTPDPAALKDRRMENLVAYARKVEGDMYESANNRAEYYHLLAEKIYKIQKELEEKRRTRLQKQNMLPNAAGMVPVSMNPGPNMGQPQPGMTSNGPLPDPSMIRGSVPNQMMPRITPQSGLNQFGQMSMAQPPIVPRQTPPLQHHGQLAQPGALNPPMGYGPRMQQPSNQGQFLPQTQFPSQGMNVTNIPLAPSSGQAPVSQAQMSSSSCPVNSPIMPPGSQGSHIHCPQLPQPALHQNSPSPVPSRTPTPHHTPPSIGAQQPPATTIPAPVPTPPAMPPGPQSQALHPPPRQTPTPPTTQLPQQVQPSLPAAPSADQPQQQPRSQQSTAASVPTPTAPLLPPQPATPLSQPAVSIEGQVSNPPSTSSTEVNSQAIAEKQPSQEVKMEAKMEVDQPEPADTQPEDISESKVEDCKMESTETEERSTELKTEIKEEEDQPSTSATQSSPAPGQSKKKIFKPEELRQALMPTLEALYRQDPESLPFRQPVDPQLLGIPDYFDIVKSPMDLSTIKRKLDTGQYQEPWQYVDDIWLMFNNAWLYNRKTSRVYKYCSKLSEVFEQEIDPVMQSLGYCCGRKLEFSPQTLCCYGKQLCTIPRDATYYSYQNRYHFCEKCFNEIQGESVSLGDDPSQPQTTINKEQFSKRKNDTLDPELFVECTECGRKMHQICVLHHEIIWPAGFVCDGCLKKSARTRKENKFSAKRLPSTRLGTFLENRVNDFLRRQNHPESGEVTVRVVHASDKTVEVKPGMKARFVDSGEMAESFPYRTKALFAFEEIDGVDLCFFGMHVQEYGSDCPPPNQRRVYISYLDSVHFFRPKCLRTAVYHEILIGYLEYVKKLGYTTGHIWACPPSEGDDYIFHCHPPDQKIPKPKRLQEWYKKMLDKAVSERIVHDYKDIFKQATEDRLTSAKELPYFEGDFWPNVLEESIKELEQEEEERKREENTSNESTDVTKGDSKNAKKKNNKKTSKNKSSLSRGNKKKPGMPNVSNDLSQKLYATMEKHKEVFFVIRLIAGPAANSLPPIVDPDPLIPCDLMDGRDAFLTLARDKHLEFSSLRRAQWSTMCMLVELHTQSQDRFVYTCNECKHHVETRWHCTVCEDYDLCITCYNTKNHDHKMEKLGLGLDDESNNQQAAATQSPGDSRRLSIQRCIQSLVHACQCRNANCSLPSCQKMKRVVQHTKGCKRKTNGGCPICKQLIALCCYHAKHCQENKCPVPFCLNIKQKLRQQQLQHRLQQAQMLRRRMASMQRTGVVGQQQGLPSPTPATPTTPTGQQPTTPQTPQPTSQPQPTPPNSMPPYLPRTQAAGPVSQGKAAGQVTPPTPPQTAQPPLPGPPPAAVEMAMQIQRAAETQRQMAHVQIFQRPIQHQMPPMTPMAPMGMNPPPMTRGPSGHLEPGMGPTGMQQQPPWSQGGLPQPQQLQSGMPRPAMMSVAQHGQPLNMAPQPGLGQVGISPLKPGTVSQQALQNLLRTLRSPSSPLQQQQVLSILHANPQLLAAFIKQRAAKYANSNPQPIPGQPGMPQGQPGLQPPTMPGQQGVHSNPAMQNMNPMQAGVQRAGLPQQQPQQQLQPPMGGMSPQAQQMNMNHNTMPSQFRDILRRQQMMQQQQQQGAGPGIGPGMANHNQFQQPQGVGYPPQQQQRMQHHMQQMQQGNMGQIGQLPQALGAEAGASLQAYQQRLLQQQMGSPVQPNPMSPQQHMLPNQAQSPHLQGQQIPNSLSNQVRSPQPVPSPRPQSQPPHSSPSPRMQPQPSPHHVSPQTSSPHPGLVAAQANPMEQGHFASPDQNSMLSQLASNPGMANLHGASATDLGLSTDNSDLNSNLSQSTLDIH

SEQ ID NO: 14695 - protein, 129 aa, Homo sapiens
MEKAGADLQGGAKRVIISAPSADAPMFVMDVNHEKYDNSLKIVSNASCITNCLAPLANVIHNFGHPGLHEHQVVSSDFNSDTHTYSSTFNAGAGTALDGHFVKLVSWYDNAFGYSNRVVNLRAHMAAKE

SEQ ID NO: 14696 - protein, 421 aa, Homo sapiens
MRLSVRRVLLAAGCALVLVLAVQLGQQVLECRAVLAGLRSPRGAMRPEQEELVMVGTNHVEYRYGKAMPLIFVGGVPRSGTTLMRAMLDAHPEVRCGEETRIIPRVLAMRQAWSKSGREKLRLDEAGVTDEVLDAAMQAFILEVIAKHGEPARVLCNKDPFTLKSSVYLSRLFPNSKFLLMVRDGRASVHSMITRKVTIAGFDLSSYRDCLTKWNKAIEVMYAQCMEVGKEKCLPVYYEQLVLHPRRSLKLILDFLGIAWSDAVLHHEDLIGKPGGVSLSKIERSTDQVIKPVNLEALSKWTGHIPGDVVRDMAQIAPMLAQLGYDPYANPPNYGNPDPFVINNTQRVSVHLYLWKCTLGDMGLLQMWKLQPPEEMFSLSIPGHLICSCLMDTVNYMIACISILLGLQGSSKPTGSLSLIL

SEQ ID NO: 14697 - protein, 377 aa, Homo sapiens
MRLSVRRVLLAAGCALVLVLAVQLGQQVLECRAVLAGLRSPRGAMRPEQEELVMVGTNHVEYRYGKAMPLIFVGGVPRSGTTLMRAMLDAHPEVRCGEETRIIPRVLAMRQAWSKSGREKLRLDEAGVTDEVLDAAMQAFILEVIAKHGEPARVLCNKDPFTLKSSVYLSRLFPNSKFLLMVRDGRASVHSMITRKVTIAGFDLSSYRDCLTKWNKAIEVMYAQCMEVGKEKCLPVYYEQLVLHPRRSLKLILDFLGIAWSDAVLHHEDLIGKPGGVSLSKIERSTDQVIKPVNLEALSKWTGHIPGDVVRDMAQIAPMLAQLGYDPYANPPNYGNPDPFVINNTQRVLKGDYKTPANLKGYFQVNQNSTSSHLGSS

SEQ ID NO: 14698 - protein, 377 aa, Homo sapiens; identical to SEQ ID NO: 14697

SEQ ID NO: 14699 - protein, 300 aa, Homo sapiens [sequence omitted]

SEQ ID NO: 14700 - protein, 418 aa, Homo sapiens
MVSSFLAVLIFVKFADEFGASGNIETKELGKKKTNVTIMLLTTLLPAKLKVLSAPHPLPGVVSVRFEEDEDRNLCLIAYPLKGDHGIVDIVDNSDCEPKSKLLRWTTNKKHHVLETEKTPKDWVRQHRKEEKMKSHKLEEEFEWLKKSEVLYYTVEKKGNISSQLKHYNPWSMKCHQQQLQRMKENAKHRNQYKFILLENLTSRYEVPCVLDLKMGTRQHGDDASEEKAANQIRKCQQSTSAVIGVRVCGMQVYQAGSGQLMFMNKYHGRKLSVQGFKEALFQFFHNGRYLRRELLGPVLKKLTELKAVLERQESYRFYSSSLLVIYDGKERPEVVLDSDAEDLEDLSEESADESAGAYAYKPIGASSVDVRMIDFAHTTCRLYGEDTVVHEGQDAGYIFGLQSLIDIVTEISEESGE

SEQ ID NO: 14701 - protein, 135 aa, Homo sapiens
  VARIANT (1)...(135): Xaa = Any Amino Acid
MVSSFLAVLIFVKFADEFGASGNIETKELGKKKTNVTIMLLTTLLPAKLKVLSAPHPLPGVVSVRFEEDEDRNLCLIAYPLKGDHGIVDIVDNSDCEPKSKLLRWTTNKKHHVLETEKTPKDWVRQHRKEEKMKX

SEQ ID NO: 14702 - protein, 480 aa, Homo sapiens
MSLNLPEASLLRASWPEQAKEPRREGHTDKQQTEDVLAAGLRCLPHLPAICARRMSPAFRAMDVEPRAKGVLLEPFVHQVGGHSCVLRFNETTLCKPLVPREHQFYETLPAEMRKFTPQYKGVVSVRFEEDEDRNLCLIAYPLKGDHGIVDIVDNSDCEPKSKLLRWTTNKKHHVLETEKTPKDWVRQHRKEEKMKSHKLEEEFEWLKKSEVLYYTVEKKGNISSQLKHYNPWSMKCHQQQLQRMKENAKHRNQYKFILLENLTSRYEVPCVLDLKMGTRQHGDDASEEKAANQIRKCQQSTSAVIGVRVCGMQVYQAGSGQLMFMNKYHGRKLSVQGFKEALFQFFHNGRYLRRELLGPVLKKLTELKAVLERQESYRFYSSSLLVIYDGKERPEVVLDSDAEDLEDLSEESADESAGAYAYKPIGASSVDVRMIDFAHTTCRLYGEDTVVHEGQDAGYIFGLQSLIDIVTEISEESGE

SEQ ID NO: 14703 - protein, 481 aa, Homo sapiens
MSLNLPEASLLSRASWPEQAKEPRREGHTDKQQTEDVLAAGLRCLPHLPAICARRMSPAFRAMDVEPRAKGVLLEPFVHQVGGHSCVLRFNETTLCKPLVPREHQFYETLPAEMRKFTPQYKGVVSVRFEEDEDRNLCLIAYPLKGDHGIVDIVDNSDCEPKSKLLRWTTNKKHHVLETEKTPKDWVRQHRKEEKMKSHKLEEEFEWLKKSEVLYYTVEKKGNISSQLKHYNPWSMKCHQQQLQRMKENAKHRNQYKFILLENLTSRYEVPCVLDLKMGTRQHGDDASEEKAANQIRKCQQSTSAVIGVRVCGMQVYQAGSGQLMFMNKYHGRKLSVQGFKEALFQFFHNGRYLRRELLGPVLKKLTELKAVLERQESYRFYSSSLLVIYDGKERPEVVLDSDAEDLEDLSEESADESAGAYAYKPIGASSVDVRMIDFAHTTCRLYGEDTVVHEGQDAGYIFGLQSLIDIVTEISEESGE

SEQ ID NO: 14704 - protein, 426 aa, Homo sapiens
MSPAFRAMDVEPRAKGVLLEPFVHQVGGHSCVLRFNETTLCKPLVPREHQFYETLPAEMRKFTPQYKGVVSVRFEEDEDRNLCLIAYPLKGDHGIVDIVDNSDCEPKSKLLRWTTNKKHHVLETEKTPKDWVRQHRKEEKMKSHKLEEEFEWLKKSEVLYYTVEKKGNISSQLKHYNPWSMKCHQQQLQRMKENAKHRNQYKFILLENLTSRYEVPCVLDLKMGTRQHGDDASEEKAANQIRKCQQSTSAVIGVRVCGMQVYQAGSGQLMFMNKYHGRKLSVQGFKEALFQFFHNGRYLRRELLGPVLKKLTELKAVLERQESYRFYSSSLLVIYDGKERPEVVLDSDAEDLEDLSEESADESAGAYAYKPIGASSVDVRMIDFAHTTCRLYGEDTVVHEGQDAGYIFGLQSLIDIVTEISEESGE

SEQ ID NO: 14705 - protein, 426 aa, Homo sapiens; identical to SEQ ID NO: 14704

SEQ ID NO: 14706 - protein, 480 aa, Homo sapiens
MAASVVCRAATAGAQVLLRARRSPALLRTPALRSTATFAQALQFVPETQVSLLDNGLRVASEQSSQPTCTVGVWIDVGSRFETEKNNGAGYFLEHLAFKGTKNRPGSALEKEVESMGAHLNAYSTREHTAYYIKALSKDLPKAVELLGDIVQNCSLEDSQIEKERDVILREMQENDASMRDVVFNYLHATAFQGTPLAQAVEGPSENVRKLSRADLTEYLSTHYKAPRMVLAAAGGVEHQQLLDLAQKHLGGIPWTYAEDAVPTLTPCRFTGSEIRHRDDALPFAHVAIAVEGPGWASPDNVALQVANAIIGHYDCTYGGGVHLSSPLASGAVANKLCQSFQTFSICYAETGLLGAHFVCDRMKIDDMMFVLQGQWMRLCTSATESEVARGKNILRNALVSHLDGTTPVCEDIGRSLLTYGRRIPLAEWESRIAEVDASVVREICSKYIYDQCPAVAGYGPIEQLPDYNRIRSGMFWLRF

SEQ ID NO: 14707 - protein, 469 aa, Homo sapiens
MASPRELTQNPLKKIWMPYSNGRPALHACQRGVCMTNCPTLIVMVGLPARGKTYISKKLTRYLNWIGVPTREFNVGQYRRDVVKTYKSFEFFLPDNEEGLKIRKQCALAALRDVRRFLSEEGGHVAVFDATNTTRERRATIFNFGEQNGYKTFFVESICVDPEVIAANIVQVKLGSPDYVNRDSDEATEDFMRRIECYENSYESLDEDLDRDLSYIKIMDVGQSYVVNRVADHIQSRIVYYLMNIHVTPRSIYLCRHGESELNLKGRIGGDPGLSPRGREFAKSLAQFISDQNIKDLKVWTSQMKRTIQTAEALGVPYEQWKVLNEIDAGVCEEMTYEEIQDNYPLEFALRDQDKYRYRYPKGESYEDLVQRLEPVIMELERQENVLVICHQAVMRCLLAYFLDKAAEQLPYLKCPLHTVLKLTPVAYGCKVESIFLNVAAVNTHRDRPQNVDISRPPEEALVTVPAHQ

SEQ ID NO: 14708 - protein, 749 aa, Homo sapiens
MSFIDPYQHIIVEHQYSHKFTVVVLRATKVTKGAFGDMLDTPDPYVELFISTTPDSRKRTRHFNNDINPVWNETFEFILDPNQENVLEITLMDANYVMDETLGTATFTVSSMKVGEKKEVPFIFNQVTEMVLEMSLEVCSCPDLRFSMALCDQEKTFRQQRKEHIRESMKKLLGPKNSEGLHSARDVPVVAILGSGGGFRAMVGFSGVMKALYESGILDCATYVAGLSGSTWYMSTLYSHPDFPEKGPEEINEELMKNVSHNPLLLLTPQKVKRYVESLWKKKSSGQPVTFTDIFGMLIGETLIHNRMNTTLSSLKEKVNTAQCPLPLFTCLHVKPDVSELMFADWVEFSPYEIGMAKYGTFMAPDLFGSKFFMGTVVKKYEENPLHFLMGVWGSAFSILFNRVLGVSGSQSRGSTMEEELENITTKHIVSNDSSDSDDESHEPKGTENEDAGSDYQSDNQASWIHRMIMALVSDSALFNTREGRAGKVHNFMLGLNLNTSYPLSPLSDFATQDSFDDDELDAAVADPDEFERIYEPLDVKSKKIHVVDSGLTFNLPYPLILRPQRGVDLIISFDFSARPSDSSPPFKELLLAEKWAKMNKLPFPKIDPYVFDREGLKECYVFKPKNPDMEKDCPTIIHFVLANINFRKYKAPGVPRETEEEKEIADFDIFDDPESPFSTFNFQYPNQAFKRLHDLMHFNTLNNIDVIKEAMVESIEYRRQNPSRCSVSLSNVEARRFFNKEFLSKPKA

SEQ ID NO: 14709 - protein, 579 aa, Homo sapiens [sequence omitted]

SEQ ID NO: 14710 - protein, 579 aa, Homo sapiens [sequence omitted]

SEQ ID NO: 14711 - protein, 579 aa, Homo sapiens [sequence omitted]

SEQ ID NO: 14712 - protein, 388 aa, Homo sapiens [sequence omitted]

SEQ ID NO: 14713 - protein, 384 aa, Homo sapiens
MAGAEWKSLEECLEKHLPLPDLQEVKRVLYGKELRKLDLPREAFEAASREDFELQGYAFEAAEEQLRRPRIVHVGLVQNRIPLPANAPVAEQVSALHRRIKAIVEVAAMCGVNIICFQEAWTMPFAFCTREKLPWTEFAESAEDGPTTRFCQKLAKNHDMVVVSPILERDSEHGDVLWNTAVVISNSGAVLGKTRKNHIPRVGDFNESTYYMEGNLGHPVFQTQFGRIAVNICYGRHHPLNWLMYSINGAEIIFNPSATIGALSESLWPIEARNAAIANHCFTCAINRVGTEHFPNEFTSGDGKKAHQDFGYFYGSSYVAAPDSSRTPGLSRSRDGLLVAKLDLNLCQQVNDVWNFKMTGRYEMYARELAEAVKSNYSPTIVKE

SEQ ID NO: 14714 - protein, 317 aa, Homo sapiens
MWLYLAVFVGLYYLLHWYRERQVLSHLRDKYVFITGCDSGFGKLLARQLDARGLRVLAACLTEKGAEQLRGQTSDRLETVTLDVTKTESVAAAAQWVKECVRDKGLWGLVNNAGISLPTAPNELLTKQDFVTILDVNLLGVIDVTLSLLPLVRRARGRVVNVSSVMGRVSLFGGGYCISKYGVEAFSDSLRRELSYFGVKVAMIEPGYFKTAVTSKERFLKSFLEIWDRSSPEVKEAYGEKFVADYKKSAEQMEQKCTQDLSLVTNCMEHALIACHPRTRYSAGWDAKLLYLPMSYMPTFLVDAIMYWVSPSPAKAL

SEQ ID NO: 14715 - protein, 248 aa, Homo sapiens
MVESPFSVPSLPLSHGRYYGGAEVVDEIELLCQRRALEAFDLDPAQWGVNVQPYSGSPANLAVYTALLQPHDRIMGLDLPDGGHLTHGYMSDVKRISATSIFFESMPYKLNVSALGVSVQPKTGLIDYNQLALTARLFRPRLIIAGTSAYARLIDYARMREVCDEVKAHLLADMAHISGLVAAKVIPSPFKHADIVTTTTHKTLRGARSGLIFYRKGVKAVDPKTGREIPLPCSHPCRGAPTIMPLLQ

SEQ ID NO: 14716 - protein, 483 aa, Homo sapiens
MAIRAQHSNAAQTQTGEANRGWTGQESLSDSDPEMWELLQREKDRQCRGLELIASENFCSRAALEALGSCLNNKYSEGYPGKRYYGGAEVVDEIELLCQRRALEAFDLDPAQWGVNVQPYSGSPANLAVYTALLQPHDRIMGLDLPDGGHLTHGYMSDVKRISATSIFFESMPYKLNPKTGLIDYNQLALTARLFRPRLIIAGTSAYARLIDYARMREVCDEVKAHLLADMAHISGLVAAKVIPSPFKHADIVTTTTHKTLRGARSGLIFYRKGVKAVDPKTGREIPYTFEDRINFAVFPSLQGGPHNHAIAAVAVALKQACTPMFREYSLQVLKNARAMADALLERGYSLVSGGTDNHLVLVDLRPKGLDGARAERVLELVSITANKNTCPGDRSAITPGGLRLGAPALTSRQFREDDFRRVVDFIDEGVNIGLEVKSKTAKLQDFKSFLLKDSETSQRLANLRQRVEQFARAFPMPGFDEH

SEQ ID NO: 14717 - protein, 497 aa, Homo sapiens
MLYFSLFWAARLVRMAIRAQHSNAAQTQTGEANRGWTGQESLSDSDPEMWELLQREKDRQCRGLELIASENFCSRAALEALGSCLNNKYSEGYPGKRYYGGAEVVDEIELLCQRRALEAFDLDPAQWGVNVQPYSGSPANLAVYTALLQPHDRIMGLDLPDGGHLTHGYMSDVKRISATSIFFESMPYKLNPKTGLIDYNQLALTARLFRPRLIIAGTSAYARLIDYARMREVCDEVKAHLLADMAHISGLVAAKVIPSPFKHADIVTTTTHKTLRGARSGLIFYRKGVKAVDPKTGREIPYTFEDRINFAVFPSLQGGPHNHAIAAVAVALKQACTPMFREYSLQVLKNARAMADALLERGYSLVSGGTDNHLVLVDLRPKGLDGARAERVLELVSITANKNTCPGDRSAITPGGLRLGAPALTSRQFREDDFRRVVDFIDEGVNIGLEVKSKTAKLQDFKSFLLKDSETSQRLANLRQRVEQFARAFPMPGFDEH

SEQ ID NO: 14718 - protein, 504 aa, Homo sapiens
MLYFSLFWAARPLQRCGQLVRMAIRAQHSNAAQTQTGEANRGWTGQESLSDSDPEMWELLQREKDRQCRGLELIASENFCSRAALEALGSCLNNKYSEGYPGKRYYGGAEVVDEIELLCQRRALEAFDLDPAQWGVNVQPYSGSPANLAVYTALLQPHDRIMGLDLPDGGHLTHGYMSDVKRISATSIFFESMPYKLNPKTGLIDYNQLALTARLFRPRLIIAGTSAYARLIDYARMREVCDEVKAHLLADMAHISGLVAAKVIPSPFKHADIVTTTTHKTLRGARSGLIFYRKGVKAVDPKTGREIPYTFEDRINFAVFPSLQGGPHNHAIAAVAVALKQACTPMFREYSLQVLKNARAMADALLERGYSLVSGGTDNHLVLVDLRPKGLDGARAERVLELVSITANKNTCPGDRSAITPGGLRLGAPALTSRQFREDDFRRVVDFIDEGVNIGLEVKSKTAKLQDFKSFLLKDSETSQRLANLRQRVEQFARAFPMPGFDEH

SEQ ID NO: 14719 - protein, 313 aa, Homo sapiens
MAALTDLSFMYRWFKNCNLVGNLSEKYVFITGCDSGFGNLLAKQLVDRGMQVLAACFTEEGSQKLQRDTSYRLQTTLLDVTKSESIKAAAQWVRDKVGEQGLWALVNNAGVGLPSGPNEWLTKDDFVKVINVNLVGLIEVTLHMLPMVKRARGRVVNMSSSGGRVAVIGGGYCVSKFGVEAFSDSIRRELYYFGVKVCIIEPGNYRTAILGKENLESRMRKLWERLPQETRDSYGEDYFRIYTDKLKNIMQVAEPRVRDVINSMEHAIVSRSPRIRYNPGLDAKLLYIPLAKLPTPVTDFILSRYLPRPADSV

SEQ ID NO: 14720 - protein, 87 aa, Homo sapiens
MAGASLGARFYRQIKRHPGIIPMIGLICLGMGSAALYLLRLALRSPDVCWDRKNNPEPWNRLSPNDQYKFLAVSTDYKKLKKDRPDF

SEQ ID NO: 14721 - protein, 87 aa, Homo sapiens; identical to SEQ ID NO: 14720

SEQ ID NO: 14722 - protein, 367 aa, Homo sapiens
MVMEVGTLDAGGLRALLGERAAQCLLLDCRSFFAFNAGHIAGSVNVRFSTIVRRRAKGAMGLEHIVPNAELRGRLLAGAYHAVVLLDERSAALDGAKRDGTLALAAGALCREARAAQVFFLKGGYEAFSASCPELCSKQSTPMGLSLPLSTSVPDSAESGCSSCSTPLYDQGGPVEILPFLYLGSAYHASRKDMLDALGITALINVSANCPNHFEGHYQYKSIPVEDNHKADISSWFNEAIDFIDSIKNAGGRVFVHCQAGISRSATICLAYLMRTNRVKLDEAFEFVKQRRSIISPNFSFMGQLLQFESQVLAPHCSAEAGSPAMAVLDRGTSTTTVFNFPVSIPVHSTNSALSYLQSPITTSPSC

SEQ ID NO: 14723 - protein, 367 aa, Homo sapiens; identical to SEQ ID NO: 14722

SEQ ID NO: 14724 - protein, 81 aa, Homo sapiens [sequence omitted]

SEQ ID NO: 14725 - protein, 81 aa, Homo sapiens [sequence omitted]

SEQ ID NO: 14726 - protein, 509 aa, Homo sapiens
MGVQAGLFGMLGFLGVALGGSPALRWYRTSCHLTKAVPGNPLGYLSFLAKDAQGLALIHARWDAHRRLQACSWEDEPELTAAYGALCAHETAWGSFIHTPGPELQRALATLQSQWEACRALEESPAGARKKRAAGQSGVPGGGHQREKRGWTMPGTLWCGVGDSAGNSSELGVFQGPDLCCREHDRCPQNISPLQYNYGIRNYRFHTISHCDCDTRFQQCLQNQHDSISDIVGVAFFNVLEIPCFVLEEQEACVAWYWWGGCRMYGTVPLARLQPRTFYNASWSSRATSPTPSSRSPAPPKPRQKQHLRKGPPHQKGSKRPSKANTTALQDPMVSPRLDVAPTGLQGPQGGLKPQGARWVCRSFRRHLDQCEHQIGPREIEFQLLNSAQEPLFHCNCTRRLARFLRLHSPPEVTNMLWELLGTTCFKLAPPLDCVEGKNCSRDPRAIRVSARHLRRLQQRRHQLQDKGTDERQPWPSEPLRGPMSFYNQCLQLTQAARRPDRQQKSWSQ

SEQ ID NO: 14727 - protein, 638 aa, Homo sapiens
MEGQSSRGSRRPGTRAGLGSLPMPQGVAQTGAPSKVDSSFQLPAKKNAALGPSEPRITVVTWNVGTAMPPDDVTSLLHLGGGDDSDGADMIAIGLQEVNSMLNKRLKDALFTDQWSELFMDALGPFNFVLVSSVRMQGVILLLFAKYYHLPFLRDVQTDCTRTGLGGYWGNKGGVSVRLAAFGHMLCFLNCHLPAHMDKAEQRKDNFQTILSLQQFQGPGAQGILDHDLVFWFGDLNFRIESYDLHFVKFAIDSDQLHQLWEKDQLNMAKNTWPILKGFQEGPLNFAPTFKFDVGTNKYDTSAKKRKPAWTDRILWKVKAPGGGPSPSGRKSHRLQVTQHSYRSHMEYTVSDHKPVAAQFLLQFAFRDDMPLVRLEVADEWVRPEQAVVRYRMETVFARSSWDWIGLYRVGFRHCKDYVAYVWAKHEDVDGNTYQVTFSEESLPKGHGDFILGYYSHNHSILIGITEPFQISLPSSELASSSTDSSGTSSEGEDDSTLELLAPKSRSPSPGKSKRHRSRSPGLARFPGLALRPSSRERRGASRSPSPQSRRLSRVAPDRSSNGSSRGSSEEGPSGLPGPWAFPPAVPRSLGLLPALRLETVDPGGGGSWGPDREALAPNSLSPSPQGHRGLEEGGLGP

SEQ ID NO: 14728 - protein, 1044 aa, Homo sapiens [sequence omitted]

SEQ ID NO: 14729 - protein, 731 aa, Homo sapiens
MSNPGTRRNGSSIKIRLTVLCAKNLAKKDFFRLPDPFAKIVVDGSGQCHSTDTVKNTLDPKWNQHYDLYVGKTDSITISVWNHKKIHKKQGAGFLGCVRLLSNAISRLKDTGYQRLDLCKLNPSDTDAVRGQIVVSLQTRDRIGTGGSVVDCRGLLENEGTVYEDSGPGRPLSCFMEEPAPYTDSTGAAAGGGNCRFVESPSQDQRLQAQRLRNPDVRGSLQTPQNRPHGHQSPELPEGYEQRTTVQGQVYFLHTQTGVSTWHDPRIPRDLNSVNCDELGPLPPGWEVRSTVSGRIYFVDHNNRTTQFTDPRLHHIMNHQCQLKEPSQPLPLPSEGSLEDEELPAQRYERDLVQKLKVLRHELSLQQPQAGHCRIEVSREEIFEESYRQIMKMRPKDLKKRLMVKFRGEEGLDYGGVAREWLYLLCHEMLNPYYGLFQYSTDNIYMLQINPDSSINPDHLSYFHFVGRIMGLAVFHGHYINGGFTVPFYKQLLGKPIQLSDLESVDPELHKSLVWILENDITPVLDHTFCVEHNAFGRILQHELKPNGRNVPVTEENKKEYVRLYVNWRFMRGIEAQFLALQKGFNELIPQHLLKPFDQKELELIIGGLDKIDLNDWKSNTRLKHCVADSNIVRWFWQAVETFDEERRARLLQFVTGSTRVPLQGFKALQGSTGAAGPRLFTIHLIDANTDNLPKAHTCFNRIDIPPYESYEKLYEKLLTAVEETCGFAVE

SEQ ID NO: 14730 - protein, 757 aa, Homo sapiens
MSNPGTRRNGSSIKIRLTVLCAKNLAKKDFFRLPDPFAKIVVDGSGQCHSTDTVKNTLDPKWNQHYDLYVGKTDSITISVWNHKKIHKKQGAGFLGCVRLLSNAISRLKDTGYQRLDLCKLNPSDTDAVRGQIVVSLQTRDRIGTGGSVVDCRGLLENEGTVYEDSGPGRPLSCFMEEPAPYTDSTGAAAGGGNCRFVESPSQDQRLQAQRLRNPDVRGSLQTPQNRPHGHQSPELPEGYEQRTTVQGQVYFLHTQTGVSTWHDPRIPSPSGTIPGGDAAFLYEFLLQGHTSEPRDLNSVNCDELGPLPPGWEVRSTVSGRIYFVDHNNRTTQFTDPRLHHIMNHQCQLKEPSQPLPLPSEGSLEDEELPAQRYERDLVQKLKVLRHELSLQQPQAGHCRIEVSREEIFEESYRQIMKMRPKDLKKRLMVKFRGEEGLDYGGVAREWLYLLCHEMLNPYYGLFQYSTDNIYMLQINPDSSINPDHLSYFHFVGRIMGLAVFHGHYINGGFTVPFYKQLLGKPIQLSDLESVDPELHKSLVWILENDITPVLDHTFCVEHNAFGRILQHELKPNGRNVPVTEENKKEYVRLYVNWRFMRGIEAQFLALQKGFNELIPQHLLKPFDQKELELIIGGLDKIDLNDWKSNTRLKHCVADSNIVRWFWQAVETFDEERRARLLQFVTGSTRVPLQGFKALQGSTGAAGPRLFTIHLIDANTDNLPKAHTCFNRIDIPPYESYEKLYEKLLTAVEETCGFAVE

SEQ ID NO: 14731 - protein, 582 aa, Homo sapiens
MEEPAPYTDSTGAAAGGGNCRFVESPSQDQRLQAQRLRNPDVRGSLQTPQNRPHGHQSPELPEGYEQRTTVQGQVYFLHTQTGVSTWHDPRIPSPSGTIPGGDAAFLYEFLLQGHTSEPRDLNSVNCDELGPLPPGWEVRSTVSGRIYFVDHNNRTTQFTDPRLHHIMNHQCQLKEPSQPLPLPSEGSLEDEELPAQRYERDLVQKLKVLRHELSLQQPQAGHCRIEVSREEIFEESYRQIMKMRPKDLKKRLMVKFRGEEGLDYGGVAREWLYLLCHEMLNPYYGLFQYSTDNIYMLQINPDSSINPDHLSYFHFVGRIMGLAVFHGHYINGGFTVPFYKQLLGKPIQLSDLESVDPELHKSLVWILENDITPVLDHTFCVEHNAFGRILQHELKPNGRNVPVTEENKKEYVRLYVNWRFMRGIEAQFLALQKGFNELIPQHLLKPFDQKELELIIGGLDKIDLNDWKSNTRLKHCVADSNIVRWFWQAVETFDEERRARLLQFVTGSTRVPLQGFKALQGSTGAAGPRLFTIHLIDANTDNLPKAHTCFNRIDIPPYESYEKLYEKLLTAVEETCGFAVE

SEQ ID NO: 14732 - protein, 581 aa, Homo sapiens
MSNPGTRRNGSSIKIRLTVLCAKNLAKKDFFRLPDPFAKIVVDGSGQCHSTDTVKNTLDPKWNQHYDLYVGKTDSITISVWNHKKIHKKQGAGFLGCVRLLSNAISRLKDTGYQRLDLCKLNPSDTDAVRGQIVVSLQTRDRIGTGGSVVDCRGLLENEGTVYEDSGPGRPLSCFMEEPAPYTDSTGAAAGGGNCRFVESPSQDQRLQAQRLRNPDVRGSLQTPQNRPHGHQSPELPEGYEQRTTVQGQVYFLHTQTGVSTWHDPRIPREWLYLLCHEMLNPYYGLFQYSTDNIYMLQINPDSSINPDHLSYFHFVGRIMGLAVFHGHYINGGFTVPFYKQLLGKPIQLSDLESVDPELHKSLVWILENDITPVLDHTFCVEHNAFGRILQHELKPNGRNVPVTEENKKEYVRLYVNWRFMRGIEAQFLALQKGFNELIPQHLLKPFDQKELELIIGGLDKIDLNDWKSNTRLKHCVADSNIVRWFWQAVETFDEERRARLLQFVTGSTRVPLQGFKALQGSTGAAGPRLFTIHLIDANTDNLPKAHTCFNRIDIPPYESYEKLYEKLLTAVEETCGFAVE

SEQ ID NO: 14733 - protein, 582 aa, Homo sapiens; identical to SEQ ID NO: 14731

SEQ ID NO: 14734 - protein, 515 aa, Homo sapiens [sequence omitted]

SEQ ID NO: 14735 - protein, 515 aa, Homo sapiens
MGRRGSAPGNGRTLRGCERGGRRRRSADSVMAEQVALSRTQVCGILREELFQGDAFHQSDTHIFIIMGASGDLAKKKIYPTIWWLFRDGLLPENTFIVGYARSRLTVADIRKQSEPFFKATPEEKLKLEDFFARNSYVAGQYDDAASYQRLNSHMNALHLGSGWNRIIVEKPFGRDLQSSDRLSNHISSLFREDQIYRIDHYLGKEMVQNLMVLRFANRIFGPIWNRDNIACVILTFKEPFGTEGRGGYFDEFGIIRDVMQNHLLQMLCLVAMEKPASTNSDDVRDEKVKVLKCISEVQANNVVLGQYVGNPDGEGEATKGYLDDPTVPRGSTTATFAAVVLYVENERWDGVPFILRCGKALNERKAEVRLQFHDVAGDIFHQQCKRNELVIRVQPNEAVYTKMMTKKPGMFFNPEESELDLTYGNRYKNVKLPDAYERLILDVFCGSQMHFVRSDELREAWRIFTPLLHQIELEKPKPIPYIYGSRGPTEADELMKRVGFQYEGTYKWVNPHKL

SEQ ID NO: 14736 - protein, 193 aa, Homo sapiens [sequence omitted]

SEQ ID NO: 14737 - protein, 515 aa, Homo sapiens [sequence omitted]

SEQ ID NO: 14738 - protein, 545 aa, Homo sapiens
MGRRGSAPGNGRTLRGCERGGRRRRSADSVMAEQVALSRTQVCGILREELFQGDAFHQSDTHIFIIMGASGDLAKKKIYPTIWWLFRDGLLPENTFIVGYARSRLTVADIRKQSEPFFKATPEEKLKLEDFFARNSYVAGQYDDAASYQRLNSHMNALHLGSQANRLFYLALPPTVYEAVTKNIHESCMSQIGWNRIIVEKPFGRDLQSSDRLSNHISSLFREDQIYRIDHYLGKEMVQNLMVLRFANRIFGPIWNRDNIACVILTFKEPFGTEGRGGYFDEFGIIRDVMQNHLLQMLCLVAMEKPASTNSDDVRDEKVKVLKCISEVQANNVVLGQYVGNPDGEGEATKGYLDDPTVPRGSTTATFAAVVLYVENERWDGVPFILRCGKALNERKAEVRLQFHDVAGDIFHQQCKRNELVIRVQPNEAVYTKMMTKKPGMFFNPEESELDLTYGNRYKNVKLPDAYERLILDVFCGSQMHFVRSDELREAWRIFTPLLHQIELEKPKPIPYIYGSRGPTEADELMKRVGFQYEGTYKWVNPHKL

SEQ ID NO: 14739 - protein, 329 aa, Homo sapiens
MGRRGSAPGNGRTLRGCERGGRRRRSADSVMAEQVALSRTQVCGILREELFQGDAFHQSDTHIFIIMGASGDLAKKKIYPTIWWLFRDGLLPENTFIVGYARSRLTVADIRKQSEPFFKATPEEKLKLEDFFARNSYVAGQYDDAASYQRLNSHMNALHLGSQANRLFYLALPPTVYEAVTKNIHESCMSQIGWNRIIVEKPFGRDLQSSDRLSNHISSLFREDQIYRIDHYLGKEMVQNLMVLRFANRIFGPIWNRDNIACVILTFKEPFGTEGRGGYFDEFGIIRDVMQNHLLQMLCLVAMEKPASTNSDDVRDEKGCPSSCAAARP

SEQ ID NO: 14740 - protein, 435 aa, Homo sapiens [sequence omitted]

SEQ ID NO: 14741 - protein, 491 aa, Homo sapiens [sequence omitted]

SEQ ID NO: 14742 - protein, 596 aa, Homo sapiens
MAFLIHNAPESSSACGKATDEFKHVKEYSCQRHKGNLPRVHGALRHPTSCSSSSEIMSVLFFYIMRYKQSDPENPDNDRFVLAKRLSFVDVATGWLGQGLGVACGMAYTGKYFDRASYRVFCLMSDGESSEGSVWEAMAFASYYSLDNLVAIFDVNRLGHSGALPAEHCINIYQRRCEAFGWNTYVVDGRDVEALCQVFWQASQVKHKPTAVVAKTFKGRGTPSIEDAESWHAKPMPRERADAIIKLIESQIQTSRNLDPQPPIEDSPEVNITDVRMTSPPDYRVGDKIATRKACGLALAKLGYANNRVVVLDGDTRYSTFSEIFNKEYPERFIECFMAEQNMVSVALGCASRGRTIAFASTFAAFLTRAFDHIRIGGLAESNINIIGSHCGVSVGDDGASQMALEDIAMFRTIPKCTIFYPTDAVSTEHAVALAANAKGMCFIRTTRPETMVIYTPQERFEIGQAKVLRHCVSDKVTVIGAGITVYEALAAADELSKQDIFIRVIDLFTIKPLDVATIVSSAKATEGRIITVEDHYPQGGIGEAVCAAVSMDPDIQVHSLAVSGVPQSGKSEELLDMYGISARHIIVAVKCMLLN

SEQ ID NO: 14743 - protein, 596 aa, Homo sapiens
MADAEARAEFPEEARPDRGTLQVLQDMASRLRIHSIRATCSTSSGHPTSCSSSSEIMSVLFFYIMRYKQSDPENPDNDRFVLAKRLSFVDVATGWLGQGLGVACGMAYTGKYFDRASYRVFCLMSDGESSEGSVWEAMAFASYYSLDNLVAIFDVNRLGHSGALPAEHCINIYQRRCEAFGWNTYVVDGRDVEALCQVFWQASQVKHKPTAVVAKTFKGRGTPSIEDAESWHAKPMPRERADAIIKLIESQIQTSRNLDPQPPIEDSPEVNITDVRMTSPPDYRVGDKIATRKACGLALAKLGYANNRVVVLDGDTRYSTFSEIFNKEYPERFIECFMAEQNMVSVALGCASRGRTIAFASTFAAFLTRAFDHIRIGGLAESNINIIGSHCGVSVGDDGASQMALEDIAMFRTIPKCTIFYPTDAVSTEHAVALAANAKGMCFIRTTRPETMVIYTPQERFEIGQAKVLRHCVSDKVTVIGAGITVYEALAAADELSKQDIFIRVIDLFTIKPLDVATIVSSAKATEGRIITVEDHYPQGGIGEAVCAAVSMDPDIQVHSLAVSGVPQSGKSEELLDMYGISARHIIVAVKCMLLN

SEQ ID NO: 14744 - protein, 484 aa, Homo sapiens
MADAEARAEFPEEARPDRGTLQVLQDMASRLRIHSIRATCSTSSGHPTSCSSSSEIMSVLFFYIMRYKQSDPENPDNDRFVLAKRLSFVDVATGWLGQGLGVACGMAYTGKYFDRASYRVFCLMSDGESSEGSVWEAMAFASYYSLDNLVAIFDVNRLGHSGALPAEHCINIYQRRCEAFGWNTYVVDGRDVEALCQVFWQASQVKHKPTAVVAKTFKGRGTPSIEDAESWHAKPMPRERADAIIKLIESQIQTSRNLDPQPPIEDSPEVNITDVRMTSPPDYRVGDKIATRKACGLALAKLGYANNRVVVLDGDTRYSTFSEIFNKEYPERFIECFMAEQNMVSVALGCASRGRTIAFASTFAAFLTRAFDHIRIGGLAESNINIIGSHCGVSVGDDGASQMALEDIAMFRTIPKCTIFYPTDAVSTEHAVALAANAKGMCFIRTTRPETMVIYTPQERFEIGQAKTPDGYVAYPCSRTAGAV

SEQ ID NO: 14745 - protein, 319 aa, Homo sapiens
  VARIANT (1)...(319): Xaa = Any Amino Acid
MPGLLLCEPTELYNILNQATKLSRLTDPNYLCLLDVRSKWEYDESHVITALRVKKKNNEYLLPESVDLECVKYCVVYDNNSSTLEILLKDDDDDSDSDGDGKDLVPQAAIEYGRILTRLTHHPVYILKGGYERFSGTYHFLRTQKIIWMPQELDAFQPYPIEIVPGKVFVGNFSQACDPKIQKDLKIKAHVNVSMDTGPFFAGDADKLLHIRIEDSPEAQILPFLRHMCHFIEVLGLCQEVQKQHVSKSGIGEPAAGMGEDYPWRFHHKHHGSALLIFSEAHRRVLKSLTWGHFVGGGPECVYPGLSGRRRPLLPESLX

SEQ ID NO: 14746 - protein, 313 aa, Homo sapiens
MPGLLLCEPTELYNILNQATKLSRLTDPNYLCLLDVRSKWEYDESHVITALRVKKKNNEYLLPESVDLECVKYCVVYDNNSSTLEILLKDDDDDSDSDGDGKDLVPQAAIEYGRILTRLTHHPVYILKGGYERFSGTYHFLRTQKIIWMPQELDAFQPYPIEIVPGKVFVGNFSQACDPKIQKDLKIKAHVNVSMDTGPFFAGDADKLLHIRIEDSPEAQILPFLRHMCHFIEIHHHLGSVILIFSTQGISRSCAAIIAYLMHSNEQTLQRSWAYVKKCKNNMCPNRGLVSQLLEWEKTILGDSITNIMDPLY

SEQ ID NO: 14747 - protein, 313 aa, Homo sapiens; identical to SEQ ID NO: 14746

SEQ ID NO: 14748 - protein, 313 aa, Homo sapiens; identical to SEQ ID NO: 14746

SEQ ID NO: 14749 - protein, 211 aa, Homo sapiens
MPGLLLCEPTELYNILNQATKLSRLTDPNYLCLLDVRSKWEYDESHVITALRVKKGLNYFTFPPTVYLVPQAAIEYGRILTRLTHHPVYILKGGYERFSGTYHFLRTQKIIWMPQELDAFQPYPIEIVPGKVFVGNFSQACDPKIQKDLKIKAHVNVSMDTGPFFAGDADKLLHIRIEDSPEAQILPFLRHMCHFIGYQPQLCRHHSLPHA

SEQ ID NO: 14750 - protein, 717 aa, Homo sapiens
MATPPPPRPAKAVVAPQWCGPEPCPGARREQPGCQRFMINMGDSHVDTSSTVSEAVAEEVSLFSMTDMILFSLIVGLLTYWFLFRKKKEEVPEFTKIQTLTSSVRESSFVEKMKKTGRNIIVFYGSQTGTAEEFANRLSKDAHRYGMRGMSADPEEYDLADLSSLPEIDNALVVFCMATYGEGDPTDNAQDFYDWLQETDVDLSGVKFAVFGLGNKTYEHFNAMGKYVDKRLEQLGAQRIFELGLGDDDGNLEEDFITWREQFWPAVCEHFGVEATGEESSIRQYELVVHTDIDAAKVYMGEMGRLKSYENQKPPFDAKNPFLAAVTTNRKLNQGTERHLMHLELDISDSKIRYESGDHVAVYPANDSALVNQLGKILGADLDVVMSLNNLDEESNKKHPFPCPTSYRTALTYYLDITNPPRTNVLYELAQYASEPSEQELLRKMASSSGEGKELYLSWVVEARRHILAILQDCPSLRPPIDHLCELLPRLQARYYSIASSSKVHPNSVHICAVVVEYETKAGRINKGVATNWLRAKEPAGENGGRALVPMFVRKSQFRLPFKATTPVIMVGPGTGVAPFIGFIQERAWLRQQGKEVGETLLYYGCRRSDEDYLYREELAQFHRDGALTQLNVAFSREQSHKVYVQHLLKQDREHLWKLIEGGAHIYVCGDARNMARDVQNTFYDIVAELGAMEHAQAVDYIKKLMTKGRYSLDVWS

SEQ ID NO: 14751 - protein, 680 aa, Homo sapiens
MINMGDSHVDTSSTVSEAVAEEVSLFSMTDMILFSLIVGLLTYWFLFRKKKEEVPEFTKIQTLTSSVRESSFVEKMKKTGRNIIVFYGSQTGTAEEFANRLSKDAHRYGMRGMSADPEEYDLADLSSLPEIDNALVVFCMATYGEGDPTDNAQDFYDWLQETDVDLSGVKFAVFGLGNKTYEHFNAMGKYVDKRLEQLGAQRIFELGLGDDDGNLEEDFITWREQFWPAVCEHFGVEATGEESSIRQYELVVHTDIDAAKVYMGEMGRLKSYENQKPPFDAKNPFLAAVTTNRKLNQGTERHLMHLELDISDSKIRYESGDHVAVYPANDSALVNQLGKILGADLDVVMSLNNLDEESNKKHPFPCPTSYRTALTYYLDITNPPRTNVLYELAQYASEPSEQELLRKMASSSGEGKELYLSWVVEARRHILAILQDCPSLRPPIDHLCELLPRLQARYYSIASSSKVHPNSVHICAVVVEYETKAGRINKGVATNWLRAKEPAGENGGRALVPMFVRKSQFRLPFKATTPVIMVGPGTGVAPFIGFIQERAWLRQQGKEVGETLLYYGCRRSDEDYLYREELAQFHRDGALTQLNVAFSREQSHKVYVQHLLKQDREHLWKLIEGGAHIYVCGDARNMARDVQNTFYDIVAELGAMEHAQAVDYIKKLMTKGRYSLDVWS

SEQ ID NO: 14752 - protein, 162 aa, Homo sapiens
MATPPPPRPAKAVVAPQWCGPEPCPGARREQPGCQRADLPRRPEGRLFHSLGRESPAGPRLRKHDKVCLRRLEVKPHTLESPDKHSLAFVVRVERIDGWTVMLPKIVDFLKEIGTPPSSWGKPQWVQQSCGSPNSSTSPQLAAGKYAALLVVSEKWSIKPSV

SEQ ID NO: 14753 - protein, 713 aa, Homo sapiens [sequence omitted]

SEQ ID NO: 14754 - protein, 1001 aa, Homo sapiens
MIFPVARYALRWLRRPEDRAFSRAAMEMALRGVRKVLCVAEKNDAAKGIADLLSNGRMRRREGLSKFNKIYEFDYHLYGQNVTMVMTSVSGHLLAHDFQMQFRKWQSCNPLVLFEAEIEKYCPENFVDIKKTLERETRQCQALVIWTDCDREGENIGFEIIHVCKAVKPNLQVLRARFSEITPHAVRTACENLTEPDQRVSDAVDVRQELDLRIGAAFTRFQTLRLQRIFPEVLAEQLISYGSCQFPTLGFVVERFKAIQAFVPEIFHRIKVTHDHKDGIVEFNWKRHRLFNHTACLVLYQLCVEDPMATVVEVRSKPKSKWRPQALDTVELEKLASRKLRINAKETMRIAEKLYTQGYISYPRTETNIFPRDLNLTVLVEQQTPDPRWGAFAQSILERGGPTPRNGNKSDQAHPPIHPTKYTNNLQGDEQRLYEFIVRHFLACCSQDAQGQETTVEIDIAQERFVAHGLMILARNYLDVYPYDHWSDKILPVYEQGSHFQPSTVEMVDGETSPPKLLTEADLIALMEKHGIGTDATHAEHIETIKARMYVGLTPDKRFLPGHLGMGLVEGYDSMGYEMSKPDLRAELEADLKLICDGKKDKFVVLRQQVQKYKQVFIEAVAKAKKLDEALAQYFGNGTELAQQEDIYPAMPEPIRKCPQCNKDMVLKTKKNGGFYLSCMGFPECRSAVWLPDSVLEASRDSSVCPVCQPHPVYRLKLKFKRGSLPPTMPLEFVCCIGGCDDTLREILDLRFSGGPPRASQPSGRLQANQSLNRMDNSQHPQPADSRQTGSSKALAQTLPPPTAAGESNSVTCNCGQEAVLLTVRKEGPNRGRQFFKCNGGSCNFFLWADSPNPGAGGPPALAYRPLGASLGCPPGPGIHLGGFGNPGDGSGSGTSCLCSQPSVTRTVQKDGPNKGRQFHTCAKPREQQCGFFQWVDENTAPGTSGAPSWTGDRGRTLESEARSKRPRASSSDMGSTAKKPRKCSLCHQPGHTRPFCPQNR

SEQ ID NO: 14755 - protein, 1001 aa, Homo sapiens; identical to SEQ ID NO: 14754

SEQ ID NO: 14756 - protein, 171 aa, Homo sapiens [sequence omitted]

SEQ ID NO: 14757 - protein, 1001 aa, Homo sapiens; identical to SEQ ID NO: 14754

SEQ ID NO: 14758 - protein, 297 aa, Homo sapiens
MASPQLCRALVSAQWVAEALRAPRAGQPLQLLDASWYLPKLGRDARREFEERHIPGAAFFDIDQCSDRTSPYDHMLPGAEHFAEYAGRLGVGAATHVVIYDASDQGLYSAPRVWWMFRAFGHHAVSLLDGGLRHWLRQNLPLSSGKSQPAPAEFRAQLDPAFIKTYEDIKENLESRRFQVVDSRATGRFRGTEPEPRDGIEPGHIPGTVNIPFTDFLSQEGLEKSPEEIRHLFQEKKVDLSKPLVATCGSGVTACHVALGAYLCGKPDVPIYDGSWVEWYMRARPEDVISEGRGKTH

SEQ ID NO: 14759 - protein, 297 aa, Homo sapiens; identical to SEQ ID NO: 14758

SEQ ID NO: 14760 - protein, 317 aa, Homo sapiens
MAEPGSRESETRARSPSVAAMASPQLCRALVSAQWVAEALRAPRAGQPLQLLDASWYLPKLGRDARREFEERHIPGAAFFDIDQCSDRTSPYDHMLPGAEHFAEYAGRLGVGAATHVVIYDASDQGLYSAPRVWWMFRAFGHHAVSLLDGGLRHWLRQNLPLSSGKSQPAPAEFRAQLDPAFIKTYEDIKENLESRRFQVVDSRATGRFRGTEPEPRDGIEPGHIPGTVNIPFTDFLSQEGLEKSPEEIRHLFQEKKVDLSKPLVATCGSGVTACHVALGAYLCGKPDVPIYDGSWVEWYMRARPEDVISEGRGKTH

SEQ ID NO: 14761 - protein, 297 aa, Homo sapiens
MVHQVLYRALVSTKWLAESIRTGKLGPGLRVLDASWYSPGTREARKEYLERHVPGASFFDIEECRDTASPYEMMLPSEAGFAEYVGRLGISNHTHVVVYDGEHLGSFYAPRVWWMFRVFGHRTVSVLNGGFRNWLKEGHPVTSEPSRPEPAVFKATLDRSLLKTYEQVLENLESKRFQLVDSRSQGRFLGTEPEPDAVGLDSGHIRGAVNMPFMDFLTEDGFEKGPEELRALFQTKKVDLSQPLIATCRKGVTACHVALAAYLCGKPDVAVYDGSWSEWFRRAPPESRVSQGKSEKA

SEQ ID NO: 14762 - protein, 297 aa, Homo sapiens; identical to SEQ ID NO: 14761

SEQ ID NO: 14763 - protein, 395 aa, Homo sapiens
MANEVIKCKAAVAWEAGKPLSIEEIEVAPPKAHEVRIKIIATAVCHTDAYTLSGADPEGCFPVILGHEGAGIVESVGEGVTKLKAGDTVIPLYIPQCGECKFCLNPKTNLCQKIRVTQGKGLMPDGTSRFTCKGKTILHYMGTSTFSEYTVVADISVAKIDPLAPLDKVCLLGCGISTGYGAAVNTAKLEPGSVCAVFGLGGVGLAVIMGCKVAGASRIIGVDINKDKFARAKEFGATECINPQDFSKPIQEVLIEMTDGGVDYSFECIGNVKVMRAALEACHKGWGVSVVVGVAASGEEIATRPFQLVTGRTWKGTAFGGWKSVESVPKLVSEYMSKKIKVDEFVTHNLSFDEINKAFELMHSGKRNNYQVNKMSKVLYYTRFPSVEHYGDKAA

SEQ ID NO: 14764 - protein, 374 aa, Homo sapiens
MANEVIKCKAAVAWEAGKPLSIEEIEVAPPKAHEVRIKIIATAVCHTDAYTLSGADPEGCFPVILGHEGAGIVESVGEGVTKLKAGDTVIPLYIPQCGECKFCLNPKTNLCQKIRVTQGKGLMPDGTSRFTCKGKTILHYMGTSTFSEYTVVADISVAKIDPLAPLDKVCLLGCGISTGYGAAVNTAKLEPGSVCAVFGLGGVGLAVIMGCKVAGASRIIGVDINKDKFARAKEFGATECINPQDFSKPIQEVLIEMTDGGVDYSFECIGNVKVMRAALEACHKGWGVSVVVGVAASGEEIATRPFQLVTGRTWKGTAFGGWKSVESVPKLVSEYMSKKIKVDEFVTHNLSFDEINKAFELMHSGKSIRTVVKI

SEQ ID NO: 14765 - protein, 374 aa, Homo sapiens; identical to SEQ ID NO: 14764

SEQ ID NO: 14766 - protein, 321 aa, Homo sapiens
  VARIANT (1)...(321): Xaa = Any Amino Acid
MANEVIKCKAAVAWEAGKPLSIEEIEVAPPKAHEVRIKIIATAVCHTDAYTLSGADPEGCFPVILGHEGAGIVESVGEGVTKLKAGDTVIPLYIPQCGECKFCLNPKTNLCQKIRVTQGKGLMPDGTSRFTCKGKTILHYMGTSTFSEYTVVADISVAKIDPLAPLDKVCLLGCGISTGYGAAVNTAKLEPGSVCAVFGLGGVGLAVIMGCKVAGASRIIGVDINKDKFARAKEFGATECINPQDFSKPIQEVLIEMTDGGVDYSFECIGNVKVMRAALEACHKGWGVSVVVGVAASGEEIATRPFQLVTGRTWKGTAFGX

SEQ ID NO: 14767 - protein, 375 aa, Homo sapiens [sequence omitted]

SEQ ID NO: 14768 - protein, 375 aa, Homo sapiens [sequence omitted]

SEQ ID NO: 14769 - protein, 375 aa, Homo sapiens [sequence omitted]

SEQ ID NO: 14770 - protein, 386 aa, Homo sapiens
MFAEIQIQDKDRMGTAGKVIKCKAAVLWEQKQPFSIEEIEVAPPKTKEVRIKILATGICRTDDHVIKGTMVSKFPVIVGHEATGIVESIGEGVTTVKPGDKVIPLFLPQCRECNACRNPDGNLCIRSDITGRGVLADGTTRFTCKGKPVHHFMNTSTFTEYTVVDESSVAKIDDAAPPEKVCLIGCGFSTGYGAAVKTGKVKPGSTCVVFGLGGVGLSVIMGCKSAGASRIIGIDLNKDKFEKAMAVGATECISPKDSTKPISEVLSEMTGNNVGYTFEVIGHLETMIDALASCHMNYGTSVVVGVPPSAKMLTYDPMLLFTGRTWKGCVFGGLKSRDDVPKLVTEFLAKKFDLDQLITHVLPFKKISEGFELLNSGQSIRTVLTF

SEQ ID NO: 14771 - protein, 734 aa, Homo sapiens
MSGFDDPGIFYSDSFGGDAQADEGQARKSQLQRRFKEFLRQYRVGTDRTGFTFKYRDELKRHYNLGEYWIEVEMEDLASFDEDLADYLYKQPAEHLQLLEEAAKEVADEVTRPRPSGEEVLQDIQVMLKSDASPSSIRSLKSDMMSHLVKIPGIIIAASAVRAKATRISIQCRSCRNTLTNIAMRPGLEGYALPRKCNTDQAGRPKCPLDPYFIMPDKCKCVDFQTLKLQELPDAVPHGEMPRHMQLYCDRYLCDKVVPGNRVTIMGIYSIKKFGLTTSRGRDRVGVGIRSSYIRVLGIQVDTDGSGRSFAGAVSPQEEEEFRRLAALPNVYEVISKSIAPSIFGGTDMKKAIACLLFGGSRKRLPDGLTRRGDINLLMLGDPGTAKSQLLKFVEKCSPIGVYTSGKGSSAAGLTASVMRDPSSRNFIMEGGAMVLADGGVVCIDEFDKMREDDRVAIHEAMEQQTISIAKAGITTTLNSRCSVLAAANSVFGRWDETKGEDNIDFMPTILSRFDMIFIVKDEHNEERDVMLAKHVITLHVSALTQTQAVEGEIDLAKLKKFIAYCRVKCGPRLSAEAAEKLKNRYIIMRSGARQHERDSDRRSSIPITVRQLEAIVRIAEALSKMKLQPFATEADVEEALRLFQVSTLDAALSGTLSGVEGFTSQEDQEMLSRIEKQLKRRFAIGSQVSEHSIIKDFTKQKYPEHAIHKVLQLMLRRGEIQHRMQRKVLYRLK

SEQ ID NO: 14772 - protein, 78 aa, Homo sapiens
DGQLSLSQTFSSHHSFPRDIFIRSRDGGIFSVPRRGGESRGGWILKYPEHAIHKVLQLMLRRGEIQHRMQRKVLYRLK

SEQ ID NO: 14773 - protein, 734 aa, Homo sapiens; identical to SEQ ID NO: 14771

SEQ ID NO: 14774 - protein, 88 aa, Homo sapiens [sequence omitted]

SEQ ID NO: 14775 - protein, 262 aa, Homo sapiens
MAVTAQAARRKERVLCLFDVDGTLTPARQKIDPEVAAFLQKLRSRVQIGVVGGSDYCKIAEQLGDGDEVIEKFDYVFAENGTVQYKHGRLLSKQTIQNHLGEELLQDLINFCLSYMALLRLPKKRGTFIEFRNGMLNISPIGRSCTLEERIEFSELDKKEKIREKFVEALKTEFAGKGLRFSRGGMISFDVFPEGWDKRYCLDSLDQDSFDTIHFFGNETSPGGNDFEIFADPRTVGHSVVSPQDTVQRCREIFFPETAHEA

SEQ ID NO: 14776 - protein, 262 aa, Homo sapiens; identical to SEQ ID NO: 14775

SEQ ID NO: 14777 - protein, 780 aa, Homo sapiens
MAPYSLLVTRLQKALGVRQYHVASVLCQRAKVAMSHFEPNEYIHYDLLEKNINIVRKRLNRPLTLSEKIVYGHLDDPASQEIERGKSYLRLRPDRVAMQDATAQMAMLQFISSGLSKVAVPSTIHCDHLIEAQVGGEKDLRRAKDINQEVYNFLATAGAKYGVGFWKPGSGIIHQIILENYAYPGVLLIGTDSHTPNGGGLGGICIGVGGADAVDVMAGIPWELKCPKVIGVKLTGSLSGWSSPKDVILKVAGILTVKGGTGAIVEYHGPGVDSISCTGMATICNMGAEIGATTSVFPYNHRMKKYLSKTGREDIANLADEFKDHLVPDPGCHYDQLIEINLSELKPHINGPFTPDLAHPVAEVGKVAEKEGWPLDIRVGLIGSCTNSSYEDMGRSAAVAKQALAHGLKCKSQFTITPGSEQIRATIERDGYAQILRDLGGIVLANACGPCIGQWDRKDIKKGEKNTIVTSYNRNFTGRNDANPETHAFVTSPEIVTALAIAGTLKFNPETDYLTGTDGKKFRLEAPDADELPKGEFDPGQDTYQHPPKDSSGQHVDVSPTSQRLQLLEPFDKWDGKDLEDLQILIKVKGKCTTDHISAAGPWLKFRGHLDNISNNLLIGAINIENGKANSVRNAVTQEFGPVPDTARYYKKHGIRWVVIGDENYGEGSSREHAALEPRHLGGRAIITKSFARIHETNLKKQGLLPLTFADPADYNKIHPVDKLTIQGLKDFTPGKPLKCIIKHPNGTQETILLNHTFNETQIEWFRAGSALNRMKELQQ

SEQ ID NO: 14778 - protein, 411 aa, Homo sapiens
MLLKTVLLLGHVAQVLMLDNGLLQTPPMGWLAWERFRCNINCDEDPKNCISEQLFMEMADRMAQDGWRDMGYTYLNIDDCWIGGRDASGRLMPDPKRFPHGIPFLADYVHSLGLKLGIYADMGNFTCMGYPGTTLDKVVQDAQTFAEWKVDMLKLDGCFSTPEERAQGYPKMAAALNATGRPIAFSCSWPAYEGGLPPRVNYSLLADICNLWRNYDDIQDSWWSVLSILNWFVEHQDILQPVAGPGHWNDPDMLLIGNFGLSLEQSRAQMALWTVLAAPLLMSTDLRTISAQNMDILQNPLMIKINQDPLGIQGRRIHKEKSLIEVYMRPLSNKASALVFFSCRTDMPYRYHSSLGQLNFTGSVIYEAQDVYSGDIISGLRDETNFTVIINPSGVVMWYLYPIKNLEMSQQ

SEQ ID NO: 14779 - protein, 411 aa, Homo sapiens; identical to SEQ ID NO: 14778

SEQ ID NO: 14780 - protein, 411 aa, Homo sapiens; identical to SEQ ID NO: 14778

SEQ ID NO: 14781 - protein, 128 aa, Homo sapiens
MAGSGVRQATSTASTFVKPIFSRDMNEAKRRVRELYRAWYREVPNTVHQFQLDITVKMGRDKVREMFMKNAHVTDPRVVDLLVIKGKIELEETIKVWKQRTHVMRFFHETEAPRPKDFLSKFYVGHDP

SEQ ID NO: 14782 - protein, 475 aa, Homo sapiens
CTGTNAGLHATRQVPCHCPGWATLLHVDFQNTPYCFDQLRRRFGDVFSLQLAWTPVVVLNGLAAVREAMVTRGEDTADRPPAPIYQVLGFGPRSQGVILSRYGPAWREQRRFSVSTLRNLGLGKKSLEQWVTEEAACLCAAFADQAGRPFRPNGLLDKAVSNVIASLTCGRRFEYDDPRFLRLLDLAQEGLKEESGFLREVLNAVPVLPHIPALAGKVLRFQKAFLTQLDELLTEHRMTWDPAQPPRDLTEAFLAKKEKAKGSPESSFNDENLRIVVGNLFLAGMVTTLTTLAWGLLLMILHLDVQLRVQQEIDDVIGQVRRPEMGDQAHMPYTTAVIHEVQRFGDIIPLSVTHMTSRDIEVQGFRIPKGTTLITNLSSVLKDEAVWEKPFRFHPEHFLDAQGHFVKPEAFLPFSAGRRACLGEPLARMELFLFFTSLLQHFSFSVAAGQPRPSHSRVVSFLVTPSPYELCAVPR

SEQ ID NO: 14783 - protein, 497 aa, Homo sapiens [sequence omitted]

SEQ ID NO: 14784 - protein, 220 aa, Homo sapiens
MGLDALVPLAVTVAIFLLLVDLMQQHQRWTARYPPGPLPLPGLGNLLHVDFQNIYTFNQLRHRFGDVFSLQLAWMPVVVLNGLAAVREALVTCGEDTADRPPAPIYQVLGIGPRSQGVFLAHYGHAWREQRRFSVSTLRNLGLGKKSLERWVTEEAACLCAAFADQARRPFHPNGLLNKAASNVIASLTCGCRFEYDDPRFLRLLDLAQKGLKEELGFLC

SEQ ID NO: 14785 - protein, 204 aa, Homo sapiens
MFVLVEMVDTVRIPPWQFERKLNDSIAEELNKKLANKVVYNVGLCICLFDITKLEDAYVFPGDGASHTKVHFRCVVFHPFLDEILIGKIKGCSPEGVHVSLGFFDDILIPPESLQQPAKFDEAEQVWVWEYETEEGAHDLYMDTGEEIRFRVVDESFVDTSPTGPSSADATTSSEELPKKEAPYTLVGSISEPGLGLLSWWTSN

SEQ ID NO: 14786 - protein, 204 aa, Homo sapiens; identical to SEQ ID NO: 14785

SEQ ID NO: 14787 - protein, 204 aa, Homo sapiens; identical to SEQ ID NO: 14785

SEQ ID NO: 14788 - protein, 345 aa, Homo sapiens
MSELVPEPRPKPAVPMKPMSINSNLLGYIGIDTIIEQMRKKTMKTGFDFNIMVVGQSGLGKSTLVNTLFKSQVSRKASSWNREEKIPKTVEIKAIGHVIEEGGVKMKLTVIDTPGFGDQINNENCWEPIEKYINEQYEKFLKEEVNIARKKRIPDTRVHCCLYFISPTGHSLRPLDLEFMKHLSKVVNIIPVIAKADTMTLEEKSEFKQRVRKELEVNGIEFYPQKEFDEDLEDKTENDKIRQESMPFAVVGSDKEYQVNGKRVLGRKTPWGIIEVENLNHCEFALLRDFVIRTHLQDLKEVTHNIHYETYRAKRLNDNGGLPPGEGLLGTVLPPVPATPCPTAE

SEQ ID NO: 14789 - protein, 337 aa, Homo sapiens
MSELVPEPRPKPAVPMKPMSINSNLLGYIGIDTIIEQMRKKTMKTGFDFNIMVVGQSGLGKSTLVNTLFKSQVSRKASSWNREEKIPKTVEIKAIGHVIEEGGVKMKLTVIDTPGFGDQINNENCWEPIEKYINEQYEKFLKEEVNIARKKRIPDTRVHCCLYFISPTGHSLRPLDLEFMKHLSKVVNIIPVIAKADTMTLEEKSEFKQRVRKELEVNGIEFYPQKEFDEDLEDKTENDKIRQESMPFAVVGSDKEYQVNGKRVLGRKTPWGIIEVENLNHCEFALLRDFVIRTHLQDLKEVTHNIHYETYRAKRLNDNGGLPPVSVDTEESHDSNP

SEQ ID NO: 14790 - protein, 358 aa, Homo sapiens
MSKGLPETRTDAAMSELVPEPRPKPAVPMKPMSINSNLLGYIGIDTIIEQMRKKTMKTGFDFNIMVVGQSGLGKSTLVNTLFKSQVSRKASSWNREEKIPKTVEIKAIGHVIEEGGVKMKLTVIDTPGFGDQINNENCWEPIEKYINEQYEKFLKEEVNIARKKRIPDTRVHCCLYFISPTGHSLRPLDLEFMKHLSKVVNIIPVIAKADTMTLEEKSEFKQRVRKELEVNGIEFYPQKEFDEDLEDKTENDKIRQESMPFAVVGSDKEYQVNGKRVLGRKTPWGIIEVENLNHCEFALLRDFVIRTHLQDLKEVTHNIHYETYRAKRLNDNGGLPPGEGLLGTVLPPVPATPCPTAE

SEQ ID NO: 14791 - protein, 337 aa, Homo sapiens; identical to SEQ ID NO: 14789

SEQ ID NO: 14792 - protein, 333 aa, Homo sapiens
MSELVPEPRPKPAVPMKPMSINSNLLGYIGIDTIIEQMRKKTMKTGFDFNIMVVGQSGLGKSTLVNTLFKSQVSRKASSWNREEKIPKTVEIKAIGHVIEEGGVKMKLTVIDTPGFGDQINNENCWEPIEKYINEQYEKFLKEEVNIARKKRIPDTRVHCCLYFISPTGHSLRPLDLEFMKHLSKVVNIIPVIAKADTMTLEEKSEFKQRLEVNGIEFYPQKEFDEDLEDKTENDKIRQESMPFAVVGSDKEYQVNGKRVLGRKTPWGIIEVENLNHCEFALLRDFVIRTHLQDLKEVTHNIHYETYRAKRLNDNGGLPPVSVDTEESHDSNP

SEQ ID NO: 14793 - protein, 327 aa, Homo sapiens
MFPSRRKAAQLPWEDGRSGLLSGGLPRKCSVFHLFVACLSLGFFSLLWLQLSCSGDVARAVRGQGQETSGPPRACPPEPPPEHWEEDASWGPHRLAVLVPFRERFEELLVFVPHMRRFLSRKKIRHHIYVLNQVDHFRFNRAALINVGFLESSNSTDYIAMHDVDLLPLNEELDYGFPEAGPFHVASPELHPLYHYKTYVGGILLLSKQHYRLCNGMSNRFWGWGREDDEFYRRIKGAGLQLFRPSGITTGYKTFRHLHDPAWRKRDQKRIAAQKQEQFKVDREGGLNTVKYHVASRTALSVGGAPCTVLNIMLDCDKTATPWCTFS

SEQ ID NO: 14794 - protein, 357 aa, Homo sapiens
MDSIGSSGLRQGEETLSCSEEGLPGPSDSSELVQECLQQFKVTRAQLQQIQASLLGSMEQALRGQASPAPAVRMLPTYVGSTPHGTEQGDFVVLELGATGASLRVLWVTLTGIEGHRVEPRSQEFVIPQEVMLGAGQQLFDFAAHCLSEFLDAQPVNKQGLQLGFSFSFPCHQTGLDRSTLISWTKGFRCSGVEGQDVVQLLRDAIRRQGAYNIDVVAVVNDTVGTMMGCEPGVRPCEVGLVVDTGTNACYMEEARHVAVLDEDRGRVCVSVEWGSFSDDGALGPVLTTFDHTLDHESLNPGAQRFEKMIGGLYLGELVRLVLAHLARCGVLFGGCTSPALLSQGSILLEHVAEMEE

SEQ ID NO: 14795 - protein, 923 aa, Homo sapiens
MDSIGSSGLRQGEETLSCSEEGLPGPSDSSELVQECLQQFKVTRAQLQQIQASLLGSMEQALRGQASPAPAVRMLPTYVGSTPHGTEQGDFVVLELGATGASLRVLWVTLTGIEGHRVEPRSQEFVIPQEVMLGAGQQLFDFAAHCLSEFLDAQPVNKQGLQLGFSFSFPCHQTGLDRSTLISWTKGFRCSGVEGQDVVQLLRDAIRRQGAYNIDVVAVVNDTVGTMMGCEPGVRPCEVGLVVDTGTNACYMEEARHVAVLDEDRGRVCVSVEWGSFSDDGALGPVLTTFDHTLDHESLNPGAQRFEKMIGGLYLGELVRLVLAHLARCGVLFGGCTSPALLSQGSILLEHVAEMEDPSTGAARVHAILQDLGLSPGASDVELVQHVCAAVCTRAAQLCAAALAAVLSCLQHSREQQTLQVAVATGGRVCERHPRFCSVLQGTVMLLAPECDVSLIPSVDGGGRGVAMVTAVAARLAAHRRLLEETLAPFRLNHDQLAAVQAQMRKAMAKGLRGEASSLRMLPTFVRATPDGSERGDFLALDLGGTNFRVLLVRVTTGVQITSEIYSIPETVAQGSGQQLFDHIVDCIVDFQQKQGLSGQSLPLGFTFSFPCRQLGLDQGILLNWTKGFKASDCEGQDVVSLLREAITRRQAVELNVVAIVNDTVGTMMSCGYEDPRCEIGLIVGTGTNACYMEELRNVAGVPGDSGRMCINMEWGAFGDDGSLAMLSTRFDASVDQASINPGKQRFEKMISGMYLGEIVRHILLHLTSLGVLFRGQQIQRLQTRDIFKTKFLSEIESDSLALRQVRAILEDLGLPLTSDDALMVLEVCQAVSQRAAQLCGAGVAAVVEKIRENRGLEELAVSVGVDGTLYKLHPRFSSLVAATVRELAPRCVVTFLQSEDGSGKGAALVTAVACRLAQLTRV

SEQ ID NO: 14796 - protein, 923 aa, Homo sapiens; identical to SEQ ID NO: 14795

SEQ ID NO: 14797 - protein, 52 aa, Homo sapiens [sequence omitted]

SEQ ID NO: 14798 - protein, 167 aa, Homo sapiens
MNRPAPVEISYENMRFLITHNPTNATLNKFTEELKKYGVTTLVRVCDATYDKAPVEKEGIHVLDWPFDDGAPPPNQIVDDWLNLLKTKFREEPGCCVAVHCVAGLGRAPVLVALALIECGMKYEDAVQFIRQKRRGAFNSKQLLYLEKYRPKMRLRFRDTNGHCCVQ

SEQ ID NO: 14799 - protein, 82 aa, Homo sapiens
MNRPAPVEISYENMRFLITHNPTNATLNKFTEELKKYGVTTLVRVCDATYDKAPVEKEGIHVLKKKGSVQFQTAALFGEIPT

SEQ ID NO: 14800 - protein, 167 aa, Homo sapiens; identical to SEQ ID NO: 14798

SEQ ID NO: 14801 - protein, 167 aa, Homo sapiens; identical to SEQ ID NO: 14798

SEQ ID NO: 14802 - protein, 167 aa, Homo sapiens; identical to SEQ ID NO: 14798

SEQ ID NO: 14803 - protein, 82 aa, Homo sapiens; identical to SEQ ID NO: 14799

SEQ ID NO: 14804 - protein, 168 aa, Homo sapiens
MNRPAPVEISYENMRFLITHNPTNATLNKFTEELKKYGVTTLVRVCDATYDKAPVEKEGIHVLDWPFDDGAPPPNQIVDDWLNLLKTKFREEPGCCVAVHCVAGLGRAPVLVALALIECGMKYEDAVQFIRQKRRGAFNSKQLLYLECDYASEIPMGIAVFSRRKCKR

SEQ ID NO: 14805 - protein, 482 aa, Homo sapiens
MAQTQGTRRKVCYYYDGDVGNYYYGQGHPMKPHRIRMTHNLLLNYGLYRKMEIYRPHKANAEEMTKYHSDDYIKFLRSIRPDNMSEYSKQMQRFNVGEDCPVFDGLFEFCQLSTGGSVASAVKLNKQQTDIAVNWAGGLHHAKKSEASGFCYVNDIVLAILELLKYHQRVLYIDIDIHHGDGVEEAFYTTDRVMTVSFHKYGEYFPGTGDLRDIGAGKGKYYAVNYPLRDGIDDESYEAIFKPVMSKVMEMFQPSAVVLQCGSDSLSGDRLGCFNLTIKGHAKCVEFVKSFNLPMLMLGGGGYTIRNVARCWTYETAVALDTEIPNELPYNDYFEYFGPDFKLHISPSNMTNQNTNEYLEKIKQRLFENLRMLPHAPGVQMQAIPEDAIPEESGDEDEDDPDKRISICSSDKRIACEEEFSDSEEEGEGGRKNSSNFKKAKRVKTEDEKEKDPEEKKEVTEEEKTKEEKPEAKGVKEEVKLA

SEQ ID NO: 14806 - protein, 482 aa, Homo sapiens; identical to SEQ ID NO: 14805

SEQ ID NO: 14807 - protein, 157 aa, Homo sapiens
MAGFQELVEWKWIQESNHPFQLRCAHSAFSHAHPKHEAPTFLLFLDCVWQLGCRFPLSLEFGEGLLLALFGHAYASSFGTFLCNSEKERCRVKGGLRCTPCGLGSTSQKSNKDSRTHSTSSIPWPSVEPQSLRLWQGLFLRWTCSPEPAEAAWGKSV

SEQ ID NO: 14808 - protein, 1062 aa, Homo sapiens
MEVYASEKEQHGDLCRPGEHVTSRFKNEVERMGFDMNNAWRISNINEKYKLCGSYPQELIVPAWITDKELESVSSFRSWKRIPAVIYRHQSNGAVIARCGQPEVSWWGWRNADDEHLVQSVAKACASDSRSSGSKLSTRNTSRDFPNGGDLSDVEFDSSLSNASGAESLAIQPQKLLILDARSYAAAVANRAKGGGCECPEYYPNCEVVFMGMANIHSIRRSFQSLRLLCTQMPDPGNWLSALESTKWLHHLSVLLKSALLVVHAVDQDQRPVLVHCSDGWDRTPQIVALAKLLLDPYYRTIEGFQVLVEMEWLDFGHKFADRCGHGENSDDLNERCPVFLQWLDCVHQLQRQFPCSFEFNEAFLVKLVQHTYSCLFGTFLCNNAKERGEKHTQERTCSVWSLLRAGNKAFKNLLYSSQSEAVLYPVCHVRNLMLWSAVYLPCPSPTTPVDDSCAPYPAPGTSPDDPPLSRLPKTRSYDNLTTACDNTVPLASRRCSDPSLNEKWQEHRRSLELSSLAGPGEDPLSADSLGKPTRVPGGAELSVAAGVAEGQMENILQEATKEESGVEEPAHRAGIEIQEGKEDPLLEKESRRKTPEASAIGLHQDPELGDAALRSHLDMSWPLFSQGISEQQSGLSVLLSSLQVPPRGEDSLEVPVEQFRIEEIAEGREEAVLPIPVDAKVGYGTSQSCSLLPSQVPFETRGPNVDSSTDMLVEDKVKSVSGPQGHHRSCLVNSGKDRLPQTMEPSPSETSLVERPQVGSVVHRTSLGSTLSLTRSPCALPLAECKEGLVCNGAPETENRASEQPPGLSTLQMYPTPNGHCANGEAGRSKDSLSRQLSAMSCSSAHLHSRNLHHKWLHSHSGRPSATSSPDQPSRSHLDDDGMSVYTDTIQQRLRQIESGHQQEVETLKKQVQELKSRLESQYLTSSLHFNGDFGDEVTSIPDSESNLDQNCLSRCSTEIFSEASWEQVDKQDTEMTRWLPDHLAAHCYACDSAFWLASRKHHCRNCGNVFCSSCCNQKVPVPSQQLFEPSRVCKSCYSSLHPTSSSIDLELDKPIAATSN

SEQ ID NO: 14809 - protein, 442 aa, Homo sapiens
MEVYASEKEQHGDLCRPGEHVTSRFKNEVERMGFDMNNAWRISNINEKYKLCGSYPQELIVPAWITDKELESVSSFRSWKRIPAVIYRHQSNGAVIARCGQPEVSWWGWRNADDEHLVQSVAKACASDSRSSGSKLSTRNTSRDFPNGGDLSDVEFDSSLSNASGAESLAIQPQKLLILDARSYAAAVANRAKGGGCECPEYYPNCEVVFMGMANIHSIRRSFQSLRLLCTQMPDPGNWLSALESTKWLHHLSVLLKSALLVVHAVDQDQRPVLVHCSDGWDRTPQIVALAKLLLDPYYRTIEGFQVLVEMEWLDFGHKFADRCGHGENSDDLNERCPVFLQWLDCVHQLQRQFPCSFEFNEAFLVKLVQHTYSCLFGTFLCNNAKERGEKHTQERTCSVWSLLRAGNKAFKNLLYSSQSEAVCILQPFHCGQQKEFGVGYI

SEQ ID NO: 14810 - protein, 1034 aa, Homo sapiens
MEVYASEKEQHGDLCRPGEHVTSRFKNEVERMGFDMNNAWRISNINEKYKLCGSYPQELIVPAWITDKELESVSSFRSWKRIPAVIYRHQSNGAVIARCGQPEVSWWGWRNADDEHLVQSVAKACASDSRSSGSKLSTRNTSRDFPNGGDLSDVEFDSSLSNASGAESLAIQPQKLLILDARSYAAAVANRAKGGGCECPEYYPNCEVVFMGMANIHSIRRSFQSLRLLCTQMPDPGNWLSALESTKWLHHLSVLLKSALLVVHAVDQDQRPVLVHCSDGWDRTPQIVALAKLLLDPYYRTIEGFQVLVEMEWLDFGHKFADRCGHGENSDDLNERCPVFLQWLDCVHQLQRQFPCSFEFNEAFLVKLVQHTYSCLFGTFLCNNAKERGEKHTQERTCSVWSLLRAGNKAFKNLLYSSQSEAVLYPVCHVRNLMLWSAVYLPCPSPTTPVDDSCAPYPAPGTSPDDPPLSRLPKTRSYDNLTTACDNTVPLASRRCSDPSLNEKWQEHRRSLELSSLAGPGEDPLSADSLGKPTRVPGGAELSVAAGVAEGQMENILQEATKEESGVEEPAHRAGIEIQEGKEDPLLEKESRRKTPEASAIGLHQDPELGDAALRSHLDMSWPLFSQGISEQQSGLSVLLSSLQVPPRGEDSLEVPVEQFRIEEIAEGREEAVLPIPVDAKVGYGTSQSCSLLPSQVPFETRGPNVDSSTDMLVEDKVKSVSGPQGHHRSCLVNSGKDRLPQTMEPSPSETSLVERPQVGSVVHRTSLGSTLSLTRSPCALPLAECKEGLVCNGAPETENRASEQPPGLSTLQMYPTPNGHCANGEAGRSKDSLSRQLSAMSCSSAHLHSRNLHHKWLHSHSGRPSATSSPDQPSRSHLDDDGMSVYTDTIQQRLRQIESGHQQEVETLKKQVQELKSRLESQYLTSSLHFNGDFGDEVMTRWLPDHLAAHCYACDSAFWLASRKHHCRDTDRVDQTWNCGNVFCSSCCNQKVPVPSQQLFEPSRVCKSCYSSLHPTSSSIDLELDKPIAATSN

SEQ ID NO: 14811 - protein, 1161 aa, Homo sapiens
MDEETRHSLECIQANQIFPRKQLIREDENLQVPFLELHGESTEFVGRAEDAIIALSNYRLHIKFKESLVNVPLQLIESVECRDIFQLHLTCKDCKVIRCQFSTFEQCQEWLKRLNNAIRPPAKIEDLFSFAYHAWCMEVYASEKEQHGDLCRPGEHVTSRFKNEVERMGFDMNNAWRISNINEKYKLCGSYPQELIVPAWITDKELESVSSFRSWKRIPAVIYRHQSNGAVIARCGQPEVSWWGWRNADDEHLVQSVAKACASDSRSSGSKLSTRNTSRDFPNGGDLSDVEFDSSLSNASGAESLAIQPQKLLILDARSYAAAVANRAKGGGCECPEYYPNCEVVFMGMANIHSIRRSFQSLRLLCTQMPDPGNWLSALESTKWLHHLSVLLKSALLVVHAVDQDQRPVLVHCSDGWDRTPQIVALAKLLLDPYYRTIEGFQVLVEMEWLDFGHKFADRCGHGENSDDLNERCPVFLQWLDCVHQLQRQFPCSFEFNEAFLVKLVQHTYSCLFGTFLCNNAKERGEKHTQERTCSVWSLLRAGNKAFKNLLYSSQSEAVLYPVCHVRNLMLWSAVYLPCPSPTTPVDDSCAPYPAPGTSPDDPPLSRLPKTRSYDNLTTACDNTVPLASRRCSDPSLNEKWQEHRRSLELSSLAGPGEDPLSADSLGKPTRVPGGAELSVAAGVAEGQMENILQEATKEESGVEEPAHRAGIEIQEGKEDPLLEKESRRKTPEASAIGLHQDPELGDAALRSHLDMSWPLFSQGISEQQSGLSVLLSSLQVPPRGEDSLEVPVEQFRIEEIAEGREEAVLPIPVDAKVGYGTSQSCSLLPSQVPFETRGPNVDSSTDMLVEDKVKSVSGPQGHHRSCLVNSGKDRLPQTMEPSPSETSLVERPQVGSVVHRTSLGSTLSLTRSPCALPLAECKEGLVCNGAPETENRASEQPPGLSTLQMYPTPNGHCANGEAGRSKDSLSRQLSAMSCSSAHLHSRNLHHKWLHSHSGRPSATSSPDQPSRSHLDDDGMSVYTDTIQQRLRQIESGHQQEVETLKKQVQELKSRLESQYLTSSLHFNGDFGDEVMTRWLPDHLAAHCYACDSAFWLASRKHHCRNCGNVFCSSCCNQKVPVPSQQLFEPSRVCKSCYSSLHPTSSSIDLELDKPIAATSN

SEQ ID NO: 14812 - protein, 1198 aa, Homo sapiens
MDEETRHSLECIQANQIFPRKQLIREDENLQVPFLELHGESTEFVGRAEDAIIALSNYRLHIKFKESLVNVPLQLIESVECRDIFQLHLTCKDCKVIRCQFSTFEQCQEWLKRLNNAIRPPAKIEDLFSFAYHAWCMEVYASEKEQHGDLCRPGEHVTSRFKNEVERMGFDMNNAWRISNINEKYKLCGSYPQELIVPAWITDKELESVSSFRSWKRIPAVIYRHQSNGAVIARCGQPEVSWWGWRNADDEHLVQSVAKACASDSRSSGSKLSTRNTSRDFPNGGDLSDVEFDSSLSNASGAESLAIQPQKLLILDARSYAAAVANRAKGGGCECPEYYPNCEVVFMGMANIHSIRRSFQSLRLLCTQMPDPGNWLSALESTKWLHHLSVLLKSALLVVHAVDQDQRPVLVHCSDGWDRTPQIVALAKLLLDPYYRTIEGFQVLVEMEWLDFGHKFADRCGHGENSDDLNERCPVFLQWLDCVHQLQRQFPCSFEFNEAFLVKLVQHTYSCLFGTFLCNNAKERGEKHTQERTCSVWSLLRAGNKAFKNLLYSSQSEAVLYPVCHVRNLMLWSAVYLPCPSPTTPVDDSCAPYPAPGTSPDDPPLSRLPKTRSYDNLTTACDNTVPLASRRCSDPSLNEKWQEHRRSLELSSLAGPGEDPLSADSLGKPTRVPGGAELSVAAGVAEGQMENILQEATKEESGVEEPAHRAGIEIQEGKEDPLLEKESRRKTPEASAIGLHQDPELGDAALRSHLDMSWPLFSQGISEQQSGLSVLLSSLQVPPRGEDSLEVPVEQFRIEEIAEGREEAVLPIPVDAKVGYGTSQSCSLLPSQVPFETRGPNVDSSTDMLVEDKVKSVSGPQGHHRSCLVNSGKDRLPQTMEPSPSETSLVERPQVGSVVHRTSLGSTLSLTRSPCALPLAECKEGLVCNGAPETENRASEQPPGLSTLQMYPTPNGHCANGEAGRSKDSLSRQLSAMSCSSAHLHSRNLHHKWLHSHSGRPSATSSPDQPSRSHLDDDGMSVYTDTIQQRLRQIESGHQQEVETLKKQVQELKSRLESQYLTSSLHFNGDFGDEVTSIPDSESNLDQNCLSRCSTEIFSEASWEQVDKQDTEMTRWLPDHLAAHCYACDSAFWLASRKHHCRNCGNVFCSSCCNQKVPVPSQQLFEPSRVCKSCYSSLHPTSSSIDLELDKPIAATSN

SEQ ID NO: 14813 - protein, 119 aa, Homo sapiens
MAGRGKLIAVIGDEDTVTGFLLGGIGELNKNRHPNFLVVEKDTTINEIEDTFRQFLNRDDIGIILINQYIAEMVRHALDAHQQSIPAVLEIPSKEHPYDAAKDSILRRARGMFTAEDLR

SEQ ID NO: 14814 - protein, 119 aa, Homo sapiens; identical to SEQ ID NO: 14813

SEQ ID NO: 14815 - protein, 94 aa, Homo sapiens
MDTASHSLVLLQQLNMQREFGFLCDCTVAIGDVYFKAHRAVLAAFSNYFKMIFIHQTRKRKMSCTICGHKFPRKSQLLEHMYTHKDSKSPTLRS

SEQ ID NO: 14816 - protein, 935 aa, Homo sapiens
MAPAEILNGKEISAQIRARLKNQVTQLKEQVPGFTPRLAILQVGNRDDSNLYINVKLKAAEEIGIKATHIKLPRTTTESEVMKYITSLNEDSTVHGFLVQLPLDSENSINTEEVINAIAPEKDVDGLTSINAGRLARGDLNDCFIPCTPKGCLELIKETGVPIAGRHAVVVGRSKIVGAPMHDLLLWNNATVTTCHSKTAHLDEEVNKGDILVVATGQPEMVKGEWIKPGAIVIDCGINYVPDDKKPNGRKVVGDVAYDEAKERASFITPVPGGVGPMTVAMLMQSTVESAKRFLEKFKPGKWMIQYNNLNLKTPVPSDIDISRSCKPKPIGKLAREIGLLSEEVELYGETKAKVLLSALERLKHRPDGKYVVVTGITPTPLGEGKSTTTIGLVQALGAHLYQNVFACVRQPSQGPTFGIKGGAAGGGYSQVIPMEEFNLHLTGDIHAITAANNLVAAAIDARIFHELTQTDKALFNRLVPSVNGVRRFSDIQIRRLKRLGIEKTDPTTLTDEEINRFARLDIDPETITWQRVLDTNDRFLRKITIGQAPTEKGHTRTAQFDISVASEIMAVLALTTSLEDMRERLGKMVVASSKKGEPVSAEDLGVSGALTVLMKDAIKPNLMQTLEGTPVFVHAGPFANIAHGNSSIIADQIALKLVGPEGFVVTEAGFGADIGMEKFFNIKCRYSGLCPHVVVLVATVRALKMHGGGPTVTAGLPLPKAYIQENLELVEKGFSNLKKQIENARMFGIPVVVAVNAFKTDTESELDLISRLSREHGAFDAVKCTHWAEGGKGALALAQAVQRAAQAPSSFQLLYDLKLPVEDKIRIIAQKIYGADDIELLPEAQHKAEVYTKQGFGNLPICMAKTHLSLSHNPEQKGVPTGFILPIRDIRASVGAGFLYPLVGTMSTMPGLPTRPCFYDIDLDPETEQVNGLF

SEQ ID NO: 14817 - protein, 935 aa, Homo sapiens; identical to SEQ ID NO: 14816

SEQ ID NO: 14818 - protein, 437 aa, Homo sapiens
MASPSSFTYYCPPSSSPVWSEPLYSLRPEHARERLQDDSVETVTSIEQAKVEEKIQEVFSSYKFNHLVPRLVLQREKHFHYLKRGLRQLTDAYECLDASRPWLCYWILHSLELLDEPIPQIVATDVCQFLELCQSPEGGFGGGPGQYPHLAPTYAAVNALCIIGTEEAYDIINREKLLQYLYSLKQPDGSFLMHVGGEVDVRSAYCAASVASLTNIITPDLFEGTAEWIARCQNWEGGIGGVPGMEAHGGYTFCGLAALVILKRERSLNLKSLLQWVTSRQMRFEGGFQGRCNKLVDGCYSFWQAGLLPLLHRALHAQGDPALSMSHWMFHQQALQEYILMCCQCPAGGLLDKPGKSRDFYHTCYCLSGLSIAQHFGSGAMLHDVVLGVPENALQPTHPVYNIGPDKVIQATTYFLQKPVPGFEELKDETSAEPATD

SEQ ID NO: 14819 - protein, 437 aa, Homo sapiens; identical to SEQ ID NO: 14818

SEQ ID NO: 14820 - protein, 183 aa, Homo sapiens
MQLVDHRGGGGGGGKGGRSRYRTTSSANNPNLMYQDECDRRLRGVKDGGRRDSASYRDRSETDRAGYANGSGYGSPNSAFGAQAGQYTYGQGTYGAAAYGTSSYTAQEYGAGTYGASSTTSTGRSSQSSSQQFSGIGRSGQQPQPLMSQQFAQPPGATNMIGYMGQTAYQYPPPPPPPPPSRK

SEQ ID NO: 14821 - protein, 650 aa, Homo sapiens
MRGGGFGDRDRDRDRGGFGARGGGGLPPKKFGNPGERLRKKKWDLSELPKFEKNFYVEHPEVARLTPYEVDELRRKKEITVRGGDVCPKPVFAFHHANFPQYVMDVLMDQHFTEPTPIQCQGFPLALSGRDMVGIAQTGSGKTLAYLLPAIVHINHQPYLERGDGPICLVLAPTRELAQQVQQVADDYGKCSRLKSTCIYGGAPKGPQIRDLERGVEICIATPGRLIDFLESGKTNLRRCTYLVLDEADRMLDMGFEPQIRKIVDQIRPDRQTLMWSATWPKEVRQLAEDFLRDYTQINVGNLELSANHNILQIVDVCMESEKDHKLIQLMEEIMAEKENKTIIFVETKRRCDDLTRRMRRDGWPAMCIHGDKSQPERDWVLNEFRSGKAPILIATDVASRGLDVEDVKFVINYDYPNSSEDYVHRIGRTARSTNKGTAYTFFTPGNLKQARELIKVLEEANQAINPKLMQLVDHRGGGGGGGGRSRYRTTSSANNPNLMYQDECDRRLRGVKDGGRRDSASYRDRSETDRAGYANGSGYGSPNSAFGAQAGQYTYGQGTYGAAAYGTSSYTAQEYGAGTYGASSTTSTGRSSQSSSQQFSGIGRSGQQPQPLMSQQFAQPPGATNMIGYMGQTAYQYPPPPPPPPPSRK

SEQ ID NO: 14822 - protein, 650 aa, Homo sapiens; identical to SEQ ID NO: 14821

SEQ ID NO: 14823 - protein, 386 aa, Homo sapiens
MNPQIRNPMERMYRDTFYDNFENEPILYGRSYTWLCYEVKIKRGRSNLLWDTGVFRGPVLPKRQSNHRQEVYFRFENHAEMCFLSWFCGNRLPANRRFQITWFVSWNPCLPCVVKVTKFLAEHPNVTLTISAARLYYYRDRDWRWVLLRLHKAGARVKIMDYEDFAYCWENFVCNEGQPFMPWYKFDDNYASLHRTLKEILRNPMEAMYPHIFYFHFKNLLKACGRNESWLCFTMEVTKHHSAVFRKRGVFRNQVDPETHCHAERCFLSWFCDDILSPNTNYEVTWYTSWSPCPECAGEVAEFLARHSNVNLTIFTARLCYFWDTDYQEGLCSLSQEGASVKIMGYKDFVSCWKNFVYSDDEPFKPWKGLQTNFRLLKRRLREILQ

SEQ ID NO: 14824 - protein, 280 aa, Homo sapiens
MLSAVARGYQGWFHPCARLSVRMSSTGIDRKGVLANRVAVVTGSTSGIGFAIARRLARDGAHVVISSRKQQNVDRAMAKLQGEGLSVAGIVCHVGKAEDREQLVAKALEHCGGVDFLVCSAGVNPLVGSTLGTSEQIWDKILSVNVKSPALLLSQLLPYMENRRGAVILVSSIAAYNPVVALGVYNVSKTALLGLTRTLALELAPKDIRVNCVVPGIIKTDFSKVFHGNESLWKNFKEHHQLQRIGESEDCAGIVSFLCSPDASYVNGENIAVAGYSTRL

SEQ ID NO: 14825 - protein, 280 aa, Homo sapiens; identical to SEQ ID NO: 14824

SEQ ID NO: 14826 - protein, 252 aa, Homo sapiens
MTPLCPRPALCYHFLTSLLRSAMQNARGARQRAEAAVLSGPGPPLGRAAQHGIPRPLSSAGRLSQGCRGASTVGAAGWKGELPKAGGSPAPGPETPAISPSKRARPAEVGGMQLRFARLSEHATAPTRGSARAAGYDLYSAYDYTIPPMEKAVVKTDIQIALPSGCYGRVAPRSGLAAKHFIDVGAGVIDEDYRGNVGVVLFNFGKEKFEVKKGDRIAQLICERIFYPEIEEVQALDDTERGSGGFGSTGKN

SEQ ID NO: 14827 - protein, 135 aa, Homo sapiens
MTPLCPRPALCYHFLTSLLRSAMQNARGARQRAEAAVLSGPGPPLGRAAQHGIPRPLSSAGRLSQGCRGASTVGAAGWKGELPKAGGSPAPGPGRKGGGGAPAVWKESTRLEAVGEVGWRAVLLRAGGGGGGVVH

SEQ ID NO: 14828 - protein, 218 aa, Homo sapiens
MTPLCPRPALCYHFLTSLLRSAMQNARGARQRAEAAVLSGPGPPLGRAAQHGIPRPLSSAGRLSQGCRGASTVGAAGWKGELPKAGGSPAPGPETPAISPSKRARPAEVGGMQLRFARLSEHATAPTRGSARAAGYDLYSAYDYTIPPMEKAVVKTDIQIALPSGCYGRVAPRSGLAAKHFIDVGAGVIDEDYRGNVGVVLFNFGKEKFEDRIWRMCQ

SEQ ID NO: 14829 - protein, 847 aa, Homo sapiens
MGKKGKVGKSRRDKFYHLAKETGYRSRSAFKLIQLNRRFQFLQKARALLDLCAAPGGWLQVAAKFMPVSSLIVGVDLVPIKPLPNVVTLQQDITTERCRQALRKELKTWKVDVVLNDGAPNVGASWVHDAYSQAHLTLMALRLACDFLARGGSFITKVFRSRDYQPLLWIFQQLFRRVQATKPQASRHESAEIFVVCQGFLAPDKVDSKFFDPKFAFKEVEVQAKTVTELVTKKKPKAEGYAEGDLTLYHRTSVTDFLRAANPVDFLSKASEIMVDDEELAQHPATTEDIRVCCQDIRVLGRKELRSLLNWRTKLRRYVAKKLKEQAKALDISLSSGEEDEGDEEDSTAGTTKQPSKEEEEEEEEEQLNQTLAEMKAQEVAELKRKKKKLLREQRKQRERVELKMDLPGVSIADEGETGMFSLSTIRGHQLLEEVTQGDMSAADTFLSDLPRDDIYVSDVEDDGDDTSLDSDLDPEELAGVRGHQGLRDQKRMRLTEVQDDKEEEEEENPLLVPLEEKAVLQEEQANLWFSKGSFAGIEDDADEALEISQAQLLFENRRKGRQQQQKQQLPQTPPSCLKTEIMSPLYQDEAPKGTEASSGTEAATGLEGEEKDGISDSDSSTSSEEEESWEPLRGKKRSRGPKSDDDGFEIVPIEDPAKHRILDPEGLALGAVIASSKKAKRDLIDNSFNRYTFNEDEGELPEWFVQEEKQHRIRQLPVGKKEVEHYRKRWREINARPIKKVAEAKARKKRRMLKRLEQTRKKAEAVVNTVDISEREKVAQLRSLYKKAGLGKEKRHVTYVVAKKGVGRKVRRPAGVRGHFKVVDSRMKKDQRAQQRKEQKKKHKRK

SEQ ID NO: 14830 - protein, 847 aa, Homo sapiens; identical to SEQ ID NO: 14829

SEQ ID NO: 14831 - protein, 847 aa, Homo sapiens; identical to SEQ ID NO: 14829

SEQ ID NO: 14832 - protein, 936 aa, Homo sapiens [sequence omitted]

SEQ ID NO: 14833 - protein, 828 aa, Homo sapiens
MMIPWRHSWLKWRQDQAARDMKRLEEKDKERKNVKGIRDDIEEEDDQEAYFRYMAENPTAGVVQEEEEDNLEYDSDGNPIAPTKKIIDPLPPIDHSEIDYPPFEKNFYNEHEEITNLTPQQLIDLRHKLNLRVSGAAPPRPGSSFAHFGFDEQLMHQIRKSEYTQPTPIQCQGVPVALSGRDMIGIAKTGSGKTAAFIWPMLIHIMDQKELEPGDGPIAVIVCPTRELCQQIHAECKRFGKAYNLRSVAVYGGGSMWEQAKALQEGAEIVVCTPGRLIDHVKKKATNLQRVSYLVFDEADRMFDMGFEYQVRSIASHVRPDRQTLLFSATFRKKIEKLARDILIDPIRVVQGDIGEANEDVTQIVEILHSGPSKWNWLTRRLVEFTSSGSVLLFVTKKANAEELANNLKQEGHNLGLLHGDMDQSERNKVISDFKKKDIPVLVATDVAARGLDIPSIKTVINYDVARDIDTHTHRIGRTGRAGEKGVAYTLLTPKDSNFAGDLVRNLEGANQHVSKELLDLAMQNAWFRKSRFKGGKGKKLNIGGGGLGYRERPGLGSENMDRGNNNVMSNYEAYKPSTGAMGDRLTAMKAAFQSQYKSHFVAASLSNQKAGSSAAGASGWTSAGSLNSVPTNSAQQGHNSPDSPVTSAAKGIPGFGNTGNISGAPVTYPSAGAQGVNNTASGNNSREGTGGSNGKRERYTENRGSSRHSHGETGNRHSDSPRHGDGGRHGDGYRHPESSSRHTDGHRHGENRHGGSAGRHGENRGANDGRNGESRKEAFNRESKMEPKMEPKVDSSKMDKVDSKTDKTADGFAVPEPPKRKKSRWDS

SEQ ID NO: 14834 - protein, 938 aa, Homo sapiens
MNWNKGGPGTKRGFGFGGFAISAGKKEEPKLPQQSHSAFGATSSSSGFGKSAPPQLPSFYKIGSKRANFDEENAYFEDEEEDSSNVDLPYIPAENSPTRQQFHSKPVDSDSDDDPLEAFMAEVEDQAARDMKRLEEKDKERKNVKGIRDDIEEEDDQEAYFRYMAENPTAGVVQEEEEDNLEYDSDGNPIAPTKKIIDPLPPIDHSEIDYPPFEKNFYNEHEEITNLTPQQLIDLRHKLNLRVSGAAPPRPGSSFAHFGFDEQLMHQIRKSEYTQPTPIQCQGVPVALSGRDMIGIAKTGSGKTAAFIWPMLIHIMDQKELEPGDGPIAVIVCPTRELCQQIHAECKRFGKAYNLRSVAVYGGGSMWEQAKALQEGAEIVVCTPGRLIDHVKKKATNLQRVSYLVFDEADRMFDMGFEYQVRSIASHVRPDRQTLLFSATFRKKIEKLARDILIDPIRVVQGDIGEANEDVTQIVEILHSGPSKWNWLTRRLVEFTSSGSVLLFVTKKANAEELANNLKQEGHNLGLLHGDMDQSERNKVISDFKKKDIPVLVATDVAARGLDIPSIKTVINYDVARDIDTHTHRIGRTGRAGEKGVAYTLLTPKDSNFAGDLVRNLEGANQHVSKELLDLAMQNAWFRKSRFKGGKGKKLNIGGGGLGYRERPGLGSENMDRGNNNVMSNYEAYKPSTGAMGDRLTAMKAAFQSQYKSHFVAASLSNQKAGSSAAGASGWTSAGSLNSVPTNSAQQGHNSPDSPVTSAAKGIPGFGNTGNISGAPVTYPSAGAQGVNNTASGNNSREGTGGSNGKRERYTENRGSSRHSHGETGNRHSDSPRHGDGGRHGDGYRHPESSSRHTDGHRHGENRHGGSAGRHGENRGANDGRNGESRKEAFNRESKMEPKMEPKVDSSKMDKVDSKTDKTADGFAVPEPPKRKKSRWDS

SEQ ID NO: 14835 - protein, 819 aa, Homo sapiens
MAEVEDQAARDMKRLEEKDKERKNVKGIRDDIEEEDDQEAYFRYMAENPTAGVVQEEEEDNLEYDSDGNPIAPTKKIIDPLPPIDHSEIDYPPFEKNFYNEHEEITNLTPQQLIDLRHKLNLRVSGAAPPRPGSSFAHFGFDEQLMHQIRKSEYTQPTPIQCQGVPVALSGRDMIGIAKTGSGKTAAFIWPMLIHIMDQKELEPGDGPIAVIVCPTRELCQQIHAECKRFGKAYNLRSVAVYGGGSMWEQAKALQEGAEIVVCTPGRLIDHVKKKATNLQRVSYLVFDEADRMFDMGFEYQVRSIASHVRPDRQTLLFSATFRKKIEKLARDILIDPIRVVQGDIGEANEDVTQIVEILHSGPSKWNWLTRRLVEFTSSGSVLLFVTKKANAEELANNLKQEGHNLGLLHGDMDQSERNKVISDFKKKDIPVLVATDVAARGLDIPSIKTVINYDVARDIDTHTHRIGRTGRAGEKGVAYTLLTPKDSNFAGDLVRNLEGANQHVSKELLDLAMQNAWFRKSRFKGGKGKKLNIGGGGLGYRERPGLGSENMDRGNNNVMSNYEAYKPSTGAMGDRLTAMKAAFQSQYKSHFVAASLSNQKAGSSAAGASGWTSAGSLNSVPTNSAQQGHNSPDSPVTSAAKGIPGFGNTGNISGAPVTYPSAGAQGVNNTASGNNSREGTGGSNGKRERYTENRGSSRHSHGETGNRHSDSPRHGDGGRHGDGYRHPESSSRHTDGHRHGENRHGGSAGRHGENRGANDGRNGESRKEAFNRESKMEPKMEPKVDSSKMDKVDSKTDKTADGFAVPEPPKRKKSRWDS

SEQ ID NO: 14836 - protein, 251 aa, Homo sapiens
MEGGAAAATPTALPYYVAFSQLLGLTLVAMTGAWLGLYRGGIAWESDLQFNAHPLCMVIGLIFLQGNALLVYRVFRNEAKRTTKVLHGLLHIFALVIALVGLVAVFDYHRKKGYADLYSLHSWCGILVFVLYFVQWLVGFSFFLFPGASFSLRSRYRPQHIFFGATIFLLSVGTALLGLKEALLFNLGGKYSAFEPEGVLANVLGLLLACFGGAVLYILTRADWKRPSQAEEQALSMDFKTLTEGDSPGSQ

SEQ ID NO: 14837 - protein, 251 aa, Homo sapiens; identical to SEQ ID NO: 14836

SEQ ID NO: 14838 - protein, 251 aa, Homo sapiens; identical to SEQ ID NO: 14836

SEQ ID NO: 14839 - protein, 67 aa, Homo sapiens
MTKELKKAPRSGFVTIPSERGGSVVEGRAVSVADSEAYLCLCDPEQLQLSGSASAFVLETAVSSVEV

SEQ ID NO: 14840 - protein, 419 aa, Homo sapiens
MWPGNAWRAALFWVPRGRRAQSALAQLRGILEGELEGICGAGTWKSERVITSRQGPHIRVDGVSGGILNFCANNYLGLSSHPEVIQAGLQALEEFGAGLSSVRFICGTQSIHKNLEAKIARFHQREDAILYPSCYDANAGLFEALLTPEDAVLSDELNHASIIDGIRLCKAHKYRYRHLDMADLEAKLQEAQKHRLRLVATDGAFSMDGDIAPLQEICCLASRYGALVFMDECHATGFLGPTGRGTDELLGVMDQVTIINSTLGKALGGASGGYTTGPGPLVSLLRQRARPYLFSNSLPPAVVGCASKALDLLMGSNTIVQSMAAKTQRFRSKMEAAGFTISGASHPICPVMLGDARLASRMADDMLKRGIFVIGFSYPVVPKGKARIRVQISAVHSEEDIDRCVEAFVEVGRLHGALP

SEQ ID NO: 14841 - protein, 752 aa, Homo sapiens
MQFFGRLVNTFSGVTNLFSNPFRVKEVAVADYTSSDRVREEGQLILFQNTPNRTWDCVLVNPRNSQSGFRLFQLELEADALVNFHQYSSQLLPFYESSPQVLHTEVLQHLTDLIRNHPSWSVAHLAVELGIRECFHHSRIISCANCAENEEGCTPLHLACRKGDGEILVELVQYCHTQMDVTDYKGETVFHYAVQGDNSQVLQLLGRNAVAGLNQVNNQGLTPLHLACQLGKQEMVRVLLLCNARCNIMGPNGYPIHSAMKFSQKGCAEMIISMDSSQIHSKDPRYGASPLHWAKNAEMARMLLKRGCNVNSTSSAGNTALHVAVMRNRFDCAIVLLTHGANADARGEHGNTPLHLAMSKDNVEMIKALIVFGAEVDTPNDFGETPTFLASKIGRQLQDLMHISRARKPAFILGSMRDEKRTHDHLLCLDGGGVKGLIIIQLLIAIEKASGVATKDLFDWVAGTSTGGILALAILHSKSMAYMRGMYFRMKDEVFRGSRPYESGPLEEFLKREFGEHTKMTDVRKPKVMLTGTLSDRQPAELHLFRNYDAPETVREPRFNQNVNLRPPAQPSDQLVWRAARSSGAAPTYFRPNGRFLDGGLLANNPTLDAMTEIHEYNQDLIRKGQANKVKKLSIVVSLGTGRSPQVPVTCVDVFRPSNPWELAKTVFGAKELGKMVVDCCTDPDGRAVDRARAWCEMVGIQYFRLNPQLGTDIMLDEVSDTVLVNALWETEVYIYEHREEFQKLIQLLLSP

SEQ ID NO: 14842 - protein, 806 aa, Homo sapiens
MQFFGRLVNTFSGVTNLFSNPFRVKEVAVADYTSSDRVREEGQLILFQNTPNRTWDCVLVNPRNSQSGFRLFQLELEADALVNFHQYSSQLLPFYESSPQVLHTEVLQHLTDLIRNHPSWSVAHLAVELGIRECFHHSRIISCANCAENEEGCTPLHLACRKGDGEILVELVQYCHTQMDVTDYKGETVFHYAVQGDNSQVLQLLGRNAVAGLNQVNNQGLTPLHLACQLGKQEMVRVLLLCNARCNIMGPNGYPIHSAMKFSQKGCAEMIISMDSSQIHSKDPRYGASPLHWAKNAEMARMLLKRGCNVNSTSSAGNTALHVAVMRNRFDCAIVLLTHGANADARGEHGNTPLHLAMSKDNVEMIKALIVFGAEVDTPNDFGETPTFLASKIGRLVTRKAILTLLRTVGAEYCFPPIHGVPAEQGSAAPHHPFSLERAQPPPISLNNLELQDLMHISRARKPAFILGSMRDEKRTHDHLLCLDGGGVKGLIIIQLLIAIEKASGVATKDLFDWVAGTSTGGILALAILHSKSMAYMRGMYFRMKDEVFRGSRPYESGPLEEFLKREFGEHTKMTDVRKPKVMLTGTLSDRQPAELHLFRNYDAPETVREPRFNQNVNLRPPAQPSDQLVWRAARSSGAAPTYFRPNGRFLDGGLLANNPTLDAMTEIHEYNQDLIRKGQANKVKKLSIVVSLGTGRSPQVPVTCVDVFRPSNPWELAKTVFGAKELGKMVVDCCTDPDGRAVDRARAWCEMVGIQYFRLNPQLGTDIMLDEVSDTVLVNALWETEVYIYEHREEFQKLIQLLLSP

SEQ ID NO: 14843 - protein, 127 aa, Homo sapiens
MSDNEDNFDGDDFDDVEEDEGLDDLENAEEEGQENVEILPSGERPQANQKRITTPYMTKYERARVLGTRALQIAMCAPVMVELEGETDPLLIAMKELKARKIPIIIRRYLPDGSYEDWGVDELIITD

SEQ ID NO: 14844 - protein, 119 aa, Homo sapiens
  VARIANT (1)...(119): Xaa = Any Amino Acid
MSDNEDNFDGDDFDDVEEDEGLDDLENAEEEGQENVEILPSGERPQANQKRITTPYMTKYERARVLGTRALQIAMCAPVMVELEGETDPLLIAMKELNPKRLLLRLLFACVLHTICSFX

SEQ ID NO: 14845 - protein, 225 aa, Homo sapiens
MRSVLIPRLSTGQDKKRNGSVDKHVSSKPLTGISDLQDVFRAMHPELDIVQLYLKPLLIGELAPGEPSQERHKNAQSSFLQHDAGHLSIFRKSKWNHVVHKFVMCHLKGLSADRWNYWHFEQHVKPNIYPKDPDIDTDPLFLLGDSQPVKFYYLSIQYGKKKIKYINYEEQHLYFYKVTSEPLELQVLQGAGIDLLCPSYILTDEEELKRETLISNQCQLPKENV

SEQ ID NO: 14846 - protein, 301 aa, Homo sapiens
MGAQLSTLGHMVLFPVWFLYSLLMKLFQRSTPAITLESPDIKYPLRLIDREIISHDTRRFRFALPSPQHILGLPVGQHIYLSARIDGNLVVRPYTPISSDDDKGFVDLVIKVYFKDTHPKFPAGGKMSQYLESMQIGDTIEFRGPSGLLVYQGKGKFAIRPDKKSNPIIRTVKSVGMIAGGTGITPMLQVIRAIMKDPDDHTVCHLLFANQTEKDILLRPELEELRNKHSARFKLWYTLDRAPEAWDYGQGFVNEEMIRDHLPPPEEEPLVLMCGPPPMIQYACLPNLDHVGHPTERCFVF

SEQ ID NO: 14847 - protein, 291 aa, Homo sapiens
MVLFPVWFLYSLLMKLFQRSTPAITLESPDIKYPLRLIDREIISHDTRRFRFALPSPQHILGLPVGQHIYLSARIDGNLVVRPYTPISSDDDKGFVDLVIKVYFKDTHPKFPAGGKMSQYLESMQIGDTIEFRGPSGLLVYQGKGKFAIRPDKKSNPIIRTVKSVGMIAGGTGITPMLQVIRAIMKDPDDHTVCHLLFANQTEKDILLRPELEELRNKHSARFKLWYTLDRAPEAWDYGQGFVNEEMIRDHLPPPEEEPLVLMCGPPPMIQYACLPNLDHVGHPTERCFVF

SEQ ID NO: 14848 - protein, 291 aa, Homo sapiens; identical to SEQ ID NO: 14847

SEQ ID NO: 14849 - protein, 305 aa, Homo sapiens
MVLFPVWFLYSLLMKLFQRSTPAITLESPDIKYPLRLIDREIISHDTRRFRFALPSPQHILGLPVGQHIYLSARIDGNLVVRPYTPISSDDDKGFVDLVIKVYFKDTHPKFPAGGKMSQYLESMQIGDTIEFRGPSGLLVYQGKGKFAIRPDKKSNPIIRTVKSVGMIAGGTGLAQHVRGPAGYFAGITPMLQVIRAIMKDPDDHTVCHLLFANQTEKDILLRPELEELRNKHSARFKLWYTLDRAPEAWDYGQGFVNEEMIRDHLPPPEEEPLVLMCGPPPMIQYACLPNLDHVGHPTERCFVF

SEQ ID NO: 14850 - protein, 315 aa, Homo sapiens
MGAQLSTLGHMVLFPVWFLYSLLMKLFQRSTPAITLESPDIKYPLRLIDREIISHDTRRFRFALPSPQHILGLPVGQHIYLSARIDGNLVVRPYTPISSDDDKGFVDLVIKVYFKDTHPKFPAGGKMSQYLESMQIGDTIEFRGPSGLLVYQGKGKFAIRPDKKSNPIIRTVKSVGMIAGGTGLAQHVRGPAGYFAGITPMLQVIRAIMKDPDDHTVCHLLFANQTEKDILLRPELEELRNKHSARFKLWYTLDRAPEAWDYGQGFVNEEMIRDHLPPPEEEPLVLMCGPPPMIQYACLPNLDHVGHPTERCFVF

SEQ ID NO: 14851 - protein, 291 aa, Homo sapiens; identical to SEQ ID NO: 14847

SEQ ID NO: 14852 - protein, 180 aa, Homo sapiens
MSVRVARVAWVRGLGASYRRGASSFPVPPPGAQGVAELLRDATGAEEEAPWAATERRMPGQCSVLLFPGQGSQVVGMGRGLLNYPRVRELYAAARRVLGYDLLELSLHGPQETLDRTVHCQPAIFVASLAAVEKLHHLQPSVIENCVAAAGFSVGEFAALVFAGAMEFAEGSTVSPEEFL

SEQ ID NO: 14853 - protein, 390 aa, Homo sapiens
MSVRVARVAWVRGLGASYRRGASSFPVPPPGAQGVAELLRDATGAEEEAPWAATERRMPGQCSVLLFPGQGSQVVGMGRGLLNYPRVRELYAAARRVLGYDLLELSLHGPQETLDRTVHCQPAIFVASLAAVEKLHHLQPSVIENCVAAAGFSVGEFAALVFAGAMEFAEGLYAVKIRAEAMQEASEAVPSGMLSVLGQPQSKFNFACLEAREHCKSLGIENPVCEVSNYLFPDCRVISGHQEALRFLQKNSSKFHFRRTRMLPVSGAFHTRLMEPAVEPLTQALKAVDIKKPLVSVYSNVHAHRYRHPGHIHKLLAQQLVSPVKWEQTMHAIYERKKGRGFPQTFEVGPGRQLGAILKSCNMQAWKSYSAVDVLQTLEHVDLDPQEPPR

SEQ ID NO: 14854 - protein, 679 aa, Homo sapiens
MPRGPQPSAARCTVDDESGLGAPGRGRAGRQSWVRARASGARRDSEMQAARMAASLGRQLLRLGGGSSRLTALLGQPRPGPARRPYAGGAAQESKSFAVGMFKGQLTTDQVFPYPSVLNEEQTQFLKELVEPVSRFFEEVNDPAKNDALEMVEETTWQGLKELGAFGLQVPSELGGVGLCNTQYARLVEIVGMHDLGVGITLGAHQSIGFKGILLFGTKAQKEKYLPKLASGETVAAFCLTEPSSGSDAASIRTSAVPSPCGKYYTLNGSKLWISNGGLADIFTVFAKTPVTDPATGAVKEKITAFVVERGFGGITHGPPEKKMGIKASNTAEVFFDGVRVPSENVLGEVGSGFKVAMHILNNGRFGMAAALAGTMRGIIAKAVDHATNRTQFGEKIHNFGLIQEKLARMVMLQYVTESMAYMVSANMDQGATDFQIEAAISKIFGSEAAWKVTDECIQIMGGMGFMKEPGVERVLRDLRIFRIFEGTNDILRLFVALQGCMDKGKELSGLGSALKNPFGNAGLLLGEAGKQLRRRAGLGSGLSLSGLVHPELSRSGELAVRALEQFATVVEAKLIKHKKGIVNEQFLLQRLADGAIDLYAMVVVLSRASRSLSEGHPTAQHEKMLCDTWCIEAAARIREGMAALQSDPWQQELYRNFKSISKALVERGGVVTSNPLGF

SEQ ID NO: 14855 - protein, 701 aa, Homo sapiens
MPRGPQPSAARCTVDDESGLGAPGRGRAGRQSWVRARASGARRDSEMQAARMAASLGRQLLRLGGGSSRLTALLGQPRPGPARRPYAGGAAQLALDKSDSHPSDALTRKKPAKAESKSFAVGMFKGQLTTDQVFPYPSVLNEEQTQFLKELVEPVSRFFEEVNDPAKNDALEMVEETTWQGLKELGAFGLQVPSELGGVGLCNTQYARLVEIVGMHDLGVGITLGAHQSIGFKGILLFGTKAQKEKYLPKLASGETVAAFCLTEPSSGSDAASIRTSAVPSPCGKYYTLNGSKLWISNGGLADIFTVFAKTPVTDPATGAVKEKITAFVVERGFGGITHGPPEKKMGIKASNTAEVFFDGVRVPSENVLGEVGSGFKVAMHILNNGRFGMAAALAGTMRGIIAKAVDHATNRTQFGEKIHNFGLIQEKLARMVMLQYVTESMAYMVSANMDQGATDFQIEAAISKIFGSEAAWKVTDECIQIMGGMGFMKEPGVERVLRDLRIFRIFEGTNDILRLFVALQGCMDKGKELSGLGSALKNPFGNAGLLLGEAGKQLRRRAGLGSGLSLSGLVHPELSRSGELAVRALEQFATVVEAKLIKHKKGIVNEQFLLQRLADGAIDLYAMVVVLSRASRSLSEGHPTAQHEKMLCDTWCIEAAARIREGMAALQSDPWQQELYRNFKSISKALVERGGVVTSNPLGF

SEQ ID NO: 14856 - protein, 1970 aa, Homo sapiens
MHGGGPPSGDSACPLRTIKRVQFGVLSPDELKRMSVTEGGIKYPETTEGGRPKLGGLMDPRQGVIERTGRCQTCAGNMTECPGHFGHIELAKPVFHVGFLVKTMKVLRCVCFFCSKLLVDSNNPKIKDILAKSKGQPKKRLTHVYDLCKGKNICEGGEEMDNKFGVEQPEGDEDLTKEKGHGGCGRYQPRIRRSGLELYAEWKHVNEDSQEKKILLSPERVHEIFKRISDEECFVLGMEPRYARPEWMIVTVLPVPPLSVRPAVVMQGSARNQDDLTHKLADIVKINNQLRRNEQNGAAAHVIAEDVKLLQFHVATMVDNELPGLPRAMQKSGRPLKSLKQRLKGKEGRVRGNLMGKRVDFSARTVITPDPNLSIDQVGVPRSIAANMTFAEIVTPFNIDRLQELVRRGNSQYPGAKYIIRDNGDRIDLRFHPKPSDLHLQTGYKVERHMCDGDIVIFNRQPTLHKMSMMGHRVRILPWSTFRLNLSVTTPYNADFDGDEMNLHLPQSLETRAEIQELAMVPRMIVTPQSNRPVMGIVQDTLTAVRKFTKRDVFLERGEVMNLLMFLSTWDGKVPQPAILKPRPLWTGKQIFSLIIPGHINCIRTHSTHPDDEDSGPYKHISPGDTKVVVENGELIMGILCKKSLGTSAGSLVHISYLEMGHDITRLFYSNIQTVINNWLLIEGHTIGIGDSIADSKTYQDIQNTIKKAKQDVIEVIEKAHNNELEPTPGNTLRQTFENQVNRILNDARDKTGSSAQKSLSEYNNFKSMVVSGAKGSKINISQVIAVVGQQNVEGKRIPFGFKHRTLPHFIKDDYGPESRGFVENSYLAGLTPTEFFFHAMGGREGLIDTAVKTAETGYIQRRLIKSMESVMVKYDATVRNSINQVVQLRYGEDGLAGESVEFQNLATLKPSNKAFEKKFRFDYTNERALRRTLQEDLVKDVLSNAHIQNELEREFERMREDREVLRVIFPTGDSKVVLPCNLLRMIWNAQKIFHINPRLPSDLHPIKVVEGVKELSKKLVIVNGDDPLSRQAQENATLLFNIHLRSTLCSRRMAEEFRLSGEAFDWLLGEIESKFNQAIAHPGEMVGALAAQSLGEPATQMTLNTFHYAGVSAKNVTLGVPRLKELINISKKPKTPSLTVFLLGQSARDAERAKDILCRLEHTTLRKVTANTAIYYDPNPQSTVVAEDQEWVNVYYEMPDFDVARISPWLLRVELDRKHMTDRKLTMEQIAEKINAGFGDDLNCIFNDDNAEKLVLRIRIMNSDENKMQEEEEVVDKMDDDVFLRCIESNMLTDMTLQGIEQISKVYMHLPQTDNKKKIIITEDGEFKALQEWILETDGVSLMRVLSEKDVDPVRTTSNDIVEIFTVLGIEAVRKALERELYHVISFDGSYVNYRHLALLCDTMTCRGHLMAITRHGVNRQDTGPLMKCSFEETVDVLMEAAAHGESDPMKGVSENIMLGQLAPAGTGCFDLLLDAEKCKYGMEIPTNIPGLGAAGPTGMFFGSAPSPMGGISPAMTPWNQGATPAYGAWSPSVGSGMTPGAAGFSPSAASDASGFSPGYSPAWSPTPGSPGSPGPSSPYIPSPGGAMSPSYSPTSPAYEPRSPGGYTPQSPSYSPTSPSYSPTSPSYSPTSPNYSPTSPSYSPTSPSYSPTSPSYSPTSPSYSPTSPSYSPTSPSYSPTSPSYSPTSPSYSPTSPSYSPTSPSYSPTSPSYSPTSPSYSPTSPSYSPTSPSYSPTSPSYSPTSPNYSPTSPNYTPTSPSYSPTSPSYSPTSPNYTPTSPNYSPTSPSYSPTSPSYSPTSPSYSPSSPRYTPQSPTYTPSSPSYSPSSPSYSPTSPKYTPTSPSYSPSSPEYTPTSPKYSPTSPKYSPTSPKYSPTSPTYSPTTPKYSPTSPTYSPTSPVYTPTSPKYSPTSPTYSPTSPKYSPTSPTYSPTSPKGSTYSPTSPGYSPTSPTYSLTSPAISPDDSDEEN

SEQ ID NO: 14857 - protein, 449 aa, Homo sapiens
MEIPTNIPGLGAAGRSGMTPGAAGFSPSAASDASGFSPGYSPAWSPTPGSPGSPGPSSPYIPSPGGAMSPSYSPTSPAYEPRSPGGYTPQSPSYSPTSPSYSPTSPSYSPTSPNYSPTSPSYSPTSPSYSPTSPSYSPTSPSYSPTSPSYSPTSPSYSPTSPSYSPTSPSYSPTSPSYSPTSPSYSPTSPSYSPTSPSYSPTSPSYSPTSPSYSPTSPSYSPTSPNYSPTSPNYTPTSPSYSPTSPSYSPTSPNYTPTSPNYSPTSPSYSPTSPSYSPTSPSYSPSSPRYTPQSPTYTPSSPSYSPSSPSYSPTSPKYTPTSPSYSPSSPEYTPTSPKYSPTSPKYSPTSPKYSPTSPTYSPTTPKYSPTSPTYSPTSPVYTPTSPKYSPTSPTYSPTSPKYSPTSPTYSPTSPKGSTYSPTSPGYSPTSPTYSLTSPAISPDDSDEEN

SEQ ID NO: 14858 - protein, 1511 aa, Homo sapiens [sequence omitted]

SEQ ID NO: 14859 - protein, 1549 aa, Homo sapiens
MVIALTCVSTPSPVTFTCRPAIRHVERHMCDGDIVIFNRQPTLHKMSMMGHRVRILPWSTFRLNLSVTTPYNADFDGDEMNLHLPQSLETRAEIQELAMVPRMIVTPQSNRPVMGIVQDTLTAVRKFTKRDVFLERGEVMNLLMFLSTWDGKVPQPAILKPRPLWTGKQIFSLIIPGHINCIRTHSTHPDDEDSGPYKHISPGDTKVVVENGELIMGILCKKSLGTSAGSLVHISYLEMGHDITRLFYSNIQTVINNWLLIEGHTIGIGDSIADSKTYQDIQNTIKKAKQDVIEVIEKAHNNELEPTPGNTLRQTFENQVNRILNDARDKTGSSAQKSLSEYNNFKSMVVSGAKGSKINISQVIAVVGQQNVEGKRIPFGFKHRTLPHFIKDDYGPESRGFVENSYLAGLTPTEFFFHAMGGREGLIDTAVKTAETGYIQRRLIKSMESVMVKYDATVRNSINQVVQLRYGEDGLAGESVEFQNLATLKPSNKAFEKKFRFDYTNERALRRTLQEDLVKDVLSNAHIQNELEREFERMREDREVLRVIFPTGDSKVVLPCNLLRMIWNAQKIFHINPRLPSDLHPIKVVEGVKELSKKLVIVNGDDPLSRQAQENATLLFNIHLRSTLCSRRMAEEFRLSGEAFDWLLGEIESKFNQAIAHPGEMVGALAAQSLGEPATQMTLNTFHYAGVSAKNVTLGVPRLKELINISKKPKTPSLTVFLLGQSARDAERAKDILCRLEHTTLRKVTANTAIYYDPNPQSTVVAEDQEWVNVYYEMPDFDVARISPWLLRVELDRKHMTDRKLTMEQIAEKINAGFGDDLNCIFNDDNAEKLVLRIRIMNSDENKMQEEEEVVDKMDDDVFLRCIESNMLTDMTLQGIEQISKVYMHLPQTDNKKKIIITEDGEFKALQEWILETDGVSLMRVLSEKDVDPVRTTSNDIVEIFTVLGIEAVRKALERELYHVISFDGSYVNYRHLALLCDTMTCRGHLMAITRHGVNRQDTGPLMKCSFEETVDVLMEAAAHGESDPMKGVSENIMLGQLAPAGTGCFDLLLDAEKCKYGMEIPTNIPGLGAAGPTGMFFGSAPSPMGGISPAMTPWNQGATPAYGAWSPSVGSGMTPGAAGFSPSAASDASGFSPGYSPAWSPTPGSPGSPGPSSPYIPSPGGAMSPSYSPTSPAYEPRSPGGYTPQSPSYSPTSPSYSPTSPSYSPTSPNYSPTSPSYSPTSPSYSPTSPSYSPTSPSYSPTSPSYSPTSPSYSPTSPSYSPTSPSYSPTSPSYSPTSPSYSPTSPSYSPTSPSYSPTSPSYSPTSPSYSPTSPSYSPTSPNYSPTSPNYTPTSPSYSPTSPSYSPTSPNYTPTSPNYSPTSPSYSPTSPSYSPTSPSYSPSSPRYTPQSPTYTPSSPSYSPSSPSYSPTSPKYTPTSPSYSPSSPEYTPTSPKYSPTSPKYSPTSPKYSPTSPTYSPTTPKYSPTSPTYSPTSPVYTPTSPKYSPTSPTYSPTSPKYSPTSPTYSPTSPKGSTYSPTSPGYSPTSPTYSLTSPAISPDDSDEEN

SEQ ID NO: 14860 - protein, 170 aa, Homo sapiens
MASVRIREAKEGDCGDILRLIRELAEFEKLSDQVKISEEALRADGFGDNPFYHCLVAEILPAPGKLLGPCVVGYGIYYFIYSTWKGRTIYLEDIYVMPEYRGQGIGSKIIKKVAEVALDKGCSQFRLAVLDWNQRAMDLYKALGAQDLTEAEGWHFFCFQGEATRKLAGK

SEQ ID NO: 14861 - protein, 180 aa, Homo sapiens
MPRRGLVAGPDLEYFQRRYFTPAEVAQHNRPEDLWVSYLGRVYDLTSLAQEYKGNLLLKPIVEVAGQDISHWFDPKTRDIRKHIDPLTGCLRYCTPRGRFVHVPPQLPCSDWANDFGKPWWQGSYYEVGRLSAKTRSIRIINTLTSQEHTLEVGVLESIWEILHRYLHSSPGASLCPSEV

SEQ ID NO: 14862 - protein, 1927 aa, Homo sapiens
  VARIANT (1)...(1927): Xaa = Any Amino Acid
MKAADTVILWARSKNDQLRISFPPGLCWGDRMPDKDDIRLLPSALGVKKRKRGPKKQKENKPGKPRKRKKRDSEEEFGSERDEYREKSESGGSEYGTGPGRKRRRKHREKKEKKTKRRKKGEGDGGQKQVEQKSSATLLLTWGLEDVEHVFSEEDYHTLTNYKAFSQFMRPLIAKKNPKIPMSKMMTILGAKWREFSANNPFKGSAAAVAAAAAAAAAAVAEQVSAAVSSATPIAPSGPPALPPPPAADIQPPPIRRAKTKEGKGPGHKRRSKSPRVPDGRKKLRGKKMAPLKIKLGLLGGKRKKGGSYVFQSDEGPEPEAEESDLDSGSVHSASGRPDGPVRTKKLKRGRPGRKKKKVLGCPAVAGEEEVDGYETDHQDYCEVCQQGGEIILCDTCPRAYHLVCLDPELDRAPEGKWSCPHCEKEGVQWEAKEEEEEYEEEGEEEGEKEEEDDHMEYCRVCKDGGELLCCDACISSYHIHCLNPPLPDIPNGEWLCPRCTCPVLKGRVQKILHWRWGEPPVAVPAPQQADGNPDVPPPRPLQGRSEREFFVKWVGLSYWHCSWAKELQLEIFHLVMYRNYQRKNDMDEPPPLDYGSGEDDGKSDKRKVKDPHYAEMEEKYYRFGIKPEWMTVHRIINHSVDKKGNYHYLVKWRDLPYDQSTWEEDEMNIPEYEEHKQSYWRHRELIMGEDPAQPRKYKKKKKELQGDGPPSSPTNDPTVKYETQPRFITATGGTLHMYQLEGLNWLRFSWAQGTDTILADEMGLGKTIQTIVFLYSLYKEGHTKGPFLVSAPLSTIINWEREFQMWAPKFYVVTYTGDKDSRAIIRENEFSFEDNAIKGGKKAFKMKREAQVKFHVLLTSYELITIDQAALGSIRWACLVVDEAHRLKNNQSKFFRVLNGYKIDHKLLLTGTPLQNNLEELFHLLNFLTPERFNNLEGFLEEFADISKEDQIKKLHDLLGPHMLRRLKADVFKNMPAKTELIVRVELSPMQKKYYKYILTRNFEALNSRGGGNQVSLLNIMMDLKKCCNHPYLFPVAAMESPKLPSGAYEGGALIKSSGKLMLLQKMLRKLKEQGHRVLIFSQMTKMLDLLEDFLDYEGYKYERIDGGITGALRQEAIDRFNAPGAQQFCFLLSTRAGGLGINLATADTVIIFDSDWNPHNDIQAFSRAHRIGQANKVMIYRFVTRASVEERITQVAKRKMMLTHLVVRPGLGSKAGSMSKQELDDILKFGTEELFKDENEGENKEEDSSVIHYDNEAIARLLDRNQDATEDTDVQNMNEYLSSFKVAQYVVREEDKIEEIEREIIKQEENVDPDYWEKLLRHHYEQQQEDLARNLGKGKRVRKQVNYNDAAQEDQDNQSEYSVGSEEEDEDFDERPEGRRQSKRQLRNEKDKPLPPLLARVGGNIEVLGFNTRQRKAFLNAVMRWGMPPQDAFTTQWLVRDLRGKTEKEFKAYVSLFMRHLCEPGADGSETFADGVPREGLSRQQVLTRIGVMSLVKKKVQEFEHINGRWSMPELMPDPSADSKRSSRASSPTKTSPTTPEASATNSPCTSKPATPAPSEKGEGIRTPLEKEEAENQEEKPEKNSRIGEKMETEADAPSPAPSLGERLEPRKIPLEDEVPGVPGEMEPEPGYRGDREKSEDVKGDRELRPGPRDEPRSNGRREEKTEKPRFMFNIADGGFTELHTLWQNEERAAISSGKLNEIWHRRHDYWLLAGIVLHGYARWQDIQNDAQFAIINEPFKTEANKGNFLEMKNKFLARRFKLLEQALVIEEQLRRAAYLNLSQEPAHPAMALHARFAEAECLAESHQHLSKESLAGNKPANAVLHKVLNQLEELLSDMKADVTRLPATLSRIPPIAARLQMSERSILSRLASKGTEPHPTPAYPPGPYATPPGYGAAFSAAPVGALAAAGANYSQMPAGSFITX

SEQ ID NO: 14863 - protein, 1966 aa, Homo sapiens
MKAADTVILWARSKNDQLRISFPPGLCWGDRMPDKDDIRLLPSALGVKKRKRGPKKQKENKPGKPRKRKKRDSEEEFGSERDEYREKSESGGSEYGTGPGRKRRRKHREKKEKKTKRRKKGEGDGGQKQVEQKSSATLLLTWGLEDVEHVFSEEDYHTLTNYKAFSQFMRPLIAKKNPKIPMSKMMTILGAKWREFSANNPFKGSAAAVAAAAAAAAAAVAEQVSAAVSSATPIAPSGPPALPPPPAADIQPPPIRRAKTKEGKGPGHKRRSKSPRVPDGRKKLRGKKMAPLKIKLGLLGGKRKKGGSYVFQSDEGPEPEAEESDLDSGSVHSASGRPDGPVRTKKLKRGRPGRKKKKVLGCPAVAGEEEVDGYETDHQDYCEVCQQGGEIILCDTCPRAYHLVCLDPELDRAPEGKWSCPHCEKEGVQWEAKEEEEEYEEEGEEEGEKEEEDDHMEYCRVCKDGGELLCCDACISSYHIHCLNPPLPDIPNGEWLCPRCTCPVLKGRVQKILHWRWGEPPVAVPAPQQADGNPDVPPPRPLQGRSEREFFVKWVGLSYWHCSWAKELQLEIFHLVMYRNYQRKNDMDEPPPLDYGSGEDDGKSDKRKVKDPHYAEMEEKYYRFGIKPEWMTVHRIINHSVDKKGNYHYLVKWRDLPYDQSTWEEDEMNIPEYEEHKQSYWRHRELIMGEDPAQPRKYKKKKKELQGDGPPSSPTNDPTVKYETQPRFITATGGTLHMYQLEGLNWLRFSWAQGTDTILADEMGLGKTIQTIVFLYSLYKEGHTKGPFLVSAPLSTIINWEREFQMWAPKFYVVTYTGDKDSRAIIRENEFSFEDNAIKGGKKAFKMKREAQVKFHVLLTSYELITIDQAALGSIRWACLVVDEAHRLKNNQSKFFRVLNGYKIDHKLLLTGTPLQNNLEELFHLLNFLTPERFNNLEGFLEEFADISKEDQIKKLHDLLGPHMLRRLKADVFKNMPAKTELIVRVELSPMQKKYYKYILTRNFEALNSRGGGNQVSLLNIMMDLKKCCNHPYLFPVAAMESPKLPSGAYEGGALIKSSGKLMLLQKMLRKLKEQGHRVLIFSQMTKMLDLLEDFLDYEGYKYERIDGGITGALRQEAIDRFNAPGAQQFCFLLSTRAGGLGINLATADTVIIFDSDWNPHNDIQAFSRAHRIGQANKVMIYRFVTRASVEERITQVAKRKMMLTHLVVRPGLGSKAGSMSKQELDDILKFGTEELFKDENEGENKEEDSSVIHYDNEAIARLLDRNQDATEDTDVQNMNEYLSSFKVAQYVVREEDKIEEIEREIIKQEENVDPDYWEKLLRHHYEQQQEDLARNLGKGKRVRKQVNYNDAAQEDQDNQSEYSVGSEEEDEDFDERPEGRRQSKRQLRNEKDKPLPPLLARVGGNIEVLGFNTRQRKAFLNAVMRWGMPPQDAFTTQWLVRDLRGKTEKEFKAYVSLFMRHLCEPGADGSETFADGVPREGLSRQQVLTRIGVMSLVKKKVQEFEHINGRWSMPELMPDPSADSKRSSRASSPTKTSPTTPEASATNSPCTSKPATPAPSEKGEGIRTPLEKEEAENQEEKPEKNSRIGEKMETEADAPSPAPSLGERLEPRKIPLEDEVPGVPGEMEPEPGYRGDREKSEDVKGDRELRPGPRDEPRSNGRREEKTEKPRFMFNIADGGFTELHTLWQNEERAAISSGKLNEIWHRRHDYWLLAGIVLHGYARWQDIQNDAQFAIINEPFKTEANKGNFLEMKNKFLARRFKLLEQALVIEEQLRRAAYLNLSQEPAHPAMALHARFAEAECLAESHQHLSKESLAGNKPANAVLHKVLNQLEELLSDMKADVTRLPATLSRIPPIAARLQMSERSILSRLASKGTEPHPTPAYPPGPYATPPGYGAAFSAAPVGALAAAGANYSQMPAGSFITAATNGPPVLVKKEKEMVGALVSDGLDRKEPRAGEVICIDD

SEQ ID NO: 14864 - protein, 1966 aa, Homo sapiens; identical to SEQ ID NO: 14863

SEQ ID NO: 14865 - protein, 2000 aa, Homo sapiens
MKAADTVILWARSKNDQLRISFPPGLCWGDRMPDKDDIRLLPSALGVKKRKRGPKKQKENKPGKPRKRKKRDSEEEFGSERDEYREKSESGGSEYGTGPGRKRRRKHREKKEKKTKRRKKGEGDGGQKQVEQKSSATLLLTWGLEDVEHVFSEEDYHTLTNYKAFSQFMRPLIAKKNPKIPMSKMMTILGAKWREFSANNPFKGSAAAVAAAAAAAAAAVAEQVSAAVSSATPIAPSGPPALPPPPAADIQPPPIRRAKTKEGKGPGHKRRSKSPRVPDGRKKLRGKKMAPLKIKLGLLGGKRKKGGSYVFQSDEGPEPEAEESDLDSGSVHSASGRPDGPVRTKKLKRGRPGRKKKKVLGCPAVAGEEEVDGYETDHQDYCEVCQQGGEIILCDTCPRAYHLVCLDPELDRAPEGKWSCPHCEKEGVQWEAKEEEEEYEEEGEEEGEKEEEDDHMEYCRVCKDGGELLCCDACISSYHIHCLNPPLPDIPNGEWLCPRCTCPVLKGRVQKILHWRWGEPPVAVPAPQQADGNPDVPPPRPLQGRSEREFFVKWVGLSYWHCSWAKELQLEIFHLVMYRNYQRKNDMDEPPPLDYGSGEDDGKSDKRKVKDPHYAEMEEKYYRFGIKPEWMTVHRIINHSVDKKGNYHYLVKWRDLPYDQSTWEEDEMNIPEYEEHKQSYWRHRELIMGEDPAQPRKYKKKKKELQGDGPPSSPTNDPTVKYETQPRFITATGGTLHMYQLEGLNWLRFSWAQGTDTILADEMGLGKTIQTIVFLYSLYKEGHTKGPFLVSAPLSTIINWEREFQMWAPKFYVVTYTGDKDSRAIIRENEFSFEDNAIKGGKKAFKMKREAQVKFHVLLTSYELITIDQAALGSIRWACLVVDEAHRLKNNQSKFFRVLNGYKIDHKLLLTGTPLQNNLEELFHLLNFLTPERFNNLEGFLEEFADISKEDQIKKLHDLLGPHMLRRLKADVFKNMPAKTELIVRVELSPMQKKYYKYILTRNFEALNSRGGGNQVSLLNIMMDLKKCCNHPYLFPVAAMESPKLPSGAYEGGALIKSSGKLMLLQKMLRKLKEQGHRVLIFSQMTKMLDLLEDFLDYEGYKYERIDGGITGALRQEAIDRFNAPGAQQFCFLLSTRAGGLGINLATADTVIIFDSDWNPHNDIQAFSRAHRIGQANKVMIYRFVTRASVEERITQVAKRKMMLTHLVVRPGLGSKAGSMSKQELDDILKFGTEELFKDENEGENKEEDSSVIHYDNEAIARLLDRNQDATEDTDVQNMNEYLSSFKVAQYVVREEDKIEEIEREIIKQEENVDPDYWEKLLRHHYEQQQEDLARNLGKGKRVRKQVNYNDAAQEDQDNQSEYSVGSEEEDEDFDERPEGRRQSKRQLRNEKDKPLPPLLARVGGNIEVLGFNTRQRKAFLNAVMRWGMPPQDAFTTQWLVRDLRGKTEKEFKAYVSLFMRHLCEPGADGSETFADGVPREGLSRQQVLTRIGVMSLVKKKVQEFEHINGRWSMPELMPDPSADSKRSSRASSPTKTSPTTPEASATNSPCTSKPATPAPSEKGEGIRTPLEKEEAENQEEKPEKNSRIGEKMETEADAPSPAPSLGERLEPRKIPLEDEVPGVPGEMEPEPGYRGDREKSATESTPGERGEEKPLDGQEHRERPEGETGDLGKREDVKGDRELRPGPRDEPRSNGRREEKTEKPRFMFNIADGGFTELHTLWQNEERAAISSGKLNEIWHRRHDYWLLAGIVLHGYARWQDIQNDAQFAIINEPFKTEANKGNFLEMKNKFLARRFKLLEQALVIEEQLRRAAYLNLSQEPAHPAMALHARFAEAECLAESHQHLSKESLAGNKPANAVLHKVLNQLEELLSDMKADVTRLPATLSRIPPIAARLQMSERSILSRLASKGTEPHPTPAYPPGPYATPPGYGAAFSAAPVGALAAAGANYSQMPAGSFITAATNGPPVLVKKEKEMVGALVSDGLDRKEPRAGEVICIDD

SEQ ID NO: 14866 - protein, 125 aa, Homo sapiens
MAGAGPTMLLREENGCCSRRQSSSSAGDSDGEREDSAAERARQQLEALLNKTMRIRMTDGRTLVGCFLCTDRDCNVILGSAQEFLKPSDSFSAGEPRVLGLAMVPGHHIVSIEVQRESLTGPPYL

SEQ ID NO: 14867 - protein, 130 aa, Homo sapiens
  VARIANT (1)...(130): Xaa = Any Amino Acid
MALRVVRSVRALLCTLRAVPSPAAPCPPRPWQLGVGAVRTLRTGPALLSVRKFTEKHEWVTTENGIGTVGISNFAQEALGDVVYCSLPEVGTKLNKQDEFGALESVKAASELYSPLSGEVTEINEALAEX

SEQ ID NO: 14868 - protein, 1610 aa, Homo sapiens
MNTPKEEFQDWPIVRIAAHLPDLIVYGHFSPERPFMDYFDGVLMFVDISGFTAMTEKFSSAMYMDRGAEQLVEILNYHISAIVEKVLIFGGDILKFAGDALLALWRVERKQLKNIITVVIKCSLEIHGLFETQEWEEGLDIRVKIGLAAGHISMLVFGDETHSHFLVIGQAVDDVRLAQNMAQMNDVILSPNCWQLCDRSMIEIESVPDQRAVKVNFLKPPPNFNFDEFFTKCTTFMHYYPSGEHKNLLRLACTLKPDPELEMSLQKYVMESILKQIDNKQLQGYLSELRPVTIVFVNLMFEDQDKAEEIGPAIQDAYMHITSVLKIFQGQINKVFMFDKGCSFLCVFGFPGEKVPDELTHALECAMDIFDFCSQVHKIQTVSIGVASGIVFCGIVGHTVRHEYTVIGQKVNLAARMMMYYPGIVTCDSVTYNGSNLPAYFFKELPKKVMKGVADSGPLYQYWGRTEKVMFGMACLICNRKEDYPLLGRNKEINYFMYTMKKFLISNSSQVLMYEGLPGYGKSQILMKIEYLAQGKNHRIIAISLNKISFHQTFYTIQMFMANVLGLDTCKHYKERQTNLRNKVMTLLDEKFYCLLNDIFHVQFPISREISRMSTLKKQKQLEILFMKILKLIVKEERIIFIIDEAQFVDSTSWRFMEKLIRTLPIFIIMSLCPFVNIPCAAARAVIKNRNTTYIVIGAVQPNDISNKICLDLNVSCISKELDSYLGEGSCGIPFYCEELLKNLEHHEVLVFQQTESEEKTNRTWNNLFKYSIKLTEKLNMVTLHSDKESEEVCHLTSGVRLKNLSPPTSLKEISLIQLDSMRLSHQMLVRCAAIIGLTFTTELLFEILPCWNMKMMIKTLATLVESNIFYCFRNGKELQKALKQNDPSFEVHYRSLSLKPSEGMDHGEEEQLRELENEVIECHRIRFCNPMMQKTAYELWLKDQRKAMHLKCARFLEEDAHRCDHCRGRDFIPYHHFTVNIRLNALDMDAIKKMAMSHGFKTEEKLILSNSEIPETSAFFPENRSPEEIREKILNFFDHVLTKMKTSDEDIIPLESCQCEEILEIVILPLAHHFLALGENDKALYYFLEIASAYLIFCDNYMAYMYLNEGQKLLKTLKKDKSWSQTFESATFYSLKGEVCFNMGQIVLAKKMLRKALKLLNRIFPYNLISLFLHIHVEKNRHFHYVNRQAQESPPPGKKRLAQLYRQTVCLSLLWRIYSYSYLFHCKYYAHLAVMMQMNTALETQNCFQIIKAYLDYSLYHHLAGYKGVWFKYEVMAMEHIFNLPLKGEGIEIVAYVAETLVFNKLIMGHLDLAIELGSRALQMWALLQNPNRHYQSLCRLSRCLLLNSRYPQLIQVLGRLWELSVTQEHIFSKAFFYFVCLDILLYSGFVYRTFEECLEFIHQYENNRILKFHSGLLLGLYSSVAIWYARLQEWDNFYKFSNRAKNLLPRRTMTLTYYDGISRYMEGQVLHLQKQIKEQSENAQASGEELLKNLENLVAQNTTGPVFCPRLYHLMAYVCILMGDGQKCGLFLNTALRLSETQGNILEKCWLNMNKESWYSTSELKEDQWLQTILSLPSWEKIVAGRVNIQDLQKNKFLMRANTVDNHF

SEQ ID NO: 14869 - protein, 1478 aa, Homo sapiens [sequence omitted]

SEQ ID NO: 14870 - protein, 1617 aa, Homo sapiens [sequence omitted]

SEQ ID NO: 14871 - protein, 458 aa, Homo sapiens [sequence omitted]

SEQ ID NO: 14872 - protein, 536 aa, Homo sapiens [sequence omitted]

SEQ ID NO: 14873 - protein, 531 aa, Homo sapiens [sequence omitted]

SEQ ID NO: 14874 - protein, 424 aa, Homo sapiens
MQRLQVVLGHLRGPADSGWMPQAAPCLSGAPQASAADVVVVHGRRTAICRAGRGGFKDTTPDELLSAVMTAVLKDVNLRPEQLGDICVGNVLQPGAGAIMARIAQFLSDIPETVPLSTVNRQCSSGLQAVASIAGGIRNGSYDIGMACGVESMSLADRGNPGNITSRLMEKEKARDCLIPMGITSENVAERFGISREKQDTFALASQQKAARAQSKGCFQAEIVPVTTTVHDDKGTKRSITVTQDEGIRPSTTMEGLAKLKPAFKKDGSTTAGNSSQVSDGAAAILLARRSKAEELGLPILGVLRSYAVVGVPPDIMGIGPAYAIPVALQKAGLTVSDVDIFEINEAFASQAAYCVEKLRLPPEKVNPLGGAVALGHPLGCTGARQVITLLNELKRRGKRAYGVVSMCIGTGMGAAAVFEYPGN

SEQ ID NO: 14875 - protein, 331 aa, Homo sapiens
MQRLQVVLGHLRGPADSGWMPQAAPCLSGAPQASAADVVVVHGRRTAICRAGRGGFKDTTPDELLSAVMTAVLKDVNLRPEQLGDICVGNVLQPGAGAIMARIAQFLSDIPETVPLSTVNRQCSSGLQAVASIAGGIRNGSYDIGMACGITSENVAERFGISREKQDTFALASQQKAARAQSKGCFQAEIVPVTTTVHDDKGTKRSITVTQDEGIRPSTTMEGLAKLKPAFKKDGSTTAGLTVSDVDIFEINEAFASQAAYCVEKLRLPPEKVNPLGGAVALGHPLGCTGARQVITLLNELKRRGKRAYGVVSMCIGTGMGAAAVFEYPGN

SEQ ID NO: 14876 - protein, 162 aa, Homo sapiens
MPSYPNSLPLGNSSQVSDGAAAILLARRSKAEELGLPILGVLRSYAVVGVPPDIMGIGPAYAIPVALQKAGLTVSDVDIFEINEAFASQAAYCVEKLRLPPEKVNPLGGAVALGHPLGCTGARQVITLLNELKRRGKRAYGVVSMCIGTGMGAAAVFEYPGN

SEQ ID NO: 14877 - protein, 229 aa, Homo sapiens
MSLADRGNPGNITSRLMEKEKARDCLIPMGITSENVAERFGISREKQDTFALASQQKAARAQSKGCFQAEIVPVTTTVHDDKGTKRSITVTQDEGIRPSTTMEGLAKLKPAFKKDGSTTAGNSSQVSDGAAAILLARRSKAEELGLPILGVLRSYAVVGVPPDIMGIGPAYAIPVALQKAGKVAPSYSIWVPPGSCSCPACCCQGHEGGPVGAAEWRWGRLVSHTSSPS

SEQ ID NO: 14878 - protein, 108 aa, Homo sapiens
MGIGPAYAIPVALQKAGLTVSDVDIFEINEAFASQAAYCVEKLRLPPEKVNPLGGAVALGHPLGCTGARQVITLLNELKRRGKRAYGVVSMCIGTGMGAAAVFEYPGN

SEQ ID NO: 14879 - protein, 424 aa, Homo sapiens; identical to SEQ ID NO: 14874

SEQ ID NO: 14880 - protein, 756 aa, Homo sapiens
MDSGRDFLTLHGLQDDEDLQALLKGSQLLKVKSSSWRRERFYKLQEDCKTIWQESRKVMRTPESQLFSIEDIQEVRMGHRTEGLEKFARDVPEDRCFSIVFKDQRNTLDLIAPSPADAQHWVLGLHKIIHHSGSMDQRQKLQHWIHSCLRKADKNKDNKMSFKELQNFLKELNIQVDDSYARKIFRECDHSQTDSLEDEEIEAFYKMLTQRVEIDRTFAEAAGSGETLSVDQLVTFLQHQQREEAAGPALALSLIERYEPSETAKAQRQMTKDGFLMYLLSADGSAFSLAHRRVYQDMGQPLSHYLVSSSHNTYLLEDQLAGPSSTEAYIRALCKGCRCLELDCWDGPNQEPIIYHGYTFTSKILFCDVLRAIRDYAFKASPYPVILSLENHCTLEQQRVMARHLHAILGPMLLNRPLDGVTNSLPSPEQLKGKILLKGKKLGGLLPPGGEGGPEATVVSDEDEAAEMEDEAVRSRVQHKPKEDKLRLAQELSDMVIYCKSVHFGGFSSPGTPGQAFYEMASFSENRALRLLQESGNGFVRHNVGHLSRIYPAGWRTDSSNYSPVEMWNGGCQIVALNFQTPGPEMDVYQGRFQDNGACGYVLKPAFLRDPNGTFNPRALAQGPWWARKRLNIRVISGQQLPKVNKNKNSIVDPKVTVEIHGVSRDVASRQTAVITNNGFNPWWDTEFAFEVVVPDLALIRFLVEDYDASSKNDFIGQSTIPLNSLKQGYRHVHLMSKNGDQHPSATLFVKISLQD

SEQ ID NO: 14881 - protein, 698 aa, Homo sapiens
MRTPESQLFSIEDIQEVRMGHRTEGLEKFARDVPEDRCFSIVFKDQRNTLDLIAPSPADAQHWVLGLHKIIHHSGSMDQRQKLQHWIHSCLRKADKNKDNKMSFKELQNFLKELNIQVDDSYARKIFRECDHSQTDSLEDEEIEAFYKMLTQRVEIDRTFAEAAGSGETLSVDQLVTFLQHQQREEAAGPALALSLIERYEPSETAKAQRQMTKDGFLMYLLSADGSAFSLAHRRVYQDMGQPLSHYLVSSSHNTYLLEDQLAGPSSTEAYIRALCKGCRCLELDCWDGPNQEPIIYHGYTFTSKILFCDVLRAIRDYAFKASPYPVILSLENHCTLEQQRVMARHLHAILGPMLLNRPLDGVTNSLPSPEQLKGKILLKGKKLGGLLPPGGEGGPEATVVSDEDEAAEMEDEAVRSRVQHKPKEDKLRLAQELSDMVIYCKSVHFGGFSSPGTPGQAFYEMASFSENRALRLLQESGNGFVRHNVGHLSRIYPAGWRTDSSNYSPVEMWNGGCQIVALNFQTPGPEMDVYQGRFQDNGACGYVLKPAFLRDPNGTFNPRALAQGPWWARKRLNIRVISGQQLPKVNKNKNSIVDPKVTVEIHGVSRDVASRQTAVITNNGFNPWWDTEFAFEVVVPDLALIRFLVEDYDASSKNDFIGQSTIPLNSLKQGYRHVHLMSKNGDQHPSATLFVKISLQD

SEQ ID NO: 14882 - protein, 371 aa, Homo sapiens
MCRFHSEDYIDFLQRVSPTNMQGFTKSLNAFNVGDDCPVFPGLFEFCSRYTGASLQGATQLNNKICDIAINWAGGLHHAKKFEASGFCYVNDIVIGILELLKYHPRVLYIDIDIHHGDGVQEAFYLTDRVMTVSFHKYGNYFFPGTGDMYEVGAESGRYYCLNVPLRDGIDDQSYKHLFQPVINQVVDFYQPTCIVLQCGADSLGCDRLGCFNLSIRGHGECVEYVKSFNIPLLVLGGGGYTVRNVARCWTYETSLLVEEAISEELPYSEYFEYFAPDFTLHPDVSTRIENQNSRQYLDQIRQTIFENLKMLNHAPSVQIHDVPADLLTYDRTDEADAEERGPEENYSRPEAPNEFYDGDHDNDKESDVEI

SEQ ID NO: 14883 - protein, 241 aa, Homo sapiens
MTVSFHKYGNYFFPGTGDMYEVGAESGRYYCLNVPLRDGIDDQSYKHLFQPVINQVVDFYQPTCIVLQCGADSLGCDRLGCFNLSIRGHGECVEYVKSFNIPLLVLGGGGYTVRNVARCWTYETSLLVEEAISEELPYSEYFEYFAPDFTLHPDVSTRIENQNSRQYLDQIRQTIFENLKMLNHAPSVQIHDVPADLLTYDRTDEADAEERGPEENYSRPEAPNEFYDGDHDNDKESDVEI

SEQ ID NO: 14884 - protein, 428 aa, Homo sapiens
MAKTVAYFYDPDVGNFHYGAGHPMKPHRLALTHSLVLHYGLYKKMIVFKPYQASQHDMCRFHSEDYIDFLQRVSPTNMQGFTKSLNAFNVGDDCPVFPGLFEFCSRYTGASLQGATQLNNKICDIAINWAGGLHHAKKFEASGFCYVNDIVIGILELLKYHPRVLYIDIDIHHGDGVQEAFYLTDRVMTVSFHKYGNYFFPGTGDMYEVGAESGRYYCLNVPLRDGIDDQSYKHLFQPVINQVVDFYQPTCIVLQCGADSLGCDRLGCFNLSIRGHGECVEYVKSFNIPLLVLGGGGYTVRNVARCWTYETSLLVEEAISEELPYSEYFEYFAPDFTLHPDVSTRIENQNSRQYLDQIRQTIFENLKMLNHAPSVQIHDVPADLLTYDRTDEADAEERGPEENYSRPEAPNEFYDGDHDNDKESDVEI

SEQ ID NO: 14885 - protein, 428 aa, Homo sapiens; identical to SEQ ID NO: 14884

SEQ ID NO: 14886 - protein, 640 aa, Homo sapiens
MESVVRRCPFLSRVPQAFLQKAGKSLLFYAQNCPKMMEVGAKPAPRALSTAAVHYQQIKETPPASEKDKTAKAKVQQTPDGSQQSPDGTQLPSGHPLPATSQGTASKCPFLAAQMNQRGSSVFCKASLELQEDVQEMNAVRKEVAETSAGPSVVSVKTDGGDPSGLLKNFQDIMQKQRPERVSHLLQDNLPKSVSTFQYDRFFEKKIDEKKNDHTYRVFKTVNRRAHIFPMADDYSDSLITKKQVSVWCSNDYLGMSRHPRVCGAVMDTLKQHGAGAGGTRNISGTSKFHVDLERELADLHGKDAALLFSSCFVANDSTLFTLAKMMPGCEIYSDSGNHASMIQGIRNSRVPKYIFRHNDVSHLRELLQRSDPSVPKIVAFETVHSMDGAVCPLEELCDVAHEFGAITFVDEVHAVGLYGARGGGIGDRDGVMPKMDIISGTLGKAFGCVGGYIASTSSLIDTVRSYAAGFIFTTSLPPMLLAGALESVRILKSAEGRVLRRQHQRNVKLMRQMLMDAGLPVVHCPSHIIPVRVADAAKNTEVCDELMSRHNIYVQAINYPTVPRGEELLRIAPTPHHTPQMMNYFLENLLVTWKQVGLELKPHSSAECNFCRRPLHFEVMSEREKSYFSGLSKLVSAQA

SEQ ID NO: 14887 - protein, 640 aa, Homo sapiens; identical to SEQ ID NO: 14886

SEQ ID NO: 14888 - protein, 640 aa, Homo sapiens; identical to SEQ ID NO: 14886

SEQ ID NO: 14889 - protein, 408 aa, Homo sapiens
MTSKGPEEEHPSVTLFRQYLRIRTVQPKPDYGAAVAFFEETARQLGLGCQKVEVAPGYVVTVLTWPGTNPTLSSILLNSHTDVVPVFKEHWSHDPFEAFKDSEGYIYARGAQDMKCVSIQYLEAVRRLKVEGHRFPRTIHMTFVPDEEVGGHQGMELFVQRPEFHALRAGFALDEGIANPTDAFTVFYSERSPWWVRVTSTGRPGHASRFMEDTAAEKLHKVVNSILAFREKEWQRLQSNPHLKEGSVTSVNLTKLEGGVAYNVIPATMSASFDFRVAPDVDFKAFEEQLQSWCQAAGEGVTLEFAQKWMHPQVTPTDDSNPWWAAFSRVCKDMNLTLEPEIMPAATDNRYIRAVGVPALGFSPMNRTPVLLHDHDERLHEAVFLRGVDIYTRLLPALASVPALPSDS

SEQ ID NO: 14890 - protein, 533 aa, Homo sapiens
MAPKPKPWVQTEGPEKKKGRQAGREEDPFRSTAEALKAIPAEKRIIRVDPTCPLSSNPGTQVYEDYNCTLNQTNIENNNNKFYIIQLLQDSNRFFTCWNRWGRVGEVGQSKINHFTRLEDAKKDFEKKFREKTKNNWAERDHFVSHPGKYTLIEVQAEDEAQEAVVKVDRGPVRTVTKRVQPCSLDPATQKLITNIFSKEMFKNTMALMDLDVKKMPLGKLSKQQIARGFEALEALEEALKGPTDGGQSLEELSSHFYTVIPHNFGHSQPPPINSPELLQAKKDMLLVLADIELAQALQAVSEQEKTVEEVPHPLDRDYQLLKCQLQLLDSGAPEYKVIQTYLEQTGSNHRCPTLQHIWKVNQEGEEDRFQAHSKLGNRKLLWHGTNMAVVAAILTSGLRIMPHSGGRVGKGIYFASENSKSAGYVIGMKCGAHHVGYMFLGEVALGREHHINTDNPSLKSPPPGFDSVIARGHTEPDPTQDTELELDGQQVVVPQGQPVPCPEFSSSTFSQSEYLIYQESQCRLRYLLEVHL

SEQ ID NO: 14891 - protein, 533 aa, Homo sapiens; identical to SEQ ID NO: 14890

SEQ ID NO: 14892 - protein, 419 aa, Homo sapiens [sequence omitted]

SEQ ID NO: 14893 - protein, 271 aa, Homo sapiens
MVGALCGCWFRLGGARPLIPLGPTVVQTSMSRSQVALLGLSLLLMLLLYVGLPGPPEQTSCLWGDPNVTVLAGLTPGNSPIFYREVLPLNQAHRVEVVLLHGKAFNSHTWEQLGTLQLLSQRGYRAVALDLPGFGNSAPSKEASTEAGRAALLERALRDLEVQNAVLVSPSLSGHYALPFLMRGHHQLHGFVPIAPTSTQNYTQEQFWAVKTPTLILYGELDHILARESLRQLRHLPNHSVVKLRNAGHACYLHKPQDFHLVLLAFLDHLP

SEQ ID NO: 14894 - protein, 210 aa, Homo sapiens
MAASVEQREGTIQVQGQALFFREALPGSGQARFSVLLLHGIRFSSETWQNLGTLHRLAQAGYRAVAIDLPGLGHSKEAAAPAPIGELAPGSFLAAVVDALELGPPVVISPSLSGMYSLPFLTAPGSQLPGFVPVAPICTDKINAANYASVKTPALIVYGDQDPMGQTSFEHLKQLPNHRVLIMKGAGHPCYLDKPEEWHTGLLDFLQGLQ

SEQ ID NO: 14895 - protein, 210 aa, Homo sapiens; identical to SEQ ID NO: 14894

SEQ ID NO: 14896 - protein, 210 aa, Homo sapiens; identical to SEQ ID NO: 14894

SEQ ID NO: 14897 - protein, 796 aa, Homo sapiens [sequence omitted]

SEQ ID NO: 14898 - protein, 782 aa, Homo sapiens
MGKRDRADRDKKKSRKRHYEDEEDDEEDAPGNDPQEAVPSAAGKQVDESGTKVDEYGAKDYRLQMPLKDDHTSRPLWVAPDGHIFLEAFSPVYKYAQDFLVAIAEPVCRPTHVHEYKLTAYSLYAAVSVGLQTSDITEYLRKLSKTGVPDGIMQFIKLCTVSYGKVKLVLKHNRYFVESCHPDVIQHLLQDPVIRECRLRNSEGEATELITETFTSKSAISKTAESSGGPSTSRVTDPQGKSDIPMDLFDFYEQMDKDEEEEEETQTVSFEVKQEMIEELQKRCIHLEYPLLAEYDFRNDSVNPDINIDLKPTAVLRPYQEKSLRKMFGNGRARSGVIVLPCGAGKSLVGVTAACTVRKRCLVLGNSAVSVEQWKAQFKMWSTIDDSQICRFTSDAKDKPIGCSVAISTYSMLGHTTKRSWEAERVMEWLKTQEWGLMILDEVHTIPAKMFRRVLTIVQAHCKLGLTATLVREDDKIVDLNFLIGPKLYEANWMELQNNGYIAKVQCAEVWCPMSPEFYREYVAIKTKKRILLYTMNPNKFRACQFLIKFHERRNDKIIVFADNVFALKEYAIRLNKPYIYGPTSQGERMQILQNFKHNPKINTIFISKVGDTSFDLPEANVLIQISSHGGSRRQEAQRLGRVLRAKKGMVAEEYNAFFYSLVSQDTQEMAYSTKRQRFLVDQGYSFKVITKLAGMEEEDLAFSTKEEQQQLLQKVLAATDLDAEEEVVAGEFGSRSSQASRRFGTMSSMSGADDTVYMEYHSSRSKAPSKHVHPLFKRFRK

SEQ ID NO: 14899 - protein, 439 aa, Homo sapiens
MPGPRTLANLAEFFCRDGFSRIHEIQQKHTREYGKIFKSHFGPQFVVSIADRDMVAQVLRAEGAAPQRANMESWREYRDLRGRATGLISAEGEQWLKMRSVLRQRILKPKDVAIYSGEVNQVIADLIKRIYLLRSQAEDGETVTNVNDLFFKYSMEGVATILYESRLGCLENSIPQLTVEYIEALELMFSMFKTSMYAGAIPRWLRPFIPKPWREFCRSWDGLFKFSQIHVDNKLRDIQYQMDRGRRVSGGLLTYLFLSQALTLQEIYANVTEMLLAGVDTTSFTLSWTVYLLARHPEVQQTVYREIVKNLGERHVPTAADVPKVPLVRALLKETLRLFPVLPGNGRVTQEDLVIGGYLIPKGTQLALCHYATSYQDENFPRAKEFRPERWLRKGDLDRVDNFGSIPFGHGVRSCIGRRIAELEIHLVVIQVGRGGQTL

SEQ ID NO: 14900 - protein, 169 aa, Homo sapiens
MICLVLTIFANLFPAACTGAHERTFLAVKPDGVQRRLVGEIVRRFERKGFKLVALKLVQASEELLREHYAELRERPFYGRLVKYMASGPVVAMVWQGLDVVRTSRALIGATNPADAPPGTIRGDFCIEVGKNLIHGSDSVESARREIALWFRADELLCWEDSAGHWLYE

SEQ ID NO: 14901 - protein, 317 aa, Homo sapiens
MVVGRGLLGRRSLAALGAACARRGLGPALLGVFCHTDLRKNLTVDEGTMKVEVLPALTDNYMYLVIDDETKEAAIVDPVQPQKVVDAARKHGVKLTTVLTTHHHWDHAGGNEKLVKLESGLKVYGGDDRIGALTHKITHLSTLQVGSLNVKCLATPCHTSGHICYFVSKPGGSEPPAVFTGDTLFVAGCGKFYEGTADEMCKALLEVLGRLPPDTVGSASLRAGRVYCGHEYTINNLKFARHVEPGNAAIREKLAWAKEKYSIGEPTVPSTLAEEFTYNPFMRVREKTVQQHAGETDPVTTMRAVRREKDQFKMPRD

SEQ ID NO: 14902 - protein, 308 aa, Homo sapiens
MVVGRGLLGRRSLAALGAACARRGLGPALLGVFCHTDLRKNLTVDEGTMKVEVLPALTDNYMYLVIDDETKEAAIVDPVQPQKVVDAARKHGVKLTTVLTTHHHWDHAGGNEKLVKLESGLKVYGGDDRIGALTHKITHLSTLQVGSLNVKCLATPCHTSGHICYFVSKPGGSEPPAVFTGDTLFVAGCGKFYEGTADEMCKALLEVLGRLPPDTRVYCGHEYTINNLKFARHVEPGNAAIREKLAWAKEKYSIGEPTVPSTLAEEFTYNPFMRVREKTVQQHAGETDPVTTMRAVRREKDQFKMPRD

SEQ ID NO: 14903 - protein, 260 aa, Homo sapiens [sequence omitted]

SEQ ID NO: 14904 - protein, 168 aa, Homo sapiens
MPDSWDKDVYPEPPRRTPVQPNPIVYMMKAFDLIVDRPVTLVREFIERQHAKNRYYYYHRQYRRVPDITECKEEDIMCMYEAEMQWKRDYKVDQEIINIMQDRLKACQQREGQNYQQNCIKEVEQFTQVAKAYQDRCACPTHPQPPTILLRPGGQNHCKSSLPSLVLT

SEQ ID NO: 14905 - protein, 172 aa, Homo sapiens
MPDSWDKDVYPEPPRRTPVQPNPIVYMMKAFDLIVDRPVTLVREFIERQHAKNRYYYYHRQYRRVPDITECKEEDIMCMYEAEMQWKRDYKVDQEIINIMQDRLKACQQREGQNYQQNCIKEVEQFTQVAKAYQDRYQDLGAYSSARKCLAKQRQRMLQERKAAKEAAAATS

SEQ ID NO: 14906 - protein, 359 aa, Homo sapiens
MRARLLPPLPGLERRDPMAGSGGLGGGAGGGQGAGAGQGAALRASRAPMLLVALVLGAYCLCALPGRCPPAARAPAPAPAPSEPSSSVHRPGAPGLPLASGPGRRRFPQALIVGVKKGGTRALLEFLRLHPDVRALGSEPHFFDRCYERGLAWYRSLMPRTLDGQITMEKTPSYFVTREAPRRIHAMSPDTKLIVVVRNPVTRAISDYAQTLSKTPGLPSFRALAFRHGLGPVDTAWSAVRIGLYAQHLDHWLRYFPLSHFLFVSGERLVSDPAGEVGRVQDFLGLKRVVTDKHFYFNATKGFPCLKKAQGGSRPRCLGKSKGRPHPRVPQALVRRLQEFYRPFNRRFYQMTGQDFGWG

SEQ ID NO: 14907 - protein, 525 aa, Homo sapiens [sequence omitted]

SEQ ID NO: 14908 - protein, 1186 aa, Homo sapiens
MKKEYNALHQRHTEMIQTYVEHIERSKMQQVGGNSQTESSLPGRSRKERPTSLNVFPLADGTVRAQIGGKLVPAGDHWHLSDLGQLQSSSSYQCPQDEMSESGQSSAAATPSTTGTKSNTPTSSVPSAAVTPLNESLQPLGDYGVGSKNSKRAREKRDSRNMEVQVTQEMRNVSIGMGSSDEWSDVQDIIDSTPELDMCPETRLDRTGSSPTQGIVNKAFGINTDSLYHELSTAGSEVIGDVDEGADLLGETSAPSVSGMGKEVGNLLLENSQLLETKNALNVVKNDLIAKVDQLSGEQEVLRGELEAAKQAKVKLENRIKELEEELKRVKSEAIIARREPKEEAEDVSSYLCTESDKIPMAQRRRFTRVEMARVLMERNQYKERLMELQEAVRWTEMIRASREHPSVQEKKKSTIWQFFSRLFSSSSSPPPAKRPYPSVNIHYKSPTTAGFSQRRNHAMCPISAGSRPLEFFPDDDCTSSARREQKREQYRQVREHVRNDDGRLQACGWSLPAKYKQLSPNGGQEDTRMKNVPVPVYCRPLVEKDPTMKLWCAAGVNLSGWRPNEDDAGNGVKPAPGRDPLTCDREGDGEPKSAHTSPEKKKAKELPEMDATSSRVWILTSTLTTSKVVIIDANQPGTVVDQFTVCNAHVLCISSIPAASDSDYPPGEMFLDSDVNPEDPGADGVLAGITLVGCATRCNVPRSNCSSRGDTPVLDKGQGEVATIANGKVNPSQSTEEATEATEVPDPGPSEPETATLRPGPLTEHVFTDPAPTPSSGPQPGSENGPEPDSSSTRPEPEPSGDPTGAGSSAAPTMWLGAQNGWLYVHSAVANWKKCLHSIKLKDSVLSLVHVKGRVLVALADGTLAIFHRGEDGQWDLSNYHLMDLGHPHHSIRCMAVVYDRVWCGYKNKVHVIQPKTMQIEATMTPQKSFDAHPRRESQVRQLAWIGDGVWVSIRLDSTLRLYHAHTHQHLQDVDIEPYVSKMLGTGKLGFSFVRITALLVAGSRLWVGTGNGVVISIPLTETVVLHRGQLLGLRANKTSPTSGEGARPGGIIHVYGDDSSDRAASSFIPYCSMAQAQLCFHGHRDAVKFFVSVPGNVLATLNGSVLDSPAEGPGPAAPASEVEGQKLRNVLVLSGGEGYIDFRIGDGEDDETEEGAGDMSQVKPVLSKAERSHIIVWQVSYTPE

SEQ ID NO: 14909 - protein, 1342 aa, Homo sapiens
MMEIQMDEGGGVVVYQDDYCSGSVMSERVSGLAGSIYREFERLIHCYDEEVVKELMPLVVNVLENLDSVLSENQEHEVELELLREDNEQLLTQYEREKALRRQAEEKFIEFEDALEQEKKELQIQVEHYEFQTRQLELKAKNYADQISRLEERESEMKKEYNALHQRHTEMIQTYVEHIERSKMQQVGGNSQTESSLPGRSRKERPTSLNVFPLADGTVRAQIGGKLVPAGDHWHLSDLGQLQSSSSYQCPQDEMSESGQSSAAATPSTTGTKSNTPTSSVPSAAVTPLNESLQPLGDYGVGSKNSKRAREKRDSRNMEVQVTQEMRNVSIGMGSSDEWSDVQDIIDSTPELDMCPETRLDRTGSSPTQGIVNKAFGINTDSLYHELSTAGSEVIGDVDEGADLLGETSAPSVSGMGKEVGNLLLENSQLLETKNALNVVKNDLIAKVDQLSGEQEVLRGELEAAKQAKVKLENRIKELEEELKRVKSEAIIARREPKEEAEDVSSYLCTESDKIPMAQRRRFTRVEMARVLMERNQYKERLMELQEAVRWTEMIRASREHPSVQEKKKSTIWQFFSRLFSSSSSPPPAKRPYPSVNIHYKSPTTAGFSQRRNHAMCPISAGSRPLEFFPDDDCTSSARREQKREQYRQVREHVRNDDGRLQACGWSLPAKYKQLSPNGGQEDTRMKNVPVPVYCRPLVEKDPTMKLWCAAGVNLSGWRPNEDDAGNGVKPAPGRDPLTCDREGDGEPKSAHTSPEKKKAKELPEMDATSSRVWILTSTLTTSKVVIIDANQPGTVVDQFTVCNAHVLCISSIPAASDSDYPPGEMFLDSDVNPEDPGADGVLAGITLVGCATRCNVPRSNCSSRGDTPVLDKGQGEVATIANGKVNPSQSTEEATEATEVPDPGPSEPETATLRPGPLTEHVFTDPAPTPSSGPQPGSENGPEPDSSSTRPEPEPSGDPTGAGSSAAPTMWLGAQNGWLYVHSAVANWKKCLHSIKLKDSVLSLVHVKGRVLVALADGTLAIFHRGEDGQWDLSNYHLMDLGHPHHSIRCMAVVYDRVWCGYKNKVHVIQPKTMQIEATMTPQKSFDAHPRRESQVRQLAWIGDGVWVSIRLDSTLRLYHAHTHQHLQDVDIEPYVSKMLGTGKLGFSFVRITALLVAGSRLWVGTGNGVVISIPLTETVVLHRGQLLGLRANKTSPTSGEGARPGGIIHVYGDDSSDRAASSFIPYCSMAQAQLCFHGHRDAVKFFVSVPGNVLATLNGSVLDSPAEGPGPAAPASEVEGQKLRNVLVLSGGEGYIDFRIGDGEDDETEEGAGDMSQVKPVLSKAERSHIIVWQVSYTPE

SEQ ID NO: 14910 - protein, 175 aa, Homo sapiens
MRGRGRIYGPAPALCDAGQRLPRVGTRPRDIHGARVTRGRESSVLLEPMPKTMHFLFRFIVFFYLWGLFTAQRQKKEESTEEVKIEVLHRPENCSKTSKKGDLLNAHYDGYLAKDGSKFYCSRTQNEGHPKWFVLGVGQVIKGLDIAMTDMCPGEKRKVVIPPSFAYGKEGYGST

SEQ ID NO: 14911 - protein, 175 aa, Homo sapiens; identical to SEQ ID NO: 14910

SEQ ID NO: 14912 - protein, 286 aa, Homo sapiens [sequence omitted]

SEQ ID NO: 14913 - protein, 270 aa, Homo sapiens
MRGRGRIYGPAPALCDAGQRLPRVGTRPRDIHGARVTRGRESSVLLEPMPKTMHFLFRFIVFFYLWGLFTAQRQKKEESTEEVKIEVLHRPENCSKTSKKGDLLNAHYDGYLAKDGSKFYCSRTQNEGHPKWFVLGVGQVIKGLDIAMTDMCPGEKRKVVIPPSFAYGKEGYAEGKIPPDATLIFEIELYAVTKGPRSIETFKQIDMDNDRQLSKAEINLYLQREFEKDEKPRDKSYQDAVLEDIFKKNDHDGDGFISPKEYNVYQHDEL

SEQ ID NO: 14914 - protein, 198 aa, Homo sapiens
MRGRGRIYGPAPALCDAGQRLPRVGTRPRDIHGARVTRGRESSVLLEPMPKTMHFLFRFIVFFYLWGLFTAQRQKKEESTEEVKIEVLHRPENCSKTSKKGDLLNAHYDGYLAKDGSKFYCSRTQNEGHPKWFVLGVGQVIKGLDIAMTDMCPGEKRKVVIPPSFAYGKEGYVLEEVFLLQNILVSCHRTTLHVLKCM

SEQ ID NO: 14915 - protein, 415 aa, Homo sapiens
MTGERPSTALPDRRWGPRILGFWGGCRVWVFAAIFLLLSLAASWSKAENDFGLVQPLVTMEQLLWVSGRQIGSVDTFRIPLITATPRGTLLAFAEARKMSSSDEGAKFIALRRSMDQGSTWSPTAFIVNDGDVPDGLNLGAVVSDVETGVVFLFYSLCAHKAGCQVASTMLVWSKDDGVSWSTPRNLSLDIGTEVFAPGPGSGIQKQREPRKGRLIVCGHGTLERDGVFCLLSDDHGASWRYGSGVSGIPYGQPKQENDFNPDECQPYELPDGSVVINARNQNNYHCHCRIVLRSYDACDTLRPRDVTFDPELVDPVVAAGAVVTSSGIVFFSNPAHPEFRVNLTLRWSFSNGTSWRKETVQLWPGPSGYSSLATLEGSMDGEEQAPQLYVLYEKGRNHYTESISVAKISVYGTL

SEQ ID NO: 14916 - protein, 225 aa, Homo sapiens
MRGPSSSPCGGPWTRKQREPRKGRLIVCGHGTLERDGVFCLLSDDHGASWRYGSGVSGIPYGQPKQENDFNPDECQPYELPDGSVVINARNQNNYHCHCRIVLRSYDACDTLRPRDVTFDPELVDPVVAAGAVVTSSGIVFFSNPAHPEFRVNLTLRWSFSNGTSWRKETVQLWPGPSGYSSLATLEGSMDGEEQAPQLYVLYEKGRNHYTESISVAKISVYGTL

SEQ ID NO: 14917 - protein, 1264 aa, Homo sapiens
MSTLYVSPHPDAFPSLRALIAARYGEAGEGPGWGGAHPRICLQPPPTSRTPFPPPRLPALEQGPGGLWVWGATAVAQLLWPAGLGGPGGSRAAVLVQQWVSYADTELIPAACGATLPALGLRSSAQDPQAVLGALGRALSPLEEWLRLHTYLAGEAPTLADLAAVTALLLPFRYVLDPPARRIWNNVTRWFVTCVRQPEFRAVLGEVVLYSGARPLSHQPGPEAPALPKTAAQLKKEAKKREKLEKFQQKQKIQQQQPPPGEKKPKPEKREKRDPGVITYDLPTPPGEKKDVSGPMPDSYSPRYVEAAWYPWWEQQGFFKPEYGRPNVSAANPRGVFMMCIPPPNVTGSLHLGHALTNAIQDSLTRWHRMRGETTLWNPGCDHAGIATQVVVEKKLWREQGLSRHQLGREAFLQEVWKWKEEKGDRIYHQLKKLGSSLDWDRACFTMDPKLSAAVTEAFVRLHEEGIIYRSTRLVNWSCTLNSAISDIEVDKKELTGRTLLSVPGYKEKVEFGVLVSFAYKVQGSDSDEEVVVATTRIETMLGDVAVAVHPKDTRYQHLKGKNVIHPFLSRSLPIVFDEFVDMDFGTGAVKITPAHDQNDYEVGQRHGLEAISIMDSRGALINVPPPFLGLPRFEARKAVLVALKERGLFRGIEDNPMVVPLCNRSKDVVEPLLRPQWYVRCGEMAQAASAAVTRGDLRILPEAHQRTWHAWMDNIREWCISRQLWWGHRIPAYFVTVSDPAVPPGEDPDGRYWVSGRNEAEAREKAAKEFGVSPDKISLQQDEDVLDTWFSSGLFPLSILGWPNQSEDLSVFYPGTLLETGHDILFFWVARMVMLGLKLTGRLPFREVYLHAIVRDAHGRKMSKSLGNVIDPLDVIYGISLQGLHNQLLNSNLDPSEVEKAKEGQKADFPAGIPECGTDALRFGLCAYMSQGRDINLDVNRILGYRHFCNKLWNATKFALRGLGKGFVPSPTSQPGGHESLVDRWIRSRLTEAVRLSNQGFQAYDFPAVTTAQYSFWLYELCDVYLECLKPVLNGVDQVAAECARQTLYTCLDVGLRLLSPFMPFVTEELFQRLPRRMPQAPPSLCVTPYPEPSECSWKDPEAEAALELALSITRAVRSLRADYNLTRIRPDCFLEVADEATGALASAVSGYVQALASAGVVAVLALGAPAPQGCAVALASDRCSIHLQLQGLVDPARELGKLQAKRVEAQRQAQRLRERRAASGYPVKVPLEVQEADEAKLQQTEAELRKVDEAIALFQKML

SEQ ID NO: 14918 - protein, 1264 aa, Homo sapiens; identical to SEQ ID NO: 14917

SEQ ID NO: 14919 - protein, 336 aa, Homo sapiens
MLVIPPGLSEEEEALQKKFNKLKKKKKALLALKKQSSSSTTSQGGVKRSLSEQPVMDTATATEQAKQLVKSGAISAIKAETKNSGFKRSRTLEGKLKDPEKGPVPTFQPFQRSISADDDLQESSRRPQRKSLYESFVSSSDRLRELGPDGEEAEGPGAGDGPPRSFDWGYEERSGAHSSASPPRSRSRDRSHERNRDRDRDRERDRDRDRDRDRERDRDRDRDRDRDRERDRDRERDRDRDREGPFRRSDSFPERRAPRKGNTLYVYGEDMTPTLLRGAFSPFGNIIDLSMDPPRNCAFVTYEKMESADQAVAEVGTSQICSSHRFCCSHVFSSKY

SEQ ID NO: 14920 - protein, 380 aa, Homo sapiens
MLVIPPGLSEEEEALQKKFNKLKKKKKALLALKKQSSSSTTSQGGVKRSLSEQPVMDTATATEQAKQLVKSGAISAIKAETKNSGFKRSRTLEGKLKDPEKGPVPTFQPFQRSISADDDLQESSRRPQRKSLYESFVSSSDRLRELGPDGEEAEGPGAGDGPPRSFDWGYEERSGAHSSASPPRSRSRDRSHERNRDRDRDRERDRDRDRDRDRERDRDRDRDRDRDRERDRDRERDRDRDREGPFRRSDSFPERRAPRKGNTLYVYGEDMTPTLLRGAFSPFGNIIDLSMDPPRNCAFVTYEKMESADQAVAELNGTQVESVQLKVNIARKQPMLDAATGKSVWGSLAVQNSPKGCHRDKRTQIVYSDDVYKENLVDGF

SEQ ID NO: 14921 - protein, 336 aa, Homo sapiens
MLVIPPGLSEEEEALQKKFNKLKKKKKALLALKKQSSSSTTSQGGVKRSLSEQPVMDTATATEQAKQLVKSGAISAIKAETKNSGFKRSRTLEGKLKDPEKGPVPTFQPFQRSISADDDLQESSRRPQRKSLYESDRLRELGPDGEEAEGPGAGDGPPRSFDWGYEERSGAHSSASPPRSRSRDRSHEDRERDRDRDREGPFRRSDSFPERRAPRKGNTLYVYGEDMTPTLLRGAFSPFGNIIDLSMDPPRNCAFVTYEKMESADQAVAELNGTQVESVQLKVNIARKQPMLDAATGKSVWGSLAVQNSPKGCHRDKRTQIVYSDDVYKENLVDGF

SEQ ID NO: 14922 - protein, 990 aa, Homo sapiens
MMETERLVLPPPDPLDLPLRAVELGCTGHWELLNLPGAPESSLPHGLPPCAPDLQQEAEQLFLSSPAWLPLHGVEHSARKWQRKTDPWSLLAVLGAPVPSDLQAQRHPTTGQILGYKEVLLENTNLSATTSLSLRRPPGPASQSLWGNPTQYPFWPGGMDEPTITDLNTREEAEEEIDFEKDLLTIPPGFKKGMDFAPKDCPTPAPGLLSLSCLLEPLDLGGGDEDENEAVGQPGGPRGDTVSASPCSAPLARASSLEDLVLKEASTAVSTPEAPEPPSQEQWAIPVDATSPVGDFYRLIPQPAFQWAFEPDVFQKQAILHLERHDSVFVAAHTSAGKTVVAEYAIALAQKHMTRTIYTSPIKALSNQKFRDFRNTFGDVGLLTGDVQLHPEASCLIMTTEILRSMLYSGSDVIRDLEWVIFDEVHYINDVERGVVWEEVLIMLPDHVSIILLSATVPNALEFADWIGRLKRRQIYVISTVTRPVPLEHYLFTGNSSKTQGELFLLLDSRGAFHTKGYYAAVEAKKERMSKHAQTFGAKQPTHQGGPAQDRGVYLSLLASLRTRAQLPVVVFTFSRGRCDEQASGLTSLDLTTSSEKSEIHLFLQRCLARLRGSDRQLPQVLHMSELLNRGLGVHHSGILPILKEIVEMLFSRGLVKVLFATETFAMGVNMPARTVVFDSMRKHDGSTFRDLLPGEYVQMAGRAGRRGLDPTGTVILLCKGRVPEMADLHRMMMGKPSQLQSQFRLTYTMILNLLRVDALRVEDMMKRSFSEFPSRKDSKAHEQALAELTKRLGALEEPDMTGQLVDLPEYYSWGEELTETQHMIQRRIMESVNGLKSLSAGRVVVVKNQEHHNALGVILQVSSNSTSRVFTTLVLCDKPLSQDPQDRGPATAEVPYPDDLVGFKLFLPEGPCDHTVVKLQPGDMAAITTKVLRVNGEKILEDFSKRQQPKFKSEMLGRPFSSRGARRGREGQWSGSFLQPEGDHEVVGL

SEQ ID NO: 14923 - protein, 990 aa, Homo sapiens; identical to SEQ ID NO: 14922

SEQ ID NO: 14924 - protein, 1183 aa, Homo sapiens [sequence omitted]

SEQ ID NO: 14925 - protein, 1246 aa, Homo sapiens
MMETERLVLPPPDPLDLPLRAVELGCTGHWELLNLPGAPESSLPHGLPPCAPDLQQEAEQLFLSSPAWLPLHGVEHSARKWQRKTDPWSLLAVLGAPVPSDLQAQRHPTTGQILGYKEVLLENTNLSATTSLSLRRPPGPASQSLWGNPTQYPFWPGGMDEPTITDLNTREEAEEEIDFEKDLLTIPPGFKKGMDFAPKDCPTPAPGLLSLSCLLEPLDLGGGDEDENEAVGQPGGPRGDTVSASPCSAPLARASSLEDLVLKEASTAVSTPEAPEPPSQEQWAIPVDATSPVGDFYRLIPQPAFQWAFEPDVFQKQAILHLERHDSVFVAAHTSAGKTVVAEYAIALAQKHMTRTIYTSPIKALSNQKFRDFRNTFGDVGLLTGDVQLHPEASCLIMTTEILRSMLYSGSDVIRDLEWVIFDEVHYINDVERGVVWEEVLIMLPDHVSIILLSATVPNALEFADWIGRLKRRQIYVISTVTRPVPLEHYLFTGNSSKTQGELFLLLDSRGAFHTKGYYAAVEAKKERMSKHAQTFGAKQPTHQGGPAQDRGVYLSLLASLRTRAQLPVVVFTFSRGRCDEQASGLTSLDLTTSSEKSEIHLFLQRCLARLRGSDRQLPQVLHMSELLNRGLGVHHSGILPILKEIVEMLFSRGLVKVLFATETFAMGVNMPARTVVFDSMRKHDGSTFRDLLPGEYVQMAGRAGRRGLDPTGTVILLCKGRVPEMADLHRMMMGKPSQLQSQFRLTYTMILNLLRVDALRVEDMMKRSFSEFPSRKDSKAHEQALAELTKRLGALEEPDMTGQLVDLPEYYSWGEELTETQHMIQRRIMESVNGLKSLSAGRVVVVKNQEHHNALGVILQVSSNSTSRVFTTLVLCDKPLSQDPQDRGPATAEVPYPDDLVGFKLFLPEGPCDHTVVKLQPGDMAAITTKVLRVNGEKILEDFSKRQQPKFKKDPPLAAVTTAVQELLRLAQAHPAGPPTLDPVNDLQLKDMSVVEGGLRARKLEELIQGAQCVHSPRFPAQYLKLRERMQIQKEMERLRFLLSDQSLLLLPEYHQRVEVLRTLGYVDEAGTVKLAGRVACAMSSHELLLTELMFDNALSTLRPEEIAALLSGLVCQSPGDAGDQLPNTLKQGIERVRAVAKRIGEVQVACGLNQTVEEFVGELNFGLVEVVYEWARGMPFSELAGLSGTPEGLVVRCIQRLAEMCRSLRGAARLVGEPVLGAKMETAATLLRRDIVFAASLYTQ

SEQ ID NO: 14926 - protein, 396 aa, Homo sapiens
MDPRGTKRGAEKTEVAEPRNKLPRPAPSLPTDPALYSGPFPFYRRPSELGCFSLDAQRQYHGDARALRYYSPPPTNGPGPNFDLRDGYPDRYQPRDEEVQERLDHLLCWLLEHRGRLEGGPGWLAEAIVTWRGHLTKLLTTPYERQEGWQLAASRFQGTLYLSEVETPNARAQRLARPPLLRELMYMGYKFEQYMCADKPGSSPDPSGEVNTNVAFCSVLRSRLGSHPLLFSGEVDCTDPQAPSTQPPTCYVELKTSKEMHSPGQWRSFYRHKLLKWWAQSFLPGVPNVVAGFRNPDGFVSSLKTFPTMKMFEYVRNDRDGWNPSVCMNFCAAFLSFAQSTVVQDDPRLVHLFSWEPGGPVTVSVHQDAPYAFLPIWYVEAMTQDLPSPPKTPSPK

SEQ ID NO: 14927 - protein, 396 aa, Homo sapiens; identical to SEQ ID NO: 14926

SEQ ID NO: 14928 - protein, 212 aa, Homo sapiens
MDPRGTKRGAEKTEVAEPRNKLPRPAPSLPTDPALYSGPFPFYRRPSELGCFSLDAQRQYHGDARALRYYSPPPTNGPGPNFDLRDGYPDRYQPRDEEVQERLDHLLCWLLEHRGRLEGGPGWLAEAIVTWRGHLTKLLTTPYERQEGWQLAASRFQGTLYLSEVETPNARAQRLARPPLLRELMYMGYKFEQYMCAGELPLLHSPLPLPRG

SEQ ID NO: 14929 - protein, 326 aa, Homo sapiens
MDPRGTKRGAEKTEVAEPRNKLPRPAPSLPTDPALYSGPFPFYRRPSELGCFSLDAQRQYHGDARALRYYSPPPTNGPGPNFDLRDGYPDRYQPRDEEVQERLDHLLCWLLEHRGRLEGGPGWLAEAIVTWRGHLTKLLTTPYERQEGWQLAASRFQGTLYLSEVETPNARAQRLARPPLLRELMYMGYKFEQYMCADKPGSSPDPSGEVNTNVAFCSVLRSRLGSHPLLFSGETFPTMKMFEYVRNDRDGWNPSVCMNFCAAFLSFAQSTVVQDDPRLVHLFSWEPGGPVTVSVHQDAPYAFLPIWYVEAMTQDLPSPPKTPSPK

SEQ ID NO: 14930 - protein, 326 aa, Homo sapiens; identical to SEQ ID NO: 14929

SEQ ID NO: 14931 - protein, 406 aa, Homo sapiens
MSASQDSRSRDNGPDGMEPEGVIESNWNEIVDSFDDMNLSESLLRGIYAYGFEKPSAIQQRAILPCIKGYDVIAQAQSGTGKTATFAISILQQIELDLKATQALVLAPTRELAQQIQKVVMALGDYMGASCHACIGGTNVRAEVQKLQMEAPHIIVGTPGRVFDMLNRRYLSPKYIKMFVLDEADEMLSRGFKDQIYDIFQKLNSNTQVVLLSATMPSDVLEVTKKFMRDPIRILVKKEELTLEGIRQFYINVEREEWKLDTLCDLYETLTITQAVIFINTRRKVDWLTEKMHARDFTVSAMHGDMDQKERDVIMREFRSGSSRVLITTDLLARGIDVQQVSLVINYDLPTNRENYIHRIGRGGRFGRKGVAINMVTEEDKRTLRDIETFYNTSIEEMPLNVADLI

SEQ ID NO: 14932 - protein, 347 aa, Homo sapiens
MSASQDSRSRDNGPDGMEPEGVIESNWNEIVDSFDDMNLSESLLRGIYAYGFEKPSAIQQRAILPCIKGYDVIAQAQSGTGKTATFAISILQQIELDLKATQALVLAPTRELAQQIQKVVMALGDYMGASCHACIGGTNVRAEVQKLQMEAPHIIVGTPGRVFDMLNRRYLSPKYIKMFVLDEADEMLSRGFKDQIYDIFQKLNSNTQVVLLSATMPSDVLEVTKKFMRDPIRILVKKEELTLEGIRQFYINVEREEWKLDTLCDLYETLTITQAVIFINTRRKVDWLTEKMHARDFTVSAMHGDMDQKERDVIMREFRSGSSRVLITTDLLGKLYPQNRSRWTVWP

SEQ ID NO: 14933 - protein, 406 aa, Homo sapiens; identical to SEQ ID NO: 14931

SEQ ID NO: 14934 - protein, 313 aa, Homo sapiens
MSASQDSRSRDNGPDGMEPEGVIESNWNEIVDSFDDMNLSESLLRGIYAYGFEKPSAIQQRAILPCIKGYDVIAQAQSGTGKTATFAISILQQIELDLKATQALVLAPTRELAQQIQKVVMALGDYMGASCHACIGGTNVRAEVQKLQMEAPHIIVGTPGRVFDMLNRRYLSPKYIKMFVLDEADEMLSRGFKDQIYDIFQKLNSNTQVVLLSATMPSDVLEVTKKFMRDPIRILVKKEELTLEGIRQFYINVEREEWKLDTLCDLYETLTITQAVIFINTRRKVDWLTEKMHARDFTVSAMVMEIWTKRNET

SEQ ID NO: 14935 - protein, 346 aa, Homo sapiens
MADSEALPSLAGDPVAVEALLRAVFGVVVDEAIQKGTSVSQKCHYSIQKGAAFLGLGTDSVRVVKADERGKMVPEDLERQIGMAEAEGAVPFLVSATSGTTVLGAFDPLEAIADVCQRHGLWLHVDAAWGGSVLLSQTHRHLLDGIQRADSVAWNPHKLLAAGLQCSALLLQDTSNLLKRCHGSQASYLFQQDKFYDVALDTGDKVVQCGRRVDCLKLWLMWKAQGDQGLERRIDQAFVLARYLVEEMKKREGFELVMEPEFVNVCFWFVPPSLRGKQESPDYHERLSKVAPVLKERMVKEGSMMIGYQPHGTRGNFFRVVVANSALTCADMDFLLNELERLGQDL

SEQ ID NO: 14936 - protein, 520 aa, Homo sapiens
MSIPLKSSFLLSYLCTLPPALLSREILMADSEALPSLAGDPVAVEALLRAVFGVVVDEAIQKGTSVSQKVCEWKEPEELKQLLDLELRSQGESQKQILERCRAVIRYSVKTGHPRFFNQLFSGLDPHALAGRIITESLNTSQYTYEIAPVFVLMEEEVLRKLRALVGWSSGDGIFCPGGSISNMYAVNLARYQRYPDCKQRGLRTLPPLALFTSKECHYSIQKGAAFLGLGTDSVRVVKADERGKMVPEDLERQIGMAEAEGAVPFLVSATSGTTVLGAFDPLEAIADVCQRHGLWLHVDAAWGGSVLLSQTHRHLLDGIQRADSVAWNPHKLLAAGLQCSALLLQDTSNLLKRCHGSQASYLFQQDKFYDVALDTGDKVVQCGRRVDCLKLWLMWKAQGDQGLERRIDQAFVLARYLVEEMKKREGFELVMEPEFVNVCFWFVPPSLRGKQESPDYHERLSKVAPVLKERMVKEGSMMIGYQPHGTRGNFFRVVVANSALTCADMDFLLNELERLGQDL
